United States Patent Application Publication US 2020/0163878 A1 - sequence listing, part 31

SEQ ID NO: 114159 - RNA, 1410 nt, Artificial Sequence
  derived and/or modified CDS sequence (opt2) from neuraminidase__InfluenzaA__ADD22755
augaaccccaaccagaagaucaucaccaucggcuccgucugcaugaccaucggcauggccaaccucauccuccagaucggcaacaucaucuccaucuggaucucccacuccauccagcucggcaaccagaaccagaucgagaccugcaaccaguccgucaucaccuacgagaacaacaccugggucaaccagaccuacgucaacaucuccaacaccaacuucgccgccggccaguccgucgucuccgucaagcucgccggcaacuccucccucugcaccgucuccggcugggccaucuacuccaaggacaacuccauccgcaucggcuccaagggcgacgucuucgucauccgcgagcccuucaucuccugcuccccccucgagugccgcaccuucuuccucacccagggcgcccuccucaacgacaagcacuccaacggcaccaucaaggaccgcucccccuaccgcacccucauguccugccccaucggcgagguccccucccccuacaacucccgcuucgaguccgucgccugguccgccuccgccugccacgacggcaucaacuggcucaccaucggcaucuccggccccgacaacggcgccgucgccguccucaaguacaacggcaucaucaccgacaccaucaaguccuggcgcaacaacauccuccgcacccaggaguccgagugcgccugcgucaacggcuccugcuucaccgucaugaccgacggccccuccgacggccaggccuccuacaagaucuuccgcaucgagaagggcaagaucgucaaguccgucgagaugaacgcccccaacuaccacuacgaggagugcuccugcuaccccgacuccuccgagaucaccugcgucugccgcgacaacuggcacggcuccaaccgccccugggucuccuucaaccagaaccucgaguaccagaucggcuacaucugcuccggcaucuucggcgacuccccccgccccaacgacaagaccggcuccugcggccccgucuccuccaacggcgccaacggcgucaagggcuucuccuucaaguacggcaacggcgucuggaucggccgcaccaaguccaucuccucccgcaacggcuucgagaugaucugggaccccaacggcuggaccggcaccgacaacaacuucuccaucaagcaggacaucgucggcaucaacgagugguccggcuacuccggcuccuucguccagcaccccgagcucaccggccucgacugcauccgccccugcuucugggucgagcucauccgcggccgccccaaggagaacaccaucuggaccuccggcuccuccaucuccuucugcggcgucaacuccgacaccgucggcugguccuggcccgacggcgccgagcuccccuucaccaucgacaaguga

SEQ ID NO: 114160 - RNA, 1410 nt, Artificial Sequence
  derived and/or modified CDS sequence (opt2) from neuraminidase__InfluenzaA__ADD22765
augaaccccaaccagaagaucaucaccaucggcuccgucugcaugaccaucggcauggccaaccucauccuccagaucggcaacaucaucuccaucuggaucucccacuccauccagcucggcaaccagaaccagaucgagaccugcaaccaguccgucaucaccuacgagaacaacaccugggucaaccagaccuacgucaacaucuccaacaccaacuucgccgccggccaguccgucgucuccgucaagcucgccggcaacuccucccucugccccgucuccggcugggccaucuacuccaaggacaacuccauccgcaucggcuccaagggcgacgucuucgucauccgcgagcccuucaucuccugcuccccccucgagugccgcaccuucuuccucacccagggcgcccuccucaacgacaagcacuccaacggcaccaucaaggaccgcucccccuaccgcacccucauguccugccccaucggcgagguccccucccccuacaacucccgcuucgaguccgucgccugguccgccuccgccugccacgacggcaucaacuggcucaccaucggcaucuccggccccgacaacggcgccgucgccguccucaaguacaacggcaucaucaccgacaccaucaaguccuggcgcaacaacauccuccgcacccaggaguccgagugcgccugcgucaacggcuccugcuucaccgucaugaccgacggccccuccgacggccaggccuccuacaagaucuuccgcaucgagaagggcaagaucgucaaguccgucgagaugaacgcccccaacuaccacuacgaggagugcuccugcuaccccgacuccuccgagaucaccugcgucugccgcgacaacuggcacggcuccaaccgccccugggucuccuucaaccagaaccucgaguaccagaucggcuacaucugcuccggcaucuucggcgacaacccccgccccaacgacaagaccggcuccugcggccccgucuccuccaacggcgccaacggcgucaagggcuucuccuucaaguacggcaacggcgucuggaucggccgcaccaaguccaucuccucccgcaacggcuucgagaugaucugggaccccaacggcuggaccggcaccgacaacaacuucuccaucaagcaggacaucgucggcaucaacgacugguccggcuacuccggcuccuucguccagcaccccgagcucaccggccucgacugcauccgccccugcuucugggucgagcucauccgcggccgccccaaggagaacaccaucuggaccuccggcuccuccaucuccuucugcggcgucaacuccgacaccgucggcugguccuggcccgacggcgccgagcuccccuucaccaucgacaaguga

SEQ ID NO: 114161 - RNA, 1410 nt, Artificial Sequence; identical to SEQ ID NO: 112774
  derived and/or modified CDS sequence (opt2) from neuraminidase__InfluenzaA__ADD22775

SEQ ID NO: 114162 - RNA, 1410 nt, Artificial Sequence; identical to SEQ ID NO: 112774
  derived and/or modified CDS sequence (opt2) from neuraminidase__InfluenzaA__ADD22785

SEQ ID NO: 114163 - RNA, 1410 nt, Artificial Sequence; identical to SEQ ID NO: 112774
  derived and/or modified CDS sequence (opt2) from neuraminidase__InfluenzaA__ADD22795

SEQ ID NO: 114164 - RNA, 1410 nt, Artificial Sequence; identical to SEQ ID NO: 112774
  derived and/or modified CDS sequence (opt2) from neuraminidase__InfluenzaA__ADD22805

SEQ ID NO: 114165 - RNA, 1410 nt, Artificial Sequence; identical to SEQ ID NO: 112774
  derived and/or modified CDS sequence (opt2) from neuraminidase__InfluenzaA__ADD22815

SEQ ID NO: 114166 - RNA, 1410 nt, Artificial Sequence; identical to SEQ ID NO: 112774
  derived and/or modified CDS sequence (opt2) from neuraminidase__InfluenzaA__ADD22825

SEQ ID NO: 114167 - RNA, 1410 nt, Artificial Sequence; identical to SEQ ID NO: 112774
  derived and/or modified CDS sequence (opt2) from neuraminidase__InfluenzaA__ADD22835

SEQ ID NO: 114168 - RNA, 1410 nt, Artificial Sequence; identical to SEQ ID NO: 112774
  derived and/or modified CDS sequence (opt2) from neuraminidase__InfluenzaA__ADD22845

SEQ ID NO: 114169 - RNA, 1410 nt, Artificial Sequence; identical to SEQ ID NO: 112774
  derived and/or modified CDS sequence (opt2) from neuraminidase__InfluenzaA__ADD22855

SEQ ID NO: 114170 - RNA, 1410 nt, Artificial Sequence; identical to SEQ ID NO: 112774
  derived and/or modified CDS sequence (opt2) from neuraminidase__InfluenzaA__ADD22924

SEQ ID NO: 114171 - RNA, 1410 nt, Artificial Sequence; identical to SEQ ID NO: 112774
  derived and/or modified CDS sequence (opt2) from neuraminidase__InfluenzaA__ADD22934

SEQ ID NO: 114172 - RNA, 1410 nt, Artificial Sequence; identical to SEQ ID NO: 112774
  derived and/or modified CDS sequence (opt2) from neuraminidase__InfluenzaA__ADD22944

SEQ ID NO: 114173 - RNA, 1410 nt, Artificial Sequence; identical to SEQ ID NO: 112774
  derived and/or modified CDS sequence (opt2) from neuraminidase__InfluenzaA__ADD22954

SEQ ID NO: 114174 - RNA, 1410 nt, Artificial Sequence; identical to SEQ ID NO: 112774
  derived and/or modified CDS sequence (opt2) from neuraminidase__InfluenzaA__ADD22974

SEQ ID NO: 114175 - RNA, 1410 nt, Artificial Sequence; identical to SEQ ID NO: 112774
  derived and/or modified CDS sequence (opt2) from neuraminidase__InfluenzaA__ADD23075

SEQ ID NO: 114176 - RNA, 1410 nt, Artificial Sequence
  derived and/or modified CDS sequence (opt2) from neuraminidase__InfluenzaA__ADD23085
augaaccccaaccagaagaucaucaccaucggcuccgucugcaugaccaucggcauggccaaccucauccuccagaucggcaacaucaucuccaucuggaucucccacuccauccagcucggcaaccagaaccagaucgagaccugcaaccaguccgucaucaccuacgagaacaacaccugggucaaccagaccuacgucaacaucuccaacaccaacuucgccgccggccaguccgucgucuccgucaagcucgccggcaacuccucccucugccccgucuccggcugggccaucuacuccaaggacaacuccauccgcaucggcuccaagggcgacgucuucgucauccgcgagcucuucaucuccugcuccccccucgagugccgcaccuucuuccucacccagggcgcccuccucaacgacaagcacuccaacggcaccaucaaggaccgcucccccuaccgcacccucauguccugccccaucggcgagguccccucccccuacaacucccgcuucgaguccgucgccugguccgccuccgccugccacgacggcaucaacuggcucaccaucggcaucuccggccccgacaacggcgccgucgccguccucaaguacaacggcaucaucaccgacaccaucaaguccuggcgcaacaacauccuccgcacccaggaguccgagugcgccugcgucaacggcuccugcuucaccgucaugaccgacggccccuccgacggccaggccuccuacaagaucuuccgcaucgagaagggcaagaucgucaaguccgucgagaugaacgcccccaacuaccacuacgaggagugcuccugcuaccccgacuccuccgagaucaccugcgucugccgcgacaacuggcacggcuccaaccgccccugggucuccuucaaccagaaccucgaguaccagaucggcuacaucugcuccggcaucuucggcgacaacccccgccccaacgacaagaccggcuccugcggccccgucuccuccaacggcgccaacggcgucaagggcuucuccuucaaguacggcaacggcgucuggaucggccgcaccaaguccaucuccucccgcaacggcuucgagaugaucugggaccccaacggcuggaccggcaccgacaacaacuucuccaucaagcaggacaucgucggcaucaacgagugguccggcuacuccggcuccuucguccagcaccccgagcucaccggccucgacugcauccgccccugcuucugggucgagcucauccgcggccgccccaaggagaacaccaucuggaccuccggcuccuccaucuccuucugcggcgucaacuccgacaccgucggcugguccuggcccgacggcgccgagcuccccuucaccaucgacaaguga

SEQ ID NO: 114177 - RNA, 1410 nt, Artificial Sequence; identical to SEQ ID NO: 112774
  derived and/or modified CDS sequence (opt2) from neuraminidase__InfluenzaA__ADD23095

SEQ ID NO: 114178 - RNA, 1410 nt, Artificial Sequence; identical to SEQ ID NO: 112774
  derived and/or modified CDS sequence (opt2) from neuraminidase__InfluenzaA__ADD23105

SEQ ID NO: 114179 - RNA, 1410 nt, Artificial Sequence; identical to SEQ ID NO: 112774
  derived and/or modified CDS sequence (opt2) from neuraminidase__InfluenzaA__ADD23115

SEQ ID NO: 114180 - RNA, 1410 nt, Artificial Sequence; identical to SEQ ID NO: 112774
  derived and/or modified CDS sequence (opt2) from neuraminidase__InfluenzaA__ADD23125

SEQ ID NO: 114181 - RNA, 1410 nt, Artificial Sequence; identical to SEQ ID NO: 112774
  derived and/or modified CDS sequence (opt2) from neuraminidase__InfluenzaA__ADD23135

SEQ ID NO: 114182 - RNA, 1410 nt, Artificial Sequence; identical to SEQ ID NO: 112774
  derived and/or modified CDS sequence (opt2) from neuraminidase__InfluenzaA__ADD23145

SEQ ID NO: 114183 - RNA, 1410 nt, Artificial Sequence; identical to SEQ ID NO: 112774
  derived and/or modified CDS sequence (opt2) from neuraminidase__InfluenzaA__ADD23155

SEQ ID NO: 114184 - RNA, 1410 nt, Artificial Sequence; identical to SEQ ID NO: 112774
  derived and/or modified CDS sequence (opt2) from neuraminidase__InfluenzaA__ADD23165

SEQ ID NO: 114185 - RNA, 1410 nt, Artificial Sequence; identical to SEQ ID NO: 112774
  derived and/or modified CDS sequence (opt2) from neuraminidase__InfluenzaA__ADD23175

SEQ ID NO: 114186 - RNA, 1410 nt, Artificial Sequence; identical to SEQ ID NO: 112774
  derived and/or modified CDS sequence (opt2) from neuraminidase__InfluenzaA__ADD23185

SEQ ID NO: 114187 - RNA, 1410 nt, Artificial Sequence; identical to SEQ ID NO: 112774
  derived and/or modified CDS sequence (opt2) from neuraminidase__InfluenzaA__ADD23195

SEQ ID NO: 114188 - RNA, 1410 nt, Artificial Sequence; identical to SEQ ID NO: 112774
  derived and/or modified CDS sequence (opt2) from neuraminidase__InfluenzaA__ADD23223

SEQ ID NO: 114189 - RNA, 1410 nt, Artificial Sequence
  derived and/or modified CDS sequence (opt2) from neuraminidase__InfluenzaA__ADD23233
augaaccccaaccagaagaucaucaccaucggcuccgucugcaugaccaucggcauggccaaccucauccuccagaucggcaacaucaucuccaucuggaucggccacuccauccagcucggcaaccagaaccagaucgagaccugcaaccaguccgucaucaccuacgagaacaacaccugggucaaccagaccuacgucaacaucuccaacaccaacuucgccgccggccaguccgucgucuccgucaagcucgccggcaacuccucccucugccccgucuccggcugggccaucuacuccaaggacaacuccauccgcaucggcuccaagggcgacgucuucgucauccgcgagcccuucaucuccugcuccccccucgagugccgcaccuucuuccucacccagggcgcccuccucaacgacaagcacuccaacggcaccaucaaggaccgcucccccuaccgcacccucauguccugccccaucggcgagguccccucccccuacaacucccgcuucgaguccgucgccugguccgccuccgccugccacgacggcaucaacuggcucaccaucggcaucuccggccccgacaacggcgccgucgccguccucaaguacaacggcaucaucaccgacaccaucaaguccuggcgcaacaacauccuccgcacccaggaguccgagugcgccugcgucaacggcuccugcuucaccgucaugaccgacggccccuccgacggccaggccuccuacaagaucuuccgcaucgagaagggcaagaucgucaaguccgucgagaugaacgcccccaacuaccacuacgaggagugcuccugcuaccccgacuccuccgagaucaccugcgucugccgcgacaacuggcacggcuccaaccgccccugggucuccuucaaccagaaccucgaguaccagaucggcuacaucugcuccggcaucuucggcgacaacccccgccccaacgacaagaccggcuccugcggccccgucuccuccaacggcgccaacggcgucaagggcuucuccuucaaguacggcaacggcgucuggaucggccgcaccaaguccaucuccucccgcaacggcuucgagaugaucugggaccccaacggcuggaccggcaccgacaacaacuucuccaucaagcaggacaucgucggcaucaacgagugguccggcuacuccggcuccuucguccagcaccccgagcucaccggccucgacugcauccgccccugcuucugggucgagcucauccgcggccgccccaaggagaacaccaucuggaccuccggcuccuccaucuccuucugcggcgucaacuccgacaccgucggcugguccuggcccgacggcgccgagcuccccuucaccaucgacaaguga

SEQ ID NO: 114190 - RNA, 1410 nt, Artificial Sequence; identical to SEQ ID NO: 112774
  derived and/or modified CDS sequence (opt2) from neuraminidase__InfluenzaA__ADD23243

SEQ ID NO: 114191 - RNA, 1410 nt, Artificial Sequence; identical to SEQ ID NO: 114062
  derived and/or modified CDS sequence (opt2) from neuraminidase__InfluenzaA__ADD23253

SEQ ID NO: 114192 - RNA, 1410 nt, Artificial Sequence
  derived and/or modified CDS sequence (opt2) from neuraminidase__InfluenzaA__ADD23273
augaaccccaaccagaagaucaucaccaucggcuccgucugcaugaccaucggcauggccaaccucauccuccagaucggcaacaucaucuccaucuggaucucccacuccauccagcucggcaaccagaaccagaucgagaccugcaaccaguccgucaucaccuacgagaacaacaccugggucaaccagaccuacgucaacaucuccaacaccaacuucgccgccggccaguccgucgucuccgucaagcucgccggcaacuccucccucugccccgucuccggcugggccaucuacuccaaggacaacuccauccgcaucggcuccgagggcgacgucuucgucauccgcgagcccuucaucuccugcuccccccucgagugccgcaccuucuuccucacccagggcgcccuccucaacgacaagcacuccaacggcaccaucaaggaccgcucccccuaccgcacccucauguccugccccaucggcgagguccccucccccuacaacucccgcuucgaguccgucgccugguccgccuccgccugccacgacggcaucaacuggcucaccaucggcaucuccggccccgacaacggcgccgucgccguccucaaguacaacggcaucaucaccgacaccaucaaguccuggcgcaacaacauccuccgcacccaggaguccgagugcgccugcgucaacggcuccugcuucaccgucaugaccgacggccccuccgacggccaggccuccuacaagaucuuccgcaucgagaagggcaagaucgucaaguccgucgagaugaacgcccccaacuaccacuacgaggagugcuccugcuaccccgacuccuccgagaucaccugcgucugccgcgacaacuggcacggcuccaaccgccccugggucuccuucaaccagaaccucgaguaccagaucggcuacaucugcuccggcaucuucggcgacaacccccgccccaacgacaagaccggcuccugcggccccgucuccuccaacggcgccaacggcgucaagggcuucuccuucaaguacggcaacggcgucuggaucggccgcaccaaguccaucuccucccgcaacggcuucgagaugaucugggaccccaacggcuggaccggcaccgacaacaacuucuccaucaagcaggacaucgucggcaucaacgagugguccggcuacuccggcuccuucguccagcaccccgagcucaccggccucgacugcauccgccccugcuucugggucgagcucauccgcggccgccccaaggagaacaccaucuggaccuccggcuccuccaucuccuucugcggcgucaacuccgacaccgucggcugguccuggcccgacggcgccgagcuccccuucaccaucgacaaguga

SEQ ID NO: 114193 - RNA, 1410 nt, Artificial Sequence; identical to SEQ ID NO: 112774
  derived and/or modified CDS sequence (opt2) from neuraminidase__InfluenzaA__ADD23283

SEQ ID NO: 114194 - RNA, 1410 nt, Artificial Sequence; identical to SEQ ID NO: 112774
  derived and/or modified CDS sequence (opt2) from neuraminidase__InfluenzaA__ADD23293

SEQ ID NO: 114195 - RNA, 1410 nt, Artificial Sequence; identical to SEQ ID NO: 112774
  derived and/or modified CDS sequence (opt2) from neuraminidase__InfluenzaA__ADD23303

SEQ ID NO: 114196 - RNA, 1410 nt, Artificial Sequence; identical to SEQ ID NO: 112774
  derived and/or modified CDS sequence (opt2) from neuraminidase__InfluenzaA__ADD23313

SEQ ID NO: 114197 - RNA, 1410 nt, Artificial Sequence
  derived and/or modified CDS sequence (opt2) from neuraminidase__InfluenzaA__ADD23323
augaaccccaaccagaagaucaucaccaucggcuccgucugcaugaccaucggcauggccaaccucauccuccagaucggcaacaucaucuccaucuggaucucccacuccauccagcucggcaaccagaaccagaucgagaccugcaaccaguccgucaucaccuacgagaacaacaccugggucaaccagaccuacgucaacaucuccaacaccaacuucgccgccggccaguccgucgucuccgucaagcucgccggcaacuccucccucugccccgucuccggcugggccaucuacuccaaggacaacuccauccgcaucggcuccaagggcgacgucuucgucauccgcgagcccuucaucuccugcuccccccucgagugccgcaccuucuuccucacccagggcgcccuccucaacgacaagcacuccaacggcaccaucaaggaccgcucccccuaccgcacccucauguccugccccaucggcgagguccccucccccuacaacucccgcuucgaguccgucgccugguccgccuccgccugccacgacggcaucaacuggcucaccaucggcaucuccggccccgacaacggcgccgucgccguccucaaguacaacggcaucaucaccgacaccaucaaguccuggcgcaacaacauccuccgcacccaggaguccgagugcgccugcgucaacggcuccugcuucaccguccucaccgacggccccuccgacggccaggccuccuacaagaucuuccgcaucgagaagggcaagaucgucaaguccgucgagaugaacgcccccaacuaccacuacgaggagugcuccugcuaccccgacuccuccgagaucaccugcgucugccgcgacaacuggcacggcuccaaccgccccugggucuccuucaaccagaaccucgaguaccagaucggcuacaucugcuccggcaucuucggcgacaacccccgccccaacgacaagaccggcuccugcggccccgucuccuccaacggcgccaacggcgucaagggcuucuccuucaaguacggcaacggcgucuggaucggccgcaccaaguccaucuccucccgcaacggcuucgagaugaucugggaccccaacggcuggaccggcaccgacaacaacuucuccaucaagcaggacaucgucggcaucaacgagugguccggcuacuccggcuccuucguccagcaccccgagcucaccggccucgacugcauccgccccugcuucugggucgagcucauccgcggccgccccaaggagaacaccaucuggaccuccggcuccuccaucuccuucugcggcgucaacuccgacaccgucggcugguccuggcccgacggcgccgagcuccccuucaccaucgacaaguga

SEQ ID NO: 114198 - RNA, 1410 nt, Artificial Sequence; identical to SEQ ID NO: 112774
  derived and/or modified CDS sequence (opt2) from neuraminidase__InfluenzaA__ADD23333

SEQ ID NO: 114199 - RNA, 1410 nt, Artificial Sequence; identical to SEQ ID NO: 112774
  derived and/or modified CDS sequence (opt2) from neuraminidase__InfluenzaA__ADD23358

SEQ ID NO: 114200 - RNA, 1410 nt, Artificial Sequence; identical to SEQ ID NO: 114125
  derived and/or modified CDS sequence (opt2) from neuraminidase__InfluenzaA__ADD23368

SEQ ID NO: 114201 - RNA, 1410 nt, Artificial Sequence; identical to SEQ ID NO: 112774
  derived and/or modified CDS sequence (opt2) from neuraminidase__InfluenzaA__ADD23378

SEQ ID NO: 114202 - RNA, 1410 nt, Artificial Sequence; identical to SEQ ID NO: 112774
  derived and/or modified CDS sequence (opt2) from neuraminidase__InfluenzaA__ADD23388

SEQ ID NO: 114203 - RNA, 1410 nt, Artificial Sequence; identical to SEQ ID NO: 113357
  derived and/or modified CDS sequence (opt2) from neuraminidase__InfluenzaA__ADD23398

SEQ ID NO: 114204 - RNA, 1410 nt, Artificial Sequence
  derived and/or modified CDS sequence (opt2) from neuraminidase__InfluenzaA__ADD23408
augaaccccaaccagaagaucaucaccaucggcuccgucugcaugaccaucggcauggccaaccucauccuccagaucggcaacaucaucuccaucuggaucucccacuccauccagcucggcaaccagaaccagaucgagaccugcaaccaguccgucaucaccuacgagaacaacaccugggucaaccagaccuacgucaacaucuccaacaccaacuucgccgccggccaguccgucgucuccgucaagcucgccggcaacuccucccucugccccgucuccggcugggccaucuacuccaaggacaacuccauccgcaucggcuccaagggcgacgucuucgucauccgcgagcccuucaucuccugcuccccccucgagugccgcaccuucuuccucacccagggcgcccuccucaacgacaagcacuccaacggcaccaucaaggaccgcucccccuaccgcacccucauguccugccccaucggcgagguccccucccccuacaacucccgcuucgaguccgucgccugguccgccuccgccugccacgacggcaucaacuggcucaccaucggcaucuccggccccgacaacggcgccgucgccguccucaaguacaacggcaucaucaccgacaccaucaaguccuggcgcaacaacauccuccgcacccaggaguccgagugcgccugcgucaacggcuccugcuucaccgucaugaccgacggccccuccgacggccaggccuccuacaagaucuuccgcaucgagaagggcaagaucgucaaguccgucgagaugaacgcccccaacuaccacuacgaggagugcuccugcuaccccgacuccuccgagaucaccugcgucugccgcgacaacuggcacggcuccaaccgccccugggucuccuucaaccaggaccucgaguaccagaucggcuacaucugcuccggcaucuucggcgacaacccccgccccaacgacaagaccggcuccugcggccccgucuccuccaacggcgccaacggcgucaagggcuucuccuucaaguacggcaacggcgucuggaucggccgcaccaaguccaucuccucccgcaacggcuucgagaugaucugggaccccaacggcuggaccggcaccgacaacaacuucuccaucaagcaggacaucgucggcaucaacgagugguccggcuacuccggcuccuucguccagcaccccgagcucaccggccucgacugcauccgccccugcuucugggucgagcucauccgcggccgccccaaggagaacaccaucuggaccuccggcuccuccaucuccuucugcggcgucaacuccgacaccgucggcugguccuggcccgacggcgccgagcuccccuucaccaucgacaaguga

SEQ ID NO: 114205 - RNA, 1410 nt, Artificial Sequence
  derived and/or modified CDS sequence (opt2) from neuraminidase__InfluenzaA__ADD23438
augaaccccaaccagaagaucaucaccaucggcuccgucugcaugaccaucggcauggccaaccucauccuccagaucggcaacaucaucuccaucuggaucucccacuccauccagcucggcaaccagaaccagaucgagaccugcaaccaguccgucaucaccuacgagaacaacaccugggucaaccagaccuacgucaacaucuccaacaccaacuucgccgccggccaguccgucgucuccgucaagcucgccggcaacuccucccucugccccgucuccggcugggccaucuacuccaaggacaacuccauccgcaucggcuccaagggcgacgucuucgucauccgcgagcccuucaucuccugcuccccccucgagugccgcaccuucuuccucacccagggcgcccuccucaacgacaagcacuccaacggcaccaucaaggaccgcucccccuaccgcacccucauguccugccccaucggcgagguccccucccccuacaacucccgcuucgaguccgucgccugguccgccuccgccugccacgacggcaucaacuggcucaccaucggcaucuccggccccgacaacggcgccgucgccguccucaaguacaacggcaucaucaccgacaccaucaaguccuggcgcaacaacauccuccgcacccaggaguccgagugcgccugcgucaacggcuccugcuucaccgucaugaccgacggccccuccgacggccaggccuccuacaagaucuuccgcaucgagaagggcaagaucgucaaguccgucgagaugaacgcccccaacuaccacuacgaggagugcuccugcuaccccgacuccuccgagaucaccugcgucugccgcgacaacuggcacggcuccaaccgccccugggucuccuucaaccagaaccucgaguaccagaucggcuacaucugcuccggcaucuucggcgacaacccccgccccaacgacaagaccggcuccugcggccccgucuccuccaacggcgccaacggcgucaagggcuucuccuucaaguacggcaacggcgucuggaucggccgcaccaaguccaucuccucccgcaacggcuucgagaugaucugggaccccaacggcuggaccggcaccgacaacuccuucuccaucaagcaggacaucgucggcaucaacgagugguccggcuacuccggcuccuucguccagcaccccgagcucaccggccucgacugcauccgccccugcuucugggucgagcucauccgcggccgccccaaggagaacaccaucuggaccuccggcuccuccaucuccuucugcggcgucaacuccgacaccgucggcugguccuggcccgacggcgccgagcuccccuucaccaucgacaaguga

SEQ ID NO: 114206 - RNA, 1410 nt, Artificial Sequence; identical to SEQ ID NO: 112774
  derived and/or modified CDS sequence (opt2) from neuraminidase__InfluenzaA__ADD23448

SEQ ID NO: 114207 - RNA, 1410 nt, Artificial Sequence; identical to SEQ ID NO: 112774
  derived and/or modified CDS sequence (opt2) from neuraminidase__InfluenzaA__ADD23458

SEQ ID NO: 114208 - RNA, 1410 nt, Artificial Sequence
  derived and/or modified CDS sequence (opt2) from neuraminidase__InfluenzaA__ADD23468
augaaccccaaccagaagaucaucaccaucggcuccgucugcaugaccaucggcauggccaaccucauccuccagaucggcaacaucaucuccaucuggaucucccacuccauccagcucggcaaccagaaccagaucgagaccugcaaccaguccgucaucaccuacgagaacaacaccugggucaaccagaccuacgucaacaucuccaacaccaacuucgccgccggccaguccgucgucuccgucaagcucgccggcaacuccucccucugccccgucuccggcugggccaucuacuccaaggacaacuccauccgcaucggcuccaagggcgacgucuucgucauccgcgagcccuucaucuccugcuccccccucgagugccgcaccuucuuccucacccagggcgcccuccucaacgacaagcacuccaacggcaccaucaaggaccgcucccccuaccgcacccucauguccugccccaucggcgagguccccucccccuacaacucccgcuucgaguccgucgccugguccgccuccgccugccacgacggcaucaacuggcucaccaucggcaucuccggccccgacaacggcgccgucgccguccucaaguacaacggcaucaucaccgacaccaucaaguccuggcgcaacaacauccuccgcacccaggaguccgagugcgccugcgucaacggcuccugcuucaccgucaugaccgacggccccuccgacggccaggccuccuacaagaucuuccgcaucgagaagggcaagaucgucaaguccgucgagaugaacgcccccaacuaccacuacgaggagugcuccugcuaccccgacuccuccgagaucaccugcgucugccgcgacaacuggcacggcuccaaccgccccugggucuccuucaaccagaaccucgaguaccagaucggcuacaucugcuccggcaucuucggcgacaacccccgccccaacgacaagaccggcuccugcggccccgucuccuccaacggcgccaacggcgucaagggcuucuccuucaaguacggcaacggcgucuggaucggccgcaccaaguccaucuccucccgcaacggcuucgagaugaucugggaccccaacggcuggaccggcaccgacaacaacuucuccaucaagcaggacaucgucggcgucaacgagugguccggcuacuccggcuccuucguccagcaccccgagcucaccggccucgacugcauccgccccugcuucugggucgagcucauccgcggccgccccaaggagaacaccaucuggaccuccggcuccuccaucuccuucugcggcgucaacuccgacaccgucggcugguccuggcccgacggcgccgagcuccccuucaccaucgacaaguga

SEQ ID NO: 114209 - RNA, 1410 nt, Artificial Sequence; identical to SEQ ID NO: 112774
  derived and/or modified CDS sequence (opt2) from neuraminidase__InfluenzaA__ADD23478

SEQ ID NO: 114210 - RNA, 1410 nt, Artificial Sequence; identical to SEQ ID NO: 112774
  derived and/or modified CDS sequence (opt2) from neuraminidase__InfluenzaA__ADD23488

SEQ ID NO: 114211 - RNA, 1410 nt, Artificial Sequence
  derived and/or modified CDS sequence (opt2) from neuraminidase__InfluenzaA__ADD23498
augaaccccaaccagaagaucaucaccaucggcuccgucugcaugaccaucggcauggccaaccucauccuccagaucggcaacaucaucuccaucuggaucucccacuccauccagcucggcaaccagaaccacaucgagaccugcaaccaguccgucaucaccuacgagaacaacaccugggucaaccagaccuacgucaacaucuccaacaccaacuucgccgccggccaguccgucgucuccgucaagcucgccggcaacuccucccucugccccgucuccggcugggccaucuacuccaaggacaacuccauccgcaucggcuccaagggcgacgucuucgucauccgcgagcccuucaucuccugcuccccccucgagugccgcaccuucuuccucacccagggcgcccuccucaacgacaagcacuccaacggcaccaucaaggaccgcucccccuaccgcacccucauguccugccccaucggcgagguccccucccccuacaacucccgcuucgaguccgucgccugguccgccuccgccugccacgacggcaucaacuggcucaccaucggcaucuccggccccgacaacggcgccgucgccguccucaaguacaacggcaucaucaccgacaccaucaaguccuggcgcaacaacauccuccgcacccaggaguccgagugcgccugcgucaacggcuccugcuucaccgucaugaccgacggccccuccgacggccaggccuccuacaagaucuuccgcaucgagaagggcaagaucgucaaguccgucgagaugaacgcccccaacuaccacuacgaggagugcuccugcuaccccgacuccuccgagaucaccugcgucugccgcgacaacuggcacggcuccaaccgccccugggucuccuucaaccagaaccucgaguaccagaucggcuacaucugcuccggcaucuucggcgacaacccccgccccaacgacaagaccggcuccugcggccccgucuccuccaacggcgccaacggcgucaagggcuucuccuucaaguacggcaacggcgucuggaucggccgcaccaaguccaucuccucccgcaacggcuucgagaugaucugggaccccaacggcuggaccggcaccgacaacaacuucuccaucaagcaggacaucgucggcaucaacgagugguccggcuacuccggcuccuucguccagcaccccgagcucaccggccucgacugcauccgccccugcuucugggucgagcucauccgcggccgccccaaggagaacaccaucuggaccuccggcuccuccaucuccuucugcggcgucaacuccgacaccgucggcugguccuggcccgacggcgccgagcuccccuucaccaucgacaaguga

SEQ ID NO: 114212 - RNA, 1410 nt, Artificial Sequence; identical to SEQ ID NO: 112774
  derived and/or modified CDS sequence (opt2) from neuraminidase__InfluenzaA__ADD23508

SEQ ID NO: 114213 - RNA, 1410 nt, Artificial Sequence; identical to SEQ ID NO: 112774
  derived and/or modified CDS sequence (opt2) from neuraminidase__InfluenzaA__ADD23518

SEQ ID NO: 114214 - RNA, 1410 nt, Artificial Sequence; identical to SEQ ID NO: 112774
  derived and/or modified CDS sequence (opt2) from neuraminidase__InfluenzaA__ADD23997

SEQ ID NO: 114215 - RNA, 1410 nt, Artificial Sequence; identical to SEQ ID NO: 112774
  derived and/or modified CDS sequence (opt2) from neuraminidase__InfluenzaA__ADD24007

SEQ ID NO: 114216 - RNA, 1410 nt, Artificial Sequence; identical to SEQ ID NO: 112774
  derived and/or modified CDS sequence (opt2) from neuraminidase__InfluenzaA__ADD24017

SEQ ID NO: 114217 - RNA, 1410 nt, Artificial Sequence; identical to SEQ ID NO: 112774
  derived and/or modified CDS sequence (opt2) from neuraminidase__InfluenzaA__ADD24024

SEQ ID NO: 114218 - RNA, 1410 nt, Artificial Sequence; identical to SEQ ID NO: 112774
  derived and/or modified CDS sequence (opt2) from neuraminidase__InfluenzaA__ADD24025

SEQ ID NO: 114219 - RNA, 1410 nt, Artificial Sequence; identical to SEQ ID NO: 112774
  derived and/or modified CDS sequence (opt2) from neuraminidase__InfluenzaA__ADD24026

SEQ ID NO: 114220 - RNA, 1410 nt, Artificial Sequence; identical to SEQ ID NO: 112774
  derived and/or modified CDS sequence (opt2) from neuraminidase__InfluenzaA__ADD24027

SEQ ID NO: 114221 - RNA, 1410 nt, Artificial Sequence; identical to SEQ ID NO: 112774
  derived and/or modified CDS sequence (opt2) from neuraminidase__InfluenzaA__ADD24028

SEQ ID NO: 114222 - RNA, 1410 nt, Artificial Sequence; identical to SEQ ID NO: 112774
  derived and/or modified CDS sequence (opt2) from neuraminidase__InfluenzaA__ADD24029

SEQ ID NO: 114223 - RNA, 1410 nt, Artificial Sequence; identical to SEQ ID NO: 112774
  derived and/or modified CDS sequence (opt2) from neuraminidase__InfluenzaA__ADD24030

SEQ ID NO: 114224 - RNA, 1410 nt, Artificial Sequence; identical to SEQ ID NO: 112774
  derived and/or modified CDS sequence (opt2) from neuraminidase__InfluenzaA__ADD24031

SEQ ID NO: 114225 - RNA, 1410 nt, Artificial Sequence; identical to SEQ ID NO: 112774
  derived and/or modified CDS sequence (opt2) from neuraminidase__InfluenzaA__ADD24032

SEQ ID NO: 114226 - RNA, 1410 nt, Artificial Sequence; identical to SEQ ID NO: 112774
  derived and/or modified CDS sequence (opt2) from neuraminidase__InfluenzaA__ADD25231

SEQ ID NO: 114227 - RNA, 1410 nt, Artificial Sequence; identical to SEQ ID NO: 112774
  derived and/or modified CDS sequence (opt2) from neuraminidase__InfluenzaA__ADD25233

SEQ ID NO: 114228 - RNA, 1410 nt, Artificial Sequence; identical to SEQ ID NO: 112774
  derived and/or modified CDS sequence (opt2) from neuraminidase__InfluenzaA__ADD25235

SEQ ID NO: 114229 - RNA, 1410 nt, Artificial Sequence; identical to SEQ ID NO: 112774
  derived and/or modified CDS sequence (opt2) from neuraminidase__InfluenzaA__ADD25244

SEQ ID NO: 114230 - RNA, 1410 nt, Artificial Sequence
  derived and/or modified CDS sequence (opt2) from neuraminidase__InfluenzaA__ADD25246
augaaccccaaccagaagaucaucaccaucggcuccgucugcaugaccaucggcauggccaaccucauccuccagaucggcaacaucaucuccaucuggaucucccacuccauccagcucggcaaccagaaccagaucgagaccugcaaccaguccgucaucaccuacgagaacaacaccugggucaaccagaccuacgucaacaucuccaacaccaacuucgccgccggccaguccgucgucuccgucaagcucgccggcaacuccucccucugccccgucuccggcugggccaucuacuccaaggacaacuccauccgcaucggcuccaagggcgacgucuucgucauccgcgagcccuucaucuccugcuccccccucgagugccgcaccuucuuccucacccagggcgcccuccucaacgacaagcacuccaacggcaccaucaaggaccgcucccccuaccgcacccucauguccugccccaucggcgagguccccucccccuacaacucccgcuucgaguccgucgccugguccgccuccgccugccacgacggcaccaacuggcucaccaucggcaucuccggccccgacaacggcgccgucgccguccucaaguacaacggcaucaucaccgacaccaucaaguccuggcgcaacaacauccuccgcacccaggaguccgagugcgccugcgucaacggcuccugcuucaccgucaugaccgacggccccuccgacggccaggccuccuacaagaucuuccgcaucgagaagggcaagaucgucaaguccgucgagaugaacgcccccaacuaccacuacgaggagugcuccugcuaccccgacuccuccgagaucaccugcgucugccgcgacaacuggcacggcuccaaccgccccugggucuccuucaaccagaaccucgaguaccagaucggcuacaucugcuccggcaucuucggcgacaacccccgccccaacgacaagaccggcuccugcggccccgucuccuccaacggcgccaacggcgucaagggcuucuccuucaaguacggcaacggcgucuggaucggccgcaccaaguccaucuccucccgcaacggcuucgagaugaucugggaccccaacggcuggaccggcaccgacaacaacuucuccaucaagcaggacaucgucggcaucaacgagugguccggcuacuccggcuccuucguccagcaccccgagcucaccggccucgacugcauccgccccugcuucugggucgagcucauccgcggccgccccaaggagaacaccaucuggaccuccggcuccuccaucuccuucugcggcgucaacuccgacaccgucggcugguccuggcccgacggcgccgagcuccccuucaccaucgacaaguga

SEQ ID NO: 114231 - RNA, 1410 nt, Artificial Sequence; identical to SEQ ID NO: 112774
  derived and/or modified CDS sequence (opt2) from neuraminidase__InfluenzaA__ADD25248

SEQ ID NO: 114232 - RNA, 1410 nt, Artificial Sequence
  derived and/or modified CDS sequence (opt2) from neuraminidase__InfluenzaA__ADD25250
augaaccccaaccagaagaucaucaccaucggcuccgucugcaugaccaucggcauggccaaccucauccuccagaucggcaacaucaucuccaucuggaucucccgcuccauccagcucggcaaccagaaccagaucgagaccugcaaccaguccaucaucaccuacgagaacaacaccugggucaaccagaccuacgucaacaucuccaacaccaacuucgccgccggccaguccgucgucuccgucaagcucgccggcaacuccucccucugccccgucuccggcugggccaucuacuccaaggacaacuccauccgcaucggcuccaagggcgacgucuucgucauccgcgagcccuucaucuccugcuccccccucgagugccgcaccuucuuccucacccagggcgcccuccucaacgacaagcacuccaacggcaccaucaaggaccgcucccccuaccgcacccucauguccugccccaucggcgagguccccucccccuacaacucccgcuucgaguccgucgccugguccgccuccgccugccacgacggcaucaacuggcucaccaucggcaucuccggccccgacaacggcgccgucgccguccucaaguacaacggcaucaucaccgacaccaucaaguccuggcgcaacaacauccuccgcacccaggaguccgagugcgccugcgucaacggcuccugcuucaccgucaugaccgacggccccuccgacggccaggccuccuacaagaucuuccgcaucgagaagggcaagaucgucaaguccgucgagaugaacgcccccaacuaccacuacgaggagugcuccugcuaccccgacuccggcgagaucaccugcgucugccgcgacaacuggcacggcuccaaccgccccugggucuccuucaaccagaaccucgaguaccagaucggcuacaucugcuccggcaucuucggcgacaacccccgccccaacgacaagaccggcuccugcggccccgucuccuccaacggcgccaacggcgucaagggcuucuccuucaaguacggcaacggcgucuggaucggccgcaccaaguccaucuccucccgcaacggcuucgagaugaucugggaccccaacggcuggaccggcaccgacaacaacuucuccaucaagcaggacaucgucggcaucaacgagugguccggcuacuccggcuccuucguccagcaccccgagcucaccggccucgacugcauccgccccugcuucugggucgagcucauccgcggccgccccaaggagaacaccaucuggaccuccggcuccuccaucuccuucugcggcgucaacuccgacaccaugggcugguccuggcccgacggcgccgagcuccccuucaccaucgacaaguga

SEQ ID NO: 114233 - RNA, 1410 nt, Artificial Sequence; identical to SEQ ID NO: 112774
  derived and/or modified CDS sequence (opt2) from neuraminidase__InfluenzaA__ADD25255

SEQ ID NO: 114234 - RNA, 1410 nt, Artificial Sequence; identical to SEQ ID NO: 112774
  derived and/or modified CDS sequence (opt2) from neuraminidase__InfluenzaA__ADD25259

SEQ ID NO: 114235 - RNA, 1410 nt, Artificial Sequence
  derived and/or modified CDS sequence (opt2) from neuraminidase__InfluenzaA__ADD25262
augaaccccaaccagaagaucaucaccaucggcuccgucugcaugaccaucggcauggccaaccucauccuccagaucggcaacaucaucuccaucuggaucucccacuccauccagcucggcaaccagaaccagaucgagaccugcaaccaguccgucaucaccuacgagaacaacaccugggucaaccagaccuacgucaacaucuccaacaccaacuucgccgccggccaguccgucgucuccgucaagcucgccggcaacuccucccucugccccgucuccggcugggccaucuacuccaaggacaacuccauccgcaucggcuccaagggcgacgucuucgucauccgcgagcccuucaucuccugcuccccccucgagugccgcaccuucuuccucacccagggcgcccuccucaacgacaagcacuccaacggcaccaucaaggaccgcucccccuaccgcacccucauguccugccccaucggcgagguccccucccccuacaacucccgcuucgaguccgucgccugguccgccuccgccugccacgacggcaucaacuggcucaccaucggcaucuccggccccgacaacggcgccgucgccguccucaaguacaacggcaucaucaccgacaccaucaaguccuggcgcaacaacauccuccgcacccaggaguccgagugcgccugcgucaacggcuccugcuucaccgucaugaccgacggccccuccgacggccaggccuccuacaagaucuuccgcaucgagaagggcaagaucgucaaguccgucgagaugaacgcccccaacuaccacuacgaggagugcuccugcuaccccgacuccuccgagaucaccugcgucugccgcgacaacuggcacggcuccaaccgccccugggucuccuucaaccagaaccucgaguaccagaucggcuacaucugcuccggcaucuucggcgacaacccccgccccaacgacaagaagggcuccugcggccccgucuccuccaacggcgccgacggcgucaagggcuucuccuucaaguacggcaacggcgucuggaucggccgcaccaaguccaucuccucccgcaacggcuucgagaugaucugggaccccaacggcuggaccggcaccgacaacaacuucuccaucaagcaggacaucgucggcaucaacgagugguccggcuacuccggcuccuucguccagcaccccgagcucaccggccucgacugcauccgccccugcuucugggucgagcucauccgcggccgccccaaggagaacaccaucuggaccuccggcuccuccaucuccuucugcggcgucaacuccgacaccgucggcugguccuggcccgacggcgccgagcuccccuucaccaucgacaaguga

SEQ ID NO: 114236 - RNA, 1410 nt, Artificial Sequence
  derived and/or modified CDS sequence (opt2) from neuraminidase__InfluenzaA__ADD25266
augaaccccaaccagaagaucaucaccaucggcuccgucugcaugaccaucggcauggccaaccucauccuccagaucggcaacaucaucuccaucuggaucucccacuccauccagcucggcaaccagaaccagaucgagaccugcaaccaguccgucaucaccuacgagaacaacaccugggucaaccagaccuacgucaacaucuccaacaccaacuucgccgccggccaguccgucguccccgucaagcucgccggcaacuccucccucugccccgucuccggcugggccaucuacuccaaggacaacuccauccgcaucggcuccaagggcgacgucuucgucauccgcgagcccuucaucuccugcuccccccucgagugccgcaccuucuuccucacccagggcgcccuccucaacgacaagcacuccaacggcaccaucaaggaccgcucccccuaccgcacccucauguccugccccaucggcgagguccccucccccuacaacucccgcuucgaguccgucgccugguccgccuccgccugccacgacggcaucaacuggcucaccaucggcaucuccggccccgacaacggcgccgucgccguccucaaguacaacggcaucaucaccgacaccaucaaguccuggcgcaacaacauccuccgcacccaggaguccgagugcgccugcgucaacggcuccugcuucaccgucaugaccgacggccccuccgacggccaggccuccuacaagaucuuccgcaucgagaagggcaagaucgucaaguccgucgagaugaacgcccccaacuaccacuacgaggagugcuccugcuaccccgacuccuccgagaucaccugcgucugccgcgacaacuggcacggcuccaaccgccccugggucuccuucaaccagaaccucgaguaccagaucggcuacaucugcuccggcaucuucggcgacaacccccgccccaacgacaagaccggcuccugcggccccgucuccuccaacggcgccaacggcgucaagggcuucuccuucaaguacggcaacggcgucuggaucggccgcaccaaguccaucuccucccgcaacggcuucgagaugaucugggaccccaacggcuggaccggcaccgacaacaacuucuccaucaagcaggacaucgucggcaucaacgagugguccggcuacuccggcuccuucguccagcaccccgagcucaccggccucgacugcauccgccccugcuucugggucgagcucauccgcggccgccccaaggagaacaccaucuggaccuccggcuccuccaucuccuucugcggcgucaacuccgacaccgucggcugguccuggcccgacggcgccgagcuccccuucaccaucgacaaguga

SEQ ID NO: 114237 - RNA, 1410 nt, Artificial Sequence; identical to SEQ ID NO: 112774
  derived and/or modified CDS sequence (opt2) from neuraminidase__InfluenzaA__ADD25268

SEQ ID NO: 114238 - RNA, 1410 nt, Artificial Sequence; identical to SEQ ID NO: 112774
  derived and/or modified CDS sequence (opt2) from neuraminidase__InfluenzaA__ADD25271

SEQ ID NO: 114239 - RNA, 1410 nt, Artificial Sequence; identical to SEQ ID NO: 112774
  derived and/or modified CDS sequence (opt2) from neuraminidase__InfluenzaA__ADD25274

SEQ ID NO: 114240 - RNA, 1410 nt, Artificial Sequence; identical to SEQ ID NO: 112774
  derived and/or modified CDS sequence (opt2) from neuraminidase__InfluenzaA__ADD25276

SEQ ID NO: 114241 - RNA, 1410 nt, Artificial Sequence
  derived and/or modified CDS sequence (opt2) from neuraminidase__InfluenzaA__ADD25278
augaaccccaaccagaagaucaucaccaucggcuccgucugcaugaccaucggcauggccaaccucauccuccagaucggcaacaucaucuccaucuggaucucccgcuccauccagcucggcaaccagaaccagaucgagaccugcaaccaguccaucaucaccuacgagaacaacaccugggucaaccagaccuacgucaacaucuccaacaccaacuucgccgccggccaguccgucgucuccgucaagcucgccggcaacuccucccucugccccgucuccggcugggccaucuacuccaaggacaacuccauccgcaucggcuccaagggcgacgucuucgucauccgcgagcccuucaucuccugcuccccccucgagugccgcaccuucuuccucacccagggcgcccuccucaacgacaagcacuccaacggcaccaucaaggaccgcucccccuaccgcacccucauguccugccccaucggcgagguccccucccccuacaacucccgcuucgaguccgucgccugguccgccuccgccugccacgacggcaucaacuggcucaccaucggcaucuccggccccgacaacggcgccgucgccguccucaaguacaacggcaucaucaccgacaccaucaaguccuggcgcaacaacauccuccgcacccaggaguccgagugcgccugcgucaacggcuccugcuucaccgucaugaccgacggccccuccgacggccaggccuccuacaagaucuuccgcaucgagaagggcaagaucgucaaguccgucgagaugaacgcccccaacuaccacuacgaggagugcuccugcuaccccgacuccggcgagaucaccugcgucugccgcgacaacuggcacggcuccaaccgccccugggucuccuucaaccagaaccucgaguaccagaucggcuacaucugcuccggcaucuucggcgacaacccccgccccaacgacaagaccggcuccugcggccccgucuccuccaacggcgccaacggcgucaagggcuucuccuucaaguacggcaacggcgucuggaucggccgcaccaaguccaucuccucccgcaacggcuucgagaugaucugggaccccaacggcuggaccggcaccgacaacaacuucuccaucaagcaggacaucgucggcaucaacgagugguccggcuacuccggcuccuucguccagcaccccgagcucaccggccucgacugcauccgccccugcuucugggucgagcucauccgcggccgccccaaggagaacaccaucuggaccuccggcuccuccaucuccuucugcggcgucaacuccgacaccgucggcugguccuggcccgacggcgccgagcuccccuucaccaucgacaaguga

SEQ ID NO: 114242 - RNA, 1410 nt, Artificial Sequence; identical to SEQ ID NO: 112774
  derived and/or modified CDS sequence (opt2) from neuraminidase__InfluenzaA__ADD25280

SEQ ID NO: 114243 - RNA, 1410 nt, Artificial Sequence; identical to SEQ ID NO: 112774
  derived and/or modified CDS sequence (opt2) from neuraminidase__InfluenzaA__ADD25282

SEQ ID NO: 114244 - RNA, 1410 nt, Artificial Sequence; identical to SEQ ID NO: 114062
  derived and/or modified CDS sequence (opt2) from neuraminidase__InfluenzaA__ADD25284

SEQ ID NO: 114245 - RNA, 1410 nt, Artificial Sequence; identical to SEQ ID NO: 112774
  derived and/or modified CDS sequence (opt2) from neuraminidase__InfluenzaA__ADD25287

SEQ ID NO: 114246 - RNA, 1410 nt, Artificial Sequence; identical to SEQ ID NO: 112774
  derived and/or modified CDS sequence (opt2) from neuraminidase__InfluenzaA__ADD25291

SEQ ID NO: 114247 - RNA, 1410 nt, Artificial Sequence; identical to SEQ ID NO: 114062
  derived and/or modified CDS sequence (opt2) from neuraminidase__InfluenzaA__ADD25293

SEQ ID NO: 114248 - RNA, 1410 nt, Artificial Sequence; identical to SEQ ID NO: 112774
  derived and/or modified CDS sequence (opt2) from neuraminidase__InfluenzaA__ADD25300

SEQ ID NO: 114249 - RNA, 1410 nt, Artificial Sequence
  derived and/or modified CDS sequence (opt2) from neuraminidase__InfluenzaA__ADD25304
augaaccccaaccagaagaucaucaccaucggcuccgucugcaugaccaucggcauggccaaccucauccuccagaucggcaacaucgucuccaucuggaucucccacuccauccagcucggcaaccagaaccagaucgagaccugcaaccaguccgucaucaccuacgagaacaacaccugggucaaccagaccuacgucaacaucuccaacaccaacuucgccgccggccaguccgucgucuccgucaagcucgccggcaacuccucccucugccccgucuccggcugggccaucuacuccaaggacaacuccauccgcaucggcuccaagggcgacgucuucgucauccgcgagcccuucaucuccugcuccccccucgagugccgcaccuucuuccucacccagggcgcccuccucaacgacaagcacuccaacggcaccaucaaggaccgcucccccuaccgcacccucauguccugccccaucggcgagguccccucccccuacaacucccgcuucgaguccgucgccugguccgccuccgccugccacgacggcaucaacuggcucaccaucggcaucuccggccccgacaacggcgccgucgccguccucaaguacaacggcaucaucaccgacaccaucaaguccuggcgcaacaacauccuccgcacccaggaguccgagugcgccugcgucaacggcuccugcuucaccgucaugaccgacggccccuccgacggccaggccuccuacaagaucuuccgcaucgagaagggcaagaucgucaaguccgucgagaugaacgcccccaacuaccacuacgaggagugcuccugcuaccccgacuccuccgagaucaccugcgucugccgcgacaacuggcacggcuccaaccgccccugggucuccuucaaccagaaccucgaguaccagaucggcuacaucugcuccggcaucuucggcgacaacccccgccccaacgacaagaccggcuccugcggccccgucuccuccaacggcgccaacggcgucaagggcuucuccuucaaguacggcaacggcgucuggaucggccgcaccaaguccaucuccucccgcaacggcuucgagaugaucugggaccccaacggcuggaccggcaccgacaacaacuucuccaucaagcaggacaucgucggcaucaacgagugguccggcuacuccggcuccuucguccagcaccccgagcucaccggccucgacugcauccgccccugcuucugggucgagcucauccgcggccgccccaaggagaacaccaucuggaccuccggcuccuccaucuccuucugcggcgucaacuccgacaccgucggcugguccuggcccgacggcgccgagcuccccuucaccaucgacaaguga

SEQ ID NO: 114250 - RNA, 1410 nt, Artificial Sequence
  derived and/or modified CDS sequence (opt2) from neuraminidase__InfluenzaA__ADD25306
augaaccccaaccagaagaucaucaccaucggcuccgucugcaugaccaucggcauggccaaccucauccuccagaucggcaacaucaucuccaucuggaucucccgcuccauccagcucggcaaccagaaccagaucgagaccugcaaccaguccaucaucaccuacgagaacaacaccugggucaaccagaccuacgucaacaucuccaacaccaacuucgccgccggccaguccgucgucuccgucaagcucgccggcaacuccucccucugccccgucuccggcugggccaucuacuccaaggacaacuccauccgcaucggcuccaagggcgacgucuucgucauccgcgagcccuucaucuccugcuccccccucgagugccgcaccuucuuccucacccagggcgcccuccucaacgacaagcacuccaacggcaccaucaaggaccgcucccccuaccgcacccucauguccugccccaucggcgagguccccucccccuacaacucccgcuucgaguccgucgccugguccgccuccgccugccacgacggcaucaacuggcucaccaucggcaucuccggccccgacaacggcgccgucgccguccucaaguacaacggcaucaucaccgacaccaucaaguccuggcgcaacaacauccuccgcacccaggaguccgagugcgccugcgucaacggcuccugcuucaccgucaugaccgacgagcccuccgacggccaggccuccuacaagaucuuccgcaucgagaagggcaagaucgucaaguccgucgagaugaacgcccccaacuaccacuacgaggagugcuccugcuaccccgacuccggcgagaucaccugcgucugccgcgacaacuggcacggcuccaaccgccccugggucuccuucaaccagaaccucgaguaccagaucggcuacaucugcuccggcaucuucggcgacaacccccgccccaacgacaagaccggcuccugcggccccgucuccuccaacggcgccaacggcgucaagggcuucuccuucaaguacggcaacggcgucuggaucggccgcaccaaguccaucuccucccgcaacggcuucgagaugaucugggaccccaacggcuggaccggcaccgacaacaacuucuccaucaagcaggacaucgucggcaucaacgagugguccggcuacuccggcuccuucguccagcaccccgagcucaccggccucgacugcauccgccccugcuucugggucgagcucauccgcggccgccccaaggagaacaccaucuggaccuccggcuccuccaucuccuucugcggcgucaacuccgacaccgucggcugguccuggcccgacggcgccgagcuccccuucaccaucgacaaguga

SEQ ID NO: 114251 - RNA, 1410 nt, Artificial Sequence; identical to SEQ ID NO: 112774
  derived and/or modified CDS sequence (opt2) from neuraminidase__InfluenzaA__ADD25308

SEQ ID NO: 114252 - RNA, 1410 nt, Artificial Sequence; identical to SEQ ID NO: 112774
  derived and/or modified CDS sequence (opt2) from neuraminidase__InfluenzaA__ADD25310

SEQ ID NO: 114253 - RNA, 1410 nt, Artificial Sequence; identical to SEQ ID NO: 112774
  derived and/or modified CDS sequence (opt2) from neuraminidase__InfluenzaA__ADD25312

SEQ ID NO: 114254 - RNA, 1410 nt, Artificial Sequence; identical to SEQ ID NO: 112774
  derived and/or modified CDS sequence (opt2) from neuraminidase__InfluenzaA__ADD25314

SEQ ID NO: 114255 - RNA, 1410 nt, Artificial Sequence; identical to SEQ ID NO: 112774
  derived and/or modified CDS sequence (opt2) from neuraminidase__InfluenzaA__ADD25316

SEQ ID NO: 114256 - RNA, 1410 nt, Artificial Sequence; identical to SEQ ID NO: 112774
  derived and/or modified CDS sequence (opt2) from neuraminidase__InfluenzaA__ADD29799

SEQ ID NO: 114257 - RNA, 1410 nt, Artificial Sequence; identical to SEQ ID NO: 112774
  derived and/or modified CDS sequence (opt2) from neuraminidase__InfluenzaA__ADD29800

SEQ ID NO: 114258 - RNA, 1410 nt, Artificial Sequence; identical to SEQ ID NO: 112774
  derived and/or modified CDS sequence (opt2) from neuraminidase__InfluenzaA__ADD29801

SEQ ID NO: 114259 - RNA, 1410 nt, Artificial Sequence; identical to SEQ ID NO: 112774
  derived and/or modified CDS sequence (opt2) from neuraminidase__InfluenzaA__ADD29802

SEQ ID NO: 114260 - RNA, 1410 nt, Artificial Sequence; identical to SEQ ID NO: 112774
  derived and/or modified CDS sequence (opt2) from neuraminidase__InfluenzaA__ADD29803

SEQ ID NO: 114261 - RNA, 1410 nt, Artificial Sequence; identical to SEQ ID NO: 112774
  derived and/or modified CDS sequence (opt2) from neuraminidase__InfluenzaA__ADD29804

SEQ ID NO: 114262 - RNA, 1410 nt, Artificial Sequence; identical to SEQ ID NO: 112774
  derived and/or modified CDS sequence (opt2) from neuraminidase__InfluenzaA__ADD29805

SEQ ID NO: 114263 - RNA, 1410 nt, Artificial Sequence; identical to SEQ ID NO: 112774
  derived and/or modified CDS sequence (opt2) from neuraminidase__InfluenzaA__ADD29806

SEQ ID NO: 114264 - RNA, 1410 nt, Artificial Sequence; identical to SEQ ID NO: 112774
  derived and/or modified CDS sequence (opt2) from neuraminidase__InfluenzaA__ADD29807

SEQ ID NO: 114265 - RNA, 1410 nt, Artificial Sequence; identical to SEQ ID NO: 112774
  derived and/or modified CDS sequence (opt2) from neuraminidase__InfluenzaA__ADD29808

SEQ ID NO: 114266 - RNA, 1410 nt, Artificial Sequence; identical to SEQ ID NO: 112774
  derived and/or modified CDS sequence (opt2) from neuraminidase__InfluenzaA__ADD52538

SEQ ID NO: 114267 - RNA, 1410 nt, Artificial Sequence; identical to SEQ ID NO: 113997
  derived and/or modified CDS sequence (opt2) from neuraminidase__InfluenzaA__ADD74353

SEQ ID NO: 114268 - RNA, 1410 nt, Artificial Sequence; identical to SEQ ID NO: 112774
  derived and/or modified CDS sequence (opt2) from neuraminidase__InfluenzaA__ADD74373

SEQ ID NO: 114269 - RNA, 1410 nt, Artificial Sequence; identical to SEQ ID NO: 112774
  derived and/or modified CDS sequence (opt2) from neuraminidase__InfluenzaA__ADD74383

SEQ ID NO: 114270 - RNA, 1410 nt, Artificial Sequence; identical to SEQ ID NO: 112774
  derived and/or modified CDS sequence (opt2) from neuraminidase__InfluenzaA__ADD74401

SEQ ID NO: 114271 - RNA, 1410 nt, Artificial Sequence
  derived and/or modified CDS sequence (opt2) from neuraminidase__InfluenzaA__ADD74411
augaaccccaaccagaagaucaucaccaucggcuccgucugcaugaccaucggcauggccaaccucauccuccagaucggcaacaucaucuccaucuggaucucccacuccauccagcucggcaaccagaaccagaucgagaccugcaaccaguccgucaucaccuacgagaacaacaccugggucaaccagaccuacgucaacaucuccaacaccaacgucgccgccggccaguccgucgucuccgucaagcucgccggcaacuccucccucugccccgucuccggcugggccaucuacuccaaggacaacuccauccgcaucggcuccaagggcgacgucuucgucauccgcgagcccuucaucuccugcuccccccucgagugccgcaccuucuuccucacccagggcgcccuccucaacgacaagcacuccaacggcaccaucaaggaccgcucccccuaccgcacccucauguccugccccaucggcgagguccccucccccuacaacucccgcuucgaguccgucgccugguccgccuccgccugccacgacggcaucaacuggcucaccaucggcaucuccggccccgacaacggcgccgucgccguccucaaguacaacggcaucaucaccgacaccaucaaguccuggcgcaacaacauccuccgcacccaggaguccgagugcgccugcgucaacggcuccugcuucaccgucaugaccgacggccccuccgacggccaggccuccuacaagaucuuccgcaucgagaagggcaagaucgucaaguccgucgagaugaacgcccccaacuaccacuacgaggagugcuccugcuaccccgacuccuccgagaucaccugcgucugccgcgacaacuggcacggcuccaaccgccccugggucuccuucaaccagaaccucgaguaccagaucggcuacaucugcuccggcaucuucggcgacaacccccgccccaacgacaagaccggcuccugcggccccgucuccuccaacggcgccaacggcgucaagggcuucuccuucaaguacggcuccggcgucuggaucggccgcaccaaguccaucuccucccgcuccggcuucgagaugaucugggaccccaacggcuggaccggcaccgacaacaacuucuccaucaagcaggacaucgucggcaucaacgagugguccggcuacuccggcuccuucguccagcaccccgagcucaccggccucgacugcauccgccccugcuucugggucgagcucauccgcggccgccccaaggagaacaccaucuggaccuccggcuccuccaucuccuucugcggcgucaacuccgacaccgucggcugguccuggcccgacggcgccgagcuccccuucaccaucgacaaguga

SEQ ID NO: 114272 - RNA, 1410 nt, Artificial Sequence; identical to SEQ ID NO: 112774
  derived and/or modified CDS sequence (opt2) from neuraminidase__InfluenzaA__ADD74421

SEQ ID NO: 114273 - RNA, 1410 nt, Artificial Sequence; identical to SEQ ID NO: 112774
  derived and/or modified CDS sequence (opt2) from neuraminidase__InfluenzaA__ADD74431

SEQ ID NO: 114274 - RNA, 1410 nt, Artificial Sequence
  derived and/or modified CDS sequence (opt2) from neuraminidase__InfluenzaA__ADD74441
augaaccccaaccagaagaucaucaccaucggcuccgucugcaugaccaucggcauggccaaccucauccuccagaucggcaacaucaucuccaucuggaucucccacuccauccagcucggcaaccagaaccagaucgagaccugcaaccaguccgucaucaccuacgagaacaacaccugggucaaccagaccuacgucaacaucuccaacaccaacuucgccgccggccaguccgucgucuccgucaagcucgccggcaacuccucccucugccccgucuccggcugggccaucuacuccaaggacaacuccauccgcaucggcuccaagggcgacgucuucgucauccgcgagcccuucaucuccugcuccccccucgagugccgcaccuucuuccucacccagggcgcccuccucaacgacaagcacuccaacggcaccaucaaggaccgcucccccuaccgcacccucauguccugccccaucggcgagguccccucccccuacaacucccgcuucgaguccgucgccugguccgccuccgccugccacgacggcaucaacuggcucaccaucggcaucuccggccccgacaacggcgccgucgccguccucaaguacaacggcaucaucaccgacaccaucaaguccuggcgcaacaacauccuccgcacccaggaguccgagugcgccugcgucaacggcuccugcuucaccgucaugaccgacggccccuccgacggccaggccuccuacaagaucuuccgcaucgagaagggcaagaucgucaaguccgucgagaugaacgcccccaacuaccacuacgaggagugcuccugcuaccccgacuccuccgagaucaccugcgucugccgcgacaacuggcacggcuccaaccgccccugggucuccuucaaccagaaccucgaguaccagaucggcuacaucugcuccggcaucuucggcgacaacccccgccccaacgacaagaccggcuccugcggccccgucuccuccaacggcgccaacggcgucaagggcuucuccuucaaguacggcaacggcgucuggaucggccgcaccaaguccaucuccucccgcaacggcuucgagaugaucugggaccccaacggcuggaccggcaccgacaacaucuucuccaucaagcaggacaucgucggcaucaacgagugguccggcuacuccggcuccuucguccagcaccccgagcucaccggccucgacugcauccgccccugcuucugggucgagcucauccgcggccgccccaaggagaacaccaucuggaccuccggcuccuccaucuccuucugcggcgucaacuccgacaccgucggcugguccuggcccgacggcgccgagcuccccuucaccaucgacaaguga

SEQ ID NO: 114275 - RNA, 1410 nt, Artificial Sequence; identical to SEQ ID NO: 112774
  derived and/or modified CDS sequence (opt2) from neuraminidase__InfluenzaA__ADD74451

SEQ ID NO: 114276 - RNA, 1410 nt, Artificial Sequence; identical to SEQ ID NO: 112774
  derived and/or modified CDS sequence (opt2) from neuraminidase__InfluenzaA__ADD74461

SEQ ID NO: 114277 - RNA, 1410 nt, Artificial Sequence; identical to SEQ ID NO: 112774
  derived and/or modified CDS sequence (opt2) from neuraminidase__InfluenzaA__ADD74471

SEQ ID NO: 114278 - RNA, 1410 nt, Artificial Sequence; identical to SEQ ID NO: 112774
  derived and/or modified CDS sequence (opt2) from neuraminidase__InfluenzaA__ADD74481

SEQ ID NO: 114279 - RNA, 1410 nt, Artificial Sequence; identical to SEQ ID NO: 113791
  derived and/or modified CDS sequence (opt2) from neuraminidase__InfluenzaA__ADD74491

SEQ ID NO: 114280 - RNA, 1410 nt, Artificial Sequence; identical to SEQ ID NO: 112774
  derived and/or modified CDS sequence (opt2) from neuraminidase__InfluenzaA__ADD74501

SEQ ID NO: 114281 - RNA, 1410 nt, Artificial Sequence; identical to SEQ ID NO: 112774
  derived and/or modified CDS sequence (opt2) from neuraminidase__InfluenzaA__ADD74511

SEQ ID NO: 114282 - RNA, 1410 nt, Artificial Sequence; identical to SEQ ID NO: 113792
  derived and/or modified CDS sequence (opt2) from neuraminidase__InfluenzaA__ADD74521

SEQ ID NO: 114283 - RNA, 1410 nt, Artificial Sequence; identical to SEQ ID NO: 112774
  derived and/or modified CDS sequence (opt2) from neuraminidase__InfluenzaA__ADD74531

SEQ ID NO: 114284 - RNA, 1410 nt, Artificial Sequence
  derived and/or modified CDS sequence (opt2) from neuraminidase__InfluenzaA__ADD74551
augaaccccaaccagaagaucaucaccaucggcuccgucugcaugaccaucggcauggccaaccucauccuccagaucggcaacaucaucuccaucuggaucucccacuccauccagcucggcaaccagaaccagaucgagaccugcaaccaguccgucaucaccuacgagaacaacaccugggucaaccagaccuacgucaacaucuccaacaccaacuucgccgccggccaguccgucgucuccgucaagcucgccggcaacuccucccucugccccgucuccggcugggccaucuacuccaaggacaacuccguccgcaucggcuccaagggcgacgucuucgucauccgcgagcccuucaucuccugcuccccccucgagugccgcaccuucuuccucacccagggcgcccuccucaacgacaagcacuccaacggcaccaucaaggaccgcucccccuaccgcacccucauguccugccccaucggcgagguccccucccccuacaacucccgcuucgaguccgucgccugguccgccuccgccugccacgacggcaucaacuggcucaccaucggcaucuccggccccgacuacggcgccgucgccguccucaaguacaacggcaucaucaccgacaccaucaaguccuggcgcaacaacauccuccgcacccaggaguccgagugcgccugcgucaacggcuccugcuucaccgucaugaccgacggccccuccgacggccaggccuccuacaagaucuuccgcaucgagaagggcaagaucgucaaguccgucgagaugaacgcccccaacuaccacuacgaggagugcuccugcuaccccgacuccuccgagaucaccugcgucugccgcgacaacuggcacggcuccaaccgccccugggucuccuucaaccagaaccucgaguaccagaucggcuacaucugcuccggcaucuucggcgacaacccccgccccaacgacaagaccggcuccugcggccccgucuccuccaacggcgccaacggcgucaagggcuucuccuucaaguacggcaacggcgucuggaucggccgcaccaaguccaucuccucccgcaacggcuucgagaugaucugggaccccaacggcuggaccggcaccgacaacaacuucuccaucaagcaggacaucgucggcaucaacgagugguccggcuacuccggcuccuucguccagcaccccgagcucaccggccucgacugcauccgccccugcuucugggucgagcucauccgcggccgccccaaggagaacaccaucuggaccuccggcuccuccaucuccuucugcggcgucaacuccgacaccgucggcugguccuggcccgacggcgccgagcuccccuucaccaucgacaaguga

SEQ ID NO: 114285 - RNA, 1410 nt, Artificial Sequence; identical to SEQ ID NO: 112774
  derived and/or modified CDS sequence (opt2) from neuraminidase__InfluenzaA__ADD74561

SEQ ID NO: 114286 - RNA, 1410 nt, Artificial Sequence; identical to SEQ ID NO: 112774
  derived and/or modified CDS sequence (opt2) from neuraminidase__InfluenzaA__ADD74571

SEQ ID NO: 114287 - RNA, 1410 nt, Artificial Sequence
  derived and/or modified CDS sequence (opt2) from neuraminidase__InfluenzaA__ADD74581
augaaccccaaccagaagaucaucaccaucggcuccgucugcaugaccaucggcauggccaaccucauccuccagaucggcaacaucaucuccaucuggaucucccacuccauccagcucggcaaccagaaccagaucgagaccugcaaccaguccgucaucaccuacgagaacaacaccugggucaaccagaccuacgucaacaucuccaacaccaacuucgccgccggccaguccgucgucuccgucaagcucgccggcaacuccucccucugccccgucuccggcugggccaucuacuccaaggacaacuccauccgcaucggcuccaagggcgacgucuucgucauccgcgagcccuucaucuccugcuccccccucgagugccgcaccuucuuccucacccagggcgcccuccucaacgacaagcacuccaacggcaccaucaaggaccgcucccccuaccgcacccucauguccugccccaucggcgagguccccucccccuacaacucccgcuucgaguccgucgccugguccgccuccgccugccacgacggcaucaacuggcucaccaucggcaucuccggccccgacaacggcgccgucgccguccucaaguacaacggcaucaucaccgacaccaucaaguccuggcgcaacaacauccuccgcacccaggaguccgagugcgccugcgucaacggcuccugcuucaccgucaugaccgacggccccuccgacggccaggccuccuacaagaucuuccgcaucgagaagggcaagaucgucaaguccgucgagaugaacgcccccaacuaccacuacgaggagugcuccugcuaccccgacuccuccgagaucaccugcgucugccgcgacaacuggcacggcuccaaccgccccugggucuccuucaaccagaaccucgaguaccagaucggcuacaucugcuccggcaucuucggcgacaacccccgccccaacgacaagaccggcuccugcggccccgucuccuccaacggcgccaacggcgucaagggcuucuccuucaaguacggcaacggcgucuggaucggccgcaccaaguccaucuccucccgcaacggcuucgagaugaucugggaccccaacggcuggaccggcaccgacaacaacuucuccaucaagcaggacaucgucggcaucaacgagugguccggcuacuccggcuccuucguccagcaccccgagcucaccggccucgacugcauccgccccugcuucugggucgagcucauccgcggccgccccaaggagaacaccaucuggaccuccggcuccuccaucuccuucugcggcgucaacuccgacgccgucggcugguccuggcccgacggcgccgagcuccccuucaccaucgacaaguga

SEQ ID NO: 114288 - RNA, 1410 nt, Artificial Sequence; identical to SEQ ID NO: 112774
  derived and/or modified CDS sequence (opt2) from neuraminidase__InfluenzaA__ADD74591

SEQ ID NO: 114289 - RNA, 1410 nt, Artificial Sequence; identical to SEQ ID NO: 112774
  derived and/or modified CDS sequence (opt2) from neuraminidase__InfluenzaA__ADD74601

SEQ ID NO: 114290 - RNA, 1410 nt, Artificial Sequence
  derived and/or modified CDS sequence (opt2) from neuraminidase__InfluenzaA__ADD74611
augaaccccaaccagaagaucaucaccaucggcuccgucugcaugaccaucggcauggccaaccucauccuccagaucggcaacaucaucuccaucuggaucucccacuccauccagcucggcaaccagaaccagaucgagaccugcaaccaguccgucaucaccuacgagaacaacaccugggucaaccagaccuacgucaacaucuccaacaccaacuucgccgccggccaguccgucgucuccgucaagcucgccggcaacuccucccucugccccgucuccggcugggccaucuacuccaaggacaacuccauccgcaucggcuccaagggcgacgucuucgucauccgcgagcccuucaucuccugcuccccccucgagugccgcaccuucuuccucacccagggcgcccuccucaacgacaagcacuccaacggcaccaucaaggaccgcucccccuaccgcacccucauguccugccccaucggcgagguccccucccccuacaacucccgcuucgaguccgucgccugguccgccuccgccugccacgacggcaucaacuggcucaccaucggcaucuccggccccgacaacggcgccgucgccguccucaaguacaacggcaucaucaccgacaccaucaaguccuggcgcaacaacauccuccgcacccaggaguccgagugcgccugcgucaacggcuccugcuucaccgucaugaccgacggccccuccgacggccaggccuccuacaagaucuuccgcaucgagaagggcaagaucgucaaguccgucgagaugaacgcccccaacuaccacuacgaggagugcuccugcuaccccgacuccuccgagaucaccugcgucugccgcgacaacuggcacggcuccaaccgccccugggucuccuucaaccagaaccucgaguaccagaucggcuacaucugcuccggcaucuucggcgacaacccccgccccaacgacaagaccggcuccugcggccccgucuccuccaacggcgccaacggcaucaagggcuucuccuucaaguacggcaacggcgucuggaucggccgcaccaaguccaucuccucccgcaacggcuucgagaugaucugggaccccaacggcuggaccggcaccgacaacaacuucuccaucaagcaggacaucgucggcaucaacgagugguccggcuacuccggcuccuucguccagcaccccgagcucaccggccucgacugcauccgccccugcuucugggucgagcucauccgcggccgccccaaggagaacaccaucuggaccuccggcuccuccaucuccuucugcggcgucaacuccgacaccgucggcugguccuggcccgacggcgccgagcuccccuucaccaucgacaaguga

SEQ ID NO: 114291 - RNA, 1410 nt, Artificial Sequence; identical to SEQ ID NO: 112774
  derived and/or modified CDS sequence (opt2) from neuraminidase__InfluenzaA__ADD74621

SEQ ID NO: 114292 - RNA, 1410 nt, Artificial Sequence; identical to SEQ ID NO: 112774
  derived and/or modified CDS sequence (opt2) from neuraminidase__InfluenzaA__ADD74631

SEQ ID NO: 114293 - RNA, 1410 nt, Artificial Sequence; identical to SEQ ID NO: 112774
  derived and/or modified CDS sequence (opt2) from neuraminidase__InfluenzaA__ADD74641

SEQ ID NO: 114294 - RNA, 1410 nt, Artificial Sequence; identical to SEQ ID NO: 112774
  derived and/or modified CDS sequence (opt2) from neuraminidase__InfluenzaA__ADD74651

SEQ ID NO: 114295 - RNA, 1410 nt, Artificial Sequence; identical to SEQ ID NO: 114125
  derived and/or modified CDS sequence (opt2) from neuraminidase__InfluenzaA__ADD74661

SEQ ID NO: 114296 - RNA, 1410 nt, Artificial Sequence; identical to SEQ ID NO: 112774
  derived and/or modified CDS sequence (opt2) from neuraminidase__InfluenzaA__ADD74671

SEQ ID NO: 114297 - RNA, 1410 nt, Artificial Sequence; identical to SEQ ID NO: 112774
  derived and/or modified CDS sequence (opt2) from neuraminidase__InfluenzaA__ADD74681

SEQ ID NO: 114298 - RNA, 1410 nt, Artificial Sequence
  derived and/or modified CDS sequence (opt2) from neuraminidase__InfluenzaA__ADD74691
augaaccccaaccagaagaucaucaccaucggcuccgucugcaugaccaucggcauggccaaccucauccuccagaucggcaacaucaucuccaucuggaucugccacuccauccagcucggcaaccagaaccagaucgagaccugcaaccaguccgucaucaccuacgagaacaacaccugggucaaccagaccuacgucaacaucuccaacaccaacuucgccgccggccaguccgucgucuccgucaagcucgccggcaacuccucccucugccccgucuccggcugggccaucuacuccaaggacaacuccauccgcaucggcuccaagggcgacgucuucgucauccgcgagcccuucaucuccugcuccccccucgagugccgcaccuucuuccucacccagggcgcccuccucaacgacaagcacuccaacggcaccaucaaggaccgcucccccuaccgcacccucauguccugccccaucggcgagguccccucccccuacaacucccgcuucgaguccgucgccugguccgccuccgccugccacgacggcaucaacuggcucaccaucggcaucuccggccccgacaacggcgccgucgccguccucaaguacaacggcaucaucaccgacaccaucaaguccuggcgcaacaacauccuccgcacccaggaguccgagugcgccugcgucaacggcuccugcuucaccgucaugaccgacggccccuccgacggccaggccuccuacaagaucuuccgcaucgagaagggcaagaucgucaaguccgucgagaugaacgcccccaacuaccacuacgaggagugcuccugcuaccccgacuccuccgagaucaccugcgucugccgcgacaacuggcacggcuccaaccgccccugggucuccuucaaccagaaccucgaguaccagaucggcuacaucugcuccggcaucuucggcgacaacccccgccccaacgacaagaccggcuccugcggccccgucuccuccaacggcgccaacggcgucaagggcuucuccuucaaguacggcaacggcgucuggaucggccgcaccaaguccaucuccucccgcaacggcuucgagaugaucugggaccccaacggcuggaccggcaccgacaacaacuucuccaucaagcaggacaucgucggcaucaacgagugguccggcuacuccggcuccuucguccagcaccccgagcucaccggccucgacugcauccgccccugcuucugggucgagcucauccgcggccgccccaaggagaacaccaucuggaccuccggcuccuccaucuccuucugcggcgucaacuccgacaccgucggcugguccuggcccgacggcgccgagcuccccuucaccaucgacaaguga

SEQ ID NO: 114299 - RNA, 1410 nt, Artificial Sequence; identical to SEQ ID NO: 112774
  derived and/or modified CDS sequence (opt2) from neuraminidase__InfluenzaA__ADD74701

SEQ ID NO: 114300 - RNA, 1410 nt, Artificial Sequence; identical to SEQ ID NO: 112774
  derived and/or modified CDS sequence (opt2) from neuraminidase__InfluenzaA__ADD74711

SEQ ID NO: 114301 - RNA, 1410 nt, Artificial Sequence; identical to SEQ ID NO: 112774
  derived and/or modified CDS sequence (opt2) from neuraminidase__InfluenzaA__ADD74721

SEQ ID NO: 114302 - RNA, 1410 nt, Artificial Sequence; identical to SEQ ID NO: 112774
  derived and/or modified CDS sequence (opt2) from neuraminidase__InfluenzaA__ADD74731

SEQ ID NO: 114303 - RNA, 1410 nt, Artificial Sequence
  derived and/or modified CDS sequence (opt2) from neuraminidase__InfluenzaA__ADD74741
augaaccccaaccagaagaucaucaccaucggcuccgucugcaucaccaucggcauggccaaccucauccuccagaucggcaacaucaucuccaucuggaucucccacuccauccagcucggcaaccagaaccagaucgagaccugcaaccaguccgucaucaccuacgagaacaacaccugggucaaccagaccuacgucaacaucuccaacaccaacuucgccgccggccaguccgucgucuccgucaagcucgccggcuccuccucccucugccccgucuccggcugggccaucuacuccaaggacaacuccauccgcaucggcuccaagggcgacgucuucgucauccgcgagcccuucaucuccugcuccccccucgagugccgcaccuucuuccucacccagggcgcccuccucaacgacaagcacuccaacggcaccaucaaggaccgcucccccuaccgcacccucauguccugccccaucggcgagguccccucccccuacaacucccgcuucgaguccgucgccugguccgccuccgccugccacgacggcaucaacuggcucaccaucggcaucuccggccccgacaacggcgccgucgccguccucaaguacaacggcaucaucaccgacaccaucaaguccuggcgcaacaacauccuccgcacccaggaguccgagugcgccugcgucaacggcuccugcuucaccgucaugaccgacggccccuccgacggccaggccuccuacaagaucuuccgcaucgagaagggcaagaucgucaaguccgucgagaugaacgcccccaacuaccacuacgaggagugcuccugcuaccccgacuccuccgagaucaccugcgucugccgcgacaacuggcacggcuccaaccgccccugggucuccuucaaccagaaccucgaguaccagaucggcuacaucugcuccggcaucuucggcgacaacccccgccccaacgacaagaagggcuccugcggccccgucuccuccaacggcgccaacggcgucaagggcuucuccuucaaguacggcaacggcgucuggaucggccgcaccaaguccaucuccucccgcaacggcuucgagaugaucugggaccccaacggcuggaccggcaccgacaacaacuucuccaucaagcaggacaucgucggcaucaacgagugguccggcuacuccggcuccuucguccagcaccccgagcucaccggccucgacugcauccgccccugcuucugggucgagcucauccgcggccgccccaaggagaacaccaucuggaccuccggcuccuccaucuccuucugcggcgucaacuccgacaccgucggcugguccuggcccgacggcgccgagcuccccuucaccaucgacaaguga

SEQ ID NO: 114304 - RNA, 1410 nt, Artificial Sequence
  derived and/or modified CDS sequence (opt2) from neuraminidase__InfluenzaA__ADD74751
augaaccccaaccagaagaucaucaccaucggcuccgucugcaugaccaucggcauggccaaccucauccuccagaucggcaacaucaucuccaucuggaucucccacuccauccagcucggcaacaagaaccagaucgagaccugcaaccaguccgucaucaccuacgagaacaacaccugggucaaccagaccuacgucaacaucuccaacaccaacuucgccgccggccaguccgucgucuccgucaagcucgccggcaacuccucccucugccccgucuccggcugggccaucuacuccaaggacaacuccauccgcaucggcuccaagggcgacgucuucgucauccgcgagcccuucaucuccugcuccccccucgagugccgcaccuucuuccucacccagggcgcccuccucaacgacaagcacuccaacggcaccaucaaggaccgcucccccuaccgcacccucauguccugccccaucggcgagguccccucccccuacaacucccgcuucgaguccgucgccugguccgccuccgccugccacgacggcaucaacuggcucaccaucggcaucuccggccccgacaacggcgccgucgccguccucaaguacaacggcaucaucaccgacaccaucaaguccuggcgcaacaacauccuccgcacccaggaguccgagugcgccugcgucaacggcuccugcuucaccgucaugaccgacggccccuccgacggccaggccuccuacaagaucuuccgcaucgagaagggcaagaucgucaaguccgucgagaugaacgcccccaacuaccacuacgaggagugcuccugcuaccccgacuccuccgagaucaccugcgucugccgcgacaacuggcacggcuccaaccgccccugggucuccuucaaccagaaccucaaguaccagaucggcuacaucugcuccggcaucuucggcgacaacccccgccccaacgacaagaagggcuccugcggccccgucuccuccaacggcgccaacggcgucaagggcuucuccuucaaguacggcaacggcgucuggaucggccgcaccaaguccaucuccucccgcaacggcuucgagaugaucugggaccccaacggcuggaccggcaccgacaacaacuucuccaucaagcaggacaucgucggcaugaacgagugguccggcuacuccggcuccuucguccagcaccccgagcucaccggccucgacugcauccgccccugcuucugggucgagcucauccgcggccgccccaaggagaacaccaucuggaccuccggcuccuccaucuccuucugcggcgucaacuccgacaccgucggcugguccuggcccgacggcgccgagcuccccuucaccaucgacaaguga

SEQ ID NO: 114305 - RNA, 1410 nt, Artificial Sequence
  derived and/or modified CDS sequence (opt2) from neuraminidase__InfluenzaA__ADD74761
augaaccccaaccagaagaucaucaccaucggcuccgucugcaugaccaucggcauggccaaccucauccuccagaucggcaacaucaucuccaucuggaucucccacuccauccagcucggcaaccagaaccagaucgagaccugcaaccaguccgucaucaccuacgagaacaacaccugggucaaccagaccuacgucaacaucuccaacaccaacuucgccgccggccaguccgucgucuccgucaagcucgccggcaacuccucccucugccccgucuccggcugggccaucuacuccaaggacaacuccauccgcaucggcuccaagggcgacgucuucgucauccgcgagcccuucaucuccugcuccccccucgagugccgcaccuucuuccucacccagggcgcccuccucaacgacaagcacuccaacggcaccaucaaggaccgcucccccuaccgcacccucauguccugccccaucggcgagguccccucccccuacaacucccgcuucgaguccgucgccugguccgccuccgccugccacgacggcaucaacuggcucaccaucggcaucuccggccccgacaacggcgccgucgccguccucaaguacaacggcaucaucaccgacaccaucaaguccuggcgcaacaacauccuccgcacccaggaguccgagugcgccugcgucaacggcuccugcuucaccgucaugaccgacggccccuccgacggccaggccuccuacaagaucuuccgcaucgagaagggcaagaucgucaaguccgucgagaugaacgcccccaacuaccacuacgaggagugcuccugcuaccccgacuccuccgagaucaccugcgucugccgcgacaacuggcacggcuccaaccgccccugggucuccuucaaccagaaccucgaguaccagaucggcuacaucugcuccggcaucuucggcgacaacccccgccccaacgacaagaccggcuccugcggccccgucuccuccaacggcgccaacggcgucaagggcuucuccuucaaguacggcaacggcgucuggaucggccgcaccaaguccaucuccucccgcaacggcuucgagaugaucugggaccccaacggcuggaccggcaccgacaacaacuucuccaucaagcaggacaucgucggcaucaacgagugguccggcuacuccggcuccuucguccagcaccccgagcucaccggccucgacugcauccgccccugcuucugggucgagcucauccgcggccgccccaaggagaacaccaucuggaccuccggcuccuccaucuccuucugcggcaucaacuccgacaccgucggcugguccuggcccgacggcgccgagcuccccuucaccaucgacaaguga

SEQ ID NO: 114306 - RNA, 1410 nt, Artificial Sequence; identical to SEQ ID NO: 112774
  derived and/or modified CDS sequence (opt2) from neuraminidase__InfluenzaA__ADD74791

SEQ ID NO: 114307 - RNA, 1410 nt, Artificial Sequence; identical to SEQ ID NO: 113357
  derived and/or modified CDS sequence (opt2) from neuraminidase__InfluenzaA__ADD74811

SEQ ID NO: 114308 - RNA, 1410 nt, Artificial Sequence; identical to SEQ ID NO: 112774
  derived and/or modified CDS sequence (opt2) from neuraminidase__InfluenzaA__ADD74821

SEQ ID NO: 114309 - RNA, 1410 nt, Artificial Sequence
  derived and/or modified CDS sequence (opt2) from neuraminidase__InfluenzaA__ADD74831
augaaccccaaccagaagaucaucaccaucggcuccaucugcaugaccaucggcauggccaaccucauccuccagaucggcaacaucaucuccaucuggaucucccacuccauccagcucggcaaccagaaccagaucgagaccugcaaccaguccgucaucaccuacgagaacaacaccugggucaaccagaccuacgucaacaucuccaacaccaacuucgccgccggccaguccgucgucuccgucaagcucgccggcaacuccucccucugccccgucuccggcugggccaucuacuccaaggacaacuccauccgcaucggcuccaagggcgacgucuucgucauccgcgagcccuucaucuccugcuccccccucgagugccgcaccuucuuccucacccagggcgcccuccucaacgacaagcacuccaacggcaccaucaaggaccgcucccccuaccgcacccucauguccugccccaucggcgagguccccucccccuacaacucccgcuucgaguccgucgccugguccgccuccgccugccacgacggcaucaacuggcucaccaucggcaucuccggccccgacaacggcgccgucgccguccucaaguacaacggcaucaucaccgacaccaucaaguccuggcgcaacaacauccuccgcacccaggaguccgagugcgccugccucaacggcuccugcuucaccgucaugaccgacggccccuccgacggccaggccuccuacaagaucuuccgcaucgagaagggcaagaucgucaaguccgucgagaugaacgcccccaacuaccacuacgaggagugcuccugcuaccccgacuccuccgagaucaccugcgucugccgcgacaacuggcacggcuccaaccgccccugggucuccuucaaccagaaccucgaguaccagaucggcuacaucugcuccggcaucuucggcgacaacccccgccccaacgacaagaccggcuccugcggccccgucuccuccaacggcgccaacggcgucaagggcuucuccuucaaguacggcaacggcgucuggaucggccgcaccaaguccaucuccucccgcaacggcuucgagaugaucugggaccccaacggcuggaccggcaccgacaacaacuucuccaucaagcaggacaucgucggcaucaacgagugguccggcuacuccggcuccuucguccagcaccccgagcucaccggccucgacugcauccgccccugcuucugggucgagcucauccgcggccgccccaaggagaacaccaucuggaccuccggcuccuccaucuccuucugcggcgucaacuccgacaccgucggcugguccuggcccgacggcgccgagcuccccuucaccaucgacaaguga

SEQ ID NO: 114310 - RNA, 1410 nt, Artificial Sequence; identical to SEQ ID NO: 112774
  derived and/or modified CDS sequence (opt2) from neuraminidase__InfluenzaA__ADD74841

SEQ ID NO: 114311 - RNA, 1410 nt, Artificial Sequence; identical to SEQ ID NO: 112774
  derived and/or modified CDS sequence (opt2) from neuraminidase__InfluenzaA__ADD74851

SEQ ID NO: 114312 - RNA, 1410 nt, Artificial Sequence; identical to SEQ ID NO: 113881
  derived and/or modified CDS sequence (opt2) from neuraminidase__InfluenzaA__ADD74861

SEQ ID NO: 114313 - RNA, 1410 nt, Artificial Sequence; identical to SEQ ID NO: 112774
  derived and/or modified CDS sequence (opt2) from neuraminidase__InfluenzaA__ADD74871

SEQ ID NO: 114314 - RNA, 1410 nt, Artificial Sequence; identical to SEQ ID NO: 112774
  derived and/or modified CDS sequence (opt2) from neuraminidase__InfluenzaA__ADD74881

SEQ ID NO: 114315 - RNA, 1410 nt, Artificial Sequence; identical to SEQ ID NO: 112774
  derived and/or modified CDS sequence (opt2) from neuraminidase__InfluenzaA__ADD74891

SEQ ID NO: 114316 - RNA, 1410 nt, Artificial Sequence; identical to SEQ ID NO: 112774
  derived and/or modified CDS sequence (opt2) from neuraminidase__InfluenzaA__ADD74901

SEQ ID NO: 114317 - RNA, 1410 nt, Artificial Sequence; identical to SEQ ID NO: 112774
  derived and/or modified CDS sequence (opt2) from neuraminidase__InfluenzaA__ADD74911

SEQ ID NO: 114318 - RNA, 1410 nt, Artificial Sequence; identical to SEQ ID NO: 112774
  derived and/or modified CDS sequence (opt2) from neuraminidase__InfluenzaA__ADD74921

SEQ ID NO: 114319 - RNA, 1410 nt, Artificial Sequence; identical to SEQ ID NO: 112774
  derived and/or modified CDS sequence (opt2) from neuraminidase__InfluenzaA__ADD74941

SEQ ID NO: 114320 - RNA, 1410 nt, Artificial Sequence
  derived and/or modified CDS sequence (opt2) from neuraminidase__InfluenzaA__ADD74961
augaaccccaaccagaagaucaucaccaucggcuccgucugcaugaccaucggcauggccaaccucauccuccagaucggcaacaucaucuccaucuggaucucccacuccauccagcucggcaaccagaaccagaucggcaccugcaaccaguccgucaucaccuacgagaacaacaccugggucaaccacaccuacgucaacaucuccaacaccaacuucgccgccggccaguccgucgucuccgucaagcucgccggcaacuccucccucugccccgucuccggcugggccaucuacuccaaggacaacuccguccgcaucggcuccaagggcgacgucuucgucauccgcgagcccuucaucuccugcuccccccucgagugccgcaccuucuuccucacccagggcgcccuccucaacgacaagcacuccaacggcaccaucaaggaccgcucccccuaccgcacccucauguccugccccaucggcgagguccccucccccuacaacucccgcuucgaguccgucgccugguccgccuccgccugccacgacggcaucaacuggcucaccaucggcaucuccggccccgacaacggcgccgucgccguccucaaguacaacggcaucaucaccgacaccaucaaguccuggcgcaacaacauccuccgcacccaggaguccgagugcgccugcgucaacggcuccugcuucaccgucaugaccgacggccccuccgacggccaggccuccuacaagaucuuccgcaucgagaagggcaagaucgucaaguccgucgagaugaacgcccccaacuaccacuacgaggagugcuccugcuaccccgacuccuccgagaucaccugcgucugccgcgacaacuggcacggcuccaaccgccccugggucuccuucaaccagaaccucgaguaccagaucggcuacaucugcuccggcaucuucggcgacaacccccgccccaacgacaagaccggcuccugcggccccgucuccuccaacggcgccaacggcgucaagggcuucuccuucaaguacggcaacggcgucuggaucggccgcaccaaguccaucuccucccgcaacggcuucgagaugaucugggaccccaacggcuggaccggcaccgacaacaacuucuccaucaagcaggacaucgucggcaucaacgagugguccggcuacuccggcuccuucguccagcaccccgagcucaccggccucgacugcauccgccccugcuucugggucgagcucauccgcggccgccccaaggagaacaccaucuggaccuccggcuccuccaucuccuucugcggcgucaacuccgacaccgucggcugguccuggcccgacggcgccgagcuccccuucaccaucgacaaguga

SEQ ID NO: 114321 - RNA, 1410 nt, Artificial Sequence; identical to SEQ ID NO: 112774
  derived and/or modified CDS sequence (opt2) from neuraminidase__InfluenzaA__ADD74971

SEQ ID NO: 114322 - RNA, 1410 nt, Artificial Sequence
  derived and/or modified CDS sequence (opt2) from neuraminidase__InfluenzaA__ADD74981
augaaccccaaccagaagaucaucaccaucggcuccgucugcaugaccaucggcauggccaaccucauccuccagaucggcaacaucaucuccaucuggaucucccacuccauccagcucggcaaccagaaccagaucgagaccugcaaccaguccaucaucaccuacgagaacaacaccugggucaaccagaccuacgucaacaucuccaacaccaacuucgccgccggccaguccgucgucuccgucaagcucgccggcaacuccucccucugccccgucuccggcugggccaucuacuccaaggacaacuccauccgcaucggcuccaagggcgacgucuucgucauccgcgagcccuucaucuccugcuccccccucgagugccgcaccuucuuccucacccagggcgcccuccucaacgacaagcacuccaacggcaccaucaaggaccgcucccccuaccgcacccucauguccugccccaucggcgagguccccucccccuacaacucccgcuucgaguccgucgccugguccgccuccgccugccacgacggcaucaacuggcucaccaucggcaucuccggccccgacaacggcgccgucgccguccucaaguacaacggcaucaucaccgacaccaucaaguccuggcgcaacaacauccuccgcacccaggaguccgagugcgccugcgucaacggcuccugcuucaccgucaugaccgacggccccuccgacggccaggccuccuacaagaucuuccgcaucgagaagggcaagaucgucaaguccgucgagaugaacgcccccaacuaccacuacgaggagugcuccugcuaccccgacuccuccgagaucaccugcgucugccgcgacaacuggcacggcuccaaccgccccugggucuccuucaaccagaaccucgaguaccagaucggcuacaucugcuccggcaucuucggcgacaacccccgccccaacgacaagaccggcuccugcggccccgucuccuccaacggcgccaacggcgucaagggcuucuccuucaaguacggcaacggcgucuggaucggccgcaccaaguccaucuccucccgcuccggcuucgagaugaucugggaccccaacggcuggaccggcaccgacaacaacuucuccaucaagcaggacaucgucggcaucaacgagugguccggcuacuccggcuccuucguccagcaccccgagcucaccggccucgacugcauccgccccugcuucugggucgagcucauccgcggccgccccgaggagaacaccaucuggaccuccggcuccuccaucuccuucugcggcgucaacuccgacaccgucggcugguccuggcccgacggcgccgagcuccccuucaccaucgacaaguga

SEQ ID NO: 114323 - RNA, 1410 nt, Artificial Sequence; identical to SEQ ID NO: 112774
  derived and/or modified CDS sequence (opt2) from neuraminidase__InfluenzaA__ADD74991

SEQ ID NO: 114324 - RNA, 1410 nt, Artificial Sequence; identical to SEQ ID NO: 112774
  derived and/or modified CDS sequence (opt2) from neuraminidase__InfluenzaA__ADD75001

SEQ ID NO: 114325 - RNA, 1410 nt, Artificial Sequence
  derived and/or modified CDS sequence (opt2) from neuraminidase__InfluenzaA__ADD75011
augaaccccaaccagaagaucaucaccaucggcuccgucugcaugaccaucggcauggccaaccucauccuccagaucggcaacaucaucuccaucuggaucucccacuccauccagcucggcaaccagaaccagaucgagaccugcaaccaguccgucaucaccuacgagaacaacaccugggucaaccagaccuacgucaacaucuccaacaccaacuucgccgccggccaguccgucgucuccgucaagcucgccggcaacuccucccucugccccgucuccggcugggccaucuacuccaaggacaacuccauccgcaucggcuccaagggcgacgucuucgucauccgcgagcccuucaucuccugcuccccccucgagugccgcaccuucuuccucacccagggcgcccuccucaacgacaagcacuccaacggcaccaucaaggaccgcucccccuaccgcacccucauguccugccccaucggcgagguccccucccccuacaacucccgcuucgaguccgucgccugguccgccuccgccugccacgacggcaucaacuggcucaccaucggcaucuccggccccgacaacggcgccgucgccguccucaaguacaacggcaucaucaccgacaccaucaaguccuggcgcaacaacauccuccgcacccaggaguccgagugcgccugcgucaacggcuccugcuucaccgucaugaccgacggccccuccgacggccaggccuccuacaagaucuuccgcaucgagaagggcaagaucgucaaguccgucgagaugaacgcccccaacuaccacuacgaggagugcuccugcuaccccgacuccuccgagaucaccugcgucugccgcgacaacuggcacggcuccaaccgccccugggucuccuucaaccagaaccucgaguaccagaucggcuacaucugcuccggcaucuucggcgacaacccccgccccaacgacaagaccggcuccugcgaccccgucuccuccaacggcgccaacggcgucaagggcuucuccuucaaguacggcaacggcgucuggaucggccgcaccaaguccaucuccucccgcaacggcuucgagaugaucugggaccccaacggcuggaccggcaccgacaacaacuucuccaucaagcaggacaucgucggcaucaacgagugguccggcuacuccggcuccuucguccagcaccccgagcucaccggccucgacugcauccgccccugcuucugggucgagcucauccgcggccgccccaaggagaacaccaucuggaccuccggcuccuccaucuccuucugcggcgucaacuccgacaccgucggcugguccuggcccgacggcgccgagcuccccuucaccaucgacaaguga

SEQ ID NO: 114326 - RNA, 1410 nt, Artificial Sequence; identical to SEQ ID NO: 114062
  derived and/or modified CDS sequence (opt2) from neuraminidase__InfluenzaA__ADD75031

SEQ ID NO: 114327 - RNA, 1410 nt, Artificial Sequence
  derived and/or modified CDS sequence (opt2) from neuraminidase__InfluenzaA__ADD75041
augaaccccaaccagaagaucaucaccaucggcuccgucugcaugaccaucggcauggccaaccucauccuccagaucggcaacaucaucuccaucuggaucucccacuccauccagcucggcaaccagaaccagaucgagaccugcaaccaguccgucaucaccuacgagaacaagaccugggucaaccagaccuacgucaacaucuccaacaccaacuucgccgccggccaguccgucgucuccgucaagcucgccggcaacuccucccucugccccgucuccggcugggccaucuacuccaaggacaacuccauccgcaucggcuccaagggcgacgucuucgucauccgcgagcccuucaucuccugcuccccccucgagugccgcaccuucuuccucacccagggcgcccuccucaacgacaagcacuccaacggcaccaucaaggaccgcucccccuaccgcacccucauguccugccccaucggcgagguccccucccccuacaacucccgcuucgaguccgucgccugguccgccuccgccugccacgacggcaucaacuggcucaccaucggcaucuccggccccgacaacggcgccgucgccguccucaaguacaacggcaucaucaccgacaccaucaaguccuggcgcaacaacauccuccgcacccaggaguccgagugcgccugcgucaacggcuccugcuucaccgucaugaccgacggccccuccgacggccaggccuccuacaagaucuuccgcaucgagaagggcaagaucgucaaguccgucgagaugaacgcccccaacuaccacuacgaggagugcuccugcuaccccgacuccuccgagaucaccugcgucugccgcgacaacuggcacggcuccaaccgccccugggucuccuucaaccagaaccucgaguaccagaucggcuacaucugcuccggcaucuucggcgacaacccccgccccaacgacaagaccggcuccugcggccccgucuccuccaacggcgccaacggcgucaagggcuucuccuucaaguacggcaacggcgucuggaucggccgcaccaaguccaucuccucccgcaacggcuucgagaugaucugggaccccaacggcuggaccggcaccgacaacaacuucuccaucaagcaggacaucgucggcaucaacgagugguccggcuacuccggcuccuucguccagcaccccgagcucaccggccucgacugcauccgccccugcuucugggucgagcucauccgcggccgccccaaggagaacaccaucuggaccuccggcuccuccaucuccuucugcggcgucaacuccgacaccgucggcugguccuggcccgacggcgccgagcuccccuucaccaucgacaaguga

SEQ ID NO: 114328 - RNA, 1410 nt, Artificial Sequence; identical to SEQ ID NO: 112774
  derived and/or modified CDS sequence (opt2) from neuraminidase__InfluenzaA__ADD75051

SEQ ID NO: 114329 - RNA, 1410 nt, Artificial Sequence; identical to SEQ ID NO: 112774
  derived and/or modified CDS sequence (opt2) from neuraminidase__InfluenzaA__ADD75061

SEQ ID NO: 114330 - RNA, 1410 nt, Artificial Sequence; identical to SEQ ID NO: 112774
  derived and/or modified CDS sequence (opt2) from neuraminidase__InfluenzaA__ADD75071

SEQ ID NO: 114331 - RNA, 1410 nt, Artificial Sequence; identical to SEQ ID NO: 112774
  derived and/or modified CDS sequence (opt2) from neuraminidase__InfluenzaA__ADD75081

SEQ ID NO: 114332 - RNA, 1410 nt, Artificial Sequence
  derived and/or modified CDS sequence (opt2) from neuraminidase__InfluenzaA__ADD75091
augaaccccaaccagaagaucaucaccaucggcuccgucugcaugaccaucggcauggccaaccucauccuccagaucggcaacaucaucuccaucuggaucucccacuccauccagcucggcaaccagaaccagaucgagaccugcaaccaguccgucaucaccuacgagaacaacaccugggucaaccagaccuacgucaacaucuccaacaccaacuucgccgccggccaguccgucgucuccgucaagcucgccggcaacuccucccucugccccgucuccggcugggccaucuacuccaaggacaacuccauccgcaucggcuccaagggcgacgucuucgucauccgcgagcccuucaucuccugcuccccccucgagugccgcaccuucuuccucacccagggcgcccuccucaacgacaagcacuccaacggcaccaucaaggaccgcucccccuaccgcacccucauguccugccccaucggcgagguccccucccccuacaacucccgcuucgaguccgucgccugguccgccuccgccugccacgacggcaucaacuggcucaccaucggcaucuccggccccgacaacggcgccgucgccguccucaaguacaacggcaucaucaccgacaccaucaaguccuggcgcaacaacauccuccgcacccaggaguccgagugcgccugcgucaacggcuccugcuucaccgucaugaccgacggccccuccgacggccaggccuccuacaagaucuuccgcaucgagaagggcaagaucgucaaguccgucgagaugaacgcccccaacuaccacuacgaggagugcuccugcuaccccgacuccuccgagaucaccugcgucugccgcgacaacuggcacggcuccaaccgccccugggucuccuucaaccagaaccucgaguaccagaucggcuacaucugcuccggcaucuucggcgacaacccccgccccaacgacaagaccggcuccugcggccccgucuccuccaacggcgccaacggcgucaagggcuucuccuucaaguacggcaacggcgucuggaucggccgcaccaaguccaucuccucccgcuccggcuucgagaugaucugggaccccaacggcuggaccggcaccgacaacaacuucuccaucaagcaggacaucgucggcaucaacgagugguccggcuacuccggcuccuucguccagcaccccgagcucaccggccucgacugcauccgccccugcuucugggucgagcucauccgcggccgccccaaggagaacaccaucuggaccuccggcuccuccaucuccuucugcggcgucaacuccgacaccgucggcugguccuggcccgacggcgccgagcuccccuucaccaucgacaaguga

SEQ ID NO: 114333 - RNA, 1410 nt, Artificial Sequence; identical to SEQ ID NO: 112774
  derived and/or modified CDS sequence (opt2) from neuraminidase__InfluenzaA__ADD75101

SEQ ID NO: 114334 - RNA, 1410 nt, Artificial Sequence; identical to SEQ ID NO: 112774
  derived and/or modified CDS sequence (opt2) from neuraminidase__InfluenzaA__ADD75111

SEQ ID NO: 114335 - RNA, 1410 nt, Artificial Sequence; identical to SEQ ID NO: 112774
  derived and/or modified CDS sequence (opt2) from neuraminidase__InfluenzaA__ADD75121

SEQ ID NO: 114336 - RNA, 1410 nt, Artificial Sequence; identical to SEQ ID NO: 112774
  derived and/or modified CDS sequence (opt2) from neuraminidase__InfluenzaA__ADD75131

SEQ ID NO: 114337 - RNA, 1410 nt, Artificial Sequence; identical to SEQ ID NO: 112774
  derived and/or modified CDS sequence (opt2) from neuraminidase__InfluenzaA__ADD75141

SEQ ID NO: 114338 - RNA, 1410 nt, Artificial Sequence
  derived and/or modified CDS sequence (opt2) from neuraminidase__InfluenzaA__ADD75161
augaaccccaaccagaagaucaucaccaucggcuccgucugcaugaccaucggcauggccaaccucauccuccagaucggcaacaucaucuccaucuggaucucccacuccauccagcucggcaaccagaaccagaucgagaccugcaaccaguccgucaucaccuacgagaacaacaccugggucaaccagaccuacgucaacaucuccaacaccaacuucgccgccggccaguccgucgucuccgucaagcucgccggcaacuccucccucugccccgucuccggcugggccaucuacuccaaggacaacuccauccgcaucggcuccaagggcgacgucuucgucauccgcgagcccuucaucuccugcuccccccucgagugccgcaccuucuuccucacccagggcgcccuccucaacgacaagcacuccaacggcaccaucaaggaccgcuccuccuaccgcacccucauguccugccccaucggcgagguccccucccccuacaacucccgcuucgaguccgucgccugguccgccuccgccugccacgacggcaucaacuggcucaccaucggcaucuccggccccgacaacggcgccgucgccguccucaaguacaacggcaucaucaccgacaccaucaaguccuggcgcaacaacauccuccgcacccaggaguccgagugcgccugcgucaacggcuccugcuucaccgucaugaccgacggccccuccgacggccaggccuccuacaagaucuuccgcaucgagaagggcaagaucgucaaguccgucgagaugaacgcccccaacuaccacuacgaggagugcuccugcuaccccgacuccuccgagaucaccugcgucugccgcgacaacuggcacggcuccaaccgccccugggucuccuucaaccagaaccucgaguacaagaucggcuacaucugcuccggcaucuucggcgacaacccccgccccaacgacaagaccggcuccugcggccccgucuccuccaacggcgccaacggcgucaagggcuucuccuucaaguacggcaacggcgucuggaucggccgcaccaaguccaucuccucccgcaacggcuucgagaugaucugggaccccaacggcuggaccggcaccgacaacaacuucuccaucaagcaggacaucgucggcaucaacgagugguccggcuacuccggcuccuucguccagcaccccgagcucaccggccucgacugcauccgccccugcuucugggucgagcucauccgcggccgccccaaggagaacaccaucuggaccuccggcuccuccaucuccuucugcggcgucaacuccgacaccgucggcugguccuggcccgacggcgccgagcuccccuucaccaucgaccgcuga

SEQ ID NO: 114339 - RNA, 1410 nt, Artificial Sequence
  derived and/or modified CDS sequence (opt2) from neuraminidase__InfluenzaA__ADD84500
augaaccccaaccagaacaucaucaccaucggcuccgucugcaugaccaucggcauggccaaccucauccuccagaucggcaacaucaucuccaucuggaucucccacuccauccagcucggcaaccagaaccagaucgagaccugcaaccaguccgucaucaccuacgagaacaacaccugggucaaccagaccuacgucaacaucuccaacaccaacuucgccgccggccaguccgucgucuccgucaagcucgccggcaacuccucccucugccccgucuccggcugggccaucuacuccaaggacaacuccauccgcaucggcuccaagggcgacgucuucgucauccgcgagcccuucaucuccugcuccccccucgagugccgcaccuucuuccucacccagggcgcccuccucaacgacaagcacuccaacggcaccaucaaggaccgcucccccuaccgcacccucauguccugccccaucggcgagguccccucccccuacaacucccgcuucgaguccgucgccugguccgccuccgccugccacgacggcaucaacuggcucaccaucggcaucuccggccccgacaacggcgccgucgccguccucaaguacaacggcaucaucaccgacaccaucaaguccuggcgcaacaacauccuccgcacccaggaguccgagugcgccugcgucaacggcuccugcuucaucgucaugaccgacggccccuccgacggccaggccuccuacaagaucuuccgcaucgagaagggcaagaucgucaaguccgucgagaugaacgcccccaacuaccacuacgaggagugcuccugcuaccccgacuccuccgagaucaccugcgucugccgcgacaacuggcacggcuccaaccgccccugggucuccuucaaccagaaccucgaguaccagaucggcuacaucugcuccggcaucuucggcgacaacccccgccccaacgacaagaccggcuccugcggccccgucuccuccaacggcgccaacggcgucaagggcuucuccuucaaguacggcaacggcgucuggaucggccgcaccaaguccaucuccucccgcaacggcuucgagaugaucugggaccccaacggcuggaccggcaccgacaacaacuucuccaucaagcaggacaucgucggcaucaacgagugguccggcuacuccggcuccuucguccagcaccccgagcucaccggccucgacugcauccgccccugcuucugggucgagcucauccgcggccgccccaaggagaacaccaucuggaccuccggcuccuccaucuccuucugcggcgucaacuccgacaccgucggcugguccuggcccgacggcgccgagcuccccuucaccaucgacaaguga

SEQ ID NO: 114340 - RNA, 1410 nt, Artificial Sequence
  derived and/or modified CDS sequence (opt2) from neuraminidase__InfluenzaA__ADD84502
augaaccccaaccagaacaucaucaccaucggcuccgucugcaugaccaucggcauggccaaccucauccuccagaucggcaacaucaucuccaucuggaucucccacuccauccagcucggcaaccagaaccagaucgagaccugcaaccaguccgucaucaccuacgagaacaacaccugggucaaccagaccuacgucaacaucuccaacaccaacuucgccgccggccaguccgucgucuccgucaagcucgccggcaacuccucccucugccccgucuccggcugggccaucuacuccaaggacaacuccauccgcaucggcuccaagggcgacgucuucgucauccgcgagcccuucaucuccugcuccccccucgagugccgcaccuucuuccucacccagggcgcccuccucaacgacaagcacuccaacggcaccaucaaggaccgcucccccuaccgcacccucauguccugccccaucggcgagguccccucccccuacaacucccgcuucgaguccgucgccugguccgccuccgccugccacgacggcaucaacuggcucaccaucggcaucuccggccccgacaacggcgccgucgccguccucaaguacaacggcaucaucaccgacaccaucaaguccuggcgcaacaacauccuccgcacccaggaguccgagugcgccugcgucaacggcuccugcuucaccgucaugaccgacggccccuccgacggccaggccuccuacaagaucuuccgcaucgagaagggcaagaucgucaaguccgucgagaugaacgcccccaacuaccacuacgaggagugcuccugcuaccccgacuccuccgagaucaccugcgucugccgcgacaacuggcacggcuccaaccgccccugggucuccuucaaccagaaccucgaguaccagaucggcuacaucugcuccggcaucuucggcgacaacccccgccccaacgacaagaccggcuccugcggccccgucuccuccaacggcgccaacggcgucaagggcuucuccuucaaguacggcaacggcgucuggaucggccgcaccaaguccaucuccucccgcaacggcuucgagaugaucugggaccccaacggcuggaccggcaccgacaacaacuucuccaucaagcaggacaucgucggcaucaacgagugguccggcuacuccggcuccuucguccagcaccccgagcucaccggccucgacugcauccgccccugcuucugggucgagcucauccgcggccgccccaaggagaacaccaucuggaccuccggcuccuccaucuccuucugcggcgucaacuccgacaccgucggcugguccuggcccgacggcgccgagcuccccuucaccaucgacaaguga

SEQ ID NO: 114341 - RNA, 1410 nt, Artificial Sequence; identical to SEQ ID NO: 114340
  derived and/or modified CDS sequence (opt2) from neuraminidase__InfluenzaA__ADD84503

SEQ ID NO: 114342 - RNA, 1410 nt, Artificial Sequence
  derived and/or modified CDS sequence (opt2) from neuraminidase__InfluenzaA__ADD84504
augaaccccaaccagaacaucaucaccaucggcuccgucugcaugaccaucggcauggccaaccucauccuccagaucggcaacaucaucuccaucuggaucucccacuccauccagcucggcaaccagaaccagaucgagaccugcaaccaguccgucaucaccuacgagaacaacaccugggucaaccagaccuacgucaacaucuccaacaccaacuucgccgccggccaguccgucgucuccgucaagcucgccggcaacuucucccucugccccgucuccggcugggccaucuacuccaaggacaacuccauccgcaucggcuccaagggcgacgucuucgucauccgcgagcccuucaucuccugcuccccccucgagugccgcaccuucuuccucacccagggcgcccuccucaacgacaagcacuccaacggcaccaucaaggaccgcucccccuaccgcacccucauguccugccccaucggcgagguccccucccccuacaacucccgcuucgaguccgucgccugguccgccuccgccugccacgacggcaucaacuggcucaccaucggcaucuccggccccgacaacggcgccgucgccguccucaaguacaacggcaucaucaccgacaccaucaaguccuggcgcaacaacauccuccgcacccaggaguccgagugcgccugcgucaacggcuccugcuucaccgucaugaccgacggccccuccgacggccaggccuccuacaagaucuuccgcaucgagaagggcaagaucgucaaguccgucgagaugaacgcccccaacuaccacuacgaggagugcuccugcuaccccgacuccuccgagaucaccugcgucugccgcgacaacuggcacggcuccaaccgccccugggucuccuucaaccagaaccucgaguaccagaucggcuacaucugcuccggcaucuucggcgacaacccccgccccaacgacaagaccggcuccugcggccccgucuccuccaacggcgccaacggcgucaagggcuucuccuucaaguacggcaacggcgucuggaucggccgcaccaaguccaucuccucccgcaacggcuucgagaugaucugggaccccaacggcuggaccggcaccgacaacaacuucuccaucaagcaggacaucgucggcaucaacgagugguccggcuacuccggcuccuucguccagcaccccgagcucaccggccucgacugcauccgccccugcuucugggucgagcucauccgcggccgccccaaggagaacaccaucuggaccuccggcuccuccaucuccuucugcggcgucaacuccgacaccgucggcugguccuggcccgacggcgccgagcuccccuucaccaucgacaaguga

SEQ ID NO: 114343 - RNA, 1410 nt, Artificial Sequence; identical to SEQ ID NO: 114340
  derived and/or modified CDS sequence (opt2) from neuraminidase__InfluenzaA__ADD84505

SEQ ID NO: 114344 - RNA, 1410 nt, Artificial Sequence; identical to SEQ ID NO: 114340
  derived and/or modified CDS sequence (opt2) from neuraminidase__InfluenzaA__ADD84506

SEQ ID NO: 114345 - RNA, 1410 nt, Artificial Sequence
  derived and/or modified CDS sequence (opt2) from neuraminidase__InfluenzaA__ADD92528
augaaccccaaccagaagaucaucaccaucggcuccgucugcaugaccaucggcauggccaaccucauccuccagaucggcaacaucaucuccaucuggaucucccacuccauccagcucggcaaccagaaccagaucgagaccugcaaccaguccgucaucaccuacgagaacaacaccugggucaaccagaccuacgucaacaucuccaacaccaacuucgccgccggccaguccgucgucuccgucaagcucgccggcaacuccucccucugccccgucuccggcugggccaucuacuccaaggacaacuccauccgcaucggcuccaagggcgacgucuucgucauccgcgagcccuucaucuccugcuccccccucgagugccgcaccuucuuccucacccagggcgcccuccucaacgacaagcacuccaacggcaccaucaaggaccgcucccccuaccgcacccucauguccugccccaucggcgagguccccucccccuacaacucccgcuucgaguccgucgccugguccgccuccgccugccacgacggcaucaacuggcucaccaucggcaucuccggccccgacaacggcgccgucgccguccucaaguacaacggcaucaucaccgacaccaucaaguccuggcgcaacaacauccuccgcacccaggaguccgagugcgccugcgucaacggcuccugcuucaccgucaugaccgacggccccuccgacggccaggccuccuacaagaucuuccgcaucgagaagggcaagaucgucaaguccgucgagaugaacgcccccaacuaccacuacgaggagugcuccugcuaccccgacuccuccgagaucaccugcgucugccgcgacaacuggcacggcuccaaccgccccugggucuccuucaaccagaaccucgaguaccagaucggcuacaucugcuccggcaucuucggcgacaacccccgccccaacgacaagaccggcuccugcggccccgucuccuccaacggcgccaacggcgucaagggcuucuccuucaaguacggcaacggcgucuggaucggccgcaccaaguccaucuccucccgcaacggcuucgagaugaucugggaccccaacggcuggaccggcaccgacaacaacuucuccaucaagcaggacaucgucggcaucaacgagugguccggccacuccggcuccuccguccagcaccccgagcucaccggccucgacugcauccgccccugcuucugggucgagcucauccgcggccgccccaaggagaacaccaucuggaccuccggcuccuccaucuccuucugcggcgucaacuccgacaccgucggcugguccuggcccgacggcgccgagcuccccuucaccaucgacaaguga

SEQ ID NO: 114346 - RNA, 1410 nt, Artificial Sequence; identical to SEQ ID NO: 113997
  derived and/or modified CDS sequence (opt2) from neuraminidase__InfluenzaA__ADD96769

SEQ ID NO: 114347 - RNA, 1410 nt, Artificial Sequence; identical to SEQ ID NO: 113997
  derived and/or modified CDS sequence (opt2) from neuraminidase__InfluenzaA__ADD96779

SEQ ID NO: 114348 - RNA, 1410 nt, Artificial Sequence; identical to SEQ ID NO: 113997
  derived and/or modified CDS sequence (opt2) from neuraminidase__InfluenzaA__ADD96789

SEQ ID NO: 114349 - RNA, 1410 nt, Artificial Sequence; identical to SEQ ID NO: 114125
  derived and/or modified CDS sequence (opt2) from neuraminidase__InfluenzaA__ADD96799

SEQ ID NO: 114350 - RNA, 1410 nt, Artificial Sequence; identical to SEQ ID NO: 112774
  derived and/or modified CDS sequence (opt2) from neuraminidase__InfluenzaA__ADD96809

SEQ ID NO: 114351 - RNA, 1410 nt, Artificial Sequence
  derived and/or modified CDS sequence (opt2) from neuraminidase__InfluenzaA__ADD96819
augaaccccaaccagaagaucaucaccaucggcuccgucugcaugaccaucggcauggccaaccucauccuccagaucggcaacaucaucuccaucuggaucucccacuccauccagcucggcaaccagaaccagaucgagaccugcaaccaguccgucaucaccuacgagaacaacaccugggucaaccagaccuacgucaacaucuccaacaccaacuucgccgccggccaguccgucgucuccgucaagcucgccggcuccuccucccucugccccgucuccggcugggccaucuacuccaaggacaacuccauccgcaucggcuccaagggcgacgucuucgucauccgcgagcccuucaucuccugcuccccccucgagugccgcaccuucuuccucacccagggcgcccuccucaacgacaagcacuccaacggcaccaucaaggaccgcucccccuaccgcacccucauguccugccccaucggcgagguccccucccccuacaacucccgcuucgaguccgucgccugguccgccuccgccugccacgacggcaucaacuggcucaccaucggcaucuccggccccgacaacggcgccgucgccguccucaaguacaacggcaucaucaccgacaccaucaaguccuggcgcaacaacauccuccgcacccaggaguccgagugcgccugcgucaacggcuccugcuucaccgucaugaccgacggccccuccgacggccaggccuccuacaagaucuuccgcaucgagaagggcaagaucgucaaguccgucgagaugaacgcccccaacuaccacuacgaggagugcuccugcuaccccgacuccuccgagaucaccugcgucugccgcgacaacuggcacggcuccaaccgccccugggucuccuucaaccagaaccucgaguaccagaucggcuacaucugcuccggcaucuucggcgacaacccccgccccaacgacaagaagggcuccugcggccccgucuccuccaacggcgccaacggcgucaagggcuucuccuucaaguacggcaacggcgucuggaucggccgcaccaaguccaucuccucccgcaacggcuucgagaugaucugggaccccaacggcuggaccggcaccgacaacaacuucuccaucaagcaggacaucgucggcaucaacgagugguccggcuacuccggcuccuucguccagcaccccgagcucaccggccucgacugcauccgccccugcuucugggucgagcucauccgcggccgccccaaggagaacaccaucuggaccuccggcuccuccaucuccuucugcggcgucaacuccgacaccgucggcugguccuggcccgacggcgccgagcuccccuucaccaucgacaaguga

SEQ ID NO: 114352 - RNA, 1410 nt, Artificial Sequence; identical to SEQ ID NO: 112774
  derived and/or modified CDS sequence (opt2) from neuraminidase__InfluenzaA__ADD96829

SEQ ID NO: 114353 - RNA, 1410 nt, Artificial Sequence; identical to SEQ ID NO: 112774
  derived and/or modified CDS sequence (opt2) from neuraminidase__InfluenzaA__ADD96839

SEQ ID NO: 114354 - RNA, 1410 nt, Artificial Sequence; identical to SEQ ID NO: 112774
  derived and/or modified CDS sequence (opt2) from neuraminidase__InfluenzaA__ADD96849

SEQ ID NO: 114355 - RNA, 1410 nt, Artificial Sequence; identical to SEQ ID NO: 112774
  derived and/or modified CDS sequence (opt2) from neuraminidase__InfluenzaA__ADD96859

SEQ ID NO: 114356 - RNA, 1410 nt, Artificial Sequence
  derived and/or modified CDS sequence (opt2) from neuraminidase__InfluenzaA__ADD96869
augaaccccaaccagaagaucaucaccaucggcuccgucugcaugaccaucggcauggccaaccucauccuccagaucggcaacaucaucuccaucuggaucucccaccccauccagcucggcaaccagaaccagaucgagaccugcaaccaguccgucaucaccuacgagaacaacaccugggucaaccagaccuacgucaacaucuccaacaccaacuucgccgccggccaguccgucgucuccgucaagcucgccggcaacuccucccucugccccgucuccggcugggccaucuacuccaaggacaacuccauccgcaucggcuccaagggcgacgucuucgucauccgcgagcccuucaucuccugcuccccccucgagugccgcaccuucuuccucacccagggcgcccuccucaacgacaagcacuccaacggcaccaucaaggaccgcucccccuaccgcacccucauguccugccccaucggcgagguccccucccccuacaacucccgcuucgaguccgucgccugguccgccuccgccugccacgacggcaucaacuggcucaccaucggcaucuccggccccgacaacggcgccgucgccguccucaaguacaacggcaucaucaccgacaccaucaaguccuggaagaacaacauccuccgcacccaggaguccgagugcgccugcgucaacggcuccugcuucaccgucaugaccgacggccccuccgacggccaggccuccuacaagaucuuccgcaucgagaagggcaagaucgucaaguccgucgagaugaacgcccccaacuaccacuacgaggagugcuccugcuaccccgacuccuccgagaucaccugcgucugccgcgacaacuggcacggcuccaaccgccccugggucuccuucaaccagaaccucgaguaccagaucggcuacaucugcuccggcaucuucggcgacaacccccgccccaacgacaagaccggcuccugcggccccgucuccuccaacggcgccaacggcgucaagggcuucuccuucaaguacggcaacggcgucuggaucggccgcaccaaguccaucuccucccgcaacggcuucgagaugaucugggaccccaacggcuggaccggcaccgacaacaacuucuccaucaagcaggacaucgucggcaucaacgagugguccggcuacuccggcuccuucguccagcaccccgagcucaccggccucgacugcauccgccccugcuucugggucgagcucauccgcggccgccccaaggagaacaccaucuggaccuccggcuccuccaucuccuucugcggcgucaacuccgacaccgucggcugguccuggcccgacggcgccgagcuccccuucaccaucgacaaguga

SEQ ID NO: 114357 - RNA, 1410 nt, Artificial Sequence
  derived and/or modified CDS sequence (opt2) from neuraminidase__InfluenzaA__ADD96879
augaaccccaaccagaagaucaucaccaucggcuccgucugcaugaccaucggcauggccaaccucauccuccagaucggcaacaucaucuccaucuggaucucccacuccauccagcucggcaaccagaaccagaucgagaccugcaaccaguccgucaucaccuacgagaacaacaccugggucaaccagaccuacgucaacaucuccaacaccaacuucgccgccggccaguccgucgucuccgucaagcucgccggcaacuccucccucugccccgucuccggcugggccaucuacuccaaggacaacuccauccgcaucggcuccaagggcgacgucuucgucauccgcgagcccuucaucuccugcuccccccucggcugccgcaccuucuuccucacccagggcgcccuccucaacgacaagcacuccaacggcaccaucaaggaccgcucccccuaccgcacccucauguccugccccaucggcgagguccccucccccuacaacucccgcuucgaguccgucgccugguccgccuccgccugccacgacggcaucaacuggcucaccaucggcaucuccggccccgacaacggcgccgucgccguccucaaguacaacggcaucaucaccgacaccaucaaguccuggcgcaacaacauccuccgcacccaggaguccgagugcgccugcgucaacggcuccugcuucaccgucaugaccgacggccccuccgacggccaggccuccuacaagaucuuccgcaucgagaagggcaagaucgucaaguccgucgagaugaacgcccccaacuaccacuacgaggagugcuccugcuaccccgacuccuccgagaucaccugcgucugccgcgacaacuggcacggcuccaaccgccccugggucuccuucaaccagaaccucgaguaccagaucggcuacaucugcuccggcaucuucggcgacaacccccgccccaacgacaagaccggcuccugcggccccgucuccuccaacggcgccaacggcgucaagggcuucuccuucaaguacggcaacggcgucuggaucggccgcaccaaguccaucuccucccgcaacggcuucgagaugaucugggaccccaacggcuggaccggcaccgacaacaacuucuccaucaagcaggacaucgucggcaucaacgagugguccggcuacuccggcuccuucguccagcaccccgagcucaccggccucgacugcauccgccccugcuucugggucgagcucauccgcggccgccccaaggagaacaccaucuggaccuccggcuccuccaucuccuucugcggcgucaacuccgacaccgucggcugguccuggcccgacggcgccgagcuccccuucaccaucgacaaguga

SEQ ID NO: 114358 - RNA, 1410 nt, Artificial Sequence; identical to SEQ ID NO: 112774
  derived and/or modified CDS sequence (opt2) from neuraminidase__InfluenzaA__ADD96889

SEQ ID NO: 114359 - RNA, 1410 nt, Artificial Sequence; identical to SEQ ID NO: 113357
  derived and/or modified CDS sequence (opt2) from neuraminidase__InfluenzaA__ADD96899

SEQ ID NO: 114360 - RNA, 1410 nt, Artificial Sequence; identical to SEQ ID NO: 112774
  derived and/or modified CDS sequence (opt2) from neuraminidase__InfluenzaA__ADD96909

SEQ ID NO: 114361 - RNA, 1410 nt, Artificial Sequence; identical to SEQ ID NO: 112774
  derived and/or modified CDS sequence (opt2) from neuraminidase__InfluenzaA__ADD96919

SEQ ID NO: 114362 - RNA, 1410 nt, Artificial Sequence; identical to SEQ ID NO: 112774
  derived and/or modified CDS sequence (opt2) from neuraminidase__InfluenzaA__ADD96929

SEQ ID NO: 114363 - RNA, 1410 nt, Artificial Sequence; identical to SEQ ID NO: 112774
  derived and/or modified CDS sequence (opt2) from neuraminidase__InfluenzaA__ADD96939

SEQ ID NO: 114364 - RNA, 1410 nt, Artificial Sequence; identical to SEQ ID NO: 112774
  derived and/or modified CDS sequence (opt2) from neuraminidase__InfluenzaA__ADD96959

SEQ ID NO: 114365 - RNA, 1410 nt, Artificial Sequence; identical to SEQ ID NO: 112774
  derived and/or modified CDS sequence (opt2) from neuraminidase__InfluenzaA__ADD96969

SEQ ID NO: 114366 - RNA, 1410 nt, Artificial Sequence
  derived and/or modified CDS sequence (opt2) from neuraminidase__InfluenzaA__ADD96989
augaaccccaaccagaagaucaucaccaucggcuccgucugcaugaccaucggcauggccaaccucauccuccagaucggcaacaucaucuccaucuggaucucccacuccauccagcucggcaaccagaaccagaucgagaccugcaaccaguccgucaucaccuacgagaacaacaccugggucaaccagaccuacgucaacaucuccaacaccaacuucgccgccggccaguccgucgucuccgucaagcucgccggcaacuccucccucugccccgucuccggcugggccaucuacuccaaggacaacuccauccgcaucggcuccaagggcgacgucuucgucauccgcgagcccuucaucuccugcuccccccucgagugccgcaccuucuuccucacccagggcgcccuccucaacgacaagcacuccaacggcaccaucaaggaccgcuccuccuaccgcacccucauguccugccccaucggcgagguccccucccccuacaacucccgcuucgaguccgucgccugguccgccuccgccugccacgacggcaucaacuggcucaccaucggcaucuccggccccgacaacggcgccgucgccguccucaaguacaacggcaucaucaccgacaccaucaaguccuggcgcaacaacauccuccgcacccaggaguccgagugcgccugcgucaacggcuccugcuucaccgucaugaccgacggccccuccgacggccaggccuccuacaagaucuuccgcaucgagaagggcaagaucgucaaguccgucgagaugaacgcccccaacuaccacuacgaggagugcuccugcuaccccgacuccuccgagaucaccugcgucugccgcgacaacuggcacggcuccaaccgccccugggucuccuucaaccagaaccucgaguaccagaucggcuacaucugcuccggcaucuucggcgacaacccccgccccaacgacaagaccggcuccugcggccccgucuccuccaacggcgccaacggcgucaagggcuucuccuucaaguacggcaacggcgucuggaucggccgcaccaaguccaucuccucccgcaacggcuucgagaugaucugggaccccaacggcuggaccggcaccgacaacaacuucuccaucaagcaggacaucgucggcaucaacgagugguccggcuacuccggcuccuucguccagcaccccgagcucaccggccucgacugcauccgccccugcuucugggucgagcucauccgcggccgccccaaggagaacaccaucuggaccuccggcuccuccaucuccuucugcggcgucaacuccgacaccgucggcugguccuggcccgacggcgccgagcuccccuucaccaucgacaaguga

SEQ ID NO: 114367 - RNA, 1410 nt, Artificial Sequence
  derived and/or modified CDS sequence (opt2) from neuraminidase__InfluenzaA__ADD97038
augaaccccaaccagaagaucaucaccaucggcuccgucugcaugaccaucggcauggccaaccucauccuccagaucggcaacaucaucuccaucuggaucucccacuccauccagcucggcaaccagaaccagaucgagaccugcaaccaguccgucaucaccuacgagaacaacaccugggucaaccagaccuacgucaacaucuccaacaccaacuucgccgccggccaguccgucgucuccgucaagcucgccggcaacuccucccucugccccgucuccggcugggccaucuacuccaaggacaacuccauccgcaucggcuccaagggcgacgucuucgucauccgcgagcccuucaucuccugcuccccccucgagugccgcaccuucuuccucacccagggcgcccuccucaacgacaagcacuccaacggcaccaucaaggaccgcucccccuaccgcacccucauguccugccccaucggcgagguccccucccccuacaacucccgcuucgaguccgucgccugguccgccuccgccugccacgacggcaucaacuggcucaccaucggcaucuccggccccgacaacggcgccgucgccguccucaaguacaacggcaucaucaccgacaccaucaaguccuggcgcaacaacauccuccgcacccaggaguccgagugcgccugcgucaacggcuccugcuucaccgucaugaccgacggccccuccgacggccaggccuccuacaagaucuuccgcaucgagaagggcaagaucgucaaguccgucgagaugaacgcccccaacuaccacuacgaggagugcuccugcuaccccgacuccuccgagaucaccugcgucugccgcgacaacuggcacggcuccaaccgccccugggucuccuucaaccagaaccucgaguaccagaucggcuacaucugcuccggcaucuucggcgacaacccccgccccaacgacaagaccggcuccugcggccccgucuccuccaacggcgccaacggcgucaagggcuucuccuucaaguacggcaacggcgucuggaucggccgcaccaaguccaucuccucccgcaacggcuucgagaugaucugggaccccaacggcuggaucggcaccgacaacaacuucuccaucaagcaggacaucgucggcaucaacgagugguccggcuacuccggcuccuucguccagcaccccgagcucaccggccucgacugcauccgccccugcuucugggucgagcucauccgcggccgccccaaggagaacaccaucuggaccuccggcuccuccaucuccuucugcggcgucaacuccgacaccggcggcugguccuggcccgacggcgccgagcuccccuucaccaucgacaaguga

SEQ ID NO: 114368 - RNA, 1410 nt, Artificial Sequence; identical to SEQ ID NO: 112774
  derived and/or modified CDS sequence (opt2) from neuraminidase__InfluenzaA__ADD97048

SEQ ID NO: 114369 - RNA, 1410 nt, Artificial Sequence; identical to SEQ ID NO: 112774
  derived and/or modified CDS sequence (opt2) from neuraminidase__InfluenzaA__ADD97058

SEQ ID NO: 114370 - RNA, 1410 nt, Artificial Sequence; identical to SEQ ID NO: 112774
  derived and/or modified CDS sequence (opt2) from neuraminidase__InfluenzaA__ADD97069

SEQ ID NO: 114371 - RNA, 1410 nt, Artificial Sequence; identical to SEQ ID NO: 112774
  derived and/or modified CDS sequence (opt2) from neuraminidase__InfluenzaA__ADD97126

SEQ ID NO: 114372 - RNA, 1410 nt, Artificial Sequence; identical to SEQ ID NO: 112774
  derived and/or modified CDS sequence (opt2) from neuraminidase__InfluenzaA__ADD97164

SEQ ID NO: 114373 - RNA, 1410 nt, Artificial Sequence; identical to SEQ ID NO: 112774
  derived and/or modified CDS sequence (opt2) from neuraminidase__InfluenzaA__ADD97174

SEQ ID NO: 114374 - RNA, 1410 nt, Artificial Sequence; identical to SEQ ID NO: 112774
  derived and/or modified CDS sequence (opt2) from neuraminidase__InfluenzaA__ADD97184

SEQ ID NO: 114375 - RNA, 1410 nt, Artificial Sequence
  derived and/or modified CDS sequence (opt2) from neuraminidase__InfluenzaA__ADD97194
augaaccccaaccagaagaucaucaccaucggcuccgucugcaugaccaucggcauggccaaccucauccuccagaucggcaacaucaucuccaucuggaucucccacuccauccagcucggcaaccagaaccagaucgagaccugcaaccaguccgucaucaccuacgagaacaacaccugggucaaccagaccuacgucaacaucuccaacgccaacuucgccgccggccaguccgucgucuccgucaagcucgccggcaacuccucccucugccccgucuccggcugggccaucuacuccaaggacaacuccauccgcaucggcuccaagggcgacgucuucgucauccgcgagcccuucaucuccugcuccccccucgagugccgcaccuucuuccucacccagggcgcccuccucaacgacaagcacuccaacggcaccaucaaggaccgcucccccuaccgcacccucauguccugccccaucggcgagguccccucccccuacaacucccgcuucgaguccgucgccugguccgccuccgccugccacgacggcaucaacuggcucaccaucggcaucuccggccccgacaacggcgccgucgccguccucaaguacaacggcaucaucaccgacaccaucaaguccuggcgcaacaacauccuccgcacccaggaguccgagugcgccugcgucaacggcuccugcuucaccgucaugaccgacggccccuccgacggccaggccuccuacaagaucuuccgcaucgagaagggcaagaucgucaaguccgucgagaugaacgcccccaacuaccacuacgaggagugcuccugcuaccccgacuccuccgagaucaccugcgucugccgcgacaacuggcacggcuccaaccgccccugggucuccuucaaccagaaccucgaguaccagaucggcuacaucugcuccggcaucuucggcgacaacccccgccccaacgacaagaccggcuccugcggccccgucuccuccaacggcgccaacggcgucaagggcuucuccuucaaguacggcaacggcgucuggaucggccgcaccaaguccaucuccucccgcaacggcuucgagaugaucugggaccccaacggcuggaccggcaccgacaacaacuucuccaucaagcaggacaucgucggcaucaacgagugguccggcuacuccggcuccuucguccagcaccccgagcucaccggccucgacugcauccgccccugcuucugggucgagcucauccgcggccgccccaaggagaacaccaucuggaccuccggcuccuccaucuccuucugcggcgucaacuccgacaccgucggcugguccuggcccgacggcgccgagcuccccuucaccaucgacaaguga

SEQ ID NO: 114376 - RNA, 1410 nt, Artificial Sequence; identical to SEQ ID NO: 114366
  derived and/or modified CDS sequence (opt2) from neuraminidase__InfluenzaA__ADD97204

SEQ ID NO: 114377 - RNA, 1410 nt, Artificial Sequence; identical to SEQ ID NO: 112774
  derived and/or modified CDS sequence (opt2) from neuraminidase__InfluenzaA__ADD97214

SEQ ID NO: 114378 - RNA, 1410 nt, Artificial Sequence; identical to SEQ ID NO: 112774
  derived and/or modified CDS sequence (opt2) from neuraminidase__InfluenzaA__ADD97224

SEQ ID NO: 114379 - RNA, 1410 nt, Artificial Sequence; identical to SEQ ID NO: 112774
  derived and/or modified CDS sequence (opt2) from neuraminidase__InfluenzaA__ADD97234

SEQ ID NO: 114380 - RNA, 1410 nt, Artificial Sequence; identical to SEQ ID NO: 112774
  derived and/or modified CDS sequence (opt2) from neuraminidase__InfluenzaA__ADD97244

SEQ ID NO: 114381 - RNA, 1410 nt, Artificial Sequence; identical to SEQ ID NO: 112774
  derived and/or modified CDS sequence (opt2) from neuraminidase__InfluenzaA__ADD97254

SEQ ID NO: 114382 - RNA, 1410 nt, Artificial Sequence; identical to SEQ ID NO: 112774
  derived and/or modified CDS sequence (opt2) from neuraminidase__InfluenzaA__ADD97264

SEQ ID NO: 114383 - RNA, 1410 nt, Artificial Sequence; identical to SEQ ID NO: 112774
  derived and/or modified CDS sequence (opt2) from neuraminidase__InfluenzaA__ADD97274

SEQ ID NO: 114384 - RNA, 1410 nt, Artificial Sequence
  derived and/or modified CDS sequence (opt2) from neuraminidase__InfluenzaA__ADD97284
augaaccccaaccagaagaucaucaccaucggcuccgucugcaugaccaucggcauggccaaccucauccuccagaucggcaacaucaucuccaucuggaucucccacuccauccagcucggcaaccagaaccagaucgagaccugcaaccaguccgucaucaccuacgagaacaacaccugggucaaccagaccuacgucaacaucugcaacaccaacuucgccgccggccaguccgucgucuccgucaagcucgccggcaacuccucccucugccccgucuccggcugggccaucuacuccaaggacaacuccauccgcaucggcuccaagggcgacgucuucgucauccgcgagcccuucaucuccugcuccccccucgagugccgcaccuucuuccucacccagggcgcccuccucaacgacaagcacuccaacggcaccaucaaggaccgcucccccuaccgcacccucauguccugccccaucggcgagguccccucccccuacaacucccgcuucgaguccgucgccugguccgccuccgccugccacgacggcaucaacuggcucaccaucggcaucuccggccccgacaacggcgccgucgccguccucaaguacaacggcaucaucaccgacaccaucaaguccuggcgcaacaacauccuccgcacccaggaguccgagugcgccugcgucaacggcuccugcuucaccgucaugaccgacggccccuccgacggccaggccuccuacaagaucuuccgcaucgagaagggcaagaucgucaaguccgucgagaugaacgcccccaacuaccacuacgaggagugcuccugcuaccccgacuccuccgagaucaccugcgucugccgcgacaacuggcacggcuccaaccgccccugggucuccuucaaccagaaccucgaguaccagaucggcuacaucugcuccggcaucuucggcgacaacccccgccccaacgacaagaccggcuccugcggccccgucuccuccaacggcgccaacggcgucaagggcuucuccuucaaguacggcaacggcgucuggaucggccgcaccaaguccaucuccucccgcaacggcuucgagaugaucugggaccccaacggcuggaccggcaccgacaacaacuucuccaucaagcaggacaucgucggcaucaacgagugguccggcuacuccggcuccuucguccagcaccccgagcucaccggccucgacugcauccgccccugcuucugggucgagcucauccgcggccgccccaaggagaacaccaucuggaccuccggcuccuccaucuccuucugcggcgucaacuccgacaccgucggcugguccuggcccgacggcgccgagcuccccuucaccaucgacaaguga

SEQ ID NO: 114385 - RNA, 1410 nt, Artificial Sequence; identical to SEQ ID NO: 112774
  derived and/or modified CDS sequence (opt2) from neuraminidase__InfluenzaA__ADD97294

SEQ ID NO: 114386 - RNA, 1410 nt, Artificial Sequence
  derived and/or modified CDS sequence (opt2) from neuraminidase__InfluenzaA__ADD97314
augaaccccaaccagaagaucaucaccaucggcuccgucugcaugaccaucggcauggccaaccucauccuccagaucggcaacaucaucuccaucuggaucucccacuccauccagcucggcaaccagaaccagaucgagaccugcaaccaguccgucaucaccuacgagaacaacaccugggucaaccagaccuacgucaacaucuccaacaccaacuucgccgccggccaguccgucgucuccgucaagcucgccggcaacuccucccucugccccgucuccggcugggccaucuacuccaaggacaacuccauccgcaucggcuccaagggcgacgucuucgucauccgcgagcccuucaucuccugcuccccccucgagugccgcaccuucuuccucacccagggcgcccuccucaacgacaagcacuccaacggcaccaucaaggaccgcucccccuaccgcacccucauguccugccccaucggcgagguccccucccccuacaacucccgcuucgaguccgucgccugguccgccuccgccugccacgacggcaucaacuggcucaccaucggcaucuccggccccgacaacggcgccgucgccguccucaaguacaacggcaucaucaccgacaccaucaaguccuggcgcaacaacauccuccgcacccaggaguccgagugcgccugcgucaacggcuccugcuucaccgucaugaccgacggccccuccgacggccaggccuccuacaagaucuuccgcaucgagaagggcaagaucgucaaguccgucgagaugaacgcccccaacuaccacuacgaggagugcuccugcuaccccgacuccuccgagaucaccugcgucugccgcgacaacuggcacggcuccaaccgccccugggucuccuucaaccagaaccucgaguaccagaucggcuacaucugcuccggcaucuucggcgacaacccccgccccaacgacaagaccggcuccugcggccccgucuccuccaacggcgccaacggcgucaagggcuucuccuucaaguacggcaacggcgucuggaucggccgcaccaaguccaucuccucccgcaacggcuucgagaugaucugggaccccaacggcuggaccggcaccgacaacaacuucuccaucaagcaggacaucgucggcaccaacgagugguccggcuacuccggcuccuucguccagcaccccgagcucaccggccucgacugcauccgccccugcuucugggucgagcucauccgcggccgccccaaggagaacaccaucuggaccuccggcuccuccaucuccuucugcggcgucaacuccgacaccgucggcugguccuggcccgacggcgccgagcuccccuucaccaucgacaaguga

SEQ ID NO: 114387 - RNA, 1410 nt, Artificial Sequence; identical to SEQ ID NO: 112774
  derived and/or modified CDS sequence (opt2) from neuraminidase__InfluenzaA__ADD97334

SEQ ID NO: 114388 - RNA, 1410 nt, Artificial Sequence; identical to SEQ ID NO: 112774
  derived and/or modified CDS sequence (opt2) from neuraminidase__InfluenzaA__ADD97344

SEQ ID NO: 114389 - RNA, 1410 nt, Artificial Sequence; identical to SEQ ID NO: 112774
  derived and/or modified CDS sequence (opt2) from neuraminidase__InfluenzaA__ADD97354

SEQ ID NO: 114390 - RNA, 1410 nt, Artificial Sequence
  derived and/or modified CDS sequence (opt2) from neuraminidase__InfluenzaA__ADD97384
augaaccccaaccagaagaucaucaccaucggcuccgucugcaugaccaucggcauggccaaccucauccuccagaucggcaacaucaucuccaucuggaucucccacaccauccagcucggcaaccagaaccagaucgagaccugcaaccaguccgucaucaccuacgagaacaacaccugggucaaccagaccuacgucaacaucuccaacaccaacuucgccgccggccaguccgucgucuccgucaagcucgccggcaacuccucccucugccccgucuccggcugggccaucuacuccaaggacaacuccauccgcaucggcuccaagggcgacgucuucgucauccgcgagcccuucaucuccugcuccccccucgagugccgcaccuucuuccucacccagggcgcccuccucaacgacaagcacuccaacggcaccaucaaggaccgcucccccuaccgcacccucauguccugccccaucggcgagguccccucccccuacaacucccgcuucgaguccgucgccugguccgccuccgccugccacgacggcaucaacuggcucaccaucggcaucuccggccccgacaacggcgccgucgccguccucaaguacaacggcaucaucaccgacaccaucaaguccuggcgcaacaacauccuccgcacccaggaguccgagugcgccugcgucaacggcuccugcuucaccgucaugaccgacggccccuccgacggccaggccuccuacaagaucuuccgcaucgagaagggcaagaucgucaaguccgucgagaugaacgcccccaacuaccacuacgaggagugcuccugcuaccccgacuccuccgagaucaccugcgucugccgcgacaacuggcacggcuccaaccgccccugggucuccuucaaccagaaccucgaguaccagaucggcuacaucugcuccggcaucuucggcgacaacccccgccccaacgacaagaccggcuccugcggccccgucuccuccaacggcgccaacggcgucaagggcuucuccuucaaguacggcaacggcgucuggaucggccgcaccaaguccaucuccucccgcaacggcuucgagaugaucugggaccccaacggcuggaccggcaccgacaacaacuucuccaucaagcaggacaucgucggcaucaacgagugguccggcuacuccggcuccuucguccagcaccccgagcucaccggccucgacugcauccgccccugcuucugggucgagcucauccgcggccgccccaaggagaacaccaucuggaccuccggcuccuccaucuccuucugcggcgucaacuccgacaccgucggcugguccuggcccgacggcgccgagcuccccuucaccaucgacaaguga

SEQ ID NO: 114391 - RNA, 1410 nt, Artificial Sequence
  derived and/or modified CDS sequence (opt2) from neuraminidase__InfluenzaA__ADD97394
augaaccccaaccagaagaucaucaccaucggcuccgucugcaugaccaucggcauggccaaccucauccuccagaucggcaacaucaucuccaucuggaucucccacuccauccagcucggcaaccagaaccagaucgagaccugcaaccaguccgucaucaccuacgagaacaacaccugggucaaccagaccuacgucaacaucuccaacaccaacuucgccgccggccagcccgucgucuccgucaagcucgccggcaacuccucccucugccccgucaacggcugggccaucuacuccaaggacaacuccauccgcaucggcuccaagggcgacgucuucgucauccgcgagcccuucaucuccugcuccccccucgagugccgcaccuucuuccucacccagggcgcccuccucaacgacaagcacuccaacggcaccaucaaggaccgcucccccuaccgcacccucauguccugccccaucggcgagguccccucccccuacaacucccgcuucgaguccgucgccugguccgccuccgccugccacgacggcaucaacuggcucaccaucggcaucuccggccccgacaacggcgccgucgccguccucaaguacaacggcaucaucaccgacaccaucaaguccuggcgcaacaacauccuccgcacccaggaguccgagugcgccugcgucaacggcuccugcuucaccgucaugaccgacggccccuccgacggccaggccuccuacaagaucuuccgcaucgagaagggcaagaucgucaaguccgucgagaugaacgcccccaacuaccacuacgaggagugcuccugcuaccccgacuccuccgagaucaccugcgucugccgcgacaacuggcacggcuccaaccgccccugggucuccuucaaccagaaccucgaguaccagaucggcuacaucugcuccggcaucuucggcgacaacccccgccccaacgacaagaccggcuccugcggccccgucuccuccaacggcgccaacggcgucaagggcuucuccuucaaguacggcaacggcgucuggaucggccgcaccaaguccaucuccucccgcaacggcuucgagaugaucugggaccccaacggcuggaccggcaccgacaacaacuucuccaucaagcaggacaucgucggcaucaacgagugguccggcuacuccggcuccuucguccagcaccccgagcucaccggccucgacugcauccgccccugcuucugggucgagcucauccgcggccgccccaaggagaacaccaucuggaccuccggcuccuccaucuccuucugcggcgucaacuccgacaccgucggcugguccuggcccgacggcgccgagcuccccuucaccaucgacaaguga

SEQ ID NO: 114392 - RNA, 1410 nt, Artificial Sequence; identical to SEQ ID NO: 112774
  derived and/or modified CDS sequence (opt2) from neuraminidase__InfluenzaA__ADD97404

SEQ ID NO: 114393 - RNA, 1410 nt, Artificial Sequence; identical to SEQ ID NO: 112774
  derived and/or modified CDS sequence (opt2) from neuraminidase__InfluenzaA__ADD97424

SEQ ID NO: 114394 - RNA, 1410 nt, Artificial Sequence; identical to SEQ ID NO: 112774
  derived and/or modified CDS sequence (opt2) from neuraminidase__InfluenzaA__ADD97434

SEQ ID NO: 114395 - RNA, 1410 nt, Artificial Sequence; identical to SEQ ID NO: 112774
  derived and/or modified CDS sequence (opt2) from neuraminidase__InfluenzaA__ADD97444

SEQ ID NO: 114396 - RNA, 1410 nt, Artificial Sequence
  derived and/or modified CDS sequence (opt2) from neuraminidase__InfluenzaA__ADD97454
augaaccccaaccagaagaucaucaccaucggcuccgucugcaugaccaucggcauggccaaccucauccuccagaucggcaacaucaucuccaucuggaucucccacuccauccagcucggcaaccagaaccagaucgagaccugcaaccaguccgucaucaccuacgagaacaacaccugggucaaccagaccuacgucaacaucuccaacaccaacuucgccgccggccaguccgucgucuccgucaagcucgccggcaacuccucccucugccccaucuccggcugggccaucuacuccaaggacaacuccauccgcaucggcuccaagggcgacgucuucgucauccgcgagcccuucaucuccugcuccccccucgagugccgcaccuucuuccucacccagggcgcccuccucuccgacaagcacuccaacggcaccaucaaggaccgcucccccuaccgcacccucauguccugccccaucggcgagguccccucccccuacaacucccgcuucgaguccgucgccugguccgccuccgccugccacgacggcaucaacuggcucaccaucggcaucuccggccccgacaacggcgccgucgccguccucaaguacaacggcaucaucaccgacaccaucaaguccuggcgcaacaacauccuccgcacccaggaguccgagugcgccugcgucaacggcuccugcuucaccgucaugaccgacggccccuccgacggccaggccuccuacaagaucuuccgcaucgagaagggcaagaucgucaaguccgucgagaugaacgcccccaacuaccacuacgaggagugcuccugcuaccccgacuccuccgagaucaccugcgucugccgcgacaacuggcacggcuccaaccgccccugggucuccuucaaccagaaccucgaguaccagaucggcuacaucugcuccggcaucuucggcgacaacccccgccccaacgacaagaccggcuccugcggccccgucuccuccaacggcgccaacggcgucaagggcuucuccuucaaguacggcaacggcgucuggaucggccgcaccaaguccaucuccucccgcaacggcuucgagaugaucugggaccccaacggcuggaccggcaccgacaacaacuucuccaucaagcaggacaucgucggcaucaacgagugguccggcuacuccggcuccuucguccagcaccccgagcucaccggccucgacugcauccgccccugcuucugggucgagcucauccgcggccgccccaaggagaacaccaucuggaccuccggcuccuccaucuccuucugcggcgucaacuccgacaccgucggcugguccuggcccgacggcgccgagcuccccuucaccaucgacaaguga

SEQ ID NO: 114397 - RNA, 1410 nt, Artificial Sequence
  derived and/or modified CDS sequence (opt2) from neuraminidase__InfluenzaA__ADD97464
augaaccccaaccagaagaucaucaccaucggcuccgucugcaugaccaucggcauggccaaccucauccuccagaucggcaacaucaucuccaucuggaucucccacuccauccagcucggcaaccagaaccagaucgagaccugcaaccaguccgucaucaccuacgagaacaacaccugggucaaccagaccuacgucaacaucuccaacaccaacuucgccgccggccaguccgucgucuccgucaagcucgccggcaacuccucccucugccccgucuccggcugggccaucuacuccaaggacaacuccauccgcaucggcuccaagggcgacgucuucgucauccgcgagcccuucaucuccugcuccccccucgagugccgcaccuucuuccucacccagggcgcccuccucaacgacaagcacuccaacggcaccaucaaggaccgcucccccuaccgcacccucauguccugccccaucggcgagguccccucccccuacaacucccgcuucgaguccgucgccugguccgccuccgccugccacgacggcaucaacuggcucaccaucggcaucuccggccccgacaacggcgccgucgccguccucaaguacaacggcaucaucaccgacaccaucaaguccuggcgcaacaacauccuccgcacccaggaguccgagugcgccugcgucaacggcuccugcuucaccgucaugaccgacggccccuccgacggccaggccuccuacaagaucuuccgcaucgagaagggcaagaucgucaaguccgucgagaugaacgcccccaacuaccacuacgaggagugcuccugcuaccccgacuccuccgagaucaccugcgucugccgcgacaacuggcacggcuccaaccgccccugggucuccuucaaccagaaccucgaguaccagaucggcuacaucugcuccggcaucuucggcgacaacccccgccccaacgacaagaccggcuccugcggccccgucuccuccaacggcgccaacggcgucaagggcuucuccuucaaguacggcaacggcgucuggaucggccgcaccaaguccaucuccucccgcaacggcuucgagaugaucugggaccccaacggcuggaccggcaccgacaacaacuucuccaccaagcaggacaucgucggcaucaacgagugguccggcuacuccggcuccuucguccagcaccccgagcucaccggccucgacugcauccgccccugcuucugggucgagcucauccgcggccgccccaaggagaacaccaucuggaccuccggcuccuccaucuccuucugcggcgucaacuccgacaccgucggcugguccuggcccgacggcgccgagcuccccuucaccaucgacaaguga

SEQ ID NO: 114398 - RNA, 1410 nt, Artificial Sequence; identical to SEQ ID NO: 112774
  derived and/or modified CDS sequence (opt2) from neuraminidase__InfluenzaA__ADD97474

SEQ ID NO: 114399 - RNA, 1410 nt, Artificial Sequence; identical to SEQ ID NO: 112774
  derived and/or modified CDS sequence (opt2) from neuraminidase__InfluenzaA__ADD97484

SEQ ID NO: 114400 - RNA, 1410 nt, Artificial Sequence
  derived and/or modified CDS sequence (opt2) from neuraminidase__InfluenzaA__ADD97494
augaaccccaaccagaagaucaucaccaucggcuccgucugcaugaccaucggcauggccaaccucauccuccagaucggcaacaucaucuccaucuggaucucccacuccauccagcucggcaaccagaaccagaucgagaccugcaaccaguccgucaucaccuacgagaacaacaccugggucaaccagaccuacgucaacaucuccaacaccaacuucgccgccggccaguccgucgucuccgucaagcucgccggcaacuccucccucugccccgucuccggcugggccaucuacuccaaggacaacuccauccgcaucggcuccaagggcgacgucuucgucauccgcgagcccuucaucuccugcucccccuccgagugccgcaccuucuuccucacccagggcgcccuccucaacgacaagcacuccaacggcaccaucaaggaccgcucccccuaccgcacccucauguccugccccaucggcgagguccccucccccuacaacucccgcuucgaguccgucgccugguccgccuccgccugccacgacggcaucaacuggcucaccaucggcaucuccggccccgacaacggcgccgucgccguccucaaguacaacggcaucaucaccgacaccaucaaguccuggcgcaacaacauccuccgcacccaggaguccgagugcgccugcgucaacggcuccugcuucaccgucaugaccgacggccccuccgacggccaggccuccuacaagaucuuccgcaucgagaagggcaagaucgucaaguccgucgagaugaacgcccccaacuaccacuacgaggagugcuccugcuaccccgacuccuccgagaucaccugcgucugccgcgacaacuggcacggcuccaaccgccccugggucuccuucaaccagaaccucgaguaccagaucggcuacaucugcuccggcaucuucggcgacaacccccgccccaacgacaagaccggcuccugcggccccgucuccuccaacggcgccaacggcgucaagggcuucuccuucaaguacggcaacggcgucuggaucggccgcaccaaguccaucuccucccgcaacggcuucgagaugaucugggaccccaacggcuggaccggcaccgacaacaacuucuccaucaagcaggacaucgucggcaucaacgagugguccggcuacuccggcuccuucguccagcaccccgagcucaccggccucgacugcauccgccccugcuucugggucgagcucauccgcggccgccccaaggagaacaccaucuggaccuccggcuccuccaucuccuucugcggcgucaacuccgacaccgucggcugguccuggcccgacggcgccgagcuccccuucaccaucgacaaguga

SEQ ID NO: 114401 - RNA, 1410 nt, Artificial Sequence; identical to SEQ ID NO: 112774
  derived and/or modified CDS sequence (opt2) from neuraminidase__InfluenzaA__ADD97504

SEQ ID NO: 114402 - RNA, 1410 nt, Artificial Sequence; identical to SEQ ID NO: 112774
  derived and/or modified CDS sequence (opt2) from neuraminidase__InfluenzaA__ADD97514

SEQ ID NO: 114403 - RNA, 1410 nt, Artificial Sequence; identical to SEQ ID NO: 114386
  derived and/or modified CDS sequence (opt2) from neuraminidase__InfluenzaA__ADD97534

SEQ ID NO: 114404 - RNA, 1410 nt, Artificial Sequence; identical to SEQ ID NO: 112774
  derived and/or modified CDS sequence (opt2) from neuraminidase__InfluenzaA__ADD97544

SEQ ID NO: 114405 - RNA, 1410 nt, Artificial Sequence; identical to SEQ ID NO: 112774
  derived and/or modified CDS sequence (opt2) from neuraminidase__InfluenzaA__ADD97554

SEQ ID NO: 114406 - RNA, 1410 nt, Artificial Sequence; identical to SEQ ID NO: 114390
  derived and/or modified CDS sequence (opt2) from neuraminidase__InfluenzaA__ADD97564

SEQ ID NO: 114407 - RNA, 1410 nt, Artificial Sequence; identical to SEQ ID NO: 112774
  derived and/or modified CDS sequence (opt2) from neuraminidase__InfluenzaA__ADD97574

SEQ ID NO: 114408 - RNA, 1410 nt, Artificial Sequence; identical to SEQ ID NO: 112774
  derived and/or modified CDS sequence (opt2) from neuraminidase__InfluenzaA__ADD97584

SEQ ID NO: 114409 - RNA, 1410 nt, Artificial Sequence
  derived and/or modified CDS sequence (opt2) from neuraminidase__InfluenzaA__ADD97681
augaaccccaaccagaagaucaucaccaucggcuccgucugcaugaccaucggcauggccaaccucauccuccagaucggcaacaucaucuccaucuggaucucccacuccauccagcucggcaaccagaaccagaucgagaccugcaaccaguccgucaucaccuacgagaacaacaccugggucaaccagaccuacgucaacaucuccaacaccaacuucgccgccggccaguccgucgucuccgucaagcucgccggcaacuccucccucugccccgucuccggcugggccaucuacuccaaggacaacuccauccgcaucggcuccaagggcgacgucuucgucauccgcgagcccuucaucuccugcuccccccucgagugccgcaccuucuuccucacccagggcgcccuccucaacgacaagcacuccaacggcaccaucaaggaccgcucccccuaccgcacccucauguccugccccaucggcgagguccccucccccuacaacucccgcuucgaguccgucgccugguccgccuccgccugccacgacggcaucaacuggcucaccaucggcaucuccggccccgacaacggcgccgucgccguccucaaguacaacggcaucaucaccgacaccaucaaguccuggcgcaacaacauccuccgcacccaggaguccgagugcgccugcgucaacggcuccugcuucaccgucaugaccgacggccccuccgacggccaggccuccuacaagaucuuccgcaucgagaagggcaagaucgucaaguccgucgagaucaacgcccccaacuaccacuacgaggagugcuccugcuaccccgacuccuccgagaucaccugcgucugccgcgacaacuggcacggcuccaaccgccccugggucuccuucaaccagaaccucgaguaccagaucggcuacaucugcuccggcaucuucggcgacaacccccgccccaacgacaagaccggcuccugcggccccgucuccuccaacggcgccaacggcgucaagggcuucuccuucaaguacggcaacggcgucuggaucggccgcaccaaguccaucuccucccgcaacggcuucgagaugaucugggaccccaacggcuggaccggcaccgacaacaacuucuccaucaagcaggacaucgucggcaucaacgagugguccggcuacuccggcuccuucguccagcaccccgagcucaccggccucgacugcauccgccccugcuucugggucgagcucauccgcggccgccccaaggagaacaccaucuggaccuccggcuccuccaucuccuucugcggcaucaacuccgacaccgucggcugguccuggcccgacggcgccgagcuccccuucaccaucgacaaguga

SEQ ID NO: 114410 - RNA, 1410 nt, Artificial Sequence; identical to SEQ ID NO: 114366
  derived and/or modified CDS sequence (opt2) from neuraminidase__InfluenzaA__ADD97691

SEQ ID NO: 114411 - RNA, 1410 nt, Artificial Sequence; identical to SEQ ID NO: 113911
  derived and/or modified CDS sequence (opt2) from neuraminidase__InfluenzaA__ADD97701

SEQ ID NO: 114412 - RNA, 1410 nt, Artificial Sequence; identical to SEQ ID NO: 112774
  derived and/or modified CDS sequence (opt2) from neuraminidase__InfluenzaA__ADD97891

SEQ ID NO: 114413 - RNA, 1410 nt, Artificial Sequence; identical to SEQ ID NO: 112774
  derived and/or modified CDS sequence (opt2) from neuraminidase__InfluenzaA__ADD97901

SEQ ID NO: 114414 - RNA, 1410 nt, Artificial Sequence; identical to SEQ ID NO: 112774
  derived and/or modified CDS sequence (opt2) from neuraminidase__InfluenzaA__ADD97911

SEQ ID NO: 114415 - RNA, 1410 nt, Artificial Sequence; identical to SEQ ID NO: 112774
  derived and/or modified CDS sequence (opt2) from neuraminidase__InfluenzaA__ADD97921

SEQ ID NO: 114416 - RNA, 1410 nt, Artificial Sequence; identical to SEQ ID NO: 112774
  derived and/or modified CDS sequence (opt2) from neuraminidase__InfluenzaA__ADD97931

SEQ ID NO: 114417 - RNA, 1410 nt, Artificial Sequence; identical to SEQ ID NO: 113541
  derived and/or modified CDS sequence (opt2) from neuraminidase__InfluenzaA__ADD97941

SEQ ID NO: 114418 - RNA, 1410 nt, Artificial Sequence
  derived and/or modified CDS sequence (opt2) from neuraminidase__InfluenzaA__ADD97951
augaaccccaaccagaagaucaucaccaucuccuccgucugcaugaccaucggcauggccaaccucauccuccagaucggcaacaucaucuccaucuggaucucccacuccauccagcucggcaaccagaaccagaucgagaccugcaaccaguccgucaucaccuacgagaacaacaccugggucaaccagaccuacgucaacaucuccaacaccaacuucgccgccggccaguccgucgucuccgucaagcucgccggcaacuccucccucugccccgucuccggcugggccaucuacuccaaggacaacuccauccgcaucggcuccaagggcgacgucuucgucauccgcgagcccuucaucuccugcuccccccucgagugccgcaccuucuuccucacccagggcgcccuccucaacgacaagcacuccaacggcaccaucaaggaccgcucccccuaccgcacccucauguccugccccaucggcgagguccccucccccuacaacucccgcuucgaguccgucgccugguccgccuccgccugccacgacggcaucaacuggcucaccaucggcaucuccggccccgacaacggcgccgucgccguccucaaguacaacggcaucaucaccgacaccaucaaguccuggcgcaacaacauccuccgcacccaggaguccgagugcgccugcgucaacggcuccugcuucaccgucaugaccgacggccccuccgacggccaggccuccuacaagaucuuccgcaucgagaagggcaagaucgucaaguccgucgagaugaacgcccccaacuaccacuacgaggagugcuccugcuaccccgacuccuccgagaucaccugcgucugccgcgacaacuggcacggcuccaaccgccccugggucuccuucaaccagaaccucgaguaccagaucggcuacaucugcuccggcaucuucggcgacaacccccgccccaacgacaagaccggcuccugcggccccgucuccuccaacggcgccaacggcgucaagggcuucuccuucaaguacggcaacggcgucuggaucggccgcaccaaguccaucuccucccgcaacggcuucgagaugaucugggaccccaacggcuggaccggcaccgacaacaacuucuccaucaagcaggacaucgucggcaucaacgagugguccggcuacuccggcuccuucguccagcaccccgagcucaccggccucgacugcauccgccccugcuucugggucgagcucauccgcggccgccccaaggagaacaccaucuggaccuccggcuccuccaucuccuucugcggcgucaacuccgacaccgucggcugguccuggcccgacggcgccgagcuccccuucaccaucgacaaguga

SEQ ID NO: 114419 - RNA, 1410 nt, Artificial Sequence
  derived and/or modified CDS sequence (opt2) from neuraminidase__InfluenzaA__ADD97961
augaaccccaaccagaagaucaucaccaucggcuccgucugcaugaccaucggcauggucaaccucauccuccagaucggcaacaucaucuccaucuggaucucccacuccauccagcucggcaaccagaaccagaucgagaccugcaaccaguccgucaucaccuacgagaacaacaccugggucaaccagaccuacgucaacaucuccaacaccaacuucgccgccggccaguccgucgucuccgucaagcucgccggcaacgccucccucugccccgucuccggcugggccaucuacuccaaggacaacuccauccgcaucggcuccaagggcgacgucuucgucauccgcgagcccuucaucuccugcuccccccucgagugccgcaccuucuuccucacccagggcgcccuccucaacgacaagcacuccaacggcaccaucaaggaccgcucccccuaccgcacccucauguccugccccaucggcgagguccccucccccuacaacucccgcuucgaguccgucgccugguccgccuccgccugccacgacggcaucaacuggcucaccaucggcaucuccggccccgacaacggcgccgucgccguccucaaguacaacggcaucaucaccgacaccaucaaguccuggcgcaacaacauccuccgcacccaggaguccgagugcgccugcgucaacggcuccugcuucaccgucaugaccgacggccccuccgacggccaggccuccuacaagaucuuccgcaucgagaagggcaagaucgucaaguccgucgagaugaacgcccccaacuaccacuacgaggagugcuccugcuaccccgacuccuccgagaucaccugcgucugccgcgacaacuggcacggcuccaaccgccccugggucuccuucaaccagaaccucgaguaccagaucggcuacaucugcuccggcaucuucggcgacaacccccgccccaacgacaagaccggcuccugcggccccgucuccuccaacggcgccaacggcgucaagggcuucuccuucaaguacggcaacggcgucuggaucggccgcaccaaguccaucuccucccgcaacggcuucgagaugaucugggaccccaacggcuggaccggcaccgacaacaacuucuccaucaagcaggacaucgucggcaucaacgagugguccggcuacuccggcuccuucguccagcaccccgagcucaccggccucgacugcauccgccccugcuucugggucgagcucauccgcggccgccccaaggagaacaccaucuggaccuccggcuccuccaucuccuucugcggcgucaacuccgacaccgucggcugguccuggcccgacggcgccgagcuccccuucaccaucgacaaguga

SEQ ID NO: 114420 - RNA, 1410 nt, Artificial Sequence; identical to SEQ ID NO: 114366
  derived and/or modified CDS sequence (opt2) from neuraminidase__InfluenzaA__ADD97971

SEQ ID NO: 114421 - RNA, 1410 nt, Artificial Sequence; identical to SEQ ID NO: 112774
  derived and/or modified CDS sequence (opt2) from neuraminidase__InfluenzaA__ADD97981

SEQ ID NO: 114422 - RNA, 1410 nt, Artificial Sequence
  derived and/or modified CDS sequence (opt2) from neuraminidase__InfluenzaA__ADD97991
augaaccccaaccagaagaucaucaccaucggcuccgucugcaugaccaucggcauggccaaccucauccuccagaucggcaacaucaucuccaucuggaucucccacuccauccagcucggcaaccagaaccagaucgagaccugcaaccaguccgucaucaccuacgagaacaacaccugggucaaccagaccuacgucaacaucuccaacaccaacuucgccgccggccaguccgucgucuccgucaagcucgccggcaacuccucccucugccccgucuccggcugggccaucuacuccaaggacaacuccauccgcaucggcuccaagggcgacgucuucgucauccgcgagcccuucaucuccugcuccccccucgagugccgcaccuucuuccucacccagggcgcccuccucaacgacaagcacuccaacggcaccaucaaggaccgcucccccuaccgcacccucauguccugccccaucggcgagguccccucccccuacaacucccgcuucgaguccgucgccugguccgccuccgccugccacgacggcaucaacuggcucaccaucggcaucuccggccccgacaacggcgccgucgccguccucaaguacaacggcaucaucaccgacaccaucaaguccuggcgcaacaacauccuccgcacccaggaguccgagugcgccugcgucaacggcuccugcuucaccgucaugaccgacggccccuccgacggccaggccuccuacaagaucuuccgcaucgagaagggcaagaucgucaaguccgucgagaugaacgcccccaacuaccacuacgaggagugcuccugcuaccccgacuccuccgagaucaccugcgucugccgcgacaacuggcacggcuccaaccgccccugggucuccuucaaccagaaccucgaguaccagaucggcuacaucugcuccggcaucuucggcgacaacccccgccccaacgacaagaccggcuccugcggccccgucuccuccaacggcgccaacggcgucaagggcuucuccuucaaguacggcaacggcgucuggaucggccgcaccaaguccaucuccucccgcaacggcuucgagaugaucugggaccccaacggcuggaucggcaccgacaacaacuucuccaucaagcaggacaucgucggcaucaacgagugguccggcuacuccggcuccuucguccagcaccccgagcucaccggccucgacugcauccgccccugcuucugggucgagcucauccgcggccgccccaaggagaacaccaucuggaccuccggcuccuccaucuccuucugcggcgucaacuccgacaccgucggcugguccuggcccgacggcgccgagcuccccuucaccaucgacaaguga

SEQ ID NO: 114423 - RNA, 1410 nt, Artificial Sequence
  derived and/or modified CDS sequence (opt2) from neuraminidase__InfluenzaA__ADD98001
augaaccccaaccagaagaucaucaccaucggcuccgucugcaugaccaucggcauggccaaccucauccuccagaucggcaacaucaucuccaucuggaucucccacuccauccagcucggcaaccagaaccagaucgagaccugcaaccaguccgucaucaccuacgagaacaacaccugggucaaccagaccuacgucaacaucuccaacaccaacuucgccgccggccaguccgucgucuccgucaagcucgccggcaacuccucccucugccccgucuccggcugggccaucuacuccaaggacaacuccauccgcaucggcuccaagggcgacgucuucgucauccgcgagcccuucaucuccugcuccccccucgagugccgcaccuucuuccucacccagggcgcccuccucaacgacaagcacuccaacggcaccaucaaggaccgcucccccuaccgcacccucauguccugccccaucggcgagguccccucccccuacaacucccgcuucgaguccgucgccugguccgccuccgccugccacgacggcaucaacuggcucaccaucggcaucuccggccccgacaacggcgccgucgccguccucaaguacaacggcaucaucaccgacaccgucaaguccuggcgcaacaacauccuccgcacccaggaguccgagugcgccugcgucaacggcuccugcuucaccgucaugaccgacggccccuccgacggccaggccuccuacaagaucuuccgcaucgagaagggcaagaucgucaaguccgucgagaugaacgcccccaacuaccacuacgaggagugcuccugcuaccccgacuccuccgagaucaccugcgucugccgcgacaacuggcacggcuccaaccgccccugggucuccuucaaccagaaccucgaguaccagaucggcuacaucugcuccggcaucuucggcgacaacccccgccccaacgacaagaccggcuccugcggccccgucuccuccaacggcgccaacggcgucaagggcuucuccuucaaguacggcaacggcgucuggaucggccgcaccaaguccaucuccucccgcaacggcuucgagaugaucugggaccccaacggcuggaccggcaccgacaacaacuucuccaucaagcaggacaucgucggcaucaacgagugguccggcuacuccggcuccuucguccagcaccccgagcucaccggccucgacugcauccgccccugcuucugggucgagcucauccgcggccgccccaaggagaacaccaucuggaccuccggcuccuccaucuccuucugcggcgucaacuccgacaccgucggcugguccuggcccgacggcgccgagcuccccuucaccaucgacaaguga

SEQ ID NO: 114424 - RNA, 1410 nt, Artificial Sequence; identical to SEQ ID NO: 112774
  derived and/or modified CDS sequence (opt2) from neuraminidase__InfluenzaA__ADD98011

SEQ ID NO: 114425 - RNA, 1410 nt, Artificial Sequence; identical to SEQ ID NO: 112774
  derived and/or modified CDS sequence (opt2) from neuraminidase__InfluenzaA__ADD98031

SEQ ID NO: 114426 - RNA, 1410 nt, Artificial Sequence; identical to SEQ ID NO: 114423
  derived and/or modified CDS sequence (opt2) from neuraminidase__InfluenzaA__ADD98041

SEQ ID NO: 114427 - RNA, 1410 nt, Artificial Sequence; identical to SEQ ID NO: 112774
  derived and/or modified CDS sequence (opt2) from neuraminidase__InfluenzaA__ADD98051

SEQ ID NO: 114428 - RNA, 1410 nt, Artificial Sequence; identical to SEQ ID NO: 112774
  derived and/or modified CDS sequence (opt2) from neuraminidase__InfluenzaA__ADD98061

SEQ ID NO: 114429 - RNA, 1410 nt, Artificial Sequence; identical to SEQ ID NO: 112774
  derived and/or modified CDS sequence (opt2) from neuraminidase__InfluenzaA__ADD98071

SEQ ID NO: 114430 - RNA, 1410 nt, Artificial Sequence; identical to SEQ ID NO: 112774
  derived and/or modified CDS sequence (opt2) from neuraminidase__InfluenzaA__ADD98081

SEQ ID NO: 114431 - RNA, 1410 nt, Artificial Sequence; identical to SEQ ID NO: 112774
  derived and/or modified CDS sequence (opt2) from neuraminidase__InfluenzaA__ADD98091

SEQ ID NO: 114432 - RNA, 1410 nt, Artificial Sequence; identical to SEQ ID NO: 113600
  derived and/or modified CDS sequence (opt2) from neuraminidase__InfluenzaA__ADD98101

SEQ ID NO: 114433 - RNA, 1410 nt, Artificial Sequence
  derived and/or modified CDS sequence (opt2) from neuraminidase__InfluenzaA__ADD98111
augaaccccaaccagaagaucaucaccaucggcuccgucugcaugaccaucggcauggccaaccucauccuccagaucggcaacaucaucuccaucuggaucucccacuccauccagcucggcaaccagaaccagaucgagaccugcaaccaguccgucaucaccuacgagaacaacaccugggucaaccagaccuacgucaacaucuccaacaccaacuucgccgccggccaguccgucgucuccgucaagcucgccggcaacuccucccucugccccgucuccggcugggccaucuacuccaaggacaacuccauccgcaucggcuccaagggcgacgucuucgucauccgcgagcccuucaucuccugcuccccccucgagugccgcaccuucuuccucacccagggcgcccuccucaacgacaagcacuccaacggcaccaucaaggaccgcucccccuaccgcacccucauguccugccccaucggcgagguccccucccccuacaacucccgcuucgaguccgucgccugguccgccuccgccugccacgacggcaucaacuggcucaccaucggcaucuccggccccgacaacggcgccgucgccguccucaaguacaacggcaucaucaccgacaccaucaaguccuggcgcaacaacauccuccgcacccaggaguccgagugcgccugcgucaacggcuccugcuucaccgucaugaccgacggccccuccgacggccaggccuccuacaagaucuuccgcaucgagaagggcaagaucgucaaguccgucgagaugaacgcccccaacuaccacuacgaggagugcuccugcuaccccgacuccuccgagaucaccugcgucugccgcgacaacuggcacggcuccaaccgccccugggucuccuucaaccagaaccucgaguaccagaucggcuacaucugcuccggcauccucggcgacaacccccgccccaacgacaagaccggcuccugcggccccgucuccuccaacggcgccaacggcgucaagggcuucuccuucaaguacggcaacggcgucuggaucggccgcaccaaguccaucuccucccgcaacggcuucgagaugaucugggaccccaacggcuggaccggcaccgacaacaacuucuccaucaagcaggacaucgucggcaucaacgagugguccggcuacuccggcuccuucguccagcaccccgagcucaccggccucgacugcauccgccccugcuucugggucgagcucauccgcggccgccccaaggagaacaccaucuggaccuccggcuccuccaucuccuucugcggcgucaacuccgacaccgucggcugguccuggcccgacggcgccgagcuccccuucaccaucgacaaguga

SEQ ID NO: 114434 - RNA, 1410 nt, Artificial Sequence; identical to SEQ ID NO: 112774
  derived and/or modified CDS sequence (opt2) from neuraminidase__InfluenzaA__ADD98121

SEQ ID NO: 114435 - RNA, 1410 nt, Artificial Sequence; identical to SEQ ID NO: 112774
  derived and/or modified CDS sequence (opt2) from neuraminidase__InfluenzaA__ADD98131

SEQ ID NO: 114436 - RNA, 1410 nt, Artificial Sequence; identical to SEQ ID NO: 112774
  derived and/or modified CDS sequence (opt2) from neuraminidase__InfluenzaA__ADD98141

SEQ ID NO: 114437 - RNA, 1410 nt, Artificial Sequence; identical to SEQ ID NO: 112774
  derived and/or modified CDS sequence (opt2) from neuraminidase__InfluenzaA__ADD98151

SEQ ID NO: 114438 - RNA, 1410 nt, Artificial Sequence
  derived and/or modified CDS sequence (opt2) from neuraminidase__InfluenzaA__ADD98161
augaaccccaaccagaagaucaucaccaucggcuccgucugcaugaccaucggcauggccaaccucauccuccagaucggcaacaucaucuccaucuggaucucccacaccauccagcucggcaaccagaaccagaucgagaccugcaaccaguccgucaucaccuacgagaacaacaccugggucaaccagaccuacgucaacaucuccaacaccaacuucgccgccggccaguccgucgucuccgucaagcucgccggcaacuccucccucugccccgucuccggcugggccaucuacuccaaggacaacuccauccgcaucggcuccaagggcgacgucuucgucauccgcgagcccuucaucuccugcuccccccucgagugccgcaccuucuuccucacccagggcgcccuccucaacgacaagcacuccaacggcaccaucaaggaccgcucccccuaccgcacccucauguccugccccaucggcgagguccccucccccuacaacucccgcuucgaguccgucgccugguccgccuccgccugccacgacggcaucaacuggcucaccaucggcaucuccggccccgacaacggcgccgucgccguccucaaguacaacggcaucaucaccgacaccaucaaguccuggcgcaacaacauccuccgcacccaggaguccgagugcgccugcgucaacggcuccugcuucaccgucaugaccgacggccccuccgacggccaggccuccuacaagaucuuccgcaucgagaagggcaagaucgucaaguccgucgagaugaacgcccccaacuaccacuacgaggagugcuccugcuaccccgacuccuccgagaucaccugcgucugccgcgacaacuggcacggcuccaaccgccccugggucuccuucaaccagaaccucgaguaccagaucggcuacaucugcuccggcaucuucggcgacaacccccgccccaacgacaagaccggcuccugcggccccgucuccuccaacggcgccaacggcgucaagggcuucuccuucaaguacggcaacggcgucuggaucggccgcaccaaguccaucuccucccgcaacggcuucgagaugaucugggaccccaacggcuggacccgcaccgacaacaacuucuccaucaagcaggacaucgucggcaucaacgagugguccggcuacuccggcuccuucguccagcaccccgagcucaccggccucgacugcauccgccccugcuucugggucgagcucauccgcggccgccccaaggagaacaccaucuggaccuccggcuccuccaucuccuucugcggcgucaacuccgacaccgucggcugguccuggcccgacggcgccgagcuccccuucaccaucgacaaguga

SEQ ID NO: 114439 - RNA, 1410 nt, Artificial Sequence
  derived and/or modified CDS sequence (opt2) from neuraminidase__InfluenzaA__ADD98171
augaaccccaaccagaagaucaucaucaucggcuccgucugcaugaccaucggcauggccaaccucauccuccagaucggcaacaucaucuccaucuggaucucccacuccauccagcucggcaaccagaaccagaucgagaccugcaaccaguccgucaucaccuacgagaacaacaccugggucaaccagaccuacgucaacaucuccaacaccaacuucgccgccggccagaccgucgucuccgucaagcucgccggcaacuccucccucugccccgucuccggcugggccaucuacuccaaggacaacuccauccgcaucggcuccaagggcgacgucuucgucauccgcgagcccuucaucuccugcuccccccucgagugccgcaccuucuuccucacccagggcgcccuccucaacgacaagcacuccaacggcaccaucaaggaccgcucccccuaccgcacccucauguccugccccaucggcgagguccccucccccuacaacucccgcuucgaguccgucgccugguccgccuccgccugccacgacggcaucaacuggcucaccaucggcaucuccggccccgacaacggcgccgucgccguccucaaguacaacggcaucaucaccgacaccaucaaguccuggcgcaacaacauccuccgcacccaggaguccgagugcgccugcgucaacggcuccugcuucaccgucaugaccgacggccccuccgacggccaggccuccuacaagaucuuccgcaucgagaagggcaagaucgucaaguccgucgagaugaacgcccccaacuaccacuacgaggagugcuccugcuaccccgacuccuccgagaucaccugcgucugccgcgacaacuggcacggcuccaaccgccccugggucuccuucaaccagaaccucgaguaccagaucggcuacaucugcuccggcaucuucggcgacaacccccgcuccaacgacaagaccggcuccugcggccccgucuccuccaacggcgccaacggcgucaagggcuucuccuucaaguacggcaacggcgucuggaucggccgcaccaaguccaucuccucccgcaacggcuucgagaugaucugggaccccaacggcuggaccggcaccgacaacaacuucuccaucaagcaggacaucgucggcaucaacgagugguccggcuacuccggcuccuucguccagcaccccgagcucaccggccucgacugcauccgccccugcuucugggucgagcucauccgcggccgccccaaggagaacaccaucuggaccuccggcuccuccaucuccuucugcggcgucaacuccgacaccgucggcugguccuggcccgacggcgccgagcuccccuucaccaucgacaaguga

SEQ ID NO: 114440 - RNA, 1410 nt, Artificial Sequence
  derived and/or modified CDS sequence (opt2) from neuraminidase__InfluenzaA__ADD98181
augaaccccaaccagaagaucaucaccaucggcuccgucugcaugaccaucggcauggccaaccucauccuccagaucggcaacaugaucuccaucuggaucucccacuccauccagcucgagaaccagaaccagaucgagaccugcaaccaguccgucaucaccuacgagaacaacaccugggucaaccagaccuacgucaacaucuccaacaccaacuucgccgccggccaguccgucgucuccgucaagcucgccggcaacuccucccucugccccgucuccggcugggccaucuacuccaaggacaacuccauccgcaucggcuccaagggcgacgucuucgucauccgcgagcccuucaucuccugcuccccccucgagugccgcaccuucuuccucacccagggcgcccuccucaacgacaagcacuccaacggcaccaucaaggaccgcucccccuaccgcacccucauguccugccccaucggcgagguccccucccccuacaacucccgcuucgaguccgucgccugguccgccuccgccugccacgacggcaucaacuggcucaccaucggcaucuccggccccgacaacggcgccgucgccguccucaaguacaacggcaucaucaccgacaccaucaaguccuggcgcaacaacauccuccgcacccaggaguccgagugcgccugcgucaacggcuccugcuucaccgucaugaccgacggccccuccgacggccaggccuccuacaagaucuuccgcaucgagaagggcaagaucgucaaguccgucgagaugaacgcccccaacuaccacuacgaggagugcuccugcuaccccgacuccuccgagaucaccugcgucugccgcgacaacuggcacggcuccaaccgccccugggucuccuucaaccagaaccucgaguaccagaucggcuacaucugcuccggcaucuucggcgacaacccccgccccaacgacaagaccggcuccugcggccccgucuccuccaacggcgccaacggcgucaagggcuucuccuucaaguacggcaacggcgucuggaucggccgcaccaaguccaucuccucccgcaacggcuucgagaugaucugggaccccaacggcuggaccggcaccgacaacaacuucuccaucaagcaggacaucgucggcaucaacgagugguccggcuacuccggcuccuucguccagcaccccgagcucaccggccucgacugcauccgccccugcuucugggucgagcucauccgcggccgccccaaggagaacaccaucuggaccuccggcuccuccaucuccuucugcggcgucaacuccgacaccgucggcugguccuggcccgacggcgccgagcuccccuucaccaucgacaaguga

SEQ ID NO: 114441 - RNA, 1410 nt, Artificial Sequence; identical to SEQ ID NO: 112774
  derived and/or modified CDS sequence (opt2) from neuraminidase__InfluenzaA__ADD98201

SEQ ID NO: 114442 - RNA, 1410 nt, Artificial Sequence; identical to SEQ ID NO: 112774
  derived and/or modified CDS sequence (opt2) from neuraminidase__InfluenzaA__ADD98211

SEQ ID NO: 114443 - RNA, 1410 nt, Artificial Sequence; identical to SEQ ID NO: 113997
  derived and/or modified CDS sequence (opt2) from neuraminidase__InfluenzaA__ADE20324

SEQ ID NO: 114444 - RNA, 1410 nt, Artificial Sequence; identical to SEQ ID NO: 113997
  derived and/or modified CDS sequence (opt2) from neuraminidase__InfluenzaA__ADE20334

SEQ ID NO: 114445 - RNA, 1410 nt, Artificial Sequence; identical to SEQ ID NO: 113997
  derived and/or modified CDS sequence (opt2) from neuraminidase__InfluenzaA__ADE20344

SEQ ID NO: 114446 - RNA, 1410 nt, Artificial Sequence; identical to SEQ ID NO: 113997
  derived and/or modified CDS sequence (opt2) from neuraminidase__InfluenzaA__ADE20354

SEQ ID NO: 114447 - RNA, 1410 nt, Artificial Sequence; identical to SEQ ID NO: 113997
  derived and/or modified CDS sequence (opt2) from neuraminidase__InfluenzaA__ADE20378

SEQ ID NO: 114448 - RNA, 1410 nt, Artificial Sequence; identical to SEQ ID NO: 113997
  derived and/or modified CDS sequence (opt2) from neuraminidase__InfluenzaA__ADE20391

SEQ ID NO: 114449 - RNA, 1410 nt, Artificial Sequence; identical to SEQ ID NO: 113997
  derived and/or modified CDS sequence (opt2) from neuraminidase__InfluenzaA__ADE20631

SEQ ID NO: 114450 - RNA, 1410 nt, Artificial Sequence; identical to SEQ ID NO: 113997
  derived and/or modified CDS sequence (opt2) from neuraminidase__InfluenzaA__ADE20641

SEQ ID NO: 114451 - RNA, 1410 nt, Artificial Sequence
  derived and/or modified CDS sequence (opt2) from neuraminidase__InfluenzaA__ADE20651
augaaccccaaccagaagaucaucaccaucggcuccgucugcaugaccaucggcauggccaaccucauccuccagaucggcaacaucaucuccaucuggaucucccacuccauccagcucggcaaccagaaccagaucgagaccugcaaccaguccgucaucaccuacgagaacaacaccugggucaaccagaccuacgucaacaucuccaacaccaacuucgccgccggccaguccgucgucuccgucaagcucgucggcaacuccucccucugccccgucuccggcugggccaucuacuccaaggacaacuccguccgcaucggcuccaagggcgacgucuucgucauccgcgagcccuucaucuccugcuccccccucgagugccgcaccuucuuccucacccagggcgcccuccucaacgacaagcacuccaacggcaccaucaaggaccgcucccccuaccgcacccucauguccugccccaucggcgagguccccucccccuacaacucccgcuucgaguccgucgccugguccgccuccgccugccacgacggcaucaacuggcucaccaucggcaucuccggccccgacaacggcgccgucgccguccucaaguacaacggcaucaucaccgacaccaucaaguccuggcgcaacaacauccuccgcacccaggaguccgagugcgccugcgucaacggcuccugcuucaccgucaugaccgacggccccuccgacggccaggccuccuacaagaucuuccgcaucgagaagggcaagaucgucaaguccgucgagaugaacgcccccaacuaccacuacgaggagugcuccugcuaccccgacuccuccgagaucaccugcgucugccgcgacaacuggcacggcuccaaccgccccugggucuccuucaaccagaaccucgaguaccagaucggcuacaucugcuccggcaucuucggcgacaacccccgccccaacgacaagaccggcuccugcggccccgucuccuccaacggcgccaacggcgucaagggcuucuccuucaaguacggcaacggcgucuggaucggccgcaccaaguccaucuccucccgcaacggcuucgagaugaucugggaccccaacggcuggaccggcaccgacaacaacuucuccaucaagcaggacaucgucggcaucaacgagugguccggcuacuccggcuccuucguccagcaccccgagcucaccggccucgacugcauccgccccugcuucugggucgagcucauccgcggccgccccaaggagaacaccaucuggaccuccggcuccuccaucuccuucugcggcgucaacuccgacaccgucggcugguccuggcccgacggcgccgagcuccccuucaccaucgacaaguga

SEQ ID NO: 114452 - RNA, 1410 nt, Artificial Sequence; identical to SEQ ID NO: 113997
  derived and/or modified CDS sequence (opt2) from neuraminidase__InfluenzaA__ADE20661

SEQ ID NO: 114453 - RNA, 1410 nt, Artificial Sequence; identical to SEQ ID NO: 113997
  derived and/or modified CDS sequence (opt2) from neuraminidase__InfluenzaA__ADE20671

SEQ ID NO: 114454 - RNA, 1410 nt, Artificial Sequence; identical to SEQ ID NO: 113997
  derived and/or modified CDS sequence (opt2) from neuraminidase__InfluenzaA__ADE20681

SEQ ID NO: 114455 - RNA, 1410 nt, Artificial Sequence
  derived and/or modified CDS sequence (opt2) from neuraminidase__InfluenzaA__ADE20701
augaaccccaaccagaagaucaucaccaucggcuccgucugcaugaccaucggcauggccaaccucauccuccagaucggcaacaucaucuccaucuggaucucccacuccauccagcucggcaaccagaaccagaucgagaccugcaaccaguccgucaucaccuacgagaacaacaccugggucaaccagaccuacgucaacaucuccaacaccaacuucgccgccggccaguccgucgucuccgucaagcucgccggcaacuccucccucugccccgucuccggcugggccaucuacuccaaggacaacuccguccgcaucggcuccaagggcgacgucuucgucauccgcgagcccuucaucuccugcuccccccucgagugccgcaccuucuuccucacccagggcgcccuccucaacgacaagcacuccaacggcaccaucaaggaccgcucccccuaccgcacccucauguccugccccaucggcgagguccccucccccuacaacucccgcuucgaguccgucgccugguccgccuccgccugccacgacggcaucaacuggcucaccaucggcaucuccggccccgacaacggcgccgucgccguccucaaguacaacggcgucaucaccgacaccaucaaguccuggcgcaacaacauccuccgcacccaggaguccgagugcgccugcgucaacggcuccugcuucaccgucaugaccgacggccccuccaacggccaggccuccuacaagaucuuccgcaucgagaagggcaagaucgucaaguccgucgagaugaacgcccccaacuaccacuacgaggagugcuccugcuaccccgacuccuccgagaucaccugcgucugccgcgacaacuggcacggcuccaaccgccccugggucuccuucaaccagaaccucgaguaccagaucggcuacaucugcuccggcaucuucggcgacaacccccgccccaacgacaagaccggcuccugcggccccgucuccuccaacggcgccaacggcgucaagggcuucuccuucaaguacggcaacggcgucuggaucggccgcaccaaguccaucuccucccgcaacggcuucgagaugaucugggaccccaacggcuggaccggcaccgacaacaacuucuccaucaagcaggacaucgucggcaucaacgagugguccggcuacuccggcuccuucguccagcaccccgagcucaccggccucgacugcauccgccccugcuucugggucgagcucauccgcggccgccccaaggagaacaccaucuggaccuccggcuccuccaucuccuucugcggcgucaacuccgacaccgucggcugguccuggcccgacggcgccgagcuccccuucaccaucgacaaguga

SEQ ID NO: 114456 - RNA, 1410 nt, Artificial Sequence; identical to SEQ ID NO: 113997
  derived and/or modified CDS sequence (opt2) from neuraminidase__InfluenzaA__ADE20711

SEQ ID NO: 114457 - RNA, 1410 nt, Artificial Sequence
  derived and/or modified CDS sequence (opt2) from neuraminidase__InfluenzaA__ADE20721
augaaccccaaccagaagaucaucaccaucggcuccgucugcaugaccaucggcauggccaaccucauccuccagaucggcaacaucaucuccaucuggaucucccacuccauccagcucggcaaccagaaccagaucgagaccugcaaccaguccgucaucaccuacgagaacaacaccugggucaaccagaccuacgucaacaucuccaacaccaacuucgccgccggccaguccgucgucuccgucaagcucgucggcaacuccucccucugccccgucuccggcugggccaucuacuccaaggacaacuccguccgcaucggcuccaagggcgacgucuucgucauccgcgagcccuucaucuccugcuccccccucgagugccgcaccuucuuccucacccagggcgcccuccucaacgacaagcacuccaacggcaccaucaaggaccgcucccccuaccgcacccucauguccugccccaucggcgagguccccucccccuacaacucccgcuucgaguccgucgccugguccgccuccgccugccacgacggcaucaacuggcucaccaucggcaucuccggccccgacaacggcgccgucgccguccucaaguacaacggcaucaucaccgacaccaucaaguccuggcgcaacaacauccuccgcacccaggaguccgagugcgccugcgucaacggcuccugcuucaccgucaugaccgacggccccuccaacggccaggccuccuacaagaucuuccgcaucgagaagggcaagaucgucaaguccgucgagaugaacgcccccaacuaccacuacgaggagugcuccugcuaccccgacuccuccgagaucaccugcgucugccgcgacaacuggcacggcuccaaccgccccugggucuccuucaaccagaaccucgaguaccagaucggcuacaucugcuccggcaucuucggcgacaacccccgccccaacgacaagaccggcuccugcggccccgucuccuccaacggcgccaacggcgucaagggcuucuccuucaaguacggcaacggcgucuggaucggccgcaccaaguccaucuccucccgcaacggcuucgagaugaucugggaccccaacggcuggaccggcaccgacaacaacuucuccaucaagcaggacaucgucggcaucaacgagugguccggcuacuccggcuccuucguccagcaccccgagcucaccggccucgacugcauccgccccugcuucugggucgagcucauccgcggccgccccaaggagaacaccaucuggaccuccggcuccuccaucuccuucugcggcgucaacuccgacaccgucggcugguccuggcccgacggcgccgagcuccccuucaccaucgaccgcuga

SEQ ID NO: 114458 - RNA, 1410 nt, Artificial Sequence; identical to SEQ ID NO: 114455
  derived and/or modified CDS sequence (opt2) from neuraminidase__InfluenzaA__ADE20731

SEQ ID NO: 114459 - RNA, 1410 nt, Artificial Sequence; identical to SEQ ID NO: 113997
  derived and/or modified CDS sequence (opt2) from neuraminidase__InfluenzaA__ADE20741

SEQ ID NO: 114460 - RNA, 1410 nt, Artificial Sequence; identical to SEQ ID NO: 113997
  derived and/or modified CDS sequence (opt2) from neuraminidase__InfluenzaA__ADE20751

SEQ ID NO: 114461 - RNA, 1410 nt, Artificial Sequence; identical to SEQ ID NO: 114455
  derived and/or modified CDS sequence (opt2) from neuraminidase__InfluenzaA__ADE20761

SEQ ID NO: 114462 - RNA, 1410 nt, Artificial Sequence; identical to SEQ ID NO: 114455
  derived and/or modified CDS sequence (opt2) from neuraminidase__InfluenzaA__ADE20781

SEQ ID NO: 114463 - RNA, 1410 nt, Artificial Sequence; identical to SEQ ID NO: 112774
  derived and/or modified CDS sequence (opt2) from neuraminidase__InfluenzaA__ADE20791

SEQ ID NO: 114464 - RNA, 1410 nt, Artificial Sequence; identical to SEQ ID NO: 112774
  derived and/or modified CDS sequence (opt2) from neuraminidase__InfluenzaA__ADE20801

SEQ ID NO: 114465 - RNA, 1410 nt, Artificial Sequence; identical to SEQ ID NO: 112774
  derived and/or modified CDS sequence (opt2) from neuraminidase__InfluenzaA__ADE20811

SEQ ID NO: 114466 - RNA, 1410 nt, Artificial Sequence; identical to SEQ ID NO: 112774
  derived and/or modified CDS sequence (opt2) from neuraminidase__InfluenzaA__ADE20821

SEQ ID NO: 114467 - RNA, 1410 nt, Artificial Sequence; identical to SEQ ID NO: 112774
  derived and/or modified CDS sequence (opt2) from neuraminidase__InfluenzaA__ADE20831

SEQ ID NO: 114468 - RNA, 1410 nt, Artificial Sequence; identical to SEQ ID NO: 112774
  derived and/or modified CDS sequence (opt2) from neuraminidase__InfluenzaA__ADE20841

SEQ ID NO: 114469 - RNA, 1410 nt, Artificial Sequence; identical to SEQ ID NO: 112774
  derived and/or modified CDS sequence (opt2) from neuraminidase__InfluenzaA__ADE20851

SEQ ID NO: 114470 - RNA, 1410 nt, Artificial Sequence; identical to SEQ ID NO: 114390
  derived and/or modified CDS sequence (opt2) from neuraminidase__InfluenzaA__ADE20861

SEQ ID NO: 114471 - RNA, 1410 nt, Artificial Sequence; identical to SEQ ID NO: 112774
  derived and/or modified CDS sequence (opt2) from neuraminidase__InfluenzaA__ADE20871

SEQ ID NO: 114472 - RNA, 1410 nt, Artificial Sequence; identical to SEQ ID NO: 114386
  derived and/or modified CDS sequence (opt2) from neuraminidase__InfluenzaA__ADE20881

SEQ ID NO: 114473 - RNA, 1410 nt, Artificial Sequence; identical to SEQ ID NO: 112774
  derived and/or modified CDS sequence (opt2) from neuraminidase__InfluenzaA__ADE20891

SEQ ID NO: 114474 - RNA, 1410 nt, Artificial Sequence; identical to SEQ ID NO: 112774
  derived and/or modified CDS sequence (opt2) from neuraminidase__InfluenzaA__ADE20901

SEQ ID NO: 114475 - RNA, 1410 nt, Artificial Sequence; identical to SEQ ID NO: 112774
  derived and/or modified CDS sequence (opt2) from neuraminidase__InfluenzaA__ADE20911

SEQ ID NO: 114476 - RNA, 1410 nt, Artificial Sequence; identical to SEQ ID NO: 112774
  derived and/or modified CDS sequence (opt2) from neuraminidase__InfluenzaA__ADE20921

SEQ ID NO: 114477 - RNA, 1410 nt, Artificial Sequence
  derived and/or modified CDS sequence (opt2) from neuraminidase__InfluenzaA__ADE20931
augaaccccaaccagaagaucaucaccaucggcuccgucugcaugaccaucggcauggccaaccucauccuccagaucggcaacaucaucuccaucuggaucucccacuccauccagcucggcaaccagaaccagaucgagaccugcaaccaguccgucaucaccuacgagaacaacaccugggucaaccagaccuacgucaacaucuccaacaccaacuucgccgccggccaguccgucgucuccgucaagcucgccggcaacuccucccucugccccgucuccggcugggccaucuacuccaaggacaacuccauccgcaucggcuccaagggcgacgucuucgucauccgcgagcccuucaucuccugcuccccccucgagugccgcaccuucuuccucacccagggcgcccuccucaacgacaagcacuccaacggcaccaucaaggaccgcucccccuaccgcacccucauguccugccccaucggcgagguccccucccccuacaacucccgcuucgaguccgucgccugguccgccuccgccugccacgacggcaucaacuggcucaccaucggcaucuccggccccgacaacggcgccgucgccguccucaaguacaacggcaucaucaccgacaccaucaaguccuggcgcaacaacauccuccgcacccaggaguccgagugcgccugcgucaacggcuccugcuucaccgucaugaccgacggccccuccgacggccaggccuccuacaagaucuuccgcaucgagaagggcaagaucgucaaguccgucgagaugaacgcccccaacuaccacuacgaggagugcuccugcuaccccgacuccuccgagaucaccugcgucugccgcgacaacuggcacggcuccaaccgccccugggucuccuucaaccagaaccucgaguaccagaucggcuacaucugcuccggcaucuucggcgacaacccccgccccaacgacaagaccggcuccugcggccccguccucuccaacggcgccaacggcgucaagggcuucuccuucaaguacggcaacggcgucuggaucggccgcaccaaguccaucggcucccgcaacggcuucgagaugaucugggaccccaacggcuggaccggcaccgacaacaacuucuccaucaagcaggacaucgucggcaucaacgagugguccggcuacuccggcuccuucguccagcaccccgagcucaccggccucgacugcauccgccccugcuucugggucgagcucauccgcggccgccccaaggagaacaccaucuggaccuccggcuccuccaucuccuucugcggcgucaacuccgacaccgucggcugguccuggcccgacggcgccgagcuccccuucaccaucgacaaguga

SEQ ID NO: 114478 - RNA, 1410 nt, Artificial Sequence; identical to SEQ ID NO: 112774
  derived and/or modified CDS sequence (opt2) from neuraminidase__InfluenzaA__ADE20941

SEQ ID NO: 114479 - RNA, 1410 nt, Artificial Sequence
  derived and/or modified CDS sequence (opt2) from neuraminidase__InfluenzaA__ADE20951
augaaccccaaccagaagaucaucaccaucggcuccgucugcaugaccaucggcauggccaaccucauccuccagaucggcaacaucaucuccaucuggaucucccacuccauccagcucggcaaccagaaccagaucgagaccugcaaccaguccgucaucaccuacgagaacaacaccugggucaaccagaccuacgucaacaucuccaacaccaacuucgccgccggccaguccgucgucuccgucaagcucgccggcaacuccucccucugccccgucuccggcugggccaucuacuccaaggacaacuccauccgcaucggcuccaagggcgacgucuucgucauccgcgagcccuucaucuccugcuccccccucgagugccgcaccuucuuccucacccagggcgcccuccucaacgacaagcacuccaacggcaccaucaaggaccgcucccccuaccgcacccucauguccugccccaucggcgagguccccucccccuacaacucccgcuucgaguccgucgccugguccgccuccgccugccacgacggcaucaacuggcucaccaucggcaucuccggccccgacaacggcgccgucgccguccucaaguacaacggcaucaucaccgacaccaucaaguccuggcgcaacaacauccuccgcacccaggaguccgagugcgccugcgucaacggcuccugcuucaccgucaugaccgacggccccuccgacggccaggccuccuacaagaucuuccgcaucgagaagggcaagaucgucaaguccgucgagaugaacgcccccaacuaccacuacgaggagugcuccugcuaccccgacuccuccgagaucaccugcgucugccgcgacaacuggcacggcuccaaccgccccugggucuccuucaaccagaaccucgaguaccagaucggcuacaucugcuccggcaucuucggcgacaacccccgccccaacgacaagaccggcuccugcggccccgucuccuccaacggcgccaacggcgucaagggcuucuccuucaaguacggcaacggcgucuggaucggccgcaccaaguccaucuccucccgcaacggcuucgagaugaucugggaccccaacggcuggaccggcaccgacaacaacuucuccaucaagcaggacgucgucggcaucaacgagugguccggcuacuccggcuccuucguccagcaccccgagcucaccggccucgacugcauccgccccugcuucugggucgagcucauccgcggccgccccaaggagaacaccaucuggaccuccggcuccuccaucuccuucugcggcgucaacuccgacaccgucggcugguccuggcccgacggcgccgagcuccccuucaccaucgacaaguga

SEQ ID NO: 114480 - RNA, 1410 nt, Artificial Sequence
  derived and/or modified CDS sequence (opt2) from neuraminidase__InfluenzaA__ADE20961
augaaccccaaccagaagaucaucaccaucggcuccgucugcaugaccaucggcauggccaaccucauccuccagaucggcaacaucaucuccaucuggaucucccacuccauccagcucggcaaccagaaccagaucgagaccugcaaccaguccgucaucaccuacgagaacaacaccugggucaaccagaccuacgucaacaucuccaacaccaacuucgccgccggccaguccgucgucuccgucaagcucgccggcaacuccucccucugccccgucuccggcugggccaucuacuccaaggacaacuccauccgcaucggcuccaagggcgacgucuucgucauccgcgagcccuucaucuccugcuccccccucgagugccgcaccuucuuccucacccagggcgcccuccucaacgacaagcacuccaacggcaccaucaaggaccgcucccccuaccgcacccucauguccugccccaucggcgagguccccucccccuacaacucccgcuucgaguccgucgccugguccgccuccgccugccacgacggcaucaacuggcucaccaucggcaucuccggccccgacaacggcgccgucgccguccucaaguacaacgacaucaucaccgacaccaucaaguccuggcgcaacaacauccuccgcacccaggaguccgagugcgccugcgucaacggcuccugcuucaccgucaugaccgacggccccuccgacggccaggccuccuacaagaucuuccgcaucgagaagggcaagaucgucaaguccgucgagaugaacgcccccaacuaccacuacgaggagugcuccugcuaccccgacuccuccgagaucaccugcgucugccgcgacaacuggcacggcuccaaccgccccugggucuccuucaaccagaaccucgaguaccagaucggcuacaucugcuccggcaucuucggcgacaacccccgccccaacgacaagaccggcuccugcggccccgucuccuccaacggcgccaacggcgucaagggcuucuccuucaaguacggcaacggcgucuggaucggccgcaccaaguccaucuccucccgcaacggcuucgagaugaucugggaccccaacggcuggaccggcaccgacaacaacuucuccaucaagcaggacaucgucggcaucaacgagugguccggcuacuccggcuccuucguccagcaccccgagcucaccggccucgacugcauccgccccugcuucugggucgagcucauccgcggccgccccaaggagaacaccaucuggaccuccggcuccuccaucuccuucugcggcgucaacuccgacaccgucggcugguccuggcccgacggcgccgagcuccccuucaccaucgacaaguga

SEQ ID NO: 114481 - RNA, 1410 nt, Artificial Sequence; identical to SEQ ID NO: 112774
  derived and/or modified CDS sequence (opt2) from neuraminidase__InfluenzaA__ADE20971

SEQ ID NO: 114482 - RNA, 1410 nt, Artificial Sequence; identical to SEQ ID NO: 114390
  derived and/or modified CDS sequence (opt2) from neuraminidase__InfluenzaA__ADE20981

SEQ ID NO: 114483 - RNA, 1410 nt, Artificial Sequence; identical to SEQ ID NO: 112774
  derived and/or modified CDS sequence (opt2) from neuraminidase__InfluenzaA__ADE20991

SEQ ID NO: 114484 - RNA, 1410 nt, Artificial Sequence
  derived and/or modified CDS sequence (opt2) from neuraminidase__InfluenzaA__ADE21001
augaaccccaaccagaagaucaucaccaucggcuccgucugcaugaccaucggcauggccaaccucauccuccagaucggcaacaucaucuccaucuggaucucccacaccauccagcucggcaaccagaaccagaucgagaccugcaaccaguccgucaucaccuacgagaacaacaccugggucaaccagaccuacgucaacaucuccaacaccaacuucgccgccggccaguccgucgucuccgucaagcucgccggcaacuccucccucugccccgucuccggcugggccaucuacuccaaggacaacuccauccgcaucggcuccaagggcgacgucuucaucauccgcgagcccuucaucuccugcuccccccucgagugccgcaccuucuuccucacccagggcgcccuccucaacgacaagcacuccaacggcaccaucaaggaccgcucccccuaccgcacccucauguccugccccaucggcgagguccccucccccuacaacucccgcuucgaguccgucgccugguccgccuccgccugccacgacggcaucaacuggcucaccaucggcaucuccggccccgacaacggcgccgucgccguccucaaguacaacggcaucaucaccgacaccaucaaguccuggcgcaacaacauccuccgcacccaggaguccgagugcgccugcgucaacggcuccugcuucaccgucaugaccgacggccccuccgacggccaggccuccuacaagaucuuccgcaucgagaagggcaagaucgucaaguccgucgagaugaacgcccccaacuaccacuacgaggagugcuccugcuaccccgacuccuccgagaucaccugcgucugccgcgacaacuggcacggcuccaaccgccccugggucuccuucaaccagaaccucgaguaccagaucggcuacaucugcuccggcaucuucggcgacaacccccgccccaacgacaagaccggcuccugcggccccgucuccuccaacggcgccaacggcgucaagggcuucuccuucaaguacggcaacggcgucuggaucggccgcaccaaguccaucuccucccgcaacggcuucgagaugaucugggaccccaacggcuggaccggcaccgacaacaacuucuccaucaagcaggacaucgucggcaucaacgagugguccggcuacuccggcuccuucguccagcaccccgagcucaccggccucgacugcauccgccccugcuucugggucgagcucauccgcggccgccccaaggagaacaccaucuggaccuccggcuccuccaucuccuucugcggcgucaacuccgacaccgucggcugguccuggcccgacggcgccgagcuccccuucaccaucgacaaguga

SEQ ID NO: 114485 - RNA, 1410 nt, Artificial Sequence; identical to SEQ ID NO: 112774
  derived and/or modified CDS sequence (opt2) from neuraminidase__InfluenzaA__ADE21011

SEQ ID NO: 114486 - RNA, 1410 nt, Artificial Sequence; identical to SEQ ID NO: 112774
  derived and/or modified CDS sequence (opt2) from neuraminidase__InfluenzaA__ADE21021

SEQ ID NO: 114487 - RNA, 1410 nt, Artificial Sequence; identical to SEQ ID NO: 114423
  derived and/or modified CDS sequence (opt2) from neuraminidase__InfluenzaA__ADE21031

SEQ ID NO: 114488 - RNA, 1410 nt, Artificial Sequence
  derived and/or modified CDS sequence (opt2) from neuraminidase__InfluenzaA__ADE21041
augaaccccaaccagaagaucaucaccaucggcuccgucugcaugaccaucggcauggccaaccucauccuccagaucggcaacaucaucuccaucuggaucucccacuccauccagcucggcaaccagaaccagaucgagaccugcaaccaguccgucaucaccuacgagaacaacaccugggucaaccagaccuacgucaacaucuccaacaccaacuucgccgccggccaguccgucgucuccgucaagcucgccggcaacuccucccucugccccgucuccggcugggccaucuacuccaaggacaacuccauccgcaucggcuccaagggcgacgucuucgucauccgcgagcccuucaucuccugcuccccccucgagugccgcaccuucuuccucacccagggcgcccuccucaacgacaagcacuccaacggcaccaucaaggaccgcucccccuaccgcacccucauguccugccccaucggcgagguccccucccccuacaacucccgcuucgaguccgucgccugguccgccuccgccugccacgacggcaucaacuggcucaccaucggcaucuccggccccgacaacggcgccgucgccguccucaaguacaacggcaucaucaccgacaccaucaaguccuggcgcaacaacauccuccgcacccaggaguccgagugcgccugcgucaacggcuccugcuucaccgucaugaccgacggccccuccgacggccaggccuccuacaagaucuuccgcaucgagaagggcaagaucgucaaguccaucgagaugaacgcccccaacuaccacuacgaggagugcuccugcuaccccgacuccuccgagaucaccugcgucugccgcgacaacuggcacggcuccaaccgccccugggucuccuucaaccagaaccucgaguaccagaucggcuacaucugcuccggcaucuucggcgacaacccccgccccaacgacaagaccggcuccugcggccccgucuccuccaacggcgccaacggcgucaagggcuucuccuucaaguacggcaacggcgucuggaucggccgcaccaaguccaucuccucccgcaacggcuucgagaugaucugggaccccaacggcuggaccggcaccgacaacaacuucuccaucaagcaggacaucgucggcaucaacgagugguccggcuacuccggcuccuucguccagcaccccgagcucaccggccucgacugcauccgccccugcuucugggucgagcucauccgcggccgccccaaggagaacaccaucuggaccuccggcuccuccaucuccuucugcggcgucaacuccgacaccgucggcugguccuggcccgacggcgccgagcuccccuucaccaucgacaaguga

SEQ ID NO: 114489 - RNA, 1410 nt, Artificial Sequence; identical to SEQ ID NO: 112774
  derived and/or modified CDS sequence (opt2) from neuraminidase__InfluenzaA__ADE21051

SEQ ID NO: 114490 - RNA, 1410 nt, Artificial Sequence
  derived and/or modified CDS sequence (opt2) from neuraminidase__InfluenzaA__ADE21071
augaaccccaaccagaagaucaucaccaucggcuccgucugcaugaccaucggcauggccaaccucauccuccagaucggcaacaucaucuccaucuggaucucccacuccauccagcucggcaaccagaaccagaucgagaccugcaaccaguccgucaucaccuacgagaacaacaccugggucaaccagaccuacgucaacaucuccaacaccaacuucgccgccggccaguccgucgucuccgucaagcucgccggcaacuccucccucugccccgucaacggcugggccaucuacuccaaggacaacuccauccgcaucggcuccaagggcgacgucuucgucauccgcgagcccuucaucuccugcuccccccucgagugccgcaccuucuuccucacccagggcgcccuccucaacgacaagcacuccaacggcaccaucaaggaccgcucccccuaccgcacccucauguccugccccaucggcgagguccccucccccuacaacucccgcuucgaguccgucgccugguccgccuccgccugccacgacggcaucaacuggcucaccaucggcaucuccggccccgacaacggcgccgucgccguccucaaguacaacggcaucaucaccgacaccaucaaguccuggcgcaacaacauccuccgcacccaggaguccgagugcgccugcgucaacggcuccugcuucaccgucaugaccgacggccccuccgacggccaggccuccuacaagaucuuccgcaucgagaagggcaagaucgucaaguccgucgagaugaacgcccccaacuaccacuacgaggagugcuccugcuaccccgacuccuccgagaucaccugcgucugccgcgacaacuggcacggcuccaaccgccccugggucuccuucaaccagaaccucgaguaccagaucggcuacaucugcuccggcaucuucggcgacaacccccgccccaacgacaagaccggcuccugcggccccgucuccuccaacggcgccaacggcgucaagggcuucuccuucaaguacggcaacggcgucuggaucggccgcaccaaguccaucuccucccgcaacggcuucgagaugaucugggaccccaacggcuggaccggcaccgacaacaaguucuccaucaagcaggacaucgucggcaucaacgagugguccggcuacuccggcuccuucguccagcaccccgagcucaccggccucgacugcauccgccccugcuucugggucgagcucauccgcggccgccccaaggagaacaccaucuggaccuccggcuccuccaucuccuucugcggcgucaacuccgacaccgucggcugguccuggcccgacggcgccgagcuccccuucaccaucgacaaguga

SEQ ID NO: 114491 - RNA, 1413 nt, Artificial Sequence; identical to SEQ ID NO: 112668
  derived and/or modified CDS sequence (opt2) from neuraminidase__InfluenzaA__ADE28752

SEQ ID NO: 114492 - RNA, 1413 nt, Artificial Sequence; identical to SEQ ID NO: 113497
  derived and/or modified CDS sequence (opt2) from neuraminidase__InfluenzaA__ADE28763

SEQ ID NO: 114493 - RNA, 1410 nt, Artificial Sequence; identical to SEQ ID NO: 113997
  derived and/or modified CDS sequence (opt2) from neuraminidase__InfluenzaA__ADE28773

SEQ ID NO: 114494 - RNA, 1410 nt, Artificial Sequence; identical to SEQ ID NO: 113997
  derived and/or modified CDS sequence (opt2) from neuraminidase__InfluenzaA__ADE28783

SEQ ID NO: 114495 - RNA, 1410 nt, Artificial Sequence; identical to SEQ ID NO: 114455
  derived and/or modified CDS sequence (opt2) from neuraminidase__InfluenzaA__ADE28803

SEQ ID NO: 114496 - RNA, 1410 nt, Artificial Sequence; identical to SEQ ID NO: 112774
  derived and/or modified CDS sequence (opt2) from neuraminidase__InfluenzaA__ADE28813

SEQ ID NO: 114497 - RNA, 1410 nt, Artificial Sequence; identical to SEQ ID NO: 112774
  derived and/or modified CDS sequence (opt2) from neuraminidase__InfluenzaA__ADE28823

SEQ ID NO: 114498 - RNA, 1410 nt, Artificial Sequence
  derived and/or modified CDS sequence (opt2) from neuraminidase__InfluenzaA__ADE28843
augaaccccaaccagaagaucaucaccaucggcuccgucugcaugaccaucggcauggccaaccucauccuccagaucggcaacaucaucuccaucuggaucucccacuccauccagcucggcaaccagaaccagaucgagaccugcaaccaguccgucaucaccuacgagaacaacaccugggucaaccagaccuacgucaacaucuccaacaccaacuucgccgccggccaguccgucgucuccgucaagcucgccggcaacuccucccucugccccgucuccggcugggccaucuacuccaaggacaacuccguccgcaucggcuccaagggcgacgucuucgucauccgcgagcccuucaucuccugcuccccccucgagugccgcaccuucuuccucacccagggcgcccuccucaacgacaagcacuccaacggcaccaucaaggaccgcucccccuaccgcacccucauguccugccccgucggcgagguccccucccccuacaacucccgcuucgaguccgucgccugguccgccuccgccugccacgacggcaucaacuggcucaccaucggcaucuccggccccgacaacggcgccgucgccguccucaaguacaacggcaucaucaccgacaccaucaaguccuggcgcaacaacauccuccgcacccaggaguccgagugcgccugcgucaacggcuccugcuucaccgucaugaccgacggccccuccaacggccaggccuccuacaagaucuuccgcaucgagaagggcaagaucgucaaguccgucgagaugaacgcccccaacuaccacuacgaggagugcuccugcuaccccgacuccuccgagaucaccugcgucugccgcgacaacuggcacggcuccaaccgccccugggucuccuucaaccagaaccucgaguaccagaucggcuacaucugcuccggcaucuucggcgacaacccccgccccaacgacaagaccggcuccugcggccccgucuccuccaacggcgccaacggcgucaagggcuucuccuucaaguacggcaacggcgucuggaucggccgcaccaaguccaucuccucccgcaacggcuucgagaugaucugggaccccaacggcuggaccggcaccgacaacaacuucuccaucaagcaggacaucgucggcaucaacgagugguccggcuacuccggcuccuucguccagcaccccgagcucaccggccucgacugcauccgccccugcuucugggucgagcucauccgcggccgccccaaggagaacaccaucuggaccuccggcuccuccaucuccuucugcggcgucaacuccgacaccgucggcugguccuggcccgacggcgccgagcuccccuucaccaucgacaaguga

SEQ ID NO: 114499 - RNA, 1410 nt, Artificial Sequence
  derived and/or modified CDS sequence (opt2) from neuraminidase__InfluenzaA__ADE28853
augaaccccaaccagaagaucaucaccaucgucuccgucugcaugaccaucggcauggccaaccucauccuccagaucggcaacaucaucuccaucuggaucucccacuccauccagcucggcaaccagaaccagaucgagaccugcaaccaguccgucaucaccuacgagaacaacaccugggucaaccagaccuacgucaacaucuccaacaccaacuucgccgccggccaguccgucgucuccgucaagcucgccggcaacuccucccucugccccgucuccggcugggccaucuacuccaaggacaacuccguccgcaucggcuccaagggcgacgucuucgucauccgcgagcccuucaucuccugcuccccccucgagugccgcaccuucuuccucacccagggcgcccuccucaacgacaagcacuccaacggcaccaucaaggaccgcucccccuaccgcacccucauguccugccccaucggcgagguccccucccccuacaacucccgcuucgaguccgucgccugguccgccuccgccugccacgacggcaucaacuggcucaccaucggcaucuccggccccgacaacggcgccgucgccguccucaaguacaacggcaucaucaccgacaccaucaaguccuggcgcaacaacauccuccgcacccaggaguccgagugcgccugcgucaacggcuccugcuucaccgucaugaccgacggccccuccaacggccaggccuccuacaagaucuuccgcaucgagaagggcaagaucgucaaguccgucgagaugaacgcccccaacuaccacuacgaggagugcuccugcuaccccgacuccuccgagaucaccugcgucugccgcgacaacuggcacggcuccaaccgccccugggucuccuucaaccagaaccucgaguaccagaucggcuacaucugcuccggcaucuucggcgacaacccccgccccaacgacaagaccggcuccugcggccccgucuccuccaacggcgccaacggcgucaagggcuucuccuucaaguacggcaacggcgucuggaucggccgcaccaaguccaucuccucccgcaacggcuucgagaugaucugggaccccaacggcuggaccggcaccgacaacaacuucuccaucaagcaggacaucgucggcaucaacgagugguccggcuacuccggcuccuucguccagcaccccgagcucaccggccucgacugcauccgccccugcuucugggucgagcucauccgcggccgccccaaggagaacaccaucuggaccuccggcuccuccaucuccuucugcggcgucaacuccgacaccgucggcugguccuggcccgacggcgccgagcuccccuucaccaucgacaaguga

SEQ ID NO: 114500 - RNA, 1410 nt, Artificial Sequence; identical to SEQ ID NO: 114498
  derived and/or modified CDS sequence (opt2) from neuraminidase__InfluenzaA__ADE28884

SEQ ID NO: 114501 - RNA, 1410 nt, Artificial Sequence
  derived and/or modified CDS sequence (opt2) from neuraminidase__InfluenzaA__ADE28894
augaaccccaaccagaagaucaucaccaucggcuccgucugcaugaccaucggcauggccaaccucauccuccagaucggcaacaucaucuccaucuggaucucccacuccguccagcucggcaaccagaaccagaucgagaccugcaaccaguccgucaucaccuacgagaacaacaccugggucaaccagaccuacgucaacaucuccaacaccaacuucgccgccggccaguccgucgucuccgucaagcucgccggcaacuccucccucugccccgucuccggcugggccaucuacuccaaggacaacuccguccgcaucggcuccaagggcgacgucuucgucauccgcgagcccuucaucuccugcuccccccucgagugccgcaccuucuuccucacccagggcgcccuccucaacgacaagcacuccaacggcaccaucaaggaccgcucccccuaccgcacccucauguccugccccaucggcgagguccccucccccuacaacucccgcuucgaguccgucgccugguccgccuccgccugccacgacggcaucaacuggcucaccaucggcaucuccggccccgacaacggcgccgucgccguccucaaguacaacggcaucaucaccgacaccaucaaguccuggcgcaacaacauccuccgcacccaggaguccgagugcgccugcgucaacggcuccugcuucaccgucaugaccgacggccccuccaacggccaggccuccuacaagaucuuccgcaucgagaagggcaagaucgucaaguccgucgagaugaacgcccccaacuaccacuacgaggagugcuccugcuaccccgacuccuccgagaucaccugcgucugccgcgacaacuggcacggcuccaaccgccccugggucuccuucaaccagaaccucgaguaccagaucggcuacaucugcuccggcaucuucggcgacaacccccgccccaacgacaagaccggcuccugcggccccgucuccuccaacggcgccaacggcgucaagggcuucuccuucaaguacggcaacggcgucuggaucggccgcaccaaguccaucuccucccgcaacggcuucgagaugaucugggaccccaacggcuggaccggcaccgacaacaacuucuccaucaagcaggacaucgucggcaucaacgagugguccggcuacuccggcuccuucguccagcaccccgagcucaccggccucgacugcauccgccccugcuucugggucgagcucauccgcggccgccccaaggagaacaccaucuggaccuccggcuccuccaucuccuucugcggcgucaacuccgacaccgucggcugguccuggcccgacggcgccgagcuccccuucaccaucgacaaguga

SEQ ID NO: 114502 - RNA, 1410 nt, Artificial Sequence; identical to SEQ ID NO: 114422
  derived and/or modified CDS sequence (opt2) from neuraminidase__InfluenzaA__ADE28904

SEQ ID NO: 114503 - RNA, 1410 nt, Artificial Sequence; identical to SEQ ID NO: 112774
  derived and/or modified CDS sequence (opt2) from neuraminidase__InfluenzaA__ADE28914

SEQ ID NO: 114504 - RNA, 1410 nt, Artificial Sequence; identical to SEQ ID NO: 112774
  derived and/or modified CDS sequence (opt2) from neuraminidase__InfluenzaA__ADE28924

SEQ ID NO: 114505 - RNA, 1410 nt, Artificial Sequence
  derived and/or modified CDS sequence (opt2) from neuraminidase__InfluenzaA__ADE28934
augaaccccaaccagaagaucaucaccaucggcuccgucugcaugaccaucggcauggccaaccucauccuccagaucggcaacaucaucuccaucuggaucucccacuccauccagcucggcaaccagaaccagaucgagaccugcaaccaguccgucaucaccuacgagaacaacaccugggucaaccagaccuacgucaacaucuccaacaccaacuucgccgccggccaguccgucgucuccgucaagcucgccggcaacuccucccucugccccgucuccggcugggccaucuacuccaaggacaacuccauccgcaucggcuccaagggcgacgucuucgucauccgcgagcccuucaucuccugcuccccccucgagugccgcaccuucuuccucacccagggcgcccuccucaacgacaagcacuccaacggcaccaucaaggaccgcucccccuaccgcacccucauguccugccccaucggcgagguccccucccccuacaacucccgcuucgaguccgucgccugguccgccuccgccugccacgacggcaucaacuggcucaccaucggcaucuccggccccgacaacggcgccgucgccguccucaaguacaacggcaucaucaccgacaccaucaaguccuggcgcaacaacauccuccgcacccaggaguccgagugcgccugcaucaacggcuccugcuucaccgucaugaccgacggccccuccgacggccaggccuccuacaagaucuuccgcaucgagaagggcaagaucgucaaguccgucgagaugaacgcccccaacuaccacuacgaggagugcuccugcuaccccgacuccuccgagaucaccugcgucugccgcgacaacuggcacggcuccaaccgccccugggucuccuucaaccagaaccucgaguaccagaucggcuacaucugcuccggcaucuucggcgacaacccccgccccaacgacaagaccggcuccugcggccccgucuccuccaacggcgccaacggcgucaagggcuucuccuucaaguacggcaacggcgucuggaucggccgcaccaaguccaucuccucccgcaacggcuucgagaugaucugggaccccaacggcuggaccggcaccgacaacaacuucuccaucaagcaggacaucgucggcaucaacgagugguccggcuacuccggcuccuucguccagcaccccgagcucaccggccucgacugcauccgccccugcuucugggucgagcucauccgcggccgccccaaggagaacaccaucuggaccuccggcuccuccaucuccuucugcggcgucaacuccgacaccgucggcugguccuggcccgacggcgccgagcuccccuucaccaucgacaaguga

SEQ ID NO: 114506 - RNA, 1410 nt, Artificial Sequence; identical to SEQ ID NO: 112774
  derived and/or modified CDS sequence (opt2) from neuraminidase__InfluenzaA__ADE28954

SEQ ID NO: 114507 - RNA, 1410 nt, Artificial Sequence
  derived and/or modified CDS sequence (opt2) from neuraminidase__InfluenzaA__ADE28964
augaaccccaaccagaagaucaucaccaucggcuccgucugcaugaccaucggcauggccaaccucauccuccagaucggcaacaucaucuccaucuggaucucccacuccauccagcucggcaaccagaaccagaucgagaccugcaaccaguccgucaucaccuacgagaacaacaccugggucaaccagaccuacgucaacaucuccaacaucaacuucgccgccggccaguccgucgucuccgucaagcucgccggcaacuccucccucugccccgucuccggcugggccaucuacuccaaggacaacuccauccgcaucggcuccaagggcgacgucuucgucauccgcgagcccuucaucuccugcuccccccucgagugccgcaccuucuuccucacccagggcgcccuccucaacgacaagcacuccaacggcaccaucaaggaccgcucccccuaccgcacccucauguccugccccaucggcgagguccccucccccuacaacucccgcuucgaguccgucgccugguccgccuccgccugccacgacggcaucaacuggcucaccaucggcaucuccggccccgacaacggcgccgucgccguccucaaguacaacggcaucaucaccgacaccaucaaguccuggcgcaacaacauccuccgcacccaggaguccgagugcgccugcgucaacggcuccugcuucaccgucaugaccgacggccccuccgacggccaggccuccuacaagaucuuccgcaucgagaagggcaagaucgucaaguccgucgagaugaacgcccccaacuaccacuacgaggagugcuccugcuaccccgacuccuccgagaucaccugcgucugccgcgacaacuggcacggcuccaaccgccccugggucuccuucaaccagaaccucgaguaccagaucggcuacaucugcuccggcaucuucggcgacaacccccgccccaacgacaagaccggcuccugcggccccgucuccuccaacggcgccaacggcgucaagggcuucuccuucaaguacggcaacggcgucuggaucggccgcaccaaguccaucuccucccgcaacggcuucgagaugaucugggaccccaacggcuggaccggcaccgacaacaacuucuccaucaagcaggacaucgucggcaucaacgagugguccggcuacuccggcuccuucguccagcaccccgagcucaccggccucgacugcauccgccccugcuucugggucgagcucauccgcggccgccccaaggagaacaccaucuggaccuccggcuccuccaucuccuucugcggcgucaacuccgacaccgucggcugguccuggcccgacggcgccgagcuccccuucaccaucgacaaguga

SEQ ID NO: 114508 - RNA, 1410 nt, Artificial Sequence; identical to SEQ ID NO: 112774
  derived and/or modified CDS sequence (opt2) from neuraminidase__InfluenzaA__ADE28974

SEQ ID NO: 114509 - RNA, 1410 nt, Artificial Sequence
  derived and/or modified CDS sequence (opt2) from neuraminidase__InfluenzaA__ADE29004
augaaccccaaccagaagaucaucaccaucggcuccgucugcaugaccaucggccucgccaaccucauccuccagaucggcaacaucaucuccaucuggaucucccacuccauccagcucggcaaccagaaccagaucgagaccugcaaccaguccgucaucaccuacgagaacaacaccugggucaaccagaccuacgucaacaucuccaacaccaacuucgccgccggccaguccgucgucuccgucaagcucgccggcaacuccucccucugccccgucuccggcugggccaucuacuccaaggacaacuccguccgcaucggcuccaagggcgacgucuucgucauccgcgagcccuucaucuccugcuccccccucgagugccgcaccuucuuccucacccagggcgcccuccucaacgacaagcacuccaacggcaccaucaaggaccgcucccccuaccgcacccucauguccugccccaucggcgagguccccucccccuacaacucccgcuucgaguccgucgccugguccgccuccgccugccacgacggcaucaacuggcucaccaucggcaucuccggccccgacaacggcgccgucgccguccucaaguacaacggcaucaucaccgacaccaucaaguccuggcgcaacaacauccuccgcacccaggaguccgagugcgccugcgucaacggcuccugcuucaccgucaugaccgacggccccuccgacggccaggccuccuacaagaucuuccgcaucgagaagggcaagaucgucaaguccgucgagaugaacgcccccaacuaccacuacgaggagugcuccugcuaccccgacuccuccgagaucaccugcgucugccgcgacaacuggcacggcuccaaccgccccugggucuccuucaaccagaaccucgaguaccgcaucggcuacaucugcuccggcaucuucggcgacaacccccgccccaacgacaagaccggcuccugcggccccgucuccuccaacggcgccaacggcgucaagggcuucuccuucaaguacggcaacggcgucuggaucggccgcaccaaguccaucuccucccgcaacggcuucgagaugaucugggaccccaacggcuggaccggcaccgacaagaacuucuccaucaagcaggacaucgucggcaucaacgagugguccggcuacuccggcuccuucguccagcaccccgagcucaccggccucgacugcauccgccccugcuucugggucgagcucauccgcggccgccccaaggagaacaccaucuggaccuccggcuccuccaucuccuucugcggcgucaacuccgacaccgucggcugguccuggcccgacggcgccgagcuccccuucaccaucgacaaguga

SEQ ID NO: 114510 - RNA, 1410 nt, Artificial Sequence; identical to SEQ ID NO: 112774
  derived and/or modified CDS sequence (opt2) from neuraminidase__InfluenzaA__ADE29014

SEQ ID NO: 114511 - RNA, 1410 nt, Artificial Sequence
  derived and/or modified CDS sequence (opt2) from neuraminidase__InfluenzaA__ADE29024
augaaccccaaccagaagaucaucaccaucggcuccgucugcaugaccaucggcauggccaaccucauccuccagaucggcaacaucaucuccaucuggaucucccacuccauccagcucggcaaccagaaccagaucgagaccugcaaccaguccgucaucaccuacgagaacaacaccugggucaaccagaccuacgucaacaucuccaacaccaacuucgccgccggccaguccgucgucuccgucaagcucgccggcaacuccucccucugccccgucuccggcugggccaucuacuccaaggacaacuccauccgcaucggcuccaagggcgacgucuucgucauccgcgagcccuucaucuccugcuccccccucgagugccgcaccuucuuccucacccagggcgcccuccucaacgacaagcacuccaacggcaccaucaaggaccgcucccccuaccgcacccucauguccugccccaucggcgagguccccucccccuacaacucccgcuucgaguccgucgccugguccgccuccgccugccacgacggcaucaacuggcucaccaucggcaucuccggccccgacaacggcgccgucgccguccucaaguacaacggcaucaucaccgacaccaucaaguccuggaagaacaacauccuccgcacccaggaguccgagugcgccugcgucaacggcuccugcuucaccgucaugaccgacggccccuccgacggccaggccuccuacaagaucuuccgcaucgagaagggcaagaucgucaaguccgucgagaugaacgcccccaacuaccacuacgaggagugcuccugcuaccccgacuccuccgagaucaccugcgucugccgcgacaacuggcacggcuccaaccgccccugggucuccuucaaccagaaccucgaguaccagaucggcuacaucugcuccggcaucuucggcgacaacccccgccccaacgacaagaccggcuccugcggccccgucuccuccaacggcgccaacggcgucaagggcuucuccuucaaguacggcaacggcgucuggaucggccgcaccaaguccaucuccucccgcaacggcuucgagaugaucugggaccccaacggcuggaacggcaccgacaacaacuucuccaucaagcaggacaucgucggcaucaacgagugguccggcuacuccggcuccuucguccagcaccccgagcucaccggccucgacugcauccgccccugcuucugggucgagcucauccgcggccgccccaaggagaacaccaucuggaccuccggcuccuccaucuccuucugcggcgucaacuccgacaccgucggcugguccuggcccgacggcgccgagcuccccuucaccaucgacaaguga

SEQ ID NO: 114512 - RNA, 1410 nt, Artificial Sequence; identical to SEQ ID NO: 112774
  derived and/or modified CDS sequence (opt2) from neuraminidase__InfluenzaA__ADE29034

SEQ ID NO: 114513 - RNA, 1410 nt, Artificial Sequence; identical to SEQ ID NO: 112774
  derived and/or modified CDS sequence (opt2) from neuraminidase__InfluenzaA__ADE29044

SEQ ID NO: 114514 - RNA, 1410 nt, Artificial Sequence; identical to SEQ ID NO: 112774
  derived and/or modified CDS sequence (opt2) from neuraminidase__InfluenzaA__ADE29054

SEQ ID NO: 114515 - RNA, 1410 nt, Artificial Sequence; identical to SEQ ID NO: 114062
  derived and/or modified CDS sequence (opt2) from neuraminidase__InfluenzaA__ADE29064

SEQ ID NO: 114516 - RNA, 1410 nt, Artificial Sequence
  derived and/or modified CDS sequence (opt2) from neuraminidase__InfluenzaA__ADE29087
augaaccccaaccagaagaucaucaccaucggcuccgucugcaugaccaucggcauggccaaccucauccuccagaucggcaacaucaucuccaucuggaucucccacuccauccagcucggcaaccagaaccagaucgagaccugcaaccaguccgucaucaccuacgagaacaacaccugggucaaccagaccuacgucaacaucuccaacaccaacuucgccgccggccaguccgucgucuccgucaagcucgccggcaacuccucccucugccccgucuccggcugggccaucuacuccaaggacaacuccguccgcaucggcuccaagggcgacgucuucgucauccgcgagcccuucaucuccugcuccccccucgagugcaagaccuucuuccucacccagggcgcccuccucaacgacaagcacuccaacggcaccaucaaggaccgcucccccuaccgcacccucauguccugccccaucggcgagguccccucccccuacaacucccgcuucgaguccgucgccugguccgccuccgccugccacgacggcaucaacuggcucaccaucggcaucuccggccccgacaacggcgccgucgccguccucaaguacaacggcaucaucaccgacaccaucaaguccuggcgcaacaacauccuccgcacccaggaguccgagugcgccugcgucaacggcuccugcuucaccgucaugaccgacggccccuccaacggccaggccuccuacaagaucuuccgcaucgagaagggcaagaucgucaaguccgucgagaugaacgcccccaacuaccacuacgaggagugcuccugcuaccccgacuccuccgagaucaccugcgucugccgcgacaacuggcacggcuccaaccgccccugggucuccuucaaccagaaccucgaguaccagaucggcuacaucugcuccggcaucuucggcgacaacccccgccccaacgacaagaccggcuccugcggccccgucuccuccaacggcgccaacggcgucaagggcuucuccuucaaguacggcaacggcgucuggaucggccgcaccaaguccaucuccucccgcaacggcuucgagaugaucugggaccccaacggcuggaccggcaccgacaacaacuucuccaucaagcaggacaucgucggcaucaacgagugguccggcuacuccggcuccuucguccagcaccccgagcucaccggccucgacugcauccgccccugcuucugggucgagcucauccgcggccgccccaaggagaacaccaucuggaccuccggcuccuccaucuccuucugcggcgucaacuccgacaccgucggcugguccuggcccgacggcgccgagcuccccuucaccaucgacaaguga

SEQ ID NO: 114517 - RNA, 1410 nt, Artificial Sequence; identical to SEQ ID NO: 112764
  derived and/or modified CDS sequence (opt2) from neuraminidase__InfluenzaA__ADE29097

SEQ ID NO: 114518 - RNA, 1410 nt, Artificial Sequence; identical to SEQ ID NO: 113641
  derived and/or modified CDS sequence (opt2) from neuraminidase__InfluenzaA__ADE34194

SEQ ID NO: 114519 - RNA, 1410 nt, Artificial Sequence; identical to SEQ ID NO: 112635
  derived and/or modified CDS sequence (opt2) from neuraminidase__InfluenzaA__ADE34205

SEQ ID NO: 114520 - RNA, 1410 nt, Artificial Sequence
  derived and/or modified CDS sequence (opt2) from neuraminidase__InfluenzaA__ADE34216
augaaccccaaccagaagaucaucaccaucggcuccgucucccucaccaucuccaccaucugcuucuucaugcagaucgccauccucgucaccaccgucacccuccacuucaagcaguacgaguucaacuccccccccaacaaccaggucaugcucugcgagcccaccaucaucgagcgcaacaucaccgagaucgucuaccucaccaacaccaccaucgagaaggagaucugccccaagcucgccgaguaccgcaacugguccaagccccagugcgacaucaccggcuucgcccccuucuccaaggacaacuccauccgccucuccgccggcggcgacaucugggucacccgcgagcccuacgucuccugcgaccccgacaagugcuaccaguucgcccucggccagggcaccacccucaacaacguccacuccaacaacaccguccgcgaccgcacccccuaccgcacccuccucaugaacgagcucggcguccccuuccaccucggcaccaagcaggucugcaucgccugguccuccuccuccugccacgacggcaaggccuggcuccacgucugcaucaccggcgacgacaagaacgccaccgccuccuucaucuacaacggccgccucgucgacuccgucgucuccugguccaaggacauccuccgcacccaggaguccgagugcgucugcaucaacggcaccugcaccgucgucaugaccgacggcuccgccuccggcaaggccgacaccaagauccucuucaucgaggagggcaagaucguccacaccuccacccucuccggcuccgcccagcacgucgaggagugcuccugcuacccccgcuaccccggcguccgcugcgucugccgcgacaacuggaagggcuccaaccgccccaucgucgacaucaacaucaaggaccacuccaucgucuccuccuacgucugcuccggccucgucggcgacaccccccgcaagaacgacuccuccuccuccucccacugccucgaccccaacaacgaggagggcggccacggcgucaagggcugggccuucgacgacggcaacgacgucuggaugggccgcaccaucuccgagaagucccgccucggcuacgagaccuucaaggucaucgagggcugguccaaccccaaguccaagcuccagaucaaccgccaggucaucgucgaccgcggcaaccgcuccggcuacuccggcaucuucuccgucgagggcaaguccugcaucaaccgcugcuucuacgucgagcucauccgcggccgcaaggaggagaccgagguccucuggaccuccaacuccaucgucgucuucugcggcaccuccggcaccuacggcaccggcuccuggcccgacggcgccaacaucaaccucaugcccaucuga

SEQ ID NO: 114521 - RNA, 1410 nt, Artificial Sequence; identical to SEQ ID NO: 113641
  derived and/or modified CDS sequence (opt2) from neuraminidase__InfluenzaA__ADE34227

SEQ ID NO: 114522 - RNA, 1410 nt, Artificial Sequence; identical to SEQ ID NO: 113641
  derived and/or modified CDS sequence (opt2) from neuraminidase__InfluenzaA__ADE34238

SEQ ID NO: 114523 - RNA, 1410 nt, Artificial Sequence
  derived and/or modified CDS sequence (opt2) from neuraminidase__InfluenzaA__ADE34260
augaaccccaaccagaagaucaucaccaucggcuccgucucccucaccaucuccaccaucugcuucuucaugcagaucgccauccucaucaccaccgucacccuccacuucaagcaguacgaguucaacuccccccccaacaaccaggucaugcucugcgagcccaccaucaucgagcgcaacaucaccgagaucgucuaccucaccaacaccaccaucgagaaggagaucugccccaagcucgccgaguaccgcaacugguccaagccccagugcgacaucaccggcuucgcccccuucuccaaggacaacuccauccgccucuccgccggcggcgacaucugggucacccgcgagcccuacgucuccugcgaccccgacaagugcuaccaguucgcccucggccagggcaccacccucaacaacguccacuccaacaacaccguccgcgaccgcacccccuaccgcacccuccucaugaacgagcucggcguccccuuccaccucggcaccaagcaggucugcaucgccugguccuccuccuccugccacgacggcaaggccuggcuccacgucugcaucaccggcgacgacaagaacgccaccgccuccuucaucuacaacggccgccucgucgacuccgucgucuccugguccaaggagauccuccgcacccaggaguccgagugcgucugcaucaacggcaccugcaccgucgucaugaccgacggcuccgccuccggcaaggccgacaccaagauccucuucaucgaggagggcaagaucguccacaccuccacccucuccggcuccgcccagcacgucgaggagugcuccugcuacccccgcuaccccggcguccgcugcgucugccgcgacaacuggaagggcuccaaccgccccaucgucgacaucaacaucaaggaccacuccaucgucuccuccuacgucugcuccggccucgucggcgacaccccccgcaagaacgacuccuccuccuccucccacugccucgaccccaacaacgaggagggcggccacggcgucaagggcugggccuucgacgacggcaacgacgucuggaugggccgcaccaucuccgagaagucccgccucggcuacgagaccuucaaggucaucgagggcugguccaaccccaaguccaagcuccagaucaaccgccaggucaucgucgaccgcggcaaccgcuccggcuacuccggcaucuucuccgucgagggcaaguccugcaucaaccgcugcuucuacgucgagcucauccgcggccgcaaggaggagaccgagguccucuggaccuccaacuccaucgucgucuucugcggcaccuccggcaccuacggcaccggcuccuggcccgacggcgccgacaucaaccucauguccaucuga

SEQ ID NO: 114524 - RNA, 1410 nt, Artificial Sequence; identical to SEQ ID NO: 113641
  derived and/or modified CDS sequence (opt2) from neuraminidase__InfluenzaA__ADE34271

SEQ ID NO: 114525 - RNA, 1410 nt, Artificial Sequence; identical to SEQ ID NO: 112774
  derived and/or modified CDS sequence (opt2) from neuraminidase__InfluenzaA__ADE45502

SEQ ID NO: 114526 - RNA, 1410 nt, Artificial Sequence; identical to SEQ ID NO: 112774
  derived and/or modified CDS sequence (opt2) from neuraminidase__InfluenzaA__ADE45504

SEQ ID NO: 114527 - RNA, 1410 nt, Artificial Sequence; identical to SEQ ID NO: 112774
  derived and/or modified CDS sequence (opt2) from neuraminidase__InfluenzaA__ADE45506

SEQ ID NO: 114528 - RNA, 1410 nt, Artificial Sequence; identical to SEQ ID NO: 112774
  derived and/or modified CDS sequence (opt2) from neuraminidase__InfluenzaA__ADE45508

SEQ ID NO: 114529 - RNA, 1410 nt, Artificial Sequence; identical to SEQ ID NO: 112774
  derived and/or modified CDS sequence (opt2) from neuraminidase__InfluenzaA__ADE45510

SEQ ID NO: 114530 - RNA, 1410 nt, Artificial Sequence; identical to SEQ ID NO: 112774
  derived and/or modified CDS sequence (opt2) from neuraminidase__InfluenzaA__ADE45512

SEQ ID NO: 114531 - RNA, 1410 nt, Artificial Sequence
  derived and/or modified CDS sequence (opt2) from neuraminidase__InfluenzaA__ADE45514
augaaccccaaccagaagaucaucaccaucggcuccgucugcaugaccaucggcauggccaaccucauccuccagaucggcaacaucaucuccaucuggaucucccacuccauccagcucggcaaccagaaccagaucgagaccugcaaccaguccaucaucaccuacgagaacaacaccugggucaaccagaccuacgucaacaucuccaacaccaacuucgccgccggccaguccgucgucuccgucaagcucgccggcaacuccucccucugccccgucuccggcugggccaucuacuccaaggacaacuccauccgcaucggcuccaagggcgacgucuucgucauccgcgagcccuucaucuccugcuccccccucgagugccgcaccuucuuccucacccagggcgcccuccucaacgacaagcacuccaacggcaccaucaaggaccgcucccccuaccgcacccucauguccugccccaucggcgagguccccucccccuacaacucccgcuucgaguccgucgccugguccgccuccgccugccacgacggcaucaacuggcucaccaucggcaucuccggccccgacaacggcgccgucgccguccucaaguacaacggcaucaucaccgacaccaucaaguccuggcgcaacaacauccuccgcacccaggaguccgagugcgccugcgucaacggcuccugcuucaccgucaugaccgacggccccuccgacggccaggccuccuacaagaucuuccgcaucgagaagggcaagaucgucaaguccgucgagaugaacgcccccaacuaccacuacgaggagugcuccugcuaccccgacuccuccgagaucaccugcgucugccgcgacaacuggcacggcuccaaccgccccugggucuccuucaaccagaaccucgaguaccagaucggcuacaucugcuccggcaucuucggcgacaacccccgccccaacgacaagaccggcuccugcggccccgucuccuccaacggcgccaacggcgucaagggcuucuccuuccaguacggcaacggcgucuggaucggccgcaccaaguccaucuccucccgcaacggcuucgagaugaucugggaccccaacggcuggaccggcaccgacaacaacuucuccaucaagcaggacaucgucggcaucaacgagugguccggcuacuccggcuccuucguccagcaccccgagcucaccggccucgacugcauccgccccugcuucugggucgagcucauccgcggccgccccaaggagaacaccaucuggaccuccggcuccuccaucuccuucugcggcgucaacuccgacaccgucggcugguccuggcccgacggcgccgagcuccccuucaccaucgacaaguga

SEQ ID NO: 114532 - RNA, 1410 nt, Artificial Sequence
  derived and/or modified CDS sequence (opt2) from neuraminidase__InfluenzaA__ADE45516
augaaccccaaccagaagaucaucaccaucggcuccgucugcaugaccaucggcauggccaaccucauccuccagaucggcaacaucaucuccaucuggaucucccacuccauccagcucggcaaccagaaccagaucgagaccugcaaccaguccgucaucaccuacgagaacaacaccugggucaaccagaccuacgucaacaucuccaacaccaacuucgccgccggccaguccgucgucuccgucaagcucgccggcaacuccucccucugccccgucuccggcugggccaucuacuccaaggacaacuccauccgcaucggcuccaagggcgacgucuucgucauccgcgagcccuucaucuccugcuccccccucgagugccgcaccuucuuccucacccagggcgcccuccucaacgacaagcacuccaacggcaccaucaaggaccgcucccccuaccgcacccucauguccugccccaucggcgagguccccucccccuacaacucccgcuucgaguccgucgccugguccgccuccgccugccacgacggcaucaacuggcucaccaucggcaucuccggccccgacaacggcgccgucgccguccucaaguacaacggcaucaucaccgacaccaucaaguccuggcgcaacaacauccuccgcacccaggaguccgagugcgccugcgucaacggcuccugcuucaccgucaugaccgacggccccuccgacggccaggccuccuacaagaucuuccgcaucgagaagggcaagaucgucaaguccgucgagaugaacgcccccaacuaccacuacgaggagugcuccugcuaccccgacuccuccgagaucaccugcgucugccgcgacaacuggcacggcuccaaccgccccugggucuccuucaaccagaaccucgaguaccagaucggcuacaucugcuccggcaucuucggcgacaacccccgccccaacgacaagaccggcuccugcggccccgucuccuccaacggcgccaacggcgucaagggcuucuccuucaaguacggcaacggcgucuggaucggccgcaccaaguccaucucccuccgcaacggcuucgagaugaucugggaccccaacggcuggaccggcaccgacaacaacuucuccaucaagcaggacaucgucggcaucaacgagugguccggcuacuccggcuccuucguccagcaccccgagcucaccggccucgacugcauccgccccugcuucugggucgagcucauccgcggccgccccaaggagaacaccaucuggaccuccggcuccuccaucuccuucugcggcgucaacuccgacaccgucggcugguccuggcccgacggcgccgagcuccccuucaccaucgacaaguga

SEQ ID NO: 114533 - RNA, 1410 nt, Artificial Sequence
  derived and/or modified CDS sequence (opt2) from neuraminidase__InfluenzaA__ADF10069
augaaccccaaccagaagaucaucaccaucggcuccgucugcaugaccaucggcauggccaaccucauccuccagaucggcaacaucaucuccaucuggaucucccacuccauccagcucggcaaccagaaccagaucgagaccugcaaccaguccgucaucaccuacgagaacaacaccugggucaaccagaccuacgucaacaucuccaacaccaacuucgccgccggccaguccgucgucuccgucaagcucgccggcaacuccucccucugccccgucuccggcugggccaucuacuccaaggacaacuccauccgcaucggcuccaagggcgacgucuucgucauccgcgagcccuucaucuccugcuccccccucgagugccgcaccuucuuccucacccagggcacccuccucaacgacaagcacuccaacggcaccaucaaggaccgcucccccuaccgcacccucauguccugccccaucggcgagguccccucccccuacaacucccgcuucgaguccgucgccugguccgccuccgccugccacgacggcaucaacuggcucaccaucggcaucuccggccccgacaacggcgccgucgccguccucaaguacaacggcaucaucaccgacaccaucaaguccuggcgcaacaacauccuccgcacccaggaguccgagugcgccugcgucaacggcuccugcuucaccgucaugaccgacggccccuccgacggccaggccuccuacaagaucuuccgcaucgagaagggcaagaucgucaaguccgucgagaugaacgcccccaacuaccacuacgaggagugcuccugcuaccccgacuccuccgagaucaccugcgucugccgcgacaacuggcacggcuccaaccgccccugggucuccuucaaccagaaccucgaguaccagaucggcuacaucugcuccggcaucuucggcgacaacccccgccccaacgacaagaccggcuccugcggccccgucuccuccaacggcgccaacggcgucaagggcuucuccuucaaguacggcaacggcgucuggaucggccgcaccaaguccaucuccucccgcaacggcuucgagaugaucugggaccccaacggcuggaccggcaccgacaacaacuucuccaucaagcaggacaucgucggcaucaacgagugguccggcuacuccggcuccuucguccagcaccccgagcucaccggccucgacugcauccgccccugcuucugggucgagcucauccgcggccgccccaaggagaacaccaucuggaccuccggcuccuccaucuccuucugcggcgucaacuccgacaccgucggcugguccuggcccgacggcgccgagcuccccuucaccaucgacaaguga

SEQ ID NO: 114534 - RNA, 1410 nt, Artificial Sequence; identical to SEQ ID NO: 112774
  derived and/or modified CDS sequence (opt2) from neuraminidase__InfluenzaA__ADF10079

SEQ ID NO: 114535 - RNA, 1410 nt, Artificial Sequence; identical to SEQ ID NO: 112774
  derived and/or modified CDS sequence (opt2) from neuraminidase__InfluenzaA__ADF10089

SEQ ID NO: 114536 - RNA, 1410 nt, Artificial Sequence; identical to SEQ ID NO: 112774
  derived and/or modified CDS sequence (opt2) from neuraminidase__InfluenzaA__ADF10099

SEQ ID NO: 114537 - RNA, 1410 nt, Artificial Sequence
  derived and/or modified CDS sequence (opt2) from neuraminidase__InfluenzaA__ADF10109
augaaccccaaccagaagaucaucaccaucggcuccgucugcaugaccaucggcauggccaaccucauccuccagaucggcaacaucaucuccaucuggaucucccacuccauccagcucggcaaccagaaccagaucgagaccugcaaccaguccgucaucaccuacgagaacaacaccugggucaaccagaccuacgucaacaucuccaacaccaacuucgccgccggccaguccgucgucuccgucaagcucgccggcaacuccucccucugccccgucuccggcugggccaucuacuccaaggacaacuccauccgcaucggcuccaagggcgacgucuucgucauccgcgagcccuucaucuccugcuccccccucgagugccgcaccuucuuccucacccagggcgcccuccucaacgacaagcacuccaacggcaccaucaaggaccgcucccccuaccgcacccucauguccugccccaucggcgagguccccucccccuacaacucccgcuucgaguccgucgccugguccgccuccgccugccacgacggcaucaacuggcucaccaucggcaucuccggccccgacaacggcgccgucgccguccucaaguacaacggcaucaucaccgacaccaucaaguccuggcgcaacaacauccuccgcacccaggaguccgagugcgccugcgucaacggcuccugcuucaccgucaugaccgacggccccuccgacggccaggccuccuacaagaucuuccgcaucgagaagggcaagaucgucaaguccgucgagaugaacgcccccaacuacuacuacgaggagugcuccugcuaccccgacuccuccgagaucaccugcgucugccgcgacaacuggcacggcuccaaccgccccugggucuccuucaaccagaaccucgaguaccagaucggcuacaucugcuccggcaucuucggcgacaacccccgccccaacgacaagaccggcaacugcggccccgucuccuccaacggcgccaacggcgucaagggcuucuccuucaaguacggcaacggcgucuggaucggccgcaccaaguccaucuccucccgcaacggcuucgagaugaucugggaccccaacggcuggaccggcaccgacaacaacuucuccaucaagcaggacaucgucggcaucaacgagugguccggcuacuccggcuccuucguccagcaccccgagcucaccggccucgacugcauccgccccugcuucugggucgagcucauccgcggccgccccaaggagaacaccaucuggaccuccggcuccuccaucuccuucugcggcgucaacuccgacaccgucggcugguccuggcccgacggcgccgagcuccccuucaccaucgacaaguga

SEQ ID NO: 114538 - RNA, 1410 nt, Artificial Sequence; identical to SEQ ID NO: 112774
  derived and/or modified CDS sequence (opt2) from neuraminidase__InfluenzaA__ADF10129

SEQ ID NO: 114539 - RNA, 1410 nt, Artificial Sequence; identical to SEQ ID NO: 114204
  derived and/or modified CDS sequence (opt2) from neuraminidase__InfluenzaA__ADF10146

SEQ ID NO: 114540 - RNA, 1410 nt, Artificial Sequence
  derived and/or modified CDS sequence (opt2) from neuraminidase__InfluenzaA__ADF10166
augaaccccaaccagaagaucaucaccaucggcuccgucugcaugaucaucggcauggccaaccucauccuccagaucggcaacaucaucuccaucuggaucucccacuccauccagcucggcaaccagaaccagaucgagaccugcaaccaguccgucaucaccuacgagaacaacaccugggucaaccagaccuacgucaacaucuccaacaccaacuucgccgccggccaguccgucgucuccgucaagcucgccggcaacuccucccucugccccgucuccggcugggccaucuacuccaaggacaacuccauccgcaucggcuccaagggcgacgucuucgucauccgcgagcccuucaucuccugcuccccccucgagugccgcaccuucuuccucacccagggcgcccuccucaacgacaagcacuccaacggcaccaucaaggaccgcucccccuaccgcacccucauguccugccccaucggcgagguccccucccccuacaacucccgcuucgaguccgucgccugguccgccuccgccugccacgacggcaucaacuggcucaccaucggcaucuccggccccgacaacggcgccgucgccguccucaaguacaacggcaucaucaccgacaccaucaaguccuggcgcaacaacauccuccgcacccaggaguccgagugcgccugcgucaacggcuccugcuucaccgucaugaccgacggccccuccgacggccaggccuccuacaagaucuuccgcaucgagaagggcaagaucgucaaguccgucgagaugaacgcccccaacuaccacuacgaggagugcuccugcuaccccgacuccuccgagaucaccugcgucugccgcgacaacuggcacggcuccaaccgccccugggucuccuucaaccagaaccucgaguaccagaucggcuacaucugcuccggcaucuucggcgacaacccccgccccaacgacaagaccggcuccugcggccccgucuccuccaacggcgccaacggcgucaagggcuucuccuucaaguacggcaacggcgucuggaucggccgcaccaaguccaucuccucccgcaagggcuucgagaugaucugggaccccaacggcuggaccggcaccgacaacaacuucuccaucaagcaggacaucgucggcaucaacgagugguccggcuacuccggcuccuucguccagcaccccgagcucaccggccucgacugcauccgccccugcuucugggucgagcucauccgcggccgccccaaggagaacaccaucuggaccuccggcuccuccaucuccuucugcggcgucaacuccgacaccgucggcugguccuggcccgacggcgccgagcuccccuucaccaucgacaaguga

SEQ ID NO: 114541 - RNA, 1410 nt, Artificial Sequence; identical to SEQ ID NO: 114540
  derived and/or modified CDS sequence (opt2) from neuraminidase__InfluenzaA__ADF10176

SEQ ID NO: 114542 - RNA, 1410 nt, Artificial Sequence; identical to SEQ ID NO: 114540
  derived and/or modified CDS sequence (opt2) from neuraminidase__InfluenzaA__ADF10192

SEQ ID NO: 114543 - RNA, 1410 nt, Artificial Sequence; identical to SEQ ID NO: 112774
  derived and/or modified CDS sequence (opt2) from neuraminidase__InfluenzaA__ADF10247

SEQ ID NO: 114544 - RNA, 1410 nt, Artificial Sequence; identical to SEQ ID NO: 114540
  derived and/or modified CDS sequence (opt2) from neuraminidase__InfluenzaA__ADF10290

SEQ ID NO: 114545 - RNA, 1410 nt, Artificial Sequence
  derived and/or modified CDS sequence (opt2) from neuraminidase__InfluenzaA__ADF10304
augaaccccaaccagaagaucaucaccaucggcuccgucugcaugaccaucggcauggccaaccucauccuccagaucggcaacaucaucuccaucuggaucucccacuccauccagcucggcaaccagaaccagaucgagaccugcaaccaguccgucaucaccuacgagaacaacaccugggucaaccagaccuacgucaacaucuccaacaccaacuucgccgccggccaguccgucgucuccgucaagcucgccggcaacuccucccucugccccgucuccggcugggccaucuacuccaaggacaacuccauccgcaucggcuccaagggcgacgucuucgucauccgcgagcccuucaucuccugcuccccccucgagugccgcaccuucuuccucacccagggcgcccuccucaacgacaagcacuccaacggcaccaucaaggaccgcucccccuaccgcacccucauguccugccccaucggcgagguccccucccccuacaacucccgcuucgaguccgucgccugguccgccuccgccugccacgacggcaucaacuggcucaccaucggcaucuccggccccgacaacggcgccgucgccguccucaaguacaacggcaucaucaccgacaccaucaaguccuggcgcaacaacauccuccgcacccaggaguccgagugcgccugcgucaacggcuccugcuucaccgucaugaccgacggccccuccgacggccaggccuccuacaagaucuuccgcaucgagaagggcaagaucgucaaguccgucgagaugaacgcccccaacuaccacuacgaggagugcuccugcuaccccgacuccuccgagaucaccugcgucugccgcgacaacuggcacggcuccaaccgccccugggucuccuucaaccagaaccucgaguaccagaucggcuacaucugcuccggcaucuucggcgacaacccccgccccaacgacaagaccggcuccugcggccccgucuccuccaacggcgccaacggcgucaagggcuucuccuucaaguacggcaacggcgucuggaucggccgcaccaaguccaucuccucccgcaacggcuucgagaugaucugggaccccaacggcuggaccggcaccgacaacaacuucuccaucaagcaggacaucgucggcaucaacgagugguccggcuacuccggcuccuucguccagcaccccgagcucaccggccucgacugcauccgccccugcuucugggucgagcucauccgcggccgccccaaggagaacaccaucuggaccuccggcuccuccaucuccuucugcggcgucaacuccgacaccgucggcugguccuggcccgacggcgccggccuccccuucaccaucgacaaguga

SEQ ID NO: 114546 - RNA, 1410 nt, Artificial Sequence; identical to SEQ ID NO: 112774
  derived and/or modified CDS sequence (opt2) from neuraminidase__InfluenzaA__ADF10340

SEQ ID NO: 114547 - RNA, 1410 nt, Artificial Sequence; identical to SEQ ID NO: 112774
  derived and/or modified CDS sequence (opt2) from neuraminidase__InfluenzaA__ADF10361

SEQ ID NO: 114548 - RNA, 1410 nt, Artificial Sequence; identical to SEQ ID NO: 114540
  derived and/or modified CDS sequence (opt2) from neuraminidase__InfluenzaA__ADF10371

SEQ ID NO: 114549 - RNA, 1410 nt, Artificial Sequence; identical to SEQ ID NO: 114540
  derived and/or modified CDS sequence (opt2) from neuraminidase__InfluenzaA__ADF10407

SEQ ID NO: 114550 - RNA, 1410 nt, Artificial Sequence; identical to SEQ ID NO: 112774
  derived and/or modified CDS sequence (opt2) from neuraminidase__InfluenzaA__ADF10472

SEQ ID NO: 114551 - RNA, 1410 nt, Artificial Sequence; identical to SEQ ID NO: 114540
  derived and/or modified CDS sequence (opt2) from neuraminidase__InfluenzaA__ADF10616

SEQ ID NO: 114552 - RNA, 1410 nt, Artificial Sequence; identical to SEQ ID NO: 114540
  derived and/or modified CDS sequence (opt2) from neuraminidase__InfluenzaA__ADF10688

SEQ ID NO: 114553 - RNA, 1410 nt, Artificial Sequence; identical to SEQ ID NO: 114540
  derived and/or modified CDS sequence (opt2) from neuraminidase__InfluenzaA__ADF10726

SEQ ID NO: 114554 - RNA, 1410 nt, Artificial Sequence; identical to SEQ ID NO: 112774
  derived and/or modified CDS sequence (opt2) from neuraminidase__InfluenzaA__ADF10773

SEQ ID NO: 114555 - RNA, 1410 nt, Artificial Sequence
  derived and/or modified CDS sequence (opt2) from neuraminidase__InfluenzaA__ADF10837
augaaccccaaccagaagaucaucaccaucggcuccgucugcaugaccaucggcauggccaaccucauccuccagaucggcaacaucaucuccaucuggaucucccacuccauccagcucggcaaccagaaccagaucgagaccugcaaccaguccgucaucaccuacgagaacaacaccugggucaaccagaccuacgucaacaucuccaacaccaacuucgccgccggccaguccgucgucuccgucaagcucgccggcaacuccucccucugccccgucuccggcugggccaucuacuccaaggacaacuccauccgcaucggcuccaagggcgacgucuucgucauccgcgagcccuucaucuccugcuccccccucgagugccgcaccuucuuccucacccagggcgcccuccucaacgacaagcacuccaacggcaccaucaaggaccgcucccccuaccgcacccucauguccugccccaucggcgagguccccucccccuacaacucccgcuucgaguccgucgccugguccgccuccgccugccacgacggcaucaacuggcucaccaucggcaucuccggccccgacaacggcgccgucgccguccucaaguacaacggcaucaucaccgacaccaucaaguccuggaagaacaacauccuccgcacccaggaguccgagugcgccugcgucaacggcuccugcuucaccgucaugaccgacggccccuccgacggccaggccuccuacaagaucuuccgcaucgagaagggcaagaucgucaaguccgucgagaugaacgcccccaacuaccacuacgaggagugcuccugcuaccccgacuccuccgagaucaccugcgucugccgcgacaacuggcacggcuccaaccgccccugggucuccuucaaccagaaccucgaguaccagaucggcuacaucugcuccggcaucuucggcgacaacccccgccccaacgacaagaccggcuccugcggccccgucuccuccaacggcgccaacggcgucaagggcuucuccuucaaguacggcaacggcgucuggaucggccgcaccaaguccaucuccucccgcaacggcuucgagaugaucugggaccccaacggcuggaccggcaccgacaacaacuucuccaucaagcaggacaucgucggcaucaacgagugguccggcuacuccggcuccuucguccagcaccccgagcucaccggccucgacugcauccgccccugcuucugggucgagcucauccgcggccgccccaaggagaacaccaucuggaccuccggcuccuccaucuccuucugcggcgucaacuccgacaccgucggcugguccuggcccgacggcgccgagcuccccuucaccaucgacaaguga

SEQ ID NO: 114556 - RNA, 1410 nt, Artificial Sequence; identical to SEQ ID NO: 112774
  derived and/or modified CDS sequence (opt2) from neuraminidase__InfluenzaA__ADF10889

SEQ ID NO: 114557 - RNA, 1410 nt, Artificial Sequence; identical to SEQ ID NO: 112774
  derived and/or modified CDS sequence (opt2) from neuraminidase__InfluenzaA__ADF10947

SEQ ID NO: 114558 - RNA, 1410 nt, Artificial Sequence; identical to SEQ ID NO: 112774
  derived and/or modified CDS sequence (opt2) from neuraminidase__InfluenzaA__ADF11010

SEQ ID NO: 114559 - RNA, 1410 nt, Artificial Sequence
  derived and/or modified CDS sequence (opt2) from neuraminidase__InfluenzaA__ADF27355
augaaccccaaccagaagaucaucaccaucggcuccgucugcaugaccaucggcauggccaaccucauccuccagaucggcaacaucaucuccaucuggaucucccacuccauccagcucggcaaccagaaccagaucgagaccugcaaccaguccgucaucaccuacgagaacaacaccugggucaaccagaccuacgucaacaucuccaacaccaacuucgccgccggccaguccgucgucuccgucaagcucgccggcaacuccucccucugccccgucuccggcugggccaucuacuccaaggacaacuccauccgcaucggcuccaagggcgacgucuucgucauccgcgagcccuucaucuccugcuccccccucgagugccgcaccuucuuccucacccagggcgcccuccucaacgacaagcacuccaacggcaccaucaaggaccgcucccccuaccgcacccucauguccugccccaucggcgagguccccucccccuacaacucccgcuucgaguccgucgccugguccgccuccgccugccacgacggcaucaacuggcucaccaucggcaucuccggccccgacaacggcgccgucgccguccucaaguacaacggcaucaucaccgacaccaucaaguccuggcgcaacaacauccuccgcacccaggaguccgagugcgccugcgucaacggcuccugcuucaccgucaugaccgacggccccuccgacggccaggccuccuacaagaucuuccgcaucgagaagggcaagaucgucaaguccgucgagaugaacgcccccaacuaccacuacgaggagugcuccugcuaccccgacuccuccgagaucaccugcgucugccgcgacaacuggcacggcuccaaccgccccugggucuccuucaaccagaaccucgaguaccagaucggcuacaucugcuccggcaucuucggcgacaacccccgccccaacgacaagaccggcuccugcggccccgucuccuccaacggcgccaacggcgucaagggcuucuccuucaaguacggcaacggcgucuggaugggccgcaccaaguccaucuccucccgcaacggcuucgagaugaucugggaccccaacggcuggaccggcaccgacaacaacuucuccaucaagcaggacaucgucggcaucaacgagugguccggcuacuccggcuccuucguccagcaccccgagcucaccggccucgacugcauccgccccugcuucugggucgagcucauccgcggccgccccaaggagaacaccaucuggaccuccggcuccuccaucuccuucugcggcgucaacuccgacaccgucggcugguccuggcccgacggcgccgagcuccccuucaccaucgacaaguga

SEQ ID NO: 114560 - RNA, 1410 nt, Artificial Sequence
  derived and/or modified CDS sequence (opt2) from neuraminidase__InfluenzaA__ADF27356
augaaccccaaccagaagaucaucaccaucggcuccgucugcaugaccaucggcauggccaaccucauccuccagaucggcaacaucaucuccaucuggaucucccacuccauccagcucggcaaccagaaccagaucgagaccugcaaccagaacgucaucaccuacgagaacaacaccugggucaaccagaccuacgucaacaucuccaacaccaacuucgccgccggccaguccgucgucuccgucaagcucgccggcaacuccucccucugccccgucuccggcugggccaucuacuccaaggacaacuccauccgcaucggcuccaagggcgacgucuucgucauccgcgagcccuucaucuccugcuccccccucgagugccgcaccuucuuccucacccagggcgcccuccucaacgacaagcacuccaacggcaccaucaaggaccgcucccccuaccgcacccucauguccugccccaucggcgagguccccucccccuacaacucccgcuucgaguccgucgccugguccgccuccgccugccacgacggcaucaacuggcucaccaucggcaucuccggccccgacaacggcgccgucgccguccucaaguacaacggcaucaucaccgacaccaucaaguccuggcgcaacaacauccuccgcacccaggaguccgagugcgccugcgucaacggcuccugcuucaccgucaugaccgacggccccuccgacggccaggccuccuacaagaucuuccgcaucgagaagggcaagaucgucaaguccgucgagaugaacgcccccaacuacuacuacgaggagugcuccugcuaccccgacuccuccgagaucaccugcgucugccgcgacaacuggcacggcuccaaccgccccugggucuccuucaaccagaaccucgaguaccagaucggcuacaucugcuccggcaucuucggcgacaacccccgccccaacgacaagaccggcuccugcggccccgucuccuccaacggcgccaacggcgucaagggcuucuccuucaaguacggcaacggcgucuggaucggccgcaccaaguccaucuccucccgcaacggcuucgagaugaucugggaccccaacggcuggaccggcaccgacaacaacuucuccaucaagcaggacaucgucggcaucaacgagugguccggcuacuccggcuccuucguccagcaccccgagcucaccggccucgacugcauccgccccugcuucugggucgagcucauccgcggccgccccaaggagaacaccaucuggaccuccggcuccuccaucuccuucugcggcgucaacuccgacaccgucggcugguccuggcccgacggcgccgagcuccccuucaccaucgacaaguga

SEQ ID NO: 114561 - RNA, 1410 nt, Artificial Sequence; identical to SEQ ID NO: 113128
  derived and/or modified CDS sequence (opt2) from neuraminidase__InfluenzaA__ADF27357

SEQ ID NO: 114562 - RNA, 1410 nt, Artificial Sequence; identical to SEQ ID NO: 113128
  derived and/or modified CDS sequence (opt2) from neuraminidase__InfluenzaA__ADF27358

SEQ ID NO: 114563 - RNA, 1410 nt, Artificial Sequence; identical to SEQ ID NO: 113128
  derived and/or modified CDS sequence (opt2) from neuraminidase__InfluenzaA__ADF27360

SEQ ID NO: 114564 - RNA, 1410 nt, Artificial Sequence; identical to SEQ ID NO: 112774
  derived and/or modified CDS sequence (opt2) from neuraminidase__InfluenzaA__ADF27361

SEQ ID NO: 114565 - RNA, 1410 nt, Artificial Sequence; identical to SEQ ID NO: 112774
  derived and/or modified CDS sequence (opt2) from neuraminidase__InfluenzaA__ADF27362

SEQ ID NO: 114566 - RNA, 1410 nt, Artificial Sequence; identical to SEQ ID NO: 112774
  derived and/or modified CDS sequence (opt2) from neuraminidase__InfluenzaA__ADF27363

SEQ ID NO: 114567 - RNA, 1410 nt, Artificial Sequence; identical to SEQ ID NO: 113128
  derived and/or modified CDS sequence (opt2) from neuraminidase__InfluenzaA__ADF27364

SEQ ID NO: 114568 - RNA, 1410 nt, Artificial Sequence; identical to SEQ ID NO: 112774
  derived and/or modified CDS sequence (opt2) from neuraminidase__InfluenzaA__ADF27365

SEQ ID NO: 114569 - RNA, 1410 nt, Artificial Sequence; identical to SEQ ID NO: 113128
  derived and/or modified CDS sequence (opt2) from neuraminidase__InfluenzaA__ADF27366

SEQ ID NO: 114570 - RNA, 1410 nt, Artificial Sequence; identical to SEQ ID NO: 112774
  derived and/or modified CDS sequence (opt2) from neuraminidase__InfluenzaA__ADF27382

SEQ ID NO: 114571 - RNA, 1410 nt, Artificial Sequence; identical to SEQ ID NO: 112774
  derived and/or modified CDS sequence (opt2) from neuraminidase__InfluenzaA__ADF27392

SEQ ID NO: 114572 - RNA, 1410 nt, Artificial Sequence; identical to SEQ ID NO: 112774
  derived and/or modified CDS sequence (opt2) from neuraminidase__InfluenzaA__ADF27402

SEQ ID NO: 114573 - RNA, 1410 nt, Artificial Sequence; identical to SEQ ID NO: 114555
  derived and/or modified CDS sequence (opt2) from neuraminidase__InfluenzaA__ADF27422

SEQ ID NO: 114574 - RNA, 1410 nt, Artificial Sequence
  derived and/or modified CDS sequence (opt2) from neuraminidase__InfluenzaA__ADF27432
augaaccccaaccagaagaucaucaccaucggcuccgucugcgucaccaucggcauggccaaccucauccuccagaucggcaacaucaucuccaucuggaucucccacuccauccagcucggcaaccagaaccagaucgagaccugcaaccaguccgucaucaccuacgagaacaacaccugggucaaccagaccuacgucaacaucuccaacaccaacuucgccgccggccaguccgucgucuccgucaagcucgccggcaacuccucccucugccccgucuccggcugggccaucuacuccaaggacaacuccauccgcaucggcuccaagggcgacgucuucgucauccgcgagcccuucaucuccugcuccccccucgagugccgcaccuucuuccucacccagggcgcccuccucaacgacaagcacuccaacggcaccaucaaggaccgcucccccuaccgcacccucauguccugccccaucggcgagguccccucccccuacaacucccgcuucgaguccgucgccugguccgccuccgccugccacgacggcaucaacuggcucaccaucggcaucuccggccccgacaacggcgccgucgccguccucaaguacaacggcaucaucaccgacaccaucaaguccuggcgcaacaacauccuccgcacccaggaguccgagugcgccugcgucaacggcuccugcuucaccgucaugaccgacggccccuccgacggccaggccuccuacaagaucuuccgcaucgagaagggcaagaucgucaaguccgucgagaugaacgcccccaacuaccacuacgaggagugcuccugcuaccccgacuccuccgagaucaccugcgucugccgcgacaacuggcacggcuccaaccgccccugggucuccuucaaccagaaccucgaguaccagaucggcuacaucugcuccggcaucuucggcgacaacccccgccccaacgacaagaccggcuccugcggccccgucuccuccaacggcgccaacggcgucaagggcuucuccuucaaguacggcaacggcgucuggaucggccgcaccaaguccaucuccucccgcaacggcuucgagaugaucugggaccccaacggcuggaccggcaccgacaacaacuucuccaucaagcaggacaucgucggcaucaacgagugguccggcuacuccggcuccuucguccagcaccccgagcucaccggccucgacugcauccgccccugcuucugggucgagcucauccgcggccgccccaaggagaacaccaucuggaccuccggcuccuccaucuccuucugcggcgucaacuccgacaccgucggcugguccuggcccgacggcgccgagcuccccuucaccaucgacaaguga

SEQ ID NO: 114575 - RNA, 1410 nt, Artificial Sequence
  derived and/or modified CDS sequence (opt2) from neuraminidase__InfluenzaA__ADF27442
augaaccccaaccagaagaucaucaccaucggcuccgucugcaugaccaucggcauggccaaccucauccuccagaucggcaacaucaucuccaucuggaucucccacuccauccagcucgagaaccagaaccagaucgagaccugcaaccaguccgucaucaccuacgagaacaacaccugggucaaccagaccuacgucaacaucuccaacaccaacuucgccgccggccaguccgucgucuccgucaagcucgccggcaacuccucccucugccccgucuccggcugggccaucuacuccaaggacaacuccauccgcaucggcuccaagggcgacgucuucgucauccgcgagcccuucaucuccugcuccccccucgagugccgcaccuucuuccucacccagggcgcccuccucaacgacaagcacuccaacggcaccaucaaggaccgcucccccuaccgcacccucauguccugccccaucggcgagguccccucccccuacaacucccgcuucgaguccgucgccugguccgccuccgccugccacgacggcaucaacuggcucaccaucggcaucuccggccccgacaacggcgccgucgccguccucaaguacaacggcaucaucaccgacaccaucaaguccuggcgcaacaacauccuccgcacccaggaguccgagugcgccugcgucaacggcuccugcuucaccgucaugaccgacggccccuccgacggccaggccuccuacaagaucuuccgcaucgagaagggcaagaucgucaaguccgucgagaugaacgcccccaacuaccacuacgaggagugcuccugcuaccccgacuccuccgagaucaccugcgucugccgcgacaacuggcacggcuccaaccgccccugggucuccuucaaccagaaccucgaguaccagaucggcuacaucugcuccggcaucuucggcgacaacccccgccccaacgacaagaccggcuccugcggccccgucuccuccaacggcgccaacggcgucaagggcuucuccuucaaguacggcaacggcgucuggaucggccgcaccaaguccaucuccucccgcaacggcuucgagaugaucugggaccccaacggcuggaccggcaccgacaacaacuucuccaucaagcaggacaucgucggcaucaacgagugguccggcuacuccggcuccuucguccagcaccccgagcucaccggccucgacugcauccgccccugcuucugggucgagcucauccgcggccgccccaaggagaacaccaucuggaccuccggcuccuccaucuccuucugcggcgucaacuccgacaccgucggcugguccuggcccgacggcgccgagcuccccuucaccaucgacaaguga

SEQ ID NO: 114576 - RNA, 1410 nt, Artificial Sequence
  derived and/or modified CDS sequence (opt2) from neuraminidase__InfluenzaA__ADF27462
augaaccccaaccagaagaucaucaccaucggcuccgucugcaugaccaucggcauggccaaccucauccuccagaucggcaacaucaucuccaucuggaucucccacuccauccagcucggcaaccagaaccagaucgaggccugcaaccaguccgucaucaccuacgagaacaacaccugggucaaccagaccuacgucaacaucuccaacaccaacuucgccgccggccaguccgucgucuccgucaagcucgccggcaacuccucccucugccccgucuccggcugggccgucuacuccaaggacaacuccauccgcaucggcuccaagggcgacgucuucgucauccgcgagcccuucaucuccugcuccccccucgagugccgcaccuucuuccucacccagggcgcccuccucaacgacaagcacuccaacggcaccaucaaggaccgcucccccuaccgcacccucauguccugccccaucggcgagguccccucccccuacaacucccgcuucgaguccgucgccugguccgccuccgccugccacgacggcaucaacuggcucaccaucggcaucuccggccccgacaacggcgccgucgccguccucaaguacaacggcaucaucaccgacaccaucaaguccuggcgcaacaacauccuccgcacccaggaguccgagugcgccugcgucaacggcuccugcuucaccgucaugaccgacggccccuccgacggccaggccuccuacaagaucuuccgcaucgagaagggcaagaucgucaaguccgucgagaugaacgcccccaacuaccacuacgaggagugcuccugcuaccccgacuccuccgagaucaccugcgucugccgcgacaacuggcacggcuccaaccgccccugggucuccuucaaccagaaccucgaguaccagaucggcuacaucugcuccggcaucuucggcgacaacccccgccccaacgacaagaccggcuccugcggccccgucuccuccaacggcgccaacggcgucaagggcuucuccuucaaguacggcaacggcgucuggaucggccgcaccaaguccaucuccucccgcaacggcuucgagaugaucugggaccccaacggcuggaccggcaccgacaacaacuucuccaucaagcaggacaucgucggcaucaacgagugguccggcuacuccggcuccuucguccagcaccccgagcucaccggccucgacugcauccgccccugcuucugggucgagcucauccgcggccgccccaaggagaacaccaucuggaccuccggcuccuccaucuccuucugcggcgucaacuccgacaccgucggcugguccuggcccgacggcgccgagcuccccuucaccaucgacaaguga

SEQ ID NO: 114577 - RNA, 1410 nt, Artificial Sequence; identical to SEQ ID NO: 112774
  derived and/or modified CDS sequence (opt2) from neuraminidase__InfluenzaA__ADF27472

SEQ ID NO: 114578 - RNA, 1410 nt, Artificial Sequence
  derived and/or modified CDS sequence (opt2) from neuraminidase__InfluenzaA__ADF27482
augaaccccaaccagaagaucaucaccaucggcuccgucugcaugaccaucggcauggccaaccucauccuccagaucggcaacaucaucuccaucuggaucucccacuccauccagcucggcaaccagaaccaggucgagaccugcaaccaguccaucaucaccuacgagaacaacaccugggucaaccagaccuacgucaacaucuccaacaccaacuucgccgccggccaguccgucgucuccgucaagcucgccggcaacuccucccucugccccgucuccggcugggccaucuacuccaaggacaacuccauccgcaucggcuccaagggcgacgucuucgucauccgcgagcccuucaucuccugcuccccccucgagugccgcaccuucuuccucacccagggcgcccuccucaacgacaagcacuccaacggcaccaucaaggaccgcucccccuaccgcacccucauguccugccccaucggcgagguccccucccccuacaacucccgcuucgaguccgucgccugguccgccuccgccugccacgacggcaucaacuggcucaccaucggcaucuccggccccgacaacggcgccgucgccguccucaaguacaacggcaucaucaccgacaccaucaaguccuggcgcaacaacauccuccgcacccaggaguccgagugcgccugcgucaacggcuccugcuucaccgucaugaccgacggccccuccgacggccaggccuccuacaagaucuuccgcaucgagaagggcaagaucgucaaguccgucgagaugaacgcccccaacuaccacuacgaggagugcuccugcuaccccgacuccuccgagaucaccugcgucugccgcgacaacuggcacggcuccaaccgccccugggucuccuucaaccagaaccucgaguaccagaucggcuacaucugcuccggcaucuucggcgacaacccccgccccaacgacaagaccggcuccugcggccccgucuccuccaacggcgccaacggcgucaagggcuucuccuucaaguacggcaacggcgucuggaucggccgcaccaaguccaucuccucccgcaacggcuucgagaugaucugggaccccaacggcuggaccggcaccgacaacaacuucuccaucaagcaggacaucgucggcaucaacgagugguccggcuacuccggcuccuucguccagcaccccgagcucaccggccucgacugcauccgccccugcuucugggucgagcucauccgcggccgccccaaggagaacaccaucuggaccuccggcuccuccaucuccuucugcggcgucaacuccgacaccgucggcugguccuggcccgacggcgccgagcuccccuucaccaucgacaaguga

SEQ ID NO: 114579 - RNA, 1410 nt, Artificial Sequence
  derived and/or modified CDS sequence (opt2) from neuraminidase__InfluenzaA__ADF27492
augaaccccaaccagaagaucaucaccaucggcuccgucugcaugaccaucggcauggccaaccucauccuccagaucggcaacaucaucuccaucuggaucucccacuccauccagcucggcaaccagaaccagaucgagcccugcaaccaguccgucaucaccuacgagaacaacaccugggucaaccagaccuacgucaacaucuccaacaccaacuucgccgccggccaguccgucgucuccgucaagcucgccggcaacuccucccucugccccgucuccggcugggccaucuacuccaaggacaacuccauccgcaucggcuccaagggcgacgucuucgucauccgcgagcccuucaucuccugcuccccccucgagugccgcaccuucuuccucacccagggcgcccuccucaacgacaagcacuccaacggcaccaucaaggaccgcucccccuaccgcacccucauguccugccccaucggcgagguccccucccccuacaacucccgcuucgaguccgucgccugguccgccuccgccugccacgacggcaucaacuggcucaccaucggcaucuccggccccgacaacggcgccgucgccguccucaaguacaacggcaucaucaccgacaccaucaaguccuggcgcaacaacauccuccgcacccaggaguccgagugcgccugcgucaacggcuccugcuucaccgucaugaccgacggccccuccgacggccaggccuccuacaagaucuuccgcaucgagaagggcaagaucgucaaguccaucgagaugaacgcccccaacuaccacuacgaggagugcuccugcuaccccgacuccuccgagaucaccugcgucugccgcgacaacuggcacggcuccaaccgccccugggucuccuucaaccagaaccucgaguaccagaucggcuacaucugcuccggcaucuucggcgacaacccccgccccaacgacaagaccggcuccugcggccccgucuccuccaacggcgccaacggcgucaagggcuucuccuucaaguacggcaacggcgucuggaucggccgcaccaaguccaucuccucccgcaacggcuucgagaugaucugggaccccaacggcuggaccggcaccgacaacaacuucuccaucaagcaggacaucgucggcaucaacgagugguccggcuacuccggcuccuucguccagcaccccgagcucaccggccucgacugcauccgccccugcuucugggucgagcucauccgcggccgccccaaggagaacaccgucuggaccuccggcuccuccaucuccuucugcggcgucaacuccgacaccgucggcugguccuggcccgacggcgccgagcuccccuucaccaucgacaaguga

SEQ ID NO: 114580 - RNA, 1410 nt, Artificial Sequence; identical to SEQ ID NO: 112774
  derived and/or modified CDS sequence (opt2) from neuraminidase__InfluenzaA__ADF27502

SEQ ID NO: 114581 - RNA, 1410 nt, Artificial Sequence; identical to SEQ ID NO: 112774
  derived and/or modified CDS sequence (opt2) from neuraminidase__InfluenzaA__ADF27512

SEQ ID NO: 114582 - RNA, 1410 nt, Artificial Sequence
  derived and/or modified CDS sequence (opt2) from neuraminidase__InfluenzaA__ADF27522
augaaccccaaccagaagaucaucaccaucggcuccgucugcaugaccaucggcauggccaaccucauccuccagaucggcaacaucaucuccaucuggaucucccacuccauccagcucggcaaccagaaccagaucgagaccugcaaccaguccgucaucaccuacgagaacaacaccugggucaaccagaccuacgucaacaucuccaacaccaacuucgccgccggccaguccgucgucuccgucaagcucgccggcaacuccucccucugccccgucuccggcugggccaucuacuccaaggacaacuccauccgcaucggcuccaagggcgacgucuucgucauccgcgagcccuucaucuccugcuccccccucgagugccgcaccuucuuccucacccagggcgcccuccucaacgacaagcacuccaacggcaccaucaaggaccgcucccccuaccgcacccucauguccugccccaucggcgagguccccucccccuacaacucccgcuucgaguccgucgccugguccgccuccgccugccacgacggcaucaacuggcucaccaucggcaucuccggccccgacaacggcgccgucgccguccucaaguacaacggcaucaucaccgacaccaucaaguccuggcgcaacaacauccuccgcacccaggaguccgagugcgccugcgucaacggcuccugcuucaccgucaugaccgacggccccuccgacggccaggccuccuacaagaucuuccgcaucgagaagggcaagaucgucaaguccgucgagaugaacgcccccaacuaccacuacgaggagugcuccugcuaccccgacuccuccgagaucaccugcgucugccgcgacaacuggcacggcuccaaccgccccugggucuccuucaaccagaaccucgaguaccagaucggcuacaucugcuccggcaucuucggcgacaacccccgccccaacgacaagaccggcuccugcggccccgucuccuccaacggcgccaacggcgucaagggcuucuccuucaaguacggcaacggcgucuggaucggccgcaucaaguccaucuccucccgcaacggcuucgagaugaucugggaccccaacggcuggaccggcaccgacaacaacuucuccaucaagcaggacaucgucggcaucaacgagugguccggcuacuccggcuccuucguccagcaccccgagcucaccggccucgacugcauccgccccugcuucugggucgagcucauccgcggccgccccaaggagaacaccaucuggaccuccggcuccuccaucuccuucugcggcgucaacuccgacaccgucggcugguccuggcccgacggcgccgagcuccccuucaccaucgacaaguga

SEQ ID NO: 114583 - RNA, 1410 nt, Artificial Sequence; identical to SEQ ID NO: 112774
  derived and/or modified CDS sequence (opt2) from neuraminidase__InfluenzaA__ADF27532

SEQ ID NO: 114584 - RNA, 1410 nt, Artificial Sequence
  derived and/or modified CDS sequence (opt2) from neuraminidase__InfluenzaA__ADF27542
augaaccccaaccagaagaucaucaccaucggcuccgucugcaugaccaucggcauggccaaccucauccuccagaucggcaacaucaucuccaucuggaucucccacuccauccagcucggcaaccagaaccagaucgagaccugcaaccaguccgucaucaccuacgagaacaacaccugggucaaccagaccuacgucaacaucuccaacaccaacuucgccgccggccaguccgucgucuccgucaagcucgccggcaacuccucccucugccccgucuccggcugggccaucuacuccaaggacaacuccguccgcaucggcuccaagggcgacgucuucgucauccgcgagcccuucaucuccugcuccccccucgagugccgcaccuucuuccucacccagggcgcccuccucaacgacaagcacuccaacggcaccaucaaggaccgcucccccuaccgcacccucauguccugccccaucggcgagguccccucccccuacaacucccgcuucgaguccgucgccugguccgccuccgccugccacgacggcaucaacuggcucaccaucggcaucuccggccccgacaacggcgccgucgccguccucaaguacaacggcaucaucaccgacaccaucaaguccuggcgcaacaacauccuccgcacccaggaguccgagugcgccugcgucaacggcuccugcuucaccgucaugaccgacggccccuccgacggccaggccuccuacaagaucuuccgcaucgagaagggcaagaucgucaaguccgucgagaugaacgcccccaacuaccacuacgaggagugcuccugcuaccccgacuccuccgagaucaccugcgucugccgcgacaacuggcacggcuccaaccgccccugggucuccuucaaccagaaccucgaguaccgcaucggcuacaucugcuccggcaucuucggcgacaacccccgccccaacgacaagaccggcuccugcggccccgucuccuccaacggcgccaacggcgucaagggcuucuccuucaaguacggcaacggcgucuggaucggccgcaccaaguccaucuccucccgcaacggcuucgagaugaucugggaccccaacggcuggaccggcaccgacaacaacuucuccaucaagcaggacaucgucggcaucaacgagugguccggcuacuccggcuccuucguccagcaccccgagcucaccggccucgacugcauccgccccugcuucugggucgagcucauccgcggccgccccaaggagaacaccaucuggaccuccggcuccuccaucuccuucugcggcgucaacuccgacaccgucggcugguccuggcccgacggcgccgagcuccccuucaccaucgacaaguga

SEQ ID NO: 114585 - RNA, 1410 nt, Artificial Sequence
  derived and/or modified CDS sequence (opt2) from neuraminidase__InfluenzaA__ADF27552
augaaccccaaccagaagaucaucaccaucggcuccgucugcaugaccaucggccucgccaaccucauccuccagaucggcaacaucaucuccaucugggucucccacuccauccagcucggcaaccagaaccagaucgagaccugcaaccaguccgucaucaccuacgagaacaacaccugggucaaccagaccuacgucaacaucuccaacaccaacuucgccgccggccaguccgucgucuccgucaagcucgccggcaacuccucccucugccccgucuccggcugggccaucuacuccaaggacaacuccguccgcaucggcuccaagggcgacgucuucgucauccgcgagcccuucaucuccugcuccccccucgagugccgcaccuucuuccucacccagggcgcccuccucaacgacaagcacuccaacggcaccaucaaggaccgcucccccuaccgcacccucauguccugccccaucggcgagguccccucccccuacaacucccgcuucgaguccgucgccugguccgccuccgccugccacgacggcaucaacuggcucaccaucggcaucuccggccccgacaacggcgccgucgccguccucaaguacaacggcaucaucaccgacaccaucaaguccuggcgcaacaacauccuccgcacccaggaguccgagugcgccugcgucaacggcuccugcuucaccgucaugaccgacggccccuccgacggccaggccuccuacaagaucuuccgcaucgagaagggcaagaucgucaaguccgucgagaugaacgcccccaacuaccacuacgaggagugcuccugcuaccccgacuccuccgagaucaccugcgucugccgcgacaacuggcacggcuccaaccgccccugggucuccuucaaccagaaccucgaguaccgcaucggcuacaucugcuccggcaucuucggcgacaacccccgccccaacgacaagaccggcuccugcggccccgucuccuccaacggcgccaacggcgucaagggcuucuccuucaaguacggcaacggcgucuggaucggccgcaccaaguccaucuccucccgcaacggcuucgagaugaucugggaccccaacggcuggaccggcaccgacaagaacuucuccaucaagcaggacaucgucggcaucaacgagugguccggcuacuccggcuccuucguccagcaccccgagcucaccggccucgacugcauccgccccugcuucugggucgagcucauccgcggccgccccaaggagaacaccaucuggaccuccggcuccuccaucuccuucugcggcgucaacuccgacaccgucggcugguccuggcccgacggcgccgagcuccccuucaccaucgacaaguga

SEQ ID NO: 114586 - RNA, 1410 nt, Artificial Sequence; identical to SEQ ID NO: 113600
  derived and/or modified CDS sequence (opt2) from neuraminidase__InfluenzaA__ADF27562

SEQ ID NO: 114587 - RNA, 1410 nt, Artificial Sequence; identical to SEQ ID NO: 112774
  derived and/or modified CDS sequence (opt2) from neuraminidase__InfluenzaA__ADF27572

SEQ ID NO: 114588 - RNA, 1410 nt, Artificial Sequence
  derived and/or modified CDS sequence (opt2) from neuraminidase__InfluenzaA__ADF27582
augaaccccaaccagaagaucaucaccaucggcuccgucugcaugaccaucggcauggccaaccucauccuccagaucggcaacaucaucuccaucuggaucucccacuccauccagcucggcaaccagaaccagaucgagaccugcaaccaguccgucaucaccuacgagaacaacaccugggucaaccagaccuacgucaacaucuccaacaccaacuucgccgccggccaguccgucgucuccgucaagcucgccggcaacuccucccucugccccgucuccggcugggccaucuacuccaaggacaacuccauccgcaucggcuccaagggcgacgucuucgucauccgcgagcccuucaucuccugcuccccccucgagugccgcaccuucuuccucacccagggcgcccuccucaacgacaagcacuccaacggcaccaucaaggaccgcucccccuaccgcacccucauguccugccccaucggcgagguccccucccccuacaacucccgcuucgaguccgucgccugguccgccuccgccugccacgacggcaucaacuggcucaccaucggcaucuccggccccgacaacggcgccgucgccguccucaaguacaacggcaucaucaccgacaccaucaaguccuggcgcaacaacauccuccgcacccaggaguccgagugcgccugcgucaacggcuccugcuucaccgucaugaccgacggccccuccgacggccaggccuccuacaagaucuuccgcaucgagaagggcaagaucgucaaguccgucgagaugaacgcccccaacuaccacuacgaggagugcuccugcuaccccgacuccuccgagaucaccugcgucugccgcgacaacuggcacggcuccaaccgccccugggucuccuucaaccagaaccucgaguaccgcaucggcuacaucugcuccggcaucuucggcgacaacccccgccccaacgacaagaccggcuccugcggccccgucuccuccaacggcgccaacggcgucaagggcuucuccuucaaguacggcaacggcgucuggaucggccgcaccaaguccaucuccucccgcaacggcuucgagaugaucugggaccccaacggcuggaccggcaccgacaacaacuucuccaucaagcaggacaucgucggcaucaacgagugguccggcuacuccggcuccuucguccagcaccccgagcucaccggccucgacugcauccgccccugcuucugggucgagcucauccgcggccgccccaaggagaacaccaucuggaccuccggcuccuccaucuccuucugcggcgucaacuccgacaccgucggcugguccuggcccgacggcgccgagcuccccuucaccaucgacaaguga

SEQ ID NO: 114589 - RNA, 1410 nt, Artificial Sequence; identical to SEQ ID NO: 112774
  derived and/or modified CDS sequence (opt2) from neuraminidase__InfluenzaA__ADF27592

SEQ ID NO: 114590 - RNA, 1410 nt, Artificial Sequence
  derived and/or modified CDS sequence (opt2) from neuraminidase__InfluenzaA__ADF27602
augaaccccaaccagaagaucaucaccaucggcuccgucugcaugaccaucggcauggccaaccucauccuccagaucggcaacaucaucuccaucuggaucucccacuccauccagcucggcaaccagaaccagaucgagaccugcaaccaguccgucaucaccuacgagaacaacaccugggucaaccagaccuacgucaacaucuccaacaccaacuucgccgccggccaguccgucgucuccgucaagcucgccggcaacuccucccucugccccgucuccggcugggccaucuacuccaaggacaacuccauccgcaucggcuccaagggcgacgucuucgucauccgcgagcccuucaucuccugcuccccccucgagugccgcaccuucuuccucacccagggcgcccuccucaacgacaagcacuccaacggcaccaucaaggaccgcucccccuaccgcacccucauguccugccccaucggcgagguccccucccccuacaacucccgcuucgaguccgucgccugguccgccuccgccugccacgacggcaucaacuggcucaccaucggcaucuccggccccgacaacggcgccgucgccguccucaaguacaacggcaucaucaccgacaccaucaaguccuggcgcaacaacauccuccgcacccaggaguccgagugcgccugcgucaacggcuccugcuucaccgucaugaccgacggccccuccgacggccaggccuccuacaagaucuuccgcaucgagcgcggcaagaucgucaaguccgucgagaugaacgcccccaacuaccacuacgaggagugcuccugcuaccccgacuccuccgagaucaccugcgucugccgcgacaacuggcacggcuccaaccgccccugggucuccuucaaccagaaccucgaguaccagaucggcuacaucugcuccggcaucuucggcgacaacccccgccccaacgacaagaccggcuccugcggccccgucuccuccaacggcgccaacggcgucaagggcuucuccuucaaguacggcaacggcgucuggaucggccgcaccaaguccaucuccucccgcaacggcuucgagaugaucugggaccccaacggcuggaccggcaccgacaacuccuucuccaucaagcaggacaucgucggcaucaacgagugguccggcuacuccggcuccuucguccagcaccccgagcucaccggccucgacugcauccgccccugcuucugggucgagcucauccgcggccgccccaaggagaacaccaucuggaccuccggcuccuccaucuccuucugcggcgucaacuccgacaccgucggcugguccuggcccgacggcgccgagcuccccuucaccaucgacaaguga

SEQ ID NO: 114591 - RNA, 1410 nt, Artificial Sequence; identical to SEQ ID NO: 112774
  derived and/or modified CDS sequence (opt2) from neuraminidase__InfluenzaA__ADF27612

SEQ ID NO: 114592 - RNA, 1410 nt, Artificial Sequence; identical to SEQ ID NO: 114062
  derived and/or modified CDS sequence (opt2) from neuraminidase__InfluenzaA__ADF27622

SEQ ID NO: 114593 - RNA, 1410 nt, Artificial Sequence; identical to SEQ ID NO: 114509
  derived and/or modified CDS sequence (opt2) from neuraminidase__InfluenzaA__ADF27632

SEQ ID NO: 114594 - RNA, 1410 nt, Artificial Sequence; identical to SEQ ID NO: 112774
  derived and/or modified CDS sequence (opt2) from neuraminidase__InfluenzaA__ADF27642

SEQ ID NO: 114595 - RNA, 1410 nt, Artificial Sequence; identical to SEQ ID NO: 112774
  derived and/or modified CDS sequence (opt2) from neuraminidase__InfluenzaA__ADF27652

SEQ ID NO: 114596 - RNA, 1410 nt, Artificial Sequence
  derived and/or modified CDS sequence (opt2) from neuraminidase__InfluenzaA__ADF27662
augaaccccaaccagaagaucaucaccaucggcuccgucugcaugaccaucggcauggccaaccucauccuccagaucggcaacaucaucuccaucuggaucucccacuccauccagcucggcaaccagaaccagaucgagaccugcaaccaguccgucaucaccuacgagaacaacaccugggucaaccagaccuacgucaacaucuccaacaccaacuucgccgccggccaguccgucgucuccgucaagcucgccggcaacuccucccucugccccgucuccggcugggccaucuacuccaaggacaacuccguccgcaucggcuccaagggcgacgucuucgucauccgcgagcccuucaucuccugcuccccccucgagugccgcaccuucuuccucacccagggcgcccuccucaacgacaagcacuccaacggcaccaucaaggaccgcucccccuaccgcacccucauguccugccccaucggcgagguccccucccccuacaacucccgcuucgaguccgucgccugguccgccuccgccugcaacgacggcaucaacuggcucaccaucggcaucuccggccccgacaacggcgccgucgccguccucaaguacaacggcaucaucaccgacaccaucaaguccuggcgcaacaacauccuccgcacccaggaguccgagugcgccugcgucaacggcuccugcuucaccgucaugaccgacggccccuccgacggccaggccuccuacaagaucuuccgcaucgagaagggcaagaucgucaaguccgucgagaugaacgcccccaacuaccacuacgaggagugcuccugcuaccccgacuccuccgagaucaccugcgucugccgcgacaacuggcacggcuccaaccgccccugggucuccuucaaccagaaccucgaguaccgcaucggcuacaucugcuccggcaucuucggcgacaacccccgccccaacgacaagaccggcuccugcggccccgucuccuccaacggcgccaacggcgucaagggcuucuccuucaaguacggcaacggcgucuggaucggccgcaccaaguccaucuccucccgcaacggcuucgagaugaucugggaccccaacggcuggaccggcaccgacaacaacuucuccaucaagcaggacaucgucggcaucaacgagugguccggcuacuccggcuccuucguccagcaccccgagcucaccggccucgacugcauccgccccugcuucugggucgagcucauccgcggccgccccaaggagaacaccaucuggaccuccggcuccuccaucuccuucugcggcgucaacuccgacaccgucggcugguccuggcccgacggcgccgagcuccccuucaccaucgacaaguga

SEQ ID NO: 114597 - RNA, 1410 nt, Artificial Sequence; identical to SEQ ID NO: 112774
  derived and/or modified CDS sequence (opt2) from neuraminidase__InfluenzaA__ADF27672

SEQ ID NO: 114598 - RNA, 1410 nt, Artificial Sequence; identical to SEQ ID NO: 112774
  derived and/or modified CDS sequence (opt2) from neuraminidase__InfluenzaA__ADF27682

SEQ ID NO: 114599 - RNA, 1410 nt, Artificial Sequence; identical to SEQ ID NO: 112774
  derived and/or modified CDS sequence (opt2) from neuraminidase__InfluenzaA__ADF27692

SEQ ID NO: 114600 - RNA, 1410 nt, Artificial Sequence; identical to SEQ ID NO: 112774
  derived and/or modified CDS sequence (opt2) from neuraminidase__InfluenzaA__ADF27702

SEQ ID NO: 114601 - RNA, 1410 nt, Artificial Sequence; identical to SEQ ID NO: 112774
  derived and/or modified CDS sequence (opt2) from neuraminidase__InfluenzaA__ADF27712

SEQ ID NO: 114602 - RNA, 1410 nt, Artificial Sequence; identical to SEQ ID NO: 114062
  derived and/or modified CDS sequence (opt2) from neuraminidase__InfluenzaA__ADF27788

SEQ ID NO: 114603 - RNA, 1410 nt, Artificial Sequence; identical to SEQ ID NO: 114017
  derived and/or modified CDS sequence (opt2) from neuraminidase__InfluenzaA__ADF27798

SEQ ID NO: 114604 - RNA, 1410 nt, Artificial Sequence; identical to SEQ ID NO: 114509
  derived and/or modified CDS sequence (opt2) from neuraminidase__InfluenzaA__ADF27808

SEQ ID NO: 114605 - RNA, 1410 nt, Artificial Sequence
  derived and/or modified CDS sequence (opt2) from neuraminidase__InfluenzaA__ADF27818
augaaccccaaccagaagaucaucaccaucggcuccgucugcaugaccaucggcauggccaaccucauccuccagaucggcaacaucaucuccaucuggaucucccacuccauccagcucggcaaccagaaccagaucgagaccugcaaccaguccgucaucaccuacgagaacaacaccugggucaaccagaccuacgucaacaucuccaacaccaacuucgccgccggccaguccgucgucuccgucaagcucgccggcaacuccucccucugccccgucuccggcugggccaucuacuccaaggacaacuccauccgcaucggcuccaagggcgacgucuucgucauccgcgagcccuucaucuccugcuccccccucgagugccgcaccuucuuccucacccagggcgcccuccucaacgacaagcacuccaacggcaccaucaaggaccgcucccccuaccgcacccucauguccugccccaucggcgagguccccucccccuacaacucccgcuucgaguccgucgccugguccgccuccgccugccacgacggcaucaacuggcucaccaucggcaucuccggccccgacaacggcgccgucgccguccucaaguacaacggcaucaucaccgacaccaucaaguccuggcgcaacaacauccuccgcacccaggaguccgagugcgccugcgucaacggcuccugcuucaccaucaugaccgacggccccuccgacggccaggccuccuacaagaucuuccgcaucgagaagggcaagaucgucaaguccgucgagaugaacgcccccaacuaccacuacgaggagugcuccugcuaccccgacuccuccgagaucaccugcgucugccgcgacaacuggcacggcuccaaccgccccugggucuccuucaaccagaaccucgaguaccagaucggcuacaucugcuccggcaucuucggcgacaacccccgccccaacgacaagaccggcuccugcggccccgucuccuccaacggcgccaacggcgucaagggcuucuccuucaaguacggcaacggcgucuggaucggccgcaccaaguccaucaacucccgcaacggcuucgagaugaucugggaccccaacggcuggaccggcaccgacaacaacuucuccaucaagcaggacaucgucggcaucaacgagugguccggcuacuccggcuccuucguccagcaccccgagcucaccggccucgacugcauccgccccugcuucugggucgagcucauccgcggccgccccaaggagaacaccaucuggaccuccggcuccuccaucuccuucugcggcgucaacuccgacaccgucggcugguccuggcccgacggcgccgagcuccccuucaccaucgacaaguga

SEQ ID NO: 114606 - RNA, 1410 nt, Artificial Sequence; identical to SEQ ID NO: 112774
  derived and/or modified CDS sequence (opt2) from neuraminidase__InfluenzaA__ADF27838

SEQ ID NO: 114607 - RNA, 1410 nt, Artificial Sequence; identical to SEQ ID NO: 112774
  derived and/or modified CDS sequence (opt2) from neuraminidase__InfluenzaA__ADF27848

SEQ ID NO: 114608 - RNA, 1410 nt, Artificial Sequence
  derived and/or modified CDS sequence (opt2) from neuraminidase__InfluenzaA__ADF27858
augaaccccaaccagaagaucaucaccaucggcuccgucugcaugaccaucggcauggccaaccucauccuccagaucggcaacaucaucuccaucuggaucucccacuccauccagcucggcaaccagaaccagaucgagaccugcaaccaguccgucaucaccuacgagaacaacaccugggucaaccagaccuacgucaacaucuccaacaccaacuucgccgccggccaguccgucgucuccgucaagcucgccggcaacuccucccucugccccgucuccggcugggccaucuacuccaaggacaacuccauccgcaucggcuccaagggcgacgucuucgucauccgcgagcccuucaucuccugcuccccccucgagugccgcaccuucuuccucacccagggcgcccuccucaacgacaagcacuccaacggcaccaucaaggaccgcucccccuaccgcacccucauguccugccccaucggcgagguccccucccccuacaacucccgcuucgaguccgucgccugguccuccuccgccugccacgacggcaucaacuggcucaccaucggcaucuccggccccgacaacggcgccgucgccguccucaaguacaacggcaucaucaccgacaccaucaaguccuggcgcaacaacauccuccgcacccaggaguccgagugcgccugcgucaacggcuccugcuucaccgucaugaccgacggccccuccgacggccaggccuccuacaagaucuuccgcaucgagaagggcaagaucgucaaguccgucgagaugaacgcccccaacuaccacuacgaggagugcuccugcuaccccgacuccuccgagaucaccugcgucugccgcgacaacuggcacggcuccaaccgccccugggucuccuucaaccagaaccucgaguaccagaucggcuacaucugcuccggcaucuucggcgacaacccccgccccaacgacaagaagggcuccugcggccccgucuccuccaacggcgccaacggcgucaagggcuucuccuucaaguacggcaacggcgucuggaucggccgcaccaaguccaucuccucccgcaacggcuucgagaugaucugggaccccaacggcuggaccggcaccgacaacaacuucuccaucaagcaggacaucgucggcaucaacgagugguccggcuacuccggcuccuucguccagcaccccgagcucaccggccucgacugcauccgccccugcuucugggucgagcucauccgcggccgccccaaggagaacaccaucuggaccuccggcuccuccaucuccuucugcggcgucaacggcgacaccgucggcugguccuggcccgacggcgccgagcuccccuucaccaucgacaaguga

SEQ ID NO: 114609 - RNA, 1410 nt, Artificial Sequence
  derived and/or modified CDS sequence (opt2) from neuraminidase__InfluenzaA__ADF27878
augaaccccaaccagaagaucaucaccaucggcuccgucugcaugaccaucggcauggccaaccucauccuccagaucggcaacaucaucuccaucuggaucucccacuccauccagcucggcaaccagaaccagaucgagaccugcaaccaguccgucaucaccuacgagaacaacaccugggucaaccagaccuacgucaacaucuccaacaccaacuucgccgccggccaguccgucgucuccgucaagcucgccggcaacuccucccucugccccgucuccggcugggccaucuacuccaaggacaacuccauccgcaucggcuccaagggcgacgucuucgucauccgcgagcccuucaucuccugcuccccccucgagugccgcaccuucuuccucacccagggcgcccuccucaacgacaagcacuccaacggcaccaucaaggaccgcucccccuaccgcacccucauguccugccccaucggcgagguccccucccccuacaacucccgcuucgaguccgucgccugguccgccuccgccugccacgacggcaucaacuggcucaccaucggcaucuccggccccgacaacggcgccgucgccguccucaaguacaacggcaucaucaccgacaccaucaaguccuggcgcaacaacauccuccgcacccaggaguccgagugcgccugcgucaacggcuccugcuucaccgucaugaccgacggccccuccgacggccaggccuccuacaagaucuuccgcaucgagaagggcaagaucgucaaguccgucgagaugaacgcccccaacuaccacuacgaggagugcuccugcuaccccgacuccuccgagaucaccugcgucugccgcgacaacuggcacggcuccaaccgccccugggucuccuucaaccagaaccucgaguaccagaucggcuacaucugcuccggcaucuucggcgacaacccccgccccaacgacaagaagggcuccugcggccccgucuccuccaacggcgccaacggcgucaagggcuucuccuucaaguacggcaacggcgucuggaucggccgcaccaaguccaucuccucccgcaacggcuucgagaugaucugggaccccaacggcuggaccggcaccgacaacaacuucuccaucaagcaggacaucgucggcaucaacgagugguccggcuacuccggcuccuucguccagcaccccgagcucaccggccucgacugcauccgccccugcuucugggucgagcucauccgcggccgccccaaggagaacaccaucuggaccuccggcuccuccaucuccuucugcggcgucaacggcgacaccgucggcugguccuggcccgacggcgccgagcuccccuucaccaucgacaaguga

SEQ ID NO: 114610 - RNA, 1410 nt, Artificial Sequence; identical to SEQ ID NO: 114062
  derived and/or modified CDS sequence (opt2) from neuraminidase__InfluenzaA__ADF27888

SEQ ID NO: 114611 - RNA, 1410 nt, Artificial Sequence; identical to SEQ ID NO: 112774
  derived and/or modified CDS sequence (opt2) from neuraminidase__InfluenzaA__ADF27898

SEQ ID NO: 114612 - RNA, 1410 nt, Artificial Sequence; identical to SEQ ID NO: 114062
  derived and/or modified CDS sequence (opt2) from neuraminidase__InfluenzaA__ADF27908

SEQ ID NO: 114613 - RNA, 1410 nt, Artificial Sequence; identical to SEQ ID NO: 114062
  derived and/or modified CDS sequence (opt2) from neuraminidase__InfluenzaA__ADF27918

SEQ ID NO: 114614 - RNA, 1410 nt, Artificial Sequence
  derived and/or modified CDS sequence (opt2) from neuraminidase__InfluenzaA__ADF27938
augaaccccaaccagcgcaucaucaccaucggcuccgucugcaugaccaucggcauggccaaccucauccuccagaucggcaacaucaucuccaucuggaucucccacuccauccagcucggcaaccagaaccagaucgagaccugcaaccaguccgucaucaccuacgagaacaacaccugggucaaccagaccuacgucaacaucuccaacaccaacuucgccgccggccaguccgucgucuccgucaagcucgccggcaacuccucccucugccccgucuccggcugggccaucuacuccaaggacaacuccauccgcaucggcuccaagggcgacgucuucgucauccgcgagcccuucaucuccugcuccccccucgagugccgcaccuucuuccucacccagggcgcccuccucaacgacaagcacuccaacggcaccaucaaggaccgcucccccuaccgcacccucauguccugccccaucggcgagguccccucccccuacaacucccgcuucgaguccgucgccugguccgccuccgccugccacgacggcaucaacuggcucaccaucggcaucuccggccccgacaacggcgccgucgccguccucaaguacaacggcaucaucaccgacaccaucaaguccuggcgcaacaacauccuccgcacccaggaguccgagugcgccugcgucaacggcuccugcuucaccgucaugaccgacggccccuccgacggccaggccuccuacaagaucuuccgcaucgagaagggcaagaucgucaaguccgucgagaugaacgcccccaacuaccacuacgaggagugcuccugcuaccccgacuccuccgagaucaccugcgucugccgcgacaacuggcacggcuccaaccgccccugggucuccuucaaccagaaccucgaguaccagaucggcuacaucugcuccggcaucuucggcgacaacccccgccccaacgacaagaccggcuccugcggccccgucuccuccaacggcgccaacggcgucaagggcuucuccuucaaguacggcaacggcgucuggaucggccgcaccaaguccaucuccucccgcaacggcuucgagaugaucugggaccccaacggcuggaccggcaccgacaacaacuucuccaucaagcaggacaucgucggcaucaacgagugguccggcuacuccggcuccuucguccagcaccccgagcucaccggccucgacugcauccgccccugcuucugggucgagcucauccgcggccgccccaaggagaacaccaucuggaccuccggcuccuccauguccuucugcggcgucaacuccgacaccgucggcugguccuggcccgacggcgccgagcuccccuucaccaucgacaaguga

SEQ ID NO: 114615 - RNA, 1410 nt, Artificial Sequence; identical to SEQ ID NO: 112774
  derived and/or modified CDS sequence (opt2) from neuraminidase__InfluenzaA__ADF27948

SEQ ID NO: 114616 - RNA, 1410 nt, Artificial Sequence; identical to SEQ ID NO: 114062
  derived and/or modified CDS sequence (opt2) from neuraminidase__InfluenzaA__ADF27958

SEQ ID NO: 114617 - RNA, 1410 nt, Artificial Sequence; identical to SEQ ID NO: 112774
  derived and/or modified CDS sequence (opt2) from neuraminidase__InfluenzaA__ADF27968

SEQ ID NO: 114618 - RNA, 1410 nt, Artificial Sequence; identical to SEQ ID NO: 114062
  derived and/or modified CDS sequence (opt2) from neuraminidase__InfluenzaA__ADF27978

SEQ ID NO: 114619 - RNA, 1410 nt, Artificial Sequence
  derived and/or modified CDS sequence (opt2) from neuraminidase__InfluenzaA__ADF27988
augaaccccaaccagaagaucaucaccaucggcuccgucugcaugaccaucggccucgccaaccucauccuccagaucggcaacaucaucuccaucuggaucucccacuccauccagcucggcaaccagaaccagaucgagaccugcaaccaguccgucaucuccuacgagaacaacaccugggucaaccagaccuacgucaacaucuccaacaccaacuucgccgccggccaguccgucgucuccgucaagcucgccggcaacuccucccucugccccgucuccggcugggccaucuacuccaaggacaacuccguccgcaucggcuccaagggcgacgucuucgucauccgcgagcccuucaucuccugcuccccccucgagugccgcaccuucuuccucacccagggcgcccuccucaacgacaagcacuccaacggcaccaucaaggaccgcucccccuaccgcacccucauguccugccccaucggcgagguccccucccccuacaacucccgcuucgaguccgucgccugguccgccuccgccugccacgacggcaucaacuggcucaccaucggcaucuccggccccgacaacggcgccgucgccguccucaaguacaacggcaucaucaccgacaccaucaaguccuggcgcaacaacauccuccgcacccaggaguccgagugcgccugcgucaacggcuccugcuucaccgucaugaccgacggccccuccgacggccaggccuccuacaagaucuuccgcaucgagaagggcaagaucgucaaguccgucgagaugaacgcccccaacuaccacuacgaggagugcuccugcuaccccgacuccuccgagaucaccugcgucugccgcgacaacuggcacggcuccaaccgccccugggucuccuucaaccagaaccucgaguaccgcaucggcuacaucugcuccggcaucuucggcgacaacccccgccccaacgacaagaccggcuccugcggccccgucuccuccaacggcgccaacggcgucaagggcuucuccuucaaguacggcaacggcgucuggaucggccgcaccaaguccaucuccucccgcaacggcuucgagaugaucugggaccccaacggcuggaccggcaccgacaagaacuucuccaucaagcaggacaucgucggcaucaacgagugguccggcuacuccggcuccuucguccagcaccccgagcucaccggccucgacugcauccgccccugcuucugggucgagcucauccgcggccgccccaaggagaacaccaucuggaccuccggcuccuccaucuccuucugcggcgucaacuccgacaccgucggcugguccuggcccgacggcgccgagcuccccuucaccaucgacaaguga

SEQ ID NO: 114620 - RNA, 1410 nt, Artificial Sequence; identical to SEQ ID NO: 112774
  derived and/or modified CDS sequence (opt2) from neuraminidase__InfluenzaA__ADF27998

SEQ ID NO: 114621 - RNA, 1410 nt, Artificial Sequence; identical to SEQ ID NO: 112774
  derived and/or modified CDS sequence (opt2) from neuraminidase__InfluenzaA__ADF28008

SEQ ID NO: 114622 - RNA, 1410 nt, Artificial Sequence; identical to SEQ ID NO: 113661
  derived and/or modified CDS sequence (opt2) from neuraminidase__InfluenzaA__ADF28018

SEQ ID NO: 114623 - RNA, 1410 nt, Artificial Sequence; identical to SEQ ID NO: 112774
  derived and/or modified CDS sequence (opt2) from neuraminidase__InfluenzaA__ADF28028

SEQ ID NO: 114624 - RNA, 1410 nt, Artificial Sequence
  derived and/or modified CDS sequence (opt2) from neuraminidase__InfluenzaA__ADF28038
augaaccccaaccagaagaucaucaccaucggcuccgucugcaugaccaucggcauggccaaccucauccuccagaucggcaacaucaucuccaucuggaucucccacuccauccagcucggcaaccagaaccagaucgagaccugcaaccaguccgucaucaccuacgagaacaacaccugggucaaccagaccuacgucaacaucuccaacaccaacuucgccaccggccagcucgucgucuccgucaagcucgccggcaacuccucccucugccccgucuccggcugggccaucuacuccaaggacaacuccauccgcaucggcuccaagggcgacgucuucgucauccgcgagcccuucaucuccugcuccccccucgagugccgcaccuucuuccucacccagggcgcccuccucaacgaccgccacuccaacggcaccaucaaggaccgcucccccuaccgcacccucauguccugccccaucggcgagguccccucccccuacaacucccgcuucgaguccgucgccugguccgccuccgccugccacgacggcaucaacuggcucaccaucggcaucuccggccccgacaacggcgccgucgccguccucaaguacaacggcaucaucaccgacaccaucaaguccuggcgcaacaacauccuccgcacccaggaguccgagugcgccugcgucaacggcuccugcuucaccgucaugaccgacggccccuccgacggccaggccuccuacaagaucuuccgcaucgagaagggcaagaucgucaaguccgucgagaugaacgcccccaacuaccacuacgaggagugcuccugcuaccccgacuccuccgagaucaccugcgucugccgcgacaacuggcacggcuccaaccgccccugggucuccuucaaccagaaccucgaguaccagaucggcuacaucugcuccggcaucuucggcgacaacccccgccccaacgacaagaccggcuccugcggccccgucuccuccaacggcgccaacggcgucaagggcuucuccuucaaguacggcaacggcgucuggaucggccgcaccaaguccaucuccucccgcaacggcuucgagaugaucugggaccccaacggcuggaccggcaccgacaacaacuucuccaucaagcaggacaucgucggcaucaacgagugguccggcuacuccggcuccuucguccagcaccccgagcucaccggccucgacugcauccgccccugcuucugggucgagcucauccgcggccgccccaaggagaacaccaucuggaccuccggcuccuccaucuccuucugcggcgucaacuccgacaccgucggcugguccuggcccgacggcgccgagcuccccuucaccaucgacaaguga

SEQ ID NO: 114625 - RNA, 1410 nt, Artificial Sequence; identical to SEQ ID NO: 112774
  derived and/or modified CDS sequence (opt2) from neuraminidase__InfluenzaA__ADF28048

SEQ ID NO: 114626 - RNA, 1410 nt, Artificial Sequence; identical to SEQ ID NO: 112774
  derived and/or modified CDS sequence (opt2) from neuraminidase__InfluenzaA__ADF28058

SEQ ID NO: 114627 - RNA, 1410 nt, Artificial Sequence
  derived and/or modified CDS sequence (opt2) from neuraminidase__InfluenzaA__ADF28068
augaaccccaaccagaagaucaucaccaucggcuccgucugcaugaccaucggcauggccaaccucauccuccagaucggcaacaucaucuccaucuggaucucccacuccauccagcucggcaaccagaaccagaucgagaccugcaaccaguccgucaucaccuacgagaacaacaccugggucaaccagaccuacgucaacaucuccaacaccaacuucgccgccggccaguccgucgucuccgucaagcucgccggcuccuccucccucugccccgucuccggcugggccaucuacuccaaggacaacuccauccgcaucggcuccaagggcgacgucuucgucauccgcgagcccuucaucuccugcucccaccucgagugccgcaccuucuuccucacccagggcgcccuccucaacgacaagcacuccaacggcaccaucaaggaccgcucccccuaccgcacccucauguccugccccaucggcgagguccccucccccuacaacucccgcuucgaguccgucgccugguccgccuccgccugccacgacggcaucaacuggcucaccaucggcaucuccggccccgacaacggcgccgucgccguccucaaguacaacggcaucaucaccgacaccaucaaguccuggcgcaacaacauccuccgcacccaggaguccgagugcgccugcgucaacggcuccugcuucaccgucaugaccgacggccccuccgacggccaggccuccuacaagaucuuccgcaucgagaagggcaagaucgucaaguccgucgagaugaacgcccccaacuaccacuacgaggagugcuccugcuaccccgacuccuccgagaucaccugcgucugccgcgacaacuggcacggcuccaaccgccccugggucuccuucaaccagaaccucgaguaccagaucggcuacaucugcuccggcaucuucggcgacaacccccgccccaacgacaagaagggcuccugcggccccgucuccuccaacggcgccaacggcgucaagggcuucuccuucaaguacggcaacggcgucuggaucggccgcaccaaguccaucuccucccgcaacggcuucgagaugaucugggaccccaacggcuggaccggcaccgacaacaacuucuccaucaagcaggacaucgucggcaucaacgagugguccggcuacuccggcuccuucguccagcaccccgagcucaccggccucgacugcauccgccccugcuucugggucgagcucauccgcggccgccccaaggagaacaccaucuggaccuccggcuccuccaucuccuucugcggcgucaacuccgacaccgucggcugguccuggcccgacggcgccgagcuccccuucaccaucgacaaguga

SEQ ID NO: 114628 - RNA, 1410 nt, Artificial Sequence; identical to SEQ ID NO: 112774
  derived and/or modified CDS sequence (opt2) from neuraminidase__InfluenzaA__ADF28078

SEQ ID NO: 114629 - RNA, 1410 nt, Artificial Sequence; identical to SEQ ID NO: 112774
  derived and/or modified CDS sequence (opt2) from neuraminidase__InfluenzaA__ADF28088

SEQ ID NO: 114630 - RNA, 1410 nt, Artificial Sequence; identical to SEQ ID NO: 114236
  derived and/or modified CDS sequence (opt2) from neuraminidase__InfluenzaA__ADF28110

SEQ ID NO: 114631 - RNA, 1410 nt, Artificial Sequence; identical to SEQ ID NO: 112774
  derived and/or modified CDS sequence (opt2) from neuraminidase__InfluenzaA__ADF28120

SEQ ID NO: 114632 - RNA, 1410 nt, Artificial Sequence; identical to SEQ ID NO: 112774
  derived and/or modified CDS sequence (opt2) from neuraminidase__InfluenzaA__ADF29919

SEQ ID NO: 114633 - RNA, 1410 nt, Artificial Sequence; identical to SEQ ID NO: 113911
  derived and/or modified CDS sequence (opt2) from neuraminidase__InfluenzaA__ADF42692

SEQ ID NO: 114634 - RNA, 1410 nt, Artificial Sequence; identical to SEQ ID NO: 112774
  derived and/or modified CDS sequence (opt2) from neuraminidase__InfluenzaA__ADF42702

SEQ ID NO: 114635 - RNA, 1410 nt, Artificial Sequence; identical to SEQ ID NO: 114609
  derived and/or modified CDS sequence (opt2) from neuraminidase__InfluenzaA__ADF42712

SEQ ID NO: 114636 - RNA, 1410 nt, Artificial Sequence; identical to SEQ ID NO: 112774
  derived and/or modified CDS sequence (opt2) from neuraminidase__InfluenzaA__ADF42722

SEQ ID NO: 114637 - RNA, 1410 nt, Artificial Sequence; identical to SEQ ID NO: 114062
  derived and/or modified CDS sequence (opt2) from neuraminidase__InfluenzaA__ADF42732

SEQ ID NO: 114638 - RNA, 1410 nt, Artificial Sequence; identical to SEQ ID NO: 112774
  derived and/or modified CDS sequence (opt2) from neuraminidase__InfluenzaA__ADF42742

SEQ ID NO: 114639 - RNA, 1410 nt, Artificial Sequence; identical to SEQ ID NO: 112764
  derived and/or modified CDS sequence (opt2) from neuraminidase__InfluenzaA__ADF58339

SEQ ID NO: 114640 - RNA, 1410 nt, Artificial Sequence; identical to SEQ ID NO: 112774
  derived and/or modified CDS sequence (opt2) from neuraminidase__InfluenzaA__ADF58348

SEQ ID NO: 114641 - RNA, 1410 nt, Artificial Sequence; identical to SEQ ID NO: 112774
  derived and/or modified CDS sequence (opt2) from neuraminidase__InfluenzaA__ADF58350

SEQ ID NO: 114642 - RNA, 1410 nt, Artificial Sequence; identical to SEQ ID NO: 112774
  derived and/or modified CDS sequence (opt2) from neuraminidase__InfluenzaA__ADF58352

SEQ ID NO: 114643 - RNA, 1410 nt, Artificial Sequence
  derived and/or modified CDS sequence (opt2) from neuraminidase__InfluenzaA__ADF80459
augaaccccaaccagaagaucaucaccaucggcuccgucugcaugaccaucggcauggccaaccucauccuccagaucggcaacaucaucuccaucuggaucucccacuccauccagcucggcaaccagaaccagaucgagaccugcaaccaguccgucaucaccuacgagaacaacaccugggucaaccagaccuacgucaacaucuccaacaccaacuucgccgccggccaguccgucgucuccgucaagcucgccggcaacuccucccucugccccgucuccggcugggccaucuacuccaaggacaacuccauccgcaucggcuccaagggcgacgucuucgucauccgcgagcccuucaucuccugcuccccccucgagugccgcaccuucuuccucacccagggcgcccuccucaacgacaagcacuccaacggcaccaucaaggaccgcucccccuaccgcacccucauguccugccccaucggcgagguccccucccccuacaacucccgcuucgaguccgucgccugguccgccuccgccugccacgacggcaucaacuggcucaccaucggcaucuccggccccgacaacggcgccgucgccguccucaaguacaacggcaucaucaccgacaccaucaaguccuggcgcaacaacauccuccgcacccaggaguccgagugcgccugcgucaacggcuccugcuucaccgucaugaccgacggccccuccgacggccaggccuccuacaagaucuuccgcaucgagaagggcaagaucgucaaguccgucgagaugaacgcccccaacuacuacuacgaggagugcuccugcuaccccgacuccuccgagaucaccugcgucugccgcgacaacuggcacggcuccaaccgccccugggucaccuucaaccagaaccucgaguaccagaucggcuacaucugcuccggcaucuucggcgacaacccccgccccaacgacaagaccggcuccugcggccccgucuccuccaacggcgccaacggcgucaagggcuucuccuucaaguacggcaacggcgucuggaucggccgcaccaaguccaucuccucccgcaacggcuucgagaugaucugggaccccaacggcuggaccggcaccgacaacaacuucuccaucaagcaggacaucgucggcaucaacgagugguccggcuacuccggcuccuucguccagcaccccgagcucaccggccucgacugcauccgccccugcuucugggucgagcucauccgcggccgccccaaggagaacaccgucuggaccuccggcuccuccaucuccuucugcggcgucaacuccgacaccgucggcugguccuggcccgacggcgccgagcuccccuucaccaucgacaaguga

SEQ ID NO: 114644 - RNA, 1410 nt, Artificial Sequence
  derived and/or modified CDS sequence (opt2) from neuraminidase__InfluenzaA__ADF80503
augaaccccaaccagaagaucaucaccaucggcuccgucugcaugaccaucggcauggccaaccucauccuccagaucggcaacaucaccuccaucuggaucucccacuccauccagcucggcaaccagaaccagaucgagaccugcaaccaguccgucaucaccuacgagaacaacaccugggucaaccagaccuacgucaacaucuccaacaccaacuucgccgccggccaguccgucgucuccgucaagcucgccggcaacuccucccucugccccgucuccggcugggccaucuacuccaaggacaacuccauccgcaucggcuccaagggcgacgucuucgucauccgcgagcccuucaucuccugcuccccccucgagugccgcaccuucuuccucacccagggcgcccuccucaacgacaagcacuccaacggcaccaucaaggaccgcucccccuaccgcacccucauguccugccccaucggcgagguccccucccccuacaacucccgcuucgaguccgucgccugguccgccuccgccugccacgacggcaucaacuggcucaccaucggcaucuccggccccgacaacggcgccgucgccguccucaaguacaacggcaucaucaccgacaccaucaaguccuggcgcaacaacauccuccgcacccaggaguccgagugcgccugcgucaacggcuccugcuucaccgucaugaccgacggccccuccgacggccaggccuccuacaagaucuuccgcaucgagaagggcaagaucgucaaguccgucgagaugaacgcccccaacuacuacuacgaggagugcuccugcuaccccgacuccuccgagaucaccugcgucugccgcgacaacuggcacggcuccaaccgccccugggucuccuucaaccagaaccucgaguaccagaucggcuacaucugcuccggcaucuucggcgacaacccccgccccaacgacaagaccggcuccugcggccccgucuccuccaacggcgccaacggcgucaagggcuucuccuucaaguacggcaacggcgucuggaucggccgcaccaaguccaucuccucccgcaacggcuucgagaugaucugggaccccaacggcuggaccggcaccgacaacaacuucuccaucaagcaggacaucgucggcaucaacgagugguccggcuacuccggcuccuucguccagcaccccgagcucaccggccucgacugcauccgccccugcuucugggucgagcucauccgcggccgccccaaggagaacaccaucuggaccuccggcuccuccaucuccuucugcggcgucaacuccgacaccgucggcugguccuggcccgacggcgccgagcuccccuucaccaucgacaaguga

SEQ ID NO: 114645 - RNA, 1410 nt, Artificial Sequence
  derived and/or modified CDS sequence (opt2) from neuraminidase__InfluenzaA__ADF83744
augaaccccaaccagaagaucaucaccaucggcuccgucucccucaccaucuccaccaucugcuucuucaugcagaucgccauccucaucaccaccgucacccuccacuucaagcaguacgaguucaacuccccccccaacaaccaggucaugcucugcgagcccaccaucaucgagaagaacaucaccgagaucgucuaccucaccaacaccaccaucgagaaggagaucugccccaagcucgccgaguaccgcaacugguccaagccccagugcgacaucaccggcuucgcccccuucuccaaggacaacuccauccgccucuccgccggcggcgacaucugggucacccgcgagcccuacgucuccugcgaccccgacaagugcuaccaguucgcccucggccagggcaccacccucaacaacguccacuccaacaacaccguccgcgaccgcacccccuaccgcacccuccucaugaacgagcucggcguccccuuccaccucggcaccaagcaggucugcaucgccugguccuccuccuccugccacgacggcaaggccuggcuccacgucugcaucaccggcgacgacaagaacgccaccgccuccuucaucuacaacggccgccucgucgacuccgucgucuccugguccaaggagauccuccgcacccaggaguccgagugcgucugcaucaacggcaccugcaccgucgucaugaccgacggcuccgccuccggcaaggccgacaccaagauccucuucaucgaggagggcaagaucguccacaccuccacccucuccggcuccgcccagcacgucgaggagugcuccugcuacccccgcuaccccggcguccgcugcgucugccgcgacaacuggaagggcuccaaccgccccaucgucgacaucaacaucaaggaccacuccaucgucuccuccuacgucugcuccggccucgucggcgacaccccccgcaagaacgacuccuccuccuccucccacugccucgaccccaacaacgaggagggcggccacggcgucaagggcugggccuucgacgacggcaacgacgucuggaugggccgcaccaucuccgagaagucccgccucggcuacgagaccuucaaggucaucgagggcugguccaaccccaaguccaagcuccagaucaaccgccaggucaucgucgaccgcggcaaccgcuccggcuacuccggcaucuucuccgucgagggcaaguccugcaucaaccgcugcuucuacgucgagcucauccgcggccgcaaggaggagaccgagguccucuggaccuccaacuccaucgucgucuucugcggcaccuccggcaccuacggcaccggcuccuggcccgacggcgccgacaucaaccucaugcccaucuga

SEQ ID NO: 114646 - RNA, 1410 nt, Artificial Sequence; identical to SEQ ID NO: 113628
  derived and/or modified CDS sequence (opt2) from neuraminidase__InfluenzaA__ADF83755

SEQ ID NO: 114647 - RNA, 1410 nt, Artificial Sequence
  derived and/or modified CDS sequence (opt2) from neuraminidase__InfluenzaA__ADF83766
augaaccccaaccagaagaucaucaccaucggcuccgucugcaugaccaucggcauggccaaccucauccuccagaucggcaacaucaucuccaucuggaucucccacuccauccagcucggcaaccagaaccagaccgagaccugcaaccaguccgucaucaccuacgagaacaacaccugggucaaccagaccuacgucaacaucuccaacaccaacuucgccgccggccaguccgucgucuccgucaagcucgccggcaacuccucccucugccccgucuccggcugggccaucuacuccaaggacaacuccauccgcaucggcuccaagggcgacgucuucgucauccgcgagcccuucaucuccugcuccccccucgagugccgcaccuucuuccucacccagggcgcccuccucaacgacaagcacuccaacggcaccaucaaggaccgcucccccuaccgcacccucauguccugccccaucggcgagguccccucccccuacaacucccgcuucgaguccgucgccugguccgccuccgccugccacgacggcaucaacuggcucaccaucggcaucuccggccccgacaacggcgccgucgccguccucaaguacaacggcaucaucaccgacaccaucaaguccuggcgcaacaacauccuccgcacccaggaguccgagugcgccugcgucaacggcuccugcuucaccgucaugaccgacggccccuccgacggccaggccuccuacaagaucuuccgcaucgagaagggcaagaucgucaaguccgucgagaugaacgcccccaacuaccacuacgaggagugcuccugcuaccccgacuccuccgagaucaccugcgucugccgcgacaacuggcacggcuccaaccgccccugggucuccuucaaccagaaccucgaguaccagaucggcuacaucugcuccggcaucuucggcgacaacccccgccccaacgacaagaccggcuccugcggccccgucuccuccaacggcgccaacggcgucaagggcuucuccuucaaguacgacaacggcgucuggaucggccgcaccaaguccaucuccucccgcaacggcuucgagaugaucugggaccccaacggcuggaccggcaccgacaacaacuucuccaucaagcaggacaucgucggcaucaacgagugguccggcuacuccggcuccuucguccagcaccccgagcucaccggccucgacugcauccgccccugcuucugggucgagcucauccgcggccgccccaaggagaacaccaucuggaccuccggcuccuccaucuccuucugcggcgucaacuccgacaccgucggcugguccuggcccgacggcgccgagcuccccuucaccaucgacaaguga

SEQ ID NO: 114648 - RNA, 1410 nt, Artificial Sequence; identical to SEQ ID NO: 112774
  derived and/or modified CDS sequence (opt2) from neuraminidase__InfluenzaA__ADF83776

SEQ ID NO: 114649 - RNA, 1410 nt, Artificial Sequence
  derived and/or modified CDS sequence (opt2) from neuraminidase__InfluenzaA__ADF83786
augaaccccaaccagaagaucaucaccaucggcuccgucugcaugaccaucggcauggccaaccucauccuccagaucggcaacaucaucuccaucuggaucucccacuccauccagcucggcaaccagaaccagaucgagaccugcaaccaguccgucaucaccuacgagaacaacaccugggucaaccagaccuacgucaacaucuccaacaccaacuucgccgccggccaguccgucgucuccgucaagcucgccggcaacuccucccucugccccgucuccggcugggccaucuacuccaaggacaacuccauccgcaucggcuccaagggcgacgucuucgucauccgcgagcccuucaucuccugcuccccccucgagugccgcaccuucuuccucacccagggcgcccuccucaacgacaagcacuccaacggcaccaucaaggaccgcucccccuaccgcacccucauguccugccccaucggcgagguccccucccccuacaacucccgcuucgaguccgucgccugguccgccuccgccugccacgacggcaucaacuggcucaccaucggcaucuccggccccgacaacggcgccgucgccguccucaaguacaacggcaucaucaccgacaccaucaaguccuggcgcaacaacauccuccgcacccaggaguccgagugcgccugcgucaacggcuccugcuucaccgucaugaccgacggccccuccgacggccaggccuccuacaagaucuuccgcaucgagaagggcaagaucgucaaguccgucgagaugaacgcccccaacuaccacuacgaggagugcuccugcuaccccgacuccuccgagaucaccugcgucugccgcgacaacuggcacggcuccaaccgccccugggucuccuucaaccagaaccucgaguaccagaucggcuacaucugcuccggcaucuucggcgacaacccccgccccaacgacaagaccggcuccugcggccccgucuccuccaacggcgccaacggcgucaagggcuucuccuucaaguacggcaacggcgucuggaucggccgcaccaaguccaucuccucccgcaacggcuucgagaugaucugggaccccaacggcuggaccggcaccgacaacaacuucuccaucaagcaggacaucgucggcaucaacgagugguccggcuacuccggcuccuucguccagcaccccgagcucaccggccucgacugcauccgccccugcuucugggucgagcucauccgcggccgccccaaggagaacaccaucuggaccuccggcuccuccaucuccuucugcggcgucaacggcgacaccgucggcugguccuggcccgacggcgccgagcuccccuucaccaucgacaaguga

SEQ ID NO: 114650 - RNA, 1410 nt, Artificial Sequence
  derived and/or modified CDS sequence (opt2) from neuraminidase__InfluenzaA__ADF83796
augaaccccaaccagaagaucaucaccaucggcuccgucugcaugaccaucggcauggccaaccucauccuccagaucggcaacaucaucuccaucuggaucucccacuccauccagcucggcaaccagaaccagaucgagaccugcaaccaguccgucaucaccuacgagaacaacaccugggucaaccagaccuacgucaacaucuccaacaccaacuucgccgccggccaguccgucgucuccgucaagcucgccggcaacuccucccucugccccgucuccggcugggccaucuacuccaaggacaacuccauccgcaucggcuccaagggcgacgucuucgucauccgcgagcccuucaucuccugcuccccccucgagugccgcaccuucuuccucacccagggcgcccuccucaacgacaagcacuccaacggcaccaucaaggaccgcucccccuaccgcacccucauguccugccccaucggcgagguccccucccccuacaacucccgcuucgaguccgucgccugguccgccuccgccugccacgacggcaucaacuggcucaccaucggcaucuccggccccgacaacggcgccgucgccguccucaaguacaacggcaucaucaccgacaccaucaaguccuggcgcaacaacauccuccgcacccaggaguccgagugcgccugcgucaacggcuccugcuucaccgucaugaccgacggccccuccgacggccaggccuccuacaagaucuuccgcaucgagaagggcaagaucgucaaguccgucgagaugaacgcccccaacuaccacuacgaggagugcuccugcuaccccgacuccuccgagaucaccugcgucugccgcgacaacuggcacggcuccaaccgccccugggucuccuucaaccagaaccucgaguaccagaucggcuacaucugcuccggcaucuucggcgacaacccccgccccaacgacaagaccggcuccugcggccccgucuccuccaacggcgccaacggcgucaagggcuucuccuucaaguacggcaacggcgucuggaucggccgcaccaaguccaucuccucccgcaacggcuucgagaugaucugggaccccaacggcuggaccggcaccgacaacaacuucuccaucaagcaggacaucguccgcaucaacgagugguccggcuacuccggcuccuucguccagcaccccgagcucaccggccucgacugcauccgccccugcuucugggucgagcucauccgcggccgccccaaggagaacaccaucuggaccuccggcuccuccaucuccuucugcggcgucaacuccgacaccgucggcugguccuggcccgacggcgccgagcuccccuucaccaucgacaaguga

SEQ ID NO: 114651 - RNA, 1410 nt, Artificial Sequence; identical to SEQ ID NO: 112774
  derived and/or modified CDS sequence (opt2) from neuraminidase__InfluenzaA__ADF83806

SEQ ID NO: 114652 - RNA, 1410 nt, Artificial Sequence; identical to SEQ ID NO: 114287
  derived and/or modified CDS sequence (opt2) from neuraminidase__InfluenzaA__ADF83816

SEQ ID NO: 114653 - RNA, 1410 nt, Artificial Sequence; identical to SEQ ID NO: 112774
  derived and/or modified CDS sequence (opt2) from neuraminidase__InfluenzaA__ADF83826

SEQ ID NO: 114654 - RNA, 1410 nt, Artificial Sequence; identical to SEQ ID NO: 112774
  derived and/or modified CDS sequence (opt2) from neuraminidase__InfluenzaA__ADF83836

SEQ ID NO: 114655 - RNA, 1410 nt, Artificial Sequence; identical to SEQ ID NO: 112774
  derived and/or modified CDS sequence (opt2) from neuraminidase__InfluenzaA__ADF83846

SEQ ID NO: 114656 - RNA, 1410 nt, Artificial Sequence; identical to SEQ ID NO: 112774
  derived and/or modified CDS sequence (opt2) from neuraminidase__InfluenzaA__ADF83856

SEQ ID NO: 114657 - RNA, 1410 nt, Artificial Sequence; identical to SEQ ID NO: 114125
  derived and/or modified CDS sequence (opt2) from neuraminidase__InfluenzaA__ADF83866

SEQ ID NO: 114658 - RNA, 1410 nt, Artificial Sequence; identical to SEQ ID NO: 114555
  derived and/or modified CDS sequence (opt2) from neuraminidase__InfluenzaA__ADF83876

SEQ ID NO: 114659 - RNA, 1410 nt, Artificial Sequence; identical to SEQ ID NO: 114205
  derived and/or modified CDS sequence (opt2) from neuraminidase__InfluenzaA__ADF83888

SEQ ID NO: 114660 - RNA, 1410 nt, Artificial Sequence
  derived and/or modified CDS sequence (opt2) from neuraminidase__InfluenzaA__ADF83898
augaaccccaaccagaagaucaucaccaucggcuccgucugcaugaccaucggcauggccaaccucauccuccagaucggcaacaucaucuccaucuggaucucccaccccauccagcucggcaaccagaaccagaucgagaccugcaaccaguccgucaucaccuacgagaacaacaccugggucaaccagaccuacgucaacaucuccaacaccaacuucgccgccggccaguccgucgucuccgucaagcucgccggcaacuccucccucugccccgucuccggcugggccaucuacuccaaggacaacuccauccgcaucggcuccaagggcgacgucuucgucauccgcgagcccuucaucuccugcuccccccucgagugccgcaccuucuuccucacccagggcgcccuccucaacgacaagcacuccaacggcaccaucaaggaccgcucccccuaccgcacccucauguccugccccaucggcgagguccccucccccuacaacucccgcuucgaguccgucgccugguccgccuccgccugccacgacggcaucaacuggcucaccaucggcaucuccggccccgacaacggcgccgucgccguccucaaguacaacggcaucaucaccgacaccaucaaguccuggcgcaacaacauccuccgcacccaggaguccgagugcgccugcgucaacggcuccugcuucaccgucaugaccgacggccccuccgacggccaggccuccuacaagaucuuccgcaucgagaagggcaagaucgucaaguccgucgagaugaacgcccccaacuaccacuacgaggagugcuccugcuaccccgacuccuccgagaucaccugcgucugccgcgacaacuggcacggcuccaaccgccccugggucuccuucaaccagaaccucgaguaccagaucggcuacaucugcuccggcaucuucggcgacaacccccgccccaacgacaagaccggcuccugcggccccgucuccuccaacggcgccaacggcgucaagggcuucuccuucaaguacggcaacggcgucuggaucggccgcaccaaguccaucuccucccgcaacggcuucgagaugaucugggaccccaacggcuggaccggcaccgacaacaacuucuccaucaagcaggacaucgucggcaucaacgagugguccggcuacuccggcuccuucguccagcaccccgagcucaccggccucgacugcauccgccccugcuucugggucgagcucauccgcggccgccccaaggagaacaccaucuggaccuccggcuccuccaucuccuucugcggcgucaacuccgacaccgucggcugguccuggcccgacggcgccgagcuccccuucaccaucgacaaguga

SEQ ID NO: 114661 - RNA, 1410 nt, Artificial Sequence; identical to SEQ ID NO: 112774
  derived and/or modified CDS sequence (opt2) from neuraminidase__InfluenzaA__ADF83908

SEQ ID NO: 114662 - RNA, 1410 nt, Artificial Sequence; identical to SEQ ID NO: 112774
  derived and/or modified CDS sequence (opt2) from neuraminidase__InfluenzaA__ADF83918

SEQ ID NO: 114663 - RNA, 1410 nt, Artificial Sequence; identical to SEQ ID NO: 112774
  derived and/or modified CDS sequence (opt2) from neuraminidase__InfluenzaA__ADF84444

SEQ ID NO: 114664 - RNA, 1410 nt, Artificial Sequence; identical to SEQ ID NO: 112774
  derived and/or modified CDS sequence (opt2) from neuraminidase__InfluenzaA__ADF84462

SEQ ID NO: 114665 - RNA, 1410 nt, Artificial Sequence
  derived and/or modified CDS sequence (opt2) from neuraminidase__InfluenzaA__ADF84472
augaaccccaaccagaagaucaucaccaucggcuccgucugcaugaccaucggcauggccaaccucauccuccagaucggcaacaucaucuccaucuggaucucccacuccauccagcucggcaaccagaaccagaucgagaccugcaaccaguccgucaucaccuacgagaacaacaccugggucaaccagaccuacgucaacaucuccaacaccaacuucgccgccgagcaguccgucgucuccgucaagcucgccggcaacuccucccucugccccgucuccggcugggccaucuacuccaaggacaacuccauccgcaucggcuccaagggcgacgucuucgucauccgcgagcccuucaucuccugcuccccccucgagugccgcaccuucuuccucacccagggcgcccuccucaacgacaagcacuccaacggcaccaucaaggaccgcucccccuaccgcacccucauguccugccccaucggcgagguccccucccccuacaacucccgcuucgaguccgucgccugguccgccuccgccugccacgacggcaucaacuggcucaccaucggcaucuccggccccgacaacggcgccgucgccguccucaaguacaacggcaucaucaccgacaccaucaaguccuggcgcaacaacauccuccgcacccaggaguccgagugcgccugcgucaacggcuccugcuucaccgucaugaccgacggccccuccgacggccaggccuccuacaagaucuuccgcaucgagaagggcaagaucgucaaguccgucgagaugaacgcccccaacuaccacuacgaggagugcuccugcuaccccgacuccuccgagaucaccugcgucugccgcgacaacuggcacggcuccaaccgccccugggucuccuucaaccagaaccucgaguaccagaucggcuacaucugcuccggcaucuucggcgacaacccccgccccaacgacaagaccggcuccugcggccccgucuccuccaacggcgccaacggcgucaagggcuucuccuucaaguacggcaacggcgucuggaucggccgcaccaaguccaucuccucccgcaacggcuucgagaugaucugggaccccaacggcuggaccggcaccgacaacaacuucuccaucaagcaggacaucgucggcaucaacgagugguccggcuacuccggcuccuucguccagcaccccgagcucaccggccucgacugcauccgccccugcuucugggucgagcucauccgcggccgccccaaggagaacaccaucuggaccuccggcuccuccaucuccuucugcggcgucaacuccgacaccgucggcugguccuggcccgacggcgccgagcuccccuucaccaucgacaaguga

SEQ ID NO: 114666 - RNA, 1410 nt, Artificial Sequence
  derived and/or modified CDS sequence (opt2) from neuraminidase__InfluenzaA__ADF84482
augaaccccaaccagaagaucaucaucaucggcuccgucugcaugaccaucggcauggccaaccucauccuccagaucggcaacaucaucuccaucuggaucucccacuccauccagcucggcaaccagaaccagaucgagaccugcaaccaguccgucaucaccuacgagaacaacaccugggucaaccagaccuacgucaacaucuccaacaccaacuucgccgccggccaguccgucgucuccgucaagcucgccggcaacuccucccucugccccgucuccggcugggccaucuacuccaaggacaacuccauccgcaucggcuccaagggcgacgucuucgucauccgcgagcccuucaucuccugcuccccccucgagugccgcaccuucuuccucacccagggcgcccuccucaacgacaagcacuccaacggcaccaucaaggaccgcucccccuaccgcacccucauguccugccccaucggcgagguccccucccccuacaacucccgcuucgaguccgucgccugguccgccuccgccugccacgacggcaucaacuggcucaccaucggcaucuccggccccgacaacggcgccgucgccguccucaaguacaacggcaucaucaccgacaccaucaaguccuggcgcaacaacauccuccgcacccaggaguccgagugcgccugcgucaacggcuccugcuucaccgucaugaccgacggccccuccgacggccaggccuccuacaagaucuuccgcaucgagaagggcaagaucgucaaguccgucgagaugaacgcccccaacuaccacuacgaggagugcuccugcuaccccgacuccuccgagaucaccugcgucugccgcgacaacuggcacggcuccaaccgccccugggucuccuucaaccagaaccucgaguaccagaucggcuacaucugcuccggcaucuucggcgacaacccccgccccaacgacaagaccggcuccugcggccccgucuccuccaacggcgccaacggcgucaagggcuucuccuucaaguacggcaacggcgucuggaucggccgcaccaaguccaucuccucccgcaacggcuucgagaugaucugggaccccaacggcuggaccggcaccgacaacaacuucgccaucaagcaggacaucgucggcaucaacgagugguccggcuacuccggcuccuucguccagcaccccgagcucaccggccucgacugcauccgccccugcuucugggucgagcucauccgcggccgccccaaggagaacaccaucuggaccuccggcuccuccaucuccuucugcggcgucaacuccgacaccgucuccugguccuggcccgacggcgccgagcuccccuucaccaucgacaaguga

SEQ ID NO: 114667 - RNA, 1410 nt, Artificial Sequence
  derived and/or modified CDS sequence (opt2) from neuraminidase__InfluenzaA__ADF84492
augaaccccaaccagaagaucaucaccaucggcuccgucugcaugaccaucggcauggccaaccucauccuccagaucggcaacaucaucuccaucuggaucucccacuccauccagcucggcaaccaggaccagaucgagaccugcaaccaguccgucaucaccuacgagaacaacaccugggucaaccagaccuacgucaacaucuccaacaccaacuucgccgccggccaguccgucgucuccgucaagcucgccggcaacuccucccucugccccgucuccggcugggccaucuacuccaaggacaacuccauccgcaucggcuccaagggcgacgucuucgucauccgcgagcccuucaucuccugcuccccccucgagugccgcaccuucuuccucacccagggcgcccuccucaacgacaagcacuccaacggcaccaucaaggaccgcucccccuaccgcacccucauguccugccccaucggcgagguccccucccccuacaacucccgcuucgaguccgucgccugguccgccuccgccugccacgacggcaucaacuggcucaccaucggcaucuccggccccgacaacggcgccgucgccguccucaaguacaacggcaucaucaccgacaccaucaaguccuggcgcaacaacauccuccgcacccaggaguccgagugcgccugcgucaacggcuccugcuucaccgucaugaccgacggccccuccgacggccaggccuccuacaagaucuuccgcaucgagaagggcaagaucgucaaguccgucgagaugaacgcccccaacuaccacuacgaggagugcuccugcuaccccgacuccuccgagaucaccugcgucugccgcgacaacuggcacggcuccaaccgccccugggucuccuucaaccagaaccucgaguaccagaucggcuacaucugcuccggcaucuucggcgacaacccccgccccaacgacaagaccggcuccugcggccccgucuccuccaacggcgccaacggcgucaagggcuucuccuucaaguacggcaacggcgucuggaucggccgcaccaaguccaucuccucccgcaacggcuucgagaugaucugggaccccaacggcuggaccggcaccgacaacaacuucuccaucaagcaggacaucgucggcaucaacgagugguccggcuacuccggcuccuucguccagcaccccgagcucaccggccucgacugcauccgccccugcuucugggucgagcucauccgcggccgccccaaggagaacaccaucuggaccuccggcuccuccaucuccuucugcggcgucaacuccgacaccgucggcugguccuggcccgacggcgccgagcuccccuucaccaucgacaaguga

SEQ ID NO: 114668 - RNA, 1410 nt, Artificial Sequence; identical to SEQ ID NO: 113881
  derived and/or modified CDS sequence (opt2) from neuraminidase__InfluenzaA__ADF85020

SEQ ID NO: 114669 - RNA, 1410 nt, Artificial Sequence; identical to SEQ ID NO: 112774
  derived and/or modified CDS sequence (opt2) from neuraminidase__InfluenzaA__ADF87155

SEQ ID NO: 114670 - RNA, 1410 nt, Artificial Sequence
  derived and/or modified CDS sequence (opt2) from neuraminidase__InfluenzaA__ADF87165
augaaccccaaccagaagaucaucaucaucggcuccgucugcaugaccaucggcauggccaaccucauccuccagaucggcaacaucaucuccaucuggaucucccacuccauccagcucggcaaccagaaccagaucgagaccugcaaccaguccgucaucaccuacgagaacaacaccugggucaaccagaccuacgucaacaucuccaacaccaacuucgccgccggccaguccgucgucuccgucaagcucgccggcaacuccucccucugccccgucuccggcugggccaucuacuccaaggacaacuccauccgcaucggcuccaagggcgacgucuucgucauccgcgagcccuucaucuccugcuccccccucgagugccgcaccuucuuccucacccagggcgcccuccucaacgacaagcacuccaacggcaccaucaaggaccgcucccccuaccgcacccucauguccugccccaucggcgagguccccucccccuacaacucccgcuucgaguccgucgccugguccgccuccgccugccacgacggcaucaacuggcucaccaucggcaucuccggccccgacaacggcgccgucgccguccucaaguacaacggcaucaucaccgacaccaucaaguccuggcgcaacaacauccuccgcacccaggaguccgagugcgccugcgucaacggcuccugcuucaccgucaugaccgacggccccuccgacggccaggccuccuacaagaucuuccgcaucgacaagggcaagaucgucaaguccgucgagaugaacgcccccaacuaccacuacgaggagugcuccugcuaccccgacuccuccgagaucaccugcgucugccgcgacaacuggcacggcuccaaccgccccugggucuccuucaaccagaaccucgaguaccagaucggcuacaucugcuccggcaucuucggcgacaacccccgccccaacgacaagaccggcuccugcggccccgucuccuccaacggcgccaacggcgucaagggcuucuccuucaaguacggcaacggcgucuggaucggccgcaccaaguccaucuccucccgcaacggcuucgagaugaucugggaccccaacggcuggaccggcaccgacaacaacuucgccaucaagcaggacaucgucggcaucaacgagugguccggcuacuccggcuccuucguccagcaccccgagcucaccggccucgacugcauccgccccugcuucugggucgagcucauccgcggccgccccaaggagaacaccaucuggaccuccggcuccuccaucuccuucugcggcgucaacuccgacaccgucggcugguccuggcccgacggcgccgagcuccccuucaccaucgacaaguga

SEQ ID NO: 114671 - RNA, 1410 nt, Artificial Sequence; identical to SEQ ID NO: 114665
  derived and/or modified CDS sequence (opt2) from neuraminidase__InfluenzaA__ADF87175

SEQ ID NO: 114672 - RNA, 1410 nt, Artificial Sequence; identical to SEQ ID NO: 112774
  derived and/or modified CDS sequence (opt2) from neuraminidase__InfluenzaA__ADF87185

SEQ ID NO: 114673 - RNA, 1410 nt, Artificial Sequence; identical to SEQ ID NO: 114665
  derived and/or modified CDS sequence (opt2) from neuraminidase__InfluenzaA__ADF87195

SEQ ID NO: 114674 - RNA, 1410 nt, Artificial Sequence; identical to SEQ ID NO: 112774
  derived and/or modified CDS sequence (opt2) from neuraminidase__InfluenzaA__ADF87205

SEQ ID NO: 114675 - RNA, 1410 nt, Artificial Sequence; identical to SEQ ID NO: 112774
  derived and/or modified CDS sequence (opt2) from neuraminidase__InfluenzaA__ADF87215

SEQ ID NO: 114676 - RNA, 1410 nt, Artificial Sequence
  derived and/or modified CDS sequence (opt2) from neuraminidase__InfluenzaA__ADF87235
augaaccccaaccagaagaucaucaccaucggcuccgucugcaugaccaucggcauggccaaccucauccuccagaucggcaacaucaucuccaucuggaucucccacuccauccagcucggcaaccagaaccagaucgagaccugcaaccaguccgucaucaccuacgagaacaacaccugggucaaccagaccuacgucaacaucuccaacaccaacuucgccgccggccaguccgucgucuccgucaagcucgccggcaacuccucccucugccccgucuccggcugggccaucuacuccaaggacaacuccauccgcaucggcuccaagggcgacgucuucgucauccgcgagcccuucaucuccugcuccccccucgagugccgcaccuucuuccucacccagggcgcccuccucaacgacaagcacuccaacggcaccaucaaggaccgcucccccuaccgcacccucauguccugccccaucggcgagguccccucccccuacaacucccgcuucgaguccgucgccugguccgccuccgccugccacgacggcaucaacuggcucaccaucggcaucuccggccccgacaacggcgccgucgccguccucaaguacaacggcaucaucaccgacaccaucaaguccuggcgcaacaacauccuccgcacccaggaguccgagugcgccugcgucaacggcuccugcuucaccgucaugaccgacggccccuccgacggccaggccuccuacaagaucuucaagaucgagaagggcaagaucgucaaguccgucgagaugaacgcccccaacuaccacuacgaggagugcuccugcuaccccgacuccuccgagaucaccugcgucugccgcgacaacuggcacggcuccaaccgccccugggucuccuucaaccagaaccucgaguaccagaucggcuacaucugcuccggcaucuucggcgacaacccccgccccaacgacaagaccggcuccugcggccccgucuccuccaacggcgccaacggcgucaagggcuucuccuucaaguacggcaacggcgucuggaucggccgcaccaaguccaucuccucccgcaacggcuucgagaugaucugggaccccaacggcuggaccggcaccgacaacaacuucuccaucaagcaggacaucgucggcaucaacgagugguccggcuacuccggcuccuucguccagcaccccgagcucaccggccucgacugcauccgccccugcuucugggucgagcucauccgcggccgccccaaggagaacaccaucuggaccuccggcuccuccaucuccuucugcggcgucaacuccgacaccgucggcugguccuggcccgacggcgccgagcuccccuucaccaucgacaaguga

SEQ ID NO: 114677 - RNA, 1410 nt, Artificial Sequence; identical to SEQ ID NO: 114665
  derived and/or modified CDS sequence (opt2) from neuraminidase__InfluenzaA__ADF87245

SEQ ID NO: 114678 - RNA, 1410 nt, Artificial Sequence; identical to SEQ ID NO: 114665
  derived and/or modified CDS sequence (opt2) from neuraminidase__InfluenzaA__ADF87265

SEQ ID NO: 114679 - RNA, 1410 nt, Artificial Sequence
  derived and/or modified CDS sequence (opt2) from neuraminidase__InfluenzaA__ADF87285
augaaccccaaccagaagaucaucaccaucggcuccgucugcauguccaucggcauggccaaccucauccuccagaucggcaacaucaucuccaucuggaucucccacuccauccagcucggcaacaagaaccagaucgagaccugcaaccaguccgucaucaccuacgagaacaacaccugggucaaccagaccuacgucaacaucuccaacaccaacuucgccgccggccaguccgucgucuccgucaagcucgccggcaacuccucccucugccccgucuccggcugggccaucuacuccaaggacaacuccauccgcaucggcuccaagggcgacgucuucgucauccgcgagcccuucaucuccugcuccccccucgagugccgcaccuucuuccucacccagggcgcccuccucaacgacaagcacuccaacggcaccaucaaggaccgcucccccuaccgcacccucauguccugccccaucggcgagguccccucccccuacaacucccgcuucgaguccgucgccugguccgccuccgccugccacgacggcaucaacuggcucaccaucggcaucuccggccccgacaacggcgccgucgccguccucaaguacaacggcaucaucaccgacaccaucaaguccuggcgcaacaacauccuccgcacccaggaguccgagugcgccugcgucaacggcuccugcuucaccgucaugaccgacggccccuccgacggccaggccuccuacaagaucuuccgcaucgagaagggcaagaucgucaaguccgucgagaugaacgcccccaacuaccacuacgaggagugcuccugcuaccccgacuccuccgagaucaccugcgucugccgcgacaacuggcacggcuccaaccgccccugggucuccuucaaccagaaccucgaguaccagaucggcuacaucugcuccggcaucuucggcgacaacccccgccccaacgacaagaagggcuccugcggccccgucuccuccaacggcgccaacggcgucaagggcuucuccuucaaguacggcaacggcgucuggaucggccgcaccaaguccaucuccucccgcaacggcuucgagaugaucugggaccccaacggcuggaccggcaccgacaacaacuucuccaucaagcaggacaucgucggcaugaacgagugguccggcuacuccggcuccuucguccagcaccccgagcucaccggccucgacugcauccgccccugcuucugggucgagcucauccgcggccgccccaaggagaacaccaucuggaccuccggcuccuccaucuccuucugcggcgucaacuccgacaccgucggcugguccuggcccgacggcgccgagcuccccuucaccaucgacaaguga

SEQ ID NO: 114680 - RNA, 1410 nt, Artificial Sequence; identical to SEQ ID NO: 112774
  derived and/or modified CDS sequence (opt2) from neuraminidase__InfluenzaA__ADF87295

SEQ ID NO: 114681 - RNA, 1410 nt, Artificial Sequence; identical to SEQ ID NO: 112774
  derived and/or modified CDS sequence (opt2) from neuraminidase__InfluenzaA__ADF87305

SEQ ID NO: 114682 - RNA, 1410 nt, Artificial Sequence; identical to SEQ ID NO: 112774
  derived and/or modified CDS sequence (opt2) from neuraminidase__InfluenzaA__ADF87334

SEQ ID NO: 114683 - RNA, 1410 nt, Artificial Sequence; identical to SEQ ID NO: 112774
  derived and/or modified CDS sequence (opt2) from neuraminidase__InfluenzaA__ADF87344

SEQ ID NO: 114684 - RNA, 1410 nt, Artificial Sequence
  derived and/or modified CDS sequence (opt2) from neuraminidase__InfluenzaA__ADF87354
augaaccccaaccagaagaucaucaccaucggcuccgucugcaugaccaucggcauggccaaccucauccuccagaucggcaacaucaucuccaucuggaucucccacuccauccagcucggcaaccagaaccagaucgagaccugcaaccaguccgucaucaccuacgagaacaacaccugggucaaccagaccuacgucaacaucuccaacaccaacuucgccgccggccaguccgucgucuccgucaagcucgccggcaacuccucccucugccccgucuccggcugggccaucuacuccaaggacaacuccauccgcaucggcuccaagggcgacgucuucgucauccgcgagcccuucaucuccugcuccccccucgagugccgcaccuucuuccucacccagggcgcccuccucaacgacaagcacuccaacggcaccaucaaggaccgcucccccuaccgcacccucauguccugccccaucggcgagguccccucccccuacaacucccgcuucgaguccgucgccugguccgccuccgccugccacgacggcaucaacuggcucaccaucggcaucuccggccccgacaacggcgccgucgccguccucaaguacaacggcaucaucaccgacaccaucaaguccuggcgcaacaacauccuccgcacccaggaguccgagugcgccugcgucaacggcuccugcuucaccgucaugaccgacggccccuccgacggccaggccuccuacaagaucuuccgcaucgagaagggcaagaucgucaaguccgucgagaugaacgcccccaacuaccacuacgaggagugcuccugcuaccccgacuccuccgagaucaccugcgucugccgcgacaacuggcacggcuccaaccgccccugggucuccuucaaccagaaccucgaguaccagaucggcuacaucugcuccggcaucuucggcgacaacccccgccccaacgacaagaccggcuccugcggccccgucuccuccaacggcgccaacggcgucaagggcuucuccuucaaguacggcaacggcgucuggaucggccgcaccaaguccaucuccucccgcaacggcuucgagaugaucugggaccccaacggcuggaccggcaccgacaacuacuucuccaucaagcaggacaucgucggcaucaacgagugguccggcuacuccggcuccuucguccagcaccccgagcucaccggccucgacugcauccgccccugcuucugggucgagcucauccgcggccgccccaaggagaacaccaucuggaccuccggcuccuccaucuccuucugcggcgucaacuccgacaccgucggcugguccuggcccgacggcgccgagcuccccuucaccaucgacaaguga

SEQ ID NO: 114685 - RNA, 1410 nt, Artificial Sequence; identical to SEQ ID NO: 113357
  derived and/or modified CDS sequence (opt2) from neuraminidase__InfluenzaA__ADF87364

SEQ ID NO: 114686 - RNA, 1410 nt, Artificial Sequence; identical to SEQ ID NO: 112774
  derived and/or modified CDS sequence (opt2) from neuraminidase__InfluenzaA__ADF87374

SEQ ID NO: 114687 - RNA, 1410 nt, Artificial Sequence
  derived and/or modified CDS sequence (opt2) from neuraminidase__InfluenzaA__ADF87384
augaaccccaaccagaagaucaucaccaucggcuccgucugcaugaccaucggcauggccaaccucauccuccagaucggcaacaucaucuccaucuggaucucccacuccauccagcucggcaaccagaaccagaucgagaccugcaaccaguccaucaucaccuacgagaacaacaccugggucaaccagaccuacgucaacaucuccaacaccaacuucgccgccggccaguccgucgucuccgucaagcucgccggcaacuccucccucugccccgucuccggcugggccaucuacuccaaggacaacuccauccgcaucggcuccaagggcgacgucuucgucauccgcgagcccuucaucuccugcuccccccucgagugccgcaccuucuuccucacccagggcgcccuccucaacgacaagcacuccaacggcaccaucaaggaccgcucccccuaccgcacccucauguccugccccaucggcgagguccccucccccuacaacucccgcuucgaguccgucgccugguccgccuccgccugccacgacggcaucaacuggcucaccaucggcaucuccggccccgacaacggcgccgucgccguccucaaguacaacggcaucaucaccgacaccaucaaguccuggcgcaacaacauccuccgcacccaggaguccgagugcgccugcgucaacggcuccugcuucaccgucaugaccgacggccccuccgacggccaggccuccuacaagaucuuccgcaucgagaagggcaagaucgucaaguccgucgagaugaacgcccccaacuaccacuacgaggagugcuccugcuaccccgacuccuccgagaucaccugcgucugccgcgacaacuggcacggcuccaaccgccccugggucuccuucaaccagaaccucgaguaccagaucggcuacaucugcuccggcaucuucggcgacaacccccgccccaacgacaagaccggcuccugcggccccgucuccuccaacggcgccaacggcgucaagggcuucuccuucaaguacggcaacggcgucuggaucggccgcaccaaguccaucuccucccgcaacggcuucgagaugaucugggaccccaacggcuggaccggcaccgacaacaacuucuccaucaagcaggacaucgucggcaucaacgagugguccggcuacuccggcuccuucguccagcaccccgagcucaccggccucgacugcauccgccccugcuucugggucgagcucauccgcggccgccccaaggagaacaccaucuggaccuccggcuccuccaucuccuucugcggcgucaacuccgacaccgucggcugguccuggcccgacggcgccgagcuccccuucaccaucgacaaguga

SEQ ID NO: 114688 - RNA, 1410 nt, Artificial Sequence; identical to SEQ ID NO: 112774
  derived and/or modified CDS sequence (opt2) from neuraminidase__InfluenzaA__ADF97251

SEQ ID NO: 114689 - RNA, 1410 nt, Artificial Sequence; identical to SEQ ID NO: 114017
  derived and/or modified CDS sequence (opt2) from neuraminidase__InfluenzaA__ADF97252

SEQ ID NO: 114690 - RNA, 1410 nt, Artificial Sequence; identical to SEQ ID NO: 112774
  derived and/or modified CDS sequence (opt2) from neuraminidase__InfluenzaA__ADF97253

SEQ ID NO: 114691 - RNA, 1410 nt, Artificial Sequence; identical to SEQ ID NO: 112774
  derived and/or modified CDS sequence (opt2) from neuraminidase__InfluenzaA__ADF97254

SEQ ID NO: 114692 - RNA, 1410 nt, Artificial Sequence
  derived and/or modified CDS sequence (opt2) from neuraminidase__InfluenzaA__ADF97255
augaaccccaaccagaagaucaucaccaucggcuccgucugcaugaccaucggcauggccaaccucauccuccagaucggcaacaucaucuccaucuggaucucccacuccauccagcucggcaaccagaaccagaucgagaccugcaaccaguccgucaucaccuacgagaacaacaccugggucaaccagaccuacgucaacaucuccaacaccaacuucgccgccggccaguccgucgucuccgucaagcucgccggcaacuccucccucugccccgucuccggcugggccaucuacuccaaggacaacuccauccgcaucggcuccaagggcgacgucuucgucauccgcgagcccuucaucuccugcuccccccucgagugccgcaccuucuuccucacccagggcgcccuccucaacgacaagcacuccaacggcaccaucaaggaccgcucccccuaccgcacccucauguccugccccaucggcgagguccccucccccuacaacucccgcuucgaguccgucgccugguccgccuccgccugccacgacggcaucaacuggcucaccaucggcaucuccggccccgacaacggcgccgucgccguccucaaguacaacggcaucaucaccgacaccaucaaguccuggcgcaacaacauccuccgcacccaggaguccgagugcgccugcgucaacggcuccugcuucaccgucaugaccgacggccccuccgacggccaggccuccuacaagaucuuccgcaucgagaagggcaagaucgucaaguccgucgagaugaacgcccccaacuaccacuacgaggagugcuccugcuaccccgacuccuccgagaucaccugcgucugccgcgacaacuggcacggcuccaaccgccccugggucuccuucaaccagaaccucgaguaccagaucggcuacaucugcuccggcaucuucggcgacaacccccgccccaacgacaagaccggcuccugcggccccgucuccuccaacggcgccaacggcgucaagggcuucuccuucaaguacggcaacggcgucuggaucggccgcaccaaguccaucuccucccgcaacggcuucgagaugaucugggaccccaacggcuggaccggcaccgacaaccacuucuccaucaagcaggacaucgucggcaucaacgagugguccggcuacuccggcuccuucguccagcaccccgagcucaccggccucgacugcauccgccccugcuucugggucgagcucauccgcggccgccccaaggagaacaccaucuggaccuccggcuccuccaucuccuucugcggcgucaacuccgacaccgucggcugguccuggcccgacggcgccgagcuccccuucaccaucgacaaguga

SEQ ID NO: 114693 - RNA, 1410 nt, Artificial Sequence; identical to SEQ ID NO: 112774
  derived and/or modified CDS sequence (opt2) from neuraminidase__InfluenzaA__ADF97256

SEQ ID NO: 114694 - RNA, 1410 nt, Artificial Sequence; identical to SEQ ID NO: 112774
  derived and/or modified CDS sequence (opt2) from neuraminidase__InfluenzaA__ADF97257

SEQ ID NO: 114695 - RNA, 1410 nt, Artificial Sequence; identical to SEQ ID NO: 113128
  derived and/or modified CDS sequence (opt2) from neuraminidase__InfluenzaA__ADF97837

SEQ ID NO: 114696 - RNA, 1410 nt, Artificial Sequence; identical to SEQ ID NO: 112774
  derived and/or modified CDS sequence (opt2) from neuraminidase__InfluenzaA__ADG08120

SEQ ID NO: 114697 - RNA, 1350 nt, Artificial Sequence
  derived and/or modified CDS sequence (opt2) from neuraminidase__InfluenzaA__ADG21408
augaaccccaaccagaagaucaucaccaucggcuccaucugcauggucaucggcaucgucucccucaugcuccagaucggcaacaugaucuccaucugggucucccacuccauccagaccggcaaccagugccaggacgagcccaucuccaacaccaaguuccucaccgagaaggccgucgccuccgucacccucgccggcaaccucucccucugccccgucuccggcugggccgucuacuccaaggacaacuccauccgcaucggcucccgcggcgacgucuucgucauccgcgagcccuucaucuccugcucccaccucgagugccgcaccuucuuccucacccagggcgcccuccucaacgacaagcacuccaacggcaccgucaaggaccgcuccccccaccgcacccucauguccugccccgucggcgaggcccccucccccuacaacucccgcuucgaguccgucgccugguccgccuccgccugccacgacggcaccuccuggcucaccaucggcaucuccggccccgacaacggcgccgucgccguccucaaguacaacggcaucaucaccgacaccaucaaguccuggcgcaacaacaucaugcgcacccaggaguccgagugcgccugcgucaacggcuccugcuucaccgucaugaccgacggccccuccuccggccaggccuccuacaagaucuucaagauggagaagggcaaggucgucaaguccgucgagcucgacgcccccaacuaccacuacgaggagugcuccugcuaccccgacgccggcgagaucaccugcgucugccgcgacaacuggcacggcuccaaccgccccugggucuccuucaaccagaaccucgaguaccagaucggcuacaucugcuccggcgucuucggcgacaacccccgccccaacgacggcaccggcuccugcggccccgucuuccccaacggcgccuacggcgucaagggcuucuccuucaaguacggcaacggcgucuggaucggccgcaccaaguccaccaacucccgcuccggcuucgagaugaucugggaccccaacggcuggaccggcaccgacuccuccuucuccgucaagcaggacaucgucgccaucaccgacugguccggcuacuccggcuccuucguccagcaccccgagcucaccggccucgacugcauccgccccugcuucugggucgagcucauccgcggccgccccaaggaguccaccaucuggaccuccggcuccuccaucuccuucugcggcgucaacggcgacaccgucuccugguccuggcccgacggcgccgagcuccccuucaccaucgacaaguga

SEQ ID NO: 114698 - RNA, 1350 nt, Artificial Sequence; identical to SEQ ID NO: 113059
  derived and/or modified CDS sequence (opt2) from neuraminidase__InfluenzaA__ADG21409

SEQ ID NO: 114699 - RNA, 1350 nt, Artificial Sequence; identical to SEQ ID NO: 113059
  derived and/or modified CDS sequence (opt2) from neuraminidase__InfluenzaA__ADG21415

SEQ ID NO: 114700 - RNA, 1350 nt, Artificial Sequence; identical to SEQ ID NO: 113059
  derived and/or modified CDS sequence (opt2) from neuraminidase__InfluenzaA__ADG21417

SEQ ID NO: 114701 - RNA, 1350 nt, Artificial Sequence
  derived and/or modified CDS sequence (opt2) from neuraminidase__InfluenzaA__ADG21419
augaaccccaaccagaagaucaucaccaucggcuccaucugcauggucaucggcaucgucucccucaugcuccagaucggcaacaugaucuccaucugggucucccacuccauccagaccggcaaccagugccaggacgaguccaucuccaacaccaaguuccucaccgagaaggccgucgccuccgucacccucgccggcaacuccucccucugccccaucuccggcugggccgucuacuccaaggacaacuccauccgcaucggcucccgcggcgacgucuucgucauccgcgagcccuucaucuccugcucccaccucgagugccgcaccuucuuccucacccagggcgcccuccucaacgacaagcacuccaacggcaccgucaaggaccgcuccccccaccgcacccucauguccugccccgucggcgaggcccccucccccuacaacucccgcuucgaguccgucgccugguccgccuccgccugccacgacggcaccuccuggcucaccaucggcaucuccggccccgacaacggcgccgucgccguccucaaguacaacggcaucaucaccgacaccaucaaguccuggcgcaacaacaucaugcgcacccaggaguccgagugcgccugcgucaacggcuccugcuucaccgucaugaccgacggccccuccuccggccaggccuccuacaagaucuucaagauggagaagggcaaggucgucaaguccgucgagcucgacgcccccaacuaccacuacgaggagugcuccugcuaccccgacgccggcgagaucaccugcgucugccgcgacaacuggcacggcuccaaccgccccugggucuccuucaaccagaaccucgaguaccagaucggcuacaucugcuccggcgucuucggcgacaacccccgccccaacgacggcaccggcuccugcggccccgucuuccccaacggcgccuacggcgucaagggcuucuccuucaaguacggcaacggcgucuggaucggccgcaccaaguccaccaacucccgcuccggcuucgagaugaucugggaccccaacggcuggaccggcaccgacuccuccuucuccgucaagcaggacaucgucgccaucaccgacugguccggcuacuccggcuccuucguccagcaccccgagcucaccggccucgacugcauccgccccugcuucugggucgagcucauccgcggccgccccaaggaguccaccaucuggaccuccggcuccuccaucuccuucugcggcgucaacggcgacaccgucuccugguccuggcccgacggcgccgagcuccccuucaccaucgacaaguga

SEQ ID NO: 114702 - RNA, 1350 nt, Artificial Sequence
  derived and/or modified CDS sequence (opt2) from neuraminidase__InfluenzaA__ADG21423
augaaccccaaccagaagaucaucaccaucggcuccaucugcauggucaucggcaucgucucccucaugcuccagaucggcaacaugaucuccaucugggucucccacuccauccagaccggcaaccagugccaggacgagcccaucuccaacaccaaguuccucaccgagaaggccgucgccuccgucacccucgccggcaacuccucccucugccccaucuccggcugggccgucuacuccaaggacaacuccauccgcaucggcucccgcggcgacgucuucgucauccgcgagcccuucaucuccugcucccaccucgagugccgcaccuucuuccucacccagggcgcccuccucaacgacaagcacuccaacggcaccgucaaggaccgcuccccccaccgcacccucauguccugccccgucggcgaggcccccucccccuacaacucccgcuucgaguccgucgccugguccgccuccgccugccacgacggcaccuccuggcucaccaucggcaucuccggccccgacaacggcgccgucgccguccucaaguacaacggcaucaucaccgacaccaucaaguccuggcgcaacaacaucaugcgcacccaggaguccgagugcgccugcgucaacggcuccugcuucaccgucaugaccgacggccccuccuccggccaggccuccuacaagaucuucaagauggagaagggcaaggucgucaaguccgucgagcucgacgcccccaacuaccacuacgaggagugcuccugcuaccccgacgccggcgagaucaccugcgucugccgcgacuccuggcacggcuccaaccgccccugggucuccuucaaccagaaccucgaguaccagaucggcuacaucugcuccggcgucuucggcgacaacccccgccccaacgacggcaccggcuccugcggccccgucuuccccaacggcgccuacggcgucaagggcuucuccuucaaguacggcaacggcgucuggaucggccgcaccaaguccaccaacucccgcuccggcuucgagaugaucugggaccccaacggcuggaccggcaccgacuccuccuucuccgucaagcaggacaucgucgccaucaccgacugguccggcuacuccggcuccuucguccagcaccccgagcucaccggccucgacugcauccgccccugcuucugggucgagcucauccgcggccgccccaaggaguccaccaucuggaccuccggcuccuccaucuccuucugcggcgucaacggcgacaccgucuccugguccuggcccgacggcgccgagcuccccuucaccaucgacaaguga

SEQ ID NO: 114703 - RNA, 1350 nt, Artificial Sequence
  derived and/or modified CDS sequence (opt2) from neuraminidase__InfluenzaA__ADG21424
augaaccccaaccagaagaucaucaccaucggcuccaucugcauggucaucggcaucgccucccucaugcuccagaucggcaacaugaucuccaucugggucucccacuccauccagaccggcaaccagugccaggacgaguccaucuccaacaccaaguuccucaccgagaaggccgucgccuccgucacccucgccggcaacuccucccucugccccaucuccggcugggccgucuacuccaaggacaacuccauccgcaucggcuccaagggcgacgucuucgucauccgcgagcccuucaucuccugcucccaccucgagugccgcaccuucuuccucacccagggcgcccuccucaacgacaagcacuccaacggcaccgucaaggaccgcuccccccaccgcacccucauguccugccccgucggcgaggcccccucccccuacaacucccgcuucgaguccgucgccugguccgccuccgccugccacgacggcaccuccuggcucaccaucggcaucuccggccccgacaacggcgccgucgccguccucaaguacaacggcaucaucaccgacaccaucaaguccuggcgcaacaacaucaugcgcacccaggaguccgagugcgccugcgucaacggcuccugcuucaccgucaugaccgacggccccuccuccggccaggccuccuacaagaucuucaagauggagaagggcaaggucgucaaguccgucgagcucgacgcccccaacuaccacuacgaggagugcuccugcuaccccgacgccggcgagaucaccugcgucugccgcgacaacuggcacggcuccaaccgccccugggucuccuucaaccagaaccucgaguaccagaucggcuacaucugcuccggcgucuucggcgacaacccccgccccaacgacggcaccggcuccugcggccccgucuuccccaacggcgccuacggcgucaagggcuucuccuucaaguacggcaacggcgucuggaucggccgcaccaaguccaccaacucccgcuccggcuucgagaugaucugggaccccaacggcuggaccggcaccgacuccuccuucuccgucaagcaggacaucgucgccaucaccgacugguccggcuacuccggcuccuucguccagcaccccgagcucaccggccucgacugcauccgccccugcuucugggucgagcucauccgcggccgccccaaggaguccaccaucuggaccuccggcuccuccaucuccuucugcggcgucaacggcgacaccgucuccugguccuggcccgacggcgccgagcuccccuucaccaucgacaaguga

SEQ ID NO: 114704 - RNA, 1350 nt, Artificial Sequence
  derived and/or modified CDS sequence (opt2) from neuraminidase__InfluenzaA__ADG21426
augaaccccaaccagaagaucaucaccaucggcuccaucugcauggucaucggcaucgucucccucaugcuccagaucggcaacaugaucuccaucugggucucccacuccauccagaccgagaaccagugccaggacgagcccaucuccaacaccaaguuccucaccgagaaggccgucgccuccgucacccucgccggcaacuccucccucugccccaucuccggcugggccgucuacuccaaggacaacuccauccgcaucggcucccgcggcgacgucuucgucauccgcgagcccuucaucuccugcucccaccucgagugccgcaccuucuuccucacccagggcgcccuccucaacgacaagcacuccaacggcaccgucaaggaccgcuccccccaccgcacccucauguccugccccgucggcgaggcccccucccccuacaacucccgcuucgaguccgucgccugguccgccuccgccugccacgacggcaccuccuggcucaccaucggcaucuccggccccgacaacggcgccgucgccguccucaaguacaacggcaucaucaccgacaccaucaaguccuggcgcaacaacaucaugcgcacccaggaguccgagugcgccugcgucaacggcuccugcuucaccgucaugaccgacggccccuccuccggccaggccuccuacaagaucuucaagauggagaagggcaaggucgucaaguccgucgagcucgacgcccccaacuaccacuacgaggagugcuccugcuaccccgacgccggcgagaucaccugcgucugccgcgacaacuggcacggcuccaaccgccccugggucuccuucaaccagaaccucgaguaccagaucggcuacaucugcuccggcgucuucggcgacaacccccgccccaacgacggcaccggcuccugcggccccgucuuccccaacggcgccuacggcgucaagggcuucuccuucaaguacggcaacggcgucuggaucggccgcaccaaguccaccaacucccgcuccggcuucgagaugaucugggaccccaacggcuggaccggcaccgacuccuccuucuccguccgccaggacaucgucgccaucaccgacugguccggcuacuccggcuccuucguccagcaccccgagcucaccggccucgacugcauccgccccugcuucugggucgagcucauccgcggccgccccaaggaguccaccaucuggaccuccggcuccuccaucuccuucugcggcgucaacggcgacaccgucuccugguccuggcccgacggcgccgagcuccccuucaccaucgacaaguga

SEQ ID NO: 114705 - RNA, 1350 nt, Artificial Sequence
  derived and/or modified CDS sequence (opt2) from neuraminidase__InfluenzaA__ADG21428
augaaccccaaccagaagaucaucaccaucggcuccaucugcauggucaucggcaucgucucccucaugcuccagaucggcaacaugaucuccaucugggucucccaccccauccagaccggcaaccagugccaggacaagcccaucuccaacaccaaguuccucaccgagaaggccgucgccuccgucacccucgccggcaacuccucccucugccccaucuccggcugggccgucuacuccaaggacaacuccauccgcaucggcucccgcggcgacgucuucgucauccgcgagcccuucaucuccugcucccaccucgagugccgcaccuucuuccucacccagggcgcccuccucaacgacaagcacuccaacggcaccgucaaggaccgcuccccccaccgcacccucauguccugccccgucggcgaggcccccucccccuacaacucccgcuucgaguccgucgccugguccgccuccgccugccacgacggcaccuccuggcucaccaucggcaucuccggccccgacaacggcgccgucgccguccucaaguacaacggcaucaucaccgacaccaucaaguccuggcgcaacuccaucaugcgcacccaggaguccgagugcgccugcgucaacggcuccugcuucaccgucaugaccgacggccccuccuccggccaggccuccuacaagaucuucaagauggagaagggcaaggucgucaaguccgucgagcucgacgcccccaacuaccacuacgaggagugcuccugcuaccccgacgccggcgagaucaccugcgucugccgcgacaacuggcacggcuccaaccgccccugggucuccuucaaccagaaccucgaguaccagaucggcuacaucugcuccggcgucuucggcgacaacccccgccccaacgacggcaccggcuccugcggccccgucuuccccaacggcgccuacggcgucaagggcuucuccuucaaguacggcaacggcgucuggaucggccgcaccaaguccaccaacucccgcuccggcuucgagaugaucugggaccccaacggcuggaccggcaccgacuccuccuucuccgucaagcaggacaucgucgccaucaccgacugguccggcuacuccggcuccuucguccagcaccccgagcucaccggccucgacugcauccgccccugcuucugggucgagcucauccgcggccgccccaaggaguccaccaucuggaccuccggcuccuccaucuccuucugcggcgucaacggcgacaccgucuccugguccuggcccgacggcgccgagcuccccuucaccaucgacaaguga

SEQ ID NO: 114706 - RNA, 1350 nt, Artificial Sequence; identical to SEQ ID NO: 113059
  derived and/or modified CDS sequence (opt2) from neuraminidase__InfluenzaA__ADG21430

SEQ ID NO: 114707 - RNA, 1350 nt, Artificial Sequence
  derived and/or modified CDS sequence (opt2) from neuraminidase__InfluenzaA__ADG21432
augaaccccaaccagaagaucaucaccaucggcuccaucugcauggucaucggcaucgucucccucaugcuccagaucggcaacaugaucuccaucugggucucccacuccauccagaccggcaaccagugccaggacgagcccaucuccaacaccaaguuccucaccgagaaggccgucgccuccgucacccucgccggcaacuccucccucugccccaucuccggcugggccgucuacuccaaggacaacuccauccgcaucggcucccgcggcgacgucuucgucauccgcgagcccuucaucuccugcucccaccucgagugccgcaccuucuuccucacccagggcgcccuccucaacgacaagcacuccaacggcaccgucaaggaccgcuccccccaccgcacccucauguccugccccgucggcgaggcccccucccccuacaacucccgcuucgaguccgucgccugguccgccuccgccugccacgacggcaccuccuggcucaccaucggcaucuccggccccgacaacggcgccgucgccguccucaaguacaacggcaucaucaccgacaccaucaaguccuggcgcaacaacaucaugcgcacccaggaguccgagugcgccugcgucaacggcuccugcuucaccgucaugaccgacggccccuccuccggccaggccuccuacaagaucuucaagauggagaagggcaaggucgucaaguccgucgagcucgacgcccccaacuaccacuacgaggagugcuccugcuaccccgacgccggcgagaucaccugcgucugccgcgacaacuggcacggcuccaaccgccccugggucuccuucaaccagaaccucgaguaccagaucggcuacaucugcuccggcgucuucggcgacaacccccgccccaacgacggcaccggcuccugcggccccgucuuccccaacggcgccuacggcgucaagggcuucuccuuccgcuacggcaacggcgucuggaucggccgcaccaaguccaccaacucccgcuccggcuucgagaugaucugggaccccaacggcuggaccggcaccgacuccuccuucuccgucaagcaggacaucgucgccaucaccgacugguccggcuacuccggcuccuucguccagcaccccgagcucaccggccucgacugcauccgccccugcuucugggucgagcucauccgcggccgccccaaggaguccaccaucuggaccuccggcuccuccaucuccuucugcggcgucaacggcgacaccgucuccugguccuggcccgacggcgccgagcuccccuucaccaucgacaaguga

SEQ ID NO: 114708 - RNA, 1350 nt, Artificial Sequence
  derived and/or modified CDS sequence (opt2) from neuraminidase__InfluenzaA__ADG21438
augaaccccaaccagaagaucaucaccaucggcuccaucugcauggucaucggcaucgucucccucaugcuccagaucggcaacaugaucuccaucuggaucucccacuccauccagaccggcaaccagugccaggacgagcccaucuccaacaccaaguuccucaccgagaaggccgucgccuccgucacccucgccggcaacuccucccucugccccaucuccggcugggccgucuacuccaaggacaacuccauccgcaucggcucccgcggcgacgucuucgucauccgcgagcccuucaucuccugcucccaccucgagugccgcaccuucuuccucacccagggcgcccuccucaacgacaagcacuccaacggcaccgucaaggaccgcuccccccaccgcacccucauguccugccccgucggcgaggcccccucccccuacaacucccgcuucgaguccgucgccugguccgccuccgccugccacgacggcaccuccuggcucaccaucggcaucuccggccccgacaacggcgccgucgccguccucaaguacaacggcaucaucaccgacaccaucaaguccuggcgcaacaacaucaugcgcacccaggaguccgagugcgccugcgucaacggcuccugcuucaccgucaugaccgacggccccuccuccggccaggccuccuacaagaucuucaagauggagaagggcaaggucgucaaguccgucgagcucgacgcccccaacuaccacuacgaggagugcuccugcuaccccgacgccggcgagaucaccugcgucugccgcgacaacuggcacggcuccaaccgccccugggucuccuucaaccagaaccucgaguaccagaucggcuacaucugcuccggcgucuucggcgacaacccccgccccaacgacggcaccggcuccugcggccccgucuuccccaacggcgccuacggcgucaagggcuucuccuucaaguacggcuccggcgucuggaucggccgcaccaaguccaccaacucccgcuccggcuucgagaugaucugggaccccaacggcuggaccggcaccgacuccuccuucuccgucaagcaggacaucgucgccaucaccgacugguccggcuacuccggcuccuucguccagcaccccgagcucaccggccucgacugcauccgccccugcuucugggucgagcucauccgcggccgccccaaggaguccaccaucuggaccuccggcuccuccaucuccuucugcggcgucaacggcgacaccgucuccugguccuggcccgacggcgccgagcuccccuucaccaucgacaaguga

SEQ ID NO: 114709 - RNA, 1350 nt, Artificial Sequence
  derived and/or modified CDS sequence (opt2) from neuraminidase__InfluenzaA__ADG21440
augaaccccaaccagaagaucaucaccaucggcuccaucugcauggucaucggcaucgccucccucaugcuccagaucggcaacaugaucuccaucugggucucccacuccauccagaccggcaaccagugccaggacgaguccaucuccaacaccaaguuccucaccgagaaggccgucgccuccgucacccucgccggcaacuccucccucugccccaucuccggcugggccgucuacuccaaggacaacuccauccgcaucggcucccgcggcgacgucuucgucauccgcgagcccuucaucuccugcucccaccucgagugccgcaccuucuuccucacccagggcgcccuccucaacgacaagcacuccaacggcaccgucaaggaccgcuccccccaccgcacccucauguccugccccgucggcgaggcccccucccccuacaacucccgcuucgaguccgucgccugguccgccuccgccugccacgacggcaccuccuggcucaccaucggcaucuccggccccgacaacggcgccgucgccguccucaaguacaacggcaucaucaccgacaccaucaaguccuggcgcaacaacaucaugcgcacccaggaguccgagugcgccugcgucaacggcuccugcuucaccgucaugaccgacggccccuccuccggccaggccuccuacaagaucuucaagauggagaagggcaaggucgucaaguccgucgagcucgacgcccccaacuaccacuacgaggagugcuccugcuaccccgacgccggcgagaucaccugcgucugccgcgacaacuggcacggcuccaaccgccccugggucuccuucaaccagaaccucgaguaccagaucggcuacaucugcuccggcgucuucggcgacaacccccgccccaacgacggcaccggcuccugcggccccgucuuccccaacggcgccuacggcgucaagggcuucuccuucaaguacggcaacggcgucuggaucggccgcaccaaguccaccaacucccgcuccggcuucgagaugaucugggaccccaacggcuggaccggcaccgacuccuccuucuccgucaagcaggacaucgucgccaucaccgacugguccggcuacuccggcuccuucguccagcaccccgagcucaccggccucgacugcauccgccccugcuucugggucgagcucauccgcggccgccccaaggaguccaccaucuggaccuccggcuccuccaucuccuucugcggcgucaacggcgacaccgucuccugguccuggcccgacggcgccgagcuccccuucaccaucgacaaguga

SEQ ID NO: 114710 - RNA, 1350 nt, Artificial Sequence; identical to SEQ ID NO: 113059
  derived and/or modified CDS sequence (opt2) from neuraminidase__InfluenzaA__ADG21442

SEQ ID NO: 114711 - RNA, 1350 nt, Artificial Sequence
  derived and/or modified CDS sequence (opt2) from neuraminidase__InfluenzaA__ADG21444
augaaccccaaccagaagaucaucaccaucggcuccaucugcauggucaucggcaucgucucccucaugcuccagaucggcaacaugaucuccaucugggucucccacuccauccagaccggcaaccagugccaggacgaguccaucuccaacaccaaguuccucaccgagaaggccgucaccuccgucacccucgccggcaacuccucccucugccccaucuccggcugggccgucuacuccaaggacaacuccauccgcaucggcucccgcggcgacgucuucgucauccgcgagcccuucaucuccugcucccaccucgagugccgcaccuucuuccucacccagggcgcccuccucaacgacaagcacuccaacggcaccgucaaggaccgcuccccccaccgcacccucauguccugccccgucggcgaggcccccucccccuacaacucccgcuucgaguccgucgccugguccgccuccgccugccacgacggcaccuccuggcucaccaucggcaucuccggccccgacaacggcgccgucgccguccucaaguacaacggcaucaucaccgacaccaucaaguccuggcgcaacaacaucaugcgcacccaggaguccgagugcgccugcgucaacggcuccugcuucaccgucaugaccgacggccccuccuccggccaggccuccuacaagaucuucaagauggagaagggcaaggucgucaaguccgucgagcucgacgcccccaacuaccacuacgaggagugcuccugcuaccccgacgccggcgagaucaccugcgucugccgcgacaacuggcacggcuccaaccgccccuggaucuccuucaaccagaaccucgaguaccagaucggcuacaucugcuccggcgucuucggcgacaacccccgccccaacgacggcaccggcuccugcggccccgucuuccccaacggcgccuacggcgucaagggcuucuccuucaaguacggcaacggcgucuggaucggccgcaccaaguccaccaacucccgcuccggcuucgagaugaucugggaccccaacggcuggaccggcaccgacuccuccuucuccgucaagcaggacaucgucgccaucaccgacugguccggcuacuccggcuccuucguccagcaccccgagcucaccggccucgacugcauccgccccugcuucugggucgagcucauccgcggccgccccaaggaguccaccaucuggaccuccggcuccuccaucuccuucugcggcgucaacggcgacaccgucuccugguccuggcccgacggcgccgagcuccccuucaccaucgacaaguga

SEQ ID NO: 114712 - RNA, 1350 nt, Artificial Sequence; identical to SEQ ID NO: 113059
  derived and/or modified CDS sequence (opt2) from neuraminidase__InfluenzaA__ADG21446

SEQ ID NO: 114713 - RNA, 1350 nt, Artificial Sequence
  derived and/or modified CDS sequence (opt2) from neuraminidase__InfluenzaA__ADG21448
augaaccccaaccagaagaucaucaccaucggcuccaucugcauggucaucggcaucgucucccucaugcuccagaucggcaacaugaucuccaucugggucucccacuccauccagaccggcaaccagugccaggacgagcccaucuccaacaccaaguuccucaccgagaaggccgucgccuccgucacccucgccggcaacuccucccucugccccaucuccggcugggccgucuacuccaaggacaacuccauccgcaucggcucccgcggcgacgucuucgucauccgcgagcccuucaucuccugcucccaccucgagugccgcaccuucuuccucacccagggcgcccuccucaacgacaagcacuccaacggcaccgucaaggaccgcuccccccaccgcacccucauguccugccccgucggcgaggcccccucccccuacaacucccgcuucgaguccgucgccugguccgccuccgccugccacgacggcaccuccuggcucaccaucggcaucuccggccccgacaacggcgccgucgccguccucaaguacaacggcaucaucaccgacaccaucaaguccuggcgcaacaacaucaugcgcacccaggaguccgagugcgccugcgucaacggcuccugcuucaccgucaugaccgacggccccuccuccggccaggccuccuacaagaucuucaagauggagaagggcaaggucgucaaguccgucgagcucgacgcccccaacuaccacuacgaggagugcuccugcuaccccgacgccggcgagaucaccugcgucugccgcgacaacuggcacggcuccaaccgccccuggaucuccuucaaccagaaccucgaguaccagaucggcuacaucugcuccggcgucuucggcgacaacccccgccccaacgacggcaccggcuccugcggccccgucuuccccaacggcgccuacggcgucaagggcuucuccuucaaguacggcaacggcgucuggaucggccgcaccaaguccaccaacucccgcuccggcuucgagaugaucugggaccccaacggcuggaccggcaccgacuccuccuucuccgucaagcaggacaucgucgccaucaccgacugguccggcuacuccggcuccuucguccagcaccccgagcucaccggccucgacugcauccgccccugcuucugggucgagcucauccgcggccgccccaaggaguccaccaucuggaccuccggcuccuccaucuccuucugcggcgucaacggcgacaccgucuccugguccuggcccgacggcgccgagcuccccuucaccaucgacaaguga

SEQ ID NO: 114714 - RNA, 1350 nt, Artificial Sequence; identical to SEQ ID NO: 114713
  derived and/or modified CDS sequence (opt2) from neuraminidase__InfluenzaA__ADG21450

SEQ ID NO: 114715 - RNA, 1410 nt, Artificial Sequence; identical to SEQ ID NO: 112774
  derived and/or modified CDS sequence (opt2) from neuraminidase__InfluenzaA__ADG27797

SEQ ID NO: 114716 - RNA, 1410 nt, Artificial Sequence
  derived and/or modified CDS sequence (opt2) from neuraminidase__InfluenzaA__ADG27983
augaaccccaaccagaagaucaucaccaucggcuccgucugcaugaccaucggcauggccaaccucauccuccagaucggcaacaucaucuccaucuggaucucccacuccauccagcucggcaaccagaaccagaucgagaccugcaaccaguccgucaucaccuacgagaacaacaccugggucaaccagaccuacgucaacaucuccaacaccaacuucgccgccggccaguccgucgucuccgucaagcucgccggcaacuccucccucugccccgucuccggcugggccaucuacuccaaggacaacuccauccgcaucggcuccaagggcgacgucuucgucauccgcgagcccuucaucuccugcuccccccucgagugccgcaccuucuuccucacccagggcgcccuccucaacgacaagcacuccaacggcaccaucaaggaccgcucccccuaccgcacccucauguccugccccaucggcgagguccccucccccuacaacucccgcuucgaguccgucgccugguccgccuccgccugccacgacggcaucaacuggcucaccaucggcaucuccggccccgacaacggcgccgucgccguccucaaguacaacggcaucaucaccgacaccaucaaguccuggcgcaacaacauccuccgcacccaggaguccgagugcgccugcgucaacggcuccugcuucaccgucaugaccgacggccccuccgacggccaggccuccuacaagaucuuccgcaucgagaagggcaagaucgucaaguccgucgagaugaacgcccccaaccaccacuacgaggagugcuccugcuaccccgacuccuccgagaucaccugcgucugccgcgacaacuggcacggcuccaaccgccccugggucuccuucaaccagaaccucgaguaccagaucggcuacaucugcuccggcaucuucggcgacaacccccgccccaacgacaagaccggcuccugcggccccgucuccuccaacggcgccaacggcgucaagggcuucuccuucaaguacggcaacggcgucuggaucggccgcaccaaguccaucuccucccgcaacggcuucgagaugaucugggaccccaacggcuggaccggcaccgacaacaacuucuccaucaagcaggacaucgucggcaucaacgagugguccggcuacuccggcuccuucguccagcaccccgagcucaccggccucgacugcauccgccccugcuucugggucgagcucauccgcggccgccccaaggagaacaccaucuggaccuccggcuccuccaucuccuucugcggcgucaacuccgacaccaugggcugguccuggcccgacggcgccgagcuccccuucaccaucgacaaguga

SEQ ID NO: 114717 - RNA, 1410 nt, Artificial Sequence; identical to SEQ ID NO: 112774
  derived and/or modified CDS sequence (opt2) from neuraminidase__InfluenzaA__ADG27989

SEQ ID NO: 114718 - RNA, 1410 nt, Artificial Sequence; identical to SEQ ID NO: 114716
  derived and/or modified CDS sequence (opt2) from neuraminidase__InfluenzaA__ADG27998

SEQ ID NO: 114719 - RNA, 1410 nt, Artificial Sequence; identical to SEQ ID NO: 113128
  derived and/or modified CDS sequence (opt2) from neuraminidase__InfluenzaA__ADG28013

SEQ ID NO: 114720 - RNA, 1410 nt, Artificial Sequence; identical to SEQ ID NO: 112774
  derived and/or modified CDS sequence (opt2) from neuraminidase__InfluenzaA__ADG42086

SEQ ID NO: 114721 - RNA, 1410 nt, Artificial Sequence; identical to SEQ ID NO: 112774
  derived and/or modified CDS sequence (opt2) from neuraminidase__InfluenzaA__ADG42096

SEQ ID NO: 114722 - RNA, 1410 nt, Artificial Sequence; identical to SEQ ID NO: 114351
  derived and/or modified CDS sequence (opt2) from neuraminidase__InfluenzaA__ADG42106

SEQ ID NO: 114723 - RNA, 1410 nt, Artificial Sequence; identical to SEQ ID NO: 112774
  derived and/or modified CDS sequence (opt2) from neuraminidase__InfluenzaA__ADG42116

SEQ ID NO: 114724 - RNA, 1410 nt, Artificial Sequence; identical to SEQ ID NO: 112774
  derived and/or modified CDS sequence (opt2) from neuraminidase__InfluenzaA__ADG42126

SEQ ID NO: 114725 - RNA, 1410 nt, Artificial Sequence; identical to SEQ ID NO: 112774
  derived and/or modified CDS sequence (opt2) from neuraminidase__InfluenzaA__ADG42136

SEQ ID NO: 114726 - RNA, 1410 nt, Artificial Sequence; identical to SEQ ID NO: 113357
  derived and/or modified CDS sequence (opt2) from neuraminidase__InfluenzaA__ADG42146

SEQ ID NO: 114727 - RNA, 1410 nt, Artificial Sequence; identical to SEQ ID NO: 112774
  derived and/or modified CDS sequence (opt2) from neuraminidase__InfluenzaA__ADG42156

SEQ ID NO: 114728 - RNA, 1410 nt, Artificial Sequence; identical to SEQ ID NO: 112774
  derived and/or modified CDS sequence (opt2) from neuraminidase__InfluenzaA__ADG42166

SEQ ID NO: 114729 - RNA, 1410 nt, Artificial Sequence; identical to SEQ ID NO: 112774
  derived and/or modified CDS sequence (opt2) from neuraminidase__InfluenzaA__ADG42186

SEQ ID NO: 114730 - RNA, 1410 nt, Artificial Sequence; identical to SEQ ID NO: 114665
  derived and/or modified CDS sequence (opt2) from neuraminidase__InfluenzaA__ADG42196

SEQ ID NO: 114731 - RNA, 1410 nt, Artificial Sequence
  derived and/or modified CDS sequence (opt2) from neuraminidase__InfluenzaA__ADG42206
augaaccccaaccagaagaucaucaccaucggcuccgucugcaugaccaucggcauggccaaccucauccuccagaucggcaacaucaucuccaucuggaucucccacuccauccagcucggcaaccagaaccagaucgagaccugcaaccaguccgucaucaccuacgagaacaacaccugggucaaccagaccuacgucaacaucuccaacaccaacuucgccgccggccaguccgucgucuccgucaagcucgccggcaacuccucccucugccccgucuccggcugggccaucuacuccaaggacaacuccauccgcaucggcuccaagggcgacgucuucgucauccgcgagcccuucaucuccugcuccccccucgagugccgcaccuucuuccucacccagggcgcccuccucaacgacaagcacuccaacggcaccaucaaggaccgcucccccuaccgcacccucauguccugccccaucggcgagguccccucccccuacaacucccgcuucgaguccgucgccugguccgccuccgccugccacgacggcaucaacuggcucaccaucggcaucuccggccccgacaacggcgccgucgccguccucaaguacaacggcaucaucaccgacaccaucaaguccuggcgcaacaacauccuccgcacccaggaguccgagugcgccugcgucaacggcuccugcuucaccgucaugaccgacggccccuccgacggccaggccuccuacaagaucuuccgcaucgagaagggcaagaucgucaaguccgucgagaugaacgcccccaacuaccacuacgaggagugcuccugcuaccccgacuccuccaagaucaccugcgucugccgcgacaacuggcacggcuccaaccgccccugggucuccuucaaccagaaccucgaguaccagaucggcuacaucugcuccggcaucuucggcgacaacccccgccccaacgacaagaccggcuccugcggccccgucuccuccaacggcgccaacggcgucaagggcuucuccuucaaguacggcaacggcgucuggaucggccgcaccaaguccaucuccucccgcaacggcuucgagaugaucugggaccccaacggcuggaccggcaccgacaacaacuucuccaucaagcaggacaucgucggcaucaacgagugguccggcuacuccggcuccuucguccagcaccccgagcucaccggccucgacugcauccgccccugcuucugggucgagcucauccgcggccgccccaaggagaacaccaucuggaccuccggcuccuccaucuccuucugcggcgucaacuccgacaccgucggcugguccuggcccgacggcgccgagcuccccuucaccaucgacaaguga

SEQ ID NO: 114732 - RNA, 1410 nt, Artificial Sequence; identical to SEQ ID NO: 112774
  derived and/or modified CDS sequence (opt2) from neuraminidase__InfluenzaA__ADG42216

SEQ ID NO: 114733 - RNA, 1410 nt, Artificial Sequence; identical to SEQ ID NO: 114125
  derived and/or modified CDS sequence (opt2) from neuraminidase__InfluenzaA__ADG42226

SEQ ID NO: 114734 - RNA, 1410 nt, Artificial Sequence; identical to SEQ ID NO: 112774
  derived and/or modified CDS sequence (opt2) from neuraminidase__InfluenzaA__ADG42236

SEQ ID NO: 114735 - RNA, 1410 nt, Artificial Sequence; identical to SEQ ID NO: 112774
  derived and/or modified CDS sequence (opt2) from neuraminidase__InfluenzaA__ADG42246

SEQ ID NO: 114736 - RNA, 1410 nt, Artificial Sequence; identical to SEQ ID NO: 112774
  derived and/or modified CDS sequence (opt2) from neuraminidase__InfluenzaA__ADG42256

SEQ ID NO: 114737 - RNA, 1410 nt, Artificial Sequence; identical to SEQ ID NO: 112774
  derived and/or modified CDS sequence (opt2) from neuraminidase__InfluenzaA__ADG42276

SEQ ID NO: 114738 - RNA, 1410 nt, Artificial Sequence
  derived and/or modified CDS sequence (opt2) from neuraminidase__InfluenzaA__ADG42296
augaaccccaaccagaagaucaucaccaucggcuccgucugcaugaccaucggcauggccaaccucauccuccagaucggcaacaucaucuccaucuggaucucccacuccauccagcucggcaaccagaaccagaucgagaccugcaaccaguccgucaucaccuacgagaacaacaccugggucaaccagaccuacgucaacaucuccaacaccaacuucgccgccggccaguccgucgucuccgucaagcucgccggcaacuccucccucugccccgucuccggcugggccaucuacuccaaggacaacuccauccgcaucggcuccaagggcgacgucuucgucauccgcgagcccuucaucuccugcuccccccucgagugccgcaccuucuuccucacccagggcgcccuccucaacgacaagcacuccaacggcaccaucaaggaccgcucccccuaccgcacccucauguccugccccaucggcgagguccccucccccuacaacucccgcuucgaguccgucgccugguccgccuccgccugccacgacggcaucaacuggcucaccaucggcaucuccggccccgacaacggcgccgucgccguccucaaguacaacggcaucaucaccgacaccaucaaguccuggcgcaacaacauccuccgcgcccaggaguccgagugcgccugcgucaacggcuccugcuucaccgucaugaccgacggccccuccgacggccaggccuccuacaagaucuuccgcaucgagaagggcaagaucgucaaguccgucgagaugaacgcccccaacuaccacuacgaggagugcuccugcuaccccgacuccuccgagaucaccugcgucugccgcgacaacuggcacggcuccaaccgccccugggucuccuucaaccagaaccucgaguaccagaucggcuacaucugcuccggcaucuucggcgacaacccccgccccaacgacaagaccggcuccugcggccccgucuccuccaacggcgccaacggcgucaagggcuucuccuucaaguacggcaacggcgucuggaucggccgcaccaaguccaucuccucccgcaacggcuucgagaugaucugggaccccaacggcuggaccggcaccgacaacaacuucuccaucaagcaggacaucgucggcaucaacgagugguccggcuacuccggcuccuucguccagcaccccgagcucaccggccucgacugcauccgccccugcuucugggucgagcucauccgcggccgccccaaggagaacaccaucuggaccuccggcuccuccaucuccuucugcggcgucaacuccgacaccgucggcugguccuggcccgacggcgccgagcuccccuucaccaucgacaaguga

SEQ ID NO: 114739 - RNA, 1410 nt, Artificial Sequence; identical to SEQ ID NO: 112774
  derived and/or modified CDS sequence (opt2) from neuraminidase__InfluenzaA__ADG42306

SEQ ID NO: 114740 - RNA, 1410 nt, Artificial Sequence; identical to SEQ ID NO: 112774
  derived and/or modified CDS sequence (opt2) from neuraminidase__InfluenzaA__ADG42316

SEQ ID NO: 114741 - RNA, 1410 nt, Artificial Sequence; identical to SEQ ID NO: 112774
  derived and/or modified CDS sequence (opt2) from neuraminidase__InfluenzaA__ADG42326

SEQ ID NO: 114742 - RNA, 1410 nt, Artificial Sequence
  derived and/or modified CDS sequence (opt2) from neuraminidase__InfluenzaA__ADG42336
augaaccccaaccagaagaucaucaccaucggcuccgucugcaugaccaucggcauggccaaccucauccuccagaucggcaacaucaucuccaucuggaucucccacuccauccagcucggcaaccagaaccagaucgagaccugcaaccaguccgucaucaccuacgagaacaacaccugggucaaccagaccuacgucaacaucuccaacaccaacuucgccgccggccaguccgucgucuccaugaagcucgccggcaacuccucccucugccccgucuccggcugggccaucuacuccaaggacaacuccauccgcaucggcuccaagggcgacgucuucgucauccgcgagcccuucaucuccugcuccccccucgagugccgcaccuucuuccucacccagggcgcccuccucaacgacaagcacuccaacggcaccaucaaggaccgcucccccuaccgcacccucauguccugccccaucggcgagguccccucccccuacaacucccgcuucgaguccgucgccugguccgccuccgccugccacgacggcaucaacuggcucaccaucggcaucuccggccccgacaacggcgccgucgccguccucaaguacaacggcaucaucaccgacaccaucaaguccuggcgcaacaacauccuccgcacccaggaguccgagugcgccugcgucaacggcuccugcuucaccgucaugaccgacggccccuccgacggccaggccuccuacaagaucuuccgcaucgagaagggcaagaucgucaaguccgucgagaugaacgcccccaacuaccacuacgaggagugcuccugcuaccccgacuccuccgagaucaccugcgucugccgcgacaacuggcacggcuccaaccgccccugggucuccuucaaccagaaccucgaguaccagaucggcuacaucugcuccggcaucuucggcgacaacccccgccccaacgacaagaccggcuccugcggccccgucuccuccaacggcgccaacggcgucaagggcuucuccuucaaguacggcaacggcgucuggaucggccgcaccaaguccaucuccucccgcaacggcuucgagaugaucugggaccccaacggcuggaccggcaccgacaacaaguucuccaucaagcaggacaucgucggcaucaacgagugguccggcuacuccggcuccuucguccagcaccccgagcucaccggccucgacugcauccgccccugcuucugggucgagcucauccgcggccgccccaaggagaacaccaucuggaccuccggcuccuccaucuccuucugcggcgucaacuccgacaccgucggcugguccuggcccgacggcgccgagcuccccuucaccaucgacaaguga

SEQ ID NO: 114743 - RNA, 1410 nt, Artificial Sequence; identical to SEQ ID NO: 114236
  derived and/or modified CDS sequence (opt2) from neuraminidase__InfluenzaA__ADG42346

SEQ ID NO: 114744 - RNA, 1410 nt, Artificial Sequence; identical to SEQ ID NO: 113951
  derived and/or modified CDS sequence (opt2) from neuraminidase__InfluenzaA__ADG42356

SEQ ID NO: 114745 - RNA, 1410 nt, Artificial Sequence
  derived and/or modified CDS sequence (opt2) from neuraminidase__InfluenzaA__ADG42366
augaaccccaaccagaagaucaucaccaucggcuccgucugcaugaccaucggcauggccaaccucauccuccagaucggcaacaucaucuccaucuggaucucccacuccauccagcucggcaaccagaaccagaucgagaccugcaaccaguccgucaucaccuacgagaacaacaccugggucaaccagaccuacgucaacaucuccaacaccaacuucgccgccggccaguccgucgucuccgucaagcucgccggcaacuccucccucugccccgucuccggcugggccaucuacuccaaggacaacuccauccgcaucggcuccaagggcgacgucuucgucauccgcgagcccuucaucuccugcuccccccucgagugccgcaccuucuuccucacccagggcgcccuccucaacgacaagcacuccaacggcaccaucaaggaccgcucccccuaccgcacccucauguccugccccaucggcgagguccccucccccuacaacucccgcuucgaguccgucgccugguccgccuccgccugccacgacggcaucaacuggcucaccaucggcaucuccggccccgacaacggcgccgucgccguccucaaguacaacggcaucaucaccgacaccaucaaguccuggcgcaacaacauccuccgcacccaggaguccgagugcgccugcgucaacggcuccugcuucaccgucaugaccgacggccccuccgacggccaggccuccuacaagaucuuccgcaucgagaagggcaagaucgucaaguccgucgagaugaacgcccccaacuaccacuacgaggagugcuccugcuaccccgacuccuccgagaucaccugcgucugccgcgacaacuggcacggcuccaaccgccccuggaucuccuucaaccagaaccucgaguaccagaucggcuacaucugcuccggcaucuucggcgacaacccccgccccaacgacaagaccggcuccugcggccccgucuccuccaacggcgccaacggcgucaagggcuucuccuucaaguacggcaacggcgucuggaucggccgcaccaaguccaucuccucccgcaacggcuucgagaugaucugggaccccaacggcuggaccggcaccgacaacaaguucuccaucaagcaggacaucgucggcaucaacgagugguccggcuacuccggcuccuucguccagcaccccgagcucaccggccucgacugcauccgccccugcuucugggucgagcucauccgcggccgccccaaggagaacaccaucuggaccuccggcuccuccaucuccuucugcggcgucaacuccgacaccgucggcugguccuggcccgacggcgccgagcuccccuucaccaucgacaaguga

SEQ ID NO: 114746 - RNA, 1410 nt, Artificial Sequence; identical to SEQ ID NO: 112774
  derived and/or modified CDS sequence (opt2) from neuraminidase__InfluenzaA__ADG42376

SEQ ID NO: 114747 - RNA, 1410 nt, Artificial Sequence
  derived and/or modified CDS sequence (opt2) from neuraminidase__InfluenzaA__ADG42386
augaaccccaaccagaagaucaucaccaucggcuccgucugcaugaccaucggcauggccaaccucauccuccagaucggcaacaucaucuccaucuggaucucccacuccauccagcucggcaaccagaaccagaucgagaccugcaaccaguccgucaucaccuacgagaacaacaccugggucaaccagaccuacgucaacaucuccaacaccaacuucgccgccggccaguccgucgucuccgucaaguucgccggcaacuccucccucugccccgucuccggcugggccaucuacuccaaggacaacuccauccgcaucggcuccaagggcgacgucuucgucauccgcgagcccuucaucuccugcuccccccucgagugccgcaccuucuuccucacccagggcgcccuccucaacgacaagcacuccaacggcaccaucaaggaccgcucccccuaccgcacccucauguccugccccaucggcgagguccccucccccuacaacucccgcuucgaguccgucgccugguccgccuccgccugccacgacggcaucaacuggcucaccaucggcaucuccggccccgacaacggcgccgucgccguccucaaguacaacggcaucaucaccgacaccaucaaguccuggcgcaacaacauccuccgcacccaggaguccgagugcgccugcgucaacggcuccugcuucaccgucaugaccgacggccccaacgacggccaggccuccuacaagaucuuccgcaucgagaagggcaagaucgucaaguccgucgagaugaacgcccccaacuaccacuacgaggagugcuccugcuaccccgacuccuccgagaucaccugcgucugccgcgacaacuggcacggcuccaaccgccccugggucuccuucaaccagaaccucgaguaccagaucggcuacaucugcuccggcaucuucggcgacaacccccgccccaacgacaagaccggcuccugcggccccgucuccuccaacggcgccaacggcgucaagggcuucuccuucaaguacggcaacggcgucuggaucggccgcaccaaguccaucuccucccgcuccggcuucgagaugaucugggaccccaacggcuggaccggcaccgacaacaaguucuccaucaagcaggacaucgucggcaucaacgagugguccggcuacuccggcuccuucguccagcaccccgagcucaccggccucgacugcauccgccccugcuucugggucgagcucauccgcggccgccccaaggagaacaccaucuggaccuccggcuccuccaucuccuucugcggcgucaacuccgacaccgucggcugguccuggcccgacggcgccgagcuccccuucaccaucgacaaguga

SEQ ID NO: 114748 - RNA, 1410 nt, Artificial Sequence; identical to SEQ ID NO: 114731
  derived and/or modified CDS sequence (opt2) from neuraminidase__InfluenzaA__ADG42396

SEQ ID NO: 114749 - RNA, 1410 nt, Artificial Sequence
  derived and/or modified CDS sequence (opt2) from neuraminidase__InfluenzaA__ADG42406
augaaccccaaccagaagaucaucaccaucggcuccgucugcaugaccaucggcauggccaaccucauccuccagaucggcaacauccucuccaccuggaucucccacuccauccagcucggcaaccagaaccagaucgagaccugcaaccaguccgucaucaccuacgagaacaacaccugggucaaccagaccuacgucaacaucuccaacaccaacuucgccgccggccaguccgucgucuccgucaagcucgccggcaacuccucccucugccccgucuccggcugggccaucuacuccaaggacaacuccauccgcaucggcuccaagggcgacgucuucgucauccgcgagcccuucaucuccugcuccccccucgagugccgcaccuucuuccucacccagggcgcccuccucaacgacaagcacuccaacggcaccaucaaggaccgcucccccuaccgcacccucauguccugccccaucggcgagguccccucccccuacaacucccgcuucgaguccgucgccugguccgccuccgccugccacgacggcaucaacuggcucaccaucggcaucuccggccccgacaacggcgccgucgccguccucaaguacaacggcaucaucaccgacaccaucaaguccuggcgcaacaacauccuccgcacccaggaguccgagugcgccugcgucaacggcuccugcuucaccgucaugaccgacggccccuccgacggccaggccuccuacaagaucuuccgcaucgagaagggcaagaucgucaaguccgucgagaugaacgcccccaacuaccacuacgaggagugcuccugcuaccccgacuccuccgagaucaccugcgucugccgcgacaacuggcacggcuccaaccgccccugggucuccuucaaccagaaccucgaguaccagaucggcuacaucugcuccggcaucuucggcgacaacccccgccccaacgacaagaagggcuccugcggccccgucuccuccaacggcgccaacggcgucaagggcuucuccuucaaguacggcaacggcgucuggaucggccgcaccaaguccaucuccucccgcaacggcuucgagaugaucugggaccccaacggcuggaccggcaccgacaacaacuucuccaucaagcaggacaucgucggcaucaacgagugguccggcuacuccggcuccuucguccagcaccccgagcucaccggccucgacugcauccgccccugcuucugggucgagcucauccgcggccgccccaaggagaacaccaucuggaccuccggcuccuccaucuccuucugcggcgucaacuccgacaccgucggcugguccuggcccgacggcgccgagcuccccuucaccaucgacaaguga

SEQ ID NO: 114750 - RNA, 1410 nt, Artificial Sequence; identical to SEQ ID NO: 113951
  derived and/or modified CDS sequence (opt2) from neuraminidase__InfluenzaA__ADG42426

SEQ ID NO: 114751 - RNA, 1410 nt, Artificial Sequence; identical to SEQ ID NO: 112774
  derived and/or modified CDS sequence (opt2) from neuraminidase__InfluenzaA__ADG42436

SEQ ID NO: 114752 - RNA, 1410 nt, Artificial Sequence
  derived and/or modified CDS sequence (opt2) from neuraminidase__InfluenzaA__ADG42446
augaaccccaaccagaagaucaucaccaucggcuccgucugcaugaccaucggcauggccaaccucauccuccagaucggcaacaucaucuccaucuggaucucccacuccauccagcucggcaaccagaaccagaucgagaccugcaaccaguccgucaucaccuacgagaacaacaccugggucaaccagaccuacgucaacaucuccaacaccaacuucgccgccggccaguccgucgucuccgccaagcucgccggcaacuccucccucugccccgucuccggcugggccaucuacuccaaggacaacuccauccgcaucggcuccaagggcgacgucuucgucauccgcgagcccuucaucuccugcuccccccucgagugccgcaccuucuuccucacccagggcgcccuccucaacgacaagcacuccaacggcaccaucaaggaccgcucccccuaccgcacccucauguccugccccaucggcgagguccccucccccuacaacucccgcuucgaguccgucgccugguccgccuccgccugccacgacggcaucaacuggcucaccaucggcaucuccggccccgacaacggcgccgucgccguccucaaguacaacggcaucaucaccgacaccaucaaguccuggcgcaacaacauccuccgcacccaggaguccgagugcgccugcgucaacggcuccugcuucaccgucaugaccgacggccccuccgacggccaggccuccuacaagaucuuccgcaucgagaagggcaagaucgucaaguccgucgagaugaacgcccccaacuaccacuacgaggagugcuccugcuaccccgacuccuccgagaucaccugcgucugccgcgacaacuggcacggcuccaaccgccccugggucuccuucaaccagaaccucgaguaccagaucggcuacaucugcuccggcaucuucggcgacaacccccgccccaacgacaagaccggcuccugcggccccgucuccuccaacggcgccaacggcgucaagggcuucuccuucaaguacggcaacggcgucuggaucggccgcaccaaguccaucuccucccgcaacggcuucgagaugaucugggaccccaacggcuggaccggcaccgacaacaacuucuccaucaagcaggacaucgucggcaucaacgagugguccggcuacuccggcuccuucguccagcaccccgagcucaccggccucgacugcauccgccccugcuucugggucgagcucauccgcggccgccccaaggagaacaccaucuggaccuccggcuccuccaucuccuucugcggcgucaacuccgacaccgucggcugguccuggcccgacggcgccgagcuccccuucaccaucgacaaguga

SEQ ID NO: 114753 - RNA, 1410 nt, Artificial Sequence
  derived and/or modified CDS sequence (opt2) from neuraminidase__InfluenzaA__ADG42456
augaaccccaaccagaagaucaucaccaucggcuccgucugcaugaccaucggcauggccaaccucauccuccagaucggcaacaucaucuccaucuggaucucccacuccauccagcucggcaaccagaaccagaucgagaccugcaaccaguccgucaucaccuacgagaacaacaccugggucaaccagaccuacgucaacaucuccaacaccaacuucgccgccggccaguccgucgucuccgucaagcucgccggcaacuccucccucugccccgucuccggcugggccaucuacuccaaggacaacuccauccgcaucggcuccaagggcgacgucuucgucauccgcgagcccuucaucuccugcuccccccucgagugccgcaccuucuuccucacccagggcgcccuccucaacgacaagcacuccaacggcaccaucaaggaccgcuccccccaccgcacccucauguccugccccaucggcgagguccccucccccuacaacucccgcuucgaguccgucgccugguccgccuccgccugccacgacggcaucaacuggcucaccaucggcaucuccggccccgacaacggcgccgucgccguccucaaguacaacggcaucaucaccgacaccaucaaguccuggcgcaacaacauccuccgcacccaggaguccgagugcgccugcgucaacggcuccugcuucaccgucaugaccgacggccccuccgacggccaggccuccuacaagaucuuccgcaucgagaagggcaagaucgucaaguccgucgagaugaacgcccccaacuaccacuacgaggagugcuccugcuaccccgacuccuccgagaucaccugcgucugccgcgacaacuggcacggcuccaaccgccccugggucuccuucaaccagaaccucgaguaccagaucggcuacaucugcuccggcaucuucggcgacaacccccgccccaacgacaagaccggcuccugcggccccgucuccuccaacggcgccaacggcgucaagggcuucuccuucaaguacggcaacggcgucuggaucggccgcaccaaguccaucuccucccgcaacggcuucgagaugaucugggaccccaacggcuggaccggcaccgacaacaacuucuccaucaagcaggacaucgucggcaucaacgagugguccggcuacuccggcuccuucguccagcaccccgagcucaccggccucgacugcauccgccccugcuucugggucgagcucauccgcggccgccccaaggagaacaccaucuggaccuccggcuccuccaucuccuucugcggcgucaacuccgacaccgucggcugguccuggcccgacggcgccgagcuccccuucaccaucgacaaguga

SEQ ID NO: 114754 - RNA, 1410 nt, Artificial Sequence; identical to SEQ ID NO: 112774
  derived and/or modified CDS sequence (opt2) from neuraminidase__InfluenzaA__ADG42466

SEQ ID NO: 114755 - RNA, 1410 nt, Artificial Sequence
  derived and/or modified CDS sequence (opt2) from neuraminidase__InfluenzaA__ADG42476
augaaccccaaccagaagaucaucaccaucggcuccgucugcaugaccaucggcauggccaaccucauccuccagaucggcaacaucaucuccaucuggaucucccacuccauccagcucggcaaccagaaccagaccgagaccugcaaccaguccgucaucaccuacgagaacaacaccugggucaaccagaccuacgucaacaucuccaacaccaacuucgccgccggccaguccgucgucuccgucaagcucgccggcaacuccucccucugccccgucuccggcugggccaucuacuccaaggacaacuccauccgcaucggcuccaagggcgacgucuucgucauccgcgagcccuucaucuccugcuccccccucgagugccgcaccuucuuccucacccagggcgcccuccucaacgacaagcacuccaacggcaccaucaaggaccgcucccccuaccgcacccucauguccugccccaucggcgagguccccucccccuacaacucccgcuucgaguccgucgccugguccgccuccgccugccacgacggcaucaacuggcucaccaucggcaucuccggccccgacaacggcgccgucgccguccucaaguacaacggcaucaucaccgacaccaucaaguccuggcgcaacaacauccuccgcacccaggaguccgagugcgccugcgucaacggcuccugcuucaccgucaugaccgacggccccuccgacggccaggccuccuacaagaucuuccgcaucgagaagggcaagaucgucaaguccgucgagaugaacgcccccaacuaccacuacgaggagugcuccugcuaccccgacuccuccgagaucaccugcgucugccgcgacaacuggcacggcuccaaccgccccugggucuccuucaaccagaaccucgaguaccagaucggcuacaucugcuccggcaucuucggcgacaacccccgccccaacgacaagaccggcuccugcggccccgucuccuccaacggcgccaacggcgucaagggcuucuccuucaaguacggcaacggcgucuggaucggccgcaccaaguccaucuccucccgcaacggcuucgagaugaucugggaccccaacggcuggaccggcaccgacaacaacuucuccaucaagcaggacaucgucggcaucaacgagugguccggcuacuccggcuccuucguccagcaccccgagcucaccggccucgacugcauccgccccugcuucugggucgagcucauccgcggccgccccaaggagaacaccaucuggaccuccggcuccuccaucuccuucugcggcgucaacuccgacaccgucggcugguccuggcccgacggcgccgagcuccccuucaccaucgacaaguga

SEQ ID NO: 114756 - RNA, 1410 nt, Artificial Sequence; identical to SEQ ID NO: 114676
  derived and/or modified CDS sequence (opt2) from neuraminidase__InfluenzaA__ADG42486

SEQ ID NO: 114757 - RNA, 1410 nt, Artificial Sequence; identical to SEQ ID NO: 112774
  derived and/or modified CDS sequence (opt2) from neuraminidase__InfluenzaA__ADG42496

SEQ ID NO: 114758 - RNA, 1410 nt, Artificial Sequence
  derived and/or modified CDS sequence (opt2) from neuraminidase__InfluenzaA__ADG42506
augaaccccaaccagaagaucaucaucaucggcuccgucugcaugaccaucggcauggccaaccucauccuccagaucggcaacaucaucuccaucuggaucucccacuccauccagcucggcaaccagaaccagaucgagaccugcaaccaguccaucaucaccuacgagaacaacaccugggucaaccagaccuacgucaacaucuccaacaccaacuucgccgccggccaguccgucgucuccgucaagcucgccggcaacuccucccucugccccgucuccggcugggccaucuacuccaaggacaacuccauccgcaucggcuccaagggcgacgucuucgucauccgcgagcccuucaucuccugcuccccccucgagugccgcaccuucuuccucacccagggcgcccuccucaacgacaagcacuccaacggcaccaucaaggaccgcucccccuaccgcacccucauguccugccccaucggcgagguccccucccccuacaacucccgcuucgaguccgucgccugguccgccuccgccugccacgacggcaucaacuggcucaccaucggcaucuccggccccgacaacggcgccgucgccguccucaaguacaacggcaucaucaccgacaccaucaaguccuggcgcaacaacauccuccgcacccaggaguccgagugcgccugcgucaacggcuccugcuucaccgucaugaccgacggccccuccgacggccaggccuccuacaagaucuuccgcaucgagaagggcaaggucgucaaguccgucgagaugaacgcccccaacuaccacuacgaggagugcuccugcuaccccgacuccuccgagaucaccugcgucugccgcgacaacuggcacggcuccaaccgccccugggucuccuucaaccagaaccucgaguaccagaucggcuacaucugcuccggcaucuucggcgacaacccccgccccaacgacaagaccggcuccugcggccccgucuccuccaacggcgccaacggcgucaagggcuucuccuucaaguacggcaacggcgucuggaucggccgcaccaaguccaucuccucccgcaacggcuucgagaugaucugggaccccaacggcuggaccggcaccgacaacaacuucuccaucaagcaggacaucgucggcaucaacgagugguccggcuacuccggcuccuucguccagcaccccgagcucaccggccucgacugcauccgccccugcuucugggucgagcucauccgcggccgccccaaggagaacaccaucuggaccuccggcuccuccaucuccuucugcggcgucaacuccgacaccgucggcugguccuggcccgacggcgccgagcuccccuucaccaucgacaaguga

SEQ ID NO: 114759 - RNA, 1410 nt, Artificial Sequence; identical to SEQ ID NO: 113949
  derived and/or modified CDS sequence (opt2) from neuraminidase__InfluenzaA__ADG42516

SEQ ID NO: 114760 - RNA, 1410 nt, Artificial Sequence
  derived and/or modified CDS sequence (opt2) from neuraminidase__InfluenzaA__ADG42526
augaaccccaaccagaagaucaucaccaucggcuccgucugcaugaccaucggcauggccaaccucauccuccagaucggcaacaucaucuccaucuggaucucccacuccauccagcucggcaaccagaaccagaucgagaccugcaaccaguccgucaucaccuacgagaacaacaccugggucaaccagaccuacgucaacaucuccaacaccaacuucgccgccggccaguccgucgucuccgucaagcucgccggcaacuccucccucugccccgucuccggcugggccaucuacuccaaggacaacuccauccgcaucggcuccaagggcgacgucuucgucauccgcgagcccuucaucuccugcuccccccucgagugccgcaccuucuuccucacccagggcgcccuccucaacgacaagcacuccaacggcaccaucaaggaccgcucccccuaccgcacccucauguccugccccaucggcgagguccccucccccuacaacucccgcuucgaguccgucgccugguccgccuccgccugccacgacggcaucaacuggcucaccaucggcaucuccggccccgacaacggcgccgucgccguccucaaguacaacggcaucaucaccgacaccaucaaguccuggcgcaacaacauccuccgcacccaggaguccgagugcgccugccucaacggcuccugcuucaccgucaugaccgacggccccuccgacggccaggccuccuacaagaucuuccgcaucgagaagggcaagaucgucaaguccgucgagaugaacgcccccaacuaccacuacgaggagugcuccugcuaccccgacuccuccgagaucaccugcgucugccgcgacaacuggcacggcuccaaccgccccugggucuccuucaaccagaaccucgaguaccagaucggcuacaucugcuccggcaucuucggcgacaacccccgccccaacgacaagaccggcuccugcggccccgucuccuccaacggcgccaacggcgucaagggcuucuccuucaaguacggcaacggcgucuggaucggccgcaccaaguccaucuccucccgcaacggcuucgagaugaucugggaccccaacggcuggaccggcaccgacaacaacuucuccaucaagcaggacaucgucggcaucaacgagugguccggcuacuccggcuccuucguccagcaccccgagcucaccggccucgacugcauccgccccugcuucugggucgagcucauccgcggccgccccaaggagaacaccaucuggaccuccggcuccuccaucuccuucugcggcgucaacuccgacaccgucggcugguccuggcccgacggcgccgagcuccccuucaccaucgacaaguga

SEQ ID NO: 114761 - RNA, 1410 nt, Artificial Sequence
  derived and/or modified CDS sequence (opt2) from neuraminidase__InfluenzaA__ADG42536
augaaccccaaccagaagaucaucaccaucggcuccgucugcaugaccaucggcauggccaaccucauccuccagaucggcaacaucaucuccaucuggaucucccacuccauccagcucggcaaccagaaccagaucgagaccugcaaccaguccgucaucaccuacgagaacaacaccugggucaaccagaccuacgucaacaucuccaacaccaacuucgccgccggccaguccgucgucuccgucaagcucgccggcaacuccucccucugccccgucuccggcugggccaucuacuccaaggacaacuccauccgcaucggcuccaagggcgacgucuucgucauccgcgagcccuucaucuccugcuccccccucgagugccgcaccuucuuccucacccagggcgcccuccucaacgacaagcacuccaacggcaccaucaaggaccgcucccccuaccgcacccucauguccugccccaucggcgagguccccucccccuacaacucccgcuucgaguccgucgccugguccgccuccgccugccacgacggcaucaacuggcucaccaucggcaucuccggccccgacaacggcgccgucgccguccucaaguacaacggcaucaucaccgacaccaucaaguccuggcgcaacaacauccuccgcacccaggaguccgagugcgccugcgucaacggcuccugcuucaccgucaugaccgacggccccuccgacggccaggccuccuacaagaucuuccgcaucgagaagggcaagaucgucaaguccgucgagaugaacgcccccaacuaccacuacgaggagugcuccugcuaccccgacuccuccgagaucaccugcgucugccgcgacaacuggcacggcuccaaccgccccugggucuccuucaaccagaaccucgaguaccagaucggcuacaucugcuccggcaucuucggcgacaacccccgccccaacgacaagaccggcuccugcggccccgucuccuccaacggcgccaacggcgucaagggcuucuccuucaaguacggcaacggcgucuggaucggccgcaccaaguccaucuccucccgcaacggcuucgagaugaucugggaccccaacggcuggaccggcaccgacaacaacuucuccaucaagcaggacaucgucggcaucaacgagugguccggcuacuccggcuccuucguccagcaccccgagcucaccggccucgacugcauccgccccugcuucugggucgagcucauccgcggccgccccaaggagaacaccaucuggaccuccggcuccuccaucuccuucugcggcgucaccuccgacaccgucggcugguccuggcccgacggcgccgagcuccccuucaccaucgacaaguga

SEQ ID NO: 114762 - RNA, 1410 nt, Artificial Sequence; identical to SEQ ID NO: 112774
  derived and/or modified CDS sequence (opt2) from neuraminidase__InfluenzaA__ADG42546

SEQ ID NO: 114763 - RNA, 1410 nt, Artificial Sequence; identical to SEQ ID NO: 112774
  derived and/or modified CDS sequence (opt2) from neuraminidase__InfluenzaA__ADG42556

SEQ ID NO: 114764 - RNA, 1410 nt, Artificial Sequence
  derived and/or modified CDS sequence (opt2) from neuraminidase__InfluenzaA__ADG42566
augaaccccaaccagaagaucaucaccaucggcuccgucugcaugaccaucggcauggccaaccucauccuccagaucggcaacaucaucuccaucuggaucucccacuccauccagcucggcaaccagaaccagaucgagaccugcaaccaguccgucaucaccuacgagaacaacaccugggucaaccagaccuacgucaacaucuccaacaccaacuucgccgccggccacuccgucgucuccgucaagcucgccggcaacuccucccucugccccgucuccggcugggccaucuacuccaaggacaacuccauccgcaucggcuccaagggcgacgucuucgucauccgcgagcccuucaucuccugcuccccccucgagugccgcaccuucuuccucacccagggcgcccuccucaacgacaagcacuccaacggcaccaucaaggaccgcucccccuaccgcacccucauguccugccccaucggcgagguccccucccccuacaacucccgcuucgaguccgucgccugguccgccuccgccugccacgacggcaucaacuggcucaccaucggcaucuccggccccgacaacggcgccgucgccguccucaaguacaacggcaucaucaccgacaccaucaaguccuggcgcaacaacauccuccgcacccaggaguccgagugcgccugcgucaacggcuccugcuucaccgucaugaccgacggccccuccgacggccaggccuccuacaagaucuuccgcaucgagaagggcaagaucgucaaguccgucgagaugaacgcccccaacuaccacuacgaggagugcuccugcuaccccgacuccuccgagaucaccugcgucugccgcgacaacuggcacggcuccaaccgccccugggucuccuucaaccagaaccucgaguaccagaucggcuacaucugcuccggcaucuucggcgacaacccccgccccaacgacaagaccggcuccugcggccccgucuccuccaacggcgccaacggcgucaagggcuucuccuucaaguacggcaacggcgucuggaucggccgcaccaaguccaucuccucccgcaacggcuucgagaugaucugggaccccaacggcuggaccggcaccgacaacaacuucuccaucaagcaggacaucgucggcaucaacgagugguccggcuacuccggcuccuucguccagcaccccgagcucaccggccucgacugcauccgccccugcuucugggucgagcucauccgcggccgccccaaggagaacaccaucuggaccuccggcuccuccaucuccuucugcggcgucaacuccgacaccgucggcugguccuggcccgacggcgccgagcuccccuucaccaucgacaaguga

SEQ ID NO: 114765 - RNA, 1410 nt, Artificial Sequence
  derived and/or modified CDS sequence (opt2) from neuraminidase__InfluenzaA__ADG42576
augaaccccaaccagaagaucaucaccaucggcuccgucugcaugaccaucggcauggccaaccucauccuccagaucggcaacaucaucuccaucuggaucucccacuccauccagcucggcaaccagaaccagaucgagaccugcaaccaguccgucaucaccuacgagaacaacaccugggucaaccagaccuacgucaacaucuccaacaccaacuucgccgccggccaguccgucgucuccgucaagcucgccggcaacuccucccucugccccgucuccggcugggccaucuacuccaaggacaacuccauccgcaucggcuccaagggcgacgucuucgucauccgcgagcccuucaucuccugcuccccccucgagugccgcaccuucuuccucacccagggcgcccuccucaacgacaagcacuccaacggcaccaucaaggaccgcucccccuaccgcacccucauguccugccccaucggcgagguccccucccccuacaacucccgcuucgaguccgucgccugguccgccuccgccugccacgacggcaucaacuggcucaccaucggcaucuccggccccuacaacggcgccgucgccguccucaaguacaacggcaucaucaccgacaccaucaaguccuggcgcaacaacauccuccgcacccaggaguccgagugcgccugcgucaacggcuccugcuucaccgucaugaccgacggccccuccgacggccaggccuccuacaagaucuucaagaucgagaagggcaagaucgucaaguccgucgagaugaacgcccccaacuaccacuacgaggagugcuccugcuaccccgacuccuccgagaucaccugcgucugccgcgacaacuggcacggcuccaaccgccccugggucuccuucaaccagaaccucgaguaccagaucggcuacaucugcuccggcaucuucggcgacaacccccgccccaacgacaagaccggcuccugcggccccgucuccuccaacggcgccaacggcgucaagggcuucuccuucaaguacggcaacggcgucuggaucggccgcaccaaguccaucuccucccgcaacggcuucgagaugaucugggaccccaacggcuggaccggcaccgacaacaacuucuccaucaagcaggacaucgucggcaucaacgagugguccggcuacuccggcuccuucguccagcaccccgagcucaccggccucgacugcauccgccccugcuucugggucgagcucauccgcggccgccccaaggagaacaccaucuggaccuccggcuccuccaucuccuucugcggcgucaacuccgacaccgucggcugguccuggcccgacggcgccgagcuccccuucaccaucgacaaguga

SEQ ID NO: 114766 - RNA, 1410 nt, Artificial Sequence; identical to SEQ ID NO: 112774
  derived and/or modified CDS sequence (opt2) from neuraminidase__InfluenzaA__ADG42586

SEQ ID NO: 114767 - RNA, 1410 nt, Artificial Sequence
  derived and/or modified CDS sequence (opt2) from neuraminidase__InfluenzaA__ADG42606
augaaccccaaccagaagaucaucaccaucggcuccgucugcaugaccaucggcauggccaaccucauccuccagaucggcaacaucaucuccaucuggaucucccacuccauccagcucggcaaccagaaccagaucgagaccugcaaccaguccgucaucaccuacgagaacaacaccugggucaaccagaccuacgucaacaucuccaacaccaacuucgccgccggccaguccgucgucuccgucaagcucgccggcaacuccucccucugccccgucuccggcugggccaucuacuccaaggacaacuccauccgcaucggcuccaagggcgacgucuucgucauccgcgagcccuucaucuccugcuccccccucgagugccgcaccuucuuccucacccagggcgcccuccucaacgacaagcacuccaacggcaccaucaaggaccgcucccccuaccgcacccucauguccugccccaucggcgagguccccucccccuacaacucccgcuucgaguccgucgccugguccgccuccgccugccacgacggcaucaacuggcucaccaucggcaucuccggccccgacaacggcgccgucgccguccucaaguacaacggcaucaucaccgacaccaucaaguccuggcgcaacaacauccuccgcacccaggaguccgagugcgccugcgucaacggcuccugcuucaccgucaugaccgacggccccuccgacggccaggccuccuacaagaucuuccgcaucgagaagggcaagaucgucaaguccgucgagaugaacgcccccaacuaccacuacgaggagugcuccugcuaccccgacuccuccgagaucaccugcgucugccgcgacaacuggcacggcuccaaccgccccugggucuccuucaaccagaaccucgaguaccagaucggcuacaucugcuccggcaucuucggcgacaacccccgccccaacgacaagaccggcuccugcggccccgucuccuccaacggcgccaacggcgucaagggcuucuccuucaaguacggcaacggcgucuggaucggccgcaccaaguccaucuccucccgcaacggcuucgagaugaucugggaccccaacggcuggaccggcaccgacaacaacuucuccaucaagcaggacaucgucggcaucaacgagugguccggcuacuccggcuccuucguccagcaccccgagcucaccggccucgacugcauccgccccugcuucugggucgagcucauccgcggccgccccaaggagaacaccaucuggaccuccggcuccuccaucuccuucugcggcgucaacuccgacaccgucggcugguccuggcccgacggcgccgagcuccccuuccccaucgacaaguga

SEQ ID NO: 114768 - RNA, 1410 nt, Artificial Sequence
  derived and/or modified CDS sequence (opt2) from neuraminidase__InfluenzaA__ADG42616
augaacuccaaccagaagaucaucaccaucggcuccgucugcaugaccaucggcauggccaaccucauccuccagaucggcaacaucaucuccaucuggaucucccacuccauccagcucggcaaccagaaccagaucgagaccugcaaccaguccgucaucaccuacgagaacaacaccugggucaaccagaccuacgucaacaucuccaacaccaacuucgccgccggccaguccgucgucuccgucaagcucgccggcaacuccucccucugccccgucuccggcugggccaucuacuccaaggacaacuccauccgcaucggcuccaagggcgacgucuucgucauccgcgagcccuucaucuccugcuccccccucgagugccgcaccuucuuccucacccagggcgcccuccucaacgacaagcacuccaacggcaccaucaaggaccgcucccccuaccgcacccucauguccugccccaucggcgagguccccucccccuacaacucccgcuucgaguccgucgccugguccgccuccgccugccacgacggcaucaacuggcucaccaucggcaucuccggccccgacaacggcgccgucgccguccucaaguacaacggcaucaucaccgacaccaucaaguccuggcgcaacaacauccuccgcacccaggaguccgagugcgccugcgucaacggcuccugcuucaccgucaugaccgacggccccuccgacggccaggccuccuacaagaucuuccgcaucgagaagggcaagaucgucaaguccgucgagaugaacgcccccaacuaccacuacgaggagugcuccugcuaccccgacuccuccgagaucaccugcgucugccgcgacaacuggcacggcuccaaccgccccugggucuccuucaaccagaaccucgaguaccagaucggcuacaucugcuccggcaucuucggcgacaacccccgccccaacgacaagaccggcuccugcggccccgucuccuccaacggcgccaacggcgucaagggcuucuccuucaaguacggcaacggcgucuggaucggccgcaccaaguccaucuccucccgcaacggcuucgagaugaucugggaccccaacggcuggaccggcaccgacaacaacuucuccaucaagcaggacaucgucggcaucaacgagugguccggcuacuccggcuccuucguccagcaccccgagcucaccggccucgacugcauccgccccugcuucugggucgagcucauccgcggccgccccaaggagaacaccaucuggaccuccggcuccuccaucuccuucugcggcgucaacuccgacaccgucggcugguccuggcccgacggcgccgagcuccccuucaccaucgacaaguga

SEQ ID NO: 114769 - RNA, 1410 nt, Artificial Sequence; identical to SEQ ID NO: 113357
  derived and/or modified CDS sequence (opt2) from neuraminidase__InfluenzaA__ADG42626

SEQ ID NO: 114770 - RNA, 1410 nt, Artificial Sequence; identical to SEQ ID NO: 114755
  derived and/or modified CDS sequence (opt2) from neuraminidase__InfluenzaA__ADG42636

SEQ ID NO: 114771 - RNA, 1410 nt, Artificial Sequence
  derived and/or modified CDS sequence (opt2) from neuraminidase__InfluenzaA__ADG42646
augaaccccaaccagcgcaucaucaccaucggcuccgucugcaugaccaucggcauggccaaccucauccuccagaucggcaacaucaucuccaucuggaucucccacuccauccagcucggcaaccagaaccagaucgagaccugcaaccaguccgucaucaccuacgagaacaacaccugggucaaccagaccuacgucaacaucuccaacaccaacuucgccgccggccaguccgucgucuccgucaagcucgccggcaacuccucccucugccccgucuccggcugggccaucuacuccaaggacaacuccauccgcaucggcuccaagggcgacgucuucgucauccgcgagcccuucaucuccugcuccccccucgagugccgcaccuucuuccucacccagggcgcccuccucaacgacaagcacuccaacggcaccaucaaggaccgcucccccuaccgcacccucauguccugccccaucggcgagguccccucccccuacaacucccgcuucgaguccgucgccugguccgccuccgccugccacgacggcaucaacuggcucaccaucggcaucuccggccccgacaacggcgccgucgccguccucaaguacaacggcaucaucaccgacaccaucaaguccuggcgcaacaacauccuccgcacccaggaguccgagugcgccugcgucaacggcuccugcuucaccgucaugaccgacggccccuccgacggccaggccuccuacaagaucuuccgcaucgagaagggcaagaucgucaaguccgucgagaugaacgcccccaacuaccacuacgaggagugcuccugcuaccccgacuccuccgagaucaccugcgucugccgcgacaacuggcacggcuccaaccgccccugggucuccuucaaccagaaccucgaguaccagaucggcuacaucugcuccggcaucuucggcgacaacccccgccccaacgacaagaccggcuccugcggccccgucuccuccaacggcgccaacggcgucaagggcuucuccuucaaguacggcaacggcgucuggaucggccgcaccaaguccaucuccucccgcaacggcuucgagaugaucugggaccccaacggcuggaccggcaccgacaacaacuucuccaucaagcaggacaucgucggcaucaacgagugguccggcuacuccggcuccuucguccagcaccccgagcucaccggccucgacugcauccgccccugcuucugggucgagcucauccgcggccgccccaaggagaacaccaucuggaccuccggcuccuccaucuccuucugcggcgucaacuccgacaccgucggcugguccuggcccgacggcgccgagcuccccuucaccaucgacaaguga

SEQ ID NO: 114772 - RNA, 1410 nt, Artificial Sequence; identical to SEQ ID NO: 112774
  derived and/or modified CDS sequence (opt2) from neuraminidase__InfluenzaA__ADG42656

SEQ ID NO: 114773 - RNA, 1410 nt, Artificial Sequence; identical to SEQ ID NO: 114687
  derived and/or modified CDS sequence (opt2) from neuraminidase__InfluenzaA__ADG42666

SEQ ID NO: 114774 - RNA, 1410 nt, Artificial Sequence
  derived and/or modified CDS sequence (opt2) from neuraminidase__InfluenzaA__ADG42676
augaaccccaaccagaagaucaucaccaucggcuccgucugcaugaccaucggcauggccaaccucauccuccagaucggcaacaucaucuccaucuggaucucccacuccauccagcucggcaaccagaaccagaucgagaucugcaaccaguccgucaucaccuacgagaacaacaccugggucaaccagaccuacgucaacaucuccaacaccaacuucgccgccggccaguccgucgucuccgucaagcucgccggcaacuccucccucugccccgucuccggcugggccaucuacuccaaggacaacuccauccgcaucggcuccaagggcgacgucuucgucauccgcgagcccuucaucuccugcuccccccucgagugccgcaccuucuuccucacccagggcgcccuccucaacgacaagcacuccaacggcaccaucaaggaccgcucccccuaccgcacccucauguccugccccaucggcgagguccccucccccuacaacucccgcuucgaguccgucgccugguccgccuccgccugccacgacggcaucaacuggcucaccaucggcaucuccggccccgacaacggcgccgucgccguccucaaguacaacggcaucaucaccgacaccaucaaguccuggcgcaacaacauccuccgcacccaggaguccgagugcgccugcgucaacggcuccugcuucaccgucaugaccgacggccccuccgacggccaggccuccuacaagaucuuccgcaucgagaagggcaagaucgucaaguccgucgagaugaacgcccccaacuaccacuacgaggagugcuccugcuaccccgacuccuccgagaucaccugcgucugccgcgacaacuggcacggcuccaaccgccccugggucuccuucaaccagaaccucgaguaccagaucggcuacaucugcuccggcaucuucggcgacaacccccgccccaacgacaagaccggcuccugcggccccgucuccuccaacggcgccaacggcgucaagggcuucuccuucaaguacggcaacggcgucuggaucggccgcaccaaguccaucuccucccgcaacggcuucgagaugaucugggaccccaacggcuggaccggcaccgacaacaacuucuccaucaagcaggacaucgucggcaucaacgagugguccggcuacuccggcuccuucguccagcaccccgagcucaccggccucgacugcauccgccccugcuucugggucgagcucauccgcggccgccccaaggagaacaccaucuggaccuccggcuccuccaucuccuucugcggcgucaacuccgacaccgucggcugguccuggcccgacggcgccgagcuccccuucaccaucgacaaguga

SEQ ID NO: 114775 - RNA, 1410 nt, Artificial Sequence; identical to SEQ ID NO: 112774
  derived and/or modified CDS sequence (opt2) from neuraminidase__InfluenzaA__ADG42686

SEQ ID NO: 114776 - RNA, 1410 nt, Artificial Sequence; identical to SEQ ID NO: 114351
  derived and/or modified CDS sequence (opt2) from neuraminidase__InfluenzaA__ADG42696

SEQ ID NO: 114777 - RNA, 1410 nt, Artificial Sequence; identical to SEQ ID NO: 114555
  derived and/or modified CDS sequence (opt2) from neuraminidase__InfluenzaA__ADG42706

SEQ ID NO: 114778 - RNA, 1410 nt, Artificial Sequence; identical to SEQ ID NO: 112774
  derived and/or modified CDS sequence (opt2) from neuraminidase__InfluenzaA__ADG42716

SEQ ID NO: 114779 - RNA, 1410 nt, Artificial Sequence; identical to SEQ ID NO: 114062
  derived and/or modified CDS sequence (opt2) from neuraminidase__InfluenzaA__ADG42726

SEQ ID NO: 114780 - RNA, 1410 nt, Artificial Sequence; identical to SEQ ID NO: 113357
  derived and/or modified CDS sequence (opt2) from neuraminidase__InfluenzaA__ADG42746

SEQ ID NO: 114781 - RNA, 1410 nt, Artificial Sequence; identical to SEQ ID NO: 114287
  derived and/or modified CDS sequence (opt2) from neuraminidase__InfluenzaA__ADG42756

SEQ ID NO: 114782 - RNA, 1410 nt, Artificial Sequence; identical to SEQ ID NO: 114062
  derived and/or modified CDS sequence (opt2) from neuraminidase__InfluenzaA__ADG42766

SEQ ID NO: 114783 - RNA, 1410 nt, Artificial Sequence; identical to SEQ ID NO: 114062
  derived and/or modified CDS sequence (opt2) from neuraminidase__InfluenzaA__ADG42776

SEQ ID NO: 114784 - RNA, 1410 nt, Artificial Sequence; identical to SEQ ID NO: 114062
  derived and/or modified CDS sequence (opt2) from neuraminidase__InfluenzaA__ADG42796

SEQ ID NO: 114785 - RNA, 1410 nt, Artificial Sequence
  derived and/or modified CDS sequence (opt2) from neuraminidase__InfluenzaA__ADG42806
augaaccccaaccagaagaucaucaccaucggcuccgucugcaugaccaucggcauggccaaccucauccuccagaucggcaacaucaucuccaucuggaucucccacuccauccagcucggcaaccagaaccagaucgagaccugcaaccaguccgucaucaccuacgagaacaacaccugggucaaccagaccuacgucaacaucuccaacaccaacuucgccgccggccaguccgucgucuccgucaagcucgccggcaacuccucccucugccccgucuccggcugggccaucuacuccaaggacaacuccauccgcaucggcuccaagggcgacgucuucgucauccgcgagcccuucaucuccugcuccccccucgagugccgcaccuucuuccucacccagggcgcccuccucaacgacaagcacuccaacggcaccaucaaggaccgcucccccuaccgcacccucauguccugccccaucggcgagguccccucccccuacaacucccgcuucgaguccgucgccugguccgccuccgccugccacgacggcaucaacuggcucaccaucggcaucuccggccccgacaacggcgccgucgccguccucaaguacaacggcaucaucaccgacaccaucaaguccuggcgcaacaacauccuccgcacccaggaguccgagugcgccugcgucaacggcuccugcuucaccgucaugaccgacggccccuccgacggccaggccuccuacaagaucuuccgcaucgagaagggcaagaucgucaaguccgucgagaugaacgcccccaacuaccacuacgaggagugcuccugcuaccccgacuccuccgagaucaccugcgucugccgcgacaacuggcacggcuccaaccgccccugggucuccuucaaccagaaccucgaguaccagaucggcuacaucugcuccggcaucuucggcgacaacccccgccccaacgacaagaccggcuccugcggccccgucuccuccaacggcgccaacggcgucaagggcuucuccuucaaguacggcaacggcgucuggaucggccgcaccaaguccaucuccucccgcaacggcuucgagaugaucugggaccccaacggcuggaccggcaccgacaacaacuucuccaucaagcaggacaucgucggcaucaacgagugguccggcuacuccggcuccuucguccagcaccccgagcucaccggccucgacugcauccgccccugcuucugggucgagcucauccgcggccgccccaaggagaacaccaucuggaccuccggcuccuccaucuccuucugcggcgucaacuccgacaccgucuccugguccuggcccgacggcgccgagcuccccuucaccaucgacaaguga

SEQ ID NO: 114786 - RNA, 1410 nt, Artificial Sequence; identical to SEQ ID NO: 112774
  derived and/or modified CDS sequence (opt2) from neuraminidase__InfluenzaA__ADG42816

SEQ ID NO: 114787 - RNA, 1410 nt, Artificial Sequence; identical to SEQ ID NO: 112774
  derived and/or modified CDS sequence (opt2) from neuraminidase__InfluenzaA__ADG42826

SEQ ID NO: 114788 - RNA, 1410 nt, Artificial Sequence; identical to SEQ ID NO: 112774
  derived and/or modified CDS sequence (opt2) from neuraminidase__InfluenzaA__ADG42836

SEQ ID NO: 114789 - RNA, 1410 nt, Artificial Sequence; identical to SEQ ID NO: 114390
  derived and/or modified CDS sequence (opt2) from neuraminidase__InfluenzaA__ADG42846

SEQ ID NO: 114790 - RNA, 1410 nt, Artificial Sequence; identical to SEQ ID NO: 112774
  derived and/or modified CDS sequence (opt2) from neuraminidase__InfluenzaA__ADG42856

SEQ ID NO: 114791 - RNA, 1410 nt, Artificial Sequence; identical to SEQ ID NO: 114386
  derived and/or modified CDS sequence (opt2) from neuraminidase__InfluenzaA__ADG42866

SEQ ID NO: 114792 - RNA, 1410 nt, Artificial Sequence; identical to SEQ ID NO: 112774
  derived and/or modified CDS sequence (opt2) from neuraminidase__InfluenzaA__ADG42876

SEQ ID NO: 114793 - RNA, 1410 nt, Artificial Sequence; identical to SEQ ID NO: 114423
  derived and/or modified CDS sequence (opt2) from neuraminidase__InfluenzaA__ADG42886

SEQ ID NO: 114794 - RNA, 1410 nt, Artificial Sequence; identical to SEQ ID NO: 114366
  derived and/or modified CDS sequence (opt2) from neuraminidase__InfluenzaA__ADG42896

SEQ ID NO: 114795 - RNA, 1410 nt, Artificial Sequence; identical to SEQ ID NO: 114366
  derived and/or modified CDS sequence (opt2) from neuraminidase__InfluenzaA__ADG42906

SEQ ID NO: 114796 - RNA, 1410 nt, Artificial Sequence; identical to SEQ ID NO: 112774
  derived and/or modified CDS sequence (opt2) from neuraminidase__InfluenzaA__ADG42916

SEQ ID NO: 114797 - RNA, 1410 nt, Artificial Sequence; identical to SEQ ID NO: 112774
  derived and/or modified CDS sequence (opt2) from neuraminidase__InfluenzaA__ADG42926

SEQ ID NO: 114798 - RNA, 1410 nt, Artificial Sequence; identical to SEQ ID NO: 112774
  derived and/or modified CDS sequence (opt2) from neuraminidase__InfluenzaA__ADG58909

SEQ ID NO: 114799 - RNA, 1410 nt, Artificial Sequence; identical to SEQ ID NO: 112774
  derived and/or modified CDS sequence (opt2) from neuraminidase__InfluenzaA__ADG58910

SEQ ID NO: 114800 - RNA, 1410 nt, Artificial Sequence
  derived and/or modified CDS sequence (opt2) from neuraminidase__InfluenzaA__ADG58913
augaaccccaaccagaagaucaucaccaucggcuccgucugcaugaccaucggcauggccaaccucauccuccagaucggcaacaucaucuccaucuggaucucccacuccauccagcucggcaaccagaaccagaucgagaccugcaaccaguccgucaucaccuacgagaacaacaccugggucaaccagaccuacgucaacaucuccaacaccaacuucgccgccggccaguccgucgucuccgucaagcucgccggcaacuccucccucugccccgucuccggcugggccaucuacuccaaggacaacuccauccgcaucggcuccaagggcgacgucuucgucauccgcgagcccuucaucuccugcuccccccucgagugccgcaccuucuuccucacccagggcgcccuccucaacgacaagcacuccaacggcaccaucaaggaccgcucccccuaccgcacccucauguccugccccaucggcgagguccccucccccuacaacucccgcuucgaguccgucgccugguccgccuccgccugccacgacggcaucaacuggcucaccaucggcaucuccggccccgacaacggcgccgucgccguccucaaguacaacggcaucaucaccgacaccaucaaguccuggcgcaacaacauccuccgcacccaggaguccgagugcgccugcgucaacggcuccugcuucaccgucaugaccgacggccccuccgacggccaggccuccuacaagaucuuccgcaucgagaagggcaagaucgucaaguccgucgagaugaacgcccccaacuaccacuacgaggagugcuccugcuaccccgacuccuccgagaucaccugcgucugccgcgacaacuggcacggcuccaaccgccccugggucaccuucaaccagaaccucgaguaccagaucggcuacaucugcuccggcaucuucggcgacaacccccgccccaacgacaagaccggcuccugcggccccgucuccuccaacggcgccaacggcgucaagggcuucuccuucaaguacggcaacggcgucuggaucggccgcaccaaguccaucuccucccgcaacggcuucgagaugaucugggaccccaacggcuggaccggcaccgacaacaacuucuccaucaagcaggacaucgucggcaucaacgagugguccggcuacuccggcuccuucguccagcaccccgagcucaccggccucgacugcauccgccccugcuucuggaucgagcucauccgcggccgccccaaggagaacaccaucuggaccuccggcuccuccaucuccuucugcggcgucaacuccgacaccgucggcugguccuggcccgacggcgccgagcuccccuucaccaucgacaaguga

SEQ ID NO: 114801 - RNA, 1410 nt, Artificial Sequence; identical to SEQ ID NO: 112774
  derived and/or modified CDS sequence (opt2) from neuraminidase__InfluenzaA__ADG58914

SEQ ID NO: 114802 - RNA, 1410 nt, Artificial Sequence; identical to SEQ ID NO: 112774
  derived and/or modified CDS sequence (opt2) from neuraminidase__InfluenzaA__ADG58916

SEQ ID NO: 114803 - RNA, 1410 nt, Artificial Sequence; identical to SEQ ID NO: 112774
  derived and/or modified CDS sequence (opt2) from neuraminidase__InfluenzaA__ADG58917

SEQ ID NO: 114804 - RNA, 1410 nt, Artificial Sequence
  derived and/or modified CDS sequence (opt2) from neuraminidase__InfluenzaA__ADG58918
augaaccccaaccagaagaucaucaccaucggcuccgucugcaugaccaucggcauggccaaccucauccuccagaucggcaacaucaucuccaucuggaucucccacuccauccagcucggcaaccagaaccagaucgagaccugcaaccaguccgucaucaccuacgagaacaacaccugggucaaccagaccuacgucaacaucuccaacaccaacuucgccgccggccaguccgucgucuccgucaagcucgccggcaacuccucccucugccccgucuccggcugggccaucuacuccaaggacaacuccauccgcaucggcuccaagggcgacgucuucgucauccgcgagcccuucaucuccugcuccccccucgagugccgcaccuucuuccucacccagggcgcccuccucaacgacaagcacuccaacggcaccaucaaggaccgcucccccuaccgcacccucauguccugccccaucggcgagguccccucccccuacaacucccgcuucgaguccgucgccugguccgccuccgccugccacgacggcaucaacuggcucaccaucggcaucuccggccccgacaacggcgccgucgccguccucaaguacaacggcaucaucaccgacaccaucaaguccuggcgcaacaacauccuccgcacccaggaguccgagugcgccugcgucaacggcuccugcuucaccgucaugaccgacggccccuccgacggccaggccuccuacaagaucuuccgcaucgagaagggcaagaucgucaaguccgucgagaugaacgcccccaacuaccacuacgaggagugcuccugcuaccccgacuccuccgagaucaccugcgucugccgcgacaacuggcacggcuccaaccgccccugggucaccuucaaccagaaccucgaguaccagaucggcuacaucugcuccggcaucuucggcgacaacccccgccccaacgacaagaccggcuccugcggccccgucuccuccaacggcgccaacggcgucaagggcuucuccuucaaguacggcaacggcgucuggaucggccgcaccaaguccaucuccucccgcaacggcuucgagaugaucugggaccccaacggcuggaccggcaccgacaacaacuucuccaucaagcaggacaucgucggcaucaacgagugguccggcuacuccggcuccuucguccagcaccccgagcucaccggccucgacugcauccgccccugcuucugggucgagcucauccgcggccgccccaaggagaacaccaucuggaccuccggcuccuccaucuccuucugcggcgucaacuccgacaccgucggcugguccuggcccgacggcgccgagcuccccuucaccaucgacaaguga

SEQ ID NO: 114805 - RNA, 1410 nt, Artificial Sequence; identical to SEQ ID NO: 114800
  derived and/or modified CDS sequence (opt2) from neuraminidase__InfluenzaA__ADG58919

SEQ ID NO: 114806 - RNA, 1410 nt, Artificial Sequence; identical to SEQ ID NO: 112929
  derived and/or modified CDS sequence (opt2) from neuraminidase__InfluenzaA__ADG58920

SEQ ID NO: 114807 - RNA, 1410 nt, Artificial Sequence; identical to SEQ ID NO: 112929
  derived and/or modified CDS sequence (opt2) from neuraminidase__InfluenzaA__ADG58921

SEQ ID NO: 114808 - RNA, 1410 nt, Artificial Sequence; identical to SEQ ID NO: 112929
  derived and/or modified CDS sequence (opt2) from neuraminidase__InfluenzaA__ADG58922

SEQ ID NO: 114809 - RNA, 1410 nt, Artificial Sequence; identical to SEQ ID NO: 112929
  derived and/or modified CDS sequence (opt2) from neuraminidase__InfluenzaA__ADG58923

SEQ ID NO: 114810 - RNA, 1410 nt, Artificial Sequence; identical to SEQ ID NO: 112929
  derived and/or modified CDS sequence (opt2) from neuraminidase__InfluenzaA__ADG58924

SEQ ID NO: 114811 - RNA, 1410 nt, Artificial Sequence; identical to SEQ ID NO: 112929
  derived and/or modified CDS sequence (opt2) from neuraminidase__InfluenzaA__ADG58925

SEQ ID NO: 114812 - RNA, 1410 nt, Artificial Sequence; identical to SEQ ID NO: 112929
  derived and/or modified CDS sequence (opt2) from neuraminidase__InfluenzaA__ADG58926

SEQ ID NO: 114813 - RNA, 1410 nt, Artificial Sequence; identical to SEQ ID NO: 112929
  derived and/or modified CDS sequence (opt2) from neuraminidase__InfluenzaA__ADG58927

SEQ ID NO: 114814 - RNA, 1410 nt, Artificial Sequence; identical to SEQ ID NO: 113792
  derived and/or modified CDS sequence (opt2) from neuraminidase__InfluenzaA__ADG58928

SEQ ID NO: 114815 - RNA, 1410 nt, Artificial Sequence; identical to SEQ ID NO: 113792
  derived and/or modified CDS sequence (opt2) from neuraminidase__InfluenzaA__ADG58929

SEQ ID NO: 114816 - RNA, 1410 nt, Artificial Sequence
  derived and/or modified CDS sequence (opt2) from neuraminidase__InfluenzaA__ADG58931
augaaccccaaccagaagaucaucaccaucggcuccgucugcaugaccaucggcauggccaaccucauccuccagaucggcaacaccaucuccaucuggaucaaccacuccauccagcucggcaaccagaaccagaucgagaccugcaaccaguccgucaucaccuacgagaacaacaccugggucaaccagaccuacgucaacaucuccaacaccaacuucgccgccggccaguccgucgucuccgucaagcucgccggcaacuccucccucugccccgucuccggcugggccaucuacuccaaggacaacuccauccgcaucggcuccaagggcgacgucuucgucauccgcgagcccuucaucuccugcuccccccucgagugccgcaccuucuuccucacccagggcgcccuccucaacgacaagcacuccaacggcaccaucaaggaccgcucccccuaccgcacccucauguccugccccaucggcgagguccccucccccuacaacucccgcuucgaguccgucgccugguccgccuccgccugccacgacggcaucaacuggcucaccaucggcaucuccggccccgacaacggcgccgucgccguccucaaguacaacggcaucaucaccgacaccaucaaguccuggcgcaacaacauccuccgcacccaggaguccgagugcgccugcgucaacggcuccugcuucaccgucaugaccgacggccccuccgacggccaggccuccuacaagaucuuccgcaucgagaagggcaagaucgucaaguccgucgagaugaacgcccccaacuaccacuacgaggagugcuccugcuaccccgacuccuccgagaucaccugcgucugccgcgacaacuggcacggcuccaaccgccccugggucuccuucaaccagaaccucgaguaccagaucggcuacaucugcuccggcaucuucggcgacaacccccgccccaacgacaagaccggcuccugcggccccgucuccuccaacggcgccaacggcgucaagggcuucuccuucaaguacggcaacggcgucuggaucggccgcaccaaguccaucuccucccgcaacggcuucgagaugaucugggaccccaacggcuggaccggcaccgacaacaacuucuccaucaagcaggacaucgucggcaucaacgagugguccggcuacuccggcuccuucguccagcaccccgagcucaccggccucgacugcauccgccccugcuucugggucgagcucauccgcggccgccccaaggagaacaccaucuggaccuccggcuccuccaucuccuucugcggcgucaacuccgacaccgucggcugguccuggcccgacggcgccgagcuccccuucaccaucgacaaguga

SEQ ID NO: 114817 - RNA, 1410 nt, Artificial Sequence; identical to SEQ ID NO: 114816
  derived and/or modified CDS sequence (opt2) from neuraminidase__InfluenzaA__ADG58932

SEQ ID NO: 114818 - RNA, 1410 nt, Artificial Sequence; identical to SEQ ID NO: 114816
  derived and/or modified CDS sequence (opt2) from neuraminidase__InfluenzaA__ADG58933

SEQ ID NO: 114819 - RNA, 1410 nt, Artificial Sequence; identical to SEQ ID NO: 114816
  derived and/or modified CDS sequence (opt2) from neuraminidase__InfluenzaA__ADG58934

SEQ ID NO: 114820 - RNA, 1410 nt, Artificial Sequence; identical to SEQ ID NO: 114816
  derived and/or modified CDS sequence (opt2) from neuraminidase__InfluenzaA__ADG58935

SEQ ID NO: 114821 - RNA, 1410 nt, Artificial Sequence; identical to SEQ ID NO: 114816
  derived and/or modified CDS sequence (opt2) from neuraminidase__InfluenzaA__ADG58936

SEQ ID NO: 114822 - RNA, 1410 nt, Artificial Sequence; identical to SEQ ID NO: 114816
  derived and/or modified CDS sequence (opt2) from neuraminidase__InfluenzaA__ADG58937

SEQ ID NO: 114823 - RNA, 1410 nt, Artificial Sequence; identical to SEQ ID NO: 114816
  derived and/or modified CDS sequence (opt2) from neuraminidase__InfluenzaA__ADG58938

SEQ ID NO: 114824 - RNA, 1410 nt, Artificial Sequence
  derived and/or modified CDS sequence (opt2) from neuraminidase__InfluenzaA__ADG59589
augaaccccaaccagaagaucaucaccaucggcuccgucugcaugaccaucggcauggccaaccucauccuccagaucggcaacaucaucuccaucuggaucucccacuccauccagcucggcaaccagaaccagaucgagaccugcaaccaguccgucaucaccuacgagaacaacaccugggucaaccagaccuacgucaacaucuccaacaccaacuucgccgccggccaguccgucgucuccgucaagcucgccggcaacuccucccucugccccgucuccggcugggccaucuacuccaaggacaacuccauccgcaucggcuccaagggcgacgucuucgucauccgcgagcccuucaucuccugcuccccccucgagugccgcaccuucuuccucacccagggcgcccuccucaacgacaagcacuccaacggcaccaucaaggaccgcucccccuaccgcacccucauguccugccccaucggcgagguccccucccccuacaacucccgcuucgaguccgucgccugguccgccuccgccugccacgacggcaucaacuggcucaccaucggcaucuccggccccgacaacggcgccauggccguccucaaguacaacggcaucaucaccgacaccaucaaguccuggcgcaacaacauccuccgcacccaggaguccgagugcgccugcgucaacggcuccugcuucaccgucaugaccgacggccccuccgacggccaggccuccuacaagaucuuccgcaucgagaagggcaaggucgucaaguccgucgagaugaacgcccccaacuaccacuacgaggagugcuccugcuaccccgacuccuccgagaucaccugcgucugccgcgacaacuggcacggcuccaaccgccccugggucuccuucaaccagaaccucgaguaccagaucggcuacaucugcuccggcaucuucggcgacaacccccgccccaacgacaagaccggcuccugcggccccgucuccuccaacggcgccaacggcgucaagggcuucuccuucaaguacggcaacggcgucuggaucggccgcaccaaguccaucuccucccgcaacggcuucgagaugaucugggaccccaacggcuggaccggcaccgacaacaacuucuccaucaagcaggacaucgucggcaucaacgagugguccggcuacuccggcuccuucguccagcaccccgagcucaccggccucgacugcauccgccccugcuucugggucgagcucauccgcggccgccccaaggagaacaccaucuggaccuccggcuccuccaucuccuucugcggcgucaacuccgacaccgucggcugguccuggcccgacggcgccgagcuccccuucaccaucgacaaguga

SEQ ID NO: 114825 - RNA, 1410 nt, Artificial Sequence; identical to SEQ ID NO: 112774
  derived and/or modified CDS sequence (opt2) from neuraminidase__InfluenzaA__ADG59590

SEQ ID NO: 114826 - RNA, 1410 nt, Artificial Sequence; identical to SEQ ID NO: 112774
  derived and/or modified CDS sequence (opt2) from neuraminidase__InfluenzaA__ADG59591

SEQ ID NO: 114827 - RNA, 1410 nt, Artificial Sequence; identical to SEQ ID NO: 112774
  derived and/or modified CDS sequence (opt2) from neuraminidase__InfluenzaA__ADG59592

SEQ ID NO: 114828 - RNA, 1410 nt, Artificial Sequence; identical to SEQ ID NO: 114676
  derived and/or modified CDS sequence (opt2) from neuraminidase__InfluenzaA__ADG59593

SEQ ID NO: 114829 - RNA, 1410 nt, Artificial Sequence; identical to SEQ ID NO: 113951
  derived and/or modified CDS sequence (opt2) from neuraminidase__InfluenzaA__ADG59594

SEQ ID NO: 114830 - RNA, 1410 nt, Artificial Sequence; identical to SEQ ID NO: 113951
  derived and/or modified CDS sequence (opt2) from neuraminidase__InfluenzaA__ADG59595

SEQ ID NO: 114831 - RNA, 1410 nt, Artificial Sequence
  derived and/or modified CDS sequence (opt2) from neuraminidase__InfluenzaA__ADG59596
augaaccccaaccagaagaucaucaccaucggcuccgucugcaugaccaucggcauggccaaccucauccuccagaucggcaacaucaucuccaucuggaucucccacuccauccagcucggcaaccagaaccagaucgagaccugcaaccaguccgucaucaccuacgagaacaacaccugggucaaccagaccuacgucaacaucuccaacaccaacuucgccgccggccaguccgucgucuccgucaagcucgccggcaacuccucccucugccccgucuccggcugggccaucuacuccaaggacaacuccauccgcaucggcuccaagggcgacgucuucgucauccgcgagcccuucaucuccugcuccccccucgagugccgcaccuucuuccucacccagggcgcccuccucaacgacaagcacuccaacggcaccaucaaggaccgcucccccuaccgcacccucauguccugccccaucggcgagguccccucccccuacaacucccgcuucgaguccgucgccugguccgccuccgccugccacgacggcaucaacuggcucaccaucggcaucuccggccccgacaacggcgccgucgccguccucaaguacaacggcaucaucaccgacaccaucaaguccuggcgcaacaacauccuccgcacccaggaguccgagugcgccugcgucaacggcuccugcuucaccgucaugaccgacggccccuccgacggccaggccuccuacaagaucuuccgcaucgagaagggcaagaucgucaaguccgucgagaugaacgcccccaacuaccacuacgaggagugcuccugcuaccccgacuccuccgagaucaccugcgucugccgcgacaacuggcacggcuccaaccgccccugggucuccuucaaccagaaccucgaguaccagaucggcuacaucugcuccggcaucuucggcgacaacccccgccccaacgaccgcaccggcuccugcggccccgucuccuccaacggcgccaacggcgucaagggcuucuccuucaaguacggcaacggcgucuggaucggccgcaccaaguccaucuccucccgcaacggcuucgagaugaucugggaccccaacggcuggaccggcaccgacaacaacuucuccaucaagcaggacaucgucggcaucaacgagugguccggcuacuccggcuccuucguccagcaccccgagcucaccggccucgacugcauccgccccugcuucugggucgagcucauccgcggccgccccaaggagaacaccaucuggaccuccggcuccuccaucuccuucugcggcgucaacuccgacaccgucggcugguccuggcccgacggcgccgagcuccccuucaccaucgacaaguga

SEQ ID NO: 114832 - RNA, 1410 nt, Artificial Sequence; identical to SEQ ID NO: 112774
  derived and/or modified CDS sequence (opt2) from neuraminidase__InfluenzaA__ADG59597

SEQ ID NO: 114833 - RNA, 1410 nt, Artificial Sequence; identical to SEQ ID NO: 112774
  derived and/or modified CDS sequence (opt2) from neuraminidase__InfluenzaA__ADG59598

SEQ ID NO: 114834 - RNA, 1410 nt, Artificial Sequence; identical to SEQ ID NO: 113949
  derived and/or modified CDS sequence (opt2) from neuraminidase__InfluenzaA__ADG59599

SEQ ID NO: 114835 - RNA, 1410 nt, Artificial Sequence; identical to SEQ ID NO: 112774
  derived and/or modified CDS sequence (opt2) from neuraminidase__InfluenzaA__ADG59601

SEQ ID NO: 114836 - RNA, 1410 nt, Artificial Sequence; identical to SEQ ID NO: 114676
  derived and/or modified CDS sequence (opt2) from neuraminidase__InfluenzaA__ADG59602

SEQ ID NO: 114837 - RNA, 1410 nt, Artificial Sequence; identical to SEQ ID NO: 114676
  derived and/or modified CDS sequence (opt2) from neuraminidase__InfluenzaA__ADG59603

SEQ ID NO: 114838 - RNA, 1410 nt, Artificial Sequence; identical to SEQ ID NO: 112774
  derived and/or modified CDS sequence (opt2) from neuraminidase__InfluenzaA__ADG59604

SEQ ID NO: 114839 - RNA, 1410 nt, Artificial Sequence; identical to SEQ ID NO: 112774
  derived and/or modified CDS sequence (opt2) from neuraminidase__InfluenzaA__ADG59605

SEQ ID NO: 114840 - RNA, 1410 nt, Artificial Sequence; identical to SEQ ID NO: 113792
  derived and/or modified CDS sequence (opt2) from neuraminidase__InfluenzaA__ADG59606

SEQ ID NO: 114841 - RNA, 1410 nt, Artificial Sequence; identical to SEQ ID NO: 112774
  derived and/or modified CDS sequence (opt2) from neuraminidase__InfluenzaA__ADG59607

SEQ ID NO: 114842 - RNA, 1410 nt, Artificial Sequence; identical to SEQ ID NO: 112774
  derived and/or modified CDS sequence (opt2) from neuraminidase__InfluenzaA__ADG59608

SEQ ID NO: 114843 - RNA, 1410 nt, Artificial Sequence; identical to SEQ ID NO: 113595
  derived and/or modified CDS sequence (opt2) from neuraminidase__InfluenzaA__ADG59609

SEQ ID NO: 114844 - RNA, 1410 nt, Artificial Sequence; identical to SEQ ID NO: 114676
  derived and/or modified CDS sequence (opt2) from neuraminidase__InfluenzaA__ADG59610

SEQ ID NO: 114845 - RNA, 1410 nt, Artificial Sequence; identical to SEQ ID NO: 113792
  derived and/or modified CDS sequence (opt2) from neuraminidase__InfluenzaA__ADG59611

SEQ ID NO: 114846 - RNA, 1410 nt, Artificial Sequence; identical to SEQ ID NO: 114676
  derived and/or modified CDS sequence (opt2) from neuraminidase__InfluenzaA__ADG59612

SEQ ID NO: 114847 - RNA, 1410 nt, Artificial Sequence
  derived and/or modified CDS sequence (opt2) from neuraminidase__InfluenzaA__ADG59613
augaaccccaaccagaagaucaucaccaucggcuccgucugcaugaccaucggcaugaccaaccucauccuccagcucggcaacaucaucuccaucuggaucucccacuccauccagcucggcaaccagaaccagaucgagaccugcaaccaguccgucaucaccuacgagaacaacaccugggucaaccagaccuacgucaacaucuccaacaccaacuucgccgccggccaguccgucgucuccgucaagcucgccggcaacuccucccucugccccgucuccggcugggccaucuacuccaaggacaacuccauccgcaucggcuccaagggcgacgucuucgucauccgcgagcccuucaucuccugcuccccccucgagugccgcaccuucuuccucacccagggcgcccuccucaacgacaagcacuccaacggcaccaucaaggaccgcucccccuaccgcacccucauguccugccccaucggcgagguccccucccccuacaacucccgcuucgaguccgucgccugguccgccuccgccugccacgacggcaucaacuggcucaccaucggcaucuccggccccgacaacggcgccgucgccguccucaaguacaacggcaucaucaccgacaccaucaaguccuggcgcaacaacauccuccgcacccaggaguccgagugcgccugcgucaacggcuccugcuucaccgucaugaccgacggccccuccgacggccaggccuccuacaagaucuuccgcaucgagaagggcaagaucgucaaguccgucgagaugaacgcccccaacuaccacuacgaggagugcuccugcuaccccgacuccuccgagaucaccugcgucugccgcgacaacuggcacggcuccaaccgccccugggucuccuucaaccagaaccucgaguaccagaucggcuacaucugcuccggcaucuucggcgacaacccccgccccaacgacaagaccggcuccugcggccccgucuccuccaacggcgccaacggcgucaagggcuucuccuucaaguacggcaacggcgucuggaucggccgcaccaaguccaucuccucccgcaacggcuucgagaugaucugggaccccaacggcuggaccggcaccgacaacuccuucuccaucaagcaggacaucgucggcaucaacgagugguccggcuacuccggcuccuucguccagcaccccgagcucaccggccucgacugcauccgccccugcuucugggucgagcucauccgcggccgccccaaggagaacaccgucuggaccuccggcuccuccaucuccuucugcggcgucaacuccgacaccgucggcugguccuggcccgacggcgccgagcuccccuucaccaucgacaaguga

SEQ ID NO: 114848 - RNA, 1410 nt, Artificial Sequence; identical to SEQ ID NO: 113949
  derived and/or modified CDS sequence (opt2) from neuraminidase__InfluenzaA__ADG59614

SEQ ID NO: 114849 - RNA, 1410 nt, Artificial Sequence; identical to SEQ ID NO: 112774
  derived and/or modified CDS sequence (opt2) from neuraminidase__InfluenzaA__ADH01811

SEQ ID NO: 114850 - RNA, 1410 nt, Artificial Sequence; identical to SEQ ID NO: 112774
  derived and/or modified CDS sequence (opt2) from neuraminidase__InfluenzaA__ADH01821

SEQ ID NO: 114851 - RNA, 1410 nt, Artificial Sequence; identical to SEQ ID NO: 112774
  derived and/or modified CDS sequence (opt2) from neuraminidase__InfluenzaA__ADH01831

SEQ ID NO: 114852 - RNA, 1410 nt, Artificial Sequence; identical to SEQ ID NO: 112774
  derived and/or modified CDS sequence (opt2) from neuraminidase__InfluenzaA__ADH01841

SEQ ID NO: 114853 - RNA, 1410 nt, Artificial Sequence; identical to SEQ ID NO: 112774
  derived and/or modified CDS sequence (opt2) from neuraminidase__InfluenzaA__ADH01851

SEQ ID NO: 114854 - RNA, 1410 nt, Artificial Sequence; identical to SEQ ID NO: 112774
  derived and/or modified CDS sequence (opt2) from neuraminidase__InfluenzaA__ADH01861

SEQ ID NO: 114855 - RNA, 1410 nt, Artificial Sequence; identical to SEQ ID NO: 112774
  derived and/or modified CDS sequence (opt2) from neuraminidase__InfluenzaA__ADH01871

SEQ ID NO: 114856 - RNA, 1410 nt, Artificial Sequence; identical to SEQ ID NO: 112774
  derived and/or modified CDS sequence (opt2) from neuraminidase__InfluenzaA__ADH01881

SEQ ID NO: 114857 - RNA, 1410 nt, Artificial Sequence; identical to SEQ ID NO: 112774
  derived and/or modified CDS sequence (opt2) from neuraminidase__InfluenzaA__ADH01891

SEQ ID NO: 114858 - RNA, 1410 nt, Artificial Sequence; identical to SEQ ID NO: 112774
  derived and/or modified CDS sequence (opt2) from neuraminidase__InfluenzaA__ADH01901

SEQ ID NO: 114859 - RNA, 1410 nt, Artificial Sequence; identical to SEQ ID NO: 112774
  derived and/or modified CDS sequence (opt2) from neuraminidase__InfluenzaA__ADH01911

SEQ ID NO: 114860 - RNA, 1410 nt, Artificial Sequence; identical to SEQ ID NO: 112774
  derived and/or modified CDS sequence (opt2) from neuraminidase__InfluenzaA__ADH01921

SEQ ID NO: 114861 - RNA, 1410 nt, Artificial Sequence; identical to SEQ ID NO: 112774
  derived and/or modified CDS sequence (opt2) from neuraminidase__InfluenzaA__ADH01931

SEQ ID NO: 114862 - RNA, 1410 nt, Artificial Sequence; identical to SEQ ID NO: 114665
  derived and/or modified CDS sequence (opt2) from neuraminidase__InfluenzaA__ADH01941

SEQ ID NO: 114863 - RNA, 1410 nt, Artificial Sequence; identical to SEQ ID NO: 112774
  derived and/or modified CDS sequence (opt2) from neuraminidase__InfluenzaA__ADH01951

SEQ ID NO: 114864 - RNA, 1410 nt, Artificial Sequence; identical to SEQ ID NO: 112774
  derived and/or modified CDS sequence (opt2) from neuraminidase__InfluenzaA__ADH01961

SEQ ID NO: 114865 - RNA, 1410 nt, Artificial Sequence
  derived and/or modified CDS sequence (opt2) from neuraminidase__InfluenzaA__ADH01981
augaaccccaaccagaagaucaucaccaucggcuccgccugcaugaccaucggcauggccaaccucauccuccagaucggcaacaucaucuccaucuggaucucccacuccauccagcucggcaaccagaaccagaccgagaccugcaaccaguccgucaucaccuacgagaacaacaccugggucaaccagaccuacgucaacaucuccaacaccaacuucgccgccggccaguccgucgucuccgucaagcucgccggcaacuccucccucugccccgucuccggcugggccaucuacuccaaggacaacuccauccgcaucggcuccaagggcgacgucuucgucauccgcgagcccuucaucuccugcuccccccucgagugccgcaccuucuuccucacccagggcgcccuccucaacgacaagcacuccaacggcaccaucaaggaccgcucccccuaccgcacccucauguccugccccaucggcgagguccccucccccuacaacucccgcuucgaguccgucgccugguccgccuccgccugccacgacggcaucaacuggcucaccaucggcaucuccggccccgacaacggcgccgucgccguccucaaguacaacggcaucaucaccgacaccaucaaguccuggcgcaacaacauccuccgcacccaggaguccgagugcgccugcgucaacggcuccugcuucaccgucaugaccgacggccccuccgacggccaggccuccuacaagaucuuccgcaucgagaagggcaagaucgucaaguccgucgagaugaacgcccccaacuaccacuacgaggagugcuccugcuaccccgacuccuccgagaucaccugcgucugccgcgacaacuggcacggcuccaaccgccccugggucuccuucaaccagaaccucgaguaccagaucggcuacaucugcuccggcaucuucggcgacaacccccgccccaacgacaagaccggcuccugcggccccgucuccuccaacggcgccaacggcgucaagggcuucuccuucaaguacggcaacggcgucuggaucggccgcaccaaguccaucuccucccgcaacggcuucgagaugaucugggaccccaacggcuggaccggcaccgacaacaacuucuccaucaagcaggacaucgucggcaucaacgagugguccggcuacuccggcuccuucguccagcaccccgagcucaccggccucgacugcauccgccccugcuucugggucgagcucauccgcggccgccccaaggagaacaccaucuggaccuccggcuccuccaucuccuucugcggcgucaacuccgacaccgucggcugguccuggcccgacggcgccgagcuccccuucaccaucgacaaguga

SEQ ID NO: 114866 - RNA, 1410 nt, Artificial Sequence; identical to SEQ ID NO: 114062
  derived and/or modified CDS sequence (opt2) from neuraminidase__InfluenzaA__ADH01991

SEQ ID NO: 114867 - RNA, 1410 nt, Artificial Sequence; identical to SEQ ID NO: 114731
  derived and/or modified CDS sequence (opt2) from neuraminidase__InfluenzaA__ADH02011

SEQ ID NO: 114868 - RNA, 1410 nt, Artificial Sequence; identical to SEQ ID NO: 113951
  derived and/or modified CDS sequence (opt2) from neuraminidase__InfluenzaA__ADH02021

SEQ ID NO: 114869 - RNA, 1410 nt, Artificial Sequence; identical to SEQ ID NO: 112774
  derived and/or modified CDS sequence (opt2) from neuraminidase__InfluenzaA__ADI24510

SEQ ID NO: 114870 - RNA, 1410 nt, Artificial Sequence; identical to SEQ ID NO: 112774
  derived and/or modified CDS sequence (opt2) from neuraminidase__InfluenzaA__ADI24516

SEQ ID NO: 114871 - RNA, 1410 nt, Artificial Sequence; identical to SEQ ID NO: 112774
  derived and/or modified CDS sequence (opt2) from neuraminidase__InfluenzaA__ADI24518

SEQ ID NO: 114872 - RNA, 1410 nt, Artificial Sequence; identical to SEQ ID NO: 112774
  derived and/or modified CDS sequence (opt2) from neuraminidase__InfluenzaA__ADI24522

SEQ ID NO: 114873 - RNA, 1410 nt, Artificial Sequence; identical to SEQ ID NO: 112774
  derived and/or modified CDS sequence (opt2) from neuraminidase__InfluenzaA__ADI24524

SEQ ID NO: 114874 - RNA, 1410 nt, Artificial Sequence; identical to SEQ ID NO: 112774
  derived and/or modified CDS sequence (opt2) from neuraminidase__InfluenzaA__ADI24526

SEQ ID NO: 114875 - RNA, 1410 nt, Artificial Sequence; identical to SEQ ID NO: 112774
  derived and/or modified CDS sequence (opt2) from neuraminidase__InfluenzaA__ADI24528

SEQ ID NO: 114876 - RNA, 1410 nt, Artificial Sequence; identical to SEQ ID NO: 112774
  derived and/or modified CDS sequence (opt2) from neuraminidase__InfluenzaA__ADI24530

SEQ ID NO: 114877 - RNA, 1410 nt, Artificial Sequence
  derived and/or modified CDS sequence (opt2) from neuraminidase__InfluenzaA__ADI24532
augaaccccaaccagaagaucaucaccaucggcuccgucugcaugaccaucggcauggccaaccucauccuccagaucggcaacaucaucuccaucuggaucucccacuccauccagcucggcaaccagaaccagaucgagaccugcaaccaguccgucaucaccuacgagaacaacaccugggucaaccagaccuacgucaacaucuccaacaccaacuucgccgccggccaguccgucgucuccgucaagcucgccggcaacuccucccucugccccgucuccggcugggccaucuacuccaaggacaacuccauccgcaucggcuccaagggcgacgucuucgucauccgcgagcccuucaucuccugcuccccccucgagugccgcaccuucuuccucacccagggcgcccuccucaacgacaagcacuccaacggcaccaucaaggaccgcucccccuaccgcacccucauguccugccccaucggcgagguccccucccccuacaacucccgcuucgaguccgucgccugguccgccuccgccugccacgacggcaucaacuggcucaccaucggcaucuccggccccgacaacggcgccgucgccguccucaaguacaacggcaucaucaccgacaccaucaaguccuggcgcaacaacauccuccgcacccaggaguccgagugcgccugcgucaacggcuccugcuucaccgucaugaccgacggccccuccgacggccaggccuccuacaagaucuuccgcaucgagaagggcaagaucgucaaguccgucgagaugaacgcccccaacuaccacuacgaggagugcuccugcuaccccgacuccuccgagaucaccugcgucugccgcgacaacuggcacggcuccaaccgccccugggucuccuucaaccagaaccucgaguaccagaucggcuacaucugcuccggcaucuucggcgacaacccccgccccaacgacaagaccggcuccugcggccccgucuccuccuccggcgccaacggcgucaagggcuucuccuucaaguacggcaacggcgucuggaucggccgcaccaaguccaucuccucccgcaacggcuucgagaugaucugggaccccaacggcuggaccggcaccgacaacaacuucuccaucaagcaggacaucgucggcaucaacgagugguccggcuacuccggcuccuucguccagcaccccgagcucaccggccucgacugcauccgccccugcuucugggucgagcucauccgcggccgccccaaggagaacaccaucuggaccuccggcuccuccaucuccuucugcggcgucaacuccgacaccgucggcugguccuggcccgacggcgccgagcuccccuucaccaucgacaaguga

SEQ ID NO: 114878 - RNA, 1410 nt, Artificial Sequence; identical to SEQ ID NO: 112774
  derived and/or modified CDS sequence (opt2) from neuraminidase__InfluenzaA__ADI24538

SEQ ID NO: 114879 - RNA, 1410 nt, Artificial Sequence; identical to SEQ ID NO: 112774
  derived and/or modified CDS sequence (opt2) from neuraminidase__InfluenzaA__ADI24548

SEQ ID NO: 114880 - RNA, 1410 nt, Artificial Sequence; identical to SEQ ID NO: 112774
  derived and/or modified CDS sequence (opt2) from neuraminidase__InfluenzaA__ADI24556

SEQ ID NO: 114881 - RNA, 1410 nt, Artificial Sequence; identical to SEQ ID NO: 112774
  derived and/or modified CDS sequence (opt2) from neuraminidase__InfluenzaA__ADI24558

SEQ ID NO: 114882 - RNA, 1410 nt, Artificial Sequence; identical to SEQ ID NO: 112774
  derived and/or modified CDS sequence (opt2) from neuraminidase__InfluenzaA__ADI24560

SEQ ID NO: 114883 - RNA, 1410 nt, Artificial Sequence; identical to SEQ ID NO: 112774
  derived and/or modified CDS sequence (opt2) from neuraminidase__InfluenzaA__ADI24562

SEQ ID NO: 114884 - RNA, 1410 nt, Artificial Sequence; identical to SEQ ID NO: 112774
  derived and/or modified CDS sequence (opt2) from neuraminidase__InfluenzaA__ADI24564

SEQ ID NO: 114885 - RNA, 1410 nt, Artificial Sequence; identical to SEQ ID NO: 112774
  derived and/or modified CDS sequence (opt2) from neuraminidase__InfluenzaA__ADI24566

SEQ ID NO: 114886 - RNA, 1410 nt, Artificial Sequence; identical to SEQ ID NO: 112774
  derived and/or modified CDS sequence (opt2) from neuraminidase__InfluenzaA__ADI24568

SEQ ID NO: 114887 - RNA, 1410 nt, Artificial Sequence; identical to SEQ ID NO: 112774
  derived and/or modified CDS sequence (opt2) from neuraminidase__InfluenzaA__ADI24570

SEQ ID NO: 114888 - RNA, 1410 nt, Artificial Sequence; identical to SEQ ID NO: 112774
  derived and/or modified CDS sequence (opt2) from neuraminidase__InfluenzaA__ADI24572

SEQ ID NO: 114889 - RNA, 1410 nt, Artificial Sequence; identical to SEQ ID NO: 112774
  derived and/or modified CDS sequence (opt2) from neuraminidase__InfluenzaA__ADI24574

SEQ ID NO: 114890 - RNA, 1410 nt, Artificial Sequence; identical to SEQ ID NO: 112774
  derived and/or modified CDS sequence (opt2) from neuraminidase__InfluenzaA__ADI24576

SEQ ID NO: 114891 - RNA, 1410 nt, Artificial Sequence; identical to SEQ ID NO: 112774
  derived and/or modified CDS sequence (opt2) from neuraminidase__InfluenzaA__ADI24580

SEQ ID NO: 114892 - RNA, 1410 nt, Artificial Sequence; identical to SEQ ID NO: 113949
  derived and/or modified CDS sequence (opt2) from neuraminidase__InfluenzaA__ADI24582

SEQ ID NO: 114893 - RNA, 1410 nt, Artificial Sequence
  derived and/or modified CDS sequence (opt2) from neuraminidase__InfluenzaA__ADI24584
augaaccccaaccagaagaucaucaccaucggcuccgucugcaugaccaucggcauggccaaccucauccuccagaucggcaacaucaucuccaucuggaucucccacuccauccagcucggcaaccagaaccagaucgagaccugcaaccaguccgucaucaccuacgagaacaacaccugggucaaccagaccuacgucaacaucuccaacaccaacuucgccgccggccaguccgucguccccgucaagcucgccggcaacuccucccucugccccgucaacggcugggccaucuacuccaaggacaacuccauccgcaucggcuccaagggcgacgucuucgucauccgcgagcccuucaucuccugcuccccccucgagugccgcaccuucuuccucacccagggcgcccuccucaacgacaagcacuccaacggcaccaucaaggaccgcucccccuaccgcacccucauguccugccccaucggcgagguccccucccccuacaacucccgcuucgaguccgucgccugguccgccuccgccugccacgacggcaucaacuggcucaccaucggcaucuccggccccgacaacggcgccgucgccguccucaaguacaacggcaucaucaccgacaccaucaaguccuggcgcaacaacauccuccgcacccaggaguccgagugcgccugcgucaacggcuccugcuucaccgucaugaccgacggccccuccgacggccaggccuccuacaagaucuuccgcaucgagaagggcaagaucgucaaguccgucgagaugaacgcccccaacuaccacuacgaggagugcuccugcuaccccgacuccuccgagaucaccugcgucugccgcgacaacuggcacggcuccaaccgccccugggucuccuucaaccagaaccucgaguaccagaucggcuacaucugcuccggcaucuucggcgacaacccccgccccaacgacaagaccggcuccugcggccccgucuccuccaacggcgccaacggcgucaagggcuucuccuucaaguacggcaacggcgucuggaucggccgcaccaaguccaucuccucccgcaacggcuucgagaugaucugggaccccaacggcuggaccggcaccgacaacaacuucuccaucaagcaggacaucgucggcaucaacgagugguccggcuacuccggcuccuucguccagcaccccgagcucaccggccucgacugcauccgccccugcuucugggucgagcucauccgcggccgccccaaggagaacaccaucuggaccuccggcuccuccaucuccuucugcggcgucaacuccgacaccgucggcugguccuggcccgacggcgccgagcuccccuucaccaucgacaaguga

SEQ ID NO: 114894 - RNA, 1410 nt, Artificial Sequence; identical to SEQ ID NO: 113128
  derived and/or modified CDS sequence (opt2) from neuraminidase__InfluenzaA__ADI24592

SEQ ID NO: 114895 - RNA, 1410 nt, Artificial Sequence; identical to SEQ ID NO: 112774
  derived and/or modified CDS sequence (opt2) from neuraminidase__InfluenzaA__ADI24598

SEQ ID NO: 114896 - RNA, 1410 nt, Artificial Sequence; identical to SEQ ID NO: 112774
  derived and/or modified CDS sequence (opt2) from neuraminidase__InfluenzaA__ADI24604

SEQ ID NO: 114897 - RNA, 1410 nt, Artificial Sequence; identical to SEQ ID NO: 112774
  derived and/or modified CDS sequence (opt2) from neuraminidase__InfluenzaA__ADI24620

SEQ ID NO: 114898 - RNA, 1410 nt, Artificial Sequence; identical to SEQ ID NO: 112774
  derived and/or modified CDS sequence (opt2) from neuraminidase__InfluenzaA__ADI24622

SEQ ID NO: 114899 - RNA, 1410 nt, Artificial Sequence; identical to SEQ ID NO: 113128
  derived and/or modified CDS sequence (opt2) from neuraminidase__InfluenzaA__ADI46780

SEQ ID NO: 114900 - RNA, 1410 nt, Artificial Sequence
  derived and/or modified CDS sequence (opt2) from neuraminidase__InfluenzaA__ADI46789
augaaccccaaccagaagaucaucaccaucggcuccgucugcaugaccaucggcauggccaaccucaugcuccagaucggcaacaucaucuccaucuggaucucccacuccauccagcucggcaaccagaaccagaucgagaccugcaaccaguccgucaucaccuacgagaacaacaccugggucaaccagaccuacgucaacaucuccaacaccaacuucgccgccggccaguccgucgucuccgucaagcucgccggcaacuccucccucugccccgucuccggcugggccaucuacuccaaggacaacuccguccgcaucggcuccaagggcgacgucuucgucauccgcgagcccuucaucuccugcuccccccucgagugccgcaccuucuuccucacccagggcgcccuccucaacgacaagcacuccaacggcaccaucaaggaccgcucccccuaccgcacccucauguccugccccaucggcgagguccccucccccuacaacucccgcuucgaguccgucgccugguccgccuccgccugccacgacggcaucaacuggcucaccaucggcaucuccggccccgacaacggcgccgucgccguccucaaguacaacggcaucaucaccgacaccaucaaguccuggcgcaacaacauccuccgcacccaggaguccgagugcgccugcgucaacggcuccugcuucaccgucaugaccgacggccccuccaacgagcaggccuccuacaagaucuuccgcaucgagaagggcaagaucgucaaguccgucgagaugaacgcccccaacuaccacuacgaggagugcuccugcuaccccgacuccuccgagaucaccugcgucugccgcgacaacuggcacggcuccaaccgccccugggucuccuucaaccagaaccucgaguaccagaucggcuacaucugcuccggcaucuucggcgacaacccccgccccaacgacaagaccggcuccugcggccccgucuccuccaacggcgccaacggcgucaagggcuucuccuucaaguacggcaacggcgucuggaucggccgcaccaaguccaucuccucccgcaacggcuucgagaugaucugggaccccaacggcuggaccggcaccgacaacaacuucuccaucaagcaggacaucgucggcaucaacgagugguccggcuacuccggcuccuucguccagcaccccgagcucaccggccucgacugcauccgccccugcuucugggucgagcucauccgcggccgccccaaggagaacaccaucuggaccuccggcuccuccaucuccuucugcggcgucaacuccgacaccgucggcugguccuggcccgacggcgccgagcuccccuucaccaucgacaaguga

SEQ ID NO: 114901 - RNA, 1410 nt, Artificial Sequence; identical to SEQ ID NO: 112774
  derived and/or modified CDS sequence (opt2) from neuraminidase__InfluenzaA__ADI48185

SEQ ID NO: 114902 - RNA, 1410 nt, Artificial Sequence; identical to SEQ ID NO: 112774
  derived and/or modified CDS sequence (opt2) from neuraminidase__InfluenzaA__ADI48187

SEQ ID NO: 114903 - RNA, 1410 nt, Artificial Sequence; identical to SEQ ID NO: 112774
  derived and/or modified CDS sequence (opt2) from neuraminidase__InfluenzaA__ADI48189

SEQ ID NO: 114904 - RNA, 1410 nt, Artificial Sequence; identical to SEQ ID NO: 112774
  derived and/or modified CDS sequence (opt2) from neuraminidase__InfluenzaA__ADI48191

SEQ ID NO: 114905 - RNA, 1410 nt, Artificial Sequence; identical to SEQ ID NO: 112774
  derived and/or modified CDS sequence (opt2) from neuraminidase__InfluenzaA__ADI48193

SEQ ID NO: 114906 - RNA, 1410 nt, Artificial Sequence; identical to SEQ ID NO: 112774
  derived and/or modified CDS sequence (opt2) from neuraminidase__InfluenzaA__ADI48195

SEQ ID NO: 114907 - RNA, 1410 nt, Artificial Sequence
  derived and/or modified CDS sequence (opt2) from neuraminidase__InfluenzaA__ADI48197
augaaccccaaccagaagaucaucaccaucggcuccgucugcaugaccaucggcauggccaaccucauccuccagaucggcaacaucaucuccaucuggaucucccacuccauccaguucggcaaccagaaccagaucgagaccugcaaccaguccgucaucaccuacgagaacaacaccugggucaaccagaccuacgucaacaucuccaacaccaacuucgccgccggccaguccgucgucuccgucaagcucgccggcaacuccucccucugccccgucuccggcugggccaucuacuccaaggacaacuccauccgcaucggcuccaagggcgacgucuucgucauccgcgagcccuucaucuccugcuccccccucgagugccgcaccuucuuccucacccagggcgcccuccucaacgacaagcacuccaacggcaccaucaaggaccgcucccccuaccgcacccucauguccugccccaucggcgagguccccucccccuacaacucccgcuucgaguccgucgccugguccgccuccgccugccacgacggcaucaacuggcucaccaucggcaucuccggccccgacaacggcgccgucgccguccucaaguacaacggcaucaucaccgacaccaucaaguccuggcgcaacaacauccuccgcacccaggaguccgagugcgccugcgucaacggcuccugcuucaccgucaugaccgacggccccuccgacggccaggccuccuacaagaucuuccgcaucgagaagggcaagaucgucaaguccgucgagaugaacgcccccaacuaccacuacgaggagugcuccugcuaccccgacuccuccgagaucaccugcgucugccgcgacaacuggcacggcuccaaccgccccugggucuccuucaaccagaaccucgaguaccagaucggcuacaucugcuccggcaucuucggcgacaacccccgccccaacgacaagaccggcuccugcggccccgucuccuccaacggcgccaacggcgucaagggcuucuccuucaaguacggcaacggcgucuggaucggccgcaccaaguccaucuccucccgcaacggcuucgagaugaucugggaccccaacggcuggaccggcaccgacaacaacuucuccaucaagcaggacaucgucggcaucaacgagugguccggcuacuccggcuccuucguccagcaccccgagcucaccggccucgacugcauccgccccugcuucugggucgagcucauccgcggccgccccaaggagaacaccaucuggaccuccggcuccuccaucuccuucugcggcgucaacuccgacaccgucggcugguccuggcccgacggcgccgagcuccccuucaccaucgacaaguga

SEQ ID NO: 114908 - RNA, 1410 nt, Artificial Sequence; identical to SEQ ID NO: 112774
  derived and/or modified CDS sequence (opt2) from neuraminidase__InfluenzaA__ADI48199

SEQ ID NO: 114909 - RNA, 1410 nt, Artificial Sequence; identical to SEQ ID NO: 112774
  derived and/or modified CDS sequence (opt2) from neuraminidase__InfluenzaA__ADI48201

SEQ ID NO: 114910 - RNA, 1410 nt, Artificial Sequence; identical to SEQ ID NO: 112774
  derived and/or modified CDS sequence (opt2) from neuraminidase__InfluenzaA__ADI48203

SEQ ID NO: 114911 - RNA, 1410 nt, Artificial Sequence
  derived and/or modified CDS sequence (opt2) from neuraminidase__InfluenzaA__ADI48205
augaaccccaaccagaagaucaucaccaucggcuccgucugcaugaccaucggcauggccaaccucauccuccagaucggcaacaucaucuccaucuggaucucccacuccauccagcucggcaaccagaaccagaucgagaccugcaaccaguccgucaucaccuacgagaacaacaccugggucaaccagaccuacgucaacaucuccaacaccaacuucgccgccggccaguccgucgucuccgucaagcucgccggcaacuccucccucugccccgucuccggcugggccaucuacuccaaggacaacuccauccgcaucggcuccaagggcgacgucuucgucauccgcgagcccuucaucuccugcucccaccucgagugccgcaccuucuuccucacccagggcgcccuccucaacgacaagcacuccaacggcaccaucaaggaccgcucccccuaccgcacccucauguccugccccaucggcgagguccccucccccuacaacucccgcuucgaguccgucgccugguccgccuccgccugccacgacggcaucaacuggcucaccaucggcaucuccggccccgacaacggcgccgucgccguccucaaguacaacggcaucaucaccgacaccaucaaguccuggcgcaacaacauccuccgcacccaggaguccgagugcgccugcgucaacggcuccugcuucaccgucaugaccgacggccccuccgacggccaggccuccuacaagaucuuccgcaucgagaagggcaagaucgucaaguccgucgagaugaacgcccccaacuaccacuacgaggagugcuccugcuaccccgacuccuccgagaucaccugcgucugccgcgacaacuggcacggcuccaaccgccccugggucuccuucaaccagaaccucgaguaccagaucggcuacaucugcuccggcaucuucggcgacaacccccgccccaacgacaagaccggcuccugcggccccgucuccuccaacggcgccaacggcgucaagggcuucuccuucaaguacggcaacggcgucuggaucggccgcaccaaguccaucuccucccgcaacggcuucgagaugaucugggaccccaacggcuggaccggcaccgacaacaacuucuccaucaagcaggacaucgucggcaucaacgagugguccggcuacuccggcuccuucguccagcaccccgagcucaccggccucgacugcauccgccccugcuucugggucgagcucauccgcggccgccccaaggagaacaccaucuggaccuccggcuccuccaucuccuucugcggcgucaacuccgacaccgucggcugguccuggcccgacggcgccgagcuccccuucaccaucgacaaguga

SEQ ID NO: 114912 - RNA, 1410 nt, Artificial Sequence; identical to SEQ ID NO: 112774
  derived and/or modified CDS sequence (opt2) from neuraminidase__InfluenzaA__ADI48207

SEQ ID NO: 114913 - RNA, 1410 nt, Artificial Sequence; identical to SEQ ID NO: 112774
  derived and/or modified CDS sequence (opt2) from neuraminidase__InfluenzaA__ADI48209

SEQ ID NO: 114914 - RNA, 1410 nt, Artificial Sequence; identical to SEQ ID NO: 112774
  derived and/or modified CDS sequence (opt2) from neuraminidase__InfluenzaA__ADI48211

SEQ ID NO: 114915 - RNA, 1410 nt, Artificial Sequence; identical to SEQ ID NO: 112774
  derived and/or modified CDS sequence (opt2) from neuraminidase__InfluenzaA__ADI48213

SEQ ID NO: 114916 - RNA, 1410 nt, Artificial Sequence; identical to SEQ ID NO: 112774
  derived and/or modified CDS sequence (opt2) from neuraminidase__InfluenzaA__ADI48215

SEQ ID NO: 114917 - RNA, 1410 nt, Artificial Sequence; identical to SEQ ID NO: 112774
  derived and/or modified CDS sequence (opt2) from neuraminidase__InfluenzaA__ADI48217

SEQ ID NO: 114918 - RNA, 1410 nt, Artificial Sequence; identical to SEQ ID NO: 112774
  derived and/or modified CDS sequence (opt2) from neuraminidase__InfluenzaA__ADI48219

SEQ ID NO: 114919 - RNA, 1410 nt, Artificial Sequence; identical to SEQ ID NO: 112774
  derived and/or modified CDS sequence (opt2) from neuraminidase__InfluenzaA__ADI48221

SEQ ID NO: 114920 - RNA, 1410 nt, Artificial Sequence; identical to SEQ ID NO: 112774
  derived and/or modified CDS sequence (opt2) from neuraminidase__InfluenzaA__ADI48625

SEQ ID NO: 114921 - RNA, 1410 nt, Artificial Sequence; identical to SEQ ID NO: 112774
  derived and/or modified CDS sequence (opt2) from neuraminidase__InfluenzaA__ADI48635

SEQ ID NO: 114922 - RNA, 1410 nt, Artificial Sequence; identical to SEQ ID NO: 112774
  derived and/or modified CDS sequence (opt2) from neuraminidase__InfluenzaA__ADI48655

SEQ ID NO: 114923 - RNA, 1410 nt, Artificial Sequence; identical to SEQ ID NO: 112774
  derived and/or modified CDS sequence (opt2) from neuraminidase__InfluenzaA__ADI48665

SEQ ID NO: 114924 - RNA, 1410 nt, Artificial Sequence
  derived and/or modified CDS sequence (opt2) from neuraminidase__InfluenzaA__ADI48675
augaaccccaaccagaagaucaucaccaucggcuccgucugcaugaccaucggcauggccaaccucauccuccagaucggcaacaucaucuccaucuggaucucccacuccauccagcucggcaaccagaaccagaucgagaccugcaaccaguccgucaucaccuacgagaacaacaccugggucaaccagaccuacgucaacaucuccaacaccaacuucgccgccggccaguccgucgucuccgucaagcucgccggcaacuccucccucugccccgucuccggcugggccaucuacuccaaggacaacuccauccgcaucggcuccaagggcgacgucuucgucauccgcgagcccuucaucuccugcuccccccucgagugccgcaccuucuuccucacccagggcgcccuccucaacgacaagcacuccaacggcaccaucaaggaccgcucccccuaccgcacccucauguccugccccaucggcgagguccccucccccuacaacucccgcuucgaguccgucgccugguccgccuccgccugccacgacggcaucaacuggcucaccaucggcaucuccggccccgacaacggcgccgucgccguccucaaguacaacggcaucaucaccgacaccaucaaguccuggcgcaacaacauccuccgcacccaggaguccgagugcgccugcgucaacggcuccugcuucaccgucaugaccgacggccccuccgacggccaggccuccuacaagaucuuccgcaucgagaagggcaagaucgucaaguccgucgagaugaacgcccccaacuaccacuacgaggagugcuccugcuaccccgacuccuccgagaucaccugcgucugccgcgacaacuggcacggcuccaaccgccccugggucuccuucaaccagaaccucgaguaccagaucggcuacaucugcuccggcaucuucggcgacaacccccgccccaacgacaagaccggcuccugcggccccgucuccuccaacggcgccaacggcgucaagggcuucuccuucaaguacggcaacggcgucuggaucggccgcaccaaguccaucuccucccgcaacggcuucgagaugaucugggaccccaacggcuggaccggcaccgacaacaacuucuccaucaagcaggacaucgucggcaucaacgagugguccggcuacuccggcuccuucguccagcaccccgagcucaccggccucgacugcauccgccccugcuucugggucgagcucauccgcggccgccucaaggagaacaccaucuggaccuccggcuccuccaucuccuucugcggcgucaacuccgacaccgucggcugguccuggcccgacggcgccgagcuccccuucaccaucgacaaguga

SEQ ID NO: 114925 - RNA, 1410 nt, Artificial Sequence
  derived and/or modified CDS sequence (opt2) from neuraminidase__InfluenzaA__ADI48685
augaaccccaaccagaagaucaucaccaucggcuccgucugcaugaccaucggcauggccaaccucauccuccagaucggcaacaucaucuccaucuggaucucccacuccauccagcucggcaaccagaaccagaucgagaccugcaaccaguccgucaucaccuacgagaacaacaccugggucaaccagaccuacgucaacaucuccaacaccaacuucgccgccggccaguccgucgucuccgucaagcucgccggcaacuccucccucugccccgucuccggcugggccaucuacuccaaggacaacuccauccgcaucggcuccaagggcgacgucuucgucauccgcgagcccuucaucuccugcuccccccucgagugccgcaccuucuuccucacccagggcgcccuccucaacgacaagcacuccaacggcaccaucaaggaccgcucccccuaccgcacccucauguccugccccaucggcgagguccccucccccuacaacucccgcuucgaguccgucgccugguccgccuccgccugccacgacggcaucaacuggcucaccaucggcaucuccggccccgacaacggcgccgucgccguccucaaguacaacggcaucaucaccgacaccaucaaguccuggcgcaacaacauccuccgcacccaggaguccgagugcgccugcgucaacggcgccugcuucaccgucaugaccgacggccccuccgacggccaggccuccuacaagaucuuccgcaucgagaagggcaagaucgucaaguccgucgagaugaacgcccccaacuaccacuacgaggagugcuccugcuaccccgacuccuccgagaucaccugcgucugccgcgacaacuggcacggcuccaaccgccccugggucuccuucaaccagaaccucgaguaccagaucggcuacaucugcuccggcaucuucggcgacaacccccgccccaacgacaagaccggcuccugcggccccgucuccuccaacggcgccaacggcgucaagggcuucuccuucaaguacggcaacggcgucuggaucggccgcaccaaguccaucuccucccgcaacggcuucgagaugaucugggaccccaacggcuggaccggcaccgacaacaacuucuccaucaagcaggacaucgucggcaucaacgagugguccggcuacuccggcuccuucguccagcaccccgagcucaccggccucgacugcauccgccccugcuucugggucgagcucauccgcggccgccccaaggagaacaccaucuggaccuccggcuccuccaucuccuucugcggcgucaacuccgacaccgucggcugguccuggcccgacggcgccgagcuccccuucaccaucgacaaguga

SEQ ID NO: 114926 - RNA, 1410 nt, Artificial Sequence; identical to SEQ ID NO: 112774
  derived and/or modified CDS sequence (opt2) from neuraminidase__InfluenzaA__ADI48695

SEQ ID NO: 114927 - RNA, 1410 nt, Artificial Sequence; identical to SEQ ID NO: 112764
  derived and/or modified CDS sequence (opt2) from neuraminidase__InfluenzaA__ADI48705

SEQ ID NO: 114928 - RNA, 1410 nt, Artificial Sequence; identical to SEQ ID NO: 112774
  derived and/or modified CDS sequence (opt2) from neuraminidase__InfluenzaA__ADI48715

SEQ ID NO: 114929 - RNA, 1410 nt, Artificial Sequence; identical to SEQ ID NO: 112774
  derived and/or modified CDS sequence (opt2) from neuraminidase__InfluenzaA__ADI48725

SEQ ID NO: 114930 - RNA, 1410 nt, Artificial Sequence; identical to SEQ ID NO: 112774
  derived and/or modified CDS sequence (opt2) from neuraminidase__InfluenzaA__ADI48735

SEQ ID NO: 114931 - RNA, 1410 nt, Artificial Sequence; identical to SEQ ID NO: 112774
  derived and/or modified CDS sequence (opt2) from neuraminidase__InfluenzaA__ADI48745

SEQ ID NO: 114932 - RNA, 1410 nt, Artificial Sequence
  derived and/or modified CDS sequence (opt2) from neuraminidase__InfluenzaA__ADI48755
augaaccccaaccagaagaucaucaccaucggcuccgucugcaugaccaucggcauggccaaccucauccuccagaucggcaacaucaucuccaucuggaucucccacuccauccagcucggcaaccagaaccagaucgagaccugcaaccaguccgucaucaccuacgagaacaacaccugggucaaccagaccuacgucaacaucuccaacaccaacuucgccgccggccaguccgucgucuccgucaagcucgccggcaacuccucccucugccccgucuccggcugggccaucuacuccaaggacaacuccauccgcaucggcuccaagggcgacgucuucgucauccgcgagcccuucaucuccugcuccccccucgagugccgcaccuucuuccucacccagggcgcccuccucaacgacaagcacuccaacggcaccaucaaggaccgcucccccuaccgcacccucauguccugccccaucggcgagguccccucccccuacaacucccgcuucgaguccgucgccugguccgccuccgccugccacgacggcaucaacuggcucaccaucggcaucuccggccccgacaacggcgccgucgccguccucaaguacaacggcaucaucuccgacaccaucaaguccuggcgcaacaacauccuccgcacccaggaguccgagugcgccugcgucaacggcuccugcuucaccgucaugaccgacggccccuccgacggccaggccuccuacaagaucuuccgcaucgagaagggcaagaucgucaaguccgucgagaugaacgcccccaacuaccacuacgaggagugcuccugcuaccccgacuccuccgagaucaccugcgucugccgcgacaacuggcacggcuccaaccgccccugggucuccuucaaccagaaccucgaguaccagaucggcuacaucugcuccggcaucuucggcgacaacccccgccccaacgacaagaccggcuccugcggccccgucuccuccaacggcgccaacggcgucaagggcuucuccuucaaguacggcaacggcgucuggaucggccgcaccaaguccaucuccucccgcaacggcuucgagaugaucugggaccccaacggcuggaccggcaccgacaacaacuucuccaucaagcaggacaucgucggcaucaacgagugguccggcuacuccggcuccuucguccagcaccccgagcucaccggccucgacugcauccgccccugcuucugggucgagcucauccgcggccgccccaaggagaacaccaucuggaccuccggcuccuccaucuccuucugcggcgucaacuccgacaccgucggcugguccuggcccgacggcgccgagcuccccuucaccaucgacaaguga

SEQ ID NO: 114933 - RNA, 1410 nt, Artificial Sequence; identical to SEQ ID NO: 112774
  derived and/or modified CDS sequence (opt2) from neuraminidase__InfluenzaA__ADI48765

SEQ ID NO: 114934 - RNA, 1410 nt, Artificial Sequence; identical to SEQ ID NO: 112774
  derived and/or modified CDS sequence (opt2) from neuraminidase__InfluenzaA__ADI48775

SEQ ID NO: 114935 - RNA, 1410 nt, Artificial Sequence; identical to SEQ ID NO: 112774
  derived and/or modified CDS sequence (opt2) from neuraminidase__InfluenzaA__ADI48785

SEQ ID NO: 114936 - RNA, 1410 nt, Artificial Sequence; identical to SEQ ID NO: 112774
  derived and/or modified CDS sequence (opt2) from neuraminidase__InfluenzaA__ADI48795

SEQ ID NO: 114937 - RNA, 1410 nt, Artificial Sequence; identical to SEQ ID NO: 112774
  derived and/or modified CDS sequence (opt2) from neuraminidase__InfluenzaA__ADI49032

SEQ ID NO: 114938 - RNA, 1410 nt, Artificial Sequence; identical to SEQ ID NO: 112774
  derived and/or modified CDS sequence (opt2) from neuraminidase__InfluenzaA__ADI49243

SEQ ID NO: 114939 - RNA, 1410 nt, Artificial Sequence; identical to SEQ ID NO: 112774
  derived and/or modified CDS sequence (opt2) from neuraminidase__InfluenzaA__ADI49263

SEQ ID NO: 114940 - RNA, 1410 nt, Artificial Sequence; identical to SEQ ID NO: 112774
  derived and/or modified CDS sequence (opt2) from neuraminidase__InfluenzaA__ADI49273

SEQ ID NO: 114941 - RNA, 1410 nt, Artificial Sequence; identical to SEQ ID NO: 112774
  derived and/or modified CDS sequence (opt2) from neuraminidase__InfluenzaA__ADI49283

SEQ ID NO: 114942 - RNA, 1410 nt, Artificial Sequence; identical to SEQ ID NO: 112774
  derived and/or modified CDS sequence (opt2) from neuraminidase__InfluenzaA__ADI49315

SEQ ID NO: 114943 - RNA, 1410 nt, Artificial Sequence; identical to SEQ ID NO: 112774
  derived and/or modified CDS sequence (opt2) from neuraminidase__InfluenzaA__ADI49325

SEQ ID NO: 114944 - RNA, 1410 nt, Artificial Sequence; identical to SEQ ID NO: 112774
  derived and/or modified CDS sequence (opt2) from neuraminidase__InfluenzaA__ADI49335

SEQ ID NO: 114945 - RNA, 1410 nt, Artificial Sequence
  derived and/or modified CDS sequence (opt2) from neuraminidase__InfluenzaA__ADI49345
augaaccccaaccagaagaucaucaccaucggcuccgucugcaugaccaucggcauggccaaccucauccuccagaucggcaacaucaucuccaucuggaucucccacuccauccagcucggcaaccagaaccagaucgagaccugcaaccaguccgucaucaccuacgagaacaacaccugggucaaccagaccuacgucaacaucuccaacaccaaccucgccgccggccaguccgucgucuccgucaagcucgccggcaacuccucccucugccccgucuccggcugggccaucuacuccaaggacaacuccauccgcaucggcuccaagggcgacgucuucgucauccgcgagcccuucaucuccugcuccccccucgagugccgcaccuucuuccucacccagggcgcccuccucaacgacaagcacuccaacggcaccaucaaggaccgcucccccuaccgcacccucauguccugccccaucggcgacguccccucccccuacaacucccgcuucgaguccgucgccugguccgccuccgccugccacgacggcaucaacuggcucaccaucggcaucuccggccccgacaacggcgccgucgccguccucaaguacaacggcaucaucaccgacaccaucaaguccuggcgcaacaacauccuccgcacccaggaguccgagugcgccugcgucaacggcuccugcuucaccgucaugaccgacggccccuccgacggccaggccuccuacaagaucuuccgcaucgagaagggcaagaucgucaaguccgucgagaugaacgcccccaacuaccacuacgaggagugcuccugcuaccccgacuccuccgagaucaccugcgucugccgcgacaacuggcacggcuccaaccgccccugggucuccuucaaccagaaccucgaguaccagaucggcuacaucugcuccggcaucuucggcgacaacccccgccccaacgacaagaccggcuccugcggccccgucuccuccaacggcgccaacggcgucaagggcuucuccuucaaguacggcaacggcgucuggaucggccgcaccaaguccaucuccucccgcaacggcuucgagaugaucugggaccccaacggcuggaccggcaccgacaacaacuucuccaucaagcaggacaucgucggcaucaacgagugguccggcuacuccggcuccuucguccagcaccccgagcucaccggccucgacugcauccgccccugcuucugggucgagcucauccgcggccgccccaaggagaacaccaucuggaccuccggcuccuccaucuccuucugcggcgucaacuccgacaccgucggcugguccuggcccgacggcgccgagcuccccuucaccaucgacaaguga

SEQ ID NO: 114946 - RNA, 1410 nt, Artificial Sequence; identical to SEQ ID NO: 112774
  derived and/or modified CDS sequence (opt2) from neuraminidase__InfluenzaA__ADI49355

SEQ ID NO: 114947 - RNA, 1410 nt, Artificial Sequence; identical to SEQ ID NO: 112774
  derived and/or modified CDS sequence (opt2) from neuraminidase__InfluenzaA__ADI49365

SEQ ID NO: 114948 - RNA, 1410 nt, Artificial Sequence; identical to SEQ ID NO: 112774
  derived and/or modified CDS sequence (opt2) from neuraminidase__InfluenzaA__ADI49375

SEQ ID NO: 114949 - RNA, 1410 nt, Artificial Sequence; identical to SEQ ID NO: 112774
  derived and/or modified CDS sequence (opt2) from neuraminidase__InfluenzaA__ADI49385

SEQ ID NO: 114950 - RNA, 1410 nt, Artificial Sequence
  derived and/or modified CDS sequence (opt2) from neuraminidase__InfluenzaA__ADI49395
augaaccccaaccagaagaucaucaccaucggcuccgucugcaugaccaucggcauggccaaccucauccuccagaucggcaacaugaucuccaucuggaucucccacuccauccagcucggcaaccagaaccagaucgagaccugcaaccaguccgucaucaccuacgagaacaacaccugggucaaccagaccuacgucaacaucuccaacaccaacuucgccgccggccaguccgucgucuccgucaagcucgccggcaacuccucccucugccccgucuccggcugggccaucuacuccaaggacaacuccauccgcaucggcuccaagggcgacgucuucgucauccgcgagcccuucaucuccugcuccccccucgagugccgcaccuucuuccucacccagggcgcccuccucaacgacaagcacuccaacggcaccaucaaggaccgcucccccuaccgcacccucauguccugccccaucggcgagguccccucccccuacaacucccgcuucgaguccgucgccugguccgccuccgccugccacgacggcaucaacuggcucaccaucggcaucuccggccccgacaacggcgccgucgccguccucaaguacaacggcaucaucaccgacaccaucaaguccuggcgcaacaacauccuccgcacccaggaguccgagugcgccugcgucaacggcuccugcuucaccgucaugaccgacggccccuccgacggccaggccuccuacaagaucuuccgcaucgagaagggcaagaucgucaaguccgucgagcucaacgcccccaacuaccacuacgaggagugcuccugcuaccccgacuccuccgagaucaccugcgucugccgcgacaacuggcacggcuccaaccgccccugggucuccuucaaccagaaccucgaguaccagaucggcuacaucugcuccggcaucuucggcgacaacccccgccccaacgacaagaccggcuccugcggccccgucuccuccaacggcgccaacggcgucaagggcuucuccuucaaguacggcaacggcgucuggaucggccgcaccaaguccaucuccucccgcaacggcuucgagaugaucugggaccccaacggcuggaccggcaccgacaacaacuucuccaucaagcaggacaucgucggcaucaacgagugguccggcuacuccggcuccuucguccagcaccccgagcucaccggccucgacugcauccgccccugcuucugggucgagcucauccgcggccgccccaaggagaacaccaucuggaccuccggcuccuccaucuccuucugcggcgucaacuccgacaccgucggcugguccuggcccgacggcgccgagcuccccuucaccaucgacaaguga

SEQ ID NO: 114951 - RNA, 1410 nt, Artificial Sequence; identical to SEQ ID NO: 112774
  derived and/or modified CDS sequence (opt2) from neuraminidase__InfluenzaA__ADI49720

SEQ ID NO: 114952 - RNA, 1410 nt, Artificial Sequence; identical to SEQ ID NO: 112774
  derived and/or modified CDS sequence (opt2) from neuraminidase__InfluenzaA__ADI49730

SEQ ID NO: 114953 - RNA, 1410 nt, Artificial Sequence; identical to SEQ ID NO: 112774
  derived and/or modified CDS sequence (opt2) from neuraminidase__InfluenzaA__ADI49740

SEQ ID NO: 114954 - RNA, 1410 nt, Artificial Sequence; identical to SEQ ID NO: 112774
  derived and/or modified CDS sequence (opt2) from neuraminidase__InfluenzaA__ADI49750

SEQ ID NO: 114955 - RNA, 1410 nt, Artificial Sequence; identical to SEQ ID NO: 112774
  derived and/or modified CDS sequence (opt2) from neuraminidase__InfluenzaA__ADI49760

SEQ ID NO: 114956 - RNA, 1410 nt, Artificial Sequence; identical to SEQ ID NO: 112804
  derived and/or modified CDS sequence (opt2) from neuraminidase__InfluenzaA__ADI49780

SEQ ID NO: 114957 - RNA, 1410 nt, Artificial Sequence; identical to SEQ ID NO: 112764
  derived and/or modified CDS sequence (opt2) from neuraminidase__InfluenzaA__ADI49790

SEQ ID NO: 114958 - RNA, 1410 nt, Artificial Sequence; identical to SEQ ID NO: 112774
  derived and/or modified CDS sequence (opt2) from neuraminidase__InfluenzaA__ADI49821

SEQ ID NO: 114959 - RNA, 1410 nt, Artificial Sequence; identical to SEQ ID NO: 112764
  derived and/or modified CDS sequence (opt2) from neuraminidase__InfluenzaA__ADI50029

SEQ ID NO: 114960 - RNA, 1410 nt, Artificial Sequence
  derived and/or modified CDS sequence (opt2) from neuraminidase__InfluenzaA__ADI52830
augaaccccaaccagaagaucaucaccaucggcuccgucugcaugaccaucggcauggccaaccucauccuccagaucggcaacaucaucuccaucuggaucucccacuccauccagcucggcaaccagaaccagaucgagaccugcaaccaguccgucaucaccuacgagaacaacaccugggucaaccagaccuacgucaacaucuccaacaccaacuucgccgccggccaguccgucgucuccgucaagcucgccggcaacuccucccucugccccgucuccggcugggccaucuacuccaaggacaacuccguccgcaucggcuccaagggcgacgucuucgucauccgcgagcccuucaucuccugcuccccccucgagugccgcaccuucuuccucacccagggcgcccuccucaacgacaagcacuccaacggcaccaucaaggaccgcucccccuaccgcacccucauguccugccccaucggcgagguccccucccccuacaacucccgcuucgaguccgucgccugguccgccuccgccugccacgacggcaucaacuggcucaccaucggcaucuccggccccgacaacggcgccgucgccguccucaaguacaacggcaucaucaccgacaccaucaaguccuggcgcaacaacauccuccgcacccaggaguccgagugcgccugcgucaacggcuccugcuucaccgucaugaccgacggccccuccgacggccaggccuccuacaagaucuuccgcaucgagaagggcaagaucgucaaguccgucgagaugaacgcccccaacuaccacuacgaggagugcuccugcuaccccgacuccuccgagaucaccugcgucugccgcgacaacuggcacggcuccaaccgccccugggucuccuucaaccagaaccucgaguaccagaucggcuacaucugcuccggcaucuucggcgacaacccccgccccaacgacaagaccggcuccugcggccccgucuccuccaacggcgccaacggcgucaagggcuucuccuucaaguacggcaacggcgucuggaucggccgcaccaaguccaucuccucccgcaacggcuucgagaugaucugggaccccaacggcuggaccggcaccgacaacaacuucuccaucaagcaggacaucgucggcaucaacgagugguccggcuacuccggcuccuucguccagcaccccgagcucaccggccucgacugcauccgccccugcuucugggucgagcucauccgcggccgccccaaggagaacaccaucuggaccuccggcuccuccaucuccuucugcggcgucaacuccgacaccgucggcugguccuggcccgacggcgacgagcuccccuucaccaucgacaaguga

SEQ ID NO: 114961 - RNA, 1410 nt, Artificial Sequence
  derived and/or modified CDS sequence (opt2) from neuraminidase__InfluenzaA__ADI52831
augaaccccaaccagaagaucaucaccaucggcuccgucugcaugaccaucggcauggccaaccucauccuccagaucggcaacaucaucuccaucuggaucucccacuccauccagcucggcaaccagaaccagaucgagaccugcaaccaguccgucaucaccuacgagaacaacaccugggucaaccagaccuacgucaacaucuccaacaccaacuucgccgccggccaguccgucgucuccgucaagcucgccggcaacuccucccucugccccgucuccggcugggccaucuacuccaaggacaacuccauccgcaucggcuccaagggcgacgucuucgucauccgcgagcccuucaucuccugcuccccccucgagugccgcaccuucuuccucacccagggcgcccuccucaacgacaagcacuccaacggcaccaucaaggaccgcucccccuaccgcacccucauguccugccccaucggcgagguccccucccccuacaacucccgcuucgaguccgucgccugguccgccuccgccugccacgacggcaucaacuggcucaccaucggcaucuccggccccgacaacggcgccgucgccguccucaaguacaacggcaucaucaccgacaccaucaaguccuggcgcaacaacauccuccgcacccaggaguccgagugcgccugcgucaacggcuccugcuucaccgucaugaccgacggccccuccgacggccaggccuccuacaagaucuuccgcaucgagaagggcaagaucgucaaguccgucgagaugaacgcccccaacuaccacuacgaggagugcuccugcuaccccgacuccuccgagaucaccugcgucugccgcgacaacuggcacggcuccaaccgccccugggucuccuucaaccagaaccucgaguaccagaucggcuacaucugcuccggcaucuucggcgacaacccccgccccaacgacaagaccggcuccugcggccccgucuccuccaacggcgccaacggcgucaagggcuucuccuucaaguacggcaacggcgucuggaucggccgcaccaaguccgucuccucccgcaacggcuucgagaugaucugggaccccaacggcuggaccggcaccgacaacaacuucuccaucaagcaggacaucgucggcaucaacgagugguccggcuacuccggcuccuucguccagcaccccgagcucaccggccucgacugcauccgccccugcuucugggucgagcucauccgcggccgccccaaggagaacaccaucuggaccuccggcuccuccaucuccuucugcggcgucaacuccgacaccgucggcugguccuggcccgacggcgccgagcuccccuucaccaucgacaaguga

SEQ ID NO: 114962 - RNA, 1410 nt, Artificial Sequence; identical to SEQ ID NO: 112774
  derived and/or modified CDS sequence (opt2) from neuraminidase__InfluenzaA__ADI52832

SEQ ID NO: 114963 - RNA, 1410 nt, Artificial Sequence
  derived and/or modified CDS sequence (opt2) from neuraminidase__InfluenzaA__ADI52833
augaaccccaaccagaagaucaucaccaucggcuccgucugcaugaccaucggcauggccaaccucauccuccagaucggcaacaucaucuccaucuggaucucccacuccauccagcucggcaaccagaaccagaucgagaccugcaaccaguccgucaucaccuacgagaacaacaccugggucaaccagaccuacgucaacaucuccaacaccaacuucgccgccggccaguccgucgucuccgucaagcucgccggcaacuccucccucugccccgucuccggcugggccaucuacuccaaggacaacuccauccgcaucggcuccaagggcgacgucuucgucauccgcgagcccuucaucuccugcuccccccucgagugccgcaccuucuuccucacccagggcgcccuccucaacgacaagcacuccaacggcaccaucaaggaccgcucccccuaccgcacccucauguccugccccaucggcgaggcccccucccccuacaacucccgcuucgaguccgucgccugguccgccuccgccugccacgacggcaucaacuggcucaccaucggcaucuccggccccgacaacggcgccgucgccguccucaaguacaacggcaucaucaccgacaccaucaaguccuggcgcaacaacauccuccgcacccaggaguccgagugcgccugcgucaacggcuccugcuucaccgucaugaccgacggccccuccgacggccaggccuccuacaagaucuuccgcaucgagaagggcaagaucgucaaguccgucgagaugaacgcccccaacuaccacuacgaggagugcuccugcuaccccgacuccuccgagaucaccugcgucugccgcgacaacuggcacggcuccaaccgccccugggucuccuucaaccagaaccucgaguaccagaucggcuacaucugcuccggcaucuucggcgacaacccccgccccaacgacaagaccggcuccugcggccccgucuccuccaacggcgccaacggcgucaagggcuucuccuucaaguacggcaacggcgucuggaucggccgcaccaaguccaucuccucccgcaacggcuucgagaugaucugggaccccaacggcuggaccggcaccgacaacaacuucuccaucaagcaggacaucgucggcaucaacgagugguccggcuacuccggcuccuucguccagcaccccgagcucaccggccucgacugcauccgccccugcuucugggucgagcucauccgcggccgccccaaggagaacaccaucuggaccuccggcuccuccaucuccuucugcggcgucaacuccgacaccgucggcugguccuggcccgacggcgccgagcuccccuucaccaucgacaaguga

SEQ ID NO: 114964 - RNA, 1413 nt, Artificial Sequence; identical to SEQ ID NO: 113497
  derived and/or modified CDS sequence (opt2) from neuraminidase__InfluenzaA__ADI75821

SEQ ID NO: 114965 - RNA, 1410 nt, Artificial Sequence; identical to SEQ ID NO: 113941
  derived and/or modified CDS sequence (opt2) from neuraminidase__InfluenzaA__ADI75832

SEQ ID NO: 114966 - RNA, 1413 nt, Artificial Sequence
  derived and/or modified CDS sequence (opt2) from neuraminidase__InfluenzaA__ADI75854
augaaccccaaccagaagaucaucaccaucggcuccaucuccaucgccaucggcaucaucucccucaugcuccagaucggcuccaucaucuccaucugggccucccacuccauccagaccggcucccagaacaacaccggcaucugcaaccagcgcaucaucaccuacgagaacuccaccugggucaaccacaccuacgucaacaucaacaacaccaacgucgucgccggcgaggacaagaccuccgucacccucgccggcaacuccucccucugcuccaucuccggcugggccaucuacaccaaggacaacuccauccgcaucggcuccaagggcgacgucuucgucauccgcgagcccuucaucuccugcucccaccucgagugccgcaccuucuuccucacccagggcgcccuccucaacgacaagcacuccaacggcaccgucaaggaccgcucccccuaccgcgcccucauguccugcccccucggcgaggcccccucccccuacaacuccaaguucgaguccgucgccugguccgccuccgccugccacgacggcaugggcuggcucaccaucggcaucuccggccccgacaacggcgccgucgccguccucaaguacaacggcaucaucaccggcaccaucaaguccuggaagaagcagauccuccgcacccaggaguccgagugcgucugcaugaacggcuccugcuucaccaucaugaccgacggccccuccaacaaggccgccuccuacaagaucuucaagaucgagaagggcaaggucaccaaguccaucgagcucaacgcccccaacuucuacuacgaggagugcuccugcuaccccgacaccggcaucgucaugugcgucugccgcgacaacuggcacggcuccaaccgccccugggucuccuucaaccagaaccucgacuaccagaucggcuacaucugcuccggcgucuucggcgacaacccccgccccgaggacggcgagggcuccugcaaccccgucaccgucgacggcgccaacggcgucaagggcuucuccuacaaguacggcaacggcgucuggaucggccgcaccaaguccaaccgccuccgcaagggcuucgagaugaucugggaccccaacggcuggaccaacaccgacuccgacuucuccgucaagcaggacgucgucgccaucaccgacugguccggcuacuccggcuccuucguccagcaccccgagcucaccggccucgacugcauccgccccugcuucugggucgagcucguccgcggccucccccgcgagaacaccaccaucuggaccuccggcuccuccaucuccuucugcggcgucaacuccgacaccgccaacugguccuggcccgacggcgccgagcuccccuucaccaucgacaaguga

SEQ ID NO: 114967 - RNA, 1410 nt, Artificial Sequence
  derived and/or modified CDS sequence (opt2) from neuraminidase__InfluenzaA__ADI75876
augaaccccaaccagaagaucaucaccaucggcuccgucucccucaccaucuccaccaucugcuucuucaugcagaucgccauccucaucaccaccgucacccuccacuucaagcaguacgaguucaacuccccccccaacaaccaggucaugcucugcgagcccaccaucaucgagcgcaacaucaccgagaucgucuaccucaccaacaccaccaucgagaaggaggucugccccaagcucgccgaguaccgcaacugguccaagccccagugcgacaucaccggcuucgcccccuucuccaaggacaacuccauccgccucuccgccggcggcgacaucugggucacccgcgagcccuacgucuccugcgaccccgacaagugcuaccaguucgcccucggccagggcaccacccucaacaacguccacuccaacaacaccguccgcgaccgcacccccuaccgcacccuccucaugaacgagcucggcguccccuuccaccucggcaccaagcaggucugcaucgccugguccuccuccuccugccacgacggcaaggccuggcuccacgucugcaucaccggcgacgacaagaacgccaccgccuccuucaucuacaacggccgccucgucgacuccgucgucuccugguccaaggagauccuccgcacccaggaguccgagugcgucugcaucaacggcaccugcaccgucgucaugaccgacggcuccgccuccggcaaggccgacaccaagauccucuucaucgaggagggcaagaucguccacaccuccacccucuccggcuccgcccagcacgucgaggagugcuccugcuacccccgcuaccccggcguccgcugcgucugccgcgacaacuggaagggcuccaaccgccccaucgucgacaucaacaucaaggaccacuccgucgucuccuccuacgucugcuccggccucgucggcgacaccccccgcaagaacgacuccuccuccuccucccacugccucgaccccaacaacgaggagggcggccacggcgucaagggcugggccuucgacgacggcaacgacgucuggaugggccgcaccaucuccgagaagucccgccucggcuacgagaccuucaaggucaucgagggcugguccaaccacaaguccaagcuccagaucaaccgccaggucaucgucgaccgcggcaaccgcuccggcuacuccggcaucuucuccgucgagggcaaguccugcaucaaccgcugcuucuacgucgagcucauccgcggccgcaaggaggagaccgagguccucuggaccuccaacuccaucgucgucuucugcggcaccuccggcaccuacggcaccggcuccuggcccgacggcgccgaccucaaccucaugcccaucuga

SEQ ID NO: 114968 - RNA, 1410 nt, Artificial Sequence; identical to SEQ ID NO: 113941
  derived and/or modified CDS sequence (opt2) from neuraminidase__InfluenzaA__ADI75887

SEQ ID NO: 114969 - RNA, 1413 nt, Artificial Sequence; identical to SEQ ID NO: 113497
  derived and/or modified CDS sequence (opt2) from neuraminidase__InfluenzaA__ADI75909

SEQ ID NO: 114970 - RNA, 1410 nt, Artificial Sequence; identical to SEQ ID NO: 114520
  derived and/or modified CDS sequence (opt2) from neuraminidase__InfluenzaA__ADI75920

SEQ ID NO: 114971 - RNA, 1413 nt, Artificial Sequence; identical to SEQ ID NO: 113497
  derived and/or modified CDS sequence (opt2) from neuraminidase__InfluenzaA__ADI77352

SEQ ID NO: 114972 - RNA, 1410 nt, Artificial Sequence; identical to SEQ ID NO: 112774
  derived and/or modified CDS sequence (opt2) from neuraminidase__InfluenzaA__ADI77363

SEQ ID NO: 114973 - RNA, 1410 nt, Artificial Sequence; identical to SEQ ID NO: 113951
  derived and/or modified CDS sequence (opt2) from neuraminidase__InfluenzaA__ADI99500

SEQ ID NO: 114974 - RNA, 1410 nt, Artificial Sequence
  derived and/or modified CDS sequence (opt2) from neuraminidase__InfluenzaA__ADI99553
augaaccccaaccagaagaucaucaccaucggcuccgucugcaugaccaucggcauggccaaccucauccuccagaucggcaacaucaucuccaucuggaucucccacuccauccagcucggcaaccagaaccagaucgagaccugcaaccaguccgucaucaccuacgagaacaacaccugggucaaccagaccuacgucaacaucuccaacaccaacuucgccgccggccaguccgucgacuccgucaagcucgccggcaacuccucccucugccccgucuccggcugggccaucuacuccaaggacaacuccauccgcaucggcuccaagggcgacgucuucgucauccgcgagcccuucaucuccugcuccccccucgagugccgcaccuucuuccucacccagggcgcccuccucaacgacaagcacuccaacggcaccaucaaggaccgcucccccuaccgcacccucauguccugccccaucggcgagguccccucccccuacaacucccgcuucgaguccgucgccugguccgccuccgccugccacgacggcaucaacuggcucaccaucggcaucuccggccccgacaacggcgccgucgccguccucaaguacaacggcaucaucaccgacaccaucaaguccuggcgcaacaacauccuccgcacccaggaguccgagugcgccugcgucaacggcuccugcuucaccgucaugaccgacggccccuccgacggccaggccuccuacaagaucuuccgcaucgagaagggcaagaucgucaaguccgucgagaugaacgcccccaacuaccacuacgaggagugcuccugcuaccccgacuccuccgagaucaccugcgucugccgcgacaacuggcacggcuccaaccgccccugggucuccuucaaccagaaccucgaguaccagaucggcuacaucugcuccggcaucuucggcgacaacccccgccccaacgacaagaccggcuccugcggccccgucuccuccaacggcgccaacggcgucaagggcuucuccuucaaguacggcaacggcgucuggaucggccgcaccaaguccaucuccucccgcaacggcuucgagaugaucugggaccccaacggcuggaccggcaccgacaacaacuucuccaucaagcaggacaucgucggcaucaacgagugguccggcuacuccggcuccuucguccagcaccccgagcucaccggccucgacugcauccgccccugcuucugggucgagcucauccgcggccgccccaaggagaacaccaucuggaccuccggcuccuccaucuccuucugcggcgucaacuccgacaccgucggcugguccuggcccgacggcgccgagcuccccuucaccaucgacaaguga

SEQ ID NO: 114975 - RNA, 1410 nt, Artificial Sequence
  derived and/or modified CDS sequence (opt2) from neuraminidase__InfluenzaA__ADI99563
augaaccccaaccagaagaucaucaccaucggcuccgucugcaugaccaucggcauggccaaccucauccuccagaucggcaacaucaucuccaucuggaucucccacuccauccagcucggcaaccagaaccagaucgagaccugcaaccaguccgucaucaccuacgagaacaacaccugggucaaccagaccuacgucaacaucuccaacaccaacuucgccgccggccaguccgucgucuccgucaagcucgccggcaacuccucccucugccccgucuccggcugggccaucuacuccaaggacaacuccauccgcaucggcuccaagggcgacgucuucgucauccgcgagcccuucaucuccugcuccccccucgagugccgcaccuucuuccucacccagggcgcccuccucaacgacaagcacuccaacggcaccaucaaggaccgcucccccuaccgcacccucauguccugccccaucggcgagguccccucccccuacaacucccgcuucgaguccgucgccugguccgccuccgccugccacgacggcaucaacuggcucaccaucggcaucuccggccccgacaacggcgccgucgccguccucaaguacaacggcaucaucaccgacaccaucaaguccuggcgcaacaacauccuccgcacccaggaguccgagugcgccugcgucaacggcuccugcuucaccgucaugaccgacggccccuccgacggccaggccuccuacaagaucuuccgcaucgagaagggcaagaucgucaaguccgucgaggucaacgcccccaacuaccacuacgaggagugcuccugcuaccccgacuccuccgagaucaccugcgucugccgcgacaacuggcacggcuccaaccgccccugggucuccuucaaccagaaccucgaguaccagaucggcuacaucugcuccggcaucuucggcgacaacccccgccccaacgacaagaccggcuccugcggccccgucuccuccaacggcgccaacggcgucaagggcuucuccuucaaguacggcaacggcgucuggaucggccgcaccaaguccaucuccucccgcaacggcuucgagaugaucugggaccccaacggcuggaccggcaccgacaacaacuucuccaucaagcaggacaucgucggcaucaacgagugguccggcuacuccggcuccuucguccagcaccccgagcucaccggccucgacugcauccgccccugcuucugggucgagcucauccgcggccgccccaaggagaacaccaucuggaccuccggcuccuccaucuccuucugcggcgucaacuccgacaccgucggcugguccuggcccgacggcgccgagcuccccuucaccaucgacaaguga

SEQ ID NO: 114976 - RNA, 1410 nt, Artificial Sequence; identical to SEQ ID NO: 114975
  derived and/or modified CDS sequence (opt2) from neuraminidase__InfluenzaA__ADI99573

SEQ ID NO: 114977 - RNA, 1410 nt, Artificial Sequence; identical to SEQ ID NO: 114975
  derived and/or modified CDS sequence (opt2) from neuraminidase__InfluenzaA__ADI99583

SEQ ID NO: 114978 - RNA, 1410 nt, Artificial Sequence; identical to SEQ ID NO: 114125
  derived and/or modified CDS sequence (opt2) from neuraminidase__InfluenzaA__ADI99593

SEQ ID NO: 114979 - RNA, 1410 nt, Artificial Sequence
  derived and/or modified CDS sequence (opt2) from neuraminidase__InfluenzaA__ADI99613
augaaccccaaccagaagaucaucaccaucggcuccgucugcaugaccaucggcauggccaaccucauccuccagaucggcaacaucaucuccaucuggaucucccacuccauccagcucggcaaccagaaccagaucgagaccugcaaccaguccgucaucaccuacgagaacaacaccugggucaaccagaccuacgucaacaucuccaacaccaacuucgccgccggccaguccgucgucuccgucaagcucgccggcaacuccucccucugccccgucuccggcugggccaucuacuccaaggacaacuccauccgcaucggcuccaagggcgacgucuucgucauccgcgagcccuucaucuccugcuccccccucgagugccgcaccuucuuccucacccagggcgcccuccucaacgacaagcacuccaacggcaccaucaaggaccgcucccccuaccgcacccucauguccugccccaucggcgagguccccucccccuacaacucccgcuucgaguccgucgccugguccgccuccgccugccacgacggcaucaacuggcucaccaucggcaucuccggccccgacaacggcgccgucgccguccucaaguacaacggcaucaucaccgacaccaucaaguccuggcgcaacaacauccuccgcacccaggaguccgagugcgccugcgucaacggcuccugcuucaccgucaugaccgacggccccuccgacggccaggccuccuacaagaucuuccgcaucgagaagggcaagaucgucaaguccgucgagaugaacgcccccaacuaccacuacgaggagugcuccugcuaccccgacuccuccgagaucaccugcgucugccgcgacaacuggcacggcuccaaccgccccugggucuccuucaaccagaaccucgaguaccagaucggcuacaucugcuccggcaucuucggcgacaacccccgccccaacgacaagaccggcuccugcggccccgucuccuccaacggcgccaacggcgucaagggcuucuccuucaaguacggcaacggcgucuggaucggccgcaccaaguccaucuccucccgcaacggcuucgagaugaucugggaccccaacggcuggaccggcaccgacaacaacuucuccaucaagcaggacaucgucggcaucaacgagugguccggcuacuccggcuccuucguccagcaccccgagcucaccggccucgacugcauccgccccugcuucugggucgagcucauccgcggccgccccaaggagaacaccaucuggaccuccggcuccaucaucuccuucugcggcgucaacuccgacaccgucggcugguccuggcccgacggcgccgagcuccccuucaccaucgacaaguga

SEQ ID NO: 114980 - RNA, 1410 nt, Artificial Sequence
  derived and/or modified CDS sequence (opt2) from neuraminidase__InfluenzaA__ADI99623
augaaccccaaccagaagaucaucaccaucggcuccgucugcaugaccaucggcauggccaaccucauccuccagaucggcaacaucaucuccaucuggaucucccacuccauccagcucggcaaccagaaccagaucgagaccugcaaccaguccgucaucaccuacgagaacaacaccugggucaaccagaccuacgucaacaucuccaacaccaacuucgccgccggccaguccgucgucuccaugaagcucgccggcaacuccucccucugccccgucuccggcugggccaucuacuccaaggacaacuccauccgcaucggcuccaagggcgacgucuucgucauccgcgagcccuucaucuccugcuccccccucgagugccgcaccuucuuccucacccagggcgcccuccucaacgacaagcacuccaacggcaccaucaaggaccgcucccccuaccgcacccucauguccugccccaucggcgagguccccucccccuacaacucccgcuucgaguccgucgccugguccgccuccgccugccacgacggcaucaacuggcucaccaucggcaucuccggccccgacaacggcgccgucgccguccucaaguacaacggcaucaucaccgacaccaucaaguccuggcgcaacaacauccuccgcacccaggaguccgagugcgccugcgucaacggcuccugcuucaccgucaugaccgacggccccuccgacggccaggccuccuacaagaucuuccgcaucgagaagggcaagaucgucaaguccgucgagaugaacgcccccaacuaccacuacgaggagugcuccugcuaccccgacuccaacgagaucaccugcgucugccgcgacaacuggcacggcuccaaccgccccugggucuccuucaaccagaaccucgaguaccagaucggcuacaucugcuccggcaucuucggcgacaacccccgccccaacgacaagaccggcuccugcggccccgucuccuccaacggcgccaacggcgucaagggcuucuccuucaaguacggcaacggcgucuggaucggccgcaccaaguccaucuccucccgcaacggcuucgagaugaucugggaccccaacggcuggaccggcaccgacaacaacuucuccaucaagcaggacaucgucggcaucaacgagugguccggcuacuccggcuccuucguccagcaccccgagcucaccggccucgacugcauccgccccugcuucugggucgagcucauccgcggccgccccaaggagaacaccaucuggaccuccggcuccuccaucuccuucugcggcgucaacuccgacaccgucggcugguccuggcccgacggcgccgagcuccccuucaccaucgacaaguga

SEQ ID NO: 114981 - RNA, 1410 nt, Artificial Sequence; identical to SEQ ID NO: 114062
  derived and/or modified CDS sequence (opt2) from neuraminidase__InfluenzaA__ADI99633

SEQ ID NO: 114982 - RNA, 1410 nt, Artificial Sequence; identical to SEQ ID NO: 114125
  derived and/or modified CDS sequence (opt2) from neuraminidase__InfluenzaA__ADI99643

SEQ ID NO: 114983 - RNA, 1410 nt, Artificial Sequence; identical to SEQ ID NO: 112774
  derived and/or modified CDS sequence (opt2) from neuraminidase__InfluenzaA__ADI99653

SEQ ID NO: 114984 - RNA, 1410 nt, Artificial Sequence; identical to SEQ ID NO: 112774
  derived and/or modified CDS sequence (opt2) from neuraminidase__InfluenzaA__ADI99663

SEQ ID NO: 114985 - RNA, 1410 nt, Artificial Sequence; identical to SEQ ID NO: 112774
  derived and/or modified CDS sequence (opt2) from neuraminidase__InfluenzaA__ADI99673

SEQ ID NO: 114986 - RNA, 1410 nt, Artificial Sequence; identical to SEQ ID NO: 112774
  derived and/or modified CDS sequence (opt2) from neuraminidase__InfluenzaA__ADI99683

SEQ ID NO: 114987 - RNA, 1410 nt, Artificial Sequence; identical to SEQ ID NO: 114236
  derived and/or modified CDS sequence (opt2) from neuraminidase__InfluenzaA__ADI99703

SEQ ID NO: 114988 - RNA, 1410 nt, Artificial Sequence; identical to SEQ ID NO: 112774
  derived and/or modified CDS sequence (opt2) from neuraminidase__InfluenzaA__ADI99713

SEQ ID NO: 114989 - RNA, 1410 nt, Artificial Sequence; identical to SEQ ID NO: 112774
  derived and/or modified CDS sequence (opt2) from neuraminidase__InfluenzaA__ADI99723

SEQ ID NO: 114990 - RNA, 1410 nt, Artificial Sequence; identical to SEQ ID NO: 112774
  derived and/or modified CDS sequence (opt2) from neuraminidase__InfluenzaA__ADI99733

SEQ ID NO: 114991 - RNA, 1410 nt, Artificial Sequence; identical to SEQ ID NO: 112929
  derived and/or modified CDS sequence (opt2) from neuraminidase__InfluenzaA__ADJ00487

SEQ ID NO: 114992 - RNA, 1410 nt, Artificial Sequence; identical to SEQ ID NO: 112929
  derived and/or modified CDS sequence (opt2) from neuraminidase__InfluenzaA__ADJ00488

SEQ ID NO: 114993 - RNA, 1410 nt, Artificial Sequence; identical to SEQ ID NO: 112929
  derived and/or modified CDS sequence (opt2) from neuraminidase__InfluenzaA__ADJ00489

SEQ ID NO: 114994 - RNA, 1410 nt, Artificial Sequence; identical to SEQ ID NO: 112929
  derived and/or modified CDS sequence (opt2) from neuraminidase__InfluenzaA__ADJ00490

SEQ ID NO: 114995 - RNA, 1410 nt, Artificial Sequence; identical to SEQ ID NO: 112929
  derived and/or modified CDS sequence (opt2) from neuraminidase__InfluenzaA__ADJ00491

SEQ ID NO: 114996 - RNA, 1410 nt, Artificial Sequence; identical to SEQ ID NO: 112774
  derived and/or modified CDS sequence (opt2) from neuraminidase__InfluenzaA__ADJ18160

SEQ ID NO: 114997 - RNA, 1410 nt, Artificial Sequence; identical to SEQ ID NO: 112774
  derived and/or modified CDS sequence (opt2) from neuraminidase__InfluenzaA__ADJ18161

SEQ ID NO: 114998 - RNA, 1410 nt, Artificial Sequence
  derived and/or modified CDS sequence (opt2) from neuraminidase__InfluenzaA__ADJ18162
augauccccaaccagaagaucaucaccaucggcuccgucugcaugaccaucggcauggccaaccucauccuccagaucggcaacaucaucuccaucuggaucucccacuccauccagcucggcaaccagaaccagaucgagaccugcaaccaguccgucaucaccuacgagaacaacaccugggucaaccagaccuacgucaacaucuccaacaccaacuucgccgccggccaguccgucgucuccgucaagcucgccggcaacuccucccucugccccgucuccggcugggccaucuacuccaaggacaacuccauccgcaucggcuccaagggcgacgucuucgucauccgcaagcccuucaucuccugcuccccccucgagugccgcaccuucuuccucacccagggcgcccuccucaacgacaagcacuccaacggcaccaucaaggaccgcucccccuaccgcacccucauguccugccccaucggcgagguccccucccccuacaacucccgcuucgaguccgucgccugguccgccuccgccugccacgacggcaucaacuggcucaccaucggcaucuccggccccgacaacggcgccgucgccguccucaaguacaacggcaucaucaccgacaccaucaaguccuggcgcaacaacauccuccgcacccaggaguccgagugcgccugcgucaacggcuccugcuucaccgucaugaccgacggccccuccgacggccaggccuccuacaagaucuuccgcaucgagaagggcaagaucgucaaguccgucgagaugaacgcccccaacuaccacuacgaggagugcuccugcuaccccgacuccuccgagaucaccugcgucugccgcgacaacuggcacggcuccaaccgccccugggucuccuucaaccagaaccucgaguaccagaucggcuacaucugcuccggcaucuucggcgacaacccccgccccaacgacaagaccggcuccugcggccccgucuccuccaacggcgccaacggcgucaagggcuucuccuucaaguacggcaacggcgucuggaucggccgcaccaaguccaucuccucccgcaacggcuucgagaugaucugggaccccaacggcuggaccggcaccgacaacaacuucuccaucaagcaggacaucgucggcaucaacgagugguccggcuacuccggcuccuucguccagcaccccgagcucaccggccucgacugcauccgccccugcuucugggucgagcucauccgcggccgccccaaggagaacaccaucuggaccuccggcuccuccaucuccuucugcggcgucaacuccgacaccgucggcugguccuggcccgacggcgccgagcuccccuucaccaucgacaaguga

SEQ ID NO: 114999 - RNA, 1410 nt, Artificial Sequence
  derived and/or modified CDS sequence (opt2) from neuraminidase__InfluenzaA__ADJ18164
augaaccccaagcagaagaucaucaccaucggcuccgucugcaugaccaucggcauggccaaccucauccuccagaucggcaacaucaucuccaucuggaucucccacuccauccagcucggcaaccagaaccagaucgagaccugcaaccaguccgucaucaccuacgagaacaacaccugggucaaccagaccuacgucaacaucuccaacaccaacuucgccgccggccaguccgucgucuccgucaagcucgccggcaacuccucccucugcuccgucuccggcugggccaucuacuccaaggacaacuccauccgcaucggcuccaagggcgacgucuucgucauccgcgagcccuucaucuccugcuccccccucgagugccgcaccuucuuccucacccagggcgcccuccucaacgacaagcacuccaacggcaccaucaaggaccgcucccccuaccgcacccucauguccugccccaucggcgagguccccucccccuacaacucccgcuucgaguccgucgccugguccgccuccgccugccacgacggcaucaacuggcucaccaucggcaucuccggccccgacaacggcgccgucgccguccucaaguacaacggcaucaucaccgacaccaucaaguccuggcgcaacaacauccuccgcacccaggaguccgagugcgccugcgucaacggcuccugcuucaccgucaugaccgacggccccuccgacggccaggccuccuacaagaucuuccgcaucgagaagggcaagaucgucaaguccgucgagaugaacgcccccaacuaccacuacgaggagugcuccugcuaccccgacuccuccgagaucaccugcgucugccgcgacaacuggcacggcuccaaccgccccugggucuccuucaaccagaaccucgaguaccagaucggcuacaucugcuccggcaucuucggcgacaacccccgccccaacgacaagaccggcuccugcggccccgucuccuccaacggcgccaacggcgucaagggcuucuccuucaaguacggcaacggcgucuggaucggccgcaccaaguccaucuccucccgcaacggcuucgagaugaucugggaccccaacggcuggaccggcaccgacaacaacuucuccaucaagcaggacaucgucggcaucaacgagugguccggcuacuccggcuccuucguccagcaccccgagcucaccggccucgacugcauccgccccugcuucugggucgagcucauccgcggccgccccaaggagaacaccaucuggaccuccggcuccuccaucuccuucugcggcgucaacuccgacaccgucggcugguccuggcccgacggcgccgagcuccccuucaccaucgacaaguga

SEQ ID NO: 115000 - RNA, 1410 nt, Artificial Sequence; identical to SEQ ID NO: 112774
  derived and/or modified CDS sequence (opt2) from neuraminidase__InfluenzaA__ADJ18166

SEQ ID NO: 115001 - RNA, 1410 nt, Artificial Sequence; identical to SEQ ID NO: 112774
  derived and/or modified CDS sequence (opt2) from neuraminidase__InfluenzaA__ADJ18168

SEQ ID NO: 115002 - RNA, 1410 nt, Artificial Sequence; identical to SEQ ID NO: 112774
  derived and/or modified CDS sequence (opt2) from neuraminidase__InfluenzaA__ADJ18170

SEQ ID NO: 115003 - RNA, 1410 nt, Artificial Sequence
  derived and/or modified CDS sequence (opt2) from neuraminidase__InfluenzaA__ADJ18172
augaaccccaaccagaagaucaucaccaucggcuccgucugcaugaccaucggcauggccaaccucauccuccgcaucggcaacaucaucuccaucuggaucucccacuccauccagcucggcaaccagaaccagaucgagaccugcaaccaguccgucaucaccuacgagaacaacaccugggucaaccagaccuacgucaacaucuccaacaccaacuucgccgccggccaguccgucgucuccgucaagcucgccggcaacuccucccucugccccgucuccggcugggccaucuaccgcaaggacaacuccauccgcaucggcuccaagggcgacgucuucgucauccgcgagcccuucaucuccugcuccccccucgagugccgcaccuucuuccucacccagggcgcccuccucaacgacaagcacuccaacggcaccaucaaggaccgcucccccuaccgcacccucauguccugccccaucggcgagguccccucccccuacaacucccgcuucgaguccgucgccugguccgccuccgccugccacgacggcaucaacuggcucaccaucggcaucuccggccccgacaacggcgccgucgccguccucaaguacaacggcaucaucaccgacaccaucaaguccuggcgcaacaacauccuccgcacccaggaguccgagugcgccugcgucaacggcuccugcuucaccgucaugaccgacggccccuccgacggccaggccuccuacaagaucuuccgcaucgagaagggcaagaucgucaaguccgucgagaugaacgcccccaacuaccacuacgaggagugcuccugcuaccccgacuccuccgagaucaccugcgucugccgcgacaacuggcacggcuccaaccgccccugggucuccuucaaccagaaccucgaguaccagaucggcuacaucugcuccggcaucuucggcgacaacccccgccccaacgacaagaccggcuccugcggccccgucuccuccaacggcgccaacggcgucaagggcuucuccuucaaguacggcaacggcgucuggaucggccgcaccaaguccaucuccucccgcaacggcuucgagaugaucugggaccccaacggcuggaccggcaccgacaacaacuucuccaucaagcaggacaucgucggcaucaacgagugguccggcuacuccggcuccuucguccagcaccccgagcucaccggccucgacugcauccgccccugcuucugggucgagcucauccgcggccgccccaaggagaacaccaucuggaccuccggcuccuccaucuccuucugcggcgucaacuccgacaccgucggcugguccuggcccgacggcgccgagcuccccuucaccaucgacaaguga

SEQ ID NO: 115004 - RNA, 1410 nt, Artificial Sequence; identical to SEQ ID NO: 112774
  derived and/or modified CDS sequence (opt2) from neuraminidase__InfluenzaA__ADJ18174

SEQ ID NO: 115005 - RNA, 1410 nt, Artificial Sequence
  derived and/or modified CDS sequence (opt2) from neuraminidase__InfluenzaA__ADJ18176
augaaccccaaccagaagaucaucaccaucggcuccgucugcaugaccaucggcauggccaaccucauccuccagaucggcaacaucaucuccaucuggaucucccucuccauccagcucggcaaccagaaccagaucgagaccugcaaccaguccgucaucaccuacgagaacaacaccugggucaaccagaccuacgucaacaucuccaacaccaacuucgccgccggccaguccgucgucuccgucaagcucgccggcaacuccucccucugccccgucuccggcugggccaucuacuccaaggacaacuccauccgcaucggcuccaagggcgacgucuucgucauccgcgagcccuucaucuccugcuccccccucgagugccgcaccuucuuccucacccagggcgcccuccucaacgacaagcacuccaacggcaccaucaaggaccgcucccccuaccgcacccucauguccugccccaucggcgagguccccucccccuacaacucccgcuucgaguccgucgccugguccgccuccgccugccacgacggcaucaacuggcucaccaucggcaucuccggccccgacaacggcgccgucgccguccucaaguacaacggcaucaucaccgacaccaucaaguccuggcgcaacaacauccuccgcacccaggaguccgagugcgccugcgucaacggcuccugcuucaccgucaugaccgacggccccuccgacggccaggccuccuacaagaucuuccgcaucgagaagggcaagaucgucaaguccgucgagaugaacgcccccaacuaccacuacgaggagugcuccugcuaccccgacuccuccgagaucaccugcgucugccgcgacaacuggcacggcuccaaccgccccugggucuccuucaaccagaaccucgaguaccagaucggcuacaucugcuccggcaucuucggcgacaacccccgccccaacgacaagaccggcuccugcggccccgucuccuccaacggcgccaacggcgucaagggcuucuccuucaaguacggcaacggcgucuggaucggccgcaccaaguccaucuccucccgcaacggcuucgagaugaucugggaccccaacggcuggaccggcaccgacaacaacuucuccaucaagcaggacaucgucggcaucaacgagugguccggcuacuccggcuccuucguccagcaccccgagcucaccggccucgacugcauccgccccugcuucugggucgagcucauccgcggccgccccaaggagaacaccaucuggaccuccggcuccuccaucuccuucugcggcgucaacuccgacaccgucggcugguccuggcccgacggcgccgagcuccccuucaccaucgacaaguga

SEQ ID NO: 115006 - RNA, 1410 nt, Artificial Sequence; identical to SEQ ID NO: 112547
  derived and/or modified CDS sequence (opt2) from neuraminidase__InfluenzaA__ADJ37250

SEQ ID NO: 115007 - RNA, 1410 nt, Artificial Sequence
  derived and/or modified CDS sequence (opt2) from neuraminidase__InfluenzaA__ADJ37252
augaaccccaaccagaagaucaucaccaucggcuccgucucccucaccaucuccaccaucugcuucuucaugcagaucgccauccucgucaccaccgucacccuccacuucaagcaguacgaguucaacuccccccccaacaaccaggucaugcucugcgagcccaccaucaucgagcgcaacaucaccgagaucgucuaccucaccaacaccaccaucgagaaggagaucugccccaagcucgccgaguaccgcaacugguccaagccccagugcgacaucaccggcuucgcccccuucuccaaggacaacuccauccgccucuccgccggcggcgacaucugggucacccgcgagcccuacgucuccugcgaccccgacaagugcuaccaguucgcccucggccagggcaccacccucaacaacguccacuccaacaacaucguccgcgaccgcacccccuaccgcacccuccucaugaacgagcucggcguccccuuccaccucggcaccaagcaggucugcaucgccugguccuccuccuccugccacgacggcaaggccuggcuccacgucugcaucaccggcgacgacaagaacgccaccgccuccuucaucuacaacggccgccucgucgacuccgucgucuccugguccaaggacauccuccgcacccaggaguccgagugcgucugcaucaacggcaccugcaccgucgucaugaccgacggcuccgccuccggcaaggccgacaccaagauccucuucaucgaggagggcaagaucguccacaccuccacccucuccggcuccgcccagcacgucgaggagugcuccugcuacccccgcuaccccggcguccgcugcgucugccgcgacaacuggaagggcuccaaccgccccaucgucgacaucaacaucaaggaccacuccaucgucuccuccuacgucugcuccggccucgucggcgacaccccccgcaagaacgacuccuccuccuccucccacugccucgaccccaacaacgaggagggcggccacggcgucaagggcugggccuucgacgacggcaacgacgucuggaugggccgcaccaucuccgagaagucccgccucggcuacgagaccuucaaggucaucgagggcugguccaaccccaaguccaagcuccagaucaaccgccaggucaucgucgaccgcggcaaccgcuccggcuacuccggcaucuucuccgucgagggcaaguccugcaucaaccgcugcuucuacgucgagcucauccgcggccgcaaggaggagaccgagguccucuggaccuccaacuccaucgucgucuucugcggcaccuccggcaccuacggcaccggcuccuggcccgacggcgccaacaucaaccucaugcccaucuga

SEQ ID NO: 115008 - RNA, 1410 nt, Artificial Sequence; identical to SEQ ID NO: 112774
  derived and/or modified CDS sequence (opt2) from neuraminidase__InfluenzaA__ADJ37263

SEQ ID NO: 115009 - RNA, 1410 nt, Artificial Sequence; identical to SEQ ID NO: 112764
  derived and/or modified CDS sequence (opt2) from neuraminidase__InfluenzaA__ADJ37273

SEQ ID NO: 115010 - RNA, 1410 nt, Artificial Sequence; identical to SEQ ID NO: 112774
  derived and/or modified CDS sequence (opt2) from neuraminidase__InfluenzaA__ADJ40447

SEQ ID NO: 115011 - RNA, 1410 nt, Artificial Sequence; identical to SEQ ID NO: 112774
  derived and/or modified CDS sequence (opt2) from neuraminidase__InfluenzaA__ADJ40457

SEQ ID NO: 115012 - RNA, 1410 nt, Artificial Sequence; identical to SEQ ID NO: 114125
  derived and/or modified CDS sequence (opt2) from neuraminidase__InfluenzaA__ADJ40467

SEQ ID NO: 115013 - RNA, 1410 nt, Artificial Sequence
  derived and/or modified CDS sequence (opt2) from neuraminidase__InfluenzaA__ADJ40477
augaaccccaaccagaagaucaucaccaucggcuccgucugcaugaccaucggcauggccaaccucauccuccagaucggcaacaucaucuccaucuggaucucccacuccauccagcucggcaaccagaaccagaucgagaccugcaaccaguccgucaucaccuacgagaacaacaccugggucaaccagaccuacgucaacaucuccaacaccaacuucgccgccggccaguccgucgucuccgucaagcucgccggcaacuccucccucugccccgucuccggcugggccaucuacuccaaggacaacuccauccgcaucggcuccaagggcgacgucuucgucauccgcgagcccuucaucuccugcuccccccucgagugccgcaccuucuuccucacccagggcgcccuccucaacgacaagcacuccaacggcaccaucaaggaccgcucccccuaccgcacccucauguccugccccaucggcgagguccccucccccuacaacucccgcuucgaguccgucgccugguccgccuccgccugccacgacggcaucaacuggcucaccaucggcaucuccggccccgacaacggcgccgucgccguccucaaguacaacggcaucaucaccgacaccaucaaguccuggcgcaacaacauccuccgcacccaggaguccgagugcgccugcgucaacggcuccugcuucaccgucaugaccgacggccccuccgacggccaggccuccuacaagaucuuccgcaucgagaagggcaagaucgucaaguccgucgagaugaacgcccccaacuacuacuacgaggagugcuccugcuaccccgacuccuccgagaucaccugcgucugccgcgacaacuggcacggcuccaaccgccccugggucuccuucaaccagaaccucgaguaccagaucggcuacaucugcuccggcaucuucggcgacaacccccgccccaacgacaagaccggcuccugcggccccgucuccuccaacggcgccaacggcgucaagggcuucuccuucaaguacggcaacggcgucuggaucggccgcaccaaguccaucuccucccgcaacggcuucgagaugaucugggaccccaacggcuggaccggcaccgacaacaacuucuccaucaagcaggacaucgucggcaucaacgagugguccggcuacuccggcuccuucguccagcaccccgagcucaccggccucgacugcauccgccccugcuucugggucgagcucauccgcggccgccccaaggagaacaccaucuggaccuccggcuccuccaucuccuucugcggcgucaacuccgacaccaugggcugguccuggcccgacggcgccgagcuccccuucaccaucgacaaguga

SEQ ID NO: 115014 - RNA, 1410 nt, Artificial Sequence; identical to SEQ ID NO: 112774
  derived and/or modified CDS sequence (opt2) from neuraminidase__InfluenzaA__ADJ40487

SEQ ID NO: 115015 - RNA, 1410 nt, Artificial Sequence; identical to SEQ ID NO: 112774
  derived and/or modified CDS sequence (opt2) from neuraminidase__InfluenzaA__ADJ40507

SEQ ID NO: 115016 - RNA, 1410 nt, Artificial Sequence; identical to SEQ ID NO: 112774
  derived and/or modified CDS sequence (opt2) from neuraminidase__InfluenzaA__ADJ40517

SEQ ID NO: 115017 - RNA, 1410 nt, Artificial Sequence; identical to SEQ ID NO: 112774
  derived and/or modified CDS sequence (opt2) from neuraminidase__InfluenzaA__ADJ40527

SEQ ID NO: 115018 - RNA, 1410 nt, Artificial Sequence
  derived and/or modified CDS sequence (opt2) from neuraminidase__InfluenzaA__ADJ40537
augaaccccaaccagaagaucaucaccaucggcuccgucugcaugaccaucggcauggccaaccucauccuccagaucggcaacaucaucuccaucuggaucucccacuccauccagcucggcaaccagaaccagaucgagaccugcaaccaguccgucaucaccuacgagaacaacaccugggucaaccagaccuacgucaacaucuccaacaccaacuucgccgccggccaguccggcgucuccgucaagcucgccggcaacuccucccucugccccgucuccggcugggccaucuacuccaaggacaacuccauccgcaucggcuccaagggcgacgucuucgucauccgcgagcccuucaucuccugcuccccccucgagugccgcaccuucuuccucacccagggcgcccuccucaacgacaagcacuccaacggcaccaucaaggaccgcucccccuaccgcacccucauguccugccccaucggcgagguccccucccccuacaacucccgcuucgaguccgucgccugguccgccuccgccugccacgacggcaucaacuggcucaccaucggcaucuccggccccgacaacggcgccgucgccguccucaaguacaacggcaucaucaccgacaccaucaaguccuggcgcaacaacauccuccgcacccaggaguccgagugcgccugcgucaacggcuccugcuucaccgucaugaccgacggccccuccgacggccaggccuccuacaagaucuuccgcaucgagaagggcaagaucgucaaguccgucgagaugaacgcccccaacuaccacuacgaggagugcuccugcuaccccgacuccuccgagaucaccugcgucugccgcgacaacuggcacggcuccaaccgccccugggucuccuucaaccagaaccucgaguaccagaucggcuacaucugcuccggcaucuucggcgacaacccccgccccaacgacaagaccggcuccugcggccccgucuccuccaacggcgccaacggcgucaagggcuucuccuucaaguacggcaacggcgucuggaucggccgcaccaaguccaucuccucccgcaacggcuucgagaugaucugggaccccaacggcuggaccggcaccgacaacaacuucuccaucaagcaggacaucgucggcaucaacgagugguccggcuacuccggcuccuucguccagcaccccgagcucaccggccucgacugcauccgccccugcuucugggucgagcucauccgcggccgccccaaggagaacaccaucuggaccuccggcuccuccaucuccuucugcggcgucaacuccgacaccgucggcugguccuggcccgacggcgccgagcuccccuucaccaucgacaaguga

SEQ ID NO: 115019 - RNA, 1410 nt, Artificial Sequence
  derived and/or modified CDS sequence (opt2) from neuraminidase__InfluenzaA__ADJ40547
augaaccccaaccagaagaucaucaccaucggcuccgucugcaugaccaucggcauggccaaccucauccuccagaucggcaacaucaucuccaucuggaucucccacuccauccagcucggcaaccagaaccagaucgagaccugcaaccaguccgucaucaccuacgagaacaacaccugggucaaccagaccuacgucaacaucuccaacaccaacuucgccgccggccaguccgucgucuccgucaagcucgccggcaacuccucccucugccccgucuccggcugggccaucuacuccaaggacaacuccauccgcaucggcuccaagggcgacgucuucgucauccgcgagcccuucaucuccugcuccccccucgagugccgcaccuucuuccucacccagggcgcccuccucaacgacaagcacuccaacggcaccaucaaggaccgcucccccuaccgcacccucauguccugccccaucggcgagguccccucccccuacaacucccgcuucgaguccgucgccugguccgccuccgccugccacgacggcaucaacuggcucaccaucggcaucuccggccccgacaacggcgccgucgccguccucaaguacaacggcaucaucaccgacaccaucaaguccuggcgcaacaacauccuccgcacccaggaguccgagugcgccugcgucaacggcuccugcuucaccgucaugaccgacggccccuccgacggccaggccuccuacaagaucuuccgcaucgagaagggcaagaucaucaaguccgucgagaugaacgcccccaacuaccacuacgaggagugcuccugcuaccccgacuccuccgagaucaccugcgucugccgcgacaacuggcacggcuccaaccgccccugggucuccuucaaccagaaccucgaguaccagaucggcuacaucugcuccggcaucuucggcgacaacccccgccccaacgacaagaccggcuccugcggccccgucuccuccaacggcgccaacggcgucaagggcuucuccuucaaguacggcaacggcgucuggaucggccgcaccaaguccaucuccucccgcaacggcuucgagaugaucugggaccccaacggcuggaccggcaccgacaacaacuucuccaucaagcaggacaucaucggcaucaacgagugguccggcuacuccggcuccuucguccagcaccccgagcucaccggccucgacugcauccgccccugcuucugggucgagcucauccgcggccgccccaaggagaacaccaucuggaccuccggcuccuccaucuccuucugcggcgucaacuccgacaccgucggcugguccuggcccgacggcgccgagcuccccuucaccaucgacaaguga

SEQ ID NO: 115020 - RNA, 1410 nt, Artificial Sequence; identical to SEQ ID NO: 112774
  derived and/or modified CDS sequence (opt2) from neuraminidase__InfluenzaA__ADJ40557

SEQ ID NO: 115021 - RNA, 1410 nt, Artificial Sequence; identical to SEQ ID NO: 112774
  derived and/or modified CDS sequence (opt2) from neuraminidase__InfluenzaA__ADJ40577

SEQ ID NO: 115022 - RNA, 1410 nt, Artificial Sequence; identical to SEQ ID NO: 112774
  derived and/or modified CDS sequence (opt2) from neuraminidase__InfluenzaA__ADJ40587

SEQ ID NO: 115023 - RNA, 1410 nt, Artificial Sequence
  derived and/or modified CDS sequence (opt2) from neuraminidase__InfluenzaA__ADJ40597
augaaccccaaccagaagaucaucaccaucggcuccgucugcaugaccaucggcauggccaaccucauccuccagaucggcaacaucaucuccaucuggaucucccacuccauccagcucggcaaccagaaccagaucgagaccugcaaccaguccgucaucaccuacgagaacaacaccugggucaaccagaccuacgucaacaucuccaacaccaacuucgccgccggccaguccgucgucuccgucaagcucgccggcaacuccucccucugccccgucuccggcugggccaucuacuccaaggacaacuccauccgcaucggcuccaagggcgacgucuucgucauccgcgagcccuucaucuccugcuccccccucgagugccgcaccuucuuccucacccagggcgcccuccucaacgacaagcacuccaacggcaccaucaaggaccgcucccccuaccgcacccucauguccugccccaucggcgagguccccucccccuacaacucccgcuucgaguccgucgccugguccgccuccgccugccacgacggcaucaacuggcucaccaucggcaucuccggccccgacaacggcgccgucgccguccucaaguacaacggcaucaucaccgacaccaucaaguccuggcgcaacaacauccuccgcacccaggaguccgagugcgccugcgucaacggcuccugcuucaccgucaugaccgacggccccuccgacggccaggccuccuacaagaucuuccgcaucgagaagggcaagaucgucaaguccgucgagaugaacgcccccaacuaccacuacgaggagugcuccugcuaccccgacuccuccgagaucaccugcgucugccgcgacaacuggcacggcuccaaccgccccugggucuccuucaaccagaaccucgaguaccagaucggcuacaucugcuccggcaucuucggcgacaacccccgccccaacgacaagaccggcuccugcggccccgucuccuccaacggcgccaacggcgucaagggcuucuccuucaaguacggcaacggcgucuggaucggccgcaccaaguccaucuccucccgcaacggcuucgagaugaucugggaccccaacggcuggaccggcaccgacaacaacuuccucaucaagcaggacaucgucggcaucaacgagugguccggcuacuccggcuccuucguccagcaccccgagcucaccggccucgacugcauccgccccugcuucugggucgagcucauccgcggccgccccaaggagaacaccaucuggaccuccggcuccuccaucuccuucugcggcgucaacuccgacaccgucggcugguccuggcccgacggcgccgagcuccccuucaccaucgacaaguga

SEQ ID NO: 115024 - RNA, 1410 nt, Artificial Sequence; identical to SEQ ID NO: 112774
  derived and/or modified CDS sequence (opt2) from neuraminidase__InfluenzaA__ADJ40607

SEQ ID NO: 115025 - RNA, 1410 nt, Artificial Sequence; identical to SEQ ID NO: 112774
  derived and/or modified CDS sequence (opt2) from neuraminidase__InfluenzaA__ADJ40617

SEQ ID NO: 115026 - RNA, 1410 nt, Artificial Sequence; identical to SEQ ID NO: 113128
  derived and/or modified CDS sequence (opt2) from neuraminidase__InfluenzaA__ADJ40627

SEQ ID NO: 115027 - RNA, 1410 nt, Artificial Sequence; identical to SEQ ID NO: 112774
  derived and/or modified CDS sequence (opt2) from neuraminidase__InfluenzaA__ADJ40637

SEQ ID NO: 115028 - RNA, 1410 nt, Artificial Sequence; identical to SEQ ID NO: 112774
  derived and/or modified CDS sequence (opt2) from neuraminidase__InfluenzaA__ADJ40657

SEQ ID NO: 115029 - RNA, 1410 nt, Artificial Sequence; identical to SEQ ID NO: 112774
  derived and/or modified CDS sequence (opt2) from neuraminidase__InfluenzaA__ADJ40667

SEQ ID NO: 115030 - RNA, 1410 nt, Artificial Sequence; identical to SEQ ID NO: 112774
  derived and/or modified CDS sequence (opt2) from neuraminidase__InfluenzaA__ADJ40677

SEQ ID NO: 115031 - RNA, 1410 nt, Artificial Sequence
  derived and/or modified CDS sequence (opt2) from neuraminidase__InfluenzaA__ADJ41819
augaaccccaaccagaagaucaucaccaucggcuccgucucccucaccaucgccaccaucugcuuccucaugcagaucgccauccucgucaccaccgucacccuccacuucaagcaguacgagugcuccuccccccccaacaaccaggucguccccugcgagcccaucaucaucgagcgcaacaucaccgagaucgucuaccucaccaacaccaccaucgagaaggagaucugccccaagcucgucgaguaccgcaacugguccaagccccagugcaagaucaccggcuucgcccccuucuccaaggacaacuccauccgccucuccgccggcggcgacaucugggucacccgcgagcccuacgucuccugcgaccccggcaagugcuaccaguucgcccucggccagggcaccacccucgacaacaagcacuccaacgacaccauccacgaccgcacccccuaccgcacccuccucaugaacgagcucggcguccccuuccaccucggcacccgccaggucugcaucgccugguccuccuccuccugccacgacggcaaggccuggcuccacgucugcaucaccggcuacgacaagaacgccaccgccuccuucaucuacgacggccgccucgucgacuccaucggcuccugguccaagaacauccuccgcacccaggaguccgagugcgucugcaucaacggcaccugcaccgucgucaugaccgacggcuccgccuccgagcgcgccgacaccaagauccucuucaucgaggagggcaagaucguccacaucuccccccucuccggcuccgcccagcacgucgaggagugcuccugcuacccccgcuaccccggcguccgcugcgucugccgcgacaacuggaagggcuccaaccgccccgucgucgacaucaacgucaaggacuacuccaucgucuccuccuacgucugcuccggccucgucggcgacaccccccgcaagaacgaccgcuccuccuccuccuacugccgcaaccccaacaacgagaagggcaaccacggcgucaagggcugggccuucgacgacggcaacgacgucuggaugggccgcaccaucuccgaggagucccgcuccggcuacgagaccuucaaggucaucggcggcugguccacccccaacuccaagcuccagaucaaccgccaggucaucgucgacuccggcaaccgcuccggcuacuccggcaucuucuccgucgagggcaaguccugcaucaaccgcugcuucuacgucgagcucauccgcggccgcgagcaggagacccgcgucugguggaccuccaacuccaucgucgucuucugcggcaccuccggcaccuacggcaccggcuccuggcccgacggcgccgacaucaaccucaugcccaucuga

SEQ ID NO: 115032 - RNA, 1410 nt, Artificial Sequence; identical to SEQ ID NO: 112774
  derived and/or modified CDS sequence (opt2) from neuraminidase__InfluenzaA__ADJ56642

SEQ ID NO: 115033 - RNA, 1410 nt, Artificial Sequence; identical to SEQ ID NO: 112774
  derived and/or modified CDS sequence (opt2) from neuraminidase__InfluenzaA__ADJ56652

SEQ ID NO: 115034 - RNA, 1410 nt, Artificial Sequence; identical to SEQ ID NO: 112774
  derived and/or modified CDS sequence (opt2) from neuraminidase__InfluenzaA__ADJ80637

SEQ ID NO: 115035 - RNA, 1410 nt, Artificial Sequence; identical to SEQ ID NO: 113792
  derived and/or modified CDS sequence (opt2) from neuraminidase__InfluenzaA__ADJ80647

SEQ ID NO: 115036 - RNA, 1410 nt, Artificial Sequence; identical to SEQ ID NO: 113792
  derived and/or modified CDS sequence (opt2) from neuraminidase__InfluenzaA__ADJ80657

SEQ ID NO: 115037 - RNA, 1410 nt, Artificial Sequence; identical to SEQ ID NO: 112774
  derived and/or modified CDS sequence (opt2) from neuraminidase__InfluenzaA__ADJ80667

SEQ ID NO: 115038 - RNA, 1410 nt, Artificial Sequence; identical to SEQ ID NO: 114687
  derived and/or modified CDS sequence (opt2) from neuraminidase__InfluenzaA__ADJ80677

SEQ ID NO: 115039 - RNA, 1410 nt, Artificial Sequence; identical to SEQ ID NO: 114062
  derived and/or modified CDS sequence (opt2) from neuraminidase__InfluenzaA__ADJ80687

SEQ ID NO: 115040 - RNA, 1410 nt, Artificial Sequence
  derived and/or modified CDS sequence (opt2) from neuraminidase__InfluenzaA__ADJ80697
augaaccccaaccagaagaucaucaccaucggcuccgucugcaugaccaucggcauggccaaccucauccuccagaucggcaacaucaucuccaucuggaucucccacuccauccagcucggcaaccagaaccagaucgagaccugcaaccaguccgucaucaccuacgagaacaacaccugggucaaccagaccuacgucaacaucuccaacaccaacuucgccgccggccaguccgucaucuccgucaagcucgccggcaacuccucccucugccccgucuccggcugggccaucuacuccaaggacaacuccguccgcaucggcuccaagggcgacgucuucgucauccgcgagcccuucaucuccugcuccccccucgagugccgcaccuucuuccucacccagggcgcccuccucaacgacaagcacuccaacggcaccaucaaggaccgcucccccuaccgcacccucauguccugccccaucggcgagguccccucccccuacaacucccgcuucgaguccgucgccugguccgccuccgccugccacgacggcaucaacuggcucaccaucggcaucuccggccccgacaacggcgccgucgccguccucaaguacaacggcaucaucaccgacaccaucaaguccuggcgcaacaacauccuccgcacccaggaguccgagugcgccugcgucaacggcuccugcuucaccgucaugaccgacggccccuccgacggccaggccuccuacaagaucuuccgcaucgagaagggcaagaucgucaaguccgucgagaugaacgcccccaacuaccacuacgaggagugcuccugcuaccccgacuccuccgagaucaccugcgucugccgcgacaacuggcacggcuccaaccgccccugggucuccuucaaccagaaccucgaguaccagaucggcuacaucugcuccggcaucuucggcgacaacccccgccccaacgacaagaccggcuccugcggccccgucuccuccaacggcgccaacggcgucaagggcuucuccuucaaguacggcaacggcgucuggaucggccgcaccaaguccaucuccucccgcaacggcuucgagaugaucugggaccccaacggcuggaccggcaccgacaacaacuucuccaucaagcaggacaucgucggcaucaacgagugguccggcuacuccggcuccuucguccagcaccccgagcucaccggccucgacugcauccgccccugcuucugggucgagcucauccgcggccgccccaaggagaacaccaucuggaccuccggcuccuccaucuccuucugcggcgucaacuccgacaccgucggcugguccuggcccgacggcgccgagcuccccuucaccaucgacaaguga

SEQ ID NO: 115041 - RNA, 1410 nt, Artificial Sequence
  derived and/or modified CDS sequence (opt2) from neuraminidase__InfluenzaA__ADJ80717
augaaccccaaccagaagaucaucaccaucggcuccgucugcaugaccaucggcauggccaaccucauccuccagaucggcaacaucaucuccaucuggaucucccacuccauccagcucggcaaccagaaccagaucgagaccugcaaccaguccgucaucaccuacgagaacaacaccugggucaaccagaccuacgucaacaucuccaacaccaacuucgccgccggccaguccgucgucuccgucaagcucgccggcaacuccucccucugccccgucuccggcugggccgucuacuccaaggacaacuccauccgcaucggcuccaagggcgacgucuucgucauccgcgagcccuucaucuccugcuccccccucgagugccgcaccuucuuccucacccagggcgcccuccucaacgacaagcacuccaacggcaccaucaaggaccgcucccccuaccgcacccucauguccugccccaucggcgagguccccucccccuacaacucccgcuucgaguccgucgccugguccgccuccgccugccacgacggcaucaacuggcucaccaucggcaucuccggccccgacaacggcgccgucgccguccucaaguacaacggcaucaucaccgacaccaucaaguccuggcgcaacaacauccuccgcacccaggaguccgagugcgccugcgucaacggcuccugcuucaccgucaugaccgacggccccuccgacggccaggccuccuacaagaucuuccgcaucgagaagggcaagaucgucaaguccgucgagaugaacgcccccaacuaccacuacgaggagugcuccugcuaccccgacuccuccgagaucaccugcgucugccgcgacaacuggcacggcuccaaccgccccugggucuccuucaaccagaaccucgaguaccagaucggcuacaucugcuccggcaucuucggcgacaacccccgccccaacgacaagaccggcuccugcggccccgucuccuccaacggcgccaacggcgucaagggcuucuccuucaaguacggcaacggcgucuggaucggccgcaccaaguccaucuccucccgcaacggcuucgagaugaucugggaccccaacggcuggaccggcaccgacaacaacuucuccaucaagcaggacaucgucggcaucaacgagugguccggcuacuccggcuccuucguccagcaccccgagcucaccggccucgacugcauccgccccugcuucugggucgagcucauccgcggccgccccaaggagaacaccaucuggaccuccggcuccuccaucuccuucugcggcgucaacuccgacaccgucggcugguccuggcccgacggcgccgagcuccccuucaccaucgacaaguga

SEQ ID NO: 115042 - RNA, 1410 nt, Artificial Sequence
  derived and/or modified CDS sequence (opt2) from neuraminidase__InfluenzaA__ADJ80727
augaaccccaaccagaagaucaucaccaucggcuccgucugcaugaccaucggcauggccaaccucauccuccagaucggcaacaucaucuccaucuggaucucccacuccauccagcucggcaaccagaaccagaucgagaccugcaaccaguccgucaucaccuacgagaacaacaccugggucaaccagaccuacgucaacaucuccaacaccaacuucgccgccggccaguccgucgucuccgucaagcucgccggcaacuccucccucugccccgucuccggcugggucaucuacuccaaggacaacuccauccgcaucggcuccaagggcgacgucuucgucauccgcgagcccuucaucuccugcuccccccucgagugccgcaccuucuuccucacccagggcgcccuccucaacgacaagcacuccaacggcaccaucaaggaccgcucccccuaccgcacccucauguccugccccaucggcgagguccccucccccuacaacucccgcuucgaguccgucgccugguccgccuccgccugccacgacggcaucaacuggcucaccaucggcaucuccggccccgacaacggcgccgucgccguccucaaguacaacggcaucaucaccgacaccaucaaguccuggcgcaacaacauccuccgcacccaggaguccgagugcgccugcgucaacggcuccugcuucaccgucaugaccgacggccccuccgacggccaggccuccuacaagaucuuccgcaucgagaagggcaagaucgucaaguccgucgagaugaacgcccccaacuaccacuacgaggagugcuccugcuaccccgacuccuccgagaucaccugcgucugccgcgacaacuggcacggcuccaaccgccccugggucuccuucaaccagaaccucgaguaccagaucggcuacaucugcuccggcaucuucggcgacaacccccgccccaacgacaagaccggcuccugcggccccgucuccuccaacggcgccaacggcgucaagggcuucuccuucaaguacggcaacggcgucuggaucggccgcaccaaguccaucuccucccgcaacggcuucgagaugaucugggaccccaacggcuggaccggcaccgacaacaacuucuccaucaagcaggacaucgucggcaucaacgagugguccggcuacuccggcuccuucguccagcaccccgagcucaccggccucgacugcauccgccccugcuucugggucgagcucauccgcggccgccccaaggagaacaccaucuggaccuccggcuccuccaucuccuucugcggcgucaacuccgacaccgucggcugguccuggcccgacggcgccgagcuccccuucaccaucgacaaguga

SEQ ID NO: 115043 - RNA, 1410 nt, Artificial Sequence; identical to SEQ ID NO: 113541
  derived and/or modified CDS sequence (opt2) from neuraminidase__InfluenzaA__ADJ80737

SEQ ID NO: 115044 - RNA, 1410 nt, Artificial Sequence
  derived and/or modified CDS sequence (opt2) from neuraminidase__InfluenzaA__ADJ80747
augaaccccaaccagaagaucaucaccaucggcuccgucugcaugaccaucggcauggccaaccucauccuccagaucggcaacaucaucuccaucuggaucucccacuccauccagcucggcaaccagaaccagaucgagaccugcaaccaguccgucaucaccuacgagaacaacaccugggucaaccagaccuacgucaacaucuccaacaccaacuucgccgccggccaguccgucgucuccgucaagcucgccggcuccuccucccucugccccgucuccggcugggccaucuacuccaaggacaacuccauccgcaucggcuccaagggcgacgucuucgucauccgcgagcccuucaucuccugcuccccccucgagugccgcaccuucuuccucacccagggcgcccuccucaacgacaagcacuccaacggcaccaucaaggaccgcucccccuaccgcacccucauguccugccccaucggcgagguccccucccccuacaacucccgcuucgaguccgucgccugguccgccuccgccugccacgacggcaucaacuggcucaccaucggcaucuccggccccgacaacggcgccgucgccguccucaaguacaacggcaucaucaccgacaccaucaaguccuggcgcaacaacauccuccgcacccaggaguccgagugcgccugcgucaacggcuccugcuucaccgucaugaccgacggccccuccgacggccaggccuccuacaagaucuuccgcaucgagcgcggcaagaucgucaaguccgucgagaugaacgcccccaacuaccacuacgaggagugcuccugcuaccccgacuccuccgagaucaccugcgucugccgcgacaacuggcacggcuccaaccgccccugggucuccuucaaccagaaccucgaguaccagaucggcuacaucugcuccggcaucuucggcgacaacccccgccccaacgacaagaagggcuccugcggccccgucuccuccaacggcgccaacggcgucaagggcuucuccuucaaguacggcaacggcgucuggaucggccgcaccaaguccaucuccucccgcaacggcuucgagaugaucugggaccccaacggcuggaccggcaccgacaacaacuucuccaucaagcaggacaucgucgagaucaacgagugguccggcuacuccggcuccuucguccagcaccccgagcucaccggccucgacugcauccgccccugcuucugggucgagcucauccgcggccgccccaaggagaacaccaucuggaccuccggcuccuccaucuccuucugcggcgucaacuccgacaccgucggcugguccuggcccgacggcgccgagcuccccuucaccaucgacaaguga

SEQ ID NO: 115045 - RNA, 1410 nt, Artificial Sequence; identical to SEQ ID NO: 112774
  derived and/or modified CDS sequence (opt2) from neuraminidase__InfluenzaA__ADJ80757

SEQ ID NO: 115046 - RNA, 1410 nt, Artificial Sequence; identical to SEQ ID NO: 112774
  derived and/or modified CDS sequence (opt2) from neuraminidase__InfluenzaA__ADJ80767

SEQ ID NO: 115047 - RNA, 1410 nt, Artificial Sequence; identical to SEQ ID NO: 113357
  derived and/or modified CDS sequence (opt2) from neuraminidase__InfluenzaA__ADJ80777

SEQ ID NO: 115048 - RNA, 1410 nt, Artificial Sequence; identical to SEQ ID NO: 112774
  derived and/or modified CDS sequence (opt2) from neuraminidase__InfluenzaA__ADJ80787

SEQ ID NO: 115049 - RNA, 1410 nt, Artificial Sequence
  derived and/or modified CDS sequence (opt2) from neuraminidase__InfluenzaA__ADJ80797
augaaccccaaccagaagaucaucaccaucggcuccgucugcaugaccaucggcauggccaaccucauccuccagaucggcaacaucaucuccaucuggaucucccacuccauccagcucggcaacaagaaccagaucgagaccugcaaccaguccgucaucaccuacgagaacaacaccugggucaaccagaccuacgucaacaucuccaacaccaacuucgccgccggccaguccgucgucuccgucaagcucgccggcaacuccucccucugccccgucuccggcugggccaucuacuccaaggacaacuccauccgcaucggcuccaagggcgacgucuucgucauccgcgagcccuucaucuccugcuccccccucgagugccgcaccuucuuccucacccagggcgcccuccucaacgacaagcacuccaacggcaccaucaaggaccgcucccccuaccgcacccucauguccugccccaucggcgagguccccucccccuacaacucccgcuucgaguccgucgccugguccgccuccgccugccacgacggcaucaacuggcucaccaucggcaucuccggccccgacaacggcgccgucgccguccucaaguacaacggcaucaucaccgacaccaucaaguccuggcgcaacaacauccuccgcacccaggaguccgagugcgccugcgucaacggcuccugcuucaccgucaugaccgacggccccuccgacggccaggccuccuacaagaucuuccgcaucgagaagggcaagaucgucaaguccgucgagaugaacgcccccaacuaccacuacgaggagugcuccugcuaccccgacuccuccgagaucaccugcgucugccgcgacaacuggcacggcuccaaccgccccugggucuccuucaaccagaaccucgaguaccagaucggcuacaucugcuccggcaucuucggcgacaacccccgccccaacgacaagaagggcuccugcggccccgucuccuccaacggcgccaacggcgucaagggcuucuccuucaaguacggcaacggcgucuggaucggccgcaccaaguccaucuccucccgcaacggcuucgagaugaucugggaccccaacggcuggaccggcaccgacaacaacuucuccaucaagcaggacaucgucggcaucaacgagugguccggcuacuccggcuccuucguccagcaccccgagcucaccggccucgacugcauccgccccugcuucugggucgagcucauccgcggccgccccaaggagaacaccaucuggaccuccggcuccuccaucuccuucugcggcgucaacuccgacaccgucggcugguccuggcccgacggcgccgagcuccccuucaccaucgacaaguga

SEQ ID NO: 115050 - RNA, 1410 nt, Artificial Sequence; identical to SEQ ID NO: 113792
  derived and/or modified CDS sequence (opt2) from neuraminidase__InfluenzaA__ADJ80807

SEQ ID NO: 115051 - RNA, 1410 nt, Artificial Sequence; identical to SEQ ID NO: 112774
  derived and/or modified CDS sequence (opt2) from neuraminidase__InfluenzaA__ADJ80817

SEQ ID NO: 115052 - RNA, 1410 nt, Artificial Sequence; identical to SEQ ID NO: 112774
  derived and/or modified CDS sequence (opt2) from neuraminidase__InfluenzaA__ADJ80827

SEQ ID NO: 115053 - RNA, 1410 nt, Artificial Sequence; identical to SEQ ID NO: 114287
  derived and/or modified CDS sequence (opt2) from neuraminidase__InfluenzaA__ADJ80837

SEQ ID NO: 115054 - RNA, 1410 nt, Artificial Sequence; identical to SEQ ID NO: 114785
  derived and/or modified CDS sequence (opt2) from neuraminidase__InfluenzaA__ADJ80851

SEQ ID NO: 115055 - RNA, 1410 nt, Artificial Sequence
  derived and/or modified CDS sequence (opt2) from neuraminidase__InfluenzaA__ADJ80861
augaaccccaaccagaagaucaucaccaucggcuccgucugcaugaccaucggcauggccaaccucauccuccagaucggcaacaucaucuccaucuggaucucccacuccauccagcucggcaaccagaaccagaucgagaccugcaaccaguccgucaucaccuacgagaacaacaccugggucaaccagaccuacgucaacaucuccaacaccaacuucgccgccggccaguccgucgucuccgucaagcucgccggcaacuccucccucugccccgucuccggcugggccaucuacuccaaggacaacuccauccgcaucggcuccaagggcgacgucuucgucauccgcgagcccuucaucuccugcuccccccucgagugccgcaccuucuuccucacccagggcgcccuccucaacgacaagcacuccaacggcaccaucaaggaccgcucccccuaccgcacccucauguccugccccaucggcgagguccccucccccuacaacucccgcuucgaguccgucgccugguccgccuccgccugccacgacggcaucaacuggcucaccaucggcaucuccggccccgacaacggcgccgucgccguccucaaguacaacggcaucaucaccgacaccaucaaguccuggcgcaacaacauccuccgcacccaggaguccgagugcgccugcgucaacggcuccugcuucaccgucaugaccgacggccccuccgacggccaggccuccuacaagaucuuccgcaucgagaagggcaagaucgucaaguccgucgagaugaacgcccccaacuaccacuacgaggagugcuccugcuaccccgacuccuccgagaucaccugcgucugccgcgacaacuggcacggcuccaaccgccccugggucuccuucaaccagaaccucgaguaccagaucggcuacaucugcuccggcaucuucggcgacaacccccgccccaacgacaagaccggcuccugcggccccgucucccccaacggcgccaacggcgucaagggcuucuccuucaaguacggcaacggcgucuggaucggccgcaccaaguccaucuccucccgcaacggcuucgagaugaucugggaccccaacggcuggaccggcaccgacaacaacuucuccaucaagcaggacaucgucggcaucaacgagugguccggcuacuccggcuccuucguccagcaccccgagcucaccggccucgacugcauccgccccugcuucugggucgagcucauccgcggccgccccaaggagaacaccaucuggaccuccggcuccuccaucuccuucugcggcgucaacuccgacaccgucggcugguccuggcccgacggcgccgagcuccccuucaccaucgacaaguga

SEQ ID NO: 115056 - RNA, 1410 nt, Artificial Sequence; identical to SEQ ID NO: 115049
  derived and/or modified CDS sequence (opt2) from neuraminidase__InfluenzaA__ADJ80871

SEQ ID NO: 115057 - RNA, 1410 nt, Artificial Sequence; identical to SEQ ID NO: 112774
  derived and/or modified CDS sequence (opt2) from neuraminidase__InfluenzaA__ADJ80886

SEQ ID NO: 115058 - RNA, 1410 nt, Artificial Sequence
  derived and/or modified CDS sequence (opt2) from neuraminidase__InfluenzaA__ADJ80896
augaaccccaaccagaagaucaucaccaucggcuccgucugcaugaccaucggcauggccaaccucauccuccagaucggcaacaucaucuccaucuggaucucccacuccauccagcucggcaaccagaaccagaucgagaccugcaaccaguccaucaucaccuacgagaacaacaccugggucaaccagaccuacgucaacaucuccaacaccaacuucgccgccggccaguccgucgucuccgucaagcucaccggcaacuccucccucugccccgucuccggcugggccaucuacuccaaggacaacuccauccgcaucggcuccaagggcgacgucuucgucauccgcgagcccuucaucuccugcuccccccucgagugccgcaccuucuuccucacccagggcgcccuccucaacgacaagcacuccaacggcaccaucaaggaccgcucccccuaccgcacccucauguccugccccaucggcgagguccccucccccuacaacucccgcuucgaguccgucgccugguccgccuccgccugccacgacggcaucaacuggcucaccaucggcaucuccggccccgacaacggcgccgucgccguccucaaguacaacggcaucaucaccgacaccaucaaguccuggcgcaacaacauccuccgcacccaggaguccgagugcgccugcgucaacggcuccugcuucaccgucaugaccgacggccccuccgacggccaggccuccuacaagaucuuccgcaucgagaagggcaagaucgucaaguccgucgagaugaacgcccccaacuaccacuacgaggagugcuccugcuaccccgacuccuccgagaucaccugcgucugccgcgacaacuggcacggcuccaaccgccccugggucuccuucaaccagaaccucgaguaccagaucggcuacaucugcuccggcaucuucggcgacaacccccgccccaacgacaagaccggcuccugcggccccgucuccuccaacggcgccaacggcgucaagggcuucuccuucaaguacggcaacggcgucuggaucggccgcaccaaguccaucuccucccgcaacggcuucgagaugaucugggaccccaacggcuggaccggcaccgacaacaacuucuccaucaagcaggacaucgucggcaucaacgagugguccggcuacuccggcuccuucguccagcaccccgagcucaccggccucgacugcauccgccccugcuucugggucgagcucauccgcggccgccccaaggagaacaccaucuggaccuccggcuccuccaucuccuucugcggcgucaacuccgacaccgucggcugguccuggcccgacggcgccgagcuccccuucaccaucgacaaguga

SEQ ID NO: 115059 - RNA, 1410 nt, Artificial Sequence
  derived and/or modified CDS sequence (opt2) from neuraminidase__InfluenzaA__ADJ80913
augaaccccaaccagaagaucaucaccaucggcuccgucugcaugaccaucggcauggccaaccucauccuccagaucggcaacaucaucuccaucuggaucucccacuccauccagcucggcaaccagaaccagaucgagaccugcaaccaguccgucaucaccuacgagaacaacaccugggucaaccagaccuacgucaacaucuccaacaccaacuucgccgccggccaguccgucgucuccgucaagcucgccggcuccuccucccucugccccgucuccggcugggccaucuacuccaaggacaacuccauccgcaucggcuccaagggcgacgucuucgucauccgcgagcccuucaucuccugcuccccccucgagugccgcaccuucuuccucacccagggcgcccuccucaacgacaagcacuccaacggcaccaucaaggaccgcucccccuaccgcacccucauguccugccccaucggcgagguccccucccccuacaacucccgcuucgaguccgucgccugguccgccuccgccugccacgacggcaucaacuggcucaccaucggcaucuccggccccgacaacggcgccgucgccguccucaaguacaacggcaucaucaccgacaccaucaaguccuggcgcaacaacauccuccgcacccaggaguccgagugcgccugcgucaacggcuccugcuucaccgucaugaccgacggccccuccgacggccaggccuccuacaagaucuuccgcaucgagaagggcaagaucgucaaguccgucgagaugaacgcccccaacuaccacuacgaggagugcuccugcuaccccgacuccuccgagaucaccugcgucugccgcgacaacuggcacggcuccaaccgccccugggucuccuucaaccagaaccucgaguaccagaucggcuacaucugcuccggcaucuucggcgacaacccccgccccaacgacaagaagggcuccugcggccccgucuccuccaacggcgccaacggcgucaagggcuucuccuucaaguacggcaacggcgucuggaucggccgcaccaaguccaucuccucccgcuccggcuucgagaugaucugggaccccaacggcuggaccggcaccgacaacaacuucuccaucaagcaggacaucgucggcaucaacgagugguccggcuacuccggcuccuucguccagcaccccgagcucaccggccucgacugcauccgccccugcuucugggucgagcucauccgcggccgccccaaggagaacaccaucuggaccuccggcuccuccaucuccuucugcggcgucaacuccgacaccgucggcugguccuggcccgacggcgccgagcuccccuucaccaucgacaaguga

SEQ ID NO: 115060 - RNA, 1410 nt, Artificial Sequence; identical to SEQ ID NO: 112774
  derived and/or modified CDS sequence (opt2) from neuraminidase__InfluenzaA__ADJ80930

SEQ ID NO: 115061 - RNA, 1410 nt, Artificial Sequence; identical to SEQ ID NO: 112774
  derived and/or modified CDS sequence (opt2) from neuraminidase__InfluenzaA__ADJ80950

SEQ ID NO: 115062 - RNA, 1410 nt, Artificial Sequence; identical to SEQ ID NO: 114062
  derived and/or modified CDS sequence (opt2) from neuraminidase__InfluenzaA__ADJ80960

SEQ ID NO: 115063 - RNA, 1410 nt, Artificial Sequence; identical to SEQ ID NO: 115049
  derived and/or modified CDS sequence (opt2) from neuraminidase__InfluenzaA__ADJ80970

SEQ ID NO: 115064 - RNA, 1410 nt, Artificial Sequence; identical to SEQ ID NO: 112774
  derived and/or modified CDS sequence (opt2) from neuraminidase__InfluenzaA__ADJ80980

SEQ ID NO: 115065 - RNA, 1410 nt, Artificial Sequence; identical to SEQ ID NO: 115049
  derived and/or modified CDS sequence (opt2) from neuraminidase__InfluenzaA__ADJ80996

SEQ ID NO: 115066 - RNA, 1410 nt, Artificial Sequence
  derived and/or modified CDS sequence (opt2) from neuraminidase__InfluenzaA__ADJ81006
augaaccccaaccagaagaucaucaccaucggcuccgucugcaugaccaucggcauggccaaccucauccuccaggucggcaacaucaucuccaucuggaucucccacuccauccagcucggcaaccagaaccagaucgagaccugcaaccaguccaucaucaccuacgagaacaacaccugggucaaccagaccuacgucaacaucuccaacaccaacuucgccgccggccaguccgucgucuccgucaagcucgccggcaacuccucccucugccccgucuccggcugggccaucuacuccaaggacaacuccauccgcaucggcuccaagggcgacgucuucgucauccgcgagcccuucaucuccugcuccccccucgagugccgcaccuucuuccucacccagggcgcccuccucaacgacaagcacuccaacggcaccaucaaggaccgcucccccuaccgcacccucauguccugccccaucggcgagguccccucccccuacaacucccgcuucgaguccgucgccugguccgccuccgccugccacgacggcaucaacuggcucaccaucggcaucuccggccccgacaacggcgccgucgccguccucaaguacaacggcaucaucaccgacaccaucaaguccuggcgcaacaacauccuccgcacccaggaguccgagugcgccugcgucaacggcuccugcuucaccgucaugaccgacggccccuccgacggccaggccuccuacaagaucuuccgcaucgagaagggcaagaucgucaaguccgucgagaugaacgcccccaacuaccacuacgaggagugcuccugcuaccccgacuccuccgagaucaccugcgucugccgcgacaacuggcacggcuccaaccgccccugggucuccuucaaccagaaccucgaguaccagaucggcuacaucugcuccggcaucuucggcgacaacccccgccccaacgacaagaccggcuccugcggccccgucuccuccaacggcgccaacggcgucaagggcuucuccuucaaguacggcaacggcgucuggaucggccgcaccaaguccaccuccucccgcaacggcuucgagaugaucugggaccccaacggcuggaccggcaccgacaacaacuucuccaucaagcaggacaucgucggcaucaacgagugguccggcuacuccggcuccuucguccagcaccccgagcucaccggccucgacugcauccgccccugcuucugggucgagcucauccgcggccgccccaaggagaacaccaucuggaccuccggcuccuccaucuccuucugcggcgucaacuccgacaccgucggcugguccuggcccgacggcgccgagcuccccuucaccaucgacaaguga

SEQ ID NO: 115067 - RNA, 1410 nt, Artificial Sequence; identical to SEQ ID NO: 114785
  derived and/or modified CDS sequence (opt2) from neuraminidase__InfluenzaA__ADJ81016

SEQ ID NO: 115068 - RNA, 1410 nt, Artificial Sequence; identical to SEQ ID NO: 114974
  derived and/or modified CDS sequence (opt2) from neuraminidase__InfluenzaA__ADJ81026

SEQ ID NO: 115069 - RNA, 1410 nt, Artificial Sequence; identical to SEQ ID NO: 112774
  derived and/or modified CDS sequence (opt2) from neuraminidase__InfluenzaA__ADJ81036

SEQ ID NO: 115070 - RNA, 1410 nt, Artificial Sequence
  derived and/or modified CDS sequence (opt2) from neuraminidase__InfluenzaA__ADJ81046
augaaccccaaccagaagaucaucaccaucggcuccgucugcaugaccgucggcauggccaaccucauccuccagaucggcaacaucaucuccaucuggaucucccacuccauccagcucggcaaccagaaccagaucgagaccugcaaccaguccgucaucaccuacgagaacaacaccugggucaaccagaccuacgucaacaucuccaacaccaacuucgccgccggccaguccgucgucuccgucaagcucgccggcaacuccucccucugccccgucuccggcugggccaucuacuccaaggacaacuccauccgcaucggcuccaagggcgacgucuucgucauccgcgagcccuucaucuccugcuccccccucgagugccgcaccuucuuccucacccagggcgcccuccucaacgacaagcacuccaacggcaccaucaaggaccgcucccccuaccgcacccucauguccugccccaucggcgagguccccucccccuacaacucccgcuucgaguccgucgccugguccgccuccgccugccacgacggcaucaacuggcucaccaucggcaucuccggccccgacaacggcgccgucgccguccucaaguacaacggcaucaucaccgacaccaucaaguccuggcgcaacaacauccuccgcacccaggaguccgagugcgccugcgucaacggcuccugcuucaccgucaugaccgacggccccuccgacggccaggccuccuacaagaucuuccgcaucgagaagggcaagaucgucaaguccgucgagaugaacgcccccaacuaccacuacgaggagugcuccugcuaccccgacuccuccgagaucaccugcgucugccgcgacaacuggcacggcuccaaccgccccugggucuccuucaaccagaaccucgaguaccagaucggcuacaucugcuccggcaucuucggcgacaacccccgccccaacgacaagaccggcuccugcggccccgucuccuccaacggcgccaacggcgucaagggcuucuccuucaaguacggcaacggcgucuggaucggccgcaccaaguccaucaacucccgcaacggcuucgagaugaucugggaccccaacggcuggaccggcaccgacaacaacuucuccaucaagcaggacaucgucggcaccaacgagugguccggcuacuccggcuccuucguccagcaccccgagcucaccggccucgacugcauccgccccugcuucugggucgagcucauccgcggccgccccaaggagaacaccaucuggaccuccggcuccuccaucuccuucugcggcgucaacuccgacaccgucggcugguccuggcccgacggcgccgagcuccccuucaccaucgacaaguga

SEQ ID NO: 115071 - RNA, 1410 nt, Artificial Sequence
  derived and/or modified CDS sequence (opt2) from neuraminidase__InfluenzaA__ADJ81056
augaaccccaaccagaagaucaucaccaucggcuccgucugcaugaccaucggcauggccaaccucauccuccagaucggcaacaucaucuccaucuggaucucccacuccauccagcucggcaaccagaaccagaucgagaccugcaaccaguccgucaucaccuacgagaacaacaccugggucaaccagaccuacgucaacaucuccaacaccaacuucgccgccggccaguccgucguccccgucaagcucgccggcuccuccucccucugccccgucuccggcugggccaucuacuccaaggacaacuccauccgcaucggcuccaagggcgacgucuucgucauccgcgagcccuucaucuccugcuccccccucgagugccgcaccuucuuccucacccagggcgcccuccucaacgacaagcacuccaacggcaccaucaaggaccgcucccccuaccgcacccucauguccugccccaucggcgagguccccucccccuacaacucccgcuucgaguccgucgccugguccgccuccgccugccacgacggcaucaacuggcucaccaucggcaucuccggccccgacaacggcgccgucgccguccucaaguacaacggcaucaucaccgacaccaucaaguccuggcgcaacaacauccuccgcacccaggaguccgagugcgccugcgucaacggcuccugcuucaccgucaugaccgacggccccuccgacggccaggccuccuacaagaucuuccgcaucgagaagggcaagaucgucaaguccgucgagaugaacgcccccaacuaccacuacgaggagugcuccugcuaccccgacuccuccgagaucaccugcgucugccgcgacaacuggcacggcuccaaccgccccugggucuccuucaaccagaaccucgaguaccagaucggcuacaucugcuccggcaucuucggcgacaacccccgccccaacgacaagaagggcuccugcggccccgucuccuccaacggcgccaacggcgucaagggcuucuccuucaaguacggcaacggcgucuggaucggccgcaccaaguccaucaacucccgcaacggcuucgagaugaucugggaccccaacggcuggaccggcaccgacaacaacuucuccaucaagcaggacaucgucggcaucaacgagugguccggcuacuccggcuccuucguccagcaccccgagcucaccggccucgacugcauccgccccugcuucugggucgagcucauccgcggccgccccaaggagaacaccaucuggaccuccggcuccuccaucuccuucugcggcgucaacuccgacaccgucggcugguccuggcccgacggcgccgagcuccccuucaccaucgacaaguga

SEQ ID NO: 115072 - RNA, 1410 nt, Artificial Sequence; identical to SEQ ID NO: 114062
  derived and/or modified CDS sequence (opt2) from neuraminidase__InfluenzaA__ADJ81066

SEQ ID NO: 115073 - RNA, 1410 nt, Artificial Sequence; identical to SEQ ID NO: 112635
  derived and/or modified CDS sequence (opt2) from neuraminidase__InfluenzaA__ADJ84775

SEQ ID NO: 115074 - RNA, 1410 nt, Artificial Sequence
  derived and/or modified CDS sequence (opt2) from neuraminidase__InfluenzaA__ADJ88785
augaaccccaaccagaagaucaucaccaucggcuccgucucccucaccaucuccaccaucugcuucuucaugcagaucgccauccucaucaccaccgucacccuccacuucaagcaguacgaguucaacuccccccccaacaaccaggucaugcucugcgagcccaccaucaucgagcgcaacaucaccgagaucgucuaccucaccaacaccaccaucgagaaggagaucugccccaagcucgccgaguaccgcaacugguccaagccccagugcgacaucaccggcuucgcccccuucuccaaggacaacuccauccgccucuccgccggcggcgacaucugggucacccgcgagcccuacgucuccugcgaccccgacaagugcuaccaguucgcccucggccagggcaccacccucaacaacguccacuccaacaacaccguccgcgaccgcacccccuaccgcacccuccucaugaacgagcucggcguccccuuccaccucggcaccaagcaggucugcaucgccugguccuccuccuccugccacgacggcaaggccuggcuccacgucugcaucaccggcgacgacaagaacgccaccgccuccuucaucuacaacggccgccucgucgacuccgucgucuccugguccaaggagauccuccgcacccaggaguccgagugcgucugcaucaacggcaccugcaccgucgucaugaccgacggcuccgccuccggcaaggccgacaccaagauccucuucaucgaggagggcaagaucguccacaccuccacccucuccggcuccgcccagcacgucgaggagugcuccugcuacccccgcuaccccggcguccgcugcgucugccgcgacaacuggaagggcuccaaccgccccaucgucgacaucaacaucaaggaccacuccgucgucuccuccuacgucugcuccggccucgucggcgacaccccccgcaagaacgacuccuccuccuccucccacugccucgaccccaacaacgaggagggcggccacggcgucaagggcugggccuucgacgacggcaacgacgucuggaugggccgcaccaucuccgagaagucccgccucggcuacgagaccuucaaggucaucgagggcugguccaaccacaaguccaagcuccagaucaaccgccaggucaucgucgaccgcggcaaccgcuccggcuacuccggcaucuucuccgucgagggcaaguccugcaucaaccgcugcuucuacgucgagcucauccgcggccgcaaggaggagaccgagguccucuggaccuccaacuccaucgucgucuucugcggcaccuccggcaccuacggcaccggcuccuggcccgacggcgccgaccucaaccucaugcccaucuga

SEQ ID NO: 115075 - RNA, 1410 nt, Artificial Sequence; identical to SEQ ID NO: 112774
  derived and/or modified CDS sequence (opt2) from neuraminidase__InfluenzaA__ADK21716

SEQ ID NO: 115076 - RNA, 1410 nt, Artificial Sequence; identical to SEQ ID NO: 112774
  derived and/or modified CDS sequence (opt2) from neuraminidase__InfluenzaA__ADK21726

SEQ ID NO: 115077 - RNA, 1410 nt, Artificial Sequence; identical to SEQ ID NO: 112774
  derived and/or modified CDS sequence (opt2) from neuraminidase__InfluenzaA__ADK21736

SEQ ID NO: 115078 - RNA, 1410 nt, Artificial Sequence
  derived and/or modified CDS sequence (opt2) from neuraminidase__InfluenzaA__ADK21746
augaaccccaaccagaagaucaucaccaucggcuccgucugcaugaccaucggcauggccaaccucauccuccagaucggcaacaucaucuccaucuggaucucccacuccauccagcucggcaaccagaaccagaucgagaccugcaaccaguccaucaucaccuacgagcacaacaccugggucaaccagaccuacgucaacaucuccaacaccaacuucgccgccggccaguccgucgucuccgucaagcucgccggcaacuccucccucugccccgucuccggcugggccaucuacuccaaggacaacuccauccgcaucggcuccaagggcgacgucuucgucauccgcgagcccuucaucuccugcuccccccucgagugccgcaccuucuuccucacccagggcgcccuccucaacgacaagcacuccaacggcaccaucaaggaccgcucccccuaccgcacccucauguccugccccaucggcgagguccccucccccuacaacucccgcuucgaguccgucgccugguccgccuccgccugccacgacggcaucaacuggcucaccaucggcaucuccggccccgacaacggcgccgucgccguccucaaguacaacggcaucaucaccgacaccaucaaguccuggcgcaacaacauccuccgcacccaggaguccgagugcgccugcgucaacggcuccugcuucaccgucaugaccgacggccccuccgacggccaggccuccuacaagaucuuccgcaucgagaagggcaagaucgucaaguccgucgagaugaacgcccccaacuaccacuacgaggagugcuccugcuaccccgacuccuccgagaucaccugcgucugccgcgacaacuggcacggcuccaaccgccccugggucuccuucaaccagaaccucgaguaccagaucggcuacaucugcuccggcaucuucggcgacaacccccgccccaacgacaagaccggcuccugcggccccgucuccuccaacggcgccaacggcgucaagggcuucuccuucaaguacggcaacggcgucuggaucggccgcaccaaguccaucuccucccgcuccggcuucgagaugaucugggaccccaacggcuggaccggcaccgacaacaacuucuccaucaagcaggacaucgucggcaucaacgagugguccggcuacuccggcuccuucguccagcaccccgagcucaccggccucgacugcauccgccccugcuucugggucgagcucauccgcggccgccccgaggagaacaccaucuggaccuccggcuccuccaucuccuucugcggcgucaacuccgacaccgucggcugguccuggcccgacggcgccgagcuccccuucaccaucgacaaguga

SEQ ID NO: 115079 - RNA, 1410 nt, Artificial Sequence; identical to SEQ ID NO: 112774
  derived and/or modified CDS sequence (opt2) from neuraminidase__InfluenzaA__ADK21756

SEQ ID NO: 115080 - RNA, 1410 nt, Artificial Sequence; identical to SEQ ID NO: 112774
  derived and/or modified CDS sequence (opt2) from neuraminidase__InfluenzaA__ADK21766

SEQ ID NO: 115081 - RNA, 1410 nt, Artificial Sequence; identical to SEQ ID NO: 114205
  derived and/or modified CDS sequence (opt2) from neuraminidase__InfluenzaA__ADK21776

SEQ ID NO: 115082 - RNA, 1410 nt, Artificial Sequence; identical to SEQ ID NO: 112774
  derived and/or modified CDS sequence (opt2) from neuraminidase__InfluenzaA__ADK21786

SEQ ID NO: 115083 - RNA, 1410 nt, Artificial Sequence; identical to SEQ ID NO: 112774
  derived and/or modified CDS sequence (opt2) from neuraminidase__InfluenzaA__ADK21796

SEQ ID NO: 115084 - RNA, 1410 nt, Artificial Sequence; identical to SEQ ID NO: 112774
  derived and/or modified CDS sequence (opt2) from neuraminidase__InfluenzaA__ADK21806

SEQ ID NO: 115085 - RNA, 1410 nt, Artificial Sequence; identical to SEQ ID NO: 112774
  derived and/or modified CDS sequence (opt2) from neuraminidase__InfluenzaA__ADK21816

SEQ ID NO: 115086 - RNA, 1410 nt, Artificial Sequence; identical to SEQ ID NO: 114752
  derived and/or modified CDS sequence (opt2) from neuraminidase__InfluenzaA__ADK21826

SEQ ID NO: 115087 - RNA, 1410 nt, Artificial Sequence; identical to SEQ ID NO: 114665
  derived and/or modified CDS sequence (opt2) from neuraminidase__InfluenzaA__ADK21836

SEQ ID NO: 115088 - RNA, 1410 nt, Artificial Sequence
  derived and/or modified CDS sequence (opt2) from neuraminidase__InfluenzaA__ADK21846
augaaccccaaccagaagaucaucaccaucggcuccgucugcaugaccaucggcauggccaaccucauccuccagaucggcaacaucaucuccaucuggaucucccacuccauccagcucggcaaccagaaccagaucgagaccugcaaccaguccgucaucaccuacgagaacaacaccugggucaaccagaccuacgucaacaucuccaacaccaacuucgccgccggccaguccgucgucuccgucaagcucgccggcaacuccucccucugccccgucuccggcugggccaucuacuccaaggacaacuccauccgcaucggcuccaagggcgacgucuucgucauccgcgagcccuucaucuccugcuccccccucgagugccgcaccuucuuccucacccagggcgcccuccucaacgacaagcacuccaacggcaccaucaaggaccgcucccccuaccgcacccucauguccugccccaucggcgagguccccucccccuacaacucccgcuucgaguccgucgccugguccgccuccgccugccacgacggcaucaacuggcucaccaucggcaucuccggccccgacaacggcgccgucgccguccucaaguacaacggcaucaucaccgacaccaucaaguccuggcgcaacaacauccuccgcacccaggaguccgagugcgccugcgucaacggcuccugcuucaccgucaugaccgacggccccuccgacggccaggccuccuacaagaucuuccgcaucgagaagggcaagaucgucaaguccgucgagaugaacgcccccaacuaccacuacgaggagugcuccugcuaccccgacuccuccgagaucaccugcgucugccgcgacaacuggcacggcuccaaccgccccugggucuccuucaaccagaaccucgaguaccagaucggcuacaucugcuccggcaucuucggcgacaacccccgccccaacgacaagaccggcuccugcggccccgucuccuccaacggcgccaacggcgucaagggcuucuccuucaaguacggcaacggcgucuggaucggccgcaccaaguccaucuccucccgcaacggcuucgagaugaucugggaccccaacggcuggaccggcaccgacaacaacuucuccaugaagcaggacaucgucggcaucaacgagugguccggcuacuccggcuccuucguccagcaccccgagcucaccggccucgacugcauccgccccugcuucugggucgagcucauccgcggccgccccaaggagaacaccaucugggccuccggcuccuccaucuccuucugcggcgucaacuccgacaccgucggcugguccuggcccgacggcgccgagcuccccuucaccaucgacaaguga

SEQ ID NO: 115089 - RNA, 1410 nt, Artificial Sequence; identical to SEQ ID NO: 112774
  derived and/or modified CDS sequence (opt2) from neuraminidase__InfluenzaA__ADK21856

SEQ ID NO: 115090 - RNA, 1410 nt, Artificial Sequence; identical to SEQ ID NO: 112774
  derived and/or modified CDS sequence (opt2) from neuraminidase__InfluenzaA__ADK21866

SEQ ID NO: 115091 - RNA, 1410 nt, Artificial Sequence; identical to SEQ ID NO: 112774
  derived and/or modified CDS sequence (opt2) from neuraminidase__InfluenzaA__ADK21876

SEQ ID NO: 115092 - RNA, 1410 nt, Artificial Sequence; identical to SEQ ID NO: 112774
  derived and/or modified CDS sequence (opt2) from neuraminidase__InfluenzaA__ADK21886

SEQ ID NO: 115093 - RNA, 1410 nt, Artificial Sequence
  derived and/or modified CDS sequence (opt2) from neuraminidase__InfluenzaA__ADK21896
augaaccccaaccagaagaucaucaccaucggcuccgucugcaugaccaucggcauggccaaccucauccuccagaucggcaacaucaucuccaucuggaucucccacuccauccagcucggcaaccagaaccagaucgagaccugcaaccaguccgucaucaccuacgagaacaacaccugggucaaccagaccuacgucaacaucuccaacaccaacuucgccgccggccaguccgucgucuccgucaagcucgccggcaacuccucccucugccccgucuccggcugggccaucuacuccaaggacaacuccauccgcaucggcuccaagggcgacgucuucgucauccgcgagcccuucaucuccugcuccccccucgagugccgcaccuucuuccucacccagggcgcccuccucaacgacaagcacuccaacggcaccaucaaggaccgcucccccuaccgcacccucauguccugccccaucggcgagguccccucccccuacaacucccgcuucgaguccgucgccugguccgccuccgccugccacgacggcaucaacuggcucaccaucggcaucuccggccccgacaacggcgccgucgccguccucaaguacaacggcaucaucaccgacaccaucaaguccuggcgcaacaacauccuccgcacccaggaguccgagugcgccugcgucaacggcuccugcuucaccgucaugaccgacggccccuccgacggccaggccuccuacaagaucuuccgcaucgagaagggcaagaucgucaaguccgucgagaugaacgcccccaacuaccacuacgaggagugcuccugcuaccccgacuccuccgagaucaccugcgucugccgcgacaacuggcacggcuccaaccgccccugggucuccuucaaccagaaccucgaguaccagaucggcuacaucugcuccggcaucuucggcgacaacccccgccccaacgacaagaccggcuccugcggccccgucuccuccaacggcgccaacggcgucaagggcuucuccuucaaguacggcaacggcgucuggaucggccgcaccaaguccaucuccucccgcaacggcuucgagaugaucugggaccccaacggcuggaccggcaccgacaacaacuucuccaucaagcaggacaucgucggcaccaacgagugguccggcuacuccggcuccuucguccagcaccccgagcucaccggccucgacugcauccgccccugcuucugggucgagcucauccgcggccgccccaaggagaacaccaucuggaccuccggcuccuccaucuccuucugcggcgucuccuccgacaccgucggcugguccuggcccgacggcgccgagcuccccuucaccaucgacaaguga

SEQ ID NO: 115094 - RNA, 1410 nt, Artificial Sequence
  derived and/or modified CDS sequence (opt2) from neuraminidase__InfluenzaA__ADK21906
augaaccccaaccagaagaucaucaccaucggcuccgucugcaugaccaucggcauggccaaccucauccuccagaucggcaacaucaucuccaucuggaucucccacuccauccagcucggcaaccagaaccagaucgagaccugcaaccaguccgucaucaccuacgagaacaacaccugggucaaccagaccuacgucaacaucuccaacaccaacuucgccgccggccaguccgucgucuccgucaagcucgccggcaacuccucccucugccccgucuccggcugggccaucuacuccaaggacaacuccauccgcaucggcuccaagggcgacgucuucgucauccgcgagcccuucaucuccugcuccccccucgagugccgcaccuucuuccucacccagggcgcccuccucaacgacaagcacuccaacggcaccaucaaggaccgcucccccuaccgcacccucauguccugccccaucggcgagguccccucccccuacaacucccgcuucgaguccgucgccugguccgccuccgccugccacgacggcaucaacuggcucaccaucggcaucuccggccccgacaacggcgccgucgccguccucaaguacaacggcaucaucaccgacaccaucaaguccuggcgcaacaacauccuccgcacccaggaguccgagugcgccugcgucaacggcuccugcuucaccgucaugaccgacggccccuccgacggccaggccuccuacaagaucuuccgcaucgagaagggcaagaucgucaaguccgucgagaugaacgcccccaacuaccacuacgaggagugcuccugcuaccccgacuccuccgagaucaccugcgucugccgcgacaacuggcacggcuccaaccgccccuggaucuccuucaaccagaaccucgaguaccagaucggcuacaucugcuccggcaucuucggcgacaacccccgccccaacgacaagaccggcuccugcggccccgucuccuccaacggcgccaacggcgucaagggcuucuccuucaaguacggcaacggcgucuggaucggccgcaccaaguccaucggcucccgcaacggcuucgagaugaucugggaccccaacggcuggaccggcaccgacaacaacuucuccaucaagcaggacaucgucggcaucaacgagugguccggcuacuccggcuccuucguccagcaccccgagcucaccggccucgacugcauccgccccugcuucugggucgagcucauccgcggccgccccaaggagaacaccaucuggaccuccggcuccuccaucuccuucugcggcgucaacuccgacaccgucggcugguccuggcccgacggcgccgagcuccccuucaccaucgacaaguga

SEQ ID NO: 115095 - RNA, 1410 nt, Artificial Sequence; identical to SEQ ID NO: 112774
  derived and/or modified CDS sequence (opt2) from neuraminidase__InfluenzaA__ADK21916

SEQ ID NO: 115096 - RNA, 1410 nt, Artificial Sequence; identical to SEQ ID NO: 112774
  derived and/or modified CDS sequence (opt2) from neuraminidase__InfluenzaA__ADK21926

SEQ ID NO: 115097 - RNA, 1410 nt, Artificial Sequence; identical to SEQ ID NO: 112774
  derived and/or modified CDS sequence (opt2) from neuraminidase__InfluenzaA__ADK21936

SEQ ID NO: 115098 - RNA, 1410 nt, Artificial Sequence
  derived and/or modified CDS sequence (opt2) from neuraminidase__InfluenzaA__ADK21946
augaaccccaaccagaagaucaucaccaucggcuccgucugcaugaccaucggcauggccaaccucauccuccagaucggcaacaucaucuccaucuggaucucccacuccauccagcucggcaaccagaaccagaucgagaccugcaaccaguccgucaucaccuacgagaacaacaccugggucaaccagaccuacgucaacaucuccaacaccaacuucgccgccggccaguccgucgucuccgucaagcucgccggcaacuccucccucugccccgucuccggcugggccaucuacuccaaggacaacuccauccgcaucggcuccaagggcgacgucuucgucauccgcgagcccuucaucuccugcuccccccucgagugccgcaccuucuuccucacccagggcgcccuccucaacgacaagcacuccaacggcaccaucaaggaccgcucccccuaccgcacccucauguccugccccaucggcgagguccccucccccuacaacucccgcuucgaguccgucgccugguccgccuccgccugccacgacggcaucaacuggcucaccaucggcaucuccggccccgacaacggcgccgucgccguccucaaguacaacggcaucaucaccgacaccaucaaguccuggcgcaacaacauccuccgcacccaggaguccgagugcgccugcgucaacggcuccugcuucaccgucaugaccgacggccccuccgacggccaggccuccuacaagaucuuccgcaucgagaagggcaagaucgucaaguccgucgagaugaacgcccccaacuaccacuacgaggagugcuccugcuaccccgacuccuccgagaucaccugcgucugccgcgacaacuggcacggcuccaaccgccccugggucuccuucaaccagaaccucgaguaccagaucggcuacaucugcuccggcaucuucggcgacaacccccgccccaacgacaagaccggcuccugcggccccgucuccuccaacggcgccaacggcgucaagggcuucuccuucaaguacggcaacggcgucuggaucggccgcaccaaguccaucuccucccgcaacggcuucgagaugaucugggaccccaacggcuggaccggcaccgacaacaacuucuccaucaagcaggacaucgucggcaucaacgagugguccggcuacuccggcuccuucguccagcaccccgagcucaccggcauggacugcauccgccccugcuucugggucgagcucauccgcggccgccccaaggagaacaccaucuggaccuccggcuccuccaucuccuucugcggcgucaacuccgacaccgucggcugguccuggcccgacggcgccgagcuccccuucaccaucgacaaguga

SEQ ID NO: 115099 - RNA, 1410 nt, Artificial Sequence
  derived and/or modified CDS sequence (opt2) from neuraminidase__InfluenzaA__ADK21956
augaaccccaaccagaagaucaucaccaucggcuccgucugcaugaccaucggcauggccaaccucauccuccagaucggcaacaucaucuccaucuggaucucccacuccauccagcucggcaaccagaaccagaucgagaccugcaaccaguccgucaucaccuacgagaacaacaccugggucaaccagaccuacgucaacaucuccaacaccaacuucgccgccggccaguccgucgucuccgucaagcucgccggcaacuccucccucugccccgucuccggcugggccaucuacuccaaggacaacuccauccgcaucggcuccaagggcgacgucuucgucauccgcgagcccuucaucuccugcuccccccucgagugccgcaccuucuuccucacccagggcgcccuccucaacgacaagcacuccaacggcaccaucaaggaccgcucccccuaccgcacccucauguccugccccaucggcgagguccccucccccuacaacucccgcuucgaguccgucgccugguccgccuccgccugccacgacggcaucaacuggcucaccaucggcaucuccggccccgacaacggcgccgucgccguccucaaguacaacggcaucaucaccgacaccaucaaguccuggcgcaacaacauccuccgcacccaggaguccgagugcgccugcgucaacggcuccugcuucaccgucaugaccgacggccccuccgacggccaggccuccuacaagaucuucaagaucgagaagggcaagaucgucaaguccgucgagaugaacgcccccaacuaccacuacgaggagugcuccugcuaccccgacuccuccgagaucaccugcgucugccgcgacaacuggcacggcuccaaccgccccugggucuccuucaaccagaaccucgaguaccagaucggcuacaucugcuccggcaucuucggcgacaacccccgccccaacgacaagaccggcuccugcggccccgucuccuccaacggcgccaacggcgucaagggcuucuccuucaaguacggcaacggcgucuggaucggccgcaccaaguccaucuccucccgcaacggcuucgagaugaucugggaccccaacggcuggaccggcaccgacaacaacuucuccaucaagcaggacaucgucggcaucaacgagugguccggcuacuccggcuccuucguccagcaccccgagcucaccggccucgacugcauccgccccugcuucugggucgagcucauccgcggccgccccaaggagaacaccaucuggaccuccggcuccuccaucuccuucugcggcgucaacuccaacaccgucggcugguccuggcccgacggcgccgagcuccccuucaccaucgacaaguga

SEQ ID NO: 115100 - RNA, 1410 nt, Artificial Sequence; identical to SEQ ID NO: 112774
  derived and/or modified CDS sequence (opt2) from neuraminidase__InfluenzaA__ADK32393

SEQ ID NO: 115101 - RNA, 1410 nt, Artificial Sequence; identical to SEQ ID NO: 112774
  derived and/or modified CDS sequence (opt2) from neuraminidase__InfluenzaA__ADK32403

SEQ ID NO: 115102 - RNA, 1410 nt, Artificial Sequence; identical to SEQ ID NO: 112774
  derived and/or modified CDS sequence (opt2) from neuraminidase__InfluenzaA__ADK32413

SEQ ID NO: 115103 - RNA, 1410 nt, Artificial Sequence
  derived and/or modified CDS sequence (opt2) from neuraminidase__InfluenzaA__ADK32423
augaaccccaaccagaagaucaucaccaucggcuccgucugcaugaccaucggcaugaccaaccucauccuccagaucggcaacaucaucuccaucuggaucucccacuccauccagcucggcaaccagaaccagaucgagaccugcaaccaguccgucaucaccuacgagaacaacaccugggucaaccagaccuacgucaacaucuccaacaccaacuucgccgccggccaguccgucgucuccgucaagcucgccggcaacuccucccucugccccgucuccggcugggccaucuacuccaaggacaacuccauccgcaucggcuccaagggcgacgucuucgucauccgcgagcccuucaucuccugcuccccccucgagugccgcaccuucuuccucacccagggcgcccuccucaacgacaagcacuccaacggcaccaucaaggaccgcucccccuaccgcacccucauguccugccccaucggcgagguccccucccccuacaacucccgcuucgaguccgucgccugguccgccuccgccugccacgacggcaucaacuggcucaccaucggcaucuccggccccgacaacggcgccgucgccguccucaaguacaacggcaucaucaccgacaccaucaaguccuggcgcaacaacauccuccgcacccaggaguccgagugcgccugcgucaacggcuccugcuucaccgucaugaccgacggccccuccgacggccaggccuccuacaagaucuuccgcaucgagaagggcaagaucgucaaguccgucgagaugaacgcccccaacuaccacuacgaggagugcuccugcuaccccgacuccuccgagaucaccugcgucugccgcgacaacuggcacggcuccaaccgccccugggucuccuucaaccagaaccucgaguaccagaucggcuacaucugcuccggcaucuucggcgacaacccccgccccaacgacaagaccggcuccugcggccccgucuccuccaacggcgccaacggcgucaagggcuucuccuucaaguacggcaacggcgucuggaucggccgcaccaaguccaucuccucccgcaacggcuucgagaugaucugggaccccaacggcuggaccggcaccgacaacaacuucuccaucaagcaggacaucgucggcaucaacgagugguccggcuacuccggcuccuucguccagcaccccgagcucaccggccucgacugcauccgccccugcuucugggucgagcucauccgcggccgccccaaggagaacaccaucuggaccuccggcuccuccaucuccuucugcggcgucaacuccgacaccgucggcugguccuggcccgacggcgccgagcuccccuucaccaucgacaaguga

SEQ ID NO: 115104 - RNA, 1410 nt, Artificial Sequence; identical to SEQ ID NO: 112774
  derived and/or modified CDS sequence (opt2) from neuraminidase__InfluenzaA__ADK32433

SEQ ID NO: 115105 - RNA, 1410 nt, Artificial Sequence; identical to SEQ ID NO: 112774
  derived and/or modified CDS sequence (opt2) from neuraminidase__InfluenzaA__ADK32443

SEQ ID NO: 115106 - RNA, 1410 nt, Artificial Sequence
  derived and/or modified CDS sequence (opt2) from neuraminidase__InfluenzaA__ADK32453
augaaccccaaccagaagaucaucaccaucggcuccgucugcaugaccaucggcauggccaaccucauccuccagaucggcaacaucaucuccaucuggaucucccacuccauccagcucggcaaccagaaccagaucgagaccugcaaccaguccgucaucaccuacgagaacaacaccugggucaaccagaccuacgucaacaucuccaacaccaacuucgccgccggccaguccgucgucuccgucaagcucuccggcaacuccucccucugccccgucuccggcugggccaucuacuccaaggacaacuccguccgcaucggcuccaagggcgacgucuucgucauccgcgagcccuucaucuccugcuccccccucgagugccgcaccuucuuccucacccagggcgcccuccucaacgacaagcacuccaacggcaccaucaaggaccgcucccccuaccgcacccucauguccugccccaucggcgagguccccucccccuacaacucccgcuucgaguccgucgccugguccgccuccgccugccacgacggcaucaacuggcucaccaucggcaucuccggccccgacaacggcgccgucgccguccucaaguacaacggcaucaucaccgacaccaucaaguccuggcgcaacaacauccuccgcacccaggaguccgagugcgccugcgucaacggcuccugcuucaccgucaugaccgacggccccuccgacggccaggccuccuacaagaucuuccgcaucgagaagggcaagaucgucaaguccgucgagaugaacgcccccaacuaccacuacgaggagugcuccugcuaccccgacuccuccgagaucaccugcgucugccgcgacaacuggcacggcuccaaccgccccugggucuccuucaaccagaaccucgaguaccagaucggcuacaucugcuccggcaucuucggcgacaacccccgccccaacgacaagaccggcuccugcggccccgucuccuccaacggcgccaacggcgucaagggcuucuccuucaaguacggcaacggcgucuggaucggccgcaccaaguccaucuccucccgcaacggcuucgagaugaucugggaccccaacggcuggaccggcaccgacaacaacuucuccaucaagcaggacaucgucggcaucaacgagugguccggcuacuccggcuccuucguccagcaccccgagcucaccggccucgacugcauccgccccugcuucugggucgagcucauccgcggccgccccaaggagaacaccaucuggaccuccggcuccuccaucuccuucugcggcgucaacuccgacaccgucggcugguccuggcccgacggcgccgagcuccccuucaccaucgacaaguga

SEQ ID NO: 115107 - RNA, 1410 nt, Artificial Sequence
  derived and/or modified CDS sequence (opt2) from neuraminidase__InfluenzaA__ADK32463
augaaccccaaccagaagaucaucaccaucggcuccgucugcaugaccaucggcauggccaaccucauccuccagaucggcaacaucaucuccaucuggaucucccacuccauccagcucggcaaccagaaccagaucgagaccugcaaccaguccgucaucaccuacgagaacaacaccugggucaaccagaccuacgucaacaucuccaacaccaacuucgccgccggccaguccgucgucuccgucaagcucgccggcaacuccucccucugccccgucuccggcugggccaucuacuccaaggacaacuccauccgcaucggcuccaagggcgacgucuucgucauccgcgagcccuucaucuccugcuccccccucgagugccgcaccuucuuccucacccagggcgcccucaucaacgacaagcacuccaacggcaccaucaaggaccgcucccccuaccgcacccucauguccugccccaucggcgagguccccucccccuacaacucccgcuucgaguccgucgccugguccgccuccgccugccacgacggcaucaacuggcucaccaucggcaucuccggccccgacaacggcgccgucgccguccucaaguacaacggcaucaucaccgacaccaucaaguccuggcgcaacaacauccuccgcacccaggaguccgagugcgccugcgucaacggcuccugcuucaccgucaugaccgacggccccuccgacggccaggccuccuacaagaucuuccgcaucgagaagggcaagaucgucaaguccgucgagaugaacgcccccaacuaccacuacgaggagugcuccugcuaccccgacuccuccgagaucaccugcgucugccgcgacaacuggcacggcuccaaccgccccugggucuccuucaaccagaaccucgaguaccagaucggcuacaucugcuccggcaucuucggcgacaacccccgccccaacgacaagaccggcuccugcggccccgucuccuccaacggcgccaacggcgucaagggcuucuccuucaaguacggcaacggcgucuggaucggccgcaccaaguccaucuccucccgcaacggcuucgagaugaucugggaccccaacggcuggaccggcaccgacaacaacuucuccaucaagcaggacaucgucggcaucaacgagugguccggcuacuccggcuccuucguccagcaccccgagcucaccggccucgacugcauccgccccugcuucugggucgagcucauccgcggccgccccaaggagaacaccaucuggaccuccggcuccuccaucuccuucugcggcgucaacuccgacaccgucggcugguccuggcccgacggcgccgagcuccccuucaccaucgacaaguga

SEQ ID NO: 115108 - RNA, 1410 nt, Artificial Sequence; identical to SEQ ID NO: 112774
  derived and/or modified CDS sequence (opt2) from neuraminidase__InfluenzaA__ADK32473

SEQ ID NO: 115109 - RNA, 1410 nt, Artificial Sequence; identical to SEQ ID NO: 112774
  derived and/or modified CDS sequence (opt2) from neuraminidase__InfluenzaA__ADK32483

SEQ ID NO: 115110 - RNA, 1410 nt, Artificial Sequence; identical to SEQ ID NO: 112774
  derived and/or modified CDS sequence (opt2) from neuraminidase__InfluenzaA__ADK32493

SEQ ID NO: 115111 - RNA, 1410 nt, Artificial Sequence; identical to SEQ ID NO: 114687
  derived and/or modified CDS sequence (opt2) from neuraminidase__InfluenzaA__ADK32505

SEQ ID NO: 115112 - RNA, 1410 nt, Artificial Sequence
  derived and/or modified CDS sequence (opt2) from neuraminidase__InfluenzaA__ADK32640
augaaccccaaccagaagaucaucaccaucggcuccgucugcaugaccaucggcauggccaaccucauccuccagaucggcaacaucaucuccaucuggaucucccacuccauccagcucggcaaccagaaccagaucgagaccugcaaccaguccgucaucaccuacgagaacaacaccugggucaaccagaccuacgucaacaucuccaacaccaacuucgccgccggccaguccgucgccuccgucaagcucgccggcaacuccucccucugccccgucuccggcugggccaucuacuccaaggacaacuccauccgcaucggcuccaagggcgacgucuucgucauccgcgagcccuucaucuccugcuccccccucgagugccgcaccuucuuccucacccagggcgcccuccucaacgacaagcacuccaacggcaccaucaaggaccgcucccccuaccgcacccucauguccugccccaucggcgagguccccucccccuacaacucccgcuucgaguccgucgccugguccgccuccgccugccacgacggcaucaacuggcucaccaucggcaucuccggccccgacaacggcgccgucgccguccucaaguacaacggcaucaucaccgacaccaucaaguccuggcgcaacaacauccuccgcacccaggaguccgagugcgccugcgucaacggcuccugcuucaccgucaugaccgacggccccuccgacggccaggccuccuacaagaucuuccgcaucgagaagggcaagaucgucaaguccgucgagaugaacgcccccaacuaccacuacgaggagugcuccugcuaccccgacuccuccgagaucaccugcgucugccgcgacaacuggcacggcuccaaccgccccugggucuccuucaaccagaaccucgaguaccagaucggcuacaucugcuccggcaucuucggcgacaacccccgccccaacgacaagaccggcuccugcggccccgucuccuccaacggcgccaacggcgucaagggcuucuccuucaaguacggcaacggcgucuggaucggccgcaccaaguccaucuccucccgcaacggcuucgagaugaucugggaccccaacggcuggaccggcaccgacaacaacuucuccaucaagcaggacaucgucggcaucaacgagugguccggcuacuccggcuccuucguccagcaccccgagcucaccggccucgacugcauccgccccugcuucugggucgagcucauccgcggccgccccaaggagaacaccaucuggaccuccggcuccuccaucuccuucugcggcgucaacuccgacaccgucggcugguccuggcccgacggcgccgagcuccccuucaccaucgacaaguga

SEQ ID NO: 115113 - RNA, 1410 nt, Artificial Sequence; identical to SEQ ID NO: 112774
  derived and/or modified CDS sequence (opt2) from neuraminidase__InfluenzaA__ADK32650

SEQ ID NO: 115114 - RNA, 1410 nt, Artificial Sequence; identical to SEQ ID NO: 112774
  derived and/or modified CDS sequence (opt2) from neuraminidase__InfluenzaA__ADK32660

SEQ ID NO: 115115 - RNA, 1410 nt, Artificial Sequence; identical to SEQ ID NO: 112774
  derived and/or modified CDS sequence (opt2) from neuraminidase__InfluenzaA__ADK32670

SEQ ID NO: 115116 - RNA, 1410 nt, Artificial Sequence
  derived and/or modified CDS sequence (opt2) from neuraminidase__InfluenzaA__ADK32680
augaaccccaaccagaagaucaucaccaucggcuccgucugcaugaccaucggcauggccaaccucauccuccagaucggcaacaucaucuccaucuggaucucccacuccauccagcucggcaaccagaaccagaucgagaccugcaaccaguccgucaucaccuacaagaacaacaccugggucaaccagaccuacgucaacaucuccaacaccaacuucgccgccggccaguccgucgucuccgucaagcucgccggcaacuccucccucugccccgucuccggcugggccaucuacuccaaggacaacuccauccgcaucggcuccaagggcgacgucuucgucauccgcgagcccuucaucuccugcuccccccucgagugccgcaccuucuuccucacccagggcgcccuccucaacgacaagcacuccaacggcaccaucaaggaccgcucccccuaccgcacccucauguccugccccaucggcgagguccccucccccuacaacucccgcuucgaguccgucgccugguccgccuccgccugccacgacggcaucaacuggcucaccaucggcaucuccggccccgacaacggcgccgucgccguccucaaguacaacggcaucaucaccgacaccaucaaguccuggcgcaacaacauccuccgcacccaggaguccgagugcgccugcgucaacggcuccugcuucaccgucaugaccgacggccccuccgacggccaggccuccuacaagaucuuccgcaucgagaagggcaagaucgucaaguccgucgagaugaacgcccccaacuaccacuacgaggagugcuccugcuaccccgacuccuccgagaucaccugcgucugccgcgacaacuggcacggcuccaaccgccccugggucuccuucaaccagaaccucgaguaccagaucggcuacaucugcuccggcaucuucggcgacaacccccgccccaacgacaagaccggcuccugcggccccgucuccuccaacggcgccaacggcgucaagggcuucuccuucaaguacggcaacggcgucuggaucggccgcaccaaguccaucuccucccgcaacggcuucgagaugaucugggaccccaacggcuggaccggcaccgacaacaacuucuccaucaagcaggacaucgucggcaucaacgagugguccggcuacuccggcuccuucguccagcaccccgagcucaccggccucgacugcauccgccccugcuucugggucgagcucauccgcggccgccccaaggagaacaccaucuggaccuccggcuccuccaucuccuucugcggcgucaacuccgacaccgucggcugguccuggcccgacggcgccgagcuccccuucaccaucgacaaguga

SEQ ID NO: 115117 - RNA, 1410 nt, Artificial Sequence; identical to SEQ ID NO: 112774
  derived and/or modified CDS sequence (opt2) from neuraminidase__InfluenzaA__ADK32690

SEQ ID NO: 115118 - RNA, 1410 nt, Artificial Sequence; identical to SEQ ID NO: 112774
  derived and/or modified CDS sequence (opt2) from neuraminidase__InfluenzaA__ADK32700

SEQ ID NO: 115119 - RNA, 1410 nt, Artificial Sequence; identical to SEQ ID NO: 112774
  derived and/or modified CDS sequence (opt2) from neuraminidase__InfluenzaA__ADK32779

SEQ ID NO: 115120 - RNA, 1410 nt, Artificial Sequence; identical to SEQ ID NO: 112774
  derived and/or modified CDS sequence (opt2) from neuraminidase__InfluenzaA__ADK33614

SEQ ID NO: 115121 - RNA, 1410 nt, Artificial Sequence; identical to SEQ ID NO: 112774
  derived and/or modified CDS sequence (opt2) from neuraminidase__InfluenzaA__ADK33624

SEQ ID NO: 115122 - RNA, 1410 nt, Artificial Sequence; identical to SEQ ID NO: 112774
  derived and/or modified CDS sequence (opt2) from neuraminidase__InfluenzaA__ADK33634

SEQ ID NO: 115123 - RNA, 1410 nt, Artificial Sequence
  derived and/or modified CDS sequence (opt2) from neuraminidase__InfluenzaA__ADK33644
augaaccccaaccagaagaucaucaccaucggcuccgucugcaugaccaucggcauggccaaccucauccuccagaucggcaacaucaucuccaucuggaucucccacuccauccagcucggcaaccagaaccagaucgagaccugcaaccaguccgucaucaccuacgagaacaacaccugggucaaccagaccuacgucaacaucuccaacaccaacuucgccgccggccaguccgucgucuccgucaagcucgccggcaacuccucccucugccccgucuccggcugggccaucuacuccaaggacaacuccauccgcaucggcuccaagggcgacgucuucgucauccgcgagcccuucaucuccugcuccccccucgagugccgcaccuucuuccucacccagggcgcccuccucaacgacaagcacuccaacggcaccaucaaggaccgcucccccuaccgcacccucauguccugccccaucggcgagguccccucccccuacaacucccgcuucgaguccgucgccugguccgccuccgccugccacgacggcaucaacuggcucaccaucggcaucuccggcuccgacaacggcgccgucgccguccucaaguacaacggcaucaucaccgacaccaucaaguccuggcgcaacaacauccuccgcacccaggaguccgagugcgccugcgucaacggcuccugcuucaccgucaugaccgacggccccuccgacggccaggccuccuacaagaucuuccgcaucgagaagggcaagaucgucaaguccgucgagaugaacgcccccaacuaccacuacgaggagugcuccugcuaccccgacuccuccgagaucaccugcgucugccgcgacaacuggcacggcuccaaccgccccugggucuccuucaaccagaaccucgaguaccagaucggcuacaucugcuccggcaucuucggcgacaacccccgccccaacgacaagaccggcuccugcggccccgucuccuccaacggcgccaacggcgucaagggcuucuccuucaaguacggcaacggcgucuggaucggccgcaccaaguccaucuccucccgcaacggcuucgagaugaucugggaccccaacggcuggaccggcaccgacaacaacuucuccaucaagcaggacaucgucggcaucaacgagugguccggcuacuccggcuccuucguccagcaccccgagcucaccggccucgacugcauccgccccugcuucugggucgagcucauccgcggccgccccaaggagaacaccaucuggaccuccggcuccuccaucuccuucugcggcgucaacuccgacaccgucggcugguccuggcccgacggcgccgagcuccccuucaccaucgacaaguga

SEQ ID NO: 115124 - RNA, 1410 nt, Artificial Sequence; identical to SEQ ID NO: 114505
  derived and/or modified CDS sequence (opt2) from neuraminidase__InfluenzaA__ADK33654

SEQ ID NO: 115125 - RNA, 1410 nt, Artificial Sequence; identical to SEQ ID NO: 114505
  derived and/or modified CDS sequence (opt2) from neuraminidase__InfluenzaA__ADK33664

SEQ ID NO: 115126 - RNA, 1410 nt, Artificial Sequence; identical to SEQ ID NO: 112774
  derived and/or modified CDS sequence (opt2) from neuraminidase__InfluenzaA__ADK33674

SEQ ID NO: 115127 - RNA, 1410 nt, Artificial Sequence; identical to SEQ ID NO: 112774
  derived and/or modified CDS sequence (opt2) from neuraminidase__InfluenzaA__ADK33684

SEQ ID NO: 115128 - RNA, 1410 nt, Artificial Sequence; identical to SEQ ID NO: 114125
  derived and/or modified CDS sequence (opt2) from neuraminidase__InfluenzaA__ADK33694

SEQ ID NO: 115129 - RNA, 1410 nt, Artificial Sequence; identical to SEQ ID NO: 112774
  derived and/or modified CDS sequence (opt2) from neuraminidase__InfluenzaA__ADK33704

SEQ ID NO: 115130 - RNA, 1410 nt, Artificial Sequence; identical to SEQ ID NO: 112774
  derived and/or modified CDS sequence (opt2) from neuraminidase__InfluenzaA__ADK33714

SEQ ID NO: 115131 - RNA, 1410 nt, Artificial Sequence; identical to SEQ ID NO: 112774
  derived and/or modified CDS sequence (opt2) from neuraminidase__InfluenzaA__ADK33744

SEQ ID NO: 115132 - RNA, 1410 nt, Artificial Sequence
  derived and/or modified CDS sequence (opt2) from neuraminidase__InfluenzaA__ADK33754
augaaccccaaccagaagaucaucaccaucggcuccgucugcaugaccaucggcauggccaacuucauccuccagaucggcaacaucaucuccaucuggaucucccacuccauccagcucggcaaccagaaccagaucgagaccugcaaccaguccgucaucaccuacgagaacaacaccugggucaaccagaccuacgucaacaucuccaacaccaacuucgccgccggccaguccgucgucuccgucaagcucgccggcaacuccucccucugccccgucuccggcugggccaucuacuccaaggacaacuccauccgcaucggcuccaagggcgacgucuucgucauccgcgagcccuucaucuccugcuccccccucgagugccgcaccuucuuccucacccagggcgcccuccucaacgacaagcacuccaacggcaccaucaaggaccgcucccccuaccgcacccucauguccugccccaucggcgagguccccucccccuacaacucccgcuucgaguccgucgccugguccgccuccgccugccacgacggcaucaacuggcucaccaucggcaucuccggccccgacaacggcgccgucgccguccucaaguacaacggcaucaucaccgacaccaucaaguccuggcgcaacaacauccuccgcacccaggaguccgagugcgccugcgucaacggcuccugcuucaccgucaugaccgacggccccuccgacggccaggccuccuacaagaucuuccgcaucgagaagggcaagaucgucaaguccgucgagaugaacgcccccaacuaccacuacgaggagugcuccugcuaccccgacuccuccgagaucaccugcgucugccgcgacaacuggcacggcuccaaccgccccugggucuccuucaaccagaaccucgaguaccagaucggcuacaucugcuccggcaucuucggcgacaacccccgccccaacgacaagaccggcuccugcggccccgucuccuccaacggcgccaacggcgucaagggcuucuccuucaaguacggcaacggcgucuggaucggccgcaccaaguccaucuccucccgcaacggcuucgagaugaucugggaccccaacggcuggaccggcaccgacaacaacuucuccaucaagcaggacaucgucggcaucaacgagugguccggcuacuccggcuccuucguccagcaccccgagcucaccggccucgacugcauccgccccugcuucugggucgagcucauccgcggccgccccaaggagaacaccaucuggaccuccggcuccuccaucuccuucugcggcgucaacuccgacaccgucggcugguccuggcccgacggcgccgagcuccccuucaccaucgacaaguga

SEQ ID NO: 115133 - RNA, 1410 nt, Artificial Sequence
  derived and/or modified CDS sequence (opt2) from neuraminidase__InfluenzaA__ADK33764
augaaccccaaccagaagaucaucaccaucggcuccgucugcaugaccaucggcauggccaacuucauccuccagaucggcaacaucaucuccaucuggaucucccacuccauccagcucggcaaccagaaccagaucgagaccugcaaccaguccgucaucaccuacgagaacaacaccugggucaaccagaccuacgucaacaucuccaacaccaacuucgccgccggccaguccgucgucuccgucaagcucgccggcaacuccucccucugccccgucuccggcugggccaucuacuccaaggacaacuccauccgcaucggcuccaagggcgacgucuucgucauccgcgagcccuucaucuccugcuccccccucgagugccgcaccuucuuccucacccagggcgcccuccucaacgacaagcacuccaacggcaccaucaaggaccgcucccccuaccgcacccucauguccugccccaucggcgagguccccucccccuacaacucccgcuucgaguccgucgccugguccgccuccgccugccacgacggcaucaacuggcucaccaucggcaucuccggccccgacaacggcgccgucgccguccucaaguacaacggcaucaucaccgacaccaucaaguccuggcgcaacaacauccuccgcacccaggaguccgagugcgccugcgucaacggcuccugcuucaccgucaugaccgacggccccuccgacggccaggccuccuacaagaucuuccgcaucgagaagggcaagaucgucaaguccgucgagaugaacgcccccaacuaccacuacgaggagugcuccugcuaccccgacuccuccgagaucaccugcgucugccgcgacaacuggcacggcuccaaccgccccugggucuccuucaaccagaaccucgaguaccagaugggcuacaucugcuccggcaucuucggcgacaacccccgccccaacgacaagaccggcuccugcggccccgucuccuccaacggcgccaacggcgucaagggcuucuccuucaaguacggcaacggcgucuggaucggccgcaccaaguccaucuccucccgcaacggcuucgagaugaucugggaccccaacggcuggaccggcaccgacaacaacuucuccaucaagcaggacaucgucggcaucaacgagugguccggcuacuccggcuccuucguccagcaccccgagcucaccggccucgacugcauccgccccugcuucugggucgagcucauccgcggccgccccaaggagaacaccaucuggaccuccggcuccuccaucuccuucugcggcgucaacuccgacaccgucggcugguccuggcccgacggcgccgagcuccccuucaccaucgacaaguga

SEQ ID NO: 115134 - RNA, 1410 nt, Artificial Sequence
  derived and/or modified CDS sequence (opt2) from neuraminidase__InfluenzaA__ADK33774
augaaccccaaccagaagaucaucaccaucggcuccgucugcaugaccaucggcauggccaaccucauccuccagaucggcaacaucaucuccaucuggaucucccacuccauccagcucggcaaccagaaccagaucgagaccugcaaccaguccgucaucaccuacgagaacaacaccugggucaaccagaccuacgucaacaucuccaacaccaacuucgccgccggccaguccgucgucuccgucaagcucgucggcaacuccucccucugccccgucuccggcugggccaucuacuccaaggacaacuccauccgcaucggcuccaagggcgacgucuucgucauccgcgagcccuucaucuccugcuccccccucgagugccgcaccuucuuccucacccagggcgcccuccucaacgacaagcacuccaacggcaccaucaaggaccgcucccccuaccgcacccucauguccugccccaucggcgagguccccucccccuacaacucccgcuucgaguccgucgccugguccgccuccgccugccacgacggcaucaacuggcucaccaucggcaucuccggccccgacaacggcgccgucgccguccucaaguacaacggcaucaucaccgacaccaucaaguccuggcgcaacaacauccuccgcacccaggaguccgagugcgccugcgucaacggcuccugcuucaccgucaugaccgacggccccuccgacggccaggccuccuacaagaucuuccgcaucgagaagggcaagaucgucaaguccgucgagaugaacgcccccaacuaccacuacgaggagugcuccugcuaccccgacuccuccgagaucaccugcgucugccgcgacaacuggcacggcuccaaccgccccugggucuccuucaaccagaaccucgaguaccagaugggcuacaucugcuccggcaucuucggcgacaacccccgccccaacgacaagaccggcuccugcggccccgucuccuccaacggcgccaacggcgucaagggcuucuccuucaaguacggcaacggcgucuggaucggccgcaccaaguccaucuccucccgcaacggcuucgagaugaucugggaccccaacggcuggaccggcaccgacaacaacuucuccaucaagcaggacaucgucggcaucaacgagugguccggcuacuccggcuccuucguccagcaccccgagcucaccggccucgacugcauccgccccugcuucugggucgagcucauccgcggccgccccaaggagaacaccaucuggaccuccggcuccuccaucuccuucugcggcgucaacuccgacaccgucggcugguccuggcccgacggcgccgagcuccccuucaccaucgacaaguga

SEQ ID NO: 115135 - RNA, 1410 nt, Artificial Sequence; identical to SEQ ID NO: 113748
  derived and/or modified CDS sequence (opt2) from neuraminidase__InfluenzaA__ADK33784

SEQ ID NO: 115136 - RNA, 1410 nt, Artificial Sequence; identical to SEQ ID NO: 112774
  derived and/or modified CDS sequence (opt2) from neuraminidase__InfluenzaA__ADK33794

SEQ ID NO: 115137 - RNA, 1410 nt, Artificial Sequence; identical to SEQ ID NO: 112774
  derived and/or modified CDS sequence (opt2) from neuraminidase__InfluenzaA__ADK33804

SEQ ID NO: 115138 - RNA, 1410 nt, Artificial Sequence
  derived and/or modified CDS sequence (opt2) from neuraminidase__InfluenzaA__ADK33814
augaaccccaaccagaagaucaucaccaucggcuccgucugcaugaccaucggcauggccaaccucauccuccagaucggcaacaucaucuccaucuggaucucccacuccauccagcucggcaaccagaaccagaucgagaccugcaaccaguccgucaucaccuacgagaacaacaccugggucaacaagaccuacgucaacaucuccaacaccaacuucgccgccggccaguccgucgucuccgucaagcucgccggcaacuccucccucugccccgucuccggcugggccaucuacuccaaggacaacuccauccgcaucggcuccaagggcgacgucuucgucauccgcgagcccuucaucuccugcuccccccucgagugccgcaccuucuuccucacccagggcgcccuccucaacgacaagcacuccaacggcaccaucaaggaccgcucccccuaccgcacccucauguccugccccaucggcgagguccccucccccuacaacucccgcuucgaguccgucgccugguccgccuccgccugccacgacggcaucaacuggcucaccaucggcaucuccggccccgacaacggcgccgucgccguccucaaguacaacggcaucaucaccgacaccaucaaguccuggcgcaacaacauccuccgcacccaggaguccgagugcgccugcgucaacggcuccugcuucaccgucaugaccgacggccccuccgacggccaggccuccuacaagaucuuccgcaucgagaagggcaagaucgucaaguccgucgagaugaacgcccccaacuaccacuacgaggagugcuccugcuaccccgacuccuccgagaucaccugcgucugccgcgacaacuggcacggcuccaaccgccccugggucuccuucaaccagaaccucgaguaccagaugggcuacaucugcuccggcaucuucggcgacaacccccgccccaacgacaagaccggcuccugcggccccgucuccuccaacggcgccaacggcgucaagggcuucuccuucaaguacggcaacggcgucuggaucggccgcaccaaguccaucuccucccgcaacggcuucgagaugaucugggaccccaacggcuggaccggcaccgacaacaacuucuccaucaagcaggacaucgucggcaucaacgagugguccggcuacuccggcuccuucguccagcaccccgagcucaccggccucgacugcauccgccccugcuucugggucgagcucauccgcggccgccccaaggagaacaccaucuggaccuccggcuccuccaucuccuucugcggcgucaacuccgacaccgucggcugguccuggcccgacggcgccgagcuccccuucaccaucgacaaguga

SEQ ID NO: 115139 - RNA, 1410 nt, Artificial Sequence
  derived and/or modified CDS sequence (opt2) from neuraminidase__InfluenzaA__ADK33824
augaaccccaaccagaagaucaucaccaucggcuccgucugcaugaccaucggcauggccaaccucauccuccagaucggcaacaucaucuccaucuggaucucccacuccauccagcucggcaaccagaaccagaucgagaccugcaaccaguccgucaucaccuacgagaacaacaccugggucaaccagaccuacaucaacaucuccaacaccaacuucgccgccggccaguccgucgucuccgucaagcucgccggcaacuccucccucugccccgucuccggcugggccaucuacuccaaggacaacuccauccgcaucggcuccaagggcgacgucuucgucauccgcgagcccuucaucuccugcuccccccucgagugccgcaccuucuuccucacccagggcgcccuccucaacgacaagcacuccaacggcaccaucaaggaccgcucccccuaccgcacccucauguccugccccaucggcgagguccccucccccuacaacucccgcuucgaguccgucgccugguccgccuccgccugccacgacggcaucaacuggcucaccaucggcaucuccggccccgacaacggcgccgucgccguccucaaguacaacggcaucaucaccgacaccaucaaguccuggcgcaacaacauccuccgcacccaggaguccgagugcgccugcgucaacggcuccugcuucaccgucaugaccgacggccccuccgacggccaggccuccuacaagaucuuccgcaucgagaagggcaagaucgucaaguccgucgagaugaacgcccccaacuaccacuacgaggagugcuccugcuaccccgacuccuccgagaucaccugcgucugccgcgacaacuggcacggcuccaaccgccccugggucuccuucaaccagaaccucgaguaccagaucggcuacaucugcuccggcaucuucggcgacaacccccgccccaacgacaagaccggcuccugcggccccgucuccuccaacggcgccaacggcgucaagggcuucuccuucaaguacggcaacggcgucuggaucggccgcaccaaguccaucuccucccgcaacggcuucgagaugaucugggaccccaacggcuggaccggcaccgacaacaacuucuccaucaagcaggacaucgucggcaucaacgagugguccggcuacuccggcuccuucguccagcaccccgagcucaccggccucgacugcauccgccccugcuucugggucgagcucauccgcggccgccccaaggagaacaccaucuggaccuccggcuccuccaucuccuucugcggcgucaacuccgacaccgucggcugguccuggcccgacggcgccgagcuccccuucaccaucgacaaguga

SEQ ID NO: 115140 - RNA, 1410 nt, Artificial Sequence; identical to SEQ ID NO: 113951
  derived and/or modified CDS sequence (opt2) from neuraminidase__InfluenzaA__ADK33834

SEQ ID NO: 115141 - RNA, 1410 nt, Artificial Sequence
  derived and/or modified CDS sequence (opt2) from neuraminidase__InfluenzaA__ADK33844
augaaccccaaccagaagaucaucaccaucggcuccgucugcaugaccaucggcauggccaaccucauccuccagaucggcaacaucaucuccaucuggaucucccacuccauccagcucggcaaccagaaccagaucgagaccugcaaccaguccgucaucaccuacgagaacaacaccugggucaaccagaccuacgucaacaucuccaacaccaacuucgccgccggccaguccgucgucuccgccaagcucgccggcaacuccccccucugccccgucuccggcugggccaucuacuccaaggacaacuccauccgcaucggcuccaagggcgacgucuucgucauccgcgagcccuucaucuccugcuccccccucgagugccgcaccuucuuccucacccagggcgcccuccucaacgacaagcacuccaacggcaccaucaaggaccgcucccccuaccgcacccucauguccugccccaucggcgagguccccucccccuacaacucccgcuucgaguccgucgccugguccgccuccgccugccacgacggcaucaacuggcucaccaucggcaucuccggccccgacaacggcgccgucgccguccucaaguacaacggcaucaucaccgacaccaucaaguccuggcgcaacaacauccuccgcacccaggaguccgagugcgccugcgucaacggcuccugcuucaccgucaugaccgacggccccuccgacggccaggccuccuacaagaucuuccgcaucgagaagggcaagaucgucaaguccgucgagaugaacgcccccaacuaccacuacgaggagugcuccugcuaccccgacuccuccgagaucaccugcgucugccgcgacaacuggcacggcuccaaccgccccugggucuccuucaaccagaaccucgaguaccagaucggcuacaucugcuccggcaucuucggcgacaacccccgccccaacgacaagaccggcuccugcggccccgucuccuccaacggcgccaacggcgucaagggcuucuccuucaaguacggcaacggcgucuggaucggccgcaccaaguccaucuccucccgcaacggcuucgagaugaucugggaccccaacggcuggaccggcaccgacaacaacuucuccaucaagcaggacaucgucggcaucaacgagugguccggcuacuccggcuccuucguccagcaccccgagcucaccggccucgacugcauccgccccugcuucugggucgagcucauccgcggccgccccaaggagaacaccaucuggaccuccggcuccuccaucuccuucugcggcgucaacuccgacaccgucggcugguccuggcccgacggcgccgagcuccccuucaccaucgacaaguga

SEQ ID NO: 115142 - RNA, 1410 nt, Artificial Sequence; identical to SEQ ID NO: 113951
  derived and/or modified CDS sequence (opt2) from neuraminidase__InfluenzaA__ADK33854

SEQ ID NO: 115143 - RNA, 1410 nt, Artificial Sequence; identical to SEQ ID NO: 114665
  derived and/or modified CDS sequence (opt2) from neuraminidase__InfluenzaA__ADK33864

SEQ ID NO: 115144 - RNA, 1410 nt, Artificial Sequence
  derived and/or modified CDS sequence (opt2) from neuraminidase__InfluenzaA__ADK33874
augaaccccaaccagaagaucaucaccaucggcuccgucugcaugaccaucggcauggccaaccucauccuccagaucggcaacaucaucuccaucuggaucucccacuccauccagcucggcaaccagaaccagaucgagaccugcaaccaguccgucaucaccuacgagaacaacaccugggucaaccagaccuacgucaacaucuccaacaccaacuucgccgccggccaguccgucgucuccgucaagcucgccggcaacuccucccucugccccgucuccggcugggccaucuacuccaaggacaacuccauccgcaucggcuccaagggcgacgucuucgucauccgcgagcccuucaucuccugcuccccccucgagugccgcaccuucuuccucacccagggcgcccuccucaacgacaagcacuccaacggcaccaucaaggaccgcucccccuaccgcacccucauguccugccccaucggcgagguccccucccccuacaacucccgcuucgaguccgucgccugguccgccuccgccugccacgacggcaucaacuggcucaccaucggcaucuccggccccgacaacggcgccgucgccguccucaaguacaacggcaucaucaccgacaccaucaaguccuggcgcaacaacauccuccgcacccaggaguccgagugcgccugcgucaacggcuccugcuucaccgucaugaccgacggccccuccgacggccaggccuccuacaagaucuuccgcaucgagaagggcaagaucgucaaguccgucgagaugaacgcccccaacuaccacuacgaggagugcuccugcuaccccgacuccuccgagaucaccugcgucugccgcgacaacuggcacggcuccaaccgccccugggucuccuucaaccagaaccucgaguaccagaucggcuaccucugcuccggcaucuucggcgacaacccccgccccaacgacaagaccggcuccugcggccccgucuccuccaacggcgccaacggcgucaagggcuucuccuucaaguacggcaacggcgucuggaucggccgcaccaaguccaucuccucccgcaacggcuucgagaugaucugggaccccaacggcuggaccggcaccgacaacaacuucuccaucaagcaggacaucgucggcaucaacgagugguccggcuacuccggcuccuucguccagcaccccgagcucaccggccucgacugcauccgccccugcuucugggucgagcucauccgcggccgccccaaggagaacaccaucuggaccuccggcuccuccaucuccuucugcggcgucaacuccgacaccgucggcugguccuggcccgacggcgccgagcuccccuucaccaucgacaaguga

SEQ ID NO: 115145 - RNA, 1410 nt, Artificial Sequence; identical to SEQ ID NO: 112774
  derived and/or modified CDS sequence (opt2) from neuraminidase__InfluenzaA__ADK33884

SEQ ID NO: 115146 - RNA, 1410 nt, Artificial Sequence; identical to SEQ ID NO: 113951
  derived and/or modified CDS sequence (opt2) from neuraminidase__InfluenzaA__ADK33894

SEQ ID NO: 115147 - RNA, 1410 nt, Artificial Sequence; identical to SEQ ID NO: 113951
  derived and/or modified CDS sequence (opt2) from neuraminidase__InfluenzaA__ADK33904

SEQ ID NO: 115148 - RNA, 1410 nt, Artificial Sequence; identical to SEQ ID NO: 114731
  derived and/or modified CDS sequence (opt2) from neuraminidase__InfluenzaA__ADK33914

SEQ ID NO: 115149 - RNA, 1410 nt, Artificial Sequence
  derived and/or modified CDS sequence (opt2) from neuraminidase__InfluenzaA__ADK33924
augaaccccaaccagaagaucaucaccaucggcuccgucugcaugaccaucggcauggccaaccucauccuccagaucggcaacaucaucuccaucuggaucucccacuccauccagcucggcaaccagaaccagaucgagaccugcaaccaguccgucaucaccuacgagaacaacaccugggucaaccagaccuacgucaacaucuccaacaccaacuucgccgccggccaguccgucgucuccgucaagcucgccggcaacuccucccucugccccgucuccggcugggccaucuacuccaaggacaacuccauccgcaucggcuccaagggcgacgucuucgucauccgcgagcccuucaucuccugcuccccccucgagugccgcaccuucuuccucacccagggcgcccuccucaacgacaagcacuccaacggcaccaucaaggaccgcucccccuaccgcacccucauguccugccccaucggcgagguccccucccccuacaacucccgcuucgaguccgucgccugguccgccuccgccugccacgacggcaucaacuggcucaccaucggcaucuccggccccgacaacggcgccgucgccguccucaaguacaacggcaucaucaccgacaccaucaaguccuggcgcaacaacauccuccgcacccaggaguccgagugcgccugcgucaacggcuccugcuucaccgucaugaccgacggccccuccgacggccaggccuccuacaagaucuuccgcaucgagaagggcaagaucgucaaguccgucgagaugaacgcccccaacuaccacuacgaggagugcuccugcuaccccgacuccuccgagaucaccugcgucugccgcgacaacuggcacggcuccaaccgccccugggucuccuucaaccagaaccucgaguaccagaucggcuacaucugcuccggcaucuucggcgacaacccccgccccaacgacaagaccggcuccugcggccccgucuccuccaacggcgccaacggcgucaagggcuucuccuucaaguacggcaacggcgucuggaucggccgcaccaaguccaucuccucccgcaacggcuucgagaugaucugggaccccaacggcuggaccggcaccgacaacaacuucuccaucaagcaggacaucgucggcaucaacgagugguccggcuacuccggcuccuucguccagcaccccgagcucaccggccucgacugcauccgccccugcuucugggucgagcucauccgcggccgccccaaggagaacaccaucuggaccuccggcuccuccaucuccuucugcggcgucaacuccaacaccgucggcugguccuggcccgacggcgccgagcuccccuucaccaucgacaaguga

SEQ ID NO: 115150 - RNA, 1410 nt, Artificial Sequence; identical to SEQ ID NO: 112774
  derived and/or modified CDS sequence (opt2) from neuraminidase__InfluenzaA__ADK33934

SEQ ID NO: 115151 - RNA, 1410 nt, Artificial Sequence; identical to SEQ ID NO: 112774
  derived and/or modified CDS sequence (opt2) from neuraminidase__InfluenzaA__ADK33944

SEQ ID NO: 115152 - RNA, 1410 nt, Artificial Sequence; identical to SEQ ID NO: 114731
  derived and/or modified CDS sequence (opt2) from neuraminidase__InfluenzaA__ADK33954

SEQ ID NO: 115153 - RNA, 1410 nt, Artificial Sequence; identical to SEQ ID NO: 112774
  derived and/or modified CDS sequence (opt2) from neuraminidase__InfluenzaA__ADK33964

SEQ ID NO: 115154 - RNA, 1410 nt, Artificial Sequence; identical to SEQ ID NO: 113881
  derived and/or modified CDS sequence (opt2) from neuraminidase__InfluenzaA__ADK33974

SEQ ID NO: 115155 - RNA, 1410 nt, Artificial Sequence; identical to SEQ ID NO: 112774
  derived and/or modified CDS sequence (opt2) from neuraminidase__InfluenzaA__ADK33984

SEQ ID NO: 115156 - RNA, 1410 nt, Artificial Sequence
  derived and/or modified CDS sequence (opt2) from neuraminidase__InfluenzaA__ADK39016
augaaccccaaccagaagaucaucaccaucggcuccgucugcaucaccaucggcauggccaaccucauccuccagaucggcaacaucaucuccaucuggaucucccacuccauccagcucggcaaccagaaccagaucgagaccugcaaccaguccgucaucaccuacgagaacaacaccugggucaaccagaccuacgucaacaucuccaacaccaacuucgccgccggccaguccgucgucuccgucaagcucgccggcaacuccucccucugccccgucuccggcugggccaucuacuccaaggacaacuccauccgcaucggcuccaagggcgacgucuucgucauccgcgagcccuucaucuccugcuccccccucgagugccgcaccuucuuccucacccagggcgcccuccucaacgacaagcacuccaacggcaccaucaaggaccgcucccccuaccgcacccucauguccugccccaucggcgagguccccucccccuacaacucccgcuucgaguccgucgccugguccgccuccgccugccacgacggcaucuccuggcucaccaucggcaucuccggccccgacaacggcgccgucgccguccucaaguacaacggcaucaucaccgacaccaucaaguccuggcgcaacaacauccuccgcacccaggaguccgagugcgccugcgucaacggcuccugcuucaccgucaugaccgacggccccuccgacggccaggccuccuacaagaucuuccgcaucgagaagggcaagaucgucaaguccgucgagaugaacgcccccaacuaccacuacgaggagugcuccugcuaccccgacuccuccgagaucaccugcgucugccgcgacaacuggcacggcuccaaccgccccugggucuccuucaaccagaaccucgaguaccagaucggcuacaucugcuccggcaucuucggcgacaacccccgccccaacgacaagaccggcuccugcggccccgucuccuccaacggcgccaacggcgucaagggcuucuccuucaaguacggcaacggcgucuggaucggccgcaccaaguccaucuccucccgcaacggcuucgagaugaucugggaccccgacggcuggaccggcaccgacaacaacuucuccaucaagcaggacaucgucggcaucaacgagugguccggcuacuccggcuccuucguccagcaccccgagcucaccggccucgacugcauccgccccugcuucugggucgagcucauccgcggccgccccaaggagaacaccaucuggaccuccggcuccuccaucuccuucugcggcgucaacuccgacaccgucggcugguccuggcccgacggcgccgagcuccccuucaccaucgacaaguga

SEQ ID NO: 115157 - RNA, 1410 nt, Artificial Sequence; identical to SEQ ID NO: 112635
  derived and/or modified CDS sequence (opt2) from neuraminidase__InfluenzaA__ADK45315

SEQ ID NO: 115158 - RNA, 1410 nt, Artificial Sequence
  derived and/or modified CDS sequence (opt2) from neuraminidase__InfluenzaA__ADK45413
augaaccccaaccagaagaucaucaccaucggcuccgucucccucaccaucuccaccaucugcuucuucaugcagaucgccauccucaucaccaccgucacccuccacuucaagcaguacgaguucaacuccccccccaacaaccaggucaugcucuacgagcccaccaucaucgagcgcaacaucaccgagaucgucuaccucaccaacaccaccaucgagaaggagaucugccccaagcucgccgaguaccgcaacugguccaagccccagugcgacaucaccggcuucgcccccuucuccaaggacaacuccauccgccucuccgccggcggcgacaucugggucacccgcgagcccuacgucuccugcgaccccgacaagugcuaccaguucgcccucggccagggcaccacccucaacaacguccacuccaacaacaccguccgcgaccgcacccccuaccgcacccuccucaugaacgagcucggcguccccuuccaccucggcaccaagcaggucugcaucgccugguccuccuccuccugccacgacggcaaggccuggcuccacgucugcaucaccggcgacgacaagaacgccaccgccuccuucaucuacaacggccgccucgucgacuccgucgucuccugguccaaggacauccuccgcacccaggaguccgagugcgucugcaucaacggcaccugcaccgucgucaugaccgacggcuccgccuccggcaaggccgacaccaagauccucuucaucgaggagggcaagaucguccacaccuccacccucuccggcuccgcccagcacgucgaggagugcuccugcuacccccgcuaccccggcguccgcugcgucugccgcgacaacuggaagggcuccaaccgccccaucgucgacaucaacaucaaggaccacuccaucgccuccuccuacgucugcuccggccucgucggcgacaccccccgcaagaacgacuccuccuccuccucccacugccucgaccccaacaacgaggagggcggccacggcgucaagggcugggccuucgacgacggcaacgacgucuggaugggccgcaccaucuccgagaagucccgccucggcuacgagaccuucaaggucaucgagggcugguccaaccccaaguccaagcuccagaucaaccgccaggucaucgucgaccgcggcaaccgcuccggcuacuccggcaucuucuccgucgagggcaaguccugcaucaaccgcugcuucuacgucgagcucauccgcggccgcaaggaggagaccgagguccucuggaccuccaacuccaucgucgucuucugcggcaccuccggcaccuacggcaccggcuccuggcccgacggcgccaacaucaaccucaugcccaucuga

SEQ ID NO: 115159 - RNA, 1410 nt, Artificial Sequence
  derived and/or modified CDS sequence (opt2) from neuraminidase__InfluenzaA__ADK45424
augaaccccaaccagaagaucaucaccaucggcuccgucucccucaccaucuccaccaucugcuucuucaugcagaucgccauccucaucaccaccgucacccuccacuucaagcaguacgaguucaacuccccccccaacaaccaggucaugcucugcgagcccaccaucaucgagcgcaacaucaccgagaucgucuaccucaccaacaccaccaucgagaaggagaucugccccaagcucgccgaguaccgcaacugguccaagccccagugcgacaucaccggcuucgcccccuucuccaaggacaacuccauccgccucuccgccggcggcgacaucugggucacccgcgagcccuacgucuccugcgaccccgacaagugcuaccaguucgcccucggccagggcaccacccucaacaacguccacuccaacaacaccguccgcgaccgcacccccuaccgcacccuccucaugaacgagcucggcguccccuuccaccucggcaccaagcaggucugcaucgccugguccuccuccuccugccacgacggcaaggccuggcuccacgucugcaucaccggcgacgacaagaacgccaccgccuccuucaucuacaacggccgccucgucgacuccgucgucuccugguccaaggagauccuccgcacccaggaguccgagugcgucugcaucaacggcaccugcaccgucgucaugaccgacggcuccgccuccggcaaggccgacaccaagauccucuucaucgaggagggcaagaucguccacaccuccacccucuccggcuccgcccagcacgucgaggagugcuccugcuacccccgcuaccccggcguccgcugcgucugccgcgacaacuggaagggcuccaaccgccccaucgucgacaucaacaucaaggaccacuccaucgucuccuccuaccucugcuccggccucgucggcgacaccccccgcaagaacgacuccuccuccuccucccacugccucgaccccaacaacgaggagggcggccacggcgucaagggcugggccuucgacgacggcaacgacgucuggaugggccgcaccaucuccgagaagucccgccucggcuacgagaccuucaaggucaucgagggcugguccaaccccaaguccaagcuccagaucaaccgccaggucaucgucgaccgcggcaaccgcuccggcuacuccggcaucuucuccgucgagggcaaguccugcaucaaccgcugcuucuacgucgagcucauccgcggccgcaaggaggagaccgagguccucuggaccuccaacuccaucgucgucuucugcggcaccuccggcaccuacggcaccggcuccuggcccgacggcgccgacaucaaccucaugcccaucuga

SEQ ID NO: 115160 - RNA, 1410 nt, Artificial Sequence; identical to SEQ ID NO: 113941
  derived and/or modified CDS sequence (opt2) from neuraminidase__InfluenzaA__ADK45446

SEQ ID NO: 115161 - RNA, 1410 nt, Artificial Sequence
  derived and/or modified CDS sequence (opt2) from neuraminidase__InfluenzaA__ADK45457
augaaccccaaccagaagaucaucaccaucggcuccgucucccucaccaucuccaccaucugcuucuucaugcagaucgccauccucaucaccaccgucacccuccacuucaagcaguacgaguucaacuccccccccaacaaccaggucaugcucugcgagcccaccaucaucgagcgcaacaucaccgagaucgucuaccucaccaacaccaccaucgagaaggagaucugccccaagcucgccgaguaccgcaacugguccaagccccagugcgacaucaccggcuucgcccccuucuccaaggacaacuccauccgccucuccgccggcggcgacaucugggucacccgcgagcccuacgucuccugcgaccccgacaagugcuaccaguucgcccucggccagggcaccacccucaacaacguccacuccaacaacaccguccgcgaccgcacccccuaccgcacccuccucaugaacgagcucggcguccccuuccaccucggcaccaagcaggucugcaucgccugguccuccuccuccugccacgacggcaaggccuggcuccacgucugcaucaccggcgacgacaagaacgccaccgccuccuucaucuacaacggccgccucgucgacuccgucgucuccugguccaaggagauccuccgcacccaggaguccgagugcgucugcaucaacggcaccugcaccgucgucaugaccgacggcuccgccuccggcaaggccgacaccaagauccucuucaucgaggagggcaagaucguccacaccuccacccucuccggcuccgcccagcacgucgaggagugcuccugcuacccccgcuaccccggcguccgcugcgucugccgcgacaacuggaagggcuccaaccgccccaucgucgacaucaacaucaaggaccacuccaucgucuccuccuacgucugcuccggccucgucggcgacaccccccgcaagaacgacuccuccggcuccucccacugccucgaccccaacaacgaggagggcggccacggcgucaagggcugggccuucgacgacggcaacgacgucuggaugggccgcaccaucuccgagaagucccgccucggcuacgagaccuucaaggucaucgagggcugguccaaccccaaguccaagcuccagaucaaccgccaggucaucgucgaccgcggcaaccgcuccggcuacuccggcaucuucuccgucgagggcaaguccugcaucaaccgcugcuucuacgucgagcucauccgcggccgcaaggaggagaccgagguccucuggaccuccaacuccaucgucgucuucugcggcaccuccggcaccuacggcaccggcuccuggcccgacggcgccgacaucaaccucaugcccaucuga

SEQ ID NO: 115162 - RNA, 1410 nt, Artificial Sequence
  derived and/or modified CDS sequence (opt2) from neuraminidase__InfluenzaA__ADK45479
augaaccccaaccagaagaucaucaccaucggcuccgucucccucaccaucuccaccaucugcuucuucaugcagaucgccauccucaucaccaccgucacccuccacuucaagcaguacgaguucaacuccccccccaacaaccaggucaugcucugcgagcccaccaucaucgagcgcaacaucaccgagaucgucuaccucaccaacaccaccaucgagaaggagaucugccccaagcucgccgaguaccgcaacugguccaagccccagugcgacaucaccggcuucgcccccuucuccaaggacaacuccauccgccucuccgccggcggcgacaucugggucacccgcgagcccuacgucuccugcgaccccgacaagugcuaccaguucgcccucggccagggcaccacccucaacaacguccacuccaacaacaccguccgcgaccgcacccccuaccgcacccuccucaugaacgagcucggcguccccuuccaccucggcaccaagcaggucugcaucgccugguccuccuccuccugccacgacggcaaggccuggcuccacgucugcaucaccggcgacgacaagaacgccaccgccuccuucaucuacaacggccgccucgucgacuccgucgucuccugguccaaggacauccuccgcacccaggaguccgagugcgucugcaucaacggcaccugcaccgucgucaugaccgacggcuccgccuccggcaaggccgacaccaagauccucuucaucgaggagggcaaggucguccacaccuccacccucuccggcuccgcccagcacgucgaggagugcuccugcuacccccgcuaccccggcguccgcugcgucugccgcgacaacuggaagggcuccaaccgccccaucgucgacaucaacaucaaggaccacuccaucgucuccuccuacgucugcuccggccucgucggcgacaccccccgcaagaacgacuccuccuccuccucccacugccucgaccccaacaacgaggagggcggccacggcgucaagggcugggccuucgacgacggcaacgacgucuggaugggccgcaccaucuccgagaagucccgccucggcuacgagaccuucaaggucaucgagggcugguccaaccacaaguccaagcuccagaucaaccgccaggucaucgucgaccgcggcaaccgcuccggcuacuccggcaucuucuccgucgagggcaaguccugcaucaaccgcugcuucuacgucgagcucauccgcggccgcaaggaggaggccgagguccucuggaccuccaacuccaucgucgucuucugcggcaccuccggcaccuacggcaccggcuccuggcccgacggcgccgaccucaaccucaugcccaucuga

SEQ ID NO: 115163 - RNA, 1410 nt, Artificial Sequence; identical to SEQ ID NO: 112774
  derived and/or modified CDS sequence (opt2) from neuraminidase__InfluenzaA__ADK48799

SEQ ID NO: 115164 - RNA, 1410 nt, Artificial Sequence; identical to SEQ ID NO: 114687
  derived and/or modified CDS sequence (opt2) from neuraminidase__InfluenzaA__ADK62686

SEQ ID NO: 115165 - RNA, 1410 nt, Artificial Sequence; identical to SEQ ID NO: 114125
  derived and/or modified CDS sequence (opt2) from neuraminidase__InfluenzaA__ADK62696

SEQ ID NO: 115166 - RNA, 1410 nt, Artificial Sequence; identical to SEQ ID NO: 113357
  derived and/or modified CDS sequence (opt2) from neuraminidase__InfluenzaA__ADK64994

SEQ ID NO: 115167 - RNA, 1410 nt, Artificial Sequence
  derived and/or modified CDS sequence (opt2) from neuraminidase__InfluenzaA__ADK65002
augaaccccaaccagaagaucaucaccaucggcuccgucugcaugaccaucggcauggccaaccucauccuccagaucggcaacaucaucuccaucuggaucucccacuccauccagcucggcaaccagaaccagaucgagaccugcaaccaguccgucaucaccuacgagaacaacaccugggucaaccagaccuacgucaacaucuccaacaccaacuucgccgccggccaguccgucgucuccgucaagcucgccggcaacuccucccucugccccgucuccggcugggccaucuacuccaaggacaacuccauccgcaccggcuccaagggcgacgucuucgucauccgcgagcccuucaucuccugcuccccccucgagugccgcaccuucuuccucacccagggcgcccuccucaacgacaagcacuccaacggcaccaucaaggaccgcucccccuaccgcacccucauguccugccccaucggcgagguccccucccccuacaacucccgcuucgaguccgucgccugguccgccuccgccugccacgacggcaucaacuggcucaccaucggcaucuccggccccgacaacggcgccgucgccggccucaaguacaacggcaucaucaccgacaccaucaaguccuggcgcaacaacauccuccgcacccaggaguccgagugcgccugcgucaacggcuccugcuucaccgucaugaccgacggccccuccgacggccaggccuccuacaagaucuuccgcaucgagaagggcaagaucgucaaguccgucgagaugaacgcccccaacuaccacuacgaggagugcuccugcuaccccgacuccuccgagaucaccugcgucugccgcgacaacuggcacggcuccaaccgccccugggucuccuucaaccagaaccucgaguaccagaucggcuacaucugcuccggcaucuucggcgacaacccccgccccaacgacaagaccggcuccugcggccccgucuccuccaacggcgccaacggcgucaagggcuucuccuucaaguacggcaacggcgucuggaucggccgcaccaaguccaucuccucccgcaacggcuucgagaugaucugggaccccaacggcuggaccggcaccgacaacaacuucuccaucaagcaggacaucgucggcaucaacgagugguccggcuacuccggcuccuucguccagcaccccgagcucaccggccucgacugcauccgccccugcuucugggucgagcucauccgcggccgccccaaggagaacaccaucuggaccuccggcuccuccaucuccuucugcggcgucaacuccgacaccgucggcugguccuggcccgacggcgccgagcuccccuucaccaucgacaaguga

SEQ ID NO: 115168 - RNA, 1410 nt, Artificial Sequence; identical to SEQ ID NO: 112774
  derived and/or modified CDS sequence (opt2) from neuraminidase__InfluenzaA__ADK65010

SEQ ID NO: 115169 - RNA, 1410 nt, Artificial Sequence
  derived and/or modified CDS sequence (opt2) from neuraminidase__InfluenzaA__ADK65018
augaaccccaaccagaagaucaucaccaucggcuccgucugcaugaccaucggcauggccaaccucauccuccagaucggcaacaucaucuccaucuggaucucccacuccauccagcucggcaaccagaaccagaucgagaccugcaaccaguccgucaucaccuacgagaacaacaccugggucaaccagaccuacgucaacaucuccaacaccaacuucgccgccggccaguccgucgucuccgucaagcucgccggcaacuccucccucugccccgucuccggcugggccaucuacuccaaggacaacuccauccgcaucggcuccaagggcgacgucuucgucauccgcgagcccuucaucuccugcuccccccucgagugccgcaccuucuuccucacccagggcgcccuccucaacgacaagcacuccaacggcaccaucaaggaccgcucccccuaccgcacccucauguccugccccaucggcgagguccccucccccuacaacucccgcuucgaguccgucgccuggcccgccuccgccugccacgacggcaucaacuggcucaccaucggcaucuccggccccgacaacggcgccgucgccguccucaaguacaacggcaucaucaccgacaccaucaaguccuggcgcaacaacauccuccgcacccaggaguccgagugcgccugcgucaacggcuccugcuucaccaucaugaccgacggccccuccgacggccaggccuccuacaagaucuuccgcaucgagaagggcaagaucgucaaguccaucgagaugaacgcccccaacuaccacuacgaggagugcuccugcuaccccgacuccuccgagaucaccugcgucugccgcgacaacuggcacggcuccaaccgccccugggucuccuucaaccagaaccucgaguaccagaucggcuacaucugcuccggcaucuucggcgacaacccccgccccaacgacaagaccggcuccugcggccccgucuccuccaacggcgccaacggcgucaagggcuucuccuucaaguacggcaacggcgucuggaucggccgcaccaaguccaucuccucccgcaacggcuucgagaugaucugggaccccaacggcuggaccggcaccgacaacaacuucuccaucaagcaggacaucgucggcaucaacgagugguccggcuacuccggcuccuucguccagcaccccgagcucaccggccucgacugcauccgccccugcuucugggucgagcucauccgcggccgccccaaggagaacaccaucuggaccuccggcuccuccaucuccuucugcggcgucaacuccgacaccgucggcugguccuggcccgacggcgccgagcuccccuucaccaucgacaaguga

SEQ ID NO: 115170 - RNA, 1410 nt, Artificial Sequence
  derived and/or modified CDS sequence (opt2) from neuraminidase__InfluenzaA__ADK87290
augaaccccaaccagaagaucaucaccaucggcuccgucucccucaccaucuccaccaucugcuucuucaugcagaucgccauccucaucaccaccgucacccuccacuucaagcaguacgaguucaacuccccccccaacaaccaggucaugcucugcgagcccaccaucaucgagcgcaacaucaccgagaucgucuaccucaccaacaccaccaucgagaaggagaucugccccaagcucgccgaguaccgcaacugguccaagccccagugcgacaucaccggcuucgcccccuucuccaaggacaacuccauccgccucuccgccggcggcgacaucugggucacccgcgagcccuacgucuccugcgaccccgacaagugcuaccaguucgcccucggccagggcaccacccucaacaacguccacuccaacaacaccguccgcgaccgcacccccuaccgcacccuccucaugaacgagcucggcguccccuuccaccucggcaccaagcaggucugcaucgccugguccuccuccuccugccacgacggcaaggccuggcuccacgucugcaucaccggcgacgacaagaacgccaccgccuccuucaucuacaacggccgccucgucgacuccgucgucuccugguccaaggagauccuccgcacccaggaguccgagugcgucugcaucaacggcaccugcaccgucgucaugaccgacggcuccgccuccggcaaggccuacaccaagauccucuucaucgaggagggcaagaucguccacaccuccacccucuccggcuccgcccagcacgucgaggagugcuccugcuacccccgcuaccccggcguccgcugcgucugccgcgacaacuggaagggcuccaaccgccccaucgucgacaucaacaucaaggaccacuccaucgucuccuccuacgucugcuccggccucgucggcgacaccccccgcaagaacgacuccuccuccuccucccacugccucgaccccaacaacgaggagggcggccacggcgucaagggcugggccuucgacgacggcaacgacgucuggaugggccgcaccaucuccgagaagucccgccucggcuacgagaccuucaaggucaucgagggcugguccaaccccaaguccaagcuccagaucaaccgccaggucaucgucgaccgcggcaaccgcuccggcuacuccggcaucuucuccgucgagggcaaguccugcaucaaccgcugcuucuacgucgagcucauccgcggccgcaaggaggagaccgagguccucuggaccuccaacuccaucgucgucuucugcggcaccuccggcaccuacggcaccggcuccuggcccgacggcgccgacaucaaccucaugcccgucuga

SEQ ID NO: 115171 - RNA, 1410 nt, Artificial Sequence
  derived and/or modified CDS sequence (opt2) from neuraminidase__InfluenzaA__ADK87292
augaaccccaaccagaagaucaucaccaucggcuccgucucccucaccaucuccaccaucugcuucuucaugcagaucgccauccucaucaccaccgucacccuccacuucaagcaguacgaguucaacuccccccccaacaaccaggucaugcucugcgagcccaccaucaucgagcgcaacaucaccgagaucgucuaccucaccaacaccaccaucgagaaggagaucugccccaagcucgccgaguaccgcaacugguccaagccccagugcgacaucaccggcuucgcccccuucuccaaggacaacuccauccgccucuccgccggcggcgacaucugggucacccgcgagcccuacgucuccugcgaccccgacaagugcuaccaguucgcccucggccagggcaccacccucaacaacguccacuccaacaacaccguccgcgaccgcacccccuaccgcacccuccucaugaacgagcucggcguccccuuccaccucggcaccaagcaggucugcaucgccugguccuccuccuccugccacgacggcaaggccuggcuccacgucugcaucaccggcgacgacaagaacgccaccgccuccuucaucuacaacggccgccucgucgacuccgucgucuccugguccaaggagauccuccgcacccaggaguccgagugcgucugcaucaacggcaccugcaccgucgucaugaccgacggcuccgccuccggcaaggccgacaccaagauccucuucaucgaggagggcaagaucguccacaccuccacccucuccggcuccgcccagcacgucgaggagugcuccugcuacccccgcuaccccggcguccgcugcgucugccgcgacaacuggaagggcuccaaccgccccaucgucgacaucaacaucaaggaccacuccaucgucuccuccuacgccugcuccggccucgucggcgacaccccccgcaagaacgacuccuccuccuccucccacugccucgaccccaacaacgaggagggcggccacggcgucaagggcugggccuucgacgacggcaacgacgucuggaugggccgcaccaucuccgagaagucccgccucggcuacgagaccuucaaggucaucgagggcugguccaaccccaaguccaagcuccagaucaaccgccaggucaucgucgaccgcggcaaccgcuccggcuacuccggcaucuucuccgucgagggcaaguccugcaucaaccgcugcuucuacgucgagcucauccgcggccgcaaggaggagaccgagguccucuggaccuccaacuccaucgucgucuucugcggcaccuccggcaccuacggcaccggcuccuggcccgacggcgccgacaucaaccucaugcccgucuga

SEQ ID NO: 115172 - RNA, 1410 nt, Artificial Sequence
  derived and/or modified CDS sequence (opt2) from neuraminidase__InfluenzaA__ADK87294
augaaccccaaccagaagaucaucgccaucggcuccgucucccucaccaucuccaccaucugcuucuuccuccagaucgccauccucaucaccaccgucacccuccacuucaagcaguacgaguucaacuccccccccaacaaccaggucaugcucugcgagcccaccaucaucgagcgcaacaucaccgagaucgucuaccucaccaacaccaccaucgagaaggagaucugccccaagcucgccgaguaccgcaacugguccaagccccagugcgacaucaccggcuucgcccccuucuccaaggacaacuccauccgccucuccgccggcggcgacaucugggucacccgcgagcccuacgucuccugcgaccccgacaagugcuaccaguucgcccucggccagggcaccacccucaacaacguccacuccaacaacaccguccgcgaccgcacccccuaccgcacccuccucaugaacgagcucggcguccccuuccaccucggcaccaagcaggucugcaucgccugguccuccuccuccugccgcgacggcaaggccuggcuccacgucugcaucaccggcgacgacaagaacgccaccgccuccuucaucuacaacggccgccucgucgacuccgucgucuccugguccaaggagauccuccgcacccaggaguccgagugcgucugcaucaacggcaccugcaccgucgucaugaccgacggcuccgccuccggcaaggccgacaccaagauccucuucaucgaggagggcaagaucguccacaccuccacccucuccggcuccgcccagcacgucgaggagugcuccugcuacccccgcuaccccggcguccgcugcgucugccgcgacaccggcaagggcuccaaccgccccaucgucgacaucaacaucaaggaccacuccaucgucuccuccuacgucugcuccggccucgucggcgacaccccccgcaagaacgacuccuccuccuccucccacugccucgaccccaacaacgaggagggcggccacggcgucaagggcugggccuucgacgacggcaacgacgucuggaugggccgcaccaucuccgagaagucccgccucggcuacgagaccuucaaggucaucgagggcugguccaaccccaaguccaagcuccagaucaaccgccaggucaucgucgaccgcggcaaccgcuccggcuacuccggcaucuucuccgucgagggcaaguccugcaucaaccgcugcuucuacgucgagcucauccgcggccgcaaggaggagaccgagguccucuggaccuccaacaacaucgucgucuucugcggcaccuccggcaccuacggcaccggcuccuggcccgacggcgccgacaucaaccucaugcccgucuga

SEQ ID NO: 115173 - RNA, 1410 nt, Artificial Sequence
  derived and/or modified CDS sequence (opt2) from neuraminidase__InfluenzaA__ADK87297
augaaccccaaccagaagaucaucaccaucggcuccgucugcaugaccaucggcauggccaaccucauccuccagaucggcaacaucaucuccaucuggaucucccacuccauccagcucggcaaccagaaccagaucgagaccugcaaccaguccgucaucaccuacgagaacaacaccugggucaaccagaccuacgucaacaucuccaacaccaacuucgccgccggccaguccgucgucuccgucaagcucgccggcaacuccucccucugccccgucuccggcugggccaucuacuccaaggacaacuccauccgcaucggcuccaagggcgacgucuucgucauccgcgagcccuucaucuccugcuccccccucgagugccgcaccuucuuccucacccagggcgcccuccucaacgacaagcacuccaacggcaccaucaagaaccgcucccccuaccgcacccucauguccugccccaucggcgagguccccucccccuacaacucccgcuucgaguccgucgccugguccgccuccgccugccacgacggcaucaacuggcucaccaucggcaucuccggccccgacaacggcgccgucgccguccucaaguacaacggcaucaucaccgacaccaucaaguccuggcgcaacaacauccuccgcacccaggaguccgagugcgccugcgucaacggcuccugcuucaccgucaugaccgacggccccuccgacggccaggccuccuacaagaucuuccgcaucgagaagggcaagaucgucaaguccgucgagaugaacgcccccaacuaccacuacgaggagugcuccugcuaccccgacuccuccgagaucaccugcgucugccgcgacaacuggcacggcuccaaccgccccugggucuccuucaaccagaaccucgaguaccagaucggcuacaucugcuccggcaucuucggcgacaacccccgccccaacgacaagaccggcuccugcggccccgucuccuccaacggcgccaacggcgucaagggcuucuccuucaaguacggcaacggcgucuggaucggccgcaccaaguccaucuccucccgcaacggcuucgagaugaucugggaccccaacggcuggaccggcaccgacaacaacuucuccaucaagcaggacaucgucggcaucaacgagugguccggcuacuccggcuccuucguccagcaccccgagcucaccggccucgacugcauccgccccugcuucugggucgagcucauccgcggccgccccaaggagaacaccaucuggaccuccggcuccuccaucuccuucugcggcgucaacuccgacaccgucggcugguccuggcccgacggcgccgagcuccccuucaccaucgacaaguga

SEQ ID NO: 115174 - RNA, 1410 nt, Artificial Sequence
  derived and/or modified CDS sequence (opt2) from neuraminidase__InfluenzaA__ADK87299
augaaccccaaccagaagaucaucaccaucggcuccgucugcaugaccaucggcauggccaaccucauccuccagaucggcaacaucaucuccaucuggaucucccacuccauccagcucggcaaccagaaccagaucgagaccugcaaccaguccgucaucaccuacgagaacaacaccugggucaaccagaccuacgucaacaucuccaacaccaacuucgccgccggccaguccgucgucuccgucaagcucgccggcaacuccucccucugccccgucuccggcugggccaucuacuccaaggacaacuccauccgcaucggcuccaagggcgacgucuucgucauccgcgagcccuucaucuccugcuccccccucgagugccgcaccuucuuccucacccagggcgcccuccucaacgacaagcacuccaacggcaccaucaaggaccgcucccccuaccgcacccucauguccugccccaucggcgagguccccucccccuacaacucccgcuucgaguccgucgccugguccgccuccgccugccacgacggcaucaacuggcucaccaucggcaucuccggccccgacaacggcgccgucgccguccucaaguacaacggcaucaucaccgacaccaucaaguccuggcgcaacaacauccuccgcacccaggaguccgagugcgccugcgucaacggcuccugcuucaccgucaugaccgacggccccuccgacggccaggccuccuucaagaucuuccgcaucgagaagggcaagaucgucaaguccgucgagaugaacgcccccaacuaccacuacgaggagugcuccugcuaccccgacuccuccgagaucaccugcgucugccgcgacaacuggcacggcuccaaccgccccugggucuccuucaaccagaaccucgaguaccagaucggcuacaucugcuccggcaucuucggcgacaacccccgccccaacgacaagaccggcuccugcggccccgucuccuccaacggcgccaacggcgucaagggcuucuccuucaaguacggcaacggcgucuggaucggccgcaccaaguccaucuccucccgcaacggcuucgagaugaucugggaccccaacggcuggaccggcaccgacaacaacuucuccaucaagcaggacaucgucggcaucaacgagugguccggcuacuccggcuccuucguccagcaccccgagcucaccggccucgacugcauccgccccugcuucugggucgagcucauccgcggccgccccaaggagaacaccaucuggaccuccggcuccuccaucuccuucugcggcgucaacuccgacaccgucggcugguccuggcccgacggcgccgagcuccccuucaccaucgacaaguga

SEQ ID NO: 115175 - RNA, 1410 nt, Artificial Sequence
  derived and/or modified CDS sequence (opt2) from neuraminidase__InfluenzaA__ADK87301
augaaccccaaccagaagaucaucaccaucggcuccgucucccucaccaucuccaccaucugcuucuucaugcagaucgccauccucaucaccaccgucacccuccacuucaagcaguacgaguucaacuccccccccaacaaccaggucaugcucugcgagcccaccaucaucgagcgcaacaucaccgagaucgucuaccucaccaacaccaccaucgagaaggagaucugccccaagcucgccgaguaccgcaacugguccaagccccagugcgacaucaccggcuucgcccccuucuccaaggacaacuccauccgccucuccgccggcggcgacaucugggucacccgcgagcccuacgucuccugcgaccccgacaagugcuaccaguucgcccucggccagggcaccacccucaacaacguccacuccaacaacaccguccgcgaccgcacccccuaccgcacccuccucaugaacgagcucggcguccccuuccaccucggcaccaagcaggucugcaucgccugguccuccuccuccugccacgacggcaaggccuggcuccacgucugcaucaccggcgacgacaagaacgccaccgccuccuucaucuacaacggccgccucgucgacuccgucgucuccugguccaaggagauccuccgcacccaggaguccgagugcgucugcaucaacggcaccugcaccgucgccaugaccgacggcuccgccuccggcaaggccgacaccaagauccucuucaucgaggagggcaagaucguccacaccuccacccucuccggcuccgcccagcacgucgaggagugcuccugcuacccccgcuaccccggcguccgcugcgucugccgcgacaacuggaagggcuccaaccgccccaucgucgacaucaacaucaaggaccacuccaucgucuccuccuacgucugcuccggccucgucggcgacaccccccgcaagaacgacuccuccuccuccucccacugccucgaccccaacaacgaggagggcggccacggcgucaagggcugggccuucgacgacggcaacgacgucuggaugggccgcaccaucuccgagaagucccgccucggcuacgagaccuucaaggucaucgagggcugguccaaccccaaguccaagcuccagaucaaccgccaggucaucgucgaccgcggcaaccgcuccggcuacuccggcaucuucuccgucgagggcaaguccugcaucaaccgcugcuucuacgucgagcucauccgcggccgcaaggaggagaccgagguccucuggaccuccaacuccaucgucgucuucugcggcaccuccggcaccuacggcaccggcuccuggcccgacggcgccgacaucaaccucaugcccaucuga

SEQ ID NO: 115176 - RNA, 1410 nt, Artificial Sequence; identical to SEQ ID NO: 112635
  derived and/or modified CDS sequence (opt2) from neuraminidase__InfluenzaA__ADK87303

SEQ ID NO: 115177 - RNA, 1410 nt, Artificial Sequence
  derived and/or modified CDS sequence (opt2) from neuraminidase__InfluenzaA__ADK87305
augaaccccaaccagaagaucaucaccaucggcuccgucucccucaccaucuccaccaucugcuucuucaugcagaucgccauccucaucaccaccgucacccuccacuucaagcaguacgaguucaacuccccccccaacaaccaggucaugcucugcgagcccaccaucaucgagcgcaacaucaccgagaucgucuaccucaccaacaccaccaucgagaaggagaucugccccaagcucgccgaguaccgcaacugguccaagccccagugcgacaucaccggcuucgcccccuucuccaaggacaacuccauccgccucuccgccggcggcgacaucugggucacccgcgagcccuacgucuccugcgaccccgacaagugcuaccaguucgcccucggccagggcaccacccucaacaacguccacuccaacaacaccguccgcgaccgcacccccuaccgcacccuccucaugaacgagcucggcguccccuuccaccucggcaccaagcaggucugcaucgccugguccuccuccuccugccacgacggcaaggccuggcuccacgucugcaucaccggcgacgacaagaacgccaccgccuccuucaucuacaacggccgccucgucgacuccgucgucuccugguccaaggagauccuccgcacccaggaguccgagugcgucugcaucaacggcaccugcaccgucgucaugaccgacggcuccgccuccggcaaggccgacaccaagauccucuucaucgaggagggcaagaucguccacaccuccacccucuccggcuccgcccagcacgucgaggagugcuccugcuacccccgcuaccccggcguccgcugcgucugccgcgacaacuggaagggcuccaaccgccccaucgucgacaucaacaucaaggaccacuccaucgucuccuccuacgucugcuccggccucgucggcgacaccccccgcaagaacgacuccuccuccuccucccacugccucgaccccaacaacgaggagggcggccacggcgucaagggcugggccuucgacgacggcaacgacgucuggaugggccgcaccaucuccgagaagucccgccucggcuacgagaccuucaaggucaucgagggcugguccaaccccaaguccaagcuccagaucaaccgccaggucaucgucggccgcggcaaccgcuccggcuacuccggcaucuucuccgucgagggcaaguccugcaucaaccgcugcuucuacgucgagcucauccgcggccgcaaggaggagaccgagguccucuggaccuccaacuccaucgucgucuucugcggcaccuccggcaccuacggcaccggcuccuggcccgacggcgccgacaucaaccucaugcccgucuga

SEQ ID NO: 115178 - RNA, 1410 nt, Artificial Sequence
  derived and/or modified CDS sequence (opt2) from neuraminidase__InfluenzaA__ADK87307
augaaccccaaccagaaggucaucaccaucggcuccgucucccucaccaucuccaccaucugcuucuucaugcagaucgccauccucaucaccaccgucacccuccacuucaagcaguacgaguucaacuccccccccaacaaccaggucaugcucugcgagcccaccaucaucgagcgcaacaucaccgagaucgucuaccucaccaacaccaccaucgagaaggagaucugccccaagcucgccgaguaccgcaacugguccaagccccagugcgacaucaccggcuucgcccccuucuccaaggacaacuccauccgccucuccgccggcggcgacaucugggucacccgcgagcccuacgucuccugcgaccccgacaagugcuaccaguucgcccucggccagggcaccacccucaacaacguccacuccaacaacaccguccgcgaccgcacccccuaccgcacccuccucaugaacgagcucggcguccccuuccaccucggcaccaagcaggucugcaucgccugguccuccuccuccugccacgacggcaaggccuggcuccacgucugcaucaccggcgacgacaagaacgccaccgccuccuucaucuacaacggccgccucgucgacuccgucgucuccugguccaaggagauccuccgcacccaggaguccgagugcgucugcaucaacggcaccugcaccgucgucaugaccgacggcuccgccuccggcaaggccgacaccaagauccucuucaucgaggagggcaagaucguccacaccuccacccucuccggcuccgcccagcacgucgaggagugcuccugcuacccccgcuaccccggcguccgcugcgucugccgcgacaacuggaagggcuccaaccgccccaucgucgacaucaacaucaaggaccacuccaucgucuccuccuacgucugcuccggccucgucggcgacaccccccgcaagaacgacuccuccuccuccucccacugccucgaccccaacaacgaggagggcggccacggcgucaagggcugggccuucgacgacggcaacgacgucuggaugggccgcaccaucuccgagaagucccgccucggcuacgagaccuucaaggucaucgagggcugguccaaccccaaguccaagcuccagaucaaccgccaggucaucgucggccgcggcaaccgcuccggcuacuccggcaucuucuccgucgagggcaaguccugcaucaaccgcugcuucuacgucgagcucaucggcggccgcaaggaggagaccgagguccucuggaccuccaacuccaucgucgucuucugcggcaccuccggcaccuacggcaccggcuccuggcccgacggcgccgacaucaaccucaugcccgucuga

SEQ ID NO: 115179 - RNA, 1410 nt, Artificial Sequence
  derived and/or modified CDS sequence (opt2) from neuraminidase__InfluenzaA__ADK87312
augaaccccaaccagaccaucaucaccaucggcuccgucugcaugaccaucggcauggccaaccucauccuccagaucggcaacaucaucuccaucuggaucucccacuccauccagcucggcaaccagaaccagaucgagaccugcaaccaguccgucaucaccuacgagaacaacaccugggucaaccagaccuacgucaacaucuccaacaccaacuucgccgccggccaguccgucaucuccgucaagcucgccggcaacuccucccucugccccgucuccggcugggccaucuacuccaaggacaacaacauccgcaucggcuccaagggcgacgucuucgucauccgcgagcccuucaucuccugcuccccccucgagugccgcaccuucuuccucacccagggcgcccuccucaacgacaagcacuccaacggcaccaucaaggaccgcucccccuaccgcacccucauguccugccccaucggcgagguccccucccccuacaacucccgcuucgaguccgucgccugguccgccuccgccugccacgacggcaucaacuggcucaccaucggcaucuccggccccgacaacggcgccgucgccguccucaaguacaacggcaucaucaccgacaccaucaaguccuggcgcaacaacauccuccgcacccaggaguccgagugcgccugcgucaacggcuccugcuucaccgucaugaccgacggccccuccgacggccaggccuccuacaagaucuuccgcaucgagaagggcaagaucgucaaguccgucgagaugaacgcccccaacuaccacuacgaggagugcuccugcuaccccgacuccuccgagaucaccugcgucugccgcgacaacuggcacggcuccaaccgccccugggucuccuucaaccagaaccucgaguaccagaucggcuacaucugcuccggcaucuucggcgacaacccccgccccaacgacaagaccggcuccugcggccccgucuccuccaacggcgccaacggcgucaagggcuucuccuucaaguacggcaacggcgucuggaucggccgcaccaaguccaucuccucccgcaacggcuucgagaugaucugggaccccaacggcuggaccggcaccgacaacaacuucuccaucaagcaggacaucgucggcaucaacgagugguccggcuacuccggcuccuucguccagcaccccgagcucaccggccucgacugcauccgccccugcuucugggucgagcucauccgcggccgccccaaggagaacaccaucuggaccuccggcuccuccaucuccuucugcggcgucaacuccgacaccgucggcugguccuggcccgacggcgccgagcuccccuucaccaucgacaaguga

SEQ ID NO: 115180 - RNA, 1410 nt, Artificial Sequence
  derived and/or modified CDS sequence (opt2) from neuraminidase__InfluenzaA__ADK87314
augaaccccaaccagaagaucaucaccaucggcuccgucucccucaccaucuccaccaucugcuucuucaugcagaucgccauccucaucaccaccgucacccuccacuucaagcaguacgaguucaacuccccccccaacaaccaggucaugcucugcgagcccaccaucaucgagggcaacaucaccgagaucgucuaccucaccaacaccaccaucgagaaggagaugugccccaagcucgccgaguaccgcaacugguccaagccccagugcgacaucaccggcuucgcccccuucuccaaggacaacuccauccgccucuccgccggcggcgacaucugggucacccgcgagcccuacgucuccugcgaccccgacaagugcuaccaguucgcccucggccagggcaccacccucaacaacguccacuccaacaacaccguccgcgaccgcacccccuaccgcacccuccucaugaacgagcucggcguccccuuccaccucggcaccaagcaggucugcaucgccugguccuccuccuccugccacgacggcaaggccuggcuccacgucugcaucaccggcgacgacaagaacgccaccgccuccuucaucuacaacggccgccucgucgacuccgucgucuccugguccaaggagauccuccgcacccaggaguccgagugcgucugcaucaacggcaccugcaccgucgucaugaccgacggcuccgccuccggcaaggccgacaccaagauccucuucaucgaggagggcaagaucguccacaccuccaccuccuccggcuccgcccagcacgucgaggagugcuccugcuacccccgcuaccccggcguccgcugcgucugccgcgacaacuggaagggcuccaaccgccccaucgucgacaucaacaucaaggaccacuccaucgucuccuccuacgucugcuccggccucgucggcgacaccccccgcaagaacgacuccuccuccuccucccacugccucgaccccaacaacgaggagggcggccacggcgucaagggcugggccuucgacgacggcaacgacgucuggaugggccgcaccaucuccgagaagucccgccucggcuacgagaccuucaaggucaucgagggcugguccaaccccaaguccaagcuccagaucaaccgccaggucaucgucgaccgcggcaaccgcuccggcuacuccggcaucuucuccgucgagggcaaguccugcaucaaccgcugcuucuacgucgagcucauccgcggccgcaaggaggagaccgagguccucuggaccuccaacuccaucgucgucuucugcggcaccuccggcaccuacggcaccggcuccuggcccgacggcgccgacaucaaccucaugcccgucuga

SEQ ID NO: 115181 - RNA, 1410 nt, Artificial Sequence
  derived and/or modified CDS sequence (opt2) from neuraminidase__InfluenzaA__ADK87316
augaaccccaaccagaagaucaucaccaucggcuccgucugcaugaccaucggcauggccaaccucauccuccagaucggcaacaucaucuccaucuggaucucccacuccauccagcucggcaaccagaaccagaucgagaccugcaaccaguccgucaucaccuacgagaacaacaccugggucaaccagaccuacgucaacaucuccaacaccaacuucgccgccggccaguccgucgucuccgucaagcucgccggcaacuccucccucugccccgucuccggcugggccaucuacuccaaggacaacuccauccgcaucggcuccaagggcgacgucuucgucauccgcgagcccuucaucuccugcuccccccucgagugccgcaccuucuuccucacccagggcgcccuccucaacgacaagcacuccaacggcaccaucaaggaccgcucccccuaccgcacccucauguccugccccaucggcgagguccccucccccuacaacucccgcuucgaguccgucgccugguccgccuccgccugccacgacggcaucaacuggcucaccaucggcaucuccggccccgacaacggcgccgucgccguccucaaguacaacggcaucaucaccgacaccaucaaguccuggcgcaacaacauccuccgcacccaggaguccgagugcgccugcgucaacggcuccugcuucaccgucaugaccgacggccccuccgacggccaggccuccuacaagaucuuccgcaucgagaagggcaagaucgucaaguccgucgagaugaacgcccccaacuaccacuacgaggagugcuccugcuaccccgacuccuccgagaucaccugcgucugccgcgacaacuggcacggcuccaaccgccccugggucuccuucaaccagaaccucgaguaccagaucggcuacaucugcuccggcaucuucggcgacaacccccgccccaacgacaagaccggcuccugcggccccgucuccuccaacggcgccaacggcgucaagggcuucuccuucaaguacggcaacggcgucuggaucggccgcaccaaguccaucuccucccgcaacggcuucgagaugaucugggaccccaacggcuggaccggcaccgacaacaacuucuccaucaagcaggacaucgucggcaucaacgagugguccggcuacuccggcuccuucguccagcaccccgagaucaccggccucgacugcauccgccccugcuucugggucgagcucauccgcggccgccccaaggagaacaccaucuggaccuccggcuccuccaucuccuucugcggcgucaacuccgacaccgucggcugguccuggcccgacggcgccgagcuccccuucaccaucgacaaguga

SEQ ID NO: 115182 - RNA, 1410 nt, Artificial Sequence
  derived and/or modified CDS sequence (opt2) from neuraminidase__InfluenzaA__ADK87318
augaaccccaaccagaagaucaucaccaucggcuccgucugcaugaccaucggcauggccaaccucauccuccagaucggcaacaucaucuccaucuggaucucccacuccauccagcucggcaaccagaaccagaucgagaccugcaaccaguccgucaucaccuacgagaacaacaccugggucaaccagaccuacgucaacaucuccaacaccaacuucgccgccggccaguccgucgucuccgucaagcucgccggcaacuccucccucugccccgucuccggcugggccaucuacuccaaggacaacuccauccgcaucggcuccaagggcgacgucuucgucauccgcgagcccuucaucuccugcuccccccucgagugccgcaccuucuuccucacccagggcgcccuccucaacgacaagcacuccaacggcaccaucaaggaccgcucccccuaccgcacccucauguccugccccaucggcgagguccccucccccuacaacucccgcuucgaguccgucgccugguccgccuccgccugccacgacggcaucaacuggcucaccaucggcaucuccggccccgacaacggcgccgucgccguccucaaguacaacggcaucaucaccgacaccaucaaguccuggcgcaacaacauccuccgcacccaggaguccgagugcgccugcgucaacggcuccugcuucaccgucaugaccgacggccccuccgacggccaggccuccuacaagaucuuccgcaucgagaagggcaagaucgucaaguccgucgagaugaacgcccccaacuaccacuacgaggagugcuccugcuaccccgacuccuccgagaucaccugcgucugccgcgacaacuggcacggcuccaaccgccccugggucuccuucaaccagaaccucgaguaccagaucggcuacaucugcuccggcaucuucggcgacaacccccgccccaacgacaagaccggcuccugcggccccgucuccuccaacggcgccaacggcgucaagggcuucuccuucaaguacggcaacggcgucuggaucggccgcaccaaguccaucuccucccgcaacggcuucgagaugaucugggaccccaacggcuggaccggcaccgacaacaacuucuccaucaagcaggacaucgucggcaucaacgagugguccggcuacuccggcuccuucguccagcaccccgagcucaccggccucgacugcauccgccccugcuccugggucgagcucauccgcggccgccccaaggagaacaccaucuggaccuccggcuccuccaccuccuucugcggcgucaacuccgacaccgucggcugguccuggcccgacggcgccgagcuccccuucaccaucgacaaguga

SEQ ID NO: 115183 - RNA, 1410 nt, Artificial Sequence
  derived and/or modified CDS sequence (opt2) from neuraminidase__InfluenzaA__ADK87320
augaaccccaaccagaagaucaucaccaucggcuccgucugcaugaccaucggcauggccaaccucauccuccagaucggcaacaucaucuccaucuggaucucccacuccauccagcucggcaaccagaaccagaucgagaccugcaaccaguccgucaucaccuacgagaacaacaccuggguccaccagaccuacgucaacaucuccaacaccaacuucgccgccggccaguccgucgucuccgucaagcucgccggcaacuccucccucugccccgucuccggcugggccaucuacuccaaggacaacuccauccgcaucggcuccaagggcgacgucuucgucauccgcgagcccuucaucuccugcuccccccucgagugccgcaccuucuuccucacccagggcgcccuccucaacgacaagcacuccaacggcaccaucaaggaccgcucccccuaccgcacccucauguccugccccaucggcgagguccccucccccuacaacucccgcuucgaguccgucgccugguccgccuccgccugccacgacggcaucaacuggcucaccaucggcaucuccggccccgacaacggcgccgucgccguccucaaguacaacggcaucaucaccgacaccaucaaguccuggcgcaacaacauccuccgcacccaggaguccgagugcgccugcgucaacggcuccugcuucaccgucaugaccgacggccccuccgacggccaggccuccuacaagaucuuccgcaucgagaagggcaagaucgucaaguccgucgagaugaacgcccccaacuaccacuacgaggagugcuccugcuaccccgacuccuccgagaucaccugcgucugccgcgacaacuggcacggcuccaaccgccccugggucuccuucaaccagaaccucgaguaccagaucggcuacaucugcuccggcaucuucggcgacaacccccgccccaacgacaagaccggcuccugcggccccgucuccuccaacggcgccaacggcgucaagggcuucuccuucaaguacggcaacggcgucuggaucggccgcaccaaguccaucuccucccgcaacggcuucgagaugaucugggaccccaacggcuggaccggcaccgacaacaacuucuccaucaagcaggacaucgucggcaucaacgagugguccggcuacuccggcuccuucguccagcaccccgagcucaccggccucaacugcauccgccccugcuucugggucgagcucauccgcggccgccccaaggagaacaccaucuggaccuccggcuccuccaucuccuucugcggcgucaacuccgacaccgucggcugguccuggcccgacggcgccgagcuccccuucaccaucgacaaguga

SEQ ID NO: 115184 - RNA, 1410 nt, Artificial Sequence
  derived and/or modified CDS sequence (opt2) from neuraminidase__InfluenzaA__ADK87324
augaaccccaaccagaagaucaucaccaucggcuccgucucccucaccaucuccaccaucugcuuccucaugcagaucgccauccucaucaccaccgucacccuccacuucaagcaguacgaguucaacuccccccccaacaaccaggucaugcucugcgagcccaccaucaucgagcgcaacaucaccgagaucgucuaccucaccaacaccaccaucgagaaggagaucugccccaagcucgccgaguaccgcaacugguccaagccccagugcgacaucaccggcuucgcccccuucuccaaggacaacuccauccgccucuccgccggcggcgacaucugggucacccgcgagcccuacgucuccugcgaccccggcaagugcuaccaguucgcccucggccagggcaccacccucaacaacguccacuccaacaacaccguccgcgaccgcacccccuaccgcacccuccucaugaacgagcucggcguccccuuccaccucggcaccaagcaggucugcaucgccugguccuccuccuccugccacgacggcaaggccuggcuccacgucugcaucaccggcgacgacgagaacgccaccgccuccuucaucuacaacggccgccucgucgacuccgucgucuccugguccaaggagauccuccgcacccaggaguccgagugcgucugcaucaacggcaccugcaccgucgucaugaccgacggcuccgccuccggcaaggccgacaccaagauccucuucaucgaggagggcaagaucguccacaccuccacccucuccggcuccgcccagcacgucgaggagugcuccugcuacccccgcuaccccggcguccgcugcgucugccgcgacaacuggaagggcuccaaccgccccaucgucgacaucaacaucaaggaccacuccaucgucuccuccuacgucugcuccggccucgucggcgacaccccccgcaagaacgacuccuccuccuccucccacugccucgaccccaacaacgaggagggcggccacggcgucaagggcugggccuucgacgacggcaacgacgucuggaugggccgcaccaucuccgagaagucccgccucggcuacgagaccuucaaggucaucgagggcugguccaaccccaaguccaagcuccagaucaaccgccaggucaucgucgaccgcggcaaccgcuccggcuacuccggcaucuucuccgucgagggcaaguccugcaucaaccgcugcuucuacgucgagcucauccgcggccgcaaggaggagaccgagguccucuggaccuccaacuccaucgucgucuucugcggcaccuccggcaccuacggcaccggcuccuggcccgacggcgccgacaucaaccucaugcccgucuga

SEQ ID NO: 115185 - RNA, 1410 nt, Artificial Sequence
  derived and/or modified CDS sequence (opt2) from neuraminidase__InfluenzaA__ADK87327
augaaccccaaccagaagaucaugaccaucggcuccgucucccucaccaucuccaccaucugcuucuucaugcagaucgccauccucaucaccaccgucacccuccacuucaagcaguacgaguucaacuccccccccaacaaccaggucaugcucugcgagcccaccaucaucgagcgcaacaucaccgagaucgucuaccucaccaacaccaccaucgagaaggagaucugccccaagcucgccgaguaccgcaacugguccaagccccagugcgacaucaccggcuucgcccccuucuccaaggacaacuccauccgccucuccgccggcggcgacaucugggucacccgcgagcccuacgucuccugcgaccccgacaagugcuaccaguucgcccucggccagggcaccacccucaacaacguccacuccaacaacaccguccgcgaccgcacccccuaccgcacccuccucaugaacgagcucggcguccccuuccaccucggcaccaagcaggucugcaucgccugguccuccuccuccugccacgacggcaaggccuggcuccacgucugcaucaccggcgacgacaagaacgccaccgccuccuucaucuacaacggccgccucgucgacuccgucgucuccugguccaaggagauccuccgcacccaggaguccgagugcgucugcaucaacggcaccugcaccgucgucaugaccgacggcuccgccuccggcaaggccgacaccaagauccucuucaucgaggagggcaagaucguccacaccuccacccucuccggcuccgcccagcacgucgaggagugcuccugcuacccccgcuaccccggcguccgcugcgucugccgcgacaacuggaagggcuccaaccgccccaucgucgacaucaacaucaaggaccacuccaucgucuccuccuacgucugcuccggccucgucggcgacaccccccgcaagaacgacuccuccuccuccucccacugccucgaccccaacaacgaggagggcggccacggcgucaagggcugggccuucgacgacggcaacgacgucuggaugggccgcaccaucuccgagcgcucccgccucggcuacgagaccuucaaggucaucgagggcugguccaaccccaaguccaagcuccagaucaaccgccaggucaucgucgaccgcggcaaccgcuccggcuacuccggcaucuucuccgucgagggcaaguccugcaucaaccgcugcuucuacgucgagcucauccgcggccgcaaggaggagaccgagguccucuggaccuccaacuccaucgucgucuucugcggcaccuccggcaccuacggcaccggcuccuggcccgacggcgccgacaucaaccucaugcccgucuga

SEQ ID NO: 115186 - RNA, 1410 nt, Artificial Sequence; identical to SEQ ID NO: 112774
  derived and/or modified CDS sequence (opt2) from neuraminidase__InfluenzaA__ADK87329

SEQ ID NO: 115187 - RNA, 1410 nt, Artificial Sequence
  derived and/or modified CDS sequence (opt2) from neuraminidase__InfluenzaA__ADK87330
augaaccccaaccagaagaucaucaccaucggcuccgucugcaugaccaucggcauggccaaccucauccuccagaucggcaacaucaucuccaucuggaucucccacuccauccagcucggcaaccagaaccagaucgagaccugcaaccaguccgucaucaccuacgagaacaacaccugggucaaccagaccuacgucaacaucuccaacaccaacuucgccgccggccaguccgucgucuccgucaagcucgccggcaacuccucccucugccccgucuccggcugggccaucuacuccaaggacaacuccauccgcaucggcuccaagggcgacgucuucgucauccgcgagcccuucaucuccugcuccccccucgagugccgcaccuucuuccucacccagggcgcccuccucaacgacaagcacuccaacggcaccaucaaggaccgcucccccuaccgcacccucauguccugccccaucggcgagguccccucccccuacaacucccgcuucgaguccgucgccugguccgccuccgccugccacgacggcaucaacuggcucaccaucggcaucuccggccccgacaacggcgccgucgccguccucaaguacaacggcaucaucaccgacaccaucaaguccuggcgcaacaacauccuccgcacccaggaguccgagugcgccugcgucaacggcuccugcuucaccgucaugaccgacggccccuccgacggccaggccuccuacaagaucuuccgcaucgagaagggcaagaucgucaaguccgucgagaugaacgcccccaacuaccacuacgaggagugcuccugcuaccccgacuccuccgagaucaccugcgucugccgcgacaacuggcacggcuccaaccgccccugggucuccuucaaccagaaccucgaguaccagaucggcuacaucugcuccggcaucuucggcgacaacccccgccccaacgacaagaccggcuccugcggccccgucuccuccaacggcgccaacggcgucaagggcuucuccuucaaguacggcaacggcgucuggaucggccgcaccaaguccaucuccucccgcaacggcuucgagaugaucugggaccccaacggcuggaccggcaccgacaacaacuucuccaucaagcaggacaucgucggcaucaacgagugguccggcuacuccggcuccuucguccagcaccccgagcucaccggccucgacugcauccgccccugcuucugggucgagcucauccgcggccgccccaaggagaacaccaucugggccuccggcuccuccaucuccuucugcggcgucaacuccgacaccgucggcugguccuggcccgacggcgccgagcuccccuucaccaucgacaaguga

SEQ ID NO: 115188 - RNA, 1410 nt, Artificial Sequence; identical to SEQ ID NO: 112774
  derived and/or modified CDS sequence (opt2) from neuraminidase__InfluenzaA__ADK87331

SEQ ID NO: 115189 - RNA, 1410 nt, Artificial Sequence
  derived and/or modified CDS sequence (opt2) from neuraminidase__InfluenzaA__ADK87332
augaaccccaaccagaagaucaucaccaucggcuccgucugcaugaccaucggcauggccaaccucauccuccagaucggcaacaucaucuccaucuggaucucccacuccauccagcucggcaaccagaaccagaucgagaccugcaaccaguccgucaucaccuacgagaacaacaccugggucaaccagaccuacgucaacaucuccaacaccaacuucgccgccggccaguccgucgucuccgucaagcucgccggcaacuccucccucugccccgucuccggcugggccaucuacuccaaggacaacuccauccgcaucggcuccaagggcgacgucuucgucauccgcgagcccuucaucuccugcuccccccucgagugccgcaccuucuuccucacccagggcgcccuccucaacgacaagcacuccaacggcaccaucaaggaccgcucccccuaccgcacccucauguccugccccaucggcgagguccccucccccuacaacucccgcuucgaguccgucgccugguccgccuccgccugccacgacggcaucaacuggcucaccaucggcaucuccggccccgacaacggcgccgucgccguccucaagcacaacggcaucaucaccgacaccaucaaguccuggcgcaacaacauccuccgcacccaggaguccgagugcgccugcgucaacggcuccugcuucaccgucaugaccgacggccccuccgacggccaggccuccuacaagaucuuccgcaucgagaagggcaagaucgucaaguccgucgagaugaacgcccccaacuaccacuacgaggagugcuccugcuaccccgacuccuccgagaucaccugcgucugccgcgacaacuggcacggcuccaaccgccccugggucuccuucaaccagaaccucgaguaccagaucggcuacaucugcuccggcaucuucggcgacaacccccgccccaacgacaagaccggcuccugcggccccgucuccuccaacggcgccaacggcgucaagggcuucuccuucaaguacggcaacggcgucuggaucggccgcaccaaguccaucuccucccgcaacggcuucgagaugaucugggaccccaacggcuggaccggcaccgacaacaacuucuccaucaagcaggacaucgucggcaucaacgagugguccggcuacuccggcuccuucguccagcaccccgagcucaccggccucgacugcauccgccccugcuucugggucgagcucauccgcggccgccccaaggagaacaccaucuggaccuccggcuccuccaucuccuucugcggcgucaacuccgacaccgucggcugguccuggcccgacggcgccgagcuccccuucaccaucgacaaguga

SEQ ID NO: 115190 - RNA, 1410 nt, Artificial Sequence
  derived and/or modified CDS sequence (opt2) from neuraminidase__InfluenzaA__ADK87333
augaaccccaaccagaagaucaucaccaucggcuccgucugcaugaccaucggcauggccaaccucauccuccagaucggcaacaucaucuccaucuggaucucccacuccauccagcucggcaaccagaaccagaucgagaccugcaaccaguccgucaucaccuacgagaacaacaccugggucaaccagaccuacgucaacaucuccaacaccaacuucgccgccggccaguccgucgucuccgucaagcucgccggcaacuccucccucugccccgucuccggcugggccaucuacuccaaggacaacuccauccgcaucggcuccaagggcgacgucuucgucauccgcgagcccuucaucuccugcuccccccucgagugccgcaccuucuuccucacccagggcgcccuccucaacgacaagcacuccaacggcaccaucaaggaccgcucccccuaccgcacccucauguccugccccaucggcgagguccccucccccuacaacucccgcuucgaguccgucgccugguccgccuccgccugccacgacggcaucaacuggcucaccaucggcaucuccggccccgacaacggcgccgucgccguccucaaguacaacggcaucaucaccgacaccaucaaguccuggcgcaacaacauccuccgcacccaggaguccgagugcgccugcgucaacggcuccugcuucaccgucaugaccgacggccccuccgacggccaggccuccuacaagaucuuccgcaucgagaagggcaagaucgucaaguccgucgagaugaacgcccccaacuaccacuacgaggagugcuccugcuaccccuacuccuccgagaucaccugcgucugccgcgacaacuggcacggcuccaaccgccccugggucuccuucaaccagaaccucgaguaccagaucggcuacaucugcuccggcaucuucggcgacaacccccgccccaacgacaagaccggcuccugcggccccgucuccuccaacggcgccaacggcgucaagggcuucuccuucaaguacggcaacggcgucuggaucggccgcaccaaguccaucuccucccgcaacggcuucgagaugaucugggaccccaacggcuggaccggcaccgacaacaacuucuccaucaagcaggacaucgucggcaucaacgagugguccggcuacuccggcuccuucguccagcaccccgagcucaccggccucgacugcauccgccccugcuucugggucgagcucauccgcggccgccccaaggagaacaccaucuggaccuccggcuccuccaucuccuucugcggcgucaacuccgacaccgucggcugguccuggcccgacggcgccgagcuccccuucaccaucgacaaguga

SEQ ID NO: 115191 - RNA, 1410 nt, Artificial Sequence
  derived and/or modified CDS sequence (opt2) from neuraminidase__InfluenzaA__ADK87335
augaaccccaaccagaagaucaucaccaucggcuccgucucccucaccaucuccaccaucugcuucuucaugcagaucgccauccucaucaccaccgucacccuccacuucaagcaguacgaguucaacuccccccccaacaaccaggucaugcucugcgagcccaccaucaucgagcgcaacaucaccgagaucgucuaccucaccaacaccaccaucgagaaggagaucugccccaagcucgccgaguaccgcaacugguccaagccccagugcgacaucaccggcuucgcccccuucuccaaggacaacuccauccgccucuccgccggcggcgacaucugggucacccgcgagcccuacgucuccugcgaccccgaccgccgcuaccaguucgcccucggccagggcaccacccucaacaacguccacuccgacaacaccguccgcgaccgcacccccuaccgcacccuccucaugaacgagcucggcguccccuuccaccucggcaccaagcaggucugcaucgccugguccuccuccuccugccacgacggcaaggccuggcuccacgucugcaucaccggcgacgacaagaacgccaccgccuccuucaucuacaacggccgccucgucgacuccgucgucuccugguccaaggagauccuccgcacccaggaguccgagugcgucugcaucaacggcaccugcaccgucgucaugaccgacggcuccgccuccggcaaggccgacaccaagauccucuucaucgaggagggcaagaucguccacaccuccacccucuccggcaacgcccagcacgucgaggagugcuccugcuacccccgcuaccccggcguccgcugcgucugccgcgacaacuggaagggcuccaaccgccccaucgucgacaucaacaucaaggaccacuccaucgucuccuccuacgucugcuccggccucgucggcgacaccccccgcaagaacgacuccuccuccuccucccacugccucgaccccaacaacgaggagggcggccacggcgucaagggcugggccuucgacgacggcaacgacgucuggaugggccgcaccaucuccgagaagucccgccucggcuacgagaccuucaaggucaucgagggcugguccaaccccaaguccaagcuccagaucaaccgccaggucaucgucgaccgcggcaaccgcuccggcuacuccggcaucuucuccgucgagggcaaguccugcaucaaccgcugcuucuacgucgagcucauccgcggccgcaaggaggagaccgagguccucuggaccuccaacuccaucgucgucuucugcggcaccuccggcaccuacggcaccggcuccuggcccgacggcgccgacaucaaccucaugcccaucuga

SEQ ID NO: 115192 - RNA, 1410 nt, Artificial Sequence
  derived and/or modified CDS sequence (opt2) from neuraminidase__InfluenzaA__ADK87337
augaaccccaaccagaagaucaucaccaucggcuccgucucccucaccaucuccaccaucugcuucuucaugcagaucgccauccucaucaccaccgucacccuccacuucaagcaguacgaguucaacuccccccccaacaaccaggucaugcucugcgagcccaccaucaucgagcgcaacaucaccgagaucgucuaccucaccaacaccaccaucgagaaggagaucugccccaagcucgccgaguaccgcaacugguccaagccccagugcgacaucaccggcuucgcccccuucuccaaggacaacuccauccgccucuccgccggcggcgacaucugggucacccgcgagcccuacgucuccugcgaccccgacaagugcuaccaguucgcccucggccagggcaccacccucaacaacguccacuccaacaacgccguccgcgaccgcacccccuaccgcacccuccucaugaacgagcucggcguccccuuccaccucggcaccaagcaggucugcaucgccugguccuccuccuccugccacgacggcaaggccuggcuccacgucugcaucaccggcgacgacaagaacgccaccgccuccuucaucuacaacggccgccucgucgacuccgucgucuccugguccaaggagauccuccgcacccaggaguccgagugcgucugcaucaacggcaccugcaccgucgucaugaccgacggcuccgccuccggcaaggccgacaccaagauccucuucaucgaggagggcaagaucguccacaccuccacccucuccggcaacgcccagcacgucgaggagugcuccugcuacccccgcuaccccggcguccgcugcgucugccgcgacaacuggaagggcuccaaccgccccaucgucgacaucaacaucaaggaccacuccaucgucuccuccuacgucugcuccggccucgucggcgacaccccccgcaagaacgacuccuccuccuccucccacugccucgaccccaacaacgaggagggcggccacggcgucaagggcugggccuucgacgacggcaacgacgucuggaugggccgcaccaucuccgagaagucccgccucggcuacgagaccuucaaggucaucgagggcugguccaaccccaaguccaagcuccagaucaaccgccaggucaucgucgaccgcggcaaccgcuccggcuacuccggcaucuucuccgucgagggcaaguccugcaucaaccgcugcuucuacgucgagcucauccgcggccgcaaggaggagaccgagguccucuggaccuccaacuccaucgucgucuucugcggcaccuccggcaccuacggcaccggcuccuggcccgacggcgccgacaucaaccucaugcccaucuga

SEQ ID NO: 115193 - RNA, 1410 nt, Artificial Sequence
  derived and/or modified CDS sequence (opt2) from neuraminidase__InfluenzaA__ADK87339
augaaccccaaccagaagaucaucaccaucggcuccaucugcaugaccaucggcauggccaaccucauccuccagaucggcaacaucaucuccaucuggaucucccacuccauccagcucggcaaccagaaccagaucgagaccugcaaccaguccgucaucaccuacgagaacaacaccugggucaaccagaccuacgucaacaucuccaacaccaacuucgccgccggccaguccgucgucuccgucaagcucgccggcaacuccucccucugccccgucuccggcugggccaucuacuccaaggacaacuccauccgcaucggcuccaagggcgacgucuucgucauccgcgagcccuucaucuccugcuccccccucgagugccgcaccuucuuccucacccagggcgcccuccucaacgacaagcacuccaacggcaccaucaaggaccgcucccccuaccgcacccucauguccugccccaucggcgagguccccucccccuacaacucccgcuucgaguccgucgccugguccgccuccgccugccacgacggcaucaacuggcucaccaucggcaucuccggccccgacaacggcgccgucgccguccucaaguacaacggcaucaucaccgacaccaucaaguccuggcgcaacaacauccuccgcacccaggaguccgagugcgccugcgucaacggcuccugcuucaccgucaugaccgacggccccuccgacggccaggccuccuacaagaucuuccgcaucgagaagggcaagaucgucaaguccgucgagaugaacgcccccaacuaccacuacgaggagugcuccugcuaccccgacuccuccgagaucaccugcgucugccgcgacaacuggcacggcuccaaccgccccugggucuccuucaaccagaaccucgaguaccagaucggcuacaucugcuccggcaucuucggcgacaacccccgccccaacgacaagaccggcuccugcggccccgucuccuccaacggcgccaacggcgucaagggcuucuccuucaaguacggcaacggcgucuggaucggccgcaccaaguccaucuccucccgcaacggcuucgagaugaucugggaccccaacggcuggaccggcaccgacaacaacuucuccaucaagcaggacaucgucggcaucaacgagugguccggcuacuccggcuccuucguccagcaccccgagcucaccggccucgacugcauccgccccugcuucugggucgagcucauccgcggccgccccaaggagaacaccaucuggaccuccggcuccuccaucuccuucugcggcgucaacuccgacaccgucggcugguccuggcccgacggcgccgagcuccccuucaccaucgacaaguga

SEQ ID NO: 115194 - RNA, 1410 nt, Artificial Sequence; identical to SEQ ID NO: 112774
  derived and/or modified CDS sequence (opt2) from neuraminidase__InfluenzaA__ADK90209

SEQ ID NO: 115195 - RNA, 1410 nt, Artificial Sequence; identical to SEQ ID NO: 112774
  derived and/or modified CDS sequence (opt2) from neuraminidase__InfluenzaA__ADK90213

SEQ ID NO: 115196 - RNA, 1410 nt, Artificial Sequence; identical to SEQ ID NO: 112774
  derived and/or modified CDS sequence (opt2) from neuraminidase__InfluenzaA__ADK90217

SEQ ID NO: 115197 - RNA, 1410 nt, Artificial Sequence; identical to SEQ ID NO: 114753
  derived and/or modified CDS sequence (opt2) from neuraminidase__InfluenzaA__ADK90221

SEQ ID NO: 115198 - RNA, 1410 nt, Artificial Sequence; identical to SEQ ID NO: 114753
  derived and/or modified CDS sequence (opt2) from neuraminidase__InfluenzaA__ADK90225

SEQ ID NO: 115199 - RNA, 1410 nt, Artificial Sequence; identical to SEQ ID NO: 112774
  derived and/or modified CDS sequence (opt2) from neuraminidase__InfluenzaA__ADK90229

SEQ ID NO: 115200 - RNA, 1410 nt, Artificial Sequence; identical to SEQ ID NO: 112774
  derived and/or modified CDS sequence (opt2) from neuraminidase__InfluenzaA__ADK90233

SEQ ID NO: 115201 - RNA, 1410 nt, Artificial Sequence
  derived and/or modified CDS sequence (opt2) from neuraminidase__InfluenzaA__ADK90241
augaaccccaaccagaagaucaucaccaucggcuccgucugcaugaccaucggcauggccaaccucauccuccagaucggcaacaucaucuccaucuggaucucccacuccauccagcucggcaaccagaaccagaucgagaccugcaaccaguccgucaucaccuacgagaacaacaccugggucaaccagaccuacgucaacaucuccaacgccaacuucgccgccggccaguccgucgucuccgucaagcucgccggcaacuccucccucugccccgucuccggcugggccaucuacuccaaggacaacuccauccgcaucggcuccaagggcgacgucuucgucauccgcgagcccuucaucuccugcuccccccucgagugccgcaccuucuuccucacccagggcgcccuccucaacgacaagcacuccaacggcaccaucaaggaccgcuccccccaccgcacccucauguccugccccaucggcgagguccccucccccuacaacucccgcuucgaguccgucgccugguccgccuccgccugccacgacggcaucaacuggcucaccaucggcaucuccggccccgacaacggcgccgucgccguccucaaguacaacggcaucaucaccgacaccaucaaguccuggcgcaacaacauccuccgcacccaggaguccgagugcgccugcgucaacggcuccugcuucaccgucaugaccgacggccccuccgacggccaggccuccuacaagaucuuccgcaucgagaagggcaagaucgucaaguccgucgagaugaacgcccccaacuaccacuacgaggagugcuccugcuaccccgacuccuccgagaucaccugcgucugccgcgacaacuggcacggcuccaaccgccccugggucuccuucaaccagaaccucgaguaccagaucggcuacaucugcuccggcaucuucggcgacaacccccgccccaacgacaagaccggcuccugcggccccgucuccuccaacggcgccaacggcgucaagggcuucuccuucaaguacggcaacggcgucuggaucggccgcaccaaguccaucuccucccgcaacggcuucgagaugaucugggaccccaacggcuggaccggcaccgacaacaacuucuccaucaagcaggacaucgucggcaucaacgagugguccggcuacuccggcuccuucguccagcaccccgagcucaccggccucgacugcauccgccccugcuucugggucgagcucauccgcggccgccccaaggagaacaccaucuggaccuccggcuccuccaucuccuucugcggcgucaacuccgacaccgucggcugguccuggcccgacggcgccgagcuccccuucaccaucgacaaguga

SEQ ID NO: 115202 - RNA, 1410 nt, Artificial Sequence; identical to SEQ ID NO: 114753
  derived and/or modified CDS sequence (opt2) from neuraminidase__InfluenzaA__ADK90245

SEQ ID NO: 115203 - RNA, 1410 nt, Artificial Sequence
  derived and/or modified CDS sequence (opt2) from neuraminidase__InfluenzaA__ADK90249
augaaccccaaccagaagaucaucaccaucggcuccgucugcaugaccaucggcauggccaaccucauccuccagaucggcaacaucaucuccaucuggaucucccacuccauccagcucggcaaccagaaccagaucgagaccugcaaccaguccgucaucaccuacgagaacaacaccugggucaaccagaccuacgucaacaucuccaacaccaacuucgccgccggccaguccgucgucuccgucaagcucgccggcaacuccucccucugccccgucuccggcugggccaucuacuccaaggacaacuccauccgcaucggcuccaagggcgacgucuucgucauccgcgagcccuucaucuccugcuccccccucgagugccgcaccuucuuccucacccagggcgcccuccucaacgacaagcacuccaacggcaccaucaaggaccgcucccccuaccgcacccucauguccugccccaucggcgagguccccucccccuacaacucccgcuucgaguccgucgccugguccgccuccgccugccacgacggcaucaacuggcucaccaucggcaucuccggccccgacaacggcgccgucgccguccucaaguacaacggcaucaucaccgacaccaucaaguccuggcgcaacaacauccuccgcacccaggaguccgagugcgccugcgucaacggcuccugcuucaccgucaugaccgacggccccuccgacggccaggccuccuacaagaucuuccgcaucgagaagggcaagaucgucaaguccgucgagaugaacgcccccaacuaccacuacgaggagugcuccugcuaccccgacuccuccgagaucaccugcgucugccgcgacaacuggcacggcuccaaccgccccugggucuccuucaaccagaaccucgaguaccagaucggcuacaucugcuccggcaucuucggcgacaacccccgccccaacgacaagaccggcuccugcggccccgucuccuccaacggcgccaacggcgucaagggcuucuccuucaaguacggcaacggcgucuggaucggccgcaccaaguccaucuccucccgcaacggcuucgagaugaucugggaccccaacggcuggaccggcaccgacaacaacuucuccaugaagcaggacaucgucggcaucaacgagugguccggcuacuccggcuccuucguccagcaccccgagcucaccggccucgacugcauccgccccugcuucugggucgagcucauccgcggccgccccaaggagaacaccaucuggaccuccggcuccuccaucuccuucugcggcgucaacuccgacaccgucggcugguccuggcccgacggcgccgagcuccccuucaccaucgacaaguga

SEQ ID NO: 115204 - RNA, 1410 nt, Artificial Sequence; identical to SEQ ID NO: 115203
  derived and/or modified CDS sequence (opt2) from neuraminidase__InfluenzaA__ADK90253

SEQ ID NO: 115205 - RNA, 1410 nt, Artificial Sequence
  derived and/or modified CDS sequence (opt2) from neuraminidase__InfluenzaA__ADK90257
augaaccccaaccagaagaucaucaucaucggcuccgucugcaugaccaucggcauggccaaccucauccuccagaucggcaacaucaucuccaucuggaucucccacuccauccagcucggcaaccagaaccagaucgagaccugcaaccaguccgucaucaccuacgagaacaacaccugggucaaccagaccuacgucaacaucuccaacaccaacuucgccgccggccaguccgucgucuccgucaagcucgccggcaacuccucccucugccccgucuccggcugggccaucuacuccaaggacaacuccauccgcaucggcuccaagggcgacgucuucgucauccgcgagcccuucaucuccugcuccccccucgagugccgcaccuucuuccucacccagggcgcccuccucaacgacaagcacuccaacggcaccaucaaggaccgcuccccccaccgcacccucauguccugccccaucggcgagguccccucccccuacaacucccgcuucgaguccgucgccugguccgccuccgccugccacgacggcaucaacuggcucaccaucggcaucuccggccccgacaacggcgccgucgccguccucaaguacaacggcaucaucaccgacaccaucaaguccuggcgcaacaacauccuccgcacccaggaguccgagugcgccugcgucaacggcuccugcuucaccgucaugaccgacggccccuccgacggccaggccuccuacaagaucuuccgcaucgagaagggcaagaucgucaaguccgucgagaugaacgcccccaacuaccacuacgaggagugcuccugcuaccccgacuccuccgagaucaccugcgucugccgcgacaacuggcacggcuccaaccgccccugggucuccuucaaccagaaccucgaguaccagaucggcuacaucugcuccggcaucuucggcgacaacccccgccccaacgacaagaccggcuccugcggccccgucuccuccaacggcgccaacggcgucaagggcuucuccuucaaguacggcaacggcgucuggaucggccgcaccaaguccaucuccucccgcaacggcuucgagaugaucugggaccccaacggcuggaccggcaccgacaacaacuucuccaucaagcaggacaucgucggcaucaacgagugguccggcuacuccggcuccuucguccagcaccccgagcucaccggccucgacugcauccgccccugcuucugggucgagcucauccgcggccgccccaaggagaacaccaucuggaccuccggcuccuccaucuccuucugcggcgucaacuccgacaccgucggcugguccuggcccgacggcgccgagcuccccuucaccaucgacaaguga

SEQ ID NO: 115206 - RNA, 1410 nt, Artificial Sequence; identical to SEQ ID NO: 113128
  derived and/or modified CDS sequence (opt2) from neuraminidase__InfluenzaA__ADK90261

SEQ ID NO: 115207 - RNA, 1410 nt, Artificial Sequence
  derived and/or modified CDS sequence (opt2) from neuraminidase__InfluenzaA__ADK90265
augaaccccaaccagaagaucaucaccaucggcuccgucugcaugaccaucggcauggccaaccucauccuccagaucggcaacaucaucuccaucuggaucucccacuccauccagcucggcaaccagaaccagaucgagaccugcaaccaguccgucaucaccuacgagaacaacaccugggucaaccagaccuacgucaacaucuccaacaccaacuucgccgccggccaguccgucgucuccgucaagcucgccggcaacuccucccucugccccgucuccggcugggccaucuacuccaaggacaacuccauccgcaucggcuccaagggcgacgucuucgucauccgcgagcccuucaucuccugcuccccccucgagugccgcaccuucuuccucacccagggcgcccuccucaacgacaagcacuccaacggcaccaucaaggaccgcucccccuaccgcacccucauguccugccccaucggcgagguccccucccccuacaacucccgcuucgaguccgucgccugguccgccuccgccugccacgacggcaucaacuggcucaccaucggcaucuccggccccgacaacggcgccgucgccguccucaaguacaacggcaucaucaccgacaccaucaaguccuggcgcaacaacauccuccgcacccaggaguccgagugcgccugcgucaacggcuccugcuucaccgucaugaccgacggccccuccgacggccaggccuccuacaagaucuuccgcaucgagaagggcaagaucgucaaguccgucgagaugaacgcccccaacuaccacuacgaggagugcuccugcuaccccgacuccuccgagaucaccugcgucugccgcgacaacuggcacggcuccaaccgccccugggucuccuucaaccagaaccucgaguaccagaugggcuacaucugcuccggcaucuucggcgacaacccccgccccaacgacaagaccggcuccugcggccccgucuccuccaacggcgccaacggcgucaagggcuucuccuucaaguacggcaacggcgucuggaucggccgcaccaaguccaucuccucccgcaacggcuucgagaugaucugggaccccaacggcuggaccggcaccgacaacaacuucuccaucaagcaggacaucgucggcaucaacgagugguccggcuacuccggcuccuucguccagcaccccgagcucaccggccucgacugcauccgccccugcuucugggucgagcucauccgcggccgccccaaggagaacaccaucuggaccuccggcuccuccaucuccuucugcggcgucaacuccgacaccgucggcugguccuggcccgacggcgccgagcuccccuucaccaucgacaaguga

SEQ ID NO: 115208 - RNA, 1410 nt, Artificial Sequence
  derived and/or modified CDS sequence (opt2) from neuraminidase__InfluenzaA__ADK90269
augaaccccaaccagaagaucaucaccaucggcuccgucugcaugaccaucggcauggccaaccucauccuccagaucggcaacaucaucuccaucuggaucucccacuccauccagcucggcaaccagaaccagaucgagaagugcaaccaguccgucaucaccuacgagaacaacaccugggucaaccagaccuacgucaacaucuccaacaccaacuucgccgccggccaguccgucgucuccgucaagcucgccggcaacuccucccucugccccgucuccggcugggccaucuacuccaaggacaacuccauccgcaucggcuccaagggcgacgucuucgucauccgcgagcccuucaucuccugcuccccccucgagugccgcaccuucuuccucacccagggcgcccuccucaacgacaagcacuccaacggcaccaucaaggaccgcucccccuaccgcacccucauguccugccccaucggcgagguccccucccccuacaacucccgcuucgaguccgucgccugguccgccuccgccugccacgacggcaucaacuggcucaccaucggcaucuccggccccgacaacggcgccgucgccguccucaaguacaacggcaucaucaccgacaccaucaaguccuggcgcaacaacauccuccgcacccaggaguccgagugcgccugcgucaacggcuccugcuucaccgucaugaccgacggccccuccgacggccaggccuccuacaagaucuuccgcaucgagaagggcaagaucgucaaguccaucgagaugaacgcccccaacuaccacuacgaggagugcuccugcuaccccgacuccuccgagaucaccugcgucugccgcgacaacuggcacggcuccaaccgccccugggucuccuucaaccagaaccucgaguaccagaucggcuacaucugcuccggcaucuucggcgacaacccccgccccaacgacaagaccggcuccugcggccccgucuccuccaacggcgccaacggcgucaagggcuucuccuucaaguacggcaacggcgucuggaucggccgcaccaaguccaucuccucccgcaacggcuucgagaugaucugggaccccaacggcuggaccggcaccgacaacaacuucuccaucaagcaggacaucgucggcaucaacgagugguccggcuacuccggcuccuucguccagcaccccgagcucaccggccucgacugcauccgccccugcuucugggucgagcucauccgcggccgccccaaggagaacaccaucuggaccuccggcuccaucaucuccuucugcggcgucaacuccgacaccgucggcugguccuggcccgacggcgccgagcuccccuucaccaucgacaaguga

SEQ ID NO: 115209 - RNA, 1410 nt, Artificial Sequence; identical to SEQ ID NO: 112774
  derived and/or modified CDS sequence (opt2) from neuraminidase__InfluenzaA__ADK90273

SEQ ID NO: 115210 - RNA, 1410 nt, Artificial Sequence; identical to SEQ ID NO: 112774
  derived and/or modified CDS sequence (opt2) from neuraminidase__InfluenzaA__ADK90277

SEQ ID NO: 115211 - RNA, 1410 nt, Artificial Sequence; identical to SEQ ID NO: 112774
  derived and/or modified CDS sequence (opt2) from neuraminidase__InfluenzaA__ADK90281

SEQ ID NO: 115212 - RNA, 1410 nt, Artificial Sequence
  derived and/or modified CDS sequence (opt2) from neuraminidase__InfluenzaA__ADK90289
augaaccccaaccagaagaucaucaccaucggcuccgucugcaugaccaucggcauggccaaccucauccuccagaucggcaacaucaucuccaucuggaucucccacuccauccagcucggcaaccagaaccucaucgagaccugcaaccaguccgucaucaccuacgagaacaacaccugggucaaccagaccuacgucaacaucuccaacaccaacuucgccgccggccaguccgucgucuccgucaagcucgccggcaacuccucccucugccccgucuccggcugggccaucuacuccaaggacaacuccauccgcaucggcuccaagggcgacgucuucgucauccgcgagcccuucaucuccugcuccccccucgagugccgcaccuucuuccucacccagggcgcccuccucaacgacaagcacuccaacggcaccaucaaggaccgcucccccuaccgcacccucauguccugccccaucggcgagguccccucccccuacaacucccgcuucgaguccgucgccugguccgccuccgccugccacgacggcaucaacuggcucaccaucggcaucuccggccccgacaacggcgccgucgccguccucaaguacaacggcaucaucaccgacaccaucaaguccuggcgcaacaacauccuccgcacccaggaguccgagugcgccugcgucaacggcuccugcuucaccgucaugaccgacggccccuccgacggccaggccuccuacaagaucuuccgcaucgagaagggcaagaucgucaaguccgucgagaugaacgcccccaacuaccacuacgaggagugcuccugcuaccccgacuccuccgagaucaccugcgucugccgcgacaacuggcacggcuccaaccgccccugggucuccuucaaccagaaccucgaguaccagaucggcuacaucugcuccggcaucuucggcgacaacccccgccccaacgacaagaccggcuccugcggccccgucuccuccaacggcgccaacggcgucaagggcuucuccuucaaguacggcaacggcgucuggaucggccgcaccaaguccaucuccucccgcaacggcuucgagaugaucugggaccccaacggcuggaccggcaccgacaacaacuucuccaucaagcaggacaucgucggcaucaacgagugguccggcuacuccggcuccuucguccagcaccccgagcucaccggccucgacugcauccgccccugcuucugggucgagcucauccgcggccgccccaaggagaacaccaucuggaccuccggcuccuccaucuccuucugcggcgucaacuccgacaccgucggcugguccuggcccgacggcgccgagcuccccuucaccaucgacaaguga

SEQ ID NO: 115213 - RNA, 1410 nt, Artificial Sequence; identical to SEQ ID NO: 114753
  derived and/or modified CDS sequence (opt2) from neuraminidase__InfluenzaA__ADK90293

SEQ ID NO: 115214 - RNA, 1410 nt, Artificial Sequence; identical to SEQ ID NO: 114665
  derived and/or modified CDS sequence (opt2) from neuraminidase__InfluenzaA__ADK90297

SEQ ID NO: 115215 - RNA, 1410 nt, Artificial Sequence; identical to SEQ ID NO: 112774
  derived and/or modified CDS sequence (opt2) from neuraminidase__InfluenzaA__ADK90301

SEQ ID NO: 115216 - RNA, 1410 nt, Artificial Sequence; identical to SEQ ID NO: 114665
  derived and/or modified CDS sequence (opt2) from neuraminidase__InfluenzaA__ADK90305

SEQ ID NO: 115217 - RNA, 1410 nt, Artificial Sequence; identical to SEQ ID NO: 112774
  derived and/or modified CDS sequence (opt2) from neuraminidase__InfluenzaA__ADK90309

SEQ ID NO: 115218 - RNA, 1410 nt, Artificial Sequence
  derived and/or modified CDS sequence (opt2) from neuraminidase__InfluenzaA__ADK90313
augaaccccaaccacaagaucaucaccaucggcuccgucugcaugaccaucggcauggccaaccucauccuccagaucggcaacaucaucuccaucuggaucucccacuccauccagcucggcaaccagaaccagaucgagaccugcaaccaguccgucaucaccuacgagaacaacaccugggucaaccagaccuacgucaacaucuccaacaccaacuucgccgccggccaguccgucgucuccgucaagcucgccggcaacuccucccucugccccgucuccggcugggccaucuacuccaaggacaacuccauccgcaucggcuccaagggcgacgucuucgucauccgcgagcccuucaucuccugcuccccccucgagugccgcaccuucuuccucacccagggcgcccuccucaacgacaagcacuccaacggcaccaucaaggaccgcuccccccaccgcacccucauguccugccccaucggcgagguccccucccccuacaacucccgcuucgaguccgucgccugguccgccuccgccugccacgacggcaucaacuggcucaccaucggcaucuccggccccgacaacggcgccgucgccguccucaaguacaacggcaucaucaccgacaccaucaaguccuggcgcaacaacauccuccgcacccaggaguccgagugcgccugcgucaacggcuccugcuucaccgucaugaccgacggccccuccgacggccaggccuccuacaagaucuuccgcaucgagaagggcaagaucgucaaguccgucgagaugaacgcccccaacuaccacuacgaggagugcuccugcuaccccgacuccuccgagaucaccugcgucugccgcgacaacuggcacggcuccaaccgccccugggucuccuucaaccagaaccucgaguaccagaucggcuacaucugcuccggcaucuucggcgacaacccccgccccaacgacaagaccggcuccugcggccccgucuccuccaacggcgccaacggcgucaagggcuucuccuucaaguacggcaacggcgucuggaucggccgcaccaaguccaucuccucccgcaacggcuucgagaugaucugggaccccaacggcuggaccggcaccgacaacaacuucuccaucaagcaggacaucgucggcaucaacgagugguccggcuacuccggcuccuucguccagcaccccgagcucaccggccucgacugcauccgccccugcuucugggucgagcucauccgcggccgccccaaggagaacaccaucuggaccuccggcuccuccaucuccuucugcggcgucaacuccgacaccgucggcugguccuggcccgacggcgccgagcuccccuucaccaucgacaaguga

SEQ ID NO: 115219 - RNA, 1410 nt, Artificial Sequence; identical to SEQ ID NO: 112774
  derived and/or modified CDS sequence (opt2) from neuraminidase__InfluenzaA__ADK90317

SEQ ID NO: 115220 - RNA, 1410 nt, Artificial Sequence; identical to SEQ ID NO: 114753
  derived and/or modified CDS sequence (opt2) from neuraminidase__InfluenzaA__ADK90321

SEQ ID NO: 115221 - RNA, 1410 nt, Artificial Sequence; identical to SEQ ID NO: 112774
  derived and/or modified CDS sequence (opt2) from neuraminidase__InfluenzaA__ADK90325

SEQ ID NO: 115222 - RNA, 1410 nt, Artificial Sequence
  derived and/or modified CDS sequence (opt2) from neuraminidase__InfluenzaA__ADK90329
augaaccccaaccagaagaucaucaccaucggcuccgucugcaugaccaucggcauggccaaccucauccuccagaucggcaacaucaucuccaucuggaucucccacuccauccagcucggcaaccagaaccagaucgagaccugcaaccgcuccgucaucaccuacgagaacaacaccugggucaaccagaccuacgucaacaucuccaacaccaacuucgccgccggccaguccgucgucuccgucaagcucgccggcaacuccucccucugccccgucuccggcugggccaucuacuccaaggacaacuccauccgcaucggcuccaagggcgacgucuucgucauccgcgagcccuucaucuccugcuccccccucgagugccgcaccuucuuccucacccagggcgcccuccucaacgacaagcacuccaacggcaccaucaaggaccgcucccccuaccgcacccucauguccugccccaucggcgagguccccucccccuacaacucccgcuucgaguccgucgccugguccgccuccgccugccacgacggcaucaacuggcucaccaucggcaucuccggccccgacaacgaggccgucgccguccucaaguacaacggcaucaucaccgacaccaucaaguccuggcgcaacaacauccuccgcacccaggaguccgagugcgccugcgucaacggcuccugcuucaccgucaugaccgacggccccuccgacggccaggccuccuacaagaucuuccgcaucgagaagggcaagaucgucaaguccgucgagaugaacgcccccaacuaccacuacgaggagugcuccugcuaccccgacuccuccgagaucaccugcgucugccgcgacaacuggcacggcuccaaccgccccugggucuccuucaaccagaaccucgaguaccagaucggcuacaucugcuccggcaucuucggcgacaacccccgccccaacgacaagaccggcuccugcggccccgucuccuccaacggcgccaacggcgucaagggcuucuccuucaaguacggcaacggcgucuggaucggccgcaccaaguccaucuccucccgcaacggcuucgagaugaucugggaccccaacggcuggaccggcaccgacaacaacuucuccaucaagcaggacaucgucggcaucaacgagugguccggcuacuccggcuccuucguccagcaccccgagcucaccggccucgacugcauccgccccugcuucugggucgagcucauccgcggccgccccaaggagaacaccaucuggaccuccggcuccuccaucuccuucugcggcgucaacuccgacaccgucggcugguccuggcccgacggcgccgagcuccccuucaccaucgacaaguga

SEQ ID NO: 115223 - RNA, 1410 nt, Artificial Sequence
  derived and/or modified CDS sequence (opt2) from neuraminidase__InfluenzaA__ADK90333
augaaccccaaccagaagaucaucaccaucggcuccgucugcaugaccaucggcauggccaaccucauccuccagaucggcaacaucaucuccaucuggaucucccacuccauccagcucggcaacaagaaccagaucgagaccugcaaccaguccgucaucaccuacgagaacaacaccugggucaaccagaccuacgucaacaucuccaacaccaacuucgccgccggccaguccgucgucuccgucaagcucgccggcaacuccucccucugccccgucuccggcugggccaucuacuccaaggacaacuccauccgcaucggcuccaagggcgacgucuucgucauccgcgagcccuucaucuccugcuccccccucgagugccgcaccuucuuccucacccagggcgcccuccucaacgacaagcacuccaacggcaccaucaaggaccgcucccccuaccgcacccucauguccugccccaucggcgagguccccucccccuacaacucccgcuucgaguccgucgccugguccgccuccgccugccacgacggcaucaacuggcucaccaucggcaucuccggccccgacaacggcgccgucgccguccucaaguacaacggcaucaucaccgacaccaucaaguccuggcgcaacaacauccuccgcacccaggaguccgagugcgccugcgucaacggcuccugcuucaccgucaugaccgacggccccuccgacggccaggccuccuacaagaucuuccgcaucgagaagggcaagaucgucaaguccgucgagaugaacgcccccaacuaccacuacgaggagugcuccugcuaccccgacuccuccgagaucaccugcgucugccgcgacaacuggcacggcuccaaccgccccugggucuccuucaaccagaaccucgaguaccagaucggcuacaucugcuccggcaucuucggcgacaacccccgccccaacgacaagaccggcuccugcggccccgucuccuccaacggcgccaacggcgucaagggcuucuccuucaaguacggcaacggcgucuggaucggccgcaccaaguccaucuccucccgcaacggcuucgagaugaucugggaccccaacggcuggaccggcaccgacaacaacuucuccaucaagcaggacaucgucggcaucaacgagugguccggcuacuccggcuccuucguccagcaccccgagcucaccggccucgacugcauccgccccugcuucugggucgagcucauccgcggccgccccaaggagaacaccaucuggaccuccggcuccuccaucuccuucugcggcgucaacuccgacaccgucggcugguccuggcccgacggcgccgagcuccccuucaccaucgacaaguga

SEQ ID NO: 115224 - RNA, 1410 nt, Artificial Sequence; identical to SEQ ID NO: 114753
  derived and/or modified CDS sequence (opt2) from neuraminidase__InfluenzaA__ADK90337

SEQ ID NO: 115225 - RNA, 1410 nt, Artificial Sequence; identical to SEQ ID NO: 113833
  derived and/or modified CDS sequence (opt2) from neuraminidase__InfluenzaA__ADK90341

SEQ ID NO: 115226 - RNA, 1410 nt, Artificial Sequence; identical to SEQ ID NO: 113833
  derived and/or modified CDS sequence (opt2) from neuraminidase__InfluenzaA__ADK90345

SEQ ID NO: 115227 - RNA, 1410 nt, Artificial Sequence; identical to SEQ ID NO: 113833
  derived and/or modified CDS sequence (opt2) from neuraminidase__InfluenzaA__ADK90349

SEQ ID NO: 115228 - RNA, 1410 nt, Artificial Sequence; identical to SEQ ID NO: 114753
  derived and/or modified CDS sequence (opt2) from neuraminidase__InfluenzaA__ADK90353

SEQ ID NO: 115229 - RNA, 1410 nt, Artificial Sequence; identical to SEQ ID NO: 112774
  derived and/or modified CDS sequence (opt2) from neuraminidase__InfluenzaA__ADK90357

SEQ ID NO: 115230 - RNA, 1410 nt, Artificial Sequence; identical to SEQ ID NO: 114753
  derived and/or modified CDS sequence (opt2) from neuraminidase__InfluenzaA__ADK90361

SEQ ID NO: 115231 - RNA, 1410 nt, Artificial Sequence; identical to SEQ ID NO: 113748
  derived and/or modified CDS sequence (opt2) from neuraminidase__InfluenzaA__ADK90365

SEQ ID NO: 115232 - RNA, 1410 nt, Artificial Sequence; identical to SEQ ID NO: 112774
  derived and/or modified CDS sequence (opt2) from neuraminidase__InfluenzaA__ADK90369

SEQ ID NO: 115233 - RNA, 1410 nt, Artificial Sequence; identical to SEQ ID NO: 112774
  derived and/or modified CDS sequence (opt2) from neuraminidase__InfluenzaA__ADK90373

SEQ ID NO: 115234 - RNA, 1410 nt, Artificial Sequence
  derived and/or modified CDS sequence (opt2) from neuraminidase__InfluenzaA__ADK90377
augaaccccaaccagaagaucaucaccaucggcuccgucugcaugaccaucggcaugaccaaccucauccuccagaucggcaacaucaucuccaucuggaucucccacuccauccagcucggcaaccagaaccagaucgagaccugcaaccaguccgucaucaccuacgagaacaacaccugggucaaccagaccuacgucaacaucuccaacaccaacuucgccgccggccaguccgucgucuccgucaagcucgccggcaacuccucccucugccccgucuccggcugggccaucuacuccaaggacaacuccauccgcaucggcuccaagggcgacgucuucgucauccgcgagcccuucaucuccugcuccccccucgagugccgcaccuucuuccucacccagggcgcccuccucaacgacaagcacuccaacggcaccaucaaggaccgcuccccccaccgcacccucauguccugccccaucggcgagguccccucccccuacaacucccgcuucgaguccgucgccugguccgccuccgccugccacgacggcaucaacuggcucaccaucggcaucuccggccccgacaacggcgccgucgccguccucaaguacaacggcaucaucaccgacaccaucaaguccuggcgcaacaacauccuccgcacccaggaguccgagugcgccugcgucaacggcuccugcuucaccgucaugaccgacggccccuccgacggccaggccuccuacaagaucuuccgcaucgagaagggcaagaucgucaaguccgucgagauggacgcccccaacuaccacuacgaggagugcuccugcuaccccgacuccuccgagaucaucugcgucugccgcgacaacuggcacggcuccaaccgccccugggucuccuucaaccagaaccucgaguaccagaucggcuacaucugcuccggcaucuucggcgacaacccccgccccaacgacaagaccggcuccugcggccccgucuccuccaacggcgccaacggcgucaagggcuucuccuucaaguacggcaacggcgucuggaucggccgcaccaaguccaucuccucccgcaacggcuucgagaugaucugggaccccaacggcuggaccggcaccgacaacaacuucuccaucaagcaggacaucgucggcaucaacgagugguccggcuacuccggcuccuucguccagcaccccgagcucaccggccucgacugcauccgccccugcuucugggucgagcucauccgcggccgccccaaggagaacaccaucuggaccuccggcuccuccaucuccuucugcggcgucaacuccgacaccgucggcugguccuggcccgacggcgccgagcuccccuucaccaucgacaaguga

SEQ ID NO: 115235 - RNA, 1410 nt, Artificial Sequence; identical to SEQ ID NO: 114753
  derived and/or modified CDS sequence (opt2) from neuraminidase__InfluenzaA__ADK90381

SEQ ID NO: 115236 - RNA, 1410 nt, Artificial Sequence
  derived and/or modified CDS sequence (opt2) from neuraminidase__InfluenzaA__ADK90385
augaaccccaaccagaagaucaucaccaucggcuccgucugcaugaccaucggcauggccaaccucauccuccagaucggcaacaucaucuccaucuggaucucccacuccauccagcucggcaaccagaaccagaucgagaccugcaaccaguccgucaucaccuacgagaacaacaccugggucaaccagaccuacgucaacaucuccaacaccaacuucgccgccggccaguccgucgucuccgucaagcucuccggcaacuccucccucugccccgucuccggcugggccaucuacuccaaggacaacuccauccgcaucggcuccaagggcgacgucuucgucauccgcgagcccuucaucuccugcuccccccucgagugccgcaccuucuuccucacccagggcgcccuccucaacgacaagcacuccaacggcaccaucaaggaccgcuccccccaccgcacccucauguccugccccaucggcgagguccccucccccuacaacucccgcuucgaguccgucgccugguccgccuccgccugccacgacggcaucaacuggcucaccaucggcaucuccggccccgacaacggcgccgucgccguccucaaguacaacggcaucaucaccgacaccaucaaguccuggcgcaacaacauccuccgcacccaggaguccgagugcaccugcgucaacggcuccugcuucaccgucaugaccgacggccccuccgacggccaggccuccuacaagaucuuccgcaucgagaagggcaagaucgucaaguccgucgagaugaacgcccccaacuaccacuacgaggagugcuccugcuaccccgacuccuccgagaucaccugcgucugccgcgacaacuggcacggcuccaaccgccccugggucuccuucaaccagaaccucgaguaccagaucggcuacaucugcuccggcaucuucggcgacaacccccgccccaacgacaagaccggcuccugcggccccgucuccuccaacggcgccaacggcgucaagggcuucuccuucaaguacggcaacggcgucuggaucggccgcaccaaguccaucuccucccgcaacggcuucgagaugaucugggaccccaacggcuggaccggcaccgacaacaacuucuccaucaagcaggacaucgucggcaucaacgagugguccggcuacuccggcuccuucguccagcaccccgagcucaccggccucgacugcauccgccccugcuucugggucgagcucauccgcggccgccccaaggagaacaccaucuggaccuccggcuccuccaucuccuucugcggcgucaacuccgacaccgucggcugguccuggcccgacggcgccgagcuccccuucaccaucgacaaguga

SEQ ID NO: 115237 - RNA, 1410 nt, Artificial Sequence; identical to SEQ ID NO: 112774
  derived and/or modified CDS sequence (opt2) from neuraminidase__InfluenzaA__ADK90389

SEQ ID NO: 115238 - RNA, 1410 nt, Artificial Sequence; identical to SEQ ID NO: 114753
  derived and/or modified CDS sequence (opt2) from neuraminidase__InfluenzaA__ADK90393

SEQ ID NO: 115239 - RNA, 1410 nt, Artificial Sequence; identical to SEQ ID NO: 114665
  derived and/or modified CDS sequence (opt2) from neuraminidase__InfluenzaA__ADK90397

SEQ ID NO: 115240 - RNA, 1410 nt, Artificial Sequence; identical to SEQ ID NO: 112774
  derived and/or modified CDS sequence (opt2) from neuraminidase__InfluenzaA__ADK90401

SEQ ID NO: 115241 - RNA, 1410 nt, Artificial Sequence
  derived and/or modified CDS sequence (opt2) from neuraminidase__InfluenzaA__ADK90405
augaaccccaaccagaagaucaucaccaucggcuccgucugcaugaccaucggcauggccaaccucauccuccagaucggcaacaucaucuccaucuggaucucccacuccauccagcucggcaaccagaaccagaucgagaccugcaaccaguccgucaucaccuacgagaacaacaccugggucaaccagaccuacgucaacaucuccaacaccaacuucgccgccggccaguccgucgucuccgucaagcucgccggcaacuccucccucugccccgucuccggcugggccaucuacuccaaggacaacuccauccgcaucggcuccaagggcgacgucuucgucauccgcgagcccuucaucuccugcuccccccucgagugccgcaccuucuuccucacccagggcgcccuccucaacgacaagcacuccaacggcaccaucaaggaccgcuccccccaccgcacccucauguccugccccaucggcgagguccccucccccuacaacucccgcuucgaguccgucgccugguccgccuccgccugccacgacggcaucaacuggcucaccaucggcaucuccggccccgacaacggcgccgucgccguccucaaguacaacggcaucaucaccgacaccaucaaguccuggcgcaacaacauccuccgcacccaggaguccgagugcaccugcgucaacggcuccugcuucaccgucaugaccgacggccccuccgacggccaggccuccuacaagaucuuccgcaucgagaagggcaagaucgucaaguccgucgagaugaacgcccccaacuaccacuacgaggagugcuccugcuaccccgacuccuccgagaucaccugcgucugccgcgacaacuggcacggcuccaaccgccccugggucuccuucaaccagaaccucgaguaccagaucggcuacaucugcuccggcaucuucggcgacaacccccgccccaacgacaagaccggcuccugcggccccgucuccuccaacggcgccaacggcgucaagggcuucuccuucaaguacggcaacggcgucuggaucggccgcaccaaguccaucuccucccgcaacggcuucgagaugaucugggaccccaacggcuggaccggcaccgacaacaacuucuccaucaagcaggacaucgucggcaucaacgagugguccggcuacuccggcuccuucguccagcaccccgagcucaccggccucgacugcauccgccccugcuucugggucgagcucauccgcggccgccccaaggagaacaccaucuggaccuccggcuccuccaucuccuucugcggcgucaacuccgacaccgucggcugguccuggcccgacggcgccgagcuccccuucaccaucgacaaguga

SEQ ID NO: 115242 - RNA, 1410 nt, Artificial Sequence; identical to SEQ ID NO: 112774
  derived and/or modified CDS sequence (opt2) from neuraminidase__InfluenzaA__ADK90409

SEQ ID NO: 115243 - RNA, 1410 nt, Artificial Sequence
  derived and/or modified CDS sequence (opt2) from neuraminidase__InfluenzaA__ADK90413
augaaccccaaccagaagaucaucaccaucggcuccgucugcaugaccaucggcauggccaaccucauccuccagaucggcaacaucaucuccaucuggaucucccacuccauccagcucggcaaccagaaccagaucgagaccugcaaccaguccgucaucaccuacgagaacaacaccugggucaaccagaccuacgucaacaucuccaacaccaacuucgccgccggccaguccgucgucuccgucaagcucgccggcaacuccucccucugccccgucuccggcugggccaucuacuccaaggacaacuccauccgcaucggcuccaagggcgacgucuucgucauccgcgagcccuucaucuccugcuccccccucgagugccgcaccuucuuccucacccagggcgcccuccucaacgacaagcacuccaacggcaccaucaaggaccgcuccccccaccgcacccucauguccugccccaucggcgagguccccucccccuacaacucccgcuucgaguccgucgccugguccgccuccgccugccacgacggcaucaacuggcucaccaucggcaucuccggccccgacaacggcgccauggccguccucaaguacaacggcaucaucaccgacaccaucaaguccuggcgcaacaacauccuccgcacccaggaguccgagugcgccugcgucaacggcuccugcuucaccgucaugaccgacggccccuccgacggccaggccuccuacaagaucuuccgcaucgagaagggcaagaucgucaaguccgucgagaugaacgcccccaacuaccacuacgaggagugcuccugcuaccccgacuccuccgagaucaccugcgucugccgcgacaacuggcacggcuccaaccgccccugggucuccuucaaccagaaccucgaguaccagaucggcuacaucugcuccggcaucuucggcgacaacccccgccccaacgacaagaccggcuccugcggccccgucuccuccaacggcgccaacggcgucaagggcuucuccuucaaguacggcaacggcgucuggaucggccgcaccaaguccaucuccucccgcaacggcuucgagaugaucugggaccccaacggcuggaccggcaccgacaacaacuucuccaucaagcaggacaucgucggcaucaacgagugguccggcuacuccggcuccuucguccagcaccccgagcucaccggccucgacugcauccgccccugcuucugggucgagcucauccgcggccgccccaaggagaacaccaucuggaccuccggcuccuccaucuccuucugcggcgucaacuccgacaccgucggcugguccuggcccgacggcgccgagcuccccuucaccaucgacaaguga

SEQ ID NO: 115244 - RNA, 1410 nt, Artificial Sequence; identical to SEQ ID NO: 112774
  derived and/or modified CDS sequence (opt2) from neuraminidase__InfluenzaA__ADK90417

SEQ ID NO: 115245 - RNA, 1410 nt, Artificial Sequence; identical to SEQ ID NO: 112774
  derived and/or modified CDS sequence (opt2) from neuraminidase__InfluenzaA__ADK90421

SEQ ID NO: 115246 - RNA, 1410 nt, Artificial Sequence; identical to SEQ ID NO: 112774
  derived and/or modified CDS sequence (opt2) from neuraminidase__InfluenzaA__ADK90425

SEQ ID NO: 115247 - RNA, 1410 nt, Artificial Sequence; identical to SEQ ID NO: 112774
  derived and/or modified CDS sequence (opt2) from neuraminidase__InfluenzaA__ADK90429

SEQ ID NO: 115248 - RNA, 1410 nt, Artificial Sequence; identical to SEQ ID NO: 112635
  derived and/or modified CDS sequence (opt2) from neuraminidase__InfluenzaA__ADK94194

SEQ ID NO: 115249 - RNA, 1410 nt, Artificial Sequence; identical to SEQ ID NO: 112635
  derived and/or modified CDS sequence (opt2) from neuraminidase__InfluenzaA__ADK94205

SEQ ID NO: 115250 - RNA, 1410 nt, Artificial Sequence; identical to SEQ ID NO: 113941
  derived and/or modified CDS sequence (opt2) from neuraminidase__InfluenzaA__ADK94216

SEQ ID NO: 115251 - RNA, 1410 nt, Artificial Sequence; identical to SEQ ID NO: 112635
  derived and/or modified CDS sequence (opt2) from neuraminidase__InfluenzaA__ADK94227

SEQ ID NO: 115252 - RNA, 1410 nt, Artificial Sequence; identical to SEQ ID NO: 112635
  derived and/or modified CDS sequence (opt2) from neuraminidase__InfluenzaA__ADK94238

SEQ ID NO: 115253 - RNA, 1410 nt, Artificial Sequence; identical to SEQ ID NO: 115159
  derived and/or modified CDS sequence (opt2) from neuraminidase__InfluenzaA__ADK94260

SEQ ID NO: 115254 - RNA, 1410 nt, Artificial Sequence; identical to SEQ ID NO: 115159
  derived and/or modified CDS sequence (opt2) from neuraminidase__InfluenzaA__ADK94271

SEQ ID NO: 115255 - RNA, 1410 nt, Artificial Sequence; identical to SEQ ID NO: 112635
  derived and/or modified CDS sequence (opt2) from neuraminidase__InfluenzaA__ADK94293

SEQ ID NO: 115256 - RNA, 1410 nt, Artificial Sequence; identical to SEQ ID NO: 112635
  derived and/or modified CDS sequence (opt2) from neuraminidase__InfluenzaA__ADK94304

SEQ ID NO: 115257 - RNA, 1410 nt, Artificial Sequence
  derived and/or modified CDS sequence (opt2) from neuraminidase__InfluenzaA__ADK94326
augaaccccaaccagaagaucaucaccaucggcuccgucucccucaccaucuccaccaucugcuucuucaugcagaucgccauccucaucaccaccgucacccuccacuucaagcaguacgaguucaacuccccccccaacaaccaggucaugcucugcgagcccaccaucaucgagcgcaacaucaccgagaucgucuaccucaccaacaccaccaucgagaaggagaucugccccaagcucgccgaguaccgcaacugguccaagccccagugcgacaucaccggcuucgcccccuucuccaaggacaacuccauccgccucuccgccggcggcgacaucugggucacccgcgagcccuacgucuccugcgaccccgacaagugcuaccaguucgcccucggccagggcaccacccucaacaacauccacuccaacaacaccguccgcgaccgcacccccuaccgcacccuccucaugaacgagcucggcguccccuuccaccucggcaccaagcaggucugcaucgccugguccuccuccuccugccacgacggcaaggccuggcuccacgucugcaucaccggcgacgacaagaacgccaccgccuccuucaucuacaacggccgccucgucgacuccgucgucuccugguccaaggagauccuccgcacccaggaguccgagugcgucugcaucaacggcaccugcaccgucgucaugaccgacggcuccgccuccggcaaggccgacaccaagauccucuucaucgaggagggcaagaucguccacaccuccacccucuccggcuccgcccagcacgucgaggagugcuccugcuacccccgcuaccccggcguccgcugcgucugccgcgacaacuggaagggcuccaaccgccccaucgucgacaucaacaucaaggaccacuccaucgucuccuccuacgucugcuccggccucgucggcgacaccccccgcaagaacgacuccuccuccuccucccacugccucgaccccaacaacgaggagggcggccacggcgucaagggcugggccuucgacgacggcaacgacgucuggaugggccgcaccaucuccgagaagucccgccucggcuacgagaccuucaaggucaucgagggcugguccaaccccaaguccaagcuccagaucaaccgccaggucaucgucgaccgcggcaaccgcuccggcuacuccggcaucuucuccgucgagggcaaguccugcaucaaccgcugcuucuacgucgagcucauccgcggccgcaaggaggagaccgagguccucuggaccuccaacuccaucgucgucuucugcggcaccuccggcaccuacggcaccggcuccuggcccgacggcgccgacaucaaccucaugcccaucuga

SEQ ID NO: 115258 - RNA, 1410 nt, Artificial Sequence; identical to SEQ ID NO: 113941
  derived and/or modified CDS sequence (opt2) from neuraminidase__InfluenzaA__ADK94337

SEQ ID NO: 115259 - RNA, 1410 nt, Artificial Sequence; identical to SEQ ID NO: 112635
  derived and/or modified CDS sequence (opt2) from neuraminidase__InfluenzaA__ADK94444

SEQ ID NO: 115260 - RNA, 1410 nt, Artificial Sequence
  derived and/or modified CDS sequence (opt2) from neuraminidase__InfluenzaA__ADK94479
augaaccccaaccagaagaucaucaccaucggcuccgucucccucaccaucuccaccaucugcuuccucaugcagaucgccauccucaccaccaccgucacccuccacuucaagcaguacgaguucaacuccccccccaacaaccaggucaugcucugcgagcccaccaccaucgagcgcaacaucaccgagaucgucuaccucaccaacaccaccaucgagaaggagaucugccccaagcucgccgaguaccgcaacugguccaagccccagugcgacaucaccggcuucgcccccuucuccaaggacaacuccauccgccucuccgccggcggcgacaucugggucacccgcgagcccuacgucuccugcgaccccgacaagugcuaccaguucgcccucggccagggcaccacccucaacaacguccacuccaacaacaccguccgcgaccgcacccccuaccgcacccuccucaugaacgagcucggcguccccuuccaccucggcaccaagcaggucugcaucgccugguccuccuccuccugccacgacggcaaggccuggcuccacgucugcaucaccggcgacgacaagaacgccaccgccuccuucaucuacaacggcaagcucgucgacuccgucgucuccugguccaaggagauccuccgcacccaggaguccgagugcgucugcaucaacggcaccugcaccgucgucaugaccgacggcuccgccuccggcaaggccgacaccaagauccucuucaucgaggagggcaagaucguccacaccuccacccucuccggcuccgcccagcacgucgaggagugcuccugcuacccccgcuaccccggcguccgcugcgucugccgcgacaacuggaagggcuccaaccgccccaucgucgacaucaacaucaaggaccacuccaucgucuccuccuaccucugcuccggccucgucggcgacaccccccgcaagaacgacuccuccuccuccucccacugccucgaccccaacaacgaggagggcggccacggcgucaagggcugggccuucgacgacggcaacgacgucuggaugggccgcaccaucuccgagaagucccgccucggcuacgagaccuucaaggucaucgagggcugguccaaccccaaguccaagcuccagaucaaccgccaggucaucgucgaccgcggcaaccgcuccggcuacuccggcaucuucuccgucgagggcaaguccugcaucaaccgcugcuucuacgucgagcucauccgcggccgcaaggaggagaccggcguccucuggaccuccaacuccaucgucgucuucugcggcaccuccggcaccuacggcaccggcuccuggcccgacggcgccgacaucaaccucaugcccaucuga

SEQ ID NO: 115261 - RNA, 1410 nt, Artificial Sequence; identical to SEQ ID NO: 112635
  derived and/or modified CDS sequence (opt2) from neuraminidase__InfluenzaA__ADK94490

SEQ ID NO: 115262 - RNA, 1410 nt, Artificial Sequence; identical to SEQ ID NO: 112635
  derived and/or modified CDS sequence (opt2) from neuraminidase__InfluenzaA__ADK94501

SEQ ID NO: 115263 - RNA, 1410 nt, Artificial Sequence
  derived and/or modified CDS sequence (opt2) from neuraminidase__InfluenzaA__ADK94512
augaaccccaaccagaagaucaucaccaucggcuccgucucccucaccaucuccaccaucugcuucuucaugcagaucgccauccucaucaccaccgucacccuccacuucaagcaguacgaguucaacuccccccccaacaaccaggucaugcucugcgagcccaccaucaucgagcgcaacaucaccgagaucgucuaccucaccaacaccaccaucgagaaggagaucugccccaagcucgccgaguaccgcaacugguccaagccccagugcgacaucaccggcuucgcccccuucuccaaggacaacuccauccgccucuccgccggcggcgacaucugggucacccgcgagcccuacgucuccugcgaccccgacaagugcuaccaguucgcccucggccagggcaccacccucaacaacguccacuccaacaacaccguccgcgaccgcacccccuaccgcacccuccucaugaacgagcucggcguccccuuccaccucggcaccaagcaggucugcaucgccugguccuccuccuccugccacgacggcaaggccuggcuccacgucugcaucaccggcgacgacaagaacgccaccgccuccuucaucuacaacggccgccucgucgacuccgucgucuccugguccaaggagauccuccgcacccaggaguccgagugcgucugcaucaacggcaccugcaccgucgucaugaccgacggcuccgccuccggcaaggccgacaccaagauccucuucaucgaggagggccgcaucguccacaccuccacccucuccggcuccgcccagcacgucgaggagugcuccugcuacccccgcuaccccggcguccgcugcgucugccgcgacaacuggaagggcuccaaccgccccaucgucgacaucaacaucaaggaccacuccaucgucuccuccuacgucugcuccggccucgucggcgacaccccccgcaagaacgacuccuccuccuccucccacugccucgaccccaacaacgaggagggcggccacggcgucaagggcugggccuucgacgacggcaacgacgucuggaugggccgcaccaucuccgagaagucccgccucggcuacgagaccuucaaggucaucgagggcugguccaaccccaaguccaagcuccagaucaaccgccaggucaucgucgaccgcggcaaccgcuccggcuacuccggcaucuucuccgucgagggcaaguccugcaucaaccgcugcuucuacgucgagcucauccgcggccgcaaggaggagaccgagguccucuggaccuccaacuccaucgucgucuucugcggcaccuccggcaccuacggcaccggcuccuggcccgacggcgccgacaucaaccucaugcccaucuga

SEQ ID NO: 115264 - RNA, 1410 nt, Artificial Sequence; identical to SEQ ID NO: 112635
  derived and/or modified CDS sequence (opt2) from neuraminidase__InfluenzaA__ADK94534

SEQ ID NO: 115265 - RNA, 1410 nt, Artificial Sequence; identical to SEQ ID NO: 115159
  derived and/or modified CDS sequence (opt2) from neuraminidase__InfluenzaA__ADK94556

SEQ ID NO: 115266 - RNA, 1410 nt, Artificial Sequence; identical to SEQ ID NO: 112635
  derived and/or modified CDS sequence (opt2) from neuraminidase__InfluenzaA__ADK94567

SEQ ID NO: 115267 - RNA, 1410 nt, Artificial Sequence; identical to SEQ ID NO: 112635
  derived and/or modified CDS sequence (opt2) from neuraminidase__InfluenzaA__ADK94578

SEQ ID NO: 115268 - RNA, 1410 nt, Artificial Sequence; identical to SEQ ID NO: 112635
  derived and/or modified CDS sequence (opt2) from neuraminidase__InfluenzaA__ADK94589

SEQ ID NO: 115269 - RNA, 1410 nt, Artificial Sequence; identical to SEQ ID NO: 114325
  derived and/or modified CDS sequence (opt2) from neuraminidase__InfluenzaA__ADK98504

SEQ ID NO: 115270 - RNA, 1410 nt, Artificial Sequence
  derived and/or modified CDS sequence (opt2) from neuraminidase__InfluenzaA__ADK98506
augaaccccaaccagaagaucaucaccaucggcuccgucugcaugaccaucggcauggccaaccucauccuccagaucggcaacaucaucuccaucuggaucucccacuccauccagcucggcaaccagaaccagaucgagaccugcaaccagaacgucaucaccuacgagaacaacaccugggucaaccagaccuacgucaacaucuccaacaccaacuucgccgccggccaguccgucgucuccgucaagcucgccggcaacuccucccucugccccgucuccggcugggccaucuacuccaaggacaacuccauccgcaucggcuccaagggcgacgucuucgucauccgcgagcccuucaucuccugcuccccccucgagugccgcaccuucuuccucacccagggcgcccuccucaacgacaagcacuccaacggcaccaucaaggaccgcucccccuaccgcacccucauguccugccccaucggcgagguccccucccccuacaacucccgcuucgaguccgucgccugguccgccuccgccugccacgacggcaucaacuggcucaccaucggcaucuccggccccgacaacggcgccgucgccguccucaaguacaacggcaucaucaccgacaccaucaaguccuggcgcaacaacauccuccgcacccaggaguccgagugcgccugcgucaacggcuccugcuucaccgucaugaccgacggccccuccgacggccaggccuccuacaagaucuuccgcaucgagaagggcaagaucgucaaguccgucgagaugaacgcccccaacuaccacuacgaggagugcuccugcuaccccgacuccuccgagaucaccugcgucugccgcgacaacuggcacggcuccaaccgccccugggucuccuucaaccagaaccucgaguaccagaucggcuacaucugcuccggcaucuucggcgacaacccccgccccaacgacaagaccggcuccugcggccccgucuccuccaacggcgccaacggcgucaagggcuucuccuucaaguacggcaacggcgucuggaucggccgcaccaaguccaucuccucccgcaacggcuucgagaugaucugggaccccaacggcuggaccggcaccgacaacaacuucuccaucaagcaggacaucgucggcaucaacgagugguccggcuacuccggcuccuucguccagcaccccgagcucaccggccucgacugcauccgccccugcuucugggucgagcucauccgcggccgccccaaggagaacaccaucuggaccuccggcuccuccaucuccuucugcggcgucaacuccgacaccgucggcugguccuggcccgacggcgccgagcuccccuucaccaucgacaaguga

SEQ ID NO: 115271 - RNA, 1410 nt, Artificial Sequence
  derived and/or modified CDS sequence (opt2) from neuraminidase__InfluenzaA__ADK98626
augaaccccaaccagaagaucaucaccaucggcuccgucucccucaccaucuccaccaucugcuucuucaugcagaucgccauccucaucaccaccgucacccuccacuucaagcaguacgaguucaacuccccccccaacaaccaggucaugcucugcgagcccaccaugaucgagcgcaacaucaccgagaucgucuaccucaccaacaccaccaucgagaaggagaucugccccaagcucgccgaguaccgcaacugguccaagccccagugcgacaucaccggcuucgcccccuucuccaaggacaacuccauccgccucuccgccggcggcgacaucugggucacccgcgagcccuacgucuccugcgaccccgacaagugcuaccaguucgcccucggccagggcaccacccucaacaacguccacuccaacaacaccguccgcgaccgcacccccuaccgcacccuccucaugaacgagcucggcguccccuuccaccucggcaccaagcaggucugcaucgccugguccuccuccuccugccacgacggcaaggccuggcuccacgucugcaucaccggcgacgacaagaacgccaccgccuccuucaucuacaacggccgccucgucgacuccgucgucuccugguccaaggagauccuccgcacccaggaguccgagugcgucugcaucaacggcaccugcaccgucgucaugaccgacggcuccgccuccggcaaggccgacaccaagauccucuucaucgaggagggcaagaucguccacaccuccacccucuccggcuccgcccagcacgucgaggagugcuccugcuacccccgcuaccccggcguccgcugcgucugccgcgacaacuggaagggcuccaaccgccccaucgucgacaucaacaucaaggaccacuccaucgucuccuccuaccucugcuccggccucgucggcgacaccccccgcaagaacgacuccuccuccuccucccacugccucgaccccaacaacgaggagggcggccacggcgucaagggcugggccuucgacgacggcaacgacgucuggaugggccgcaccaucuccgagaagucccgccucggcuacgagaccuucaaggucaucgagggcugguccaaccccaaguccaagcuccagaucaaccgccaggucaucgucgaccgcggcaaccgcuccggcuacuccggcaucuucuccgucgagggcaaguccugcaucaaccgcugcuucuacgucgagcucauccgcggccgcaaggaggagaccgagguccucuggaccuccaacuccaucgucgucuucugcggcaccuccggcaccuacggcaccggcuccuggcccgacggcgccgacaucaaccucaugcccaucuga

SEQ ID NO: 115272 - RNA, 1410 nt, Artificial Sequence; identical to SEQ ID NO: 113941
  derived and/or modified CDS sequence (opt2) from neuraminidase__InfluenzaA__ADK98637

SEQ ID NO: 115273 - RNA, 1410 nt, Artificial Sequence
  derived and/or modified CDS sequence (opt2) from neuraminidase__InfluenzaA__ADK98648
augaaccccaaccagaagaucaucaccaucggcuccgucucccucaccaucuccaccaucugcuucuucaugcagaucgccauccucgucaccaccgucacccuccacuucaagcaguacgaguucaacuccccccccaacaaccaggucaugcucugcgagcccaccaucaucgagcgcaacaucaccgagaucgucuaccucaccaacaccaccaucgagaaggagaucugccccaagcucgccgaguaccgcaacugguccaagccccagugcgacaucaccggcuucgcccccuucuccaaggacaacuccauccgccucuccgccggcggcgacaucugggucacccgcgagcccuacgucuccugcgaccccgacaagugcuaccaguucgcccucggccagggcaccacccucaacaacguccacuccaacaacaccguccgcgaccgcacccccuaccgcacccuccucaugaacgagcucggcguccccuuccaccucggcaccaagcaggucugcaucgccugguccuccuccuccugccacgacggcaaggccuggcuccacgucugcaucaccggcgacgacaagaacgccaccgccuccuucaucuacaacggccgccucgucgacuccgucgucuccugguccaaggacauccuccgcacccaggaguccgagugcgucugcaucaacggcaccugcaccgucgucaugaccgacggcuccgccuccggcaaggccgacaccaagauccucuucaucgaggagggcaagaucguccacaccuccacccucuccggcuccgcccagcacgucgaggagugcuccugcuacccccgcuaccccggcguccgcugcgucugccgcgacaacuggaagggcuccaaccgccccaucgucgacaucaacaucaaggaccacuccaucgucuccuccuacgucugcuccggccucgucggcgacaccccccgcaagaacgacuccuccuccuccucccacugccucgaccccaacaacgaggagggcggccgcggcgucaagggcugggccuucgacgacggcaacgacgucuggaugggccgcaccaucuccgagaagucccgccucggcuacgagaccuucaaggucaucgagggcugguccaaccccaaguccaagcuccagaucaaccgccaggucaucgucgaccgcggcaaccgcuccggcuacuccggcaucuucuccgucgagggcaaguccugcaucaaccgcugcuucuacgucgagcucauccgcggccgcaaggaggagaccgagguccucuggaccuccaacuccaucgucgucuucugcggcaccuccggcaccuacggcaccggcuccuggcccgacggcgccaacaucaaccucaugcccaucuga

SEQ ID NO: 115274 - RNA, 1410 nt, Artificial Sequence
  derived and/or modified CDS sequence (opt2) from neuraminidase__InfluenzaA__ADK98659
augaaccccaaccagaagaucaucaccaucggcuccgucucccucaccaucuccaccaucugcuucuucaugcagaucgccauccucaucaccaccgucacccuccacuucaagcaguacgaguucaacuccccccccaacaaccaggucaugcucugcgagcccaccaucaucgagcgcaacaucaccgagaucgucuaccucaccaacaccaccaucgagaaggagaucugccccaagcucgccgaguaccgcaacugguccaagccccagugcgacaucaccggcuucgcccccuucuccaaggacaacuccauccgccucuccgccggcggcgacaucugggucacccgcgagcccuacgucuccugcgaccccgacaagugcuaccaguucgcccucggccagggcaccacccucaacaacguccacuccaacaacaccguccgcgaccgcacccccuaccgcacccuccucaugaacgagcucggcguccccuuccaccucggcaccaagcaggucugcaucgccugguccuccuccuccugccacgacggcaaggccuggcuccacgucugcaucaccggcgacgacaagaacgccaccgccuccuucaucuacaacggccgccucgucgacuccgucgucuccugguccaaggagauccuccgcacccaggaguccgagugcgucugcaucaacggcaccugcaccgucgucaugaccgacggcuccgccuccggcaaggccgacaccaagauccucuucaucgaggagggcaagaucguccacaccuccacccucuccggcuccgcccagcacgucgaggagugcuccugcuacccccgcuaccccggcguccgcugcgucugccgcgacaacuggaagggcuccaaccgccccaucgucgacaucaacaucaaggaccacuccaucgucuccuccuacgucugcuccggccucgucggcgacaccccccgcaagaacgacuccuccuccuccggccacugccucgaccccaacaacgaggagggcggccacggcgucaagggcugggccuucgacgacggcaacgacgucuggaugggccgcaccaucuccgagaagucccgccucggcuacgagaccuucaaggucaucgagggcugguccaaccacaaguccaagcuccagaucaaccgccaggucaucgucgaccgcggcaaccgcuccggcuacuccggcaucuucuccgucgagggcaaguccugcaucaaccgcugcuucuacgucgagcucauccgcggccgcaaggaggagaccgagguccucuggaccuccaacuccaucgucgucuucugcggcaccuccggcaccuacggcaccggcuccuggcccgacggcgccgaccucaaccucaugcccaucuga

SEQ ID NO: 115275 - RNA, 1410 nt, Artificial Sequence; identical to SEQ ID NO: 115159
  derived and/or modified CDS sequence (opt2) from neuraminidase__InfluenzaA__ADK98670

SEQ ID NO: 115276 - RNA, 1410 nt, Artificial Sequence
  derived and/or modified CDS sequence (opt2) from neuraminidase__InfluenzaA__ADK98681
augaaccccaaccagaagaucaucaccaucggcuccgucucccucaccaucuccaccaucugcuucuucaugcagaucgccauccucaucaccaccgucacccuccacuucaagcaguacgaguucaacuccccccccaacaaccaggucaugcucugcgagcccaccaucaucgagcgcaacaucaccgagaucgucuaccucaccaacaccaccaucgagaaggagaucugccccaagcucgccgaguaccgcaacugguccaagccccagugcgacaucaccggcuucgcccccuucuccaaggacaacuccauccgccucuccgccggcggcgacaucugggucacccgcgagcccuacgucuccugcgaccccgacaagugcuaccaguucgcccucggccagggcaccacccucaacaacguccacuccaacaacaccguccgcgaccgcacccccuaccgcacccuccucaugaacgagcucggcguccccuuccaccucggcaccaagcaggucugcaucgccugguccuccuccuccugccacgacggcaaggccuggcuccacgucugcaucaccggcgacgacaagaacgccaccgccuccuucaucuacaacggccgccucgucgacuccgucgucuccugguccaaggagauccuccgcacccaggaguccgagugcgucugcaucaacggcaccugcaccgucgucaugaccgacggcuccgccuccggcgaggccgacaccaagauccucuucaucgaggagggcaagaucguccacaccuccacccucuccggcuccgcccagcacgucgaggagugcuccugcuacccccgcuaccccggcguccgcugcgucugccgcgacaacuggaagggcuccaaccgccccaucgucgacaucaacaucaaggaccacuccaucgucuccuccuacgucugcuccggccucgucggcgacaccccccgcaagaacgacuccuccuccuccucccacugccucgaccccaacaacgaggagggcggccacggcgucaagggcugggccuucgacgacggcaacgacgucuggaugggccgcaccaucuccgagaagucccgccucggcuacgagaccuucaaggucaucgagggcugguccaaccccaaguccaagcuccagaccaaccgccaggucaucgucgaccgcggcaaccgcuccggcuacuccggcaucuucuccgucgagggcaagaacugcaucaaccgcugcuucuacgucgagcucauccgcggccgcaaggaggagaccgagguccucuggaccuccaacuccaucgucgucuucugcggcaccuccggcaccuacggcaccggcuccuggcccgacggcgccgacaucaaccucaugcccaucuga

SEQ ID NO: 115277 - RNA, 1410 nt, Artificial Sequence
  derived and/or modified CDS sequence (opt2) from neuraminidase__InfluenzaA__ADK98703
augaaccccaaccagaagaucaucaccaucggcuccgucucccucaccaucuccaccaucugcuucuucaugcagaccgccauccucaucaccaccgucacccuccacuucaagcaguacgaguucaacuccccccccaacaaccaggucaugcucugcgagcccaccaucaucgagcgcaacaucaccgagaucgucuaccucaccaacaccaccaucgagaaggagaucugccccaagcucgccgaguaccgcaacugguccaagccccagugcgacaucaccggcuucgcccccuucuccaaggacaacuccauccgccucuccgccggcggcgacaucugggucacccgcgagcccuacgucuccugcgaccccgacaagugcuaccaguucgcccucggccagggcaccacccucaacaacguccacuccaacaacaccguccgcgaccgcacccccuaccgcacccuccucaugaacgagcucggcguccccuuccaccucggcaccaagcaggucugcaucgccugguccuccuccuccugccacgacggcaaggccuggcuccacgucugcaucaccggcgacgacaagaacgccaccgccuccuucaucuacaacggccgccucgucgacuccgucgucuccugguccaaggagauccuccgcacccaggaguccgagugcgucugcaucaacggcaccugcaccgucgucaugaccgacggcuccgccuccggcgaggccgacaccaagauccucuucaucgaggagggcaagaucguccacaccuccacccucuccggcuccgcccagcacgucgaggagugcuccugcuacccccgcuaccccggcguccgcugcgucugccgcgacaacuggaagggcuccaaccgccccaucgucgacaucaacaucaaggaccacuccaucgucuccuccuacgucugcuccggccucgucggcgacaccccccgcaagaacgacuccuccuccuccucccacugccucgaccccaacaacgaggagggcggccacggcgucaagggcugggccuucgacgacggcaacgacgucuggaugggccgcaccaucuccgagaagucccgccucggcuacgagaccuucaaggucaucgagggcugguccaaccccaaguccaagcuccagaccaaccgccaggucaucgucgaccgcggcaaccgcuccggcuacuccggcaucuucuccgucgagggcaagaacugcaucaaccgcugcuucuacgucgagcucauccgcggccgcaaggaggagaccgagguccucuggaccuccaacuccaucgucgucuucugcggcaccuccggcaccuacggcaccggcuccuggcccgacggcgccgacaucaaccucaugcccaucuga

SEQ ID NO: 115278 - RNA, 1410 nt, Artificial Sequence; identical to SEQ ID NO: 114520
  derived and/or modified CDS sequence (opt2) from neuraminidase__InfluenzaA__ADK98725

SEQ ID NO: 115279 - RNA, 1410 nt, Artificial Sequence; identical to SEQ ID NO: 115159
  derived and/or modified CDS sequence (opt2) from neuraminidase__InfluenzaA__ADK98736

SEQ ID NO: 115280 - RNA, 1410 nt, Artificial Sequence
  derived and/or modified CDS sequence (opt2) from neuraminidase__InfluenzaA__ADK98747
augaaccccaaccagaagaucaucaccaucggcuccgucucccucaccaucuccaccaucugcuucuucaugcagaucgccauccucgucaccaccgucacccuccacuucaagcaguacgaguucaacuccccccccaacaaccaggucaugcucugcgagcccaccaucaucgagcgcaacaucaccgagaucgucuaccucaccaacaccaccaucgagaaggagaucugccccaagcucgccgaguaccgcaacugguccaagccccagugcgacaucaccggcuucgcccccuucuccaaggacaacuccauccgccucuccgccggcggcgacaucugggucacccgcgagcccuacgucuccugcgaccccgacaagugcuaccaguucgcccucggccagggcaccacccucaacaacguccacuccaacaacaccguccgcgaccgcacccccuaccgcacccuccucaugaacgagcucggcguccccuuccaccucggcaccaagcaggucugcaucgccugguccuccuccuccugccacgacggcaaggccuggcuccacgucugcaucaccggcgacgacaagaacgccaccgccuccuucaucuacaacggccgccucgucgacuccgucgucuccugguccaaggacauccuccgcacccaggaguccgagugcgucugcaucaacggcaccugcaccgucgucaugaccgacggcuccgccuccggcaaggccgacaccaagauccucuucaucgaggagggcaagaucguccacaccuccacccucuccggcuccgcccagcacgucgaggagugcuccugcuacccccgcuaccccggcguccgcugcgucugccgcgacaacuggaagggcuccaaccgccccaucgucgacaucaacaugaaggaccacuccaucgucuccuccuacgucugcuccggccucgucggcgacaccccccgcaagaacgacuccuccuccuccucccacugccucgaccccaacaacgaggagggcggccacggcgucaagggcugggccuucgacgacggcaacgacgucuggaugggccgcaccaucuccgagaagucccgccucggcuacgagaccuucaaggucaucgagggcugguccaaccccaaguccaagcuccagaucaaccgccaggucaucgucgaccgcggcaaccgcuccggcuacuccggcaucuucuccgucgagggcaaguccugcaucaaccgcugcuucuacgucgagcucauccgcggccgcaaggaggagaccgagguccucuggaccuccaacuccaucgucgucuucugcggcaccuccggcaccuacggcaccggcuccuggcccgacggcgccaacaucaaccucaugcccaucuga

SEQ ID NO: 115281 - RNA, 1410 nt, Artificial Sequence
  derived and/or modified CDS sequence (opt2) from neuraminidase__InfluenzaA__ADK98758
augaaccccaaccagaagaucaucaccaucggcuccgucucccucaccaucuccaccaucugcuucuucaugcagaucgccauccucgucaccaccgucacccuccacuucaagcaguacgaguucaacuccccccccaacaaccaggucaugcucugcgagcccaccaucaucgagcgcaacaucaccgagaucgucuaccucaccaacaccaccaucgagaaggagaucugccccaagcucgccgaguaccgcaacugguccaagccccagugcgacaucaccggcuucgcccccuucuccaaggacaacuccauccgccucuccgccggcggcgacaucugggucacccgcgagcccuacgucuccugcgaccccgacaagugcuaccaguucgcccucggccagggcaccacccucaacaacguccacuccaacaacaccguccgcgaccgcacccccuaccgcacccuccucaugaacgagcucggcguccccuuccaccucggcaccaagcaggucugcaucgccugguccuccuccuccugccacgacggcaaggccuggcuccacgucugcaucaccggcgacgacaagaacgccaccgccuccuucaucuacaacggccgccucgucgacuccgucgucuccugguccaaggacauccuccgcacccaggaguccgagugcgucugcaucaacggcaccugcaccgucgucaugaccgacggcuccgccuccggcaaggccaacaccaagauccucuucaucgaggagggcaagaucguccacaccuccacccucuccggcuccgcccagcacgucgaggagugcuccugcuacccccgcuaccccggcguccgcugcgucugccgcgacaacuggaagggcuccaaccgccccaucgucgacaucaacaucaaggaccacuccaucgucuccuccuacgucugcuccggccucgucggcgacaccccccgcaagaacgacuccuccuccuccucccacugccucgaccccaacaacgaggagggcggccacggcgucaagggcugggccuucgacgacggcaacgacgucuggaugggccgcaccaucuccgagaagucccgccucggcuacgagaccuucaaggucaucgagggcugguccaaccccaaguccaagcuccagaucaaccgccaggucaucgucgaccgcggcaaccgcuccggcuacuccggcaucuucuccgucgagggcaaguccugcaucaaccgcugcuucuacgucgagcucauccgcggccgcaaggaggagaccgagguccucuggaccuccaacuccaucgucgucuucugcggcaccuccggcaccuacggcaccggcuccuggcccgacggcgccaacaucaaccucaugcccaucuga

SEQ ID NO: 115282 - RNA, 1410 nt, Artificial Sequence; identical to SEQ ID NO: 114520
  derived and/or modified CDS sequence (opt2) from neuraminidase__InfluenzaA__ADK98769

SEQ ID NO: 115283 - RNA, 1410 nt, Artificial Sequence; identical to SEQ ID NO: 115074
  derived and/or modified CDS sequence (opt2) from neuraminidase__InfluenzaA__ADK98780

SEQ ID NO: 115284 - RNA, 1410 nt, Artificial Sequence; identical to SEQ ID NO: 114520
  derived and/or modified CDS sequence (opt2) from neuraminidase__InfluenzaA__ADK98791

SEQ ID NO: 115285 - RNA, 1410 nt, Artificial Sequence; identical to SEQ ID NO: 112635
  derived and/or modified CDS sequence (opt2) from neuraminidase__InfluenzaA__ADK98802

SEQ ID NO: 115286 - RNA, 1410 nt, Artificial Sequence
  derived and/or modified CDS sequence (opt2) from neuraminidase__InfluenzaA__ADK98813
augaaccccaaccagaagaucaucaccaucggcuccgucucccucaccaucuccaccaucugcuucuucaugcagaucgccauccucaucaccaccgucacccuccacuucaagcaguacgaguucaacuccccccccaacaaccaggucaugcucugcgagcccgccaucaucgagcgcaacaucaccgagaucgucuaccucaccaacaccaccaucgagaaggagaucugccccaagcucgccgaguaccgcaacugguccaagccccagugcgacaucaccggcuucgcccccuucuccaaggacaacuccauccgccucuccgccggcggcgacaucugggucacccgcgagcccuacgucuccugcgaccccgacaagugcuaccaguucgcccucggccagggcaccacccucaacaacguccacuccaacaacaccguccgcgaccgcacccccuaccgcacccuccucaugaacgagcucggcguccccuuccaccucggcaccaagcaggucugcaucgccugguccuccuccuccugccacgacggcaaggccuggcuccacgucugcaucaccggcgacgacaagaacgccaccgccuccuucaucuacaacggccgccucgucgacuccgucgucuccugguccaaggagauccuccgcacccaggaguccgagugcgucugcaucaacggcaccugcaccgucgucaugaccgacggcuccgccuccggcaaggccgacaccaagauccucuucaucgaggagggcaagaucguccacaccuccacccucuccggcuccgcccagcacgucgaggagugcuccugcuacccccgcuaccccggcguccgcugcgucugccgcgacaacuggaagggcuccaaccgccccaucgucgacaucaacaucaaggaccacuccaucgucuccuccuacgucugcuccggccucgucggcgacaccccccgcaagaacgacuccuccuccuccucccacugccucgaccccaacaacgaggagggcggccacggcgucaagggcugggccuucgacgacggcaacgacgucuggaugggccgcaccaucuccgagaagucccgccucggcuacgagaccuucaaggucaucgagggcugguccaaccacaaguccaagcuccagaucaaccgccaggucaucgucgaccgcggcaaccgcuccggcuacuccggcaucuucuccgucgagggcaaguccugcaucaaccgcugcuucuacgucgagcucauccgcggccgcaaggaggagaccgagguccucuggaccuccaacuccaucgucgucuucugcggcaccuccggcaccuacggcaccggcuccuggcccgacggcgccgaccucaaccucaugcccaucuga

SEQ ID NO: 115287 - RNA, 1410 nt, Artificial Sequence; identical to SEQ ID NO: 112635
  derived and/or modified CDS sequence (opt2) from neuraminidase__InfluenzaA__ADK98824

SEQ ID NO: 115288 - RNA, 1410 nt, Artificial Sequence; identical to SEQ ID NO: 114520
  derived and/or modified CDS sequence (opt2) from neuraminidase__InfluenzaA__ADK98835

SEQ ID NO: 115289 - RNA, 1410 nt, Artificial Sequence; identical to SEQ ID NO: 115159
  derived and/or modified CDS sequence (opt2) from neuraminidase__InfluenzaA__ADK98846

SEQ ID NO: 115290 - RNA, 1410 nt, Artificial Sequence
  derived and/or modified CDS sequence (opt2) from neuraminidase__InfluenzaA__ADK98857
augaaccccaaccagaagaucaucaccaucggcuccgucucccucaccaucuccaccaucugcuucuucaugcagaucgccauccucgucaccaccgucacccuccacuucaagcaguacgaguucaacuccccccccaacaaccaggucaugcucugcgagcccaccaucaucgagcgcaacaucaccgagaucgucuaccucaccaacaccaccaucgagaaggagaucugccccaagcucgccgaguaccgcaacugguccaagccccagugcgacaucaccggcuucgcccccuucuccaaggacaacuccauccgccucuccgccggcggcgacaucugggucacccgcgagcccuacgucuccugcgaccccgacaagugcuaccaguucgcccucggccagggcaccacccucaacaacguccacuccaacaacaccguccgcgaccgcacccccuaccgcacccuccucaugaacgagcucggcguccccuuccaccucggcaccaagcaggucugcaucgccugguccuccuccuccugccacgacggcaaggccuggcuccacgucugcaucaccggcgacgacaagaacgccaccgccuccuucaucuacaacggccgccucgucgacuccgucgucuccugguccaaggacauccuccgcacccaggaguccgagugcgucugcaucaacggcaccugcaccgucgucaugaccgacggcuccgccuccggcaaggccgacaccaagauccucuucaucgaggagggcaagaucguccacaccuccacccucuccggcuccgcccagcacgucgaggagugcuccugcuacccccgcuaccccggcguccgcugcgucugccgcgacaacuggaagggcuccaaccgccccaucgucgacaucaacaucaaggaccacuccaucgucuccuccuacgucugcuccggccucgucggcgacaccccccgcaagaacgacuccuccuccuccucccacugccucgaccccaacaacgaggagggcggccacggcgucaagggcugggccuucgacgacggcaacgacgucuggaugggccgcaccaucuccgagaagucccgccucggcuacgagaccuucaaggucaucgagggcugguccaaccacaaguccaagcuccagaucaaccgccaggucaucgucgaccgcggcaaccgcuccggcuacuccggcaucuucuccgucgagggcaaguccugcaucaaccgcugcuucuacgucgagcucauccgcggccgcaaggaggagaccgagguccucuggaccuccaacuccaucgucgucuucugcggcaccuccggcaccuacggcaccggcuccuggcccgacggcgccaacaucaaccucaugcccaucuga

SEQ ID NO: 115291 - RNA, 1410 nt, Artificial Sequence
  derived and/or modified CDS sequence (opt2) from neuraminidase__InfluenzaA__ADK98868
augaaccccaaccagaagaucaucaccaucggcuccgucucccucaccaucuccaccaucugcuucuucaugcagaucgccauccucaucaccaccgucacccuccacuucaagcaguacgaguucaacuccccccccaacaaccaggucaugcucugcgagcccaccaucaucgagcgcaacaucaccgagaucgucuaccucaccaacaccaccaucgagaaggagaucugccccaagcucgccgaguaccgcaacugguccaagccccagugcgacaucaccggcuucgcccccuucuccaaggacaacuccauccgccucuccgccggcggcgacaucugggucacccgcgagcccuacgucuccugcgaccccgacaagugcuaccaguucgcccucggccagggcaccacccucaacaacguccacuccaacaacaccguccgcgaccgcacccccuaccgcacccuccucaugaacgagcucggcguccccuuccaccucggcaccaagcaggucugcaucgccugguccuccuccuccugccacgacggcaaggccuggcuccacgucugcaucaccggcgacgacaagaacgccaccgccuccuucaucuacaacggccgccucgucgacuccgucgucuccugguccaaggagauccuccgcacccaggaguccgagugcgucugcaucaacggcaccugcaccgucgucaugaccgacggcuccgccuccggcaaggccgacaccaagauccucuucaucgaggagggcaagaucguccacaccuccacccucuccggcuccgcccagcacgucgaggagugcuccugcuacccccgcuaccccggcguccgcugcgucugccgcgacaacuggaagggcuccaaccgccccaucgucgacaucaacaucaaggaccacuccaucgucuccuccuacgucugcuccggccucgucggcgacaccccccgcaagaacgacuccuccuccuccucccacugccucgaccccaacaacgaggagggcggccacggcgucaagggcugggccuucgacgacggcaacgacgucuggaugggccgcaccaucuccgagaagucccgccucggcuacgagaccuucaaggucaucgagggcugguccaaccccaaguccaagcuccagaucaaccgccaggucaucgucgaccgcggcaaccgcuccggcuacuccggcaucuucuccgucgagggcaaguccugcaucaaccgcugcuucuacgucgagcucauccgcggccgcaaggaggagaacgagguccucuggaccuccaacuccaucgucgucuucugcggcaccuccggcaccuacggcaccggcuccuggcccgacggcgccgacaucaaccucaugcccaucuga

SEQ ID NO: 115292 - RNA, 1410 nt, Artificial Sequence
  derived and/or modified CDS sequence (opt2) from neuraminidase__InfluenzaA__ADK98879
augaaccccaaccagaagaucaucaccaucggcuccgucucccucaccaucuccaccaucugcuucuucaugcagaucgccauccucaucaccaccgucacccuccacuucaagcaguacgaguucaacuccccccccaacaaccaggccaugcucugcgagcccaccaucaucgagcgcaacaucaccgagaucgucuaccucaccaacaccaccaucgagaaggagaucugccccaagcucgccgaguaccgcaacugguccaagccccagugcgacaucaccggcuucgcccccuucuccaaggacaacuccauccgccucuccgccggcggcgacaucugggucacccgcgagcccuacgucuccugcgaccccgacaagugcuaccaguucgcccucggccagggcaccacccucaacaacguccacuccaacaacaccguccgcgaccgcacccccuaccgcacccuccucaugaacgagcucggcguccccuuccaccucggcaccaagcaggucugcaucgccugguccuccuccuccugccacgacggcaaggccuggcuccacgucugcaucaccggcgacgacaagaacgccaccgccuccuucaucuacaacggccgccucgucgacuccgucgucuccugguccaaggagauccuccgcacccaggaguccgagugcgucugcaucaacggcaccugcaccgucgucaugaccgacggcuccgccuccggcaaggccgacaccaagauccucuucaucgaggagggcaagaucguccacaccuccacccucuccggcuccgcccagcacgucgaggagugcuccugcuacccccgcuaccccggcguccgcugcgucugccgcgacaacuggaagggcuccaaccgccccaucgucgacaucaacaucaaggaccacuccaucgucuccuccuacgucugcuccggccucgucggcgacaccccccgcaagaacgacuccuccuccuccucccacugccucgaccccaacaacgaggagggcggccacggcgucaagggcugggccuucgacgacggcaacgacgucuggaugggccgcaccaucuccgagaagucccgccucggcuacgagaccuucaaggucaucgagggcugguccaaccccaaguccaagcuccagaucaaccgccaggucaucgucgaccgcggcaaccgcuccggcuacuccggcaucuucuccgucgagggcaaguccugcaucaaccgcugcuucuacgucgagcucauccgcggccgcaaggaggagaccgagguccucuggaccuccaacuccaucgucgucuucugcggcaccuccggcaccuacggcaccggcuccuggcccgacggcgccgacaucaaccucaugcccaucuga

SEQ ID NO: 115293 - RNA, 1410 nt, Artificial Sequence; identical to SEQ ID NO: 115159
  derived and/or modified CDS sequence (opt2) from neuraminidase__InfluenzaA__ADK98890

SEQ ID NO: 115294 - RNA, 1410 nt, Artificial Sequence; identical to SEQ ID NO: 114520
  derived and/or modified CDS sequence (opt2) from neuraminidase__InfluenzaA__ADK98901

SEQ ID NO: 115295 - RNA, 1410 nt, Artificial Sequence; identical to SEQ ID NO: 115074
  derived and/or modified CDS sequence (opt2) from neuraminidase__InfluenzaA__ADK98912

SEQ ID NO: 115296 - RNA, 1410 nt, Artificial Sequence; identical to SEQ ID NO: 115159
  derived and/or modified CDS sequence (opt2) from neuraminidase__InfluenzaA__ADK98923

SEQ ID NO: 115297 - RNA, 1410 nt, Artificial Sequence; identical to SEQ ID NO: 113941
  derived and/or modified CDS sequence (opt2) from neuraminidase__InfluenzaA__ADK98945

SEQ ID NO: 115298 - RNA, 1410 nt, Artificial Sequence
  derived and/or modified CDS sequence (opt2) from neuraminidase__InfluenzaA__ADK98956
augaaccccaaccagaagaucaucaccaucggcuccgucucccucaccaucuccaccaucugcuucuucaugcagaucgccauccucaucaccaccgucacccuccacuucaagcaguacgaguucaacuccccccccaacaaccaggucaugcucugcgagcccaccaucaucgagcgcaacaucaccgagaucgucuaccucaccaacaccaccaucgagaaggagaucugccccaagcucgccgaguaccgcaacugguccaagccccagugcgacaucaccggcuucgcccccuucuccaaggacaacuccauccgccucuccgccggcggcgacaucugggucacccgcgagcccuacgucuccugcgaccccgacaagugcuaccaguucgcccucggccagggcaccacccucaacaacguccacuccaacaacaccguccgcgaccgcacccccuaccgcacccuccucaugaacgagcucggcguccccuuccaccucggcaccaagcaggucugcaucgccugguccuccuccuccugccacgacggcaaggccuggcuccacgucugcaucaccggcgacgacaagaacgccaccgccuccuucaucuacaacggccgccucgucgacuccgucgucuccugguccaaggagauccuccgcacccaggaguccgagugcgucugcaucaacggcaccugcaccgucgucaugaccgacggcuccgccuccggcaaggccgacaccaagauccucuucaucgaggagggcaagaucguccacaccuccacccucuccggcuccgcccagcacgucgaggagugcuccugcuacccccgcuaccccggcguccgcugcgucugccgcgacaacuggaagggcuccaaccgccccaucgucgacaucaacaucaaggaccacuccgucgucuccuccuacgucugcuccggccucgucggcgacaccccccgcaaguccgacuccuccuccuccucccacugccucgaccccaacaacgaggagggcggccacggcgucaagggcugggccuucgacgacggcaacgacgucuggaugggccgcaccaucuccgagaagucccgccucggcuacgagaccuucaaggucaucgagggcugguccaaccacaaguccaagcuccagaucaaccgccaggucaucgucgaccgcggcaaccgcuccggcuacuccggcaucuucuccgucgagggcaaguccugcaucaaccgcugcuucuacgucgagcucauccgcggccgcaaggaggagaccgagguccucuggaccuccaacuccaucgucgucuucugcggcaccuccggcaccuacggcaccggcuccuggcccgacggcgccgaccucaaccucaugcccaucuga

SEQ ID NO: 115299 - RNA, 1410 nt, Artificial Sequence; identical to SEQ ID NO: 114520
  derived and/or modified CDS sequence (opt2) from neuraminidase__InfluenzaA__ADK98967

SEQ ID NO: 115300 - RNA, 1410 nt, Artificial Sequence; identical to SEQ ID NO: 115159
  derived and/or modified CDS sequence (opt2) from neuraminidase__InfluenzaA__ADK98978

SEQ ID NO: 115301 - RNA, 1410 nt, Artificial Sequence; identical to SEQ ID NO: 115298
  derived and/or modified CDS sequence (opt2) from neuraminidase__InfluenzaA__ADK98989

SEQ ID NO: 115302 - RNA, 1410 nt, Artificial Sequence; identical to SEQ ID NO: 112635
  derived and/or modified CDS sequence (opt2) from neuraminidase__InfluenzaA__ADK99000

SEQ ID NO: 115303 - RNA, 1410 nt, Artificial Sequence; identical to SEQ ID NO: 115298
  derived and/or modified CDS sequence (opt2) from neuraminidase__InfluenzaA__ADK99011

SEQ ID NO: 115304 - RNA, 1410 nt, Artificial Sequence
  derived and/or modified CDS sequence (opt2) from neuraminidase__InfluenzaA__ADK99022
augaaccccaaccagaagaucaucaccaucggcuccgucucccucaccaucuccaccaucugcuucuucaugcagaucgccauccucgucaccaccgucacccuccacuucaagcaguacgaguucaacuccccccccaacaaccaggucaugcucugcgaccccaccaucaucgagcgcaacaucaccgagaucgucuaccucaccaacaccaccaucgagaaggagaucugccccaagcucgccgaguaccgcaacugguccaagccccagugcgacaucaccggcuucgcccccuucuccaaggacaacuccauccgccucuccgccggcggcgacaucugggucacccgcgagcccuacgucuccugcgaccccgacaagugcuaccaguucgcccucggccagggcaccacccucaacaacguccacuccaacaacaccguccgcgaccgcacccccuaccgcacccuccucaugaacgagcucggcguccccuuccaccucggcaccaagcaggucugcaucgccugguccuccuccuccugccacgacggcaaggccuggcuccacgucugcaucaccggcgacgacaagaacgccaccgccuccuucaucuacaacggccgccucgucgacuccgucgucuccugguccaaggacauccuccgcacccaggaguccgagugcgucugcaucaacggcaccugcaccgucgucaugaccgacggcuccgccuccggcaaggccgacaccaagauccucuucaucgaggagggcaagaucguccacaccuccacccucuccggcuccgcccagcacgucgaggagugcuccugcuacccccgcuaccccggcguccgcugcgucugccgcgacaacuggaagggcuccaaccgccccaucgucgacaucaacaucaaggaccacuccaucgucuccuccuacgucugcuccggccucgucggcgacaccccccgcaagaacgacuccuccuccuccucccacugccucgaccccaacaacgaggagggcggccacggcgucaagggcugggccuucgacgacggcaacgacgucuggaugggccgcaccaucuccgagaagucccgccucggcuacgagaccuucaaggucaucgagggcugguccaaccccaaguccaagcuccagaucaaccgccaggucaucgucgaccgcggcaaccgcuccggcuacuccggcaucuucuccgucgagggcaaguccugcaucaaccgcugcuucuacgucgagcucauccgcggccgcaaggaggagaccgagguccucuggaccuccaacuccaucgucgucuucugcggcaccuccggcaccuacggcaccggcuccuggcccgacggcgccaacaucaaccucaugcccaucuga

SEQ ID NO: 115305 - RNA, 1410 nt, Artificial Sequence; identical to SEQ ID NO: 112635
  derived and/or modified CDS sequence (opt2) from neuraminidase__InfluenzaA__ADK99033

SEQ ID NO: 115306 - RNA, 1410 nt, Artificial Sequence
  derived and/or modified CDS sequence (opt2) from neuraminidase__InfluenzaA__ADK99044
augaaccccaaccagaagaucaucaccaucggcuccgucucccucaccaucuccaccaucugcuucuucaugcagaucgccauccucaucaccaccgucacccuccacuucaagcaguacgaguucaacuccccccccaacaaccaggucaugcucugcgagcccaccaucaucgagcgcaacaagaccgagaucgucuaccucaccaacaccaccaucgagaaggagaucugccccaagcucgccgaguaccgcaacugguccaagccccagugcgacaucaccggcuucgcccccuucuccaaggacaacuccauccgccucuccgccggcggcgacaucugggucacccgcgagcccuacgucuccugcgaccccgacaagugcuaccaguucgcccucggccagggcaccacccucaacaacggccacuccaacaacaccguccgcgaccgcacccccuaccgcacccuccucaugaacgagcucggcguccccuuccaccucggcaccaagcaggucugcaucgccugguccuccuccuccugccacgacggcaaggccuggcuccacgucugcaucaccggcgacgacaagaacgccaccgccuccuucaucuacaacggcaagcucgucgacuccgucgucuccugguccaaggagauccuccgcacccaggaguccgagugcgucugcaucaacggcaccugcaccgucgucaugaccgacggcuccgccuccggcaaggccgacaccaagauccucuucaucgaggagggcaagaucguccacaccuccacccucuccggcuccgcccagcacgucgaggagugcuccugcuacccccgcuaccccggcguccgcugcgucugccgcgacaacuggaagggcuccaaccgccccaucgucgacaucaacaucaaggaccacuccaucgucuccuccuacgucugcuccggccucgucggcgacaccccccgcaagaacgacuccuccuccuccucccacugccucgaccccaacaacgaggagggcggccacggcgucaagggcugggccuucgacgacggcaacgacgucuggaugggccgcaccaucuccgagaagucccgccucggcuacgagaccuucaaggucaucgagggcugguccaaccacaaguccaagcuccagaucaaccgccaggucaucgucgaccgcggcaaccgcuccggcuacuccggcaucuucuccgucgagggcaaguccugcaucaaccgcugcuucuacgucgagcucauccgcggccgcaaggaggagaccgagguccucuggaccuccaacuccaucgucgucuucugcggcaccuccggcaccuacggcaccggcuccuggcccgacggcgccgaccucaaccucaugcccaucuga

SEQ ID NO: 115307 - RNA, 1410 nt, Artificial Sequence
  derived and/or modified CDS sequence (opt2) from neuraminidase__InfluenzaA__ADK99055
augaaccccaaccagaagaucaucaccaucggcuccgucucccucaccaucuccaccaucugcuucuucaugcagaucgccauccucaucaccaccgucacccuccacuucaagcaguacgaguucaacuccccccccaacaaccaggucaugcucugcgagcccaccaucaucgagcgcaacaucaccgagaucgucuaccucaccaacaccaccaucgagaaggagaucugccccaagcucgccgaguaccgcaacugguccaagccccagugcgacaucaccggcuucgcccccuucuccaaggacaacuccauccgccucuccgccggcggcgacaucugggucacccgcgagcccuacgucuccugcgaccccgacaagugcuaccaguucgcccucggccagggcaccacccucaacaacguccacuccaacaacaccguccgcgaccgcacccccuaccgcacccuccucaugaacgagcucggcguccccuuccaccucggcaccaagcaggucugcaucgccugguccuccuccuccugccacgacggcaaggccuggcuccacgucugcaucaccggcgacgacaagaacgccaccgccuccuucaucuacaacggccgccucgucgacuccgucgucuccugguccaaggagauccuccgcacccaggaguccgagugcgucugcaucaacggcaccugcaccgucgucaugaccgacggcuccgccuccggcaaggccgacaccaagauccucuucaucgaggagggcaagaucguccacaccuccacccucuccggcuccgcccagcacgucgaggagugcuccugcuacccccgcuaccccggcguccgcugcgucugccgcgacaacuggaagggcuccaaccgccccaucgucgacaucaacaugaaggaccacuccaucgucuccuccuacgucugcuccggccucgucggcgacaccccccgcaagaacgacuccuccuccuccucccacugccucgaccccaacaacgaggagggcggccacggcgucaagggcugggccuucgacgacggcaacgacgucuggaugggccgcaccaucuccgagaagucccgccucggcuacgagaccuucaaggucaucgagggcugguccaaccccaaguccaagcuccagaucaaccgccaggucaucgucgaccgcggcaaccgcuccggcuacuccggcaucuucuccgucgagggcaaguccugcaucaaccgcugcuucuacgucgagcucauccgcggccgcaaggaggagaccgagguccucuggaccuccaacuccaucgucgucuucugcggcaccuccggcaccuacggcaccggcuccuggcccgacggcgccgacaucaaccucaugcccaucuga

SEQ ID NO: 115308 - RNA, 1410 nt, Artificial Sequence
  derived and/or modified CDS sequence (opt2) from neuraminidase__InfluenzaA__ADK99066
augaaccccaaccagaagaucaucaccaucggcuccgucucccucaccaucuccaccaucugcuucuucaugcagaucgccauccucaucaccaccgucacccuccacuucaagcagugcgaguucaacuccccccccaacaaccaggucaugcucugcgagcccaccaucaucgagcgcaacaucaccgagaucgucuaccucaccaacaccaccaucgagaagaagaucugccccaagcucgccgaguaccgcaacugguccaagccccagugcgacaucaccggcuucgcccccuucuccaaggacaacuccauccgccucuccgccggcggcgacaucugggucacccgcgagcccuacgucuccugcgaccccgacaagugcuaccaguucgcccucggccagggcaccacccucaacaacguccacuccaacaacaccguccgcgaccgcacccccuaccgcacccuccucaugaacgagcucggcguccccuuccaccucggcaccaagcaggucugcaucgccugguccuccuccuccugccacgacggcaaggccuggcuccacgucugcaucaccggcgacgacaagaacgccaccgccuccuucaucuacaacggccgccucgucgacuccgucgucuccugguccaaggagauccuccgcacccaggaguccgagugcgucugcaucaacggcaccugcaccgucgucaugaccgacggcuccgccuccggcaaggccgacaccaagauccucuucaucgaggagggcaagaucguccacaccuccacccucuccggcuccgcccagcacgucgaggagugcuccugcuacccccgcuaccccggcguccgcugcgucugccgcgacaacuggaagggcuccaaccgccccaucgucgacaucaacaucaaggaccacuccaucgucuccuccuaccucugcuccggccucgucggcgacaccccccgcaagaacgacuccuccuccuccucccacugccucgaccccaacaacgaggagggcggccacggcgucaagggcugggccuucgacgacggcaacgacgucuggaugggccgcaccaucuccgagaagucccgccucggcuacgagaccuucaaggucaucgagggcugguccaaccccaaguccaagcuccagaucaaccgccaggucaucgucgaccgcggcaaccgcuccggcuacuccggcaucuucuccgucgagggcaaguccugcaucaaccgcugcuucuacgucgagcucauccgcggccgcaaggaggagaccgagguccucuggaccuccaacuccaucgucgucuucugcggcaccuccggcaccuacggcaccggcuccuggcccgacggcgccaacaucaaccucaugcccaucuga

SEQ ID NO: 115309 - RNA, 1410 nt, Artificial Sequence
  derived and/or modified CDS sequence (opt2) from neuraminidase__InfluenzaA__ADK99077
augaaccccaaccagaagaucaucaccaucggcuccgucucccucaccaucuccaccaucugcuucuucaugcagaucgccauccucaucaccaccgucacccuccacuucaagcaguacgaguucaacuccccccccaacaaccaggucaugcucugcgagcccaccaucaucgagcgcaacaucaccgagaucgucuaccucaccaacaccaccaucgagaaggagaucugccccaagcucgccgaguaccgcaacugguccaagccccagugcgacaucaccggcuucgcccccuucuccaaggacaacuccauccgccucuccgccggcggcgacaucugggucacccgcgagcccuacgucuccugcgaccccgacaagugcuaccaguucgcccucggccagggcaccacccucaacaacguccacuccaacaacaccguccgcgaccgcacccccuaccgcacccuccucaugaacgagcucggcguccccuuccaccucggcaccaagcaggucugcaucgccugguccuccuccuccugccacgacggcaaggccuggcuccacgucugcaucaccggcgacgacaagaacgccaccgccuccuucaucuacaacggccgccucgucgacuccgucgucuccugguccaaggacauccuccgcacccaggaguccgagugcgucugcaucaacggcaccugcaccgucgucaugaccgacggcuccgccuccggcaaggccgacaccaagauccucuucaucgaggagggcaaggucguccacaccuccacccucuccggcuccgcccagcacgucgaggagugcuccugcuacccccgcuaccccggcguccgcugcgucugccgcgacaacuggaagggcuccaaccgccccaucgucgacaucaacaucaaggaccacuccaucgucuccuccuacgucugcuccggccucgucggcgacaccccccgcaagaacgacuccuccuccuccucccacugccucgaccccaacaacgaggagggcggccacggcgucaagggcugggccuucgacgacggcaacgacgucuggaugggccgcaccaucuccgagaagucccgccucggcuacgagaccuucaaggucaucgagggcugguccaaccacaaguccaagcuccagaucaaccgccaggucaucgucgaccgcggcaaccgcuccggcuacuccggcaucuucuccgucgagggcaaguccugcaucaaccgcugcuucuacgucgagcucauccgcggccgcaaggaggagaccgagguccucuggaccuccaacuccaucgucgucuucugcggcaccuccggcaccuacggcaccggcuccuggcccgacggcgccgaccucaaccucaugcccaucuga

SEQ ID NO: 115310 - RNA, 1410 nt, Artificial Sequence; identical to SEQ ID NO: 115074
  derived and/or modified CDS sequence (opt2) from neuraminidase__InfluenzaA__ADK99088

SEQ ID NO: 115311 - RNA, 1410 nt, Artificial Sequence; identical to SEQ ID NO: 114520
  derived and/or modified CDS sequence (opt2) from neuraminidase__InfluenzaA__ADK99099

SEQ ID NO: 115312 - RNA, 1410 nt, Artificial Sequence
  derived and/or modified CDS sequence (opt2) from neuraminidase__InfluenzaA__ADK99110
augaaccccaaccagaagaucaucaccaucggcuccgucucccucaccaucuccaccaucugcuucuucaugcagaucgccauccucgucaccaccgucacccuccacuucaagcaguacgaguucaaccccccccccaacaaccaggucaugcucugcgagcccaccaucaucgagcgcaacaucaccgagaucgucuaccucaccaacaccaccaucgagaaggagaucugccccaagcucgccgaguaccgcaacugguccaagccccagugcgacaucaccggcuucgcccccuucuccaaggacaacuccauccgccucuccgccggcggcgacaucugggucacccgcgagcccuacgucuccugcgaccccgacaagugcuaccaguucgcccucggccagggcaccacccucaacaacguccacuccaacaacaccguccgcgaccgcacccccuaccgcacccuccucaugaacgagcucggcguccccuuccaccucggcaccaagcaggucugcaucgccugguccuccuccuccugccacgacggcaaggccuggcuccacgucugcaucaccggcgacgacaagaacgccaccgccuccuucaucuacaacggccgccucgucgacuccgucgucuccugguccaaggacauccuccgcacccaggaguccgagugcgucugcaucaacggcaccugcaccgucgucaugaccgacggcuccgccuccggcaaggccgacaccaagauccucuucaucgaggagggcaagaucguccacaccuccacccucuccggcuccgcccagcacgucgaggagugcuccugcuacccccgcuaccccggcguccgcugcgucugccgcgacaacuggaagggcuccaaccgccccaucgucgacaucaacaucaaggaccacuccaucgucuccuccuacgucugcuccggccucgucggcgacaccccccgcaagaacgacuccuccuccuccucccacugccucgaccccaacaacgaggagggcggccacggcgucaagggcugggccuucgacgacggcaacgacgucuggaugggccgcaccaucuccgagaagucccgccucggcuacgagaccuucaaggucaucgagggcugguccaaccccaaguccaagcuccagaucaaccgccaggucaucgucgaccgcggcaaccgcuccggcuacuccggcaucuucuccgucgagggcaaguccugcaucaaccgcugcuucuacgucgagcucauccgcggccgcaaggaggagaccgagguccucuggaccuccaacuccaucgucgucuucugcggcaccuccggcaccuacggcaccggcuccuggcccgacggcgccaacaucaaccucaugcccaucuga

SEQ ID NO: 115313 - RNA, 1410 nt, Artificial Sequence; identical to SEQ ID NO: 115159
  derived and/or modified CDS sequence (opt2) from neuraminidase__InfluenzaA__ADK99121

SEQ ID NO: 115314 - RNA, 1410 nt, Artificial Sequence
  derived and/or modified CDS sequence (opt2) from neuraminidase__InfluenzaA__ADK99132
augaaccccaaccagaagaucaucaccaucggcuccgucucccucaccaucuccaccaucugcuucuucaugcagaucgccauccucaucaccaccgucacccuccacuucaagcaguacgaguucaacuccccccccaacaaccaggucaugcucugcgagcccaccaucaucgagcgcaacaucaccgagaucgucuaccucaccaacaccaccgucgagaaggagaucugccccaagcucgccgaguaccgcaacugguccaagccccagugcgacaucaccggcuucgcccccuucuccaaggacaacuccauccgccucuccgccggcggcgacaucugggucacccgcgagcccuacgucuccugcgaccccgacaagugcuaccaguucgcccucggccagggcaccacccucaacaacguccacuccaacaacaccguccgcgaccgcacccccuaccgcacccuccucaugaacgagcucggcguccccuuccaccucggcaccaagcaggucugcaucgccugguccuccuccuccugccacgacggcaaggccuggcuccacgucugcaucaccggcgacgacaagaacgccaccgccuccuucaucuacaacggccgccucgucgacuccgucgucuccugguccaaggagauccuccgcacccaggaguccgagugcgucugcaucaacggcaccugcaccgucgucaugaccgacggcuccgccuccggcaaggccgacaccaagauccucuucaucgaggagggcaagaucguccacaccuccacccucuccggcuccgcccagcacgucgaggagugcuccugcuacccccgcuaccccggcguccgcugcgucugccgcgacaacuggaagggcuccaaccgccccaucgucgacaucaacaucaaggaccacuccaucgucuccuccuaccucugcuccggccucgucggcgacaccccccgcaagaacgacuccuccuccuccucccacugccucgaccccaacaacgaggagggcggccacggcgucaagggcugggccuucgacgacggcaacgacgucuggaugggccgcaccaucuccgagaagucccgccucggcuacgagaccuucaaggucaucgagggcugguccaaccccaaguccaagcuccagaucaaccgccaggucaucgucgaccgcggcaaccgcuccggcuacuccggcaucuucuccgucgagggcaaguccugcaucaaccgcugcuucuacgucgagcucauccgcggccgcaaggaggagaccgagguccucuggaccuccaacuccaucgucgucuucugcggcaccuccggcaccuacggcaccggcuccuggcccgacggcgccgacaucaaccucaugcccaucuga

SEQ ID NO: 115315 - RNA, 1410 nt, Artificial Sequence; identical to SEQ ID NO: 115159
  derived and/or modified CDS sequence (opt2) from neuraminidase__InfluenzaA__ADK99143

SEQ ID NO: 115316 - RNA, 1410 nt, Artificial Sequence; identical to SEQ ID NO: 112635
  derived and/or modified CDS sequence (opt2) from neuraminidase__InfluenzaA__ADK99154

SEQ ID NO: 115317 - RNA, 1410 nt, Artificial Sequence
  derived and/or modified CDS sequence (opt2) from neuraminidase__InfluenzaA__ADK99176
augaaccccaaccagaagaucaucaccaucggcuccgucucccucaccaucuccaccaucugcuucuucaugcagaucgccauccucgucaccaccgucacccuccacuucaagcaguacgaguucaacuccccccccaacaaccaggucaugcucugcgagcccaccaucaucgagcgcaacaucaccgagaucgucuaccucaccaacaccaccaucgagaaggagaucugccucaagcucgccgaguaccgcaacugguccaagccccagugcgacaucaccggcuucgcccccuucuccaaggacaacuccauccgccucuccgccggcggcgacaucugggucacccgcgagcccuacgucuccugcgaccccgacaagugcuaccaguucgcccucggccagggcaccacccucaacaacguccacuccaacaacaccguccgcgaccgcacccccuaccgcacccuccucaugaacgagcucggcguccccuuccaccucggcaccaagcaggucugcaucgccugguccuccuccuccugccacgacggcaaggccuggcuccacgucugcaucaccggcgacgacaagaacgccaccgccuccuucaucuacaacggccgccucgucgacuccgucgucuccugguccaaggacauccuccgcacccaggaguccgagugcgucugcaucaacggcaccugcaccgucgucaugaccgacggcuccgccuccggcaaggccgacaccaagauccucuucaucgaggagggcaagaucguccacaccuccacccucuccggcuccgcccagcacgucgaggagugcuccugcuacccccgcuaccccggcguccgcugcgucugccgcgacaacuggaagggcuccaaccgccccaucgucgacaucaacaucaaggaccacuccaucgucuccuccuacgucugcuccggccucgucggcgacaccccccgcaagaacgacuccuccuccuccucccacugccucgaccccaacaacgaggagggcggccacggcgucaagggcugggccuucgacgacggcaacgacgucuggaugggccgcaccaucuccgagaagucccgccucggcuacgagaccuucaaggucaucgagggcugguccaaccccaaguccaagcuccagaucaaccgccaggucaucgucgaccgcggcaaccgcuccggcuacuccggcaucuucuccgucgagggcaaguccugcaucaaccgcugcuucuacgucgagcucauccgcggccgcaaggaggagaccgagguccucuggaccuccaacuccaucgucgucuucugcggcaccuccggcaccuacggcaccggcuccuggcccgacggcgccaacaucaaccucaugcccaucuga

SEQ ID NO: 115318 - RNA, 1410 nt, Artificial Sequence; identical to SEQ ID NO: 115309
  derived and/or modified CDS sequence (opt2) from neuraminidase__InfluenzaA__ADK99187

SEQ ID NO: 115319 - RNA, 1410 nt, Artificial Sequence; identical to SEQ ID NO: 114520
  derived and/or modified CDS sequence (opt2) from neuraminidase__InfluenzaA__ADK99198

SEQ ID NO: 115320 - RNA, 1410 nt, Artificial Sequence; identical to SEQ ID NO: 115159
  derived and/or modified CDS sequence (opt2) from neuraminidase__InfluenzaA__ADK99220

SEQ ID NO: 115321 - RNA, 1410 nt, Artificial Sequence
  derived and/or modified CDS sequence (opt2) from neuraminidase__InfluenzaA__ADK99231
augaaccccaaccagaagaucaucaccaucggcuccgucucccucaccaucuccaccaucugcuucuucaugcagaucgccauccucaucaccaccgucacccuccacuucaagcaguacgaguucaacuccccccccaacaaccaggucaugcucugcgagcccaccaucaucgagcgcaacaucaccgagaucgucuaccucaccaacaccaccaucgagaaggagaucugccccaagcucgccgaguaccgcaacugguccaagccccagugcgacaucaccggcuucgcccccuucuccaaggacaacuccauccgccucuccgccggcggcgacaucugggucacccgcgagcccuacgucuccugcgaccccgacaacugcuaccaguucgcccucggccagggcaccacccucaacaacguccacuccaacaacaccguccgcgaccgcacccccuaccgcacccuccucaugaacgagcucggcguccccuuccaccucggcaccaagcaggucugcaucgccugguccuccuccuccugccacgacggcaaggccuggcuccacgucugcaucaccggcgacgacaagaacgccaccgccuccuucaucuacaacggccgccucgucgacuccgucgucuccugguccaaggagauccuccgcacccaggaguccgagugcgucugcaucaacggcaccugcaccgucgucaugaccgacggcuccgccuccggcaaggccgacaccaagauccucuucaucgaggagggcaagaucguccacaccuccacccucuccggcuccgcccagcacgucgaggagugcuccugcuacccccgcuaccccggcguccgcugcgucugccgcgacaacuggaagggcuccaaccgccccaucgucgacaucaacaucaaggaccacuccaucgucuccuccuaccucugcuccggccucgucggcgacaccccccgcaagaacgacuccuccuccuccucccacugccucgaccccaacaacgaggagggcggccacggcgucaagggcugggccuucgacgacggcaacgacgucuggaugggccgcaccaucuccgagaagucccgccucggcuacgagaccuucaaggucaucgagggcugguccaaccccaaguccaagcuccagaucaaccgccaggucaucgucgaccgcggcaaccgcuccggcuacuccggcaucuucuccgucgagggcaaguccugcaucaaccgcugcuucuacgucgagcucauccgcggccgcaaggaggagaccgagguccucuggaccuccaacuccaucgucgucuucugcggcaccuccggcaccuacggcaccggcuccuggcccgacggcgccgacaucaaccucaugcccaucuga

SEQ ID NO: 115322 - RNA, 1410 nt, Artificial Sequence
  derived and/or modified CDS sequence (opt2) from neuraminidase__InfluenzaA__ADK99242
augaaccccaaccagaagaucaucaccaucggcuccgucucccucaccaucuccaccaucugcuucuucaugcagaucgccauccucaucaccaccgucacccuccacuucaagcaguacgaguucaacuccccccccaacaaccaggucaugcucugcgagcccaccaucaucgagcgcaacaucaccgagaucgucuaccucaccaacaccaccaucgagaaggagaucugccccaagcucgccgaguaccgcaacugguccaagccccagugcgacaucaccggcuucgcccccuucuccaaggacaacuccauccgccucuccgccggcggcgacaucugggucacccgcgagcccuacgucuccugcgaccccgacaagugcuaccaguucgcccucggccagggcaccacccucaacaacguccacuccaacaacaccguccgcgaccgcacccccuaccgcacccuccucaugaacgagcucggcguccccuuccaccucggcaccaagcaggucugcaucgccugguccuccuccuccugccacgacggcaaggccuggcuccacgucugcaucaccggcgacgacaagaacgccaccgccuccuucaucuacaacggccgccucgucgacuccgucgucuccugguccaaggacauccuccgcacccaggaguccgagugcgucugcaucaacggcaccugcaccgucgucaugaccgacggcuccgccuccggcaaggccgacaccaagauccucuucaucgaggagggcaagaucguccacaccuccacccucuccggcuccgcccagcacgucgaggagugcuccugcuacccccgcuaccccggcguccgcugcgucugccgcgacaacuggaagggcuccaaccgccccaucgucgacaucaacaucaaggaccacuccaucgucuccuccuacgucugcuccggccucgucggcgacaccccccgcaagaacgacuccuccuccuccucccacugccucgaccccaacaacgaggagggcggccacggcgucaagggcugggccuucgacgacggcaacgacgucuggaugggccgcaccaucuccgagaagucccgccucggcuacgagaccuucaaggucaucgagggcugguccaaccccaaguccaagcuccagaucaaccgccaggucaucgucgaccgcggcaaccgcuccggcuacuccggcaucuucuccgucgagggcaaguccugcaucaaccgcugcuucuacgucgagcucauccgcggccgcaaggaggagaccgagguccucuggaccuccaacuccaucaucgucuucugcggcaccuccggcaccuacggcaccggcuccuggcccgacggcgccgacaucaaccucaugcccaucuga

SEQ ID NO: 115323 - RNA, 1410 nt, Artificial Sequence
  derived and/or modified CDS sequence (opt2) from neuraminidase__InfluenzaA__ADK99253
augaaccccaaccagaagaucaucaccaucggcuccgucucccucaccaucuccaccaucugcuucuucaugcagaucgccauccucaucaccaccgucacccuccacuucaagcaguacgaguucaacuccccccccaacaaccaggucaugcucugcgagcccaccaucaucgagcgcaacaucaccgagaucgucuaccucaccaacaccaccaucgagaaggagaucugccccaagcucgccgaguaccgcaacugguccaagccccagugcgacaucaccggcuucgcccccuucuccaaggacaacuccauccgccucuccgccggcggcgacaucugggucacccgcgagcccuacgucuccugcgaccccgacaagugcuaccaguucgcccucggccagggcaccacccucaacaacguccacuccaacaacaccguccgcgaccgcacccccuaccgcacccuccucaugaacgagcucggcguccccuuccaccucggcaccaagcaggucugcaucgccugguccuccuccuccugccacgacggcaaggccuggcuccacgucugcaucaccggcgacgacaagaacgccaccgccuccuucaucuacaacggccgccucgucgacuccgucgucuccugguccaaggagauccuccgcacccaggaguccgagugcgucugcaucaacggcaccugcaccgucgucaugaccgacggcuccgccuccggcaaggccgacaccaagauccucuucaucgaggagggcaagaucguccacaccuccacccucuccggcuccgcccagcacgucgaggagugcuccugcuacccccgcuaccccggcguccgcugcgucugccgcgacaacuggaagggcuccaaccgccccaucgucgacaucaacaucaaggaccacuccaucgucuccuccuacgucugcuccggccucgucggcgacaccccccgcaagaacgacuccuccuccuccucccacugccucgaccccaacaacgaggagggcggccacggcgucaagggcugggccuucgacgacggcaacgacgucuggaugggccgcaccaucuccgagaagucccgccucggcuacgagaccuucaaggucaucgagggcugguccaaccacaaguccaagcuccagaucaaccgccaggucaucgucgaccgcggccaccgcuccggcuacuccggcaucuucuccgucgagggcaaguccugcaucaaccgcugcuucuacgucgagcucauccgcggccgcaaggaggagaccgagguccucuggaccuccaacuccaucgucgucuucugcggcaccuccggcaccuacggcaccggcuccuggcccgacggcgccgaccucacccucaugcccaucuga

SEQ ID NO: 115324 - RNA, 1410 nt, Artificial Sequence
  derived and/or modified CDS sequence (opt2) from neuraminidase__InfluenzaA__ADK99264
augaaccccaaccagaagaucaucaccaucggcuccgucucccucaccaucuccaccaucugcuucuucaugcagaucgccauccucaucaccaccgucacccuccacuucaagcaguacgaguucaacuccccccccaacaaccaggucaugcucugcgagcccaccaucaucgagcgcaacaucaccgagaucgucuaccucaccaacaccaccaucgagaaggagaucugccccaagcucgccgaguaccgcaacugguccaagccccagugcgacaucaccggcuucgcccccuucuccaaggacaacuccauccgccucuccgccggcggcgacaucugggucacccgcgagcccuacgucuccugcgaccccgacaagugcuaccaguucgcccucggccagggcaccacccucaacaacguccacuccaacaacaccguccgcgaccgcacccccuaccgcacccuccucaugaacgagcucggcguccccuuccaccucggcaccaagcaggucugcaucgccugguccuccuccuccugccacgacggcaaggccuggcuccacgucugcaucaccggcgacgacaagaacgccaccgccuccuucaucuacaacggccgccucgucgacuccgucgucuccugguccaaggagauccuccgcacccaggaguccgagugcgucugcaucaacggcaccugcaccgucgucaugaccgacggcuccgccuccggcaaggccgacaccaagauccucuucaucgaggagggcaagaucguccacaccuccacccucuccggcuccgcccagcacgucgaggagugcuccugcuacccccgcuaccccggcguccgcugcgucugccgcgacaacuggaagggcuccaaccgccccaucgucgacaucaacaucaaggaccacuccaucgucuccuccuaccucugcuccggccucgucggcgacaccccccgcaagaacgacuccuccuccuccucccacugccucgaccccaacaacgaggagggcggccacggcgucaagggcugggccuucgacgacggcaacgacgucuggaugggccgcaccaucuccgagaagucccgccucggcuacgagaccuucaaggucaucgagggcugguccaaccccaaguccaagcuccacaucaaccgccaggucaucgucgaccgcggcaaccgcuccggcuacuccggcaucuucuccgucgagggcaaguccugcaucaaccgcugcuucuacgucgagcucauccgcggccgcaaggaggagaccgagguccucuggaccuccaacuccaucgucgucuucugcggcaccuccggcaccuacggcaccggcuccuggcccgacggcgccgacaucaaccucaugcccaucuga

SEQ ID NO: 115325 - RNA, 1410 nt, Artificial Sequence
  derived and/or modified CDS sequence (opt2) from neuraminidase__InfluenzaA__ADK99275
augaaccccaaccagaagaucaucaccaucggcuccgucucccucaccaucuccaccaucugcuucuucaugcagaucgccguccucaucaccaccgucacccuccacuucaagcaguacgaguucaacuccccccccaacaaccaggucaugcucugcgagcccaccaucaucgagcgcaacaucaccgagaucgucuaccucaccaacaccaccaucgagaaggagaucugccccaagcucgccggcuaccgcaacugguccaagccccagugcgacaucaccggcuucgcccccuucuccaaggacaacuccauccgccucuccgccggcggcgacaucugggucacccgcgagcccuacgucuccugcgaccccgacaagugcuaccaguucgcccucggccagggcaccacccucaacaacguccacuccaacgacaccguccgcgaccgcacccccuaccgcacccuccucaugaacgagcucggcguccccuuccaccucggcaccaagcaggucugcaucgccugguccuccuccuccugccacgacggcaaggccuggcuccacgucugcaucaccggcgacgacaagaacgccaccgccuccuucaucuacaacggccgccucgucgacuccgucgucuccugguccaaggagauccuccgcacccaggaguccgagugcgucugcaucaacggcaccugcaccgucgucaugaccgacggcuccgccuccggcaaggccgacaccaagauccucuucaucgaggagggcaagaucguccacaccuccacccucuccggcuccgcccagcacgucgaggagugcuccugcuacccccgcuaccccggcguccgcugcgucugccgcgacaacuggaagggcuccaaccgccccaucgucgacaucaacaucaaggaccacuccaucgucuccuccuacgucugcuccggccucgucggcgacaccccccgcaagaacgacuccuccuccuccucccacugccucgaccccaacaacgaggagggcggccacggcgucaagggcugggccuucgacgacggcaacgacgucuggaugggccgcaccaucaacgagaccucccgccucggcuacgagaccuucaaggucaucgagggcugguccaaccccaaguccaagcuccagaucaaccgccaggucaucgucgaccgcggcaaccgcuccggcuacuccggcaucuucuccgucgagggcaaguccugcaucaaccgcugcuucuacgucgagcucauccgcggccgcaaggaggagaccgagguccucuggaccuccaacuccaucgucgucuucugcggcaccuccggcaccuacggcaccggcuccuggcccgacggcgccgaccucaaccucaugcccaucuga

SEQ ID NO: 115326 - RNA, 1410 nt, Artificial Sequence
  derived and/or modified CDS sequence (opt2) from neuraminidase__InfluenzaA__ADK99286
augaaccccaaccagaagaucaucaccaucggcuccgucucccucaccaucuccaccaucugcuucuucaugcagaucgccauccucaucaccaccgucacccuccacuucaagcaguacgaguucaaccccccccccaacaaccaggucaccccccgcgagcccaccaucaucgagcgcaacaucaccgagaucgucuaccucaccaacaccaccaucgagaaggagaucugccccaagcucgccgaguaccgcaacugguccaagccccagugcgacaucaccggcuucgcccccuucuccaaggacaacuccauccgccucuccgccggcggcgacaucugggucacccgcgagcccuacgucuccugcgaccccgacaagugcuaccaguucgcccucggccagggcaccacccucaacaacauccacuccaacaacaccguccgcgaccgcacccccuaccgcacccuccucaugaacgagcucggcguccccuuccaccucggcaccaagcaggucugcaucgccugguccuccuccuccugccacgacggcaaggccuggcuccacgucugcaucaccggcgacgacaagaacgccaccgccuccuucaucuacaacggccgccucgucgacuccgucgucuccugguccaaggagauccuccgcacccaggaguccgagugcgucugcaucaacggcaccugcaccgucgucaugaccgacggcuccgccuccggcaaggccgacaccaagauccucuucaucgaggagggcaagaucguccacaccuccacccucuccggcuccgcccagcacgucgaggagugcuccugcuacccccgcuaccccggcguccgcugcgucugccgcgacaacuggaagggcuccaaccgccccaucgucgacaucaacaucaaggaccacuccaucgucuccuccuacgucugcuccggccucgucggcgacaccccccgcaagaacgacuccuccuccuccucccacugccucgaccccaacaacgaggagggcggccacggcgucaagggcugggccuucgacgacggcaacgacgucuggaugggccgcaccaucuccgagaagucccgccucggcuacgagaccuucaaggucaucgagggcugguccaaccccaaguccaagcuccagaucaaccgccaggucaucgucgaccgcggcaaccgcuccggcuacuccggcaucuucuccgucgagggcaaguccugcaucaaccgcugcuucuacgucgagcucauccgcggccgcaaggaggagaccgagguccucuggaccuccaacuccaucgucgucuucugcggcaccuccggcaccuacggcaccggcuccuggcccgacggcgccgacaucaaccucaugcccaucuga

SEQ ID NO: 115327 - RNA, 1410 nt, Artificial Sequence; identical to SEQ ID NO: 113628
  derived and/or modified CDS sequence (opt2) from neuraminidase__InfluenzaA__ADK99297

SEQ ID NO: 115328 - RNA, 1410 nt, Artificial Sequence
  derived and/or modified CDS sequence (opt2) from neuraminidase__InfluenzaA__ADK99308
augaaccccaaccagaagaucaucaccaucggcuccgucucccucaccaucuccaccaucugcuucuucaugcagaucgccauccucgucaccaccgucacccuccacuucaagcaguacgaguucaacuccccccccaacaaccaggucaugcucugcgagcccaccaucaucgagcgcaacaucaccgagaucgucuaccucaccaacaccaccaucgagaaggagaucugccccaagcucgccgaguaccgcaacugguccaagccccagugcgacaucaccggcuucgcccccuucuccaaggacaacuccauccgccucuccgccggcggcgacaucugggucacccgcgagcccuacgucuccugcgaccccgacaagugcuaccaguucgcccucggccagggcaccacccucaacaacguccacuccaacaacaccguccgcgaccgcacccccuaccgcacccuccucaugaacgagcucggcauccccuuccaccucggcaccaagcaggucugcaucgccugguccuccuccuccugccacgacggcaaggccuggcuccacgucugcaucaccggcgacgacaagaacgccaccgccuccuucaucuacaacggccgccucgucgacuccgucgucuccugguccaaggacauccuccgcacccaggaguccgagugcgucugcaucaacggcaccugcaccgucgucaugaccgacggcuccgccuccggcaaggccgacaccaagauccucuucaucgaggagggcaagaucguccacaccuccacccucuccggcuccgcccagcacgucgaggagugcuccugcuacccccgcuaccccggcguccgcugcgucugccgcgacaacuggaagggcuccaaccgccccaucgucgacaucaacaucaaggaccacuccaucgucuccuccuacgucugcuccggccucgucggcgacaccccccgcaagaacgacuccuccuccuccucccacugccucgaccccaacaacgaggagggcggccacggcgucaagggcugggccuucgacgacggcaacgacgucuggaugggccgcaccaucuccgagaagucccgccucggcuacgagaccuucaaggucaucgagggcugguccaaccccaaguccaagcuccagaucaaccgccaggucaucgucgaccgcggcaaccgcuccggcuacuccggcaucuucuccgucgagggcaaguccugcaucaaccgcugcuucuacgucgagcucauccgcggccgcaaggaggagaccgagguccucuggaccuccaacuccaucgucgucuucugcggcaccuccggcaccuacggcaccggcuccuggcccgacggcgccaacaucaaccucaugcccaucuga

SEQ ID NO: 115329 - RNA, 1413 nt, Artificial Sequence; identical to SEQ ID NO: 113497
  derived and/or modified CDS sequence (opt2) from neuraminidase__InfluenzaA__ADL14590

SEQ ID NO: 115330 - RNA, 1410 nt, Artificial Sequence; identical to SEQ ID NO: 114520
  derived and/or modified CDS sequence (opt2) from neuraminidase__InfluenzaA__ADL27992

SEQ ID NO: 115331 - RNA, 1410 nt, Artificial Sequence; identical to SEQ ID NO: 115159
  derived and/or modified CDS sequence (opt2) from neuraminidase__InfluenzaA__ADL28003

SEQ ID NO: 115332 - RNA, 1410 nt, Artificial Sequence; identical to SEQ ID NO: 115304
  derived and/or modified CDS sequence (opt2) from neuraminidase__InfluenzaA__ADL28014

SEQ ID NO: 115333 - RNA, 1410 nt, Artificial Sequence
  derived and/or modified CDS sequence (opt2) from neuraminidase__InfluenzaA__ADL28025
augaaccccaaccagaagaucaucaccaucggcuccgucucccucaccaucuccaccaucugcuucuucaugcagaucgccauccucaucaccaccgucacccuccacuucaagcaguacgaguucaacuccccccccaacaaccaggucaugcucugcgagcccaccaucaucgagcgcaacaucaccgagaucgucuaccucaccaacaccaccaucgagaagaagaucugccccaagcucgccgaguaccgcaacugguccaagccccagugcgacaucaccggcuucgcccccuucuccaaggacaacuccauccgccucuccgccggcggcgacaucugggucacccgcgagcccuacgucuccugcgaccccgacaagugcuaccaguucgcccucggccagggcaccacccucaacaacguccacuccaacaacaccguccgcgaccgcacccccuaccgcacccuccucaugaacgagcucggcguccccuuccaccucggcaccaagcaggucugcaucgccugguccuccuccuccugccacgacggcaaggccuggcuccacgucugcaucaccggcgacgacaagaacgccaccgccuccuucaucuacaacggccgccucgucgacuccgucgucuccugguccaaggagauccuccgcacccaggaguccgagugcgucugcaucaacggcaccugcaccgucgucaugaccgacggcuccgccuccggcaaggccgacaccaagauccucuucaucgaggagggcaagaucguccacaccuccacccucuccggcuccgcccagcacgucgaggagugcuccugcuacccccgcuaccccggcguccgcugcgucugccgcgacaacuggaagggcuccaaccgccccaucgucgacaucaacaucaaggaccacuccaucgucuccuccuaccucugcuccggccucgucggcgacaccccccgcaagaacgacuccuccuccuccucccacugccucgaccccaacaacgaggagggcggccacggcgucaagggcugggccuucgacgacggcaacgacgucuggaugggccgcaccaucuccgagaagucccgccucggcuacgagaccuucaaggucaucgagggcugguccaaccccaaguccaagcuccagaucaaccgccaggucaucgucgaccgcggcaaccgcuccggcuacuccggcaucuucuccgucgagggcaaguccugcaucaaccgcugcuucuacgucgagcucauccgcggccgcaaggaggagaccgagguccucuggaccuccaacuccaucgucgucuucugcggcaccuccggcaccuacggcaccggcuccuggcccgacggcgccgacaucaaccucaugcccaucuga

SEQ ID NO: 115334 - RNA, 1410 nt, Artificial Sequence; identical to SEQ ID NO: 114520
  derived and/or modified CDS sequence (opt2) from neuraminidase__InfluenzaA__ADL28036

SEQ ID NO: 115335 - RNA, 1410 nt, Artificial Sequence; identical to SEQ ID NO: 112635
  derived and/or modified CDS sequence (opt2) from neuraminidase__InfluenzaA__ADL28047

SEQ ID NO: 115336 - RNA, 1410 nt, Artificial Sequence; identical to SEQ ID NO: 113941
  derived and/or modified CDS sequence (opt2) from neuraminidase__InfluenzaA__ADL28058

SEQ ID NO: 115337 - RNA, 1410 nt, Artificial Sequence; identical to SEQ ID NO: 115312
  derived and/or modified CDS sequence (opt2) from neuraminidase__InfluenzaA__ADL28069

SEQ ID NO: 115338 - RNA, 1410 nt, Artificial Sequence; identical to SEQ ID NO: 115159
  derived and/or modified CDS sequence (opt2) from neuraminidase__InfluenzaA__ADL28080

SEQ ID NO: 115339 - RNA, 1410 nt, Artificial Sequence; identical to SEQ ID NO: 114520
  derived and/or modified CDS sequence (opt2) from neuraminidase__InfluenzaA__ADL28091

SEQ ID NO: 115340 - RNA, 1410 nt, Artificial Sequence
  derived and/or modified CDS sequence (opt2) from neuraminidase__InfluenzaA__ADL28102
augaaccccaaccagaagaucaucaccaucggcuccgucucccucaccaucuccaccaucugcuucuucaugcagaucgccauccucaucaccaccgucacccuccacuucaagcaguacgaguucaacuccccccccaacaaccaggucaugcucugcgagcccaccaucaucgagcgcaacaucaccgagaucgucuaccucaccaacaccaccaucgagaaggagaucugccccaagcucgccgaguaccgcaacugguccaagccccagugcgacaucaccggcuucgcccccuucuccaaggacaacuccauccgccucuccgccggcggcgacaucugggucacccgcgagcccuacgucuccugcgaccccgacaagugcuaccaguucgcccucggccagggcaccacccucaacaacguccacuccaacaacaccguccgcgaccgcacccccuaccgcacccuccucaugaacgagcucggcguccccuuccaccucggcaccaagcaggucugcaucgccugguccuccuccuccugccacgacggcaaggccuggcuccacgucugcaucaccggcgacgacaagaacgccaccgccuccuucaucuacaacggccgccucgucgacuccgucgucuccugguccaaggacauccuccgcacccaggaguccgagugcgucugcaucaacggcaccugcaccgucgucaugaccgacggcuccgccuccggcaaggccgacaccaagauccucuucaucgaggagggcaagaucguccacaccuccacccucuccggcuccgcccagcacgucgaggagugcuccugcuacccccgcuaccccggcguccgcugcgucugccgcgacaacuggaagggcuccaaccgccccaucgucgacaucaacaucaaggaccacuccaucgucuccuccuacgucugcuccggccucgucggcgacaccccccgcaagaacgacuccuccuccuccucccacugccucgaccccaacaacgaggagggcggccacggcgucaagggcugggccuucgacgacggcaacgacgucuggaugggccgcaccaucuccgagaagucccgccucggcuacgagaccuucaaggucaucgagggcugguccaaccccaaguccaagcuccagaucaaccgccaggucaucgucgaccgcggcaaccgcuccggcuacuccggcaucuucuccgucgagggcaaguccugcaucaaccgcugcuucuacgucgagcucauccgcggccgcaaggaggagaccgagguccucuggaccuccaacuccaucgucgucuucugcggcaccuccggcaccuacggcaccggcuccuggcccgacggcgccgacaucaaccucaugcccaucuga

SEQ ID NO: 115341 - RNA, 1410 nt, Artificial Sequence; identical to SEQ ID NO: 112635
  derived and/or modified CDS sequence (opt2) from neuraminidase__InfluenzaA__ADL28113

SEQ ID NO: 115342 - RNA, 1410 nt, Artificial Sequence
  derived and/or modified CDS sequence (opt2) from neuraminidase__InfluenzaA__ADL28129
augaaccccaaccagaagaucaucaccaucggcuccgucucccucaccaucuccaccaucugcuucuucaugcagaucgccauccucgucaccaccgucacccuccacuucaagcaguacgaguucaacuccccccccaacaaccaggucaugcucugcgagcccaccaucaucgagcgcaacaucaccgagaucgucuaccucaccaacaccaccaucgagaaggagaucugccccaagcucgccgaguaccgcaacugguccaagccccagugcgacaucaccggcuucgcccccuucuccaaggacaacuccauccgccucuccgccggcggcgacaucugggucacccgcgagcccuacgucuccugcgaccccgacaagugcuaccaguucgcccucggccagggcaccacccucaacaacguccacuccaacaacaccguccgcgaccgcacccccuaccgcacccuccucaugaacgagcucggcguccccuuccaccucggcaccaagcaggucugcaucgccugguccuccuccuccugccacgacggcaaggccuggcuccacgucugcaucaccggcgacgacaagaacgccaccgccuccuucaucuacaacggccgccucgucgacuccgucgucuccugguccaaggacauccuccgcacccaggaguccgagugcgucugcaucaacggcaccugcaccgucgucaugaccgacggcuccgccuccggcaaggccgacaccaagauccucuucaucgaggagggcaagaucguccacaccuccacccucuccggcuccgcccagcacgucgaggagugcuccugcuacccccgcuaccccggcguccgcugcgucugccgcgacaacuggaagggcuccaaccgccccaucgucgacaucaacaucaaggaccacuccaucgucuccuccuacgucugcuccggccucgucggcgacaccccccgcaagaacgacuccuccuccuccucccacugccucgaccccaacaacgaggagggcggccacggcgucaagggcugggccuucgacgacggcaacgacgucuggaugggccgcaccaucuccgagaagucccgccucggcuacgagaccuucaaggucaucgagggcugguccaaccccaaguccaagcuccagaucaaccgccaggucaucgucgaccgcggcaaccgcuccggcuacuccggcaucuucuccgucgagggcaaguccugcaucaaccgcugcuucuacgucgagcucauccgcggccgcaaggaggagaccgagauccucuggaccuccaacuccaucgucgucuucugcggcaccuccggcaccuacggcaccggcuccuggcccgacggcgccaacaucaaccucaugcccaucuga

SEQ ID NO: 115343 - RNA, 1410 nt, Artificial Sequence
  derived and/or modified CDS sequence (opt2) from neuraminidase__InfluenzaA__ADL28140
augaaccccaaccagaagaucaucaccaucggcuccgucucccucaccaucuccaccaucugcuucuucaugcagaucgccauccucaucaccaccgucacccuccacuucaagcaguacgaguucaacuccccccccaacaaccaggucaugcucugcgagcccaccaucaucgagcgcaacaucaccgagaucgucuaccucaccaacaccaccaucgagaaggagaucugccccaagcucgccgaguaccgcaacugguccaagccccagugcgacaucaccggcuucgcccccuucuccaaggacaacuccauccgccucuccgccggcggcgacaucugggucacccgcgagcccuacgucuccugcgaccccgacaagugcuaccaguucgcccucggccagggcaccacccucaacaacguccacuccaacaacaccguccgcgaccgcacccccuaccgcacccuccucaugaacgagcucggcguccccuuccaccucggcaccaagcaggucugcaucgccugguccuccuccuccugccacgacggcaaggccuggcuccacgucugcaucaccggcgacgacaagaacgccaccgccuccuucaucuacaacggcaagcucgucgacuccgucgucuccugguccaaggagauccuccgcacccaggaguccgagugcgucugcaucaacggcaccugcaccgucgucaugaccgacggcuccgccuccggcaaggccgacaccaagauccucuucaucgaggagggcaagaucguccacaccuccacccucuccggcuccgcccagcacgucgaggagugcuccugcuacccccgcuaccccggcguccgcugcgucugccgcgacaacuggaagggcuccaaccgccccaucgucgacaucaacaucaaggaccacuccaucgucuccuccuacgucugcuccggccucgucggcgacaccccccgcaagaacgacuccuccuccuccucccacugccucgaccccaacaacgaggagggcggccacggcgucaagggcugggccuucgacgacggcaacgacgucuggaugggccgcaccaucuccgagaagucccgccucggcuacgagaccuucaaggucaucgagggcugguccaaccccaaguccaagcuccagaucaaccgccaggucaucgucgaccgcggcaaccgcuccggcuacuccggcaucuucuccgucgagggcaaguccugcaucaaccgcugcuucuacgucgagcucauccgcggccgcaaggaggagaccgagguccucuggaccuccaacuccaucgucgucuucugcggcaccuccggcaccuacggcaccggcuccuggcccgacggcgccaacaucaaccucaugcccaucuga

SEQ ID NO: 115344 - RNA, 1410 nt, Artificial Sequence; identical to SEQ ID NO: 114520
  derived and/or modified CDS sequence (opt2) from neuraminidase__InfluenzaA__ADL28151

SEQ ID NO: 115345 - RNA, 1410 nt, Artificial Sequence; identical to SEQ ID NO: 113941
  derived and/or modified CDS sequence (opt2) from neuraminidase__InfluenzaA__ADL28162

SEQ ID NO: 115346 - RNA, 1410 nt, Artificial Sequence; identical to SEQ ID NO: 115159
  derived and/or modified CDS sequence (opt2) from neuraminidase__InfluenzaA__ADL28173

SEQ ID NO: 115347 - RNA, 1410 nt, Artificial Sequence; identical to SEQ ID NO: 114520
  derived and/or modified CDS sequence (opt2) from neuraminidase__InfluenzaA__ADL28184

SEQ ID NO: 115348 - RNA, 1410 nt, Artificial Sequence
  derived and/or modified CDS sequence (opt2) from neuraminidase__InfluenzaA__ADL28195
augaaccccaaccagaagaucaucaccaucggcuccgucucccucaccaucuccaccaucugcuucuucaugcagaucgccauccucaucaccaccgucacccuccacuucaagcaguacgaguucaacuccccccccaacaaccaggucaugcucugcgagcccaccaucaucgagcgcaacaucaccgagaucgucuaccucaccaacaccaccaucgagaaggagaucugccccaagcucgccgaguaccgcaacugguccaagccccagugcgacaucaccggcuucgcccccuucuccaaggacaacuccauccgccucuccgccggcggcgacaucugggucacccgcgagcccuacgucuccugcgaccccgacaagugcuaccaguucgcccucggccagggcaccacccucaacaacguccacuccaacaacaccguccgcgaccgcacccccuaccgcacccuccucaugaacgagcucggcguccccuuccaccucggcaccaagcaggucugcaucgccugguccuccuccuccugccacgacggcaaggccuggcuccacgucugcaucaccggcgacgacaagaacgccaccgccuccuucaucuacaacggccgccucgucgacuccgucgucuccugguccaaggagauccuccgcacccaggaguccgagugcgucugcgucaacggcaccugcaccgucgucaugaccgacggcuccgccuccggcaaggccgacaccaagauccucuucaucgaggagggcaagaucguccacaccuccacccucuccggcuccgcccagcacgucgaggagugcuccugcuacccccgcuaccccggcguccgcugcgucugccgcgacaacuggaagggcuccaaccgccccaucgucgacaucaacaucaaggaccacuccaucgucuccuccuacgucugcuccggccucgucggcgacaccccccgcaagaacgacuccuccuccuccucccacugccucgaccccaacaacgaggagggcggccacggcgucaagggcugggccuucgacgacggcaacgacgucuggaugggccgcaccaucuccgagaagucccgccucggcuacgagaccuucaaggucaucgagggcugguccaaccccaaguccaagcuccagaucaaccgccaggucaucgucgaccgcggcaaccgcuccggcuacuccggcaucuucuccgucgagggcaaguccugcaucaaccgcugcuucuacgucgagcucauccgcggccgcaaggaggagaccgagguccucuggaccuccaacuccaucgucgucuucugcggcaccuccggcaccuacggcaccggcuccuggcccgacggcgccgacaucaaccucaugcccaucuga

SEQ ID NO: 115349 - RNA, 1410 nt, Artificial Sequence; identical to SEQ ID NO: 115309
  derived and/or modified CDS sequence (opt2) from neuraminidase__InfluenzaA__ADL28206

SEQ ID NO: 115350 - RNA, 1410 nt, Artificial Sequence; identical to SEQ ID NO: 113628
  derived and/or modified CDS sequence (opt2) from neuraminidase__InfluenzaA__ADL28217

SEQ ID NO: 115351 - RNA, 1410 nt, Artificial Sequence; identical to SEQ ID NO: 114520
  derived and/or modified CDS sequence (opt2) from neuraminidase__InfluenzaA__ADL28228

SEQ ID NO: 115352 - RNA, 1410 nt, Artificial Sequence; identical to SEQ ID NO: 115159
  derived and/or modified CDS sequence (opt2) from neuraminidase__InfluenzaA__ADL28239

SEQ ID NO: 115353 - RNA, 1410 nt, Artificial Sequence; identical to SEQ ID NO: 113941
  derived and/or modified CDS sequence (opt2) from neuraminidase__InfluenzaA__ADL28250

SEQ ID NO: 115354 - RNA, 1410 nt, Artificial Sequence; identical to SEQ ID NO: 115159
  derived and/or modified CDS sequence (opt2) from neuraminidase__InfluenzaA__ADL28261

SEQ ID NO: 115355 - RNA, 1410 nt, Artificial Sequence; identical to SEQ ID NO: 114520
  derived and/or modified CDS sequence (opt2) from neuraminidase__InfluenzaA__ADL28373

SEQ ID NO: 115356 - RNA, 1410 nt, Artificial Sequence; identical to SEQ ID NO: 112639
  derived and/or modified CDS sequence (opt2) from neuraminidase__InfluenzaA__ADL28387

SEQ ID NO: 115357 - RNA, 1410 nt, Artificial Sequence
  derived and/or modified CDS sequence (opt2) from neuraminidase__InfluenzaA__ADL28391
augaaccccaaccagaagaucaucaccaucggcuccgucucccucaccaucuccaccaucugcuucuucaugcagaucgccauccucaucaccaccgucacccuccacuucaagcaguacgaguucaacuccucccccaacaaccaggucaugcucugcgagcccaccaucaucgagcgcaacaucaccgagaucgucuaccucaccaacaccaccaucgagaaggagaucugccccaagcucgccgaguaccgcaacugguccaagccccagugcgacaucaccggcuucgcccccuucuccaaggacaacuccauccgccucuccgccggcggcgacaucugggucacccgcguccccuacgucuccugcgaccccgacaagugcuaccaguucgcccucggccagggcaccacccucaacaacguccacuccaacaacaccguccgcgaccgcacccccuaccgcacccuccucaugaacgagcucggcguccccuuccaccucggcaccaagcaggucugcaucgccugguccuccuccuccugccacgacggcaaggccuggcuccacgucugcaucaccggcgacgacaagaacgccaccgccuccuucaucuacaacggccgccucgucgacuccaucgucuccugguccaaggagauccuccgcacccaggaguccgagugcgucugcaucaacggcaccugcaccgucgucaugaccgacggcuccgccuccggcaaggccgacaccaagauccucuucaucgaggagggcaagaucguccacaccuccacccucuccggcuccgcccagcacgucgaggagugcuccugcuacccccgcuaccccggcguccgcugcgucugccgcgacaacuggaagggcuccaaccgccccaucgucgacaucaacaucaaggaccacuccaucgucuccuccuacgucugcuccggccucgucggcgacaccccccgcaagaacgacuccuccuccuccucccacugccucgaccccaacaacgaggagggcggccacggcgucaagggcugggccuucgacgacggcaacgacgucuggaugggccgcaccaucuccgagaagucccgccucggcuacgagaccuucaaggucaucgagggcugguccaaccccaaguccaagcuccagaucaaccgccaggucaucgucgaccgcggcaaccgcuccggcuacuccggcaucuucuccgucgagggcaaguccugcaucaaccgcugcuucuacgucgagcucauccgcggccgcaaggaggagaccgagguccucuggaccuccaacuccaucgucgucuucugcggcaccuccggcaccuacggcaccggcuccuggcccgacggcgccgacaucaaccucaugcccaucuga

SEQ ID NO: 115358 - RNA, 1410 nt, Artificial Sequence
  derived and/or modified CDS sequence (opt2) from neuraminidase__InfluenzaA__ADL28395
augaaccccaaccagaagaucaucaccaucggcuccgucucccucaccaucgccaccaucugcuuccucaugcagaucgccauccucgucaccaccgucacccuccacuucaagcaguacgagugcaacuccccccccaacaaccaggucaugcucugcgagcccgccaucaucgagcgcaacaucaccgagaucgucuaccucaccaacaccaccaucgagaaggagaucugccccaagcucgccgaguaccgcaacugguccaagccccagugcaacaucaccggcuucgcccccuucuccaaggacaacuccauccgccucuccgccggcggcgacaucugggucacccgcguccccuacgucuccugcgaccccgacaagugcuaccaguucgcccucggccagggcaccacccucaacaacggccacuccaacgacaccguccacgaccgcacccccuaccgcacccuccucaugaacgagcucggcguccccuuccaccucggcacccgccaggucugcaucgccugguccuccuccuccugccacgacggcaaggccuggcuccacgucugcgucaccggcgacgacgagaacgccaccgccuccuucaucuacaacggccgccucgucgacuccaucggcuccugguccaagaagauccuccgcacccaggaguccgagugcgucugcaucaacggcaccugcaccgucgucaugaccgacggcuccgccuccggcaaggccgacaccaagauccucuucaucgaggagggcaagaucgucaacaucuccacccucuccggcuccgcccagcacgucgaggagugcuccugcuacccccgcuaccccggcguccgcugcgucugccgcgacaacuggaagggcuccaaccgccccaucgucgacaucaacgucaaggacuacuccaucgucuccuccuacgucugcuccggccucgucggcgacaccccccgcaagaacgacuccuucuccuccucccacugccucgaccccaacaacgaggagggcggccacggcgucaagggcugggccuucgacgacggcaacgacgucuggaugggccgcaccaucuccgagaaguuccgcuccggcuacgagaccuucaaggucaucgagggcugguccaagcccaacuccaagcuccagaucaaccgccaggucaucgucgagcgcggcaaccgcuccggcuacuccggcaucuucuccgucgagggcaaguccugcaucaaccgcugcuucuacgucgagcucauccgcggccgcaaggaggagaccgaggucugguggaccuccaacuccaucgucgucuucugcggcaccuccggcaccuacggcaccggcuccuggcccgacggcgccgacaucaaccucaugcccaucuga

SEQ ID NO: 115359 - RNA, 1410 nt, Artificial Sequence; identical to SEQ ID NO: 112774
  derived and/or modified CDS sequence (opt2) from neuraminidase__InfluenzaA__ADL29675

SEQ ID NO: 115360 - RNA, 1410 nt, Artificial Sequence; identical to SEQ ID NO: 112774
  derived and/or modified CDS sequence (opt2) from neuraminidase__InfluenzaA__ADL29685

SEQ ID NO: 115361 - RNA, 1410 nt, Artificial Sequence
  derived and/or modified CDS sequence (opt2) from neuraminidase__InfluenzaA__ADL29695
augaaccccaaccagaagaucaucaccaucggcuccgucugcaugaccaucggcauggccaaccucauccuccagaucggcaacaucaucuccaucuggaucucccacuccauccagcucggcaaccagaaccagaucgagaccugcaaccaguccgucaucaccuacgagaacaacaccugggucaaccagaccuacgucaacaucuccaacaccaacuucgccgccggccaguccgucgucuccgucaagcucgccggcaacuccucccucugccccgucuccggcugggccaucuacuccaaggacaacuccauccgcaucggcuccaagggcgacgucuucgucauccgcgagcccuucaucuccugcuccccccucgagugccgcaccuucuuccucacccagggcgcccuccucaacgacaagcacuccaacggcaccaucaaggaccgcucccccuaccgcacccucauguccugccccaucggcgagguccccucccccuacaacucccgcuucgaguccgucgccugguccgccuccgccugccacgacggcaucaacuggcucaccaucggcaucuccggccccgacaacggcgccgucgccguccucaaguacaacggcaucaucaccgacaccaucaaguccuggcgcaacaacauccuccgcacccaggaguccgagugcgccugcgucaacggcuccugcuucaccgucaugaccgacggccccuccgacggccaggccuccuacaagaucuuccgcaucgagaagggcaagaucgucaaguccgucgagaugaacgcccccaacuaccacuacgaggagugcuccugcuaccccgacuccuccgagaucaccugcgucugccgcgacaacuggcacggcuccaaccgccccugggucuccuucaaccagaaccucgaguaccagaucggcuacaucugcuccggcaucuucggcgacaacccccgccccaacgacaagaccggcuccugcggccccgucuccuccaacggcgccaacggcgucaagggcuucuccuucaaguacggcaacggcgucuggaucggccgcaccaaguccaucuccucccgcaacggcuucgagaugaucugggaccccaacggcuggaccggcaccgacaacaacuucuccaucaagcaggacaucgucggcaucaacgagugguccggcuacuccggcuccuucguccagcaccccgagcucaccggccucgacugcauccgccccugcuucugggucgagcucauccgcggccgccccaaggagaacaccaucuggaccuccggcuccuccaucuccuucugcggcgucaacuccgacaucgucggcugguccuggcccgacggcgccgagcuccccuucaccaucgacaaguga

SEQ ID NO: 115362 - RNA, 1410 nt, Artificial Sequence; identical to SEQ ID NO: 112774
  derived and/or modified CDS sequence (opt2) from neuraminidase__InfluenzaA__ADL29705

SEQ ID NO: 115363 - RNA, 1410 nt, Artificial Sequence; identical to SEQ ID NO: 115361
  derived and/or modified CDS sequence (opt2) from neuraminidase__InfluenzaA__ADL29733

SEQ ID NO: 115364 - RNA, 1410 nt, Artificial Sequence; identical to SEQ ID NO: 112774
  derived and/or modified CDS sequence (opt2) from neuraminidase__InfluenzaA__ADL29743

SEQ ID NO: 115365 - RNA, 1410 nt, Artificial Sequence
  derived and/or modified CDS sequence (opt2) from neuraminidase__InfluenzaA__ADL29753
augaaccccaaccagaagaucaucaccaucggcuccgucugcauggccaucggcauggccaaccucauccuccagaucggcaacaucaucuccaucuggaucucccacuccauccagcucggcaaccagaaccagaucgagaccugcaaccaguccgucaucaccuacgagaacaacaccugggucaaccagaccuacgucaacaucuccaacaccaacuucgccgccggccaguccgucgucuccgucaagcucgccggcaacuccucccucugccccgucuccggcugggccaucuacuccaaggacaacuccauccgcaucggcuccaagggcgacgucuucgucauccgcgagcccuucaucuccugcuccccccucgagugccgcaccuucuuccucacccagggcgcccuccucaacgacaagcacuccaacggcaccaucaaggaccgcucccccuaccgcacccucauguccugccccaucggcgagguccccucccccuacaacucccgcuucgaguccgucgccugguccgccuccgccugccacgacggcaucaacuggcucaccaucggcaucuccggccccgacaacggcgccgucgccguccucaaguacaacggcaucaucaccgacaccaucaaguccuggcgcaacaacauccuccgcacccaggaguccgagugcgccugcgucaacggcuccugcuucaccgucaugaccgacggccccuccgacggccaggccuccuacaagaucuuccgcaucgagaagggcaagaucgucaaguccgucgagaugaacgcccccaacuaccacuacgaggagugcuccugcuaccccgacuccuccgagaucaccugcgucugccgcgacaacuggcacggcuccaaccgccccugggucuccuucaaccagaaccucgaguaccagaucggcuacaucugcuccggcaucuucggcgacaacccccgccccaacgacaagaccggcuccugcggccccgucuccuccaacggcgccaacggcgucaagggcuucuccuucaaguacggcaacggcgucuggaucggccgcaccaaguccaucuccucccgcaacggcuucgagaugaucugggaccccaacggcuggaccggcaccgacaacaacuucuccaucaagcaggacaucgucggcaucaacgagugguccggcuacuccggcuccuucguccagcaccccgagcucaccggccucgacugcauccgccccugcuucugggucgagcucauccgcggccgccccaaggagaacaccaucuggaccuccggcuccuccaucuccuucugcggcgucaacuccgacaucgucggcugguccuggcccgacggcgccgagcuccccuucaccaucgacaaguga

SEQ ID NO: 115366 - RNA, 1410 nt, Artificial Sequence; identical to SEQ ID NO: 112774
  derived and/or modified CDS sequence (opt2) from neuraminidase__InfluenzaA__ADL29763

SEQ ID NO: 115367 - RNA, 1410 nt, Artificial Sequence; identical to SEQ ID NO: 115361
  derived and/or modified CDS sequence (opt2) from neuraminidase__InfluenzaA__ADL29773

SEQ ID NO: 115368 - RNA, 1410 nt, Artificial Sequence; identical to SEQ ID NO: 112774
  derived and/or modified CDS sequence (opt2) from neuraminidase__InfluenzaA__ADL29783

SEQ ID NO: 115369 - RNA, 1410 nt, Artificial Sequence; identical to SEQ ID NO: 115361
  derived and/or modified CDS sequence (opt2) from neuraminidase__InfluenzaA__ADL29882

SEQ ID NO: 115370 - RNA, 1410 nt, Artificial Sequence
  derived and/or modified CDS sequence (opt2) from neuraminidase__InfluenzaA__ADL32020
augaaccccaaccagaagaucaucaccaucggcuccgucugcaugaccaucggcauggccaaccucauccuccagaucggcaacaucaucuccaccuggaucucccacuccauccagcucggcaaccagaaccagaucgagaccugcaaccaguccgucaucaccuacgagaacaacaccugggucaaccagaccuacgucaacaucuccaacaccaacuucgccgccggccaguccgucgucuccgucaagcucgccggcaacuccucccucugccccgucuccggcugggccaucuacuccaaggacaacuccauccgcaucggcuccaagggcgacgucuucgucauccgcgagcccuucaucuccugcuccccccucgagugccgcaccuucuuccucacccagggcgcccuccucaacgacaagcacuccaacggcaccaucaaggaccgcucccccuaccgcacccucauguccugccccaucggcgagguccccucccccuacaacucccgcuucgaguccgucgccugguccgccuccgccugccacgacggcaucaacuggcucaccaucggcaucuccggccccgacaacggcgccgucgccguccucaaguacaacggcaucaucaccgacaccaucaaguccuggcgcaacaacauccuccgcacccaggaguccgagugcgccugcgucaacggcuccugcuucaccgucaugaccgacggccccuccgacggccaggccuccuacaagaucuuccgcaucgagaagggcaagaucgucaaguccgucgagaugaacgcccccaacuaccacuacgaggagugcuccugcuaccccgacuccuccgagaucaccugcgucugccgcgacaacuggcacggcuccaaccgccccugggucuccuucaaccagaaccucgaguaccagaucggcuacaucugcuccggcaucuucggcgacaacccccgccccaacgacaagaccggcuccugcggccccgucuccuccaacggcgccaacggcgucaagggcuucuccuucaaguacggcaacggcgucuggaucggccgcaccaaguccaucuccucccgcaacggcuucgagaugaucugggaccccaacggcuggaccggcaccgacaacaacuucuccaucaagcaggacaucgucggcaucaacgagugguccggcuacuccggcuccuucguccagcaccccgagcucaccggccucgacugcauccgccccugcuucugggucgagcucauccgcggccgccccaaggagaacaccaucuggaccuccggcuccuccaucuccuucugcggcgucaacuccgacaccgucggcugguccuggcccgacggcgccgagcuccccuucaccaucgacaaguga

SEQ ID NO: 115371 - RNA, 1410 nt, Artificial Sequence; identical to SEQ ID NO: 115361
  derived and/or modified CDS sequence (opt2) from neuraminidase__InfluenzaA__ADL32030

SEQ ID NO: 115372 - RNA, 1410 nt, Artificial Sequence; identical to SEQ ID NO: 112774
  derived and/or modified CDS sequence (opt2) from neuraminidase__InfluenzaA__ADL32040

SEQ ID NO: 115373 - RNA, 1410 nt, Artificial Sequence; identical to SEQ ID NO: 112774
  derived and/or modified CDS sequence (opt2) from neuraminidase__InfluenzaA__ADL32050

SEQ ID NO: 115374 - RNA, 1410 nt, Artificial Sequence; identical to SEQ ID NO: 112774
  derived and/or modified CDS sequence (opt2) from neuraminidase__InfluenzaA__ADL32060

SEQ ID NO: 115375 - RNA, 1410 nt, Artificial Sequence; identical to SEQ ID NO: 112774
  derived and/or modified CDS sequence (opt2) from neuraminidase__InfluenzaA__ADL32093

SEQ ID NO: 115376 - RNA, 1410 nt, Artificial Sequence; identical to SEQ ID NO: 112774
  derived and/or modified CDS sequence (opt2) from neuraminidase__InfluenzaA__ADL32117

SEQ ID NO: 115377 - RNA, 1410 nt, Artificial Sequence; identical to SEQ ID NO: 112774
  derived and/or modified CDS sequence (opt2) from neuraminidase__InfluenzaA__ADL32347

SEQ ID NO: 115378 - RNA, 1410 nt, Artificial Sequence
  derived and/or modified CDS sequence (opt2) from neuraminidase__InfluenzaA__ADL32357
augaaccccaaccagaagaucaucaccaucggcuccgucugcaugaccaucggcauggccaaccucauccuccagaucggcaacaucaucuccaucuggaucucccacuccauccagcucggcaaccagaaccagaucgagaccugcaaccaguccgucaucaccuacgagaacaacaccugggucaaccagaccuacgucaacaucuccaacaccaacuucgccgccggccaguccgucgucuccgucaagcucgccggcaacuccucccucugccccgucuccggcugggccaucuacuccaaggacaacuccauccgcaucggcuccaagggcgacgucuucgucauccgcgagcccuucaucuccugcuccccccucgagugccgcaccuucuuccucacccagggcgcccuccucaacgacaagcacuccaacggcaccaucaaggaccgcucccccuaccgcacccucauguccugccccaucggcgagguccccucccccuacaacucccgcuucgaguccgucgccugguccgccuccgccugccacgacggcaucaacuggcucaccaucggcaucuccggccccgacaacggcgccgucgccguccucaaguacaacggcaucaucaccgacaccaucaaguccuggcgcaacaacauccuccgcacccaggaguccgagugcgccugcgucaacggcuccugcuucaccgucaugaccgacggccccuccgacggccaggccuccuacaagaucuuccgcaucgagaagggcaagaucgucaaguccgucgagaugaacgcccccaacuaccacuacgaggagugcuccugcuaccccgacuccuccgagaucaccugcgucugccgcgacaacuggcacggcuccaaccgccccugggucuccuucaaccagaaccucgaguaccagaucggcuacaucugcuccggcaucuucggcgacaacccccgccccaacgacaagaccggcuccugcggccccgucuccuccaacggcgccaacggcgucaagggcuucuccuucaaguacggcaacggcgucuggaucggccgcaccaaguccaucuccucccgcaacggcuucgagaugaucugggaccccaacggcuggaccggcaccgacaacaacuucuccaucaagcaggacaucgucggcaucaacgagugguccggcuacuccggcuccuucguccagcaccccgagcucaccggccucgacugcauccgccccugcuucugggucgagcucauccgcggccgccccaaggagaacaccaucuggaccuccggcuccuccaucuccuucugcggcgucaacuccgacaccgucggcugguccuggcccgacggcgccgagcuccccuucaccgucgacaaguga

SEQ ID NO: 115379 - RNA, 1410 nt, Artificial Sequence; identical to SEQ ID NO: 112774
  derived and/or modified CDS sequence (opt2) from neuraminidase__InfluenzaA__ADL32367

SEQ ID NO: 115380 - RNA, 1410 nt, Artificial Sequence; identical to SEQ ID NO: 112774
  derived and/or modified CDS sequence (opt2) from neuraminidase__InfluenzaA__ADL32377

SEQ ID NO: 115381 - RNA, 1410 nt, Artificial Sequence; identical to SEQ ID NO: 112774
  derived and/or modified CDS sequence (opt2) from neuraminidase__InfluenzaA__ADL32387

SEQ ID NO: 115382 - RNA, 1410 nt, Artificial Sequence; identical to SEQ ID NO: 112774
  derived and/or modified CDS sequence (opt2) from neuraminidase__InfluenzaA__ADL32397

SEQ ID NO: 115383 - RNA, 1410 nt, Artificial Sequence; identical to SEQ ID NO: 112774
  derived and/or modified CDS sequence (opt2) from neuraminidase__InfluenzaA__ADL32407

SEQ ID NO: 115384 - RNA, 1410 nt, Artificial Sequence; identical to SEQ ID NO: 112774
  derived and/or modified CDS sequence (opt2) from neuraminidase__InfluenzaA__ADL32417

SEQ ID NO: 115385 - RNA, 1410 nt, Artificial Sequence
  derived and/or modified CDS sequence (opt2) from neuraminidase__InfluenzaA__ADL32427
augaaccccaaccagaagaucaucaccaucggcuccgucugcaugaccaucggcauggccaaccucauccuccagaucggcaacaucaucuccaucuggaucucccacuccauccagcucggcaaccagaaccagaucgagaccugcaaccaguccgucaucaccuacgagaacaacaccugggucaaccagaccuacgucaacaucuccaacaccaacuucgccgccggccaguccgucgucuccgucaagcucgccggcaacuccucccucugccccgucuccggcugggccaucuacuccaaggacaacuccauccgcaucggcuccaagggcgacgucuucgucauccgcgagcccuucaucuccugcuccccccucgagugccgcaccuucuuccucacccagggcgcccuccucaacgacaagcacuccaacggcaccaucaaggaccgcucccccuaccgcacccucauguccugccccaucggcgagguccccucccccuacaacucccgcuucgaguccgucgccugguccgccuccgccugccacgacggcaucaacuggcucaccaucggcaucuccggccccgacaacggcgccgucgccguccucaaguacaacggcaucaucaccgacaccaucaaguccuggcgcaacaacauccuccgcacccaggaguccgagugcgccugcgucaacggcuccugcuucaccgucaugaccgacggccccuccgacggccaggccuccuacaagaucuuccgcaucgagaagggcaagaucgucaaguccgucgagaugaacgcccccaacuaccacuacgaggagugcuccugcuaccccgacuccuccgagaucaccugcgucugccgcgacaacuggcacggcuccaaccgccccugggucuccuucaaccagaaccucgaguaccagaucggcuacaucugcuccggcaucuucggcgacaacccccgccccaacgacaagaccggcuccugcggccccgucuccuccaacggcgccaacggcgucaagggcuucuccuucaaguacggcaacggcgucuggaucggccgcaccaaguccaucuccucccgcaacggcuucgagaugaucugggaccccaacggcuggaccggcaccgacaacaacuucuccaucaagcaggacaucgucggcaucaacgagugguccggcuacuccggcuccuucguccagcaccccgagcucaccggccucgacugcauccgccccugcuucugggucgagcucauccgcggccgccccaaggagaagaccaucuggaccuccggcuccaucaucuccuucugcggcgucaacuccgacaccgucggcugguccuggcccgacggcgccgagcuccccuucaccaucgacaaguga

SEQ ID NO: 115386 - RNA, 1410 nt, Artificial Sequence; identical to SEQ ID NO: 112774
  derived and/or modified CDS sequence (opt2) from neuraminidase__InfluenzaA__ADL32447

SEQ ID NO: 115387 - RNA, 1410 nt, Artificial Sequence
  derived and/or modified CDS sequence (opt2) from neuraminidase__InfluenzaA__ADL32457
augaaccccaaccagaagaucaucaccaucggcuccgucugcaugaccaucggcauggccaaccucauccuccagaucggcaacaucaucuccaucuggaucucccacuccauccagcucggcaaccagaaccagaucgagaccugcaaccaguccgucaucaccuacgagaacaacaccugggucaaccagaccuacgucaacaucuccaacaccaacuucgccgccggccaguccgucgucuccgucaagcucgccggcaacuccucccucugccccgucuccggcugggccaucuacuccaaggacaaguccauccgcaucggcuccaagggcgacgucuucgucauccgcgagcccuucaucuccugcuccccccucgagugccgcaccuucuuccucacccagggcgcccuccucaacgacaagcacuccaacggcaccaucaaggaccgcucccccuaccgcacccucauguccugccccaucggcgagguccccucccccuacaacucccgcuucgaguccgucgccugguccgccuccgccugccacgacggcaucuccuggcucaccaucggcaucuccggccccgacaacggcgccgucgccguccucaaguacaacggcaucaucaccgacaccaucaaguccuggcgcaacaacauccuccgcacccaggaguccgagugcgccugcgucaacggcuccugcuucaccgucaugaccgacggccccuccgacggccaggccuccuacaagaucuuccgcaucgagaagggcaagaucgucaaguccgucgagaugaacgcccccaacuaccacuacgaggagugcuccugcuaccccgacuccuccgagaucaccugcgucugccgcgacaacuggcacggcuccaaccgccccugggucuccuucaaccagaaccucgaguaccagaucggcuacaucugcuccggcaucuucggcgacaacccccgccccaacgacaagaccggcuccugcggccccgucuccuccaacggcgccaacggcgucaagggcuucuccuucaaguacggcaacggcgucuggaucggccgcaccaaguccaucuccucccgcaacggcuucgagaugaucugggaccccaacggcuggaccggcaccgacaacaacuucuccaucaagcaggacaucgucggcaucaacgagugguccggcuacuccggcuccuucguccagcaccccgagcucaccggccucgacugcauccgccccugcuucugggucgagcucauccgcggccgccccaaggagaacaccaucuggaccuccggcuccuccaucuccuucugcggcgucuccuccgacaccgucggcugguccuggcccgacggcgccgagcuccccuucaccaucgacaaguga

SEQ ID NO: 115388 - RNA, 1410 nt, Artificial Sequence; identical to SEQ ID NO: 113951
  derived and/or modified CDS sequence (opt2) from neuraminidase__InfluenzaA__ADL32487

SEQ ID NO: 115389 - RNA, 1410 nt, Artificial Sequence; identical to SEQ ID NO: 112774
  derived and/or modified CDS sequence (opt2) from neuraminidase__InfluenzaA__ADL32497

SEQ ID NO: 115390 - RNA, 1410 nt, Artificial Sequence; identical to SEQ ID NO: 112774
  derived and/or modified CDS sequence (opt2) from neuraminidase__InfluenzaA__ADL32507

SEQ ID NO: 115391 - RNA, 1410 nt, Artificial Sequence; identical to SEQ ID NO: 114236
  derived and/or modified CDS sequence (opt2) from neuraminidase__InfluenzaA__ADL32517

SEQ ID NO: 115392 - RNA, 1410 nt, Artificial Sequence; identical to SEQ ID NO: 113951
  derived and/or modified CDS sequence (opt2) from neuraminidase__InfluenzaA__ADL32527

SEQ ID NO: 115393 - RNA, 1410 nt, Artificial Sequence; identical to SEQ ID NO: 112774
  derived and/or modified CDS sequence (opt2) from neuraminidase__InfluenzaA__ADL32537

SEQ ID NO: 115394 - RNA, 1410 nt, Artificial Sequence; identical to SEQ ID NO: 113661
  derived and/or modified CDS sequence (opt2) from neuraminidase__InfluenzaA__ADL32547

SEQ ID NO: 115395 - RNA, 1410 nt, Artificial Sequence; identical to SEQ ID NO: 114125
  derived and/or modified CDS sequence (opt2) from neuraminidase__InfluenzaA__ADL32673

SEQ ID NO: 115396 - RNA, 1410 nt, Artificial Sequence; identical to SEQ ID NO: 112774
  derived and/or modified CDS sequence (opt2) from neuraminidase__InfluenzaA__ADL32683

SEQ ID NO: 115397 - RNA, 1410 nt, Artificial Sequence; identical to SEQ ID NO: 112764
  derived and/or modified CDS sequence (opt2) from neuraminidase__InfluenzaA__ADL32693

SEQ ID NO: 115398 - RNA, 1410 nt, Artificial Sequence; identical to SEQ ID NO: 113997
  derived and/or modified CDS sequence (opt2) from neuraminidase__InfluenzaA__ADL32703

SEQ ID NO: 115399 - RNA, 1410 nt, Artificial Sequence; identical to SEQ ID NO: 112764
  derived and/or modified CDS sequence (opt2) from neuraminidase__InfluenzaA__ADL32713

SEQ ID NO: 115400 - RNA, 1410 nt, Artificial Sequence; identical to SEQ ID NO: 112774
  derived and/or modified CDS sequence (opt2) from neuraminidase__InfluenzaA__ADL32723

SEQ ID NO: 115401 - RNA, 1410 nt, Artificial Sequence; identical to SEQ ID NO: 114455
  derived and/or modified CDS sequence (opt2) from neuraminidase__InfluenzaA__ADL32733

SEQ ID NO: 115402 - RNA, 1410 nt, Artificial Sequence; identical to SEQ ID NO: 114455
  derived and/or modified CDS sequence (opt2) from neuraminidase__InfluenzaA__ADL32743

SEQ ID NO: 115403 - RNA, 1410 nt, Artificial Sequence
  derived and/or modified CDS sequence (opt2) from neuraminidase__InfluenzaA__ADL39139
augaaccccaaccagaagaucaucaccaucggcuccgucucccucaccaucuccaccaucugcuucuucaugcagaucgccauccucaucaccaccgucacccuccacuucaagcaguacgaguucaacuccccccccaacaaccaggucaugcucuccgagcccaccaucaucgagcgcaacaucaccgagaucgucuaccucaccaacaccaccaucgagaaggagaucugccccaagcucgccgaguaccgcaacugguccaagccccagugcgacaucaccggcuucgcccccuucuccaaggacaacuccauccgccucuccgccggcggcgacaucugggucacccgcgagcccuacgucuccugcgaccccgacaagugcuaccaguucgcccucggccagggcaccacccucaacaacguccacuccaacaacaccguccgcgagcgcacccccuaccgcacccuccucaugaacgagcucggcguccccuuccaccucggcaccaagcaggucugcaucgccugguccuccuccuccugccacgacggcaaggccuggcuccacgucugcaucaccggcgacgacaagaacgccaccgccuccuucaucuacaacggccgccucgucgacuccgucgucuccugguccaaggagauccuccgcacccaggaguccgagugcgucugcaucaacggcaccugcaccgucgucaugaccgacggcuccgccuccggcaaggccgacaccaagauccucuucaucgaggagggcaagaucguccacaccuccacccucuccggcuccgcccagcacgucgaggagugcuccugcuacccccgcuaccccggcguccgcugcgucugccgcgacaacuggaagggcuccaaccgccccaucgucgacaucaacaucaaggaccacuccaucgucuccuccuacgucugcuccggccucgucggcgacaccccccgcaagaacgacuccuccuccuccucccacugccucgaccccaacaacgaggagggcggccacggcgucaagggcugggccuucgacgacggcaacgacgucuggaugggccgcaccaucuccgagaagucccgccucggcuacgagaccuucaaggucaucgagggcugguccaaccccaaguccaagcuccagaucaaccgccaggucaucgucgaccgcggcaaccgcuccggcuacuccggcaucuucuccgucgagggcaaguccugcaucaaccgcugcuucuacgucgagcucauccgcggccgcaaggaggagaccgagguccucuggaccuccaacuccaucgucgucuucugcggcaccuccggcaccuacggcaccggcuccuggcccgacggcgccgacaucaaccucaugcccaucuga

SEQ ID NO: 115404 - RNA, 1413 nt, Artificial Sequence
  derived and/or modified CDS sequence (opt2) from neuraminidase__InfluenzaA__ADL39150
augaaccccaaccagaagaucaucaccaucggcuccaucuccaucgccaucggcaucaucucccucaugcuccagaucggcaacaucaucuccaucugggccucccacuccauccagaccggcucccagaacaacaccggcaucugcaaccagcgcaucaucaccuacgagaacuccaccugggucaaccacaccuacgucaacaucaacaacaccaacgucgucgccggcgaggacaagaccuccgucacccucgccggcaacuccucccucugcuccaucuccggcugggccaucuacaccaaggacaacuccauccgcaucggcuccaagggcgacgucuucgucauccgcgagcccuucaucuccugcucccaccucgagugccgcaccuucuuccucacccagggcgcccuccucaacgacaagcacuccaacggcaccgucaaggaccgcucccccuaccgcgcccucauguccugcccccucggcgaggcccccucccccuacaacuccaaguucgaguccgucgccugguccgccuccgccugccacgacggcaugggcuggcucaccaucggcaucuccggccccgacaacggcgccgucgccguccucaaguacaacggcaucaucaccgagaccaucaaguccuggaagaagcagauccuccgcacccaggaguccgagugcgucugcaugaacggcuccugcuucaccaucaugaccgacggccccuccaacaaggccgccuccuacaagaucuucaagaucgagaagggcaaggucaccaaguccaucgagcucaacgcccccaacuucuacuacgaggagugcuccugcuaccccgacaccggcaucgucaugugcgucugccgcgacaacuggcacggcuccaaccgccccugggucuccuucaaccagaaccucgacuaccagaucggcuacaucugcuccggcgucuucggcgacaacccccgccccgaggacggcgagggcuccugcaaccccgucaccgucgacggcgccaacggcgucaagggcuucuccuacaaguacggcaacggcgucuggaucggccgcaccaaguccaaccgccuccgcaagggcuucgagaugaucugggaccccaacggcuggaccaacaccgacuccgacuucuccgucaagcaggacgucgucgccaucaccgacugguccggcuacuccggcuccuucguccagcaccccgagcucaccggccucgacugcauccgccccugcuucugggucgagcucguccgcggccucccccgcgagaacaccaccaucuggaccuccggcuccuccaucuccuucugcggcgucaacuccgacaccgccaacugguccuggcccgacggcgccgagcuccccuucaccaucgacaaguga

SEQ ID NO: 115405 - RNA, 1410 nt, Artificial Sequence
  derived and/or modified CDS sequence (opt2) from neuraminidase__InfluenzaA__ADL39172
augaaccccaaccagaagaucaucaccaucggcuccgucucccucaccaucuccaccaucugcuucuucaugcagaucgccauccucaucaccaccgucacccuccacuucaagcaguacgaguucaacuccccccccaacaaccaggucaugcucugcgagcccaccaucaucgagcgcaacaucaccgagaucgucuaccucaccaacaccaccaucgagaaggagaucugccccaagcucgccgaguaccgcaacugguccaagccccagugcgacaucaccggcuucgcccccuucuccaaggacaacuccauccgccucuccgccggcggcgacaucugggucacccgcgagcccuacgucuccugcgaccccgacaagugcuaccaguucgcccucggccagggcaccacccucaacaacguccacuccaacaacaccguccgcgaccgcacccccuaccgcacccuccucaugaacgagcucggcguccccuuccaccucggcaccaagcaggucugcaucgccugguccuccuccuccugccacgacggcaaggccuggcuccacgucugcaucaccggcgacgacaagaacgccaccgccuccuucaucuacaacggccgccucgucgacuccgucgucuccugguccaaggagauccuccgcacccaggaguccgagugcgucugcaucaacggcaccugcaccgucgucaugaccgacggcuccgccuccggcgaggccgacaccaagauccucuucaucgaggagggcaagaucguccacaccuccacccucuccggcuccgcccagcacgucgaggagugcuccugcuacccccgcuaccccggcguccgcugcgucugccgcgacaacuggaagggcuccaaccgccccaucgucgacaucaacaucaaggaccacuccaucgucuccuccuacgucugcuccggccucgucggcgacaccccccgcaagaacgacuccuccuccuccucccacugccucgaccccaacaacgaggagggcggccacggcgucaagggcugggccuucgacgacggcaacgacgucuggaugggccgcaccaucuccgagaagucccgccucggcuacgagaccuucaaggucaucgagggcugguccaaccccaaguccaagcuccagaucaaccgccaggucaucgucgaccgcggcaaccgcuccggcuacuccggcaucuucuccgucgagggcaaguccugcaucaaccgcugcuucuacgucgagcucauccgcggccgcaaggaggagaccgagguccucuggaccuccaacuccaucgucgucuucugcggcaccuccggcaccuacggcaccggcuccuggcccgacggcgccgacaucaaccucaugcccaucuga

SEQ ID NO: 115406 - RNA, 1410 nt, Artificial Sequence; identical to SEQ ID NO: 112635
  derived and/or modified CDS sequence (opt2) from neuraminidase__InfluenzaA__ADL39183

SEQ ID NO: 115407 - RNA, 1413 nt, Artificial Sequence; identical to SEQ ID NO: 114966
  derived and/or modified CDS sequence (opt2) from neuraminidase__InfluenzaA__ADL39194

SEQ ID NO: 115408 - RNA, 1410 nt, Artificial Sequence; identical to SEQ ID NO: 112635
  derived and/or modified CDS sequence (opt2) from neuraminidase__InfluenzaA__ADL39205

SEQ ID NO: 115409 - RNA, 1413 nt, Artificial Sequence; identical to SEQ ID NO: 113497
  derived and/or modified CDS sequence (opt2) from neuraminidase__InfluenzaA__ADL39227

SEQ ID NO: 115410 - RNA, 1413 nt, Artificial Sequence; identical to SEQ ID NO: 114966
  derived and/or modified CDS sequence (opt2) from neuraminidase__InfluenzaA__ADL39238

SEQ ID NO: 115411 - RNA, 1413 nt, Artificial Sequence; identical to SEQ ID NO: 114966
  derived and/or modified CDS sequence (opt2) from neuraminidase__InfluenzaA__ADL39249

SEQ ID NO: 115412 - RNA, 1413 nt, Artificial Sequence; identical to SEQ ID NO: 113497
  derived and/or modified CDS sequence (opt2) from neuraminidase__InfluenzaA__ADL39260

SEQ ID NO: 115413 - RNA, 1410 nt, Artificial Sequence
  derived and/or modified CDS sequence (opt2) from neuraminidase__InfluenzaA__ADL39282
augaaccccaaccagaagaucaucaccaucggcuccgucucccucaccaucuccaccaucugcuucuucaugcagaucgccauccucaucaccaccgucacccuccacuucaagcaguacgaguucaacuccccccccaacaaccaggucaugcucugcgagcccaccaucaucgagaagaacaucaccgagaucgucuaccucaccaacaccaccaucgagaaggagaucugcccccgccucgccgaguaccgcaacugguccaagccccagugcgacaucaccggcuucgcccccuucuccaaggacaacuccauccgccucuccgccggcggcgacaucugggucacccgcgagcccuacgucuccugcgaccccgacaagugcuaccaguucgcccucggccagggcaccacccucaacaacguccacuccaacaacaagguccgcgaccgcacccccuaccgcacccuccucaugaacgagcucggcguccccuuccaccucggcaccaagcaggucugcaucgccugguccuccuccuccugccacgacggcaaggccuggcuccacgucugcaucaccggcgacgacaagaacgccaccgccuccuucaucuacaacggccgccucgucgacuccgucgucuccugguccaaggagauccuccgcacccaggaguccgagugcgucugcaucaacggcaccugcaccgucgucaugaccgacggcuccgccuccggcaaggccgacaccaagauccucuucaucgaggagggcaagaucguccacaccuccacccucuccggcuccgcccagcacgucgaggagugcuccugcuacccccgcuaccccggcguccgcugcgucugccgcgacaacuggaagggcuccaaccgccccaucgucgacaucaacaucaaggaccacuccaucgucuccuccuacgucugcuccggccucgucggcgacaccccccgcaagaacgacuccuccuccuccucccacugccucgaccccaacaacgaggagggcggccacggcgucaagggcugggccuucgacgacggcaacgacgucuggaugggccgcaccaucuccgagaagucccgccucggcuacgagaccuucaaggucaucgagggcugguccaaccccaaguccaagcuccagaucaaccgccaggucaucgucgaccgcggcaaccgcuccggcuacuccggcaucuucuccgucgagggcaaguccugcaucaaccgcugcuucuacgucgagcucauccgcggccgcaaggaggagaccgagguccucuggaccuccaacuccaucgucgucuucugcggcaccuccggcaccuacggcaccggcuccuggcccgacggcgccgacaucaaccucaugcccaucuga

SEQ ID NO: 115414 - RNA, 1413 nt, Artificial Sequence; identical to SEQ ID NO: 113497
  derived and/or modified CDS sequence (opt2) from neuraminidase__InfluenzaA__ADL39293

SEQ ID NO: 115415 - RNA, 1410 nt, Artificial Sequence
  derived and/or modified CDS sequence (opt2) from neuraminidase__InfluenzaA__ADL39304
augaaccccaaccagaagaucaucaccaucggcuccgucucccucaccaucuccaccaucugcuucuucaugcagaucgccauccucaucaccaccgucacccuccacuucaagcaguacgaguucaacuucccccccaacaaccaggucaugcucugcgagcccaccaucaucgagcgcaacaucaccgagaucgucuaccucaccaacaccaccaucgagaaggagaucugccccaagcucgccgaguaccgcaacugguccaagccccagugcgacaucaccggcuucgcccccuucuccaaggacaacuccauccgccucuccgccggcggcgacaucugggucacccgcgagcccuacgucuccugcgaccccgacaagugcuaccaguucgcccucggccagggcaccacccucaacaacguccacuccaacaacaccguccgcgaccgcacccccuaccgcacccuccucaugaacgagcucggcguccccuuccaccucggcaccaagcaggucugcaucgccugguccuccuccuccugccacgacggcaaggccuggcuccacgucugcaucaccggcgacgacaagaacgccaccgccuccuucaucuacaacggccgccucgucgacuccgucgucuccugguccaaggagauccuccgcacccaggaguccgagugcgucugcaucaacggcaccugcaccgucgucaugaccgacggcuccgccuccggcaaggccgacaccaagauccucuucaucgaggagggcaagaucguccacaccuccacccucuccggcuccgcccagcacgucgaggagugcuccugcuacccccgcuaccccggcguccgcugcgucugccgcgacaacuggaagggcuccaaccgccccaucgucgacaucaacaucaaggaccacuccaucgucuccuccuacgucugcuccggccucgucggcgacaccccccgcaagaacgacuccuccuccuccucccacugccucgaccccaacaacgaggagggcggccacggcgucaagggcugggccuucgacgacggcaacgacgucuggaugggccgcaccaucuccgagaagucccgccucggcuacgagaccuucaaggucaucgagggcugguccaaccccaaguccaagcuccagaucaaccgccaggucaucgucgaccgcggcaaccgcuccggcuacuccggcaucuucuccgucgagggcaaguccugcaucaaccgcugcuucuacgucgagcucauccgcggccgcaaggaggagaccgagguccucuggaccuccaacuccaucgucgucuucugcggcaccuccggcaccuacggcaccggcuccuggcccgacggcgccgacaucaaccucaugcccaucuga

SEQ ID NO: 115416 - RNA, 1410 nt, Artificial Sequence; identical to SEQ ID NO: 112635
  derived and/or modified CDS sequence (opt2) from neuraminidase__InfluenzaA__ADL39326

SEQ ID NO: 115417 - RNA, 1413 nt, Artificial Sequence; identical to SEQ ID NO: 114966
  derived and/or modified CDS sequence (opt2) from neuraminidase__InfluenzaA__ADL39392

SEQ ID NO: 115418 - RNA, 1410 nt, Artificial Sequence
  derived and/or modified CDS sequence (opt2) from neuraminidase__InfluenzaA__ADL39403
augaaccccaaccagaagaucaucaccaucggcuccgucucccucaccaucuccaccaucugcuucuucaugcagaucgccauccucaucaccaccgucacccuccacuucaagcaguacgaguucaaccccccccccaacaaccaggucaugcucugcgagcccaccaucaucgagcgcaacaucaccgagaucgucuaccucaccaacaccaccaucgagaaggagaucugccccaagcucgccgaguaccgcaacugguccaagccccagugcgacaucaccggcuucgcccccuucuccaaggacaacuccauccgccucuccgccggcggcgacaucugggucacccgcgagcccuacgucuccugcgaccccgacaagugcuaccaguucgcccucggccagggcaccacccucaacaacguccacuccaacaacaccguccgcgaccgcacccccuaccgcacccuccucaugaacgagcucggcguccccuuccaccucggcaccaagcaggucugcaucgccugguccuccuccuccugccacgacggcaaggccuggcuccacgucugcaucaccggcgacgacaagaacgccaccgccuccuucaucuacaacggccgccucgucgacuccgucgucuccugguccaaggagauccuccgcacccaggaguccgagugcgucugcaucaacggcaccugcaccgucgucaugaccgacggcuccgccuccggcaaggccgacaccaagauccucuucaucgaggagggcaagaucguccacaccuccacccucuccggcuccgcccagcacgucgaggagugcuccugcuacccccgcuaccccggcguccgcugcgucugccgcgacaacuggaagggcuccaaccgccccaucgucgacaucaacaucaaggaccacuccaucgucuccuccuacgucugcuccggccucgucggcgacaccccccgcaagaacgacuccuccuccuccucccacugccucgaccccaacaacgaggagggcggccacggcgucaagggcugggccuucgacgacggcaacgacgucuggaugggccgcaccaucuccgagaagucccgccucggcuacgagaccuucaaggucaucgagggcugguccaaccacaaguccaagcuccagaucaaccgccaggucaucgucgaccgcggcaaccgcuccggcuacuccggcaucuucuccgucgagggcaaguccugcaucaaccgcugcuucuacgucgagcucauccgcggccgcaaggaggagaccgagguccucuggaccuccaacuccaucgucgucuucugcggcaccuccggcaccuacggcaccggcuccuggcccgacggcgccgaccucaaccucaugcccaucuga

SEQ ID NO: 115419 - RNA, 1413 nt, Artificial Sequence; identical to SEQ ID NO: 113497
  derived and/or modified CDS sequence (opt2) from neuraminidase__InfluenzaA__ADL39425

SEQ ID NO: 115420 - RNA, 1413 nt, Artificial Sequence
  derived and/or modified CDS sequence (opt2) from neuraminidase__InfluenzaA__ADL39447
augaaccccaaccagaagaucaucaccaucggcuccaucuccaucgccaucggcaucaucucccucaugcuccagaucggcuccaucaucuccaucugggccucccacuccauccagaccggcucccagaacaacaccggcaucugcaaccagcgcaucaucaccuacgagaacuccaccugggucaaccacaccuacgucaacaucaacaacaccaacgucgucgccggcgaggacaagaccuccgucacccucaccggcaacuccucccucugcuccaucuccggcugggccaucuacaccaaggacaacuccauccgcaucggcuccaagggcgacgucuucgucauccgcgagcccuucaucuccugcucccaccucgagugccgcaccuucuuccucacccagggcgcccuccucaacgacaagcacuccaacggcaccgucaaggaccgcucccccuaccgcgcccucauguccugcccccucggcgaggcccccucccccuacaacuccaaguucgaguccgucgccugguccgccuccgccugccacgacggcaugggcuggcucaccaucggcaucuccggccccgacaacggcgccgucgccguccucaaguacaacggcaucaucaccggcaccaucaaguccuggaagaagcagauccuccgcacccaggaguccgagugcgucugcaugaacggcuccugcuucaccaucaugaccgacggccccuccaacaaggccgccuccuacaagaucuucaagaucgagaagggcaaggucaccaaguccaucgagcucaacgcccccaacuucuacuacgaggagugcuccugcuaccccgacaccggcaucgucaugugcgucugccgcgacaacuggcacggcuccaaccgccccugggucuccuucaaccagaaccucgacuaccagaucggcuacaucugcuccggcgucuucggcgacaacccccgccccgaggacggcgagggcuccugcaaccccgucaccgucgacggcgccaacggcgucaagggcuucuccuacaaguacggcaacggcgucuggaucggccgcaccaaguccaaccgccuccgcaagggcuucgagaugaucugggaccccaacggcuggaccaacaccgacuccgacuucuccgucaagcaggacgucgucgccaucaccgacugguccggcuacuccggcuccuucguccagcaccccgagcucaccggccucgacugcauccgccccugcuucugggucgagcucguccgcggccucccccgcgagaacaccaccaucuggaccuccggcuccuccaucuccuucugcggcgucaacuccgacaccgccaacugguccuggcccgacggcgccgagcuccccuucaccaucgacaaguga

SEQ ID NO: 115421 - RNA, 1413 nt, Artificial Sequence; identical to SEQ ID NO: 113497
  derived and/or modified CDS sequence (opt2) from neuraminidase__InfluenzaA__ADL39458

SEQ ID NO: 115422 - RNA, 1413 nt, Artificial Sequence
  derived and/or modified CDS sequence (opt2) from neuraminidase__InfluenzaA__ADL39469
augaaccccaaccagaagaucaucaccaucggcuccaucuccaucgccaucggcaucaucucccucaugcuccagaucggcuccaucaucuccaucugggccucccacuccauccagaccggcucccagaacaacaccggcaucugcaaccagcgcaucaucaccuacgagaacuccaccugggucaaccacaccuacgucaacaucaacaacaccaacgucgucgccggcgaggacaagaccuccgucacccucgccggcaacuccucccucugcuccaucuccggcugggccaucuacaccaaggacaacuccauccgcaucggcuccaagggcgacgucuucgucauccgcgagcccuucaucuccugcucccaccucgagugccgcaccuucuuccucacccagggcgcccuccucaacgacaagcacuccaacggcaccgucaaggaccgcucccccuaccgcgcccucauguccugcccccucggcgaggcccccucccccuacaacuccaaguucgaguccgucgccugguccgccuccgccugccacgacggcaugggcuggcucaccaucggcaucuccggccccgacaacggcgccgucgccguccucaaguacaacggcaucaucaccggcaccaucaaguccuggaagaagcagauccuccgcacccaggaguccgagugcgucugcaugaacggcuccugcuucaccaucaugaccgacggccccuccaacaaggccgccuccuacaagaucuucaagaucgagaagggcaaggucaccaaguccaucgagcucgacgcccccaacuucuacuacgaggagugcuccugcuaccccgacaccggcaucgucaugugcgucugccgcgacaacuggcacggcuccaaccgccccugggucuccuucaaccagaaccucgacuaccagaucggcuacaucugcuccggcgucuucggcgacaacccccgccccgaggacggcgagggcuccugcaaccccgucaccgucgacggcgccaacggcgucaagggcuucuccuacaaguacggcaacggcgucuggaucggccgcaccaaguccaaccgccuccgcaagggcuucgagaugaucugggaccccaacggcuggaccaacaccgacuccgacuucuccgucaagcaggacgucgucgccaucaccgacugguccggcuacuccggcuccuucguccagcaccccgagcucaccggccucgacugcauccgccccugcuucugggucgagcucguccgcggccucccccgcgagaacaccaccaucuggaccuccggcuccuccaucuccuucugcggcgucaacuccgacaccgccaacugguccuggcccgacggcgccgagcuccccuucaccaucgacaaguga

SEQ ID NO: 115423 - RNA, 1413 nt, Artificial Sequence
  derived and/or modified CDS sequence (opt2) from neuraminidase__InfluenzaA__ADL39480
augaaccccaaccagaagaucaucaccaucggcuccaucuccaucgccaucggcaucaucucccucaugcuccagaucggcuccaucaucuccaucugggccucccacuccauccagaccggcucccagaacaacaccggcaucugcaaccagcgcaucaucaccuacgagaacuccaccugggucaaccacaccuacgucaacaucaacaacaccaacgucgucgccggcgaggacaagaccuccgucacccucgccggcaacuccucccucugcuccaucuccggcugggccaucuacaccaaggacaacuccauccgcaucggcuccaagggcgacgucuucgucauccgcgagcccuucaucuccugcucccaccucgagugccgcaccuucuuccucacccagggcgcccuccucaacgacaagcacuccaacggcaccgucaaggaccgcucccccuaccgcgcccucauguccugcccccucggcgaggcccccucccccuacaacuccaaguucgaguccgucgccugguccgccuccgccugccacgacggcaugggcuggcucaccaucggcaucuccggccccgacaacggcgccgucgccguccucaaguacaacggcaucaucaccggcaccaucaaguccuggaagaagcagauccuccgcacccaggaguccgagugcgucugcaugaacggcuccugcuucaccaucaugaccgacggccccuccaacaaggccgccuccuacaagaucuucaagaucgagaagggcaaggucaccaaguccaucgagcucaacgcccccaacuucuacuacgaggagugcuccugcuaccccgacaccggcaucgucaugugcgucugccgcgacaacuggcacggcuccaaccgccccugggucuccuucaaccagaaccucgacuaccagaucggcuacaucugcuccggcgucuucggcgacaacccccgccccgaggacggcgagggcuccugcaaccccgucaccgucgacggcgccaacggcgucaagggcuucuccuacaaguacggcaacggcgucuggaucggccgcaccaaguccaaccgccuccgcaagggcuucgagauggucugggaccccaacggcuggaccaacaccgacuccgacuucuccgucaagcaggacgucgucgccaucaccgacugguccggcuacuccggcuccuucguccagcaccccgagcucaccggccucgacugcauccgccccugcuucugggucgagcucguccgcggccucccccgcgagaacaccaccaucuggaccuccggcuccuccaucuccuucugcggcgucaacuccgacaccgccaacugguccuggcccgacggcgccgagcuccccuucaccaucgacaaguga

SEQ ID NO: 115424 - RNA, 1410 nt, Artificial Sequence
  derived and/or modified CDS sequence (opt2) from neuraminidase__InfluenzaA__ADL39491
augaaccccaaccagaagaucaucaccaucggcuccgucucccucaccaucuccaccaucugcuucuucaugcagaucgccauccucaucaccaccgucacccuccacuucaagcaguacgaguucaacuccucccccaacaaccaggucaugcucugcgagcccaccaucaucgagcgcaacaucaccgagaucgucuaccucaccaacaccaccaucgagaaggagaucugccccaagcucgccgaguaccgcaacugguccaagccccagugcgacaucaccggcuucgcccccuucuccaaggacaacuccauccgccucuccgccggcggcgacaucugggucacccgcgagcccuacgucuccugcgaccccgacaagugcuaccaguucgcccucggccagggcaccacccucaacaacguccacuccaacaacaucguccgcgaccgcacccccuaccgcacccuccucaugaacgagcucggcguccccuuccaccucggcaccaagcaggucugcaucgccugguccuccuccuccugccacgacggcaaggccuggcuccacgucugcaucaccggcgacgacaagaacgccaccgccuccuucaucuacaacggccgccucgucgacuccaucgucuccugguccaaggagauccuccgcacccaggaguccgagugcgucugcaucaacggcaccugcaccgucgucaugaccgacggcuccgccuccggcaaggccgacaccaagauccucuucaucgaggagggcaagaucguccacaccuccacccucuccggcuccgcccagcacgucgaggagugcuccugcuacccccgcuaccccggcguccgcugcgucugccgcgacaacuggaagggcuccaaccgccccaucgucgacaucaacaucaaggaccacuccaucgucuccuccuacgucugcuccggccucgucggcgacaccccccgcaagaacgacuccuccuccuccucccacugccucgaccccaacaacgaggagggcggccacggcgucaagggcugggccuucgacgacggcaacgacgucuggaugggccgcaccaucuccgagaagucccgccucggcuacgagaccuucaaggucaucgagggcugguccaaccccaaguccaagcuccagaucaaccgccaggucaucgucgaccgcggcaaccgcuccggcuacuccggcaucuucuccgucgagggcaaguccugcaucaaccgcugcuucuacgucgagcucauccgcggccgcaaggaggagaccgagguccucuggaccuccuccuccaucgucgucuucugcggcaccuccggcaccuacggcaccggcuccuggcccgacggcgccgacaucaaccucaugcccaucuga

SEQ ID NO: 115425 - RNA, 1410 nt, Artificial Sequence; identical to SEQ ID NO: 112774
  derived and/or modified CDS sequence (opt2) from neuraminidase__InfluenzaA__ADL41165

SEQ ID NO: 115426 - RNA, 1410 nt, Artificial Sequence
  derived and/or modified CDS sequence (opt2) from neuraminidase__InfluenzaA__ADL41175
augaaccccaaccagaagaucaucaccaucggcuccgucugcaugaccaucggcauggccaaccucauccuccagaucggcaacaucaucuccaccuggaucucccacuccauccagcucggcaaccagaaccagaucgagaccugcaaccaguccgucaucaccuacgagaacaacaccugggucaaccagaccuacgucaacaucuccaacaccaacuucgccgccggccaguccgucgucuccgucaagcucgccggcaacuccucccucugccccgucuccggcugggccaucuacuccaaggacaacuccguccgcaucggcuccaagggcgacgucuucgucauccgcgagcccuucaucuccugcuccccccucgagugccgcaccuucuuccucacccagggcgcccuccucaacgacaagcacuccaacggcaccaucaaggaccgcucccccuaccgcacccucauguccugccccaucggcgagguccccucccccuacaacucccgcuucgaguccgucgccugguccgccuccgccugccacgacggcaucaacuggcucaccaucggcaucuccggccccgacaacggcgccgucgccguccucaaguacaacggcaucaucaccgacaccaucaaguccuggcgcaacaacauccuccgcacccaggaguccgagugcgccugcgucaacggcuccugcuucaccgucaugaccgacggccccuccaacggccaggccuccuacaagaucuuccgcaucgagaagggcaagaucgucaaguccgucgagaugaacgcccccaacuaccacuacgaggagugcuccugcuaccccgacuccuccgagaucaccugcgucugccgcgacaacuggcacggcuccaaccgccccugggucuccuucaaccagaaccucgaguaccagaucggcuacaucugcuccggcaucuucggcgacaacccccgccccaacgacaagaccggcuccugcggccccgucuccuccaacggcgccaacggcgucaagggcuucuccuucaaguacggcaacggcgucuggaucggccgcaccaaguccaucuccucccgcaacggcuucgagaugaucugggaccccaacggcuggaccggcaccgacaacaacuucuccaucaagcaggacaucgucggcaucaacgagugguccggcuacuccggcuccuucguccagcaccccgagcucaccggccucgacugcauccgccccugcuucugggucgagcucauccgcggccgccccaaggagaacaccaucuggaccuccggcuccuccaucuccuucugcggcgucaacuccgacaccgucggcugguccuggcccgacggcgccgagcuccccuucaccaucgacaaguga

SEQ ID NO: 115427 - RNA, 1413 nt, Artificial Sequence
  derived and/or modified CDS sequence (opt2) from neuraminidase__InfluenzaA__ADL60255
augaaccccaaccagaagaucaucaccaucggcuccaucuccaucgccaucggcaucaucucccucaugcuccagaucggcaacaucaucuccaucugggccucccacuccauccagaccggcucccagaacaacaccggcaucugcaaccagcgcaucaucaccuacgagaacuccaccugggucaacuacaccuacgucaacaucaacaacaccaacgucgucgccggcgaggacaagaccuccgucacccucgccggcaacuccucccucugcuccaucuccggcugggccaucuacaccaaggacaacuccauccgcaucggcuccaagggcgacgucuucgucauccgcgagcccuucaucuccugcucccaccucgagugccgcaccuucuuccucacccagggcgcccuccucaacgacaagcacuccaacggcaccgucaaggaccgcucccccuaccgcgcccucauguccugcccccucggcgaggcccccucccccuacaacuccaaguucgaguccgucgccugguccgccuccgccugccacgacggcaugggcuggcucaccaucggcaucuccggccccgacaacggcgccgucgccguccucaaguacaacggcaucaucaccggcaccaucaaguccuggaagaagcagauccuccgcacccaggaguccgagugcgucugcaugaacggcuccugcuucaccaucaugaccgacggccccuccaacaaggccgccuccuacaagaucuucaagaucgagaagggcaaggucaccaaguccaucgagcucaacgcccccaacuuccacuacgaggagugcuccugcuaccccgacaccggcaucgucaugugcgucugccgcgacaacuggcacggcuccaaccgccccugggucuccuucaaccagaaccucgacuaccagaucggcuacaucugcuccggcgucuucggcgacaacccccgccccaaggacggccgcggcuccugcaaccccgucaccgucgacggcgccaacggcgucaagggcuucuccuacaaguacgacaacggcgucuggaucggccgcaccaaguccaaccgccuccgcaagggcuucgagaugaucugggaccccaacggcuggaccaacaccgacuccgacuucuccgucaagcaggacgucgucgccaucaccgacugguccggcuacuccggcuccuucguccagcaccccgagcucaccggccucgacugcauccgccccugcuucugggucgagcucguccgcggccucccccgcgagaacaccaccaucuggaccuccggcuccuccaucuccuucugcggcgucaacuccgacaccgccaacugguccuggcccgacggcgccgagcuccccuucaccaucgacaaguga

SEQ ID NO: 115428 - RNA, 1413 nt, Artificial Sequence
  derived and/or modified CDS sequence (opt2) from neuraminidase__InfluenzaA__ADL60277
augaaccccaaccagcgcaucaucaccaucggcuccaucuccaucgccaucggcaucaucucccucaugcuccagaucggcaacaucaucuccaucugggccucccacuccauccagaucggcucccagaacaacaccggcaucugcaaccagcgcaucaucaccuacgagaacuccaccugggucaaccacaccuacgucaacaucaacaacaccaacgucgucgccggcgaggacaagacccccgucacccucgccggcaacuccucccucugcuccaucuccggcugggccaucuacaccaaggacaacuccauccgcaucggcuccaagggcgacgucuucgucauccgcgagcccuucaucuccugcucccaccucgagugccgcaccuucuuccucacccagggcgcccuccucaacgacaagcacuccaacggcaccgccaaggaccgcucccccuaccgcgcccucauguccugcccccucggcgaggcccccucccccuacaacuccaaguucgaguccgucgccugguccgccuccgccugccacgacggcaugggcuggcucaccaucggcaucuccggccccgacaacggcgccgucgccguccucaaguacaacggcaucaucaccggcaccaucaaguccuggaagaagcagauccuccgcacccaggaguccgagugcgucugcaugaacggcuccugcuucaccaucaugaccgacggccccuccaacaaggccgccuccuacaagaucuucaagaucgagaagggcaaggucaccaaguccaucgagcucaacgcccccaacuucuacuacgaggagugcuccugcuaccccgacaccggcaucgucaugugcgucugccgcgacaacuggcacggcuccaaccgccccugggucuccuucaaccagaaccucgacuaccagaucggcuacaucugcuccggcgucuucggcgacaacccccgccccgaggacggcgagggcuccugcaaccccgucaccgucgacggcgccaacggcgucaagggcuucuccuacaaguacggcaacggcgucuggaucggccgcaccaaguccaaccgccuccgcaagggcuucgagaugaucugggaccccaacggcuggaccaacaccgacuccgacuucuccgucaagcaggacgucgucgccaucaccgacugguccggcuacuccggcuccuucguccagcaccccgagcucaccggccucgacugcauccgccccugcuucugggucgagcucguccgcggccucccccgcgagaacaccaccaucuggaccuccggcuccuccaucuccuucugcggcgucaacuccgacaccgccaacugguccuggcccgacggcgccgagcuccccuucaccaucgacaaguga

SEQ ID NO: 115429 - RNA, 1413 nt, Artificial Sequence
  derived and/or modified CDS sequence (opt2) from neuraminidase__InfluenzaA__ADL60288
augaaccccaaccagaagaucaucaccaucggcuccaucuccaucgccaucggcaucaucucccucaugcuccagaucggcaacaucaucuccaucugggccucccacuccauccagaccggcucccagaacaacaccggcaucugcaaccagcgcaucaucaccuacgagaacuccaccugggucaaccacaccuacgucaacaucaacaacaccaacgucgucgccggcgaggacaagaccuccgucacccucgccggcaacuccucccucugcuccaucuccggcugggccaucuacaccaaggacaacuccauccgcaucggcuccaagggcgacgucuucgucauccgcgagcccuucaucuccugcucccaccucgagugccgcaccuucuuccucacccagggcgcccuccucaacgacaagcacuccaacggcaccgucaaggaccgcucccccuaccgcgcccucauguccugcccccucggcgaggcccccucccccuacaacuccaaguucgaguccgucgccugguccgccuccgccugccacgacggcaugggcuggcucaccaucggcaucuccggccccgacaacggcgccgucgccguccucaaguacaacggcaucaucaccggcaccaucaaguccuggaagaagcagauccuccgcacccaggaguccgagugcgucugcaugaacggcuccugcuucaccaucaugaccgacggccccuccaacaaggccgccuccuacaagaucuucaagaucgagaagggcaaggucaccaaguccaucgagcucaacgcccccaacuucuacuacgaggagugcuccugcuaccccgacaccggcaucgucaugugcgucugccgcgacaacuggcacggcuccaaccgccccugggucuccuucaaccagaaccucgacuaccagaucggcuacaucugcuccggcgucuucggcgacaacccccgccccaaggacggcaagggcuccugcaaccccgucaccgucgacggcgccaacggcgucaagggcuucuccuacaaguacggcaacggcgucuggaucggccgcaccaaguccaaccgccuccgcaagggcuucgagaugaucugggaccccaacggcuggaccaacaccgacuccgacuucuccgucaagcaggacgucgucgccaucaccgacugguccggcuacuccggcuccuucguccagcaccccgagcucaccggccucgacugcauccgccccugcuucugggucgagcucguccgcggccucccccgcgagaacaccaccaucuggaccuccggcuccuccaucuccuucugcggcgucaacuccgacaccgccaacugguccuggcccgacggcgccgagcuccccuucaccaucgacaaguga

SEQ ID NO: 115430 - RNA, 1413 nt, Artificial Sequence
  derived and/or modified CDS sequence (opt2) from neuraminidase__InfluenzaA__ADL60299
augaaccccaaccagaagaucaucaccaucggcuccaucuccaucgccaucggcaucaucucccucaugcuccagaucggcaacaucaucuccaucugggccucccacuccauccagaccggcucccagaacaacaccggcaucugcaaccagcgcaucaucaccuacgagaacuccaccugggucaaccacaccuacgucuccaucaacaacaccaacgucgucgccggcaaggacaagaccuccgucacccucgccggcaacuccucccucugcuccaucuccggcugggccaucuacaccaaggacaacuccauccgcaucggcuccaagggcgacgucuucgucauccgcgagcccuucaucuccugcucccaccucgagugccgcaccuucuuccucacccagggcgcccuccucaacgacaagcacuccaacggcaccgucaaggaccgcucccccuaccgcgcccucauguccugcccccucggcgaggcccccucccccuacaacuccaaguucgaguccgucgccugguccgccuccgccugccacgacggcaugggcuggcucaccaucggcaucuccggccccgacaacggcgccgucgccguccucaaguacaacggcaucaucaccggcaccaucaaguccuggaagaagcagauccuccgcacccaggaguccgagugcgucugcaugaacggcuccugcuucaccaucaugaccgacggccccuccaacaaggccgccuccuacaagaucuucaagaucgagaagggcaaggucaccaaguccaucgagcucaacgcccccaacuucuacuacgaggagugcuccugcuaccccgacaccggcaucgucaugugcgucugccgcgacaacuggcacggcuccaaccgccccugggucuccuucaaccaggaccucgacuaccagaucggcuacaucugcuccggcgucuucggcgacaacccccgccccaaggacggcaagggcuccugcaaccccgucaccgucgacggcgccaacggcgucaagggcuucuccuacaaguacggcaacggcgucuggaucggccgcaccaaguccaaccgccuccgcaagggcuucgagaugaucugggaccccaacggcuggaccaacaccgacuccgacuucuccgucaagcaggacgucgucgccaucaccgacugguccggcuacuccggcuccuucguccagcaccccgagcucaccggccucgacugcauccgccccugcuucugggucgagcucguccgcggccucccccgcgagaacaccaccaucuggaccuccggcuccuccaucuccuucugcggcgucaacuccgacaccgccaacugguccuggcccgacggcgccgagcuccccuucaccaucgacaaguga

SEQ ID NO: 115431 - RNA, 1413 nt, Artificial Sequence; identical to SEQ ID NO: 112668
  derived and/or modified CDS sequence (opt2) from neuraminidase__InfluenzaA__ADL60310

SEQ ID NO: 115432 - RNA, 1413 nt, Artificial Sequence
  derived and/or modified CDS sequence (opt2) from neuraminidase__InfluenzaA__ADL60321
augaaccccaaccagaagaucaucaccaucggcuccaucuccaucgccaucggcaucaucucccucaugcuccagaucggcaacaucaucuccaucugggccucccacuccauccagaccggcucccagaacaacaccggcaucugcaaccagcgcaucaucaccuacgagaacuccaccugggucaaccacaccuacgucaacaucaacaacaccaacgucgucgccggcgaggacaagaccuccgucacccucgccggcaacuccucccucugcuccaucuccggcugggccaucuacaccaaggacaacuccauccgcaucggcuccaagggcgacgucuucgucauccgcgagcccuucaucuccugcucccaccucgagugccgcaccuucuuccucacccagggcgcccuccucaacgacaagcacuccaacggcaccgucaaggaccgcucccccuaccgcgcccucauguccugcccccucggcgaggcccccucccccuacaacuccaaguucgaguccgucgccugguccgccuccgccugccacgacggcaugggcuggcucaccaucggcaucuccggccccgacaacggcgccgucgccguccucaaguacaacggcaucaucaccggcaccaucaaguccuggaagaagcagauccuccgcacccaggaguccgagugcgucugcaugaacggcuccugcuucaccaucaugaccgacggccccuccaacaaggccgccuccuacaagaucuucaagaucgagaagggcaaggucaccaaguccaucgagcucaacgcccccaacuuccacuacgaggagugcuccugcuaccccgacaccggcauggucaugugcgucugccgcgacaacuggcacggcuccaaccgccccugggucuccuucaaccagaaccucgacuaccagaucggcuacaucugcuccggcgucuucggcgacaacccccgccccgaggacggcgagggcuccugcaaccccgucaccgucgacggcgccaacggcgucaagggcuucuccuacaaguacgacaacggcgucuggaucggccgcaccaaguccaaccgccuccgcaagggcuucgagaugaucugggaccccaacggcuggaccaacaccgacuccgacuucuccgucaagcaggacgucgucgccaucaccgacugguccggcuacuccggcuccuucguccagcaccccgagcucaccggccucgacugcauccgccccugcuucugggucgagcucguccgcggccucccccgcgagaacaccaccaucuggaccuccggcuccuccaucuccuucugcggcgucaacuccgacaccgccaacugguccuggcccgacggcgccgagcuccccuucaccaucgacaaguga

SEQ ID NO: 115433 - RNA, 1413 nt, Artificial Sequence
  derived and/or modified CDS sequence (opt2) from neuraminidase__InfluenzaA__ADL60332
augaaccccaaccagaagaucaucaccaucggcuccaucuccaucgccaucggcaucaucucccucaugcuccagaucggcaacaucaucuccaucugggccucccacuccauccagaccggcucccagaacaacaccggcaucugcaaccagcgcaucaucaccuacgagaacuccaccugggucaaccacaccuacgucaacaucaacaacaccaacgucgucgccggcgaggacaagaccuccgucacccucgccggcaacuccucccucugcuccaucuccggcugggccaucuacaccaaggacaacuccauccgcaucggcuccaagggcgacgucuucgucauccgcgagcccuucaucuccugcucccaccucgagugccgcaccuucuuccucacccagggcgcccuccucaacgacaagcacuccaacggcaccgucaaggaccgcucccccuaccgcgcccucauguccugcccccucggcgaggcccccucccccuacaacuccaaguucgaguccgucgccugguccgccuccgccugccacgacggcaugggcuggcucaccaucggcaucuccggccccgacaacggcgccgucgccguccucaaguacaacggcaucaucaccggcaccaucaaguccuggaagaagcagauccuccgcacccaggaguccgagugcgucugcaugaacggcuccugcuucaccaucaugaccgacggccccuccaacaaggccgccuccuacaagaucuucaagaucgagaagggcaaggucaccaaguccaucgagcucaacgcccccaacuuccacuacgaggagugcuccugcuaccccgacaccggcaucgucaugugcgucugccgcgacaacuggcacggcuccaaccgccccugggucuccuucaaccagaaccucgacuaccagaucggcuacaucugcuccggcgucuucggcgacaacccccgccccaaggacggccgcggcuccugcaaccccgucaccgucgacggcgccaacggcgucaagggcuucuccuacaaguacgacaacggcgucuggaucggccgcaccaaguccaaccgccuccgcaagggcuucgagaugaucugggaccccaacggcuggaccaacaccgacuccgacuucuccgucaagcaggacgucgucgccaucaccgacugguccggcuacuccggcuccuucguccagcaccccgagcucaccggccucgacugcauccgccccugcuucugggucgagcucguccgcggccucccccgcgagaacaccaccaucuggaccuccggcuccuccaucuccuucugcggcgucaacuccgacaccgccaacugguccuggcccgacggcgccgagcuccccuucaccaucgacaaguga

SEQ ID NO: 115434 - RNA, 1413 nt, Artificial Sequence; identical to SEQ ID NO: 112668
  derived and/or modified CDS sequence (opt2) from neuraminidase__InfluenzaA__ADL60343

SEQ ID NO: 115435 - RNA, 1413 nt, Artificial Sequence
  derived and/or modified CDS sequence (opt2) from neuraminidase__InfluenzaA__ADL60354
augaaccccaaccagcgcaucaucaccaucggcuccaucuccaucgccaucggcaucaucucccucaugcuccagaucggcaacaucaucuccaucugggccucccacuccauccagaucggcucccagaacaacaccggcaucugcaaccagcgcaucaucaccuacgagaacuccaccugggucaaccacaccuacgucaacaucaacaacaccaacgucgucgccggcgaggacaagaccuccgucacccucgccggcaacuccucccucugcuccaucuccggcugggccaucuacaccaaggacaacuccauccgcaucggcuccaagggcgacgucuucgucauccgcgagcccuucaucuccugcucccaccucgagugccgcaccuucuuccucacccagggcgcccuccucaacgacaagcacuccaacggcaccgccaaggaccgcucccccuaccgcgcccucauguccugcccccucggcgaggcccccucccccuacaacuccaaguucgaguccgucgccugguccgccuccgccugccacgacggcaugggcuggcucaccaucggcaucuccggccccgacaacggcgccgucgccguccucaaguacaacggcaucaucaccggcaccaucaaguccuggaagaagcagauccuccgcacccaggaguccgagugcgucugcaugaacggcuccugcuucaccaucaugaccgacggccccuccaacaaggccgccuccuacaagaucuucaagaucgagaagggcaaggucaccaaguccaucgagcucaacgcccccaacuucuacuacgaggagugcuccugcuaccccgacaccggcaucgucaugugcgucugccgcgacaacuggcacggcuccaaccgccccugggucuccuucaaccagaaccucgacuaccagaucggcuacaucugcuccggcgucuucggcgacaacccccgccccaaggacggcaagggcuccugcaaccccgucaccgucgacggcgccaacggcgucaagggcuucuccuacaaguacggcaacggcgucuggaucggccgcaccaaguccaaccgccuccgcaagggcuucgagaugaucugggaccccaacggcuggaccaacaccgacuccgacuucuccgucaagcaggacgucgucgccaucaccgacugguccggcuacuccggcuccuucguccagcaccccgagcucaccggccucgacugcauccgccccugcuucugggucgagcucguccgcggccucccccgcgagaacaccaccaucuggaccuccggcuccuccaucuccuucugcggcgucaacuccgacaccgccaacugguccuggcccgacggcgccgagcuccccuucaccaucgacaaguga

SEQ ID NO: 115436 - RNA, 1410 nt, Artificial Sequence
  derived and/or modified CDS sequence (opt2) from neuraminidase__InfluenzaA__ADL60365
augaaccccaaccagaagaucaucaccaucggcuccgucucccucaccaucuccaccaucugcuucuucaugcagaucgccauccucaucaccaccgucacccuccacuucaagcaguacgaguucaacuccucccccaacaaccaggucaugcucugcgagcccaccaucaucgagcgcaacaucaccgagaucgucuaccucaccaacaccaccaucgagaaggagaucucccccaagcucgccgaguaccgcaacugguccaagccccagugcgacaucaccggcuucgcccccuucuccaaggacaacuccauccgccucuccgccggcggcgacaucugggucacccgcgagcccuacgucuccugcgaccccgacaagugcuaccaguucgcccucggccagggcaccacccucaacaacguccacuccaacaacaucguccgcgaccgcacccccuaccgcacccuccucaugaacgagcucggcguccccuuccaccucggcaccaagcaggucugcaucgccugguccuccuccuccugccacgacggcaaggccuggcuccacgucugcaucaccggcgacgacaagaacgccaccgccuccuucaucuacaacggccgccucgucgacuccaucgucuccugguccaaggagauccuccgcacccaggaguccgagugcgucugcaucaacggcaccugcaccgucgucaugaccgacggcuccgccuccggcaaggccgacaccaagauccucuucaucgaggagggcaagaucguccacaccuccacccucuccggcuccgcccagcacgucgaggagugcuccugcuacccccgcuaccccggcguccgcugcgucugccgcgacaacuggaagggcuccaaccgccccaucgucgacaucaacaucaaggaccacuccaccgucuccuccuacgucugcuccggccucgucggcgacaccccccgcaagaacgacuccuccuccuccucccacugccucgaccccaacaacgaggagggcggccacggcgucaagggcugggccuucgacgacggcaacgacgucuggaugggccgcaccaucuccgagaagucccgccucggcuacgagaccuucaaggucaucgagggcugguccaaccccaaguccaagcuccagaucaaccgccaggucaucgucgaccgcggcaaccgcuccggcuacuccggcaucuucuccgucgagggcaaguccugcaucaaccgcugcuucuacgucgagcucauccgcggccgcaaggaggagaccgagguccucuggaccuccaacuccaucgucgucuucugcggcaccuccggcaccuacggcaccggcuccuggcccgacggcgccgacaucaaccucaugcccaucuga

SEQ ID NO: 115437 - RNA, 1413 nt, Artificial Sequence
  derived and/or modified CDS sequence (opt2) from neuraminidase__InfluenzaA__ADL60376
augaaccccaaccagaagaucaucaccaucggcuccaucuccaucgccaucggcaucaucucccucaugcuccagaucggcaacaucaucuccaucugggccucccacuccauccagaccggcucccagaacaacaccggcaucugcaaccagcgcaucaucaccuacgagaacuccaccugggucaaccacaccuacgucaacaucaacaacaccaacgucgucgccggcgaggacaagaccuccgucacccucgccggcaacuccucccucugcuccaucuccggcugggccaucuacaccaaggacaacuccauccgcaucggcuccaagggcgacgucuucgucauccgcgagcccuucaucuccugcucccaccucgagugccgcaccuucuuccucacccagggcgcccuccucaacgacaagcacuccaacggcaccggcaaggaccgcucccccuaccgcgcccucauguccugcccccucggcgaggcccccucccccuacaacuccaaguucgaguccgucgccugguccgccuccgccugccacgacggcaugggcuggcucaccaucggcaucuccggccccgacaacggcgccgucgccguccucaaguacaacggcaucaucaccggcaccaucaaguccuggaagaagcagauccuccgcacccaggaguccgagugcgucugcaugaacggcuccugcuucaccaucaugaccgacggccccuccaacaaggccgccuccuacaagaucuucaagaucgagaagggcaaggucaccaaguccaucgagcucaacgcccccaacuuccacuacgaggagugcuccugcuaccccgacaccggcaucgucaugugcgucugccgcgacaacuggcacggcuccaaccgccccugggucuccuucaaccagaaccucgacuaccagaucggcuacaucugcuccggcgucuucggcgacaacccccgccccaaggacggcaagggcuccugcaaccccgucaccgucgacggcgccaacggcgucaagggcuucuccuacaaguacgacaacggcgucuggaucggccgcaccaaguccaaccgccuccgcaagggcuucgagaugaucugggaccccaacggcuggaccaacaccgacuccgacuucuccgucaagcaggacgucgucgccaucaccgacugguccggcuacuccggcuccuucguccagcaccccgagcucaccggccucgacugcauccgccccugcuucugggucgagcucguccgcggccucccccgcgagaacaccaccaucuggaccuccggcuccuccaucuccuucugcggcgucaacuccgacaccgccaacugguccuggcccgacggcgccgagcuccccuucaccaucgacaaguga

SEQ ID NO: 115438 - RNA, 1410 nt, Artificial Sequence; identical to SEQ ID NO: 112774
  derived and/or modified CDS sequence (opt2) from neuraminidase__InfluenzaA__ADM07137

SEQ ID NO: 115439 - RNA, 1410 nt, Artificial Sequence; identical to SEQ ID NO: 112774
  derived and/or modified CDS sequence (opt2) from neuraminidase__InfluenzaA__ADM07146

SEQ ID NO: 115440 - RNA, 1410 nt, Artificial Sequence; identical to SEQ ID NO: 112774
  derived and/or modified CDS sequence (opt2) from neuraminidase__InfluenzaA__ADM07156

SEQ ID NO: 115441 - RNA, 1410 nt, Artificial Sequence; identical to SEQ ID NO: 112774
  derived and/or modified CDS sequence (opt2) from neuraminidase__InfluenzaA__ADM07165

SEQ ID NO: 115442 - RNA, 1413 nt, Artificial Sequence; identical to SEQ ID NO: 113497
  derived and/or modified CDS sequence (opt2) from neuraminidase__InfluenzaA__ADM07474

SEQ ID NO: 115443 - RNA, 1413 nt, Artificial Sequence; identical to SEQ ID NO: 113497
  derived and/or modified CDS sequence (opt2) from neuraminidase__InfluenzaA__ADM07485

SEQ ID NO: 115444 - RNA, 1410 nt, Artificial Sequence
  derived and/or modified CDS sequence (opt2) from neuraminidase__InfluenzaA__ADM07496
augaaccccaaccagaagaucaucaccaucggcuccgucucccucaccaucuccaccaucugcuucuucaugcagaucgccauccucaucaccaccgucacccuccacuucaagcaguacgaguucaacuccccccccaacaaccaggucaugcucugcgagcccaccaucaucgagcgcaacaucaccgagaucgucuaccucaccaacaccaccaucgagaaggagaucugccccaagcucgccgaguaccgcaacugguccaagccccagugcgacaucaccggcuucgcccccuucuccaaggacaacuccauccgccucuccgccggcggcgacaucugggucacccgcgagcccuacgucuccugcgaccccgacaagugcuaccaguucgcccucggccagggcaccacccucaacaacguccacuccaacaacaccguccgcgaccgcacccccuaccgcacccuccucaugaacgagcucggcguccccuuccaccucggcaccaagcaggucugcaucgccugguccuccuccuccugccacgacggcaaggccuggcuccacgucugcaucaccggcgacgacaagaacgccaccgccuccuucaucuacaacggccgccucgucgacuccgucgucuccugguccaaggagauccuccgcacccaggaguccgagugcgucugcaucaacggcaccugcaccgucgucaugaccgacggcuccgccuccggcaaggccgacaccaagauccucuucaucgaggagggcaagaucguccacaccuccacccucuccggcuccgcccagcacgucgaggagugcuccugcuacccccgcuaccccggcguccgcugcgucugccgcgacaacuggaagggcuccaaccgccccaucgucgacaucaacaucaaggaccacuccaucgucuccuccuacgucugcuccggccucgucggcgacaccccccgcaagaacgacuccuccuccuccucccacugccucgaccccaacaacgaggagggcggccacggcgucaagggcugggccuucgacgacggcaacgacgucuggaugggccgcaccaucuccgagaagucccgccucggcuacgagaccuucaaggucaucgagggcugguccaaccccaaguccaagcuccagaucaaccgccaggucaucgucgaccgcggcaaccgcuccggcuacuccggcaucuucuccgucgagggcaaguccugcaucaaccgcugcuucuacgucgagcucauccgcggccgcaaggaggagaccgagguccucuggaccuccaacuccaucgucgucuucugcggcaccuccggcaccuacggcaccggcuccuggcccgacggcgccgacaucaacaucaugcccaucuga

SEQ ID NO: 115445 - RNA, 1410 nt, Artificial Sequence
  derived and/or modified CDS sequence (opt2) from neuraminidase__InfluenzaA__ADM07507
augaaccccaaccagaagaucaucaccaucggcuccgucucccucaccaucuccaccaucugcuucuucaugcagaccgccauccucaucaccaccgucacccuccacuucaagcaguucgaguucaacuccccccccaacaaccaggucaugcucugcgagcccgccaucaucgagcgcaacaucaccgagaucgucuaccucaccaacaccaccaucgagaaggagaucugccccaagcucgccgaguaccgcaacugguccaagccccagugcgacaucaccggcuucgcccccuucuccaaggacaacuccauccgccucuccgccggcggcgacaucugggucacccgcgagcccuacgucuccugcgaccccgacaagugcuaccaguucgcccucggccagggcaccacccucaacaacguccacuccaacaacaccguccgcgaccgcacccccuaccgcacccuccucaugaacgagcucggcguccccuuccaccucggcaccaagcaggucugcaucgccugguccuccuccuccugccacgacggcaaggccuggcuccacgucugcaucaccggcgacgacaagaacgccaccgccuccuucaucuacaacggccgccucgucgacuccgucgucuccugguccaaggagauccuccgcacccaggaguccgagugcgucugcaucaacggcaccugcaccgucgucaugaccgacggcuccgccuccggcaaggccgacaccaagauccucuucaucgaggagggcaagaucguccacaccuccacccucuccggcuccgcccagcacgucgaggagugcuccugcuacccccgcuaccccggcguccgcugcgucugccgcgacaacuggaagggcuccaaccgccccaucgucgacaucaacaucaaggaccacuccaucgucuccuccuacgucugcuccggccucgucggcgacaccccccgcaagaacgacuccuccuccuccucccacugccucgaccccaacaacgaggagggcggccacggcgucaagggcugggccuucgacgacggcaacgacgucuggaugggccgcaccaucuccgagaagucccgccucggcuacgagaccuucaaggucaucgagggcugguccaaccccaaguccaagcuccagaucaaccgccaggucaucgucgaccgcggcaaccgcuccggcuacuccggcaucuucuccgucgagggcaaguccugcaucaaccgcugcuucuacgucgagcucauccgcggccgcaaggaggagaccgagguccucuggaccuccaacuccaucgucgucuucugcggcaccuccggcaccuacggcaccggcuccuggcccgacggcgccgacaucaaccucaugcccaucuga

SEQ ID NO: 115446 - RNA, 1410 nt, Artificial Sequence
  derived and/or modified CDS sequence (opt2) from neuraminidase__InfluenzaA__ADM12820
augaaccccaaccagaagaucaucaccaucggcuccgucucccucaccaucuccaccaucugcuucuucaugcagaucgccauccucaucaccaccgucacccuccacuucaagcaguacaaguucaacuccccccccaacaaccaggucaugcucugcgagcccaccaucaucgagcgcaacaucaccgagaucgucuaccucaccaacaccaccaucgagaaggagaucugccccaagcucgccgaguaccgcaacugguccaagccccagugcgacaucaccggcuucgcccccuucuccaaggacaacuccauccgccucuccgccggcggcgacaucugggucacccgcgagcccuacgucuccugcgaccccgacaagugcuaccaguucgcccucggccagggcaccacccucaacaacguccacuccaacaacaccguccgcgaccgcacccccuaccgcacccuccucaugaacgagcucggcguccccuuccaccucggcaccaagcaggucugcaucgccugguccuccuccuccugccacgacggcaaggccuggcuccacgucugcaucaccggcgacgacaagaacgccaccgccuccuucaucuacaacggccgccucgucgacuccgucgucuccugguccaaggagauccuccgcacccaggaguccgagugcgucugcaucaacggcaccugcaccgucgucaugaccgacggcuccgccuccggcaaggccgacaccaagauccucuucaucgaggagggcaagaucguccacaccuccacccucuccggcuccgcccagcacgucgaggagugcuccugcuacccccgcuaccccggcguccgcugcgucugccgcgacaacuggaagggcuccaaccgccccaucgucgacaucaacaucaaggaccacuccaucgucuccuccuacgucugcuccggccucgucggcgacaccccccgcaagaacgacuccuccuccuccucccacugccucgaccccaacaacgaggagggcggccacggcgucaagggcugggccuucgacgacggcaacgacgucuggaugggccgcaccaucaacgagaccucccgccucggcuacgagaccuucaaggucaucgagggcugguccaaccccaaguccaagcuccagaucaaccgccaggucaucgucgaccgcggcaaccgcuccggcuacuccggcaucuucuccgucgagggcaaguccugcaucaaccgcugcuucuacgucgagcucauccgcggccgcaaggaggagaccgagguccucuggaccuccaacuccaucgucgucuucugcggcaccuccggcaccuacggcaccggcuccuggcccgacggcgccgaccucaaccucaugcccaucuga

SEQ ID NO: 115447 - RNA, 1410 nt, Artificial Sequence; identical to SEQ ID NO: 115446
  derived and/or modified CDS sequence (opt2) from neuraminidase__InfluenzaA__ADM12831

SEQ ID NO: 115448 - RNA, 1410 nt, Artificial Sequence; identical to SEQ ID NO: 115446
  derived and/or modified CDS sequence (opt2) from neuraminidase__InfluenzaA__ADM12842

SEQ ID NO: 115449 - RNA, 1410 nt, Artificial Sequence; identical to SEQ ID NO: 115446
  derived and/or modified CDS sequence (opt2) from neuraminidase__InfluenzaA__ADM12853

SEQ ID NO: 115450 - RNA, 1410 nt, Artificial Sequence; identical to SEQ ID NO: 112774
  derived and/or modified CDS sequence (opt2) from neuraminidase__InfluenzaA__ADM12864

SEQ ID NO: 115451 - RNA, 1410 nt, Artificial Sequence; identical to SEQ ID NO: 112774
  derived and/or modified CDS sequence (opt2) from neuraminidase__InfluenzaA__ADM12874

SEQ ID NO: 115452 - RNA, 1410 nt, Artificial Sequence; identical to SEQ ID NO: 112774
  derived and/or modified CDS sequence (opt2) from neuraminidase__InfluenzaA__ADM12884

SEQ ID NO: 115453 - RNA, 1410 nt, Artificial Sequence
  derived and/or modified CDS sequence (opt2) from neuraminidase__InfluenzaA__ADM12894
augaaccccaaccagaagaucaucaccaucggcuccgucugcaugaccaucggcauggccaaccucauccuccagaucggcaacaucaucuccaucuggaucucccacuccauccagcucggcaaccagaaccagaucgagaccugcaaccaguccgucaucaccuacgagaacaacaccugggucaaccagaccuacgucaacaucuccaacaccaacuucgccgccggccaguccgucgucuccgucaagcucgccggcaacuccucccucugccccgucuccggcugggccaucuacuccaaggacaacuccauccgcaucggcuccaagggcgacgucuucgucauccgcgagcccuucaucuccugcuccccccucgagugccgcaccuucuuccucacccagggcgcccuccucaacgacaagcacuccaacggcaccaucaaggaccgcucccccuaccgcacccucauguccugccccaucggcgagguccccucccccuacaacucccgcuucgaguccgucgccugguccgccuccgccugccacgacggcaucaacuggcucaccaucggcaucuccggccccgacaacggcgccgucgccguccucaaguacaacggcaucaucaccgacaccaucaaguccuggcgcaacaacauccuccgcacccaggaguccgagugcgccugcgucaacggcuccugcuucaccgucaugaccgacggccccuccgacggccaguccuccuacaagaucuuccgcaucgagaagggcaagaucgucaaguccgucgagaugaacgcccccaacuaccacuacgaggagugcuccugcuaccccgacuccuccgagaucaccugcgucugccgcgacaacuggcacggcuccaaccgccccugggucuccuucaaccagaaccucgaguaccagaucggcuacaucugcuccggcaucuucggcgacaacccccgccccaacgacaagaccggcuccugcggccccgucuccuccaacggcgccaacggcgucaagggcuucuccuucaaguacggcaacggcgucuggaucggccgcaccaaguccaucuccucccgcaacggcuucgagaugaucugggaccccaacggcuggaccggcaccgacaacaacuucuccaucaagcaggacaucgucggcaucaacgagugguccggcuacuccggcuccuucguccagcaccccgagcucaccggccucgacugcauccgccccugcuucugggucgagcucauccgcggccgccccaaggagaacaccaucuggaccuccggcuccuccaucuccuucugcggcgucaacuccgacaccgucggcugguccuggcccgacggcgccgagcuccccuucaccaucgacaaguga

SEQ ID NO: 115454 - RNA, 1410 nt, Artificial Sequence; identical to SEQ ID NO: 112774
  derived and/or modified CDS sequence (opt2) from neuraminidase__InfluenzaA__ADM12904

SEQ ID NO: 115455 - RNA, 1410 nt, Artificial Sequence
  derived and/or modified CDS sequence (opt2) from neuraminidase__InfluenzaA__ADM12914
augaaccccaaccagaagaucaucaccaucggcuccgucugcaugaccaucggcauggccaaccucauccuccagaucggcaacaucaucuccaucuggaucucccacuccauccagcucggcaaccagaaccagaucgagaccugcaaccaguccgucaucaccuacgagaacaacaccugggucaaccagaccuacgucaacaucuccaacaccaacuucgccgccggccaguccgucgucuccgucaagcucgccggcaacuccucccucugccccgucuccggcugggccaucuacuccaaggacaacuccauccgcaucggcuccaagggcgacgucuucgucauccgcgagcccuucaucuccugcuccccccucgagugccgcaccuucuuccucacccagggcgcccuccucaacgacaagcacuccaacggcaccaucaaggaccgcucccccuaccgcacccucauguccugccccaucggcgagguccccucccccuacaacucccgcuucgaguccgucgccugguccgccuccgccugccacgacggcaucaacuggcucaccaucggcaucuccggccccgacaacggcgccgucgccguccucaaguacaacggcaucaucaccgacaccaucaaguccuggcgcaacaacauccuccgcacccaggaguccgagugcgccugcgucaacggcuccugcuucaccgucaugaccgacggccccuccgacggccaggccuccuacaagaucuuccgcaucgagaagggcaagaucgucaaguccgucgagaugaacgcccccaacuaccacuacgaggagugcuccugcuaccccgacuccuccgagaucaccugcgucugccgcgacaacuggcacggcuccaaccgccccugggucuccuucaaccagaaccucgaguaccagaucggcuacaucugcuccggcaucuucggcgacaacccccgccccaacgacaagaccggcuccugcggccccgucuccuccuacggcgccaacggcgucaagggcuucuccuucaaguacggcaacggcgucuggaucggccgcaccaaguccaucuccucccgcaacggcuucgagaugaucugggaccccaacggcuggaccggcaccgacaacaacuucuccaucaagcaggacaucgucggcaucaacgagugguccggcuacuccggcuccuucguccagcaccccgagcucaccggccucgacugcauccgccccugcuucugggucgagcucauccgcggccgccccaaggagaacaccaucuggaccuccggcuccuccaucuccuucugcggcgucaacuccgacaccgucggcugguccuggcccgacggcgccgagcuccccuucaccaucgacaaguga

SEQ ID NO: 115456 - RNA, 1410 nt, Artificial Sequence; identical to SEQ ID NO: 112774
  derived and/or modified CDS sequence (opt2) from neuraminidase__InfluenzaA__ADM12924

SEQ ID NO: 115457 - RNA, 1410 nt, Artificial Sequence; identical to SEQ ID NO: 112774
  derived and/or modified CDS sequence (opt2) from neuraminidase__InfluenzaA__ADM12934

SEQ ID NO: 115458 - RNA, 1410 nt, Artificial Sequence; identical to SEQ ID NO: 112774
  derived and/or modified CDS sequence (opt2) from neuraminidase__InfluenzaA__ADM12944

SEQ ID NO: 115459 - RNA, 1410 nt, Artificial Sequence; identical to SEQ ID NO: 112774
  derived and/or modified CDS sequence (opt2) from neuraminidase__InfluenzaA__ADM12954

SEQ ID NO: 115460 - RNA, 1410 nt, Artificial Sequence; identical to SEQ ID NO: 112774
  derived and/or modified CDS sequence (opt2) from neuraminidase__InfluenzaA__ADM12964

SEQ ID NO: 115461 - RNA, 1410 nt, Artificial Sequence; identical to SEQ ID NO: 114062
  derived and/or modified CDS sequence (opt2) from neuraminidase__InfluenzaA__ADM12974

SEQ ID NO: 115462 - RNA, 1410 nt, Artificial Sequence
  derived and/or modified CDS sequence (opt2) from neuraminidase__InfluenzaA__ADM12984
augaaccccaaccagaagaucaucaccaucggcuccgucugcaugaccaucggcauggccaaccucauccuccagaucggcaacaucaucuccaucuggaucucccacuccauccagcucggcaaccagaaccagaucgagaccugcaaccaguccgucaucaccuacgagaacaacaccugggucaaccagaccuacgucaacaucuccaacaccaacuucgccgccggccaguccgucgucuccgucaagcucgccggcaacuccucccucugccccgucuccggcugggccaucuacuccaaggacaacuccauccgcaucggcuccaagggcgacgucuucgucauccgcgagcccuucaucuccugcuccccccucgagugccgcaccuucuuccucacccagggcgcccuccucaacgacaagcacuccaacggcaccaucaaggaccgcucccccuaccgcacccucauguccugccccaucggcgagguccccucccccuacaacucccgcuucgaguccgucgccugguccgccuccgccugccacgacggcaucaacuggcucaccaucggcaucuccggccccgacaacggcgccgucgccguccucaaguacaacggcaucaucaccgacaccauccgcuccuggcgcaacaacauccuccgcacccaggaguccgagugcgccugcgucaacggcuccugcuucaccgucaugaccgacggccccuccgacggccaggccuccuacaagaucuuccgcaucgagaagggcaagaucgucaaguccgucgagaugaacgcccccaacuaccacuacgaggagugcuccugcuaccccgacuccuccgagaucaccugcgucugccgcgacaacuggcacggcuccaaccgccccugggucuccuucaaccagaaccucgaguaccagaucggcuacaucugcuccggcaucuucggcgacaacccccgccccaacgacaagaccggcuccugcggccccgucuccuccaacggcgccaacggcgucaagggcuucuccuucaaguacggcaacggcgucuggaucggccgcaccaaguccaucuccucccgcaacggcuucgagaugaucugggaccccaacggcuggaccggcaccgacaacaacuucuccaucaagcaggacaucgucggcaucaacgagugguccggcuacuccggcuccuucguccagcaccccgagcucaccggccucgacugcauccgccccugcuucugggucgagcucauccgcggccgccccaaggagaacaccaucuggaccuccggcuccuccaucuccuucugcggcgucaacuccgacaccgucggcugguccuggcccgacggcgccgagcuccccuucaccaucgacaaguga

SEQ ID NO: 115463 - RNA, 1410 nt, Artificial Sequence; identical to SEQ ID NO: 112774
  derived and/or modified CDS sequence (opt2) from neuraminidase__InfluenzaA__ADM12994

SEQ ID NO: 115464 - RNA, 1410 nt, Artificial Sequence; identical to SEQ ID NO: 112774
  derived and/or modified CDS sequence (opt2) from neuraminidase__InfluenzaA__ADM13004

SEQ ID NO: 115465 - RNA, 1410 nt, Artificial Sequence; identical to SEQ ID NO: 112774
  derived and/or modified CDS sequence (opt2) from neuraminidase__InfluenzaA__ADM13014

SEQ ID NO: 115466 - RNA, 1410 nt, Artificial Sequence
  derived and/or modified CDS sequence (opt2) from neuraminidase__InfluenzaA__ADM13034
augaaccccaaccagaagaucaucaccaucggcuccgucugcaugaccaucggcauggccaaccucauccuccagaucggcaacaucaucuccaucuggaucucccacuccauccagcucggcaaccagaaccagaucgagaccugcaaccaguccgucaucaccuacgagaacaacaccugggucaaccagaccuacgucaacaucuccaacaccaacuucgccgccggccaguccgucgucuccgucaagcucgccggcaacuccucccucugccccgucuccggcugggccaucuacuccaaggacaacuccauccgcaucggcuccaagggcgacgucuucgucauccgcgagcccuucaucuccugcuccccccucgagugccgcaccuucuuccucacccagggcgcccuccucaacgacaagcacuccaacggcaccaucaaggaccgcucccccuaccgcacccucauguccugccccaucggcgagguccccucccccuacaacucccgcuucgaguccgucgccugguccgccuccgccugccacgacggcaucaacuggcucaccaucggcaucuccggccccgacaacggcgccgucgccguccucaaguacaacggcaucaucaccgacaccaucaaguccuggcgcaacaacauccuccgcacccaggaguccgagugcgccugcgucaacggcuccugcuucaccgucaugaccgacggccccuccgacggccaggccuccuacaagaucuuccgcaucgagaagggcaagaucgucaaguccgucgagaugaacgcccccaacuaccacuacgaggagugcuccugcuaccccgacuccuccgagaucaccugcgucugccgcgacaacuggcacggcuccaaccgccccugggucuccuucaaccagaaccucgaguaccagaucggcuacaucugcuccggcaucuucggcgacaacccccgccccaacgacaagaccggcaacugcggccccgucuccuccaacggcgccaacggcgucaagggcuucuccuucaaguacggcaacggcgucuggaucggccgcaccaaguccaucuccucccgcaacggcuucgagaugaucugggaccccaacggcuggaccggcaccgacaacaacuucuccaucaagcaggacaucgucggcaucaacgagugguccggcuacuccggcuccuucguccagcaccccgagcucaccggccucgacugcauccgccccugcuucugggucgagcucauccgcggccgccccaaggagaacaccaucuggaccuccggcuccuccaucuccuucugcggcgucaacuccgacaccgucggcugguccuggcccgacggcgccgagcuccccuucaccaucgacaaguga

SEQ ID NO: 115467 - RNA, 1410 nt, Artificial Sequence; identical to SEQ ID NO: 114687
  derived and/or modified CDS sequence (opt2) from neuraminidase__InfluenzaA__ADM13044

SEQ ID NO: 115468 - RNA, 1410 nt, Artificial Sequence; identical to SEQ ID NO: 113600
  derived and/or modified CDS sequence (opt2) from neuraminidase__InfluenzaA__ADM13054

SEQ ID NO: 115469 - RNA, 1410 nt, Artificial Sequence; identical to SEQ ID NO: 113951
  derived and/or modified CDS sequence (opt2) from neuraminidase__InfluenzaA__ADM13064

SEQ ID NO: 115470 - RNA, 1410 nt, Artificial Sequence
  derived and/or modified CDS sequence (opt2) from neuraminidase__InfluenzaA__ADM13074
augaaccccaaccagaagaucaucaccaucggcuccgucugcaugaccaucggcauggccaaccucauccuccagaucggcaacaucaucuccaucuggaucucccacuccauccagcucggcaaccagaaccagaucgagaccugcaaccaguccgucaucaccuacgagaacaacaccugggucaaccagaccuacgucaacaucuccaacaccaaccucgccgccggccaguccgucgucuccgucaagcucgccggcaacuccucccucugccccgucuccggcugggccaucuacuccaaggacaacuccauccgcaucggcuccaagggcgacgucuucgucauccgcgagcccuucaucuccugcuccccccucgagugccgcaccuucuuccucacccagggcgcccuccucaacgacaagcacuccaacggcaccaucaaggaccgcucccccuaccgcacccucauguccugccccaucggcgagguccccucccccuacaacucccgcuucgaguccgucgccugguccgccuccgccugccacgacggcaucaacuggcucaccaucggcaucuccggccccgacaacggcgccgucgccguccucaaguacaacggcaucaucaccgacaccaucaaguccuggcgcaacaacauccuccgcacccaggaguccgagugcgccugcgucaacggcuccugcuucaccgucaugaccgacggccccuccgacggccaggccuccuacaagaucuuccgcaucgagaagggcaagaucgucaaguccgucgagaugaacgcccccaacuaccacuacgaggagugcuccugcuaccccgacuccuccgagaucaccugcgucugccgcgacaacuggcacggcuccaaccgccccugggucuccuucaaccagaaccucgaguaccagaucggcuacaucugcuccggcaucuucggcgacaacccccgccccaacgacaagaccggcuccugcggccccgucuccuccaacggcgccaacggcgucaagggcuucuccuucaaguacggcaacggcgucuggaucggccgcaccaaguccaucuccucccgcaacggcuucgagaugaucugggaccccaacggcuggaccggcaccgacaacaaguucuccaucaagcaggacaucgucggcaucaacgagugguccggcuacuccggcuccuucguccagcaccccgagcucaccggccucgacugcauccgccccugcuucugggucgagcucauccgcggccgccccaaggagaacaccaucuggaccuccggcuccuccaucuccuucugcggcgucaacuccgacaccgucggcugguccuggcccgacggcgccgagcuccccuucaccaucgacaaguga

SEQ ID NO: 115471 - RNA, 1410 nt, Artificial Sequence; identical to SEQ ID NO: 113951
  derived and/or modified CDS sequence (opt2) from neuraminidase__InfluenzaA__ADM13084

SEQ ID NO: 115472 - RNA, 1410 nt, Artificial Sequence
  derived and/or modified CDS sequence (opt2) from neuraminidase__InfluenzaA__ADM13094
augaaccccaaccagaagaucaucaccaucggcuccgucugcaugaccaucggcauggccaaccucauccuccagaucggcaacaccaucuccaucuggaucucccacuccauccagcucggcaaccagaaccagaucgagaccugcaaccaguccgucaucaccuacgagaacaacaccugggucaaccagaccuacgucaacaucuccaacaccaacuucgccgccggccaguccgucgucuccgccaagcucgccggcaacuccucccucugccccgucuccggcugggccaucuacuccaaggacaacuccauccgcaucggcuccaagggcgacgucuucgucauccgcgagcccuucaucuccugcuccccccucgagugccgcaccuucuuccucacccagggcgcccuccucaacgacaagcacuccaacggcaccaucaaggaccgcucccccuaccgcacccucauguccugccccaucggcgagguccccucccccuacaacucccgcuucgaguccgucgccugguccgccuccgccugccacgacggcaucaacuggcucaccaucggcaucuccggccccgacaacggcgccgucgccguccucaaguacaacggcaucaucaccgacaccaucaaguccuggcgcaacaacauccuccgcacccaggaguccgagugcgccugcgucaacggcuccugcuucaccgucaugaccgacggccccuccgacggccaggccuccuacaagaucuuccgcaucgagaagggcaagaucgucaaguccgucgagaugaacgcccccaacuaccacuacgaggagugcuccugcuaccccgacuccuccgagaucaccugcgucugccgcgacaacuggcacggcuccaaccgccccugggucuccuucaaccagaaccucgaguaccagaucggcuacaucugcuccggcaucuucggcgacaacccccgccccaacgacaagaccggcuccugcggccccgucuccuccaacggcgccaacggcgucaagggcuucuccuucaaguacggcaacggcgucuggaucggccgcaccaaguccaucuccucccgcaacggcuucgagaugaucugggaccccaacggcuggaccggcaccgacaacaacuucuccaucaagcaggacaucgucggcaucaacgagugguccggcuacuccggcuccuucguccagcaccccgagcucaccggccucgacugcauccgccccugcuucugggucgagcucauccgcggccgccccaaggagaacaccaucuggaccuccggcuccuccaucuccuucugcggcgucaacuccgacaccgucggcugguccuggcccgacggcgccgagcuccccuucaccaucgacaaguga

SEQ ID NO: 115473 - RNA, 1410 nt, Artificial Sequence; identical to SEQ ID NO: 113951
  derived and/or modified CDS sequence (opt2) from neuraminidase__InfluenzaA__ADM13104

SEQ ID NO: 115474 - RNA, 1410 nt, Artificial Sequence; identical to SEQ ID NO: 114676
  derived and/or modified CDS sequence (opt2) from neuraminidase__InfluenzaA__ADM13124

SEQ ID NO: 115475 - RNA, 1410 nt, Artificial Sequence
  derived and/or modified CDS sequence (opt2) from neuraminidase__InfluenzaA__ADM13134
augaaccccaaccagaagaucaucaccaucggcuccgucugcaugaccaucggcauggccaaccucauccuccagaucggcaacaucaucuccaucuggaucucccacuccauccagcucggcaaccagaaccagaucgagaccugcaaccaguccgucaucaccuacgagaacaacaccugggucaaccagaccuacgucaacaucuccaacaccaacuucgccgccggccaguccgucgucuccgucaagcucgccggcaacuccucccucugccccgucuccggcugggccaucuacuccaaggacaacuccauccgcaucggcuccaagggcgacgucuucgucauccgcgagcccuucaucuccugcuccccccucgagugccgcaccuucuuccucacccagggcgcccuccucaacgacaagcacuccaacggcaccaucaaggaccgcucccccuaccgcacccucauguccugccccaucggcgagguccccucccccuacaacucccgcuucgaguccgucgccugguccgccuccgccugccacgacggcaucaacuggcucaccaucggcaucuccggccccgacaacggcgccgucgccguccucaaguacaacggcaucaucaccgacaccaucaaguccuggcgcaacaacacccuccgcacccaggaguccgagugcgccugcgucaacggcuccugcuucaccgucaugaccgacggccccuccgacggccaggccuccuacaagaucuuccgcaucgagaagggcaagaucgucaaguccgucgagaugaacgcccccaacuaccacuacgaggagugcuccugcuaccccgacuccuccgagaucaccugcgucugccgcgacaacuggcacggcuccaaccgccccugggucuccuucaaccagaaccucgaguaccagaucggcuacaucugcuccggcaucuucggcgacaacccccgccccaacgacaagaagggcuccugcggccccgucuccuccaacggcgccaacggcgucaagggcuucuccuucaaguacggcaacggcgucuggaucggccgcaccaaguccaucuccucccgcaacggcuucgagaugaucugggaccccaacggcuggaccggcaccgacaacaacuucuccaucaagcaggacaucgucggcaucaacgagugguccggcuacuccggcuccuucguccagcaccccgagcucaccggccucgacugcauccgccccugcuucugggucgagcucauccgcggccgccccaaggagaacaccaucuggaccuccggcuccuccaucuccuucugcggcgucaacuccgacaccgucggcugguccuggcccgacggcgccgagcuccccuucaccaucgacaaguga

SEQ ID NO: 115476 - RNA, 1410 nt, Artificial Sequence
  derived and/or modified CDS sequence (opt2) from neuraminidase__InfluenzaA__ADM13154
augaaccccaaccagaagaucaucaccaucggcuccgucugcaugaccaucggcauggccaaccucauccuccagaucggcaacaucaucuccaucuggaucucccacuccauccagcucggcaaccagaagcagaucgagaccugcaaccaguccgucuucaccuacgagaacaacaccugggucaaccagaccuacgucaacaucuccaacaccaacuucgccgccggccaguccgucgucuccgucaagcucgccggcaacuccucccucugccccgucuccggcugggccaucuacuccaaggacaacuccauccgcaucggcuccaagggcgacgucuucgucauccgcgagcccuucaucuccugcuccccccucgagugccgcaccuucuuccucacccagggcgcccuccucaacgacaagcacuccaacggcaccaucaaggaccgcucccccuaccgcacccucauguccugccccaucggcgagguccccucccccuacaacucccgcuucgaguccgucgccugguccgccuccgccugccacgacggcaucaacuggcucaccaucggcaucuccggccccgacaacggcgccgucgccguccucaaguacaacggcaucaucaccgacaccaucaaguccuggcgcaacaacauccuccgcacccaggaguccgagugcgccugcgucaacggcuccugcuucaccgucaugaccgacggccccuccgacggccaggccuccuacaagaucuucaagaucgagaagggcaagaucgucaaguccgucgagaugaacgcccccaacuaccacuacgaggagugcuccugcuaccccgacuccuccgagaucaccugcgucugccgcgacaacuggcacggcuccaaccgccccugggucuccuucaaccagaaccucgaguaccagaucggcuacaucugcuccggcaucuucggcgacaacccccgccccaacgacaagaccggcuccugcggccccgucuccuccaacggcgccaacggcgucaagggcuucuccuucaaguacggcaacggcgucuggaucggccgcaccaaguccaucuccucccgcaacggcuucgagaugaucugggaccccaacggcuggaccggcaccgacaacaacuucuccaucaagcaggacaucgucggcaucaacgagugguccggcuacuccggcuccuucguccagcaccccgagcucaccggccucgacugcauccgccccugcuucugggucgagcucauccgcggccgccccaaggagaacaccaucuggaccuccggcuccuccaucuccuucugcggcgucaacuccgacaccgucggcugguccuggcccgacggcgccgagcuccccuucaccaucgacaaguga

SEQ ID NO: 115477 - RNA, 1410 nt, Artificial Sequence; identical to SEQ ID NO: 114204
  derived and/or modified CDS sequence (opt2) from neuraminidase__InfluenzaA__ADM13164

SEQ ID NO: 115478 - RNA, 1410 nt, Artificial Sequence; identical to SEQ ID NO: 112774
  derived and/or modified CDS sequence (opt2) from neuraminidase__InfluenzaA__ADM13174

SEQ ID NO: 115479 - RNA, 1410 nt, Artificial Sequence; identical to SEQ ID NO: 112774
  derived and/or modified CDS sequence (opt2) from neuraminidase__InfluenzaA__ADM13184

SEQ ID NO: 115480 - RNA, 1410 nt, Artificial Sequence; identical to SEQ ID NO: 112774
  derived and/or modified CDS sequence (opt2) from neuraminidase__InfluenzaA__ADM13194

SEQ ID NO: 115481 - RNA, 1410 nt, Artificial Sequence; identical to SEQ ID NO: 112774
  derived and/or modified CDS sequence (opt2) from neuraminidase__InfluenzaA__ADM13204

SEQ ID NO: 115482 - RNA, 1410 nt, Artificial Sequence; identical to SEQ ID NO: 113951
  derived and/or modified CDS sequence (opt2) from neuraminidase__InfluenzaA__ADM13214

SEQ ID NO: 115483 - RNA, 1410 nt, Artificial Sequence
  derived and/or modified CDS sequence (opt2) from neuraminidase__InfluenzaA__ADM13224
augaaccccaaccagaagaucaucaccaucggcuccgucugcaugaccaucggcauggccaaccucauccuccagaucggcaacaucaucuccaucuggaucucccacuccauccagcucggcaaccagaaccagaucgagaccugcaaccaguccgucaucaccuacgagaacaacaccugggucaaccagaccuacgucaacaucuccaacaccaacuucgccgccggccaguccgucgucuccgucaagcucgccggcaacuccucccucugccccgucuccggcugggccaucuacuccaaggacaacuccauccgcaucggcuccaagggcgacgucuucgucauccgcgagcccuucaucuccugcuccccccucgagugccgcaccuucuuccucacccagggcgcccuccucaacgacaagcacuccaacggcaccaucaaggaccgcucccccuaccgcacccucauguccugccccaucggcgagguccccucccccuacaacucccgcuucgaguccgucgccugguccgccuccgccugccacgacggcaucaacuggcucaccaucggcaucuccggccccgacaacggcgccgucgccguccucaaguacaacggcaucaucaccgacaccauccgcuccuggcgcaacaacauccuccgcacccaggaguccgagugcgccugcgucaacggcuccugcuucaccgucaugaccgacggccccuccgacggccaggccuccuacaagaucuuccgcaucgagaagggcaagaucgucaaguccgucgagaugaacgcccccaacuaccacuacgaggagugcuccugcuaccccgacuccuccaagaucaccugcgucugccgcgacaacuggcacggcuccaaccgccccugggucuccuucaaccagaaccucgaguaccagaucggcuacaucugcuccggcaucuucggcgacaacccccgccccaacgacaagaccggcuccugcggccccgucuccuccaacggcgccaacggcgucaagggcuucuccuucaaguacggcaacggcgucuggaucggccgcaccaaguccaucuccucccgcaacggcuucgagaugaucugggaccccaacggcuggaccggcaccgacaacaacuucuccaucaagcaggacaucgucggcaucaacgagugguccggcuacuccggcuccuucguccagcaccccgagcucaccggccucgacugcauccgccccugcuucugggucgagcucauccgcggccgccccaaggagaacaccaucuggaccuccggcuccuccaucuccuucugcggcgucaacuccgacaccgucggcugguccuggcccgacggcgccgagcuccccuucaccaucgacaaguga

SEQ ID NO: 115484 - RNA, 1410 nt, Artificial Sequence; identical to SEQ ID NO: 112774
  derived and/or modified CDS sequence (opt2) from neuraminidase__InfluenzaA__ADM13234

SEQ ID NO: 115485 - RNA, 1410 nt, Artificial Sequence; identical to SEQ ID NO: 114062
  derived and/or modified CDS sequence (opt2) from neuraminidase__InfluenzaA__ADM13244

SEQ ID NO: 115486 - RNA, 1410 nt, Artificial Sequence; identical to SEQ ID NO: 113128
  derived and/or modified CDS sequence (opt2) from neuraminidase__InfluenzaA__ADM13254

SEQ ID NO: 115487 - RNA, 1410 nt, Artificial Sequence; identical to SEQ ID NO: 113951
  derived and/or modified CDS sequence (opt2) from neuraminidase__InfluenzaA__ADM13264

SEQ ID NO: 115488 - RNA, 1410 nt, Artificial Sequence; identical to SEQ ID NO: 112774
  derived and/or modified CDS sequence (opt2) from neuraminidase__InfluenzaA__ADM13274

SEQ ID NO: 115489 - RNA, 1410 nt, Artificial Sequence; identical to SEQ ID NO: 112774
  derived and/or modified CDS sequence (opt2) from neuraminidase__InfluenzaA__ADM13284

SEQ ID NO: 115490 - RNA, 1410 nt, Artificial Sequence
  derived and/or modified CDS sequence (opt2) from neuraminidase__InfluenzaA__ADM13294
augaaccccaaccagaagaucaucaccaucggcuccgucugcaugaccaucggcauggccaaccucauccuccagaucggcaacaucaucuccaucuggaucucccacuccauccagcucggcaaccagaaccagaucgagaccugcaaccaguccgucaucaccuacgagaacaacaccugggucaaccagaccuacgucaacaucuccaacaccaacuucgccgccggccaguccgucgucuccgucaagcucgccggcaacuccucccucugccccgucuccggcugggccaucuacuccaaggacaacuccauccgcaucggcuccaagggcgacgucuucgucauccgcgagcccuucaucuccugcuccccccucgagugccgcaccuucuuccucacccagggcgcccuccucaacgacaagcacuccaacggcaccaucaaggaccgcucccccuaccgcgcccucauguccugccccaucggcgagguccccucccccuacaacucccgcuucgaguccgucgccugguccgccuccgccugccacgacggcaucaacuggcucaccaucggcaucuccggccccgacaacggcgccgucgccguccucaaguacaacggcaucaucaccgacaccaucaaguccuggcgcaacaacauccuccgcacccaggaguccgagugcgccugcgucaacggcuccugcuucaccgucaugaccgacggccccuccgacggccaggccuccuacaagaucuuccgcaucgagaagggcaagaucgucaaguccgucgagaugaacgcccccaacuaccacuacgaggagugcuccugcuaccccgacuccuccgagaucaccugcgucugccgcgacaacuggcacggcuccaaccgccccugggucuccuucaaccagaaccucgaguaccagaucggcuacaucugcuccggcaucuucggcgacaacccccgccccaacgacaagaccggcuccugcggccccgucuccuccaacggcgccaacggcgucaagggcuucuccuucaaguacggcaacggcgucuggaucggccgcaccaaguccaucuccucccgcaacggcuucgagaugaucugggaccccaacggcuggaccggcaccgacaacuccuucuccaucaagcaggacaucgucggcaucaacgagugguccggcuacuccggcuccuucguccagcaccccgagcucaccggccucgacugcauccgccccugcuucugggucgagcucauccgcggccgccccaaggagaacaccaucuggaccuccggcuccuccaucuccuucugcggcgucaacuccgacaccgucggcugguccuggcccgacggcgccgagcuccccuucaccaucgacaaguga

SEQ ID NO: 115491 - RNA, 1410 nt, Artificial Sequence; identical to SEQ ID NO: 112774
  derived and/or modified CDS sequence (opt2) from neuraminidase__InfluenzaA__ADM13304

SEQ ID NO: 115492 - RNA, 1410 nt, Artificial Sequence; identical to SEQ ID NO: 114236
  derived and/or modified CDS sequence (opt2) from neuraminidase__InfluenzaA__ADM13314

SEQ ID NO: 115493 - RNA, 1410 nt, Artificial Sequence; identical to SEQ ID NO: 112774
  derived and/or modified CDS sequence (opt2) from neuraminidase__InfluenzaA__ADM13324

SEQ ID NO: 115494 - RNA, 1410 nt, Artificial Sequence
  derived and/or modified CDS sequence (opt2) from neuraminidase__InfluenzaA__ADM13344
augaaccccaaccagaagaucaucaucaucggcuccgucugcaugaccaucggcauggccaaccucauccuccagaucggcaacaucaucuccaucuggauccuccacuccauccagcucggcaaccagaaccagaucgagaccugcaaccaguccgucaucaccuacgagaacaacaccugggucaaccagaccuacgucaacaucuccaacaccaacuucgccgccggccaguccgucgucuccgucaagcucgccggcaacuccucccucugccccgucuccggcugggccaucuacuccaaggacaacuccauccgcaucggcuccaagggcgacgucuucgucauccgcgagcccuucaucuccugcuccccccucgagugccgcaccuucuuccucacccagggcgcccuccucaacgacaagcacuccaacggcaccaucaaggaccgcucccccuaccgcacccucauguccugccccaucggcgagguccccucccccuacaacucccgcuucgaguccgucgccugguccgccuccgccugccacgacggcaucaacuggcucaccaucggcaucuccggccccgacaacggcgccgucgccguccucaaguacaacggcaucaucaccgacaccaucaaguccuggcgcaacaacauccuccgcacccaggaguccgagugcgccugcgucaacggcuccugcuucaccgucaugaccgacggccccuccgacggccaggccuccuacaagaucuuccgcaucgagaagggcaagaucgucaaguccgucgagaugaacgcccccaacuaccacuacgaggagugcuccugcuaccccgacuccuccgagaucaccugcgucugccgcgacaacuggcacggcuccaaccgccccugggucuccuucaaccagaaccucgaguaccagaucggcuacaucugcuccggcaucuucggcgacaacccccgccccaacgacaagaccggcuccugcggccccgucuccuccaacggcgccaacggcgucaagggcuucuccuucaaguacggcaacggcgucuggaucggccgcaccaaguccaucuccucccgcaacggcuucgagaugaucugggaccccaacggcuggaccggcaccgacaacaacuucgccaucaagcaggacaucgucggcaucaacgagugguccggcuacuccggcuccuucguccagcaccccgagcucaccggccucgacugcauccgccccugcuucugggucgagcucauccgcggccgccccaaggagaacaccaucuggaccuccggcuccuccaucuccuucugcggcgucaacuccgacaccgucggcugguccuggcccgacggcgccgagcuccccuucaccaucgacaaguga

SEQ ID NO: 115495 - RNA, 1410 nt, Artificial Sequence; identical to SEQ ID NO: 114676
  derived and/or modified CDS sequence (opt2) from neuraminidase__InfluenzaA__ADM13354

SEQ ID NO: 115496 - RNA, 1410 nt, Artificial Sequence; identical to SEQ ID NO: 113951
  derived and/or modified CDS sequence (opt2) from neuraminidase__InfluenzaA__ADM13363

SEQ ID NO: 115497 - RNA, 1410 nt, Artificial Sequence
  derived and/or modified CDS sequence (opt2) from neuraminidase__InfluenzaA__ADM13464
augaaccccaaccagaagaucaucaccaucggcuccgucucccucaccaucgccaccgucugcuuccucaugcagaucgccauccucgucaccaccgucacccuccacuucaagcaguacgagugcgacucccccgccuccaaccaggucaugcccugcgagcccaucaucaucgagcgcaacaucaccgagaucgucuaccucaacaacaccaccaucgagaaggagaucugccccaaggucgucgaguaccgcaacugguccaagccccagugccagaucaccggcuucgcccccuucuccaaggacaacuccauccgccucuccgccggcggcgacaucugggucacccgcgagcccuacgucuccugcgaccacggcaagugcuaccaguucgcccucggccagggcaccacccucgacaacaagcacuccaacgacaccauccacgaccgcaucccccaccgcacccuccucaugaacgagcucggcguccccuuccaccucggcacccgccaggucugcaucgccugguccuccuccuccugccacgacggcaaggccuggcuccacgucugcaucaccggcaacgacaagaacgccaccgccuccuucaucuacgacggccgccucgucgacuccaucggcuccuggucccagaacauccuccgcacccaggaguccgagugcgucugcaucaacggcaccugcaccgucgucaugaccgacggcuccgccuccggccgcgccgacacccgcauccucuucaucgaggagggcaagaucguccacaucuccccccucuccggcuccgcccagcacgucgaggagugcuccugcuacccccgcuaccccggcguccgcugcaucugccgcgacaacuggaagggcuccaaccgccccgucgucgacaucaacauggaggacuacuccaucgacuccuccuacgucugcuccggccucgucggcgacaccccccgcaacgacgaccgcuccuccaacuccaacugccgcaaccccaacaacgagcgcggcaaccagggcgucaagggcugggccuucgacaacggcgacgacgucuggaugggccgcaccaucuccaaggaccuccgcuccggcuacgagaccuucaaggucaucggcggcugguccacccccaacuccaagucccagaucaaccgccaggucaucgucgacuccgacaaccgcuccggcuacuccggcaucuucuccgucgagggcaaguccugcaucaaccgcugcuucuacgucgagcucauccgcggccgcgagcaggagacccgcgucugguggaccuccaacuccaucgucgucuucugcggcaccuccggcaccuacggcaccggcuccuggcccgacggcgccaacaucaacuucaugcccaucuga

SEQ ID NO: 115498 - RNA, 1410 nt, Artificial Sequence
  derived and/or modified CDS sequence (opt2) from neuraminidase__InfluenzaA__ADM13465
augaaccccaaccagaagaucaucaccaucggcuccgucucccucaccaucgccaccgucugcuuccucaugcagaucgccauccucgucaccaccgucacccuccacuucaagcaguacgagugcgacucccccgccuccaaccaggucaugcccugcgagcccaucaucaucgagcgcaacaucaccgagaucgucuaccucaacaacaccaccaucgagaaggagaucugccccaaggucgucgaguaccgcaacugguccaagccccagugccagaucaccggcuucgcccccuucuccaaggacaacuccauccgccucuccgccggcggcgacaucugggucacccgcgagcccuacgucuccugcgaccacggcaagugcuaccaguucgcccucggccagggcaccacccucgacaacaagcacuccaacgacaccauccacgaccgcaucccccaccgcacccuccucaugaacgagcucggcguccccuuccaccucggcacccgccaggucugcaucgccugguccuccuccuccugccacgacggcaaggccuggcuccacgucugcaucaccggcgacgacaagaacgccaccgccuccuucaucuacgacggccgccucgucgacuccaucggcuccuggucccagaacauccuccgcacccaggaguccgagugcgucugcaucaacggcaccugcaccgucgucaugaccgacggcuccgccuccggccgcgccgacacccgcauccucuucaucgaggagggcaagaucguccacaucuccccccucuccggcuccgcccagcacgucgaggagugcuccugcuacccccgcuaccccggcguccgcugcaucugccgcgacaacuggaagggcuccaaccgccccgucgucgacaucaacauggaggacuacuccaucgacuccuccuacgucugcuccggccucgucggcgacaccccccgcaacgacgaccgcuccuccaacuccaacugccgcaaccccaacaacgagcgcggcaaccagggcgucaagggcugggccuucgacaacggcgacgacgucuggaugggccgcaccaucuccaaggaccuccgcuccggcuacgagaccuucaaggucaucggcggcugguccacccccaacuccaagucccagaucaaccgccaggucaucgucgacuccgacaaccgcuccggcuacuccggcaucuucuccgucgagggcaaguccugcaucaaccgcugcuucuacgucgagcucaugcgcggccgcaagcaggagacccgcgucugguggaccuccaacuccaucgucgucuucugcggcaccuccggcaccuacggcaccggcuccuggcccgacggcgccaacaucaacuucaugcccaucuga

SEQ ID NO: 115499 - RNA, 1410 nt, Artificial Sequence; identical to SEQ ID NO: 110131
  derived and/or modified CDS sequence (opt2) from neuraminidase__InfluenzaA__ADM13466

SEQ ID NO: 115500 - RNA, 1410 nt, Artificial Sequence
  derived and/or modified CDS sequence (opt2) from neuraminidase__InfluenzaA__ADM13467
augaaccccaaccagaagaucaucaccaucggcuccgucucccucaccaucgccaccgucugcuuccucaugcagaucgccauccucgucaccaccgucacccuccacuucaagcaguacgagugcgacucccccgccuccaaccaggucaugcccugcgagcccaucaucaucgagcgcaacaucaccgagaucgucuaccucaacaacaccaccaucgagaaggagaucugccccaaggucgucgaguaccgcaacugguccaagccccagugccagaucaccggcuucgcccccuucuccaaggacaacuccauccgccucuccuccggcggcgacaucugggucacccgcgagcccuacgucuccugcgaccacggcaagugcuaccaguucgcccucggccagggcaccacccucgacaacaagcacuccaacgacaccauccacgaccgcaucccccaccgcacccuccucaugaacgagcucggcguccccuuccaccucggcacccgccaggucugcaucgccugguccuccuccuccugccacgacggcaaggccuggcuccacgucugcaucaccggcgacgacaagaacgccaccgccuccuucaucuacgacggccgccucgucgacuccaucggcuccuggucccagaacauccuccgcacccaggaguccgagugcgucugcaucaacggcaccugcaccgucgucaugaccgacggcuccgccuccggccgcgccgacacccgcauccucuucaucgaggagggcaagaucguccacaucuccccccucuccggcuccgcccagcacgucgaggagugcuccugcuacccccgcuaccccggcguccgcugcaucugccgcgacaacuggaagggcuccaaccgccccgucgucgacaucaacauggaggacuacuccaucgacuccuccuacgucugcuccggccucgucggcgacaccccccgcaacgacgaccgcuccuccaacuccaacugccgcaaccccaacaacgagcgcggcaaccagggcgucaagggcugggccuucgacaacggcgacgacgucuggaugggccgcaccaucuccaaggaccuccgcuccggcuacgagaccuucaaggucaucggcggcugguccacccccaacuccaagucccagaucaaccgccaggucaucgucgacuccgacaaccgcuccggcuacuccggcaucuucuccgucgagggcaaguccugcaucaaccgcugcuucuacgucgagcucauccgcggccgcaagcaggagacccgcgucugguggaccuccaacuccaucgucgucuucugcggcaccuccggcaccuacggcaccggcuccuggcccgacggcgccaacaucaacuucaugcccaucuga

SEQ ID NO: 115501 - RNA, 1410 nt, Artificial Sequence; identical to SEQ ID NO: 110131
  derived and/or modified CDS sequence (opt2) from neuraminidase__InfluenzaA__ADM13468

SEQ ID NO: 115502 - RNA, 1410 nt, Artificial Sequence
  derived and/or modified CDS sequence (opt2) from neuraminidase__InfluenzaA__ADM13469
augaaccccaaccagaagaucaucaccaucggcuccgucucccucaccaucgccaccgccugcuuccucaugcagaucgccauccucgucaccaccgucacccuccacuucaagcaguacgagugcgacucccccgccuccaaccaggucaugcccugcgagcccaucaucaucgagcgcaacaucaccgagaucgucuaccucaacaacaccaccaucgagaaggagaucugccccaaggucgucgaguaccgcaacugguccaagccccagugccagaucaccggcuucgcccccuucuccaaggacaacuccauccgccucuccgccggcggcgacaucugggucacccgcgagcccuacgucuccugcgaccacggcaagugcuaccaguucgcccucggccagggcaccacccucgacaacaagcacuccaacgacaccauccacgaccgcaucccccaccgcacccuccucaugaacgagcucggcguccccuuccaccucggcacccgccaggucugcaucgccugguccuccuccuccugccacgacggcaaggccuggcuccacgucugcaucaccggcgacgacaagaacgccaccgccuccuucaucuacgacggccgccucgucgacuccaucggcuccuggucccagaacauccuccgcacccaggaguccgagugcgucugcaucaacggcaccugcaccgucgucaugaccgacggcuccgccuccggccgcgccgacacccgcauccucuucaucgaggagggcaagaucguccacaucuccccccucuccggcuccgcccagcacgucgaggagugcuccugcuacccccgcuaccccggcguccgcugcaucugccgcgacaacuggaagggcuccaaccgccccgucgucgacaucaacauggaggacuacuccaucgacuccuccuacgucugcuccggccucgucggcgacaccccccgcaacgacgaccgcuccuccaacuccaacugccgcaaccccaacaacgagcgcggcaaccagggcgucaagggcugggccuucgacaacggcgacgacgucuggaugggccgcaccaucuccaaggaccuccgcuccggcuacgagaccuucaaggucaucggcggcugguccacccccaacuccaagucccagaucaaccgccaggucaucgucgacuccgacaaccgcuccggcuacuccggcaucuucuccgucgagggcaaguccugcaucaaccgcugcuucuacgucgagcucauccgcggccgcaagcaggagacccgcgucugguggaccuccaacuccaucgucgucuucugcggcaccuccggcaccuacggcaccggcuccuggcccgacggcgccaacaucaacuucaugcccaucuga

SEQ ID NO: 115503 - RNA, 1410 nt, Artificial Sequence
  derived and/or modified CDS sequence (opt2) from neuraminidase__InfluenzaA__ADM13470
augaaccccaaccagaagaucaucaccaucggcuccgucucccucaccaucgccaccgucugcuuccucaugcagaucgccauccucgucaccaccgucacccuccacuucaagcaguacgagugcgacucccccgccuccaaccaggucaugcccugcgagcccaucaucaucgagcgcaacaucaccgagaucgucuaccucaacaacaccaccaucgagaaggagaucugccccaaggucgucgaguaccgcaacugguccaagccccagugccagaucaccggcuucgcccccuucuccaaggacaacuccauccgccucuccgccggcggcgacaucugggucacccgcgagcccuacgucuccugcgaccacggcaagugcuaccaguucgcccucggccagggcaccacccucgacaacaagcacuccaacgacaccauccacgaccgcaucccccaccgcacccuccucaugaacgagcucggcguccccuuccaccucggcacccgccaggucugcaucgccugguccuccuccuccugccacgacggcaaggccuggcuccacgucugcaucaccggcgacgacaagaacgccaccgccuccuucaucuacgacggccgccucgucgacuccaucggcuccuggucccagaacauccuccgcacccaggaguccgagugcgucugcaucaacggcaccugcaccgucgucaugaccgacggcuccgccuccggccgcgccgacacccgcauccucuucaucgaggagggcaagaucguccacaucuccccccucuccggcuccgcccagcacgucgaggagugcuccugcuacccccgcuaccccggcguccgcugcaucugccgcgacaacuggaagggcuccaaccgccccgucgucgacaucaacauggaggacuacuccaucgacuccuccuacgucugcuccggccucgucggcgacaccccccgcaacgacgaccgcuccuccaacuccaacugccgcaaccccaacaacgagcgcggcaaccagggcgucaagggcugggccuucgacaacggcgacgacgucuggaugggccgcaccaucuccaaggaccuccgcuccggcuacgagaccuucaaggucaucggcggcugguccacccccaacuccaagucccagaucaaccgccaggucaucaucgacuccgacaaccgcuccggcuacuccggcaucuucuccgucgagggcaaguccugcaucaaccgcugcuucuacgucgagcucauccgcggccgcaagcaggagacccgcgucugguggaccuccaacuccaucgucgucuucugcggcaccuccggcaccuacggcaccggcuccuggcccgacggcgccaacaucaacuucaugcccaucuga

SEQ ID NO: 115504 - RNA, 1410 nt, Artificial Sequence
  derived and/or modified CDS sequence (opt2) from neuraminidase__InfluenzaA__ADM13471
augaaccccaaccagaagaucaucaccaucggcuccgucucccucaccaucgccaccgucugcuuccucaugcagaucgccauccucgucaccaccgucacccuccacuucaagcaguacgagugcgacucccccgccuccaaccaggucaugcccugcgagcccaucaucaucgagcgcaacaucaccgagaucgucuaccucaacaacaccaccaucgagaaggagaucugccccaaggucgucgaguaccgcaacugguccaagccccagugccagaucaccggcuucgcccccuucuccaaggacaacuccauccgcaucuccgccggcggcgacaucugggucacccgcgagcccuacgucuccugcgaccacggcaagugcuaccaguucgcccucggccagggcaccacccucgacaacaagcacuccaacgacaccauccacgaccgcaucccccaccgcacccuccucaugaacgagcucggcguccccuuccaccucggcacccgccaggucugcaucgccugguccuccuccuccugccacgacggcaaggccuggcuccacgucugcaucaccggcgacgacaagaacgccaccgccuccuucaucuacgacggccgccucgucgacuccaucggcuccuggucccagaacauccuccgcacccaggaguccgagugcgucugcaucaacggcaccugcaccgucgucaugaccgacggcuccgccuccggccgcgccgacacccgcauccucuucaucgaggagggcaagaucguccacaucuccccccucuccggcuccgcccagcacgucgaggagugcuccugcuacccccgcuaccccggcguccgcugcaucugccgcgacaacuggaagggcuccaaccgccccgucgucgacaucaacauggaggacuacuccaucgacuccuccuacgucugcuccggccucgucggcgacaccccccgcaacgacgaccgcuccuccaacuccaacugccgcaaccccaacaacgagcgcggcaaccagggcgucaagggcugggccuucgacaacggcgacgacgucuggaugggccgcaccaucuccaaggaccuccgcuccggcuacgagaccuucaaggucaucggcggcugguccacccccaacuccaagucccagaucaaccgccaggucaucgucgacuccgacaaccgcuccggcuacuccggcaucuucuccgucgagggcaaguccugcaucaaccgcugcuucuacgucgagcucauccgcggccgcaagcaggagacccgcgucugguggaccuccaacuccaucgucgucuucugcggcaccuccggcaccuacggcaccggcuccuggcccgacggcgccaacaucaacuucaugcccaucuga

SEQ ID NO: 115505 - RNA, 1410 nt, Artificial Sequence; identical to SEQ ID NO: 112544
  derived and/or modified CDS sequence (opt2) from neuraminidase__InfluenzaA__ADM13472

SEQ ID NO: 115506 - RNA, 1410 nt, Artificial Sequence; identical to SEQ ID NO: 110131
  derived and/or modified CDS sequence (opt2) from neuraminidase__InfluenzaA__ADM13473

SEQ ID NO: 115507 - RNA, 1410 nt, Artificial Sequence; identical to SEQ ID NO: 112539
  derived and/or modified CDS sequence (opt2) from neuraminidase__InfluenzaA__ADM13474

SEQ ID NO: 115508 - RNA, 1410 nt, Artificial Sequence
  derived and/or modified CDS sequence (opt2) from neuraminidase__InfluenzaA__ADM14469
augaaccccaaccagaagaucaucaccaucggcuccgucugcaugaccaucggcauggccaaccucauccuccagaucggcaacaucaucuccaucuggaucucccacuccauccagcucggcaaccagaaccagaucgagaccugcaaccaguccgucaucaccuacgagaacaacaccugggucaaccagaccuacgucaacaucuccaacaccaacuucgccgccggccaguccgucgucuccgucaagcucgccggcaacuccucccucugccccgucuccggcugggccaucuacuccaaggacaacuccaugcgcaucggcuccaagggcgacgucuucgucauccgcgagcccuucaucuccugcuccccccucgagugccgcaccuucuuccucacccagggcgcccuccucaacgacaagcacuccaacggcaccaucaaggaccgcucccccuaccgcacccucauguccugccccaucggcgagguccccucccccuacaacucccgcuucgaguccgucgccugguccgccuccgccugccacgacggcaucaacuggcucaccaucggcaucuccggccccgacaacggcgccgucgccguccucaaguacaacggcaucaucaccgacaccaucaaguccuggcgcaacaacauccuccgcacccaggaguccgagugcgccugcgucaacggcuccugcuucaccgucaugaccgacggccccuccgacggccaggccuccuacaagaucuuccgcaucgagaagggcaagaucgucaaguccgucgagaugaacgcccccaacuaccacuacgaggagugcuccugcuaccccgacuccuccgagaucaccugcgucugccgcgacaacuggcacggcuccaaccgccccugggucuccuucaaccagaaccucgaguaccagaucggcuacaucugcuccggcaucuucggcgacaacccccgccccaacgacaagaccggcuccugcggccccgucuccuccaacggcgccaacggcgucaagggcuucuccuucaaguacggcaacggcgucuggaucggccgcaccaaguccaucuccucccgcaccggcuucgagaugaucugggaccccaacggcuggaccggcaccgacaacaacuucuccaucaagcaggacaucgucggcaucaacgagugguccggcuacuccggcuccuucguccagcaccccgagcucaccggccucgacugcauccgccccugcuucugggucgagcucauccgcggccgccccaaggagaacaccaucuggaccuccggcuccuccaucuccuucugcggcgucaacuccgacaccgucggcugguccuggcccgacggcgccgagcuccccuucaccaucgacaaguga

SEQ ID NO: 115509 - RNA, 1410 nt, Artificial Sequence; identical to SEQ ID NO: 112774
  derived and/or modified CDS sequence (opt2) from neuraminidase__InfluenzaA__ADM14479

SEQ ID NO: 115510 - RNA, 1410 nt, Artificial Sequence; identical to SEQ ID NO: 112774
  derived and/or modified CDS sequence (opt2) from neuraminidase__InfluenzaA__ADM14499

SEQ ID NO: 115511 - RNA, 1410 nt, Artificial Sequence; identical to SEQ ID NO: 114287
  derived and/or modified CDS sequence (opt2) from neuraminidase__InfluenzaA__ADM14518

SEQ ID NO: 115512 - RNA, 1410 nt, Artificial Sequence; identical to SEQ ID NO: 115112
  derived and/or modified CDS sequence (opt2) from neuraminidase__InfluenzaA__ADM14527

SEQ ID NO: 115513 - RNA, 1410 nt, Artificial Sequence; identical to SEQ ID NO: 114205
  derived and/or modified CDS sequence (opt2) from neuraminidase__InfluenzaA__ADM14537

SEQ ID NO: 115514 - RNA, 1410 nt, Artificial Sequence; identical to SEQ ID NO: 112774
  derived and/or modified CDS sequence (opt2) from neuraminidase__InfluenzaA__ADM14546

SEQ ID NO: 115515 - RNA, 1410 nt, Artificial Sequence
  derived and/or modified CDS sequence (opt2) from neuraminidase__InfluenzaA__ADM14555
augaaccccaaccagaagaucaucaccaucggcuccgucugcaugaccaucggcauggccaaccucauccuccagaucggcaacaucaucuccaucuggaucucccacuccauccagcucggcaaccagaaccagaucgagaccugcaaccaguccgucaucaccuacgagaacaacaccugggucaaccagaccuacgucaacaucuccaacaccaacuucgccgccggccaguccgucgucuccgucaagcucgccggcaacuccucccucugccccgucuccggcugggccaucuacuccaaggacaacuccauccgcaucggcuccaagggcgacgucuucgucauccgcgagcccuucaucuccugcuccccccucgagugccgcaccuucuuccucacccagggcgcccuccucaacgacaagcacuccaacggcaccaucaaggaccgcucccccuaccgcacccucauguccugccccaucggcgagguccccucccccuacaacucccgcuucgaguccgucgccugguccgccuccgccugccacgacggcaucaacuggcucaccaucggcaucuccggccccgacaacggcgccgucgccguccucaaguacaacggcaucaucaccgacaccaucaaguccuggcgcaacaacauccuccgcacccaggaguccgagugcgccugcgucaacggcuccugcuucaccgucaugaccgacggccccuccgacggccaggccuccuacaagaucuuccgcaucgagaagggcaagaucgucaaguccgucgagaugaacgcccccaacuaccacuacgaggagugcuccugcuaccccgacuccuccgagaucaccugcgucugccgcgacaacuggcacggcuccaaccgccccugggucuccuucaaccagaaccucgaguaccagaucggcuacaucugcuccggcaucuucggcgacaacccccgccccaacgacaagaccggcuccugcggccccgucuccuccaacggcgccaacggcgucaagggcuucuccuuccgcuacggcaacggcgucuggaucggccgcaccaaguccaucuccucccgcaacggcuucgagaugaucugggaccccaacggcuggaccggcaccgacaacaacuucuccaucaagcaggacaucgucggcaucaacgagugguccggcuacuccggcuccuucguccagcaccccgagcucaccggccucgacugcauccgccccugcuucugggucgagcucauccgcggccgccccaaggagaacaccaucuggaccuccggcuccuccaucuccuucugcggcgucaacuccgacaccgucggcugguccuggcccgacggcgccgagcuccccuucaccaucgacaaguga

SEQ ID NO: 115516 - RNA, 1410 nt, Artificial Sequence; identical to SEQ ID NO: 112774
  derived and/or modified CDS sequence (opt2) from neuraminidase__InfluenzaA__ADM14573

SEQ ID NO: 115517 - RNA, 1410 nt, Artificial Sequence; identical to SEQ ID NO: 112774
  derived and/or modified CDS sequence (opt2) from neuraminidase__InfluenzaA__ADM14582

SEQ ID NO: 115518 - RNA, 1410 nt, Artificial Sequence; identical to SEQ ID NO: 112774
  derived and/or modified CDS sequence (opt2) from neuraminidase__InfluenzaA__ADM14591

SEQ ID NO: 115519 - RNA, 1410 nt, Artificial Sequence
  derived and/or modified CDS sequence (opt2) from neuraminidase__InfluenzaA__ADM14601
augaaccccaaccagaagaucaucaccaucggcuccgucugcaugaccaucggcauggccaaccucauccuccagaucggcaacaucaucuccaucuggaucucccacuccauccagcucggcaaccagaaccagaucgagaccugcaaccaguccgucaucaccuacgagaacaacaccugggucaaccagaccuacgucaacaucuccaacaccaacuucgccgccggccaguccgucgucuccgucaagcucgccggcaacuccucccucugccccgucaacggcugggccaucuacuccaaggacaacuccguccgcaucggcuccaagggcgacgucuucgucauccgcgagcccuucaucuccugcuccccccucgagugccgcaccuucuuccucacccagggcgcccuccucaacgacaagcacuccaacggcaccaucaaggaccgcucccccuaccgcacccucauguccugccccaucggcgagguccccucccccuacaacucccgcuucgaguccgucgccugguccgccuccgccugccacgacggcaucaacuggcucaccaucggcaucuccggccccgacaacggcgccgucgccguccucaaguacaacggcaucaucaccgacaccaucaaguccuggcgcaacaacauccuccgcacccaggaguccgagugcgccugcgucaacggcuccugcuucaccgucaugaccgacggccccuccgacggccaggccuccuacaagaucuuccgcaucgagaagggcaagaucgucaaguccgucgagaugaacgcccccaacuaccacuacgaggagugcuccugcuaccccgacuccuccgagaucaccugcgucugccgcgacaacuggcacggcuccaaccgccccugggucuccuucaaccagaaccucgaguaccagaucggcuacaucugcuccggcaucuucggcgacaacccccgccccaacgacaagaccggcuccugcggccccgucuccuccaacggcgccaacggcgucaagggcuucuccuucaaguacggcaacggcgucuggaucggccgcaccaaguccaucuccucccgcaacggcuucgagaugaucugggaccccaacggcuggaccggcaccgacaacaacuucuccaucaagcaggacaucgucggcaucaacgagugguccggcuacuccggcuccuucguccagcaccccgagcucaccggccucgacugcauccgccccugcuucugggucgagcucauccgcggccgccccaaggagaacaccaucuggaccuccggcuccuccaucuccuucugcggcgucaacuccgacaccgucggcugguccuggcccgacggcgccgagcuccccuucaccaucgacaaguga

SEQ ID NO: 115520 - RNA, 1410 nt, Artificial Sequence
  derived and/or modified CDS sequence (opt2) from neuraminidase__InfluenzaA__ADM14611
augaaccccaaccagaagaucaucaccaucggcuccgucugcaugaccaucggcauggccaaccucauccuccagaucggcaacaucaucuccaucuggaucucccacuccauccagcucggcaaccagaaccagaucgagaccugcaaccaguccgucaucaccuacgagaacaacaccugggucaaccagaccuacgucaacaucuccaacaccaacuucgccgccggccaguccgucgucuccgucaagcucuccggcaacuccucccucugccccgucuccggcugggccaucuacuccaaggacaacuccauccgcaucggcuccaagggcgacgucuucgucauccgcgagcccuucaucuccugcuccccccucgagugccgcaccuucuuccucacccagggcgcccuccucaacgacaagcacuccaacggcaccaucaaggaccgcucccccuaccgcacccucauguccugccccaucggcgagguccccucccccuacaacucccgcuucgaguccgucgccugguccgccuccgccugccacgacggcaucaacuggcucaccaucggcaucuccggccccgacaacggcgccgucgccguccucaaguacaacggcaucaucaccgacaccaucaaguccuggcgcaacaacauccuccgcacccaggaguccgagugcgccugcgucaacggcuccugcuucaccgucaugaccgacggccccuccgacggccaggccuccuacaagaucuuccgcaucgagaagggcaagaucgucaaguccgucgagaugaacgcccccaacuaccacuacgaggagugcuccugcuaccccgacuccuccgagaucaccugcgucugccgcgacaacuggcacggcuccaaccgccccugggucuccuucaaccagaaccucgaguaccagaucggcuacaucugcuccggcaucuucggcgacaacccccgccccaacgacaagaccggcuccugcggccccgucuccuccaacggcgccaacggcgucaagggcuucuccuucaaguacggcaacggcgucuggaucggccgcaccaaguccaucuccucccgcaacggcuucgagaugaucugggaccccaacggcuggaccggcaccgacaacaacuucuccaucaagcaggacaucgucggcaucaacgagugguccggcuacuccggcuccuucguccagcaccccgagcucaccggccucgacugcauccgccccugcuucugggucgagcucauccgcggccgccccaaggagaacaccaucuggaccuccggcuccuccaucuccuucugcggcgucaacuccgacaccgucggcugguccuggcccgacggcgccgagcuccccuucaccaucgacaaguga

SEQ ID NO: 115521 - RNA, 1410 nt, Artificial Sequence; identical to SEQ ID NO: 112774
  derived and/or modified CDS sequence (opt2) from neuraminidase__InfluenzaA__ADM14620

SEQ ID NO: 115522 - RNA, 1410 nt, Artificial Sequence; identical to SEQ ID NO: 112774
  derived and/or modified CDS sequence (opt2) from neuraminidase__InfluenzaA__ADM14629

SEQ ID NO: 115523 - RNA, 1410 nt, Artificial Sequence; identical to SEQ ID NO: 112774
  derived and/or modified CDS sequence (opt2) from neuraminidase__InfluenzaA__ADM14639

SEQ ID NO: 115524 - RNA, 1410 nt, Artificial Sequence; identical to SEQ ID NO: 112774
  derived and/or modified CDS sequence (opt2) from neuraminidase__InfluenzaA__ADM14657

SEQ ID NO: 115525 - RNA, 1410 nt, Artificial Sequence; identical to SEQ ID NO: 112774
  derived and/or modified CDS sequence (opt2) from neuraminidase__InfluenzaA__ADM14666

SEQ ID NO: 115526 - RNA, 1410 nt, Artificial Sequence; identical to SEQ ID NO: 112774
  derived and/or modified CDS sequence (opt2) from neuraminidase__InfluenzaA__ADM14684

SEQ ID NO: 115527 - RNA, 1410 nt, Artificial Sequence
  derived and/or modified CDS sequence (opt2) from neuraminidase__InfluenzaA__ADM14693
augaaccccaaccagaagaugaucaccaucggcuccgucugcaugaccaucggcauggccaaccucauccuccagaucggcaacaucaucuccaucuggaucucccacuccauccagcucggcaaccagaaccagaucgagaccugcaaccaguccgucaucaccuacgagaacaacaccugggucaaccagaccuacgucaacaucuccaacaccaacuucgccgccggccaguccgucgucuccgucaagcucgccggcaacuccucccucugccccgucuccggcugggccaucuacuccaaggacaacuccauccgcaucggcuccaagggcgacgucuucgucauccgcgagcccuucaucuccugcuccccccucgagugccgcaccuucuuccucacccagggcgcccuccucaacgacaagcacuccaacggcaccaucaaggaccgcucccccuaccgcacccucauguccugccccaucggcgagguccccucccccuacaacucccgcuucgaguccgucgccugguccgccuccgccugccacgacggcaucaacuggcucaccaucggcaucuccggccccgacaacggcgccgucgccguccucaaguacaacggcaucaucaccgacaccaucaaguccuggcgcaacaacauccuccgcacccaggaguccgagugcgccugcgucaacggcuccugcuucaccgucaugaccgacggccccuccgacggccaggccuccuacaagaucuuccgcaucgagaagggcaagaucgucaaguccgucgagaugaacgcccccaacuaccacuacgaggagugcuccugcuaccccgacuccuccgagaucaccugcgucugccgcgacaacuggcacggcuccaaccgccccugggucuccuucaaccagaaccucgaguaccagaucggcuacaucugcuccggcaucuucggcgacaacccccgccccaacgacaagaccggcuccugcggccccgucuccuccaacggcgccaacggcgucaagggcuucuccuucaaguacggcaacggcgucuggaucggccgcaccaaguccaucuccucccgcaacggcuucgagaugaucugggaccccaacggcuggaccggcaccgacaacaacuucuccaucaagcaggacaucgucggcaucaacgagugguccggcuacuccggcuccuucguccagcaccccgagcucaccggccucgacugcauccgccccugcuucugggucgagcucauccgcggccgccccaaggagaacaccaucuggaccuccggcuccuccaucuccuucugcggcgucaacuccgacaccgucggcugguccuggcccgacggcgccgagcuccccuucaccaucgacaaguga

SEQ ID NO: 115528 - RNA, 1410 nt, Artificial Sequence
  derived and/or modified CDS sequence (opt2) from neuraminidase__InfluenzaA__ADM14702
augaaccccaaccagaagaucaucaccaucggcuccgucugcaugaccaucggcauggccaaccucauccuccagaucggcaacaucaucuccaucuggaucucccacuccauccagcucggcaaccagaaccagaucgagaccugcaaccaguccgucaucaccuacgagaacaacaccugggucaaccagaccuacgucaacaucuccaacaccaacuucgccgccggccaguccgucgucuccgucaagcucgccggcaacuccucccucugccccgucuccggcugggccaucuacuccaaggacaacuccauccgcaucggcuccaagggcgacgucuucgucauccgcgagcccuucaucuccugcucccaccucgagugccgcaccuucuuccucacccagggcgcccuccucaacgacaagcacuccaacggcaccaucaaggaccgcucccccuaccgcacccucauguccugccccaucggcgagguccccucccccuacaacucccgcuucgaguccgucgccugguccgccuccgccugccacgacggcaucaacuggcucaccaucggcaucuccggccccgacaacggcgccgucgccguccucaaguacaacggcaucaucaccgacaccaucaaguccuggcgcaacaacauccuccgcacccaggaguccgagugcgccugcgucaacggcuccugcuucaccgucaugaccgacggccccuccgacggccaggccuccuacaagaucuuccgcaucgagaagggcaagaucgucaaguccgucgagaugaacgcccccaacuaccacuacgaggagugcuccugcuaccccgacuccuccgagaucaccugcgucugccgcgacaacuggcacggcuccaaccgccccugggucuccuucaaccagaaccucgaguaccagaucggcuacaucugcuccggcaucuucggcgacaacccccgccccaacgacaagaccggcuccugcggccccgucuccuccaacggcgccaacggcgucaagggcuucuccuucaaguacggcaacggcgccuggaucggccgcaccaaguccaccuccucccgcaacggcuucgagaugaucugggaccccaacggcuggaccggcaccgacaacaacuucuccaucaagcaggacaucgucggcaucaacgagugguccggcuacuccggcuccuucguccagcaccccgagcucaccggccucgacugcauccgccccugcuucugggucgagcucauccgcggccgccccaaggagaacaccaucuggaccuccggcuccuccaucuccuucugcggcgucaacuccgacaccgucggcugguccuggcccgacggcgccgagcuccccuucaccaucgacaaguga

SEQ ID NO: 115529 - RNA, 1410 nt, Artificial Sequence; identical to SEQ ID NO: 114676
  derived and/or modified CDS sequence (opt2) from neuraminidase__InfluenzaA__ADM14711

SEQ ID NO: 115530 - RNA, 1410 nt, Artificial Sequence
  derived and/or modified CDS sequence (opt2) from neuraminidase__InfluenzaA__ADM14720
augaaccccaaccagaagaucaucaccaucggcuccgucugcaugaccaucggcauggccaaccucauccuccagaucggcaacaucaucuccaucuggaucucccacuccauccagcucggcaaccagaaccagaucgagaccugcaaccaguccgucaucaccuacgagaacaacaccugggucaaccagaccuacgucaacaucuccaacaccaacuucgccgccggccaguccgucgucuccgucaagcucgccggcaacuccucccucugccccgucuccggcugggccaucuacuccaaggacaacuccauccgcaucggcuccaagggcgacgucuucgucauccgcgagcccuucaucuccugcuccccccucgagugccgcaccuucuuccucacccagggcgcccuccucaacgacaagcacuccaacggcaccaucaaggaccgcucccccuaccgcacccucauguccugccccaucggcgagguccccucccccuacaacucccgcuucgaguccgucgccugguccgccuccgccugccacgacggcaucaacuggcucaccaucggcaucuccggccccgacaacggcgccgucgccguccucaaguacaacggcaucaucaccgacaccaucaaguccuggcgcaacaacauccuccgcacccaggaguccgagugcgccugcgucaacggcuccugcuucaccgucaugaccgacggccccuccgacggccaggccuccuacaagaucuuccgcaucgagaagggcaagaucgucaaguccgucgagaugaacgcccccaacuaccacuacgaggagugcuccugcuaccccgacuccuccgagaucaccugcgucugccgcgacaacuggcacggcuccaaccgccccugggucuccuucaaccagaaccucgaguaccagaucggcuacaucugcuccggcgucuucggcgacaacccccgccccaacgacaagaccggcuccugcggccccgucuccuccaacggcgccaacggcgucaagggcuucuccuucaaguacggcaacggcgucuggaucggccgcaccaaguccaucuccucccgcaacggcuucgagaugaucugggaccccaacggcuggaccggcaccgacaacaacuucuccaucaagcaggacaucgucggcaucaacgagugguccggcuacuccggcuccuucguccagcaccccgagcucaccggccucgacugcauccgccccugcuucugggucgagcucauccgcggccgccccaaggagaacaccaucuggaccuccggcuccuccaucuccuucugcggcgucaacuccgacaccgucggcugguccuggcccgacggcgccgagcuccccuucaccaucgacaaguga

SEQ ID NO: 115531 - RNA, 1410 nt, Artificial Sequence
  derived and/or modified CDS sequence (opt2) from neuraminidase__InfluenzaA__ADM14730
augaaccccaaccagaagaucaucaccaucggcuccgucugcaugaccaucggcauggccaaccucauccuccagaucggcaacaucaucuccaucuggaucucccacuccauccagcucggcaaccagaaccagaucgagaccugcaaccaguccaucaucaccuacgagaacaacaccugggucaaccagaccuacgucaacaucuccaacaccaacuucgccgccggccaguccgucgucuccgucaagcucgccggcaacuccucccucugccccgucuccggcugggccgucuacuccaaggacaacuccauccgcaucggcuccaagggcgacguccucgucauccgcgagcccuucaucuccugcuccccccucgagugccgcaccuucuuccucacccagggcgcccuccucaacgacaagcacuccaacggcaccaucaaggaccgcucccccuaccgcacccucauguccugccccaucggcgagguccccucccccuacaacucccgcuucgaguccgucgccugguccgccuccgccugccacgacggcaucaacuggcucaccaucggcaucuccggccccgacaacggcgccgucgccguccucaaguacaacggcaucaucaccgacaccaucaaguccuggcgcaacaacauccuccgcacccaggaguccgagugcgccugcgucaacggcuccugcuucaccgucaugaccgacggccccuccgacggccaggccuccuacaagaucuuccgcaucgagaagggcaagaucgucaaguccgucgagaugaacgcccccaacuaccacuacgaggagugcuccugcuaccccgacuccuccgagaucaccugcgucugccgcgacaacuggcacggcuccaaccgccccugggucuccuucaaccagaaccucgaguaccagaucggcuacaucugcuccggcaucuucggcgacaacccccgccccaacgacaagaccggcuccugcggccccgucuccuccaacggcgccaacggcgucaagggcuucuccuucaaguacggcaacggcgucuggaucggccgcaccaaguccaucuccucccgcuccggcuucgagaugaucugggaccccaacggcuggaccggcaccgacaacaacuucuccaucaagcaggacaucgucggcaucaacgagugguccggcuacuccggcuccuucguccagcaccccgagcucaccggccucgacugcauccgccccugcuucugggucgagcucauccgcggccgccccaaggagaacaccaucuggaccuccggcuccuccaucuccuucugcggcgucaacuccgacaccgucggcugguccuggcccgacggcgccgagcuccccuucaccaucgacaaguga

SEQ ID NO: 115532 - RNA, 1350 nt, Artificial Sequence
  derived and/or modified CDS sequence (opt2) from neuraminidase__InfluenzaA__ADM14748
augaaccccaaccagaagaucaucaccaucggcuccgucugcaugaccaucggcauggccaaccucauccuccagaucggcaacaucaucuccaucuggaucucccacuccauccagcucggcaaccagaaccagaucgagaccugcaaccaguccgucaucaccuacgagaacaacaccugggucaaccagaccuacgucaacaucuccaacaccaacuucgccgccggccaguccgucgucuccgucaagcucgccggcaacuccucccucugccccgucuccggcugggccaucuacuccaaggacaacuccauccgcaucugccgcaccuucuuccucacccagggcgcccuccucaacgacaagcacuccaacggcaccaucaaggaccgcucccccuaccgcacccucauguccugccccaucggcgagguccccucccccuacaacucccgcuucgaguccgucgccugguccgccuccgccugccacgacggcaucaacuggcucaccaucggcaucuccggccccgacaacggcgccgucgccguccucaaguacaacggcaucaucaccgacaccaucaaguccuggcgcaacaacauccuccgcacccaggaguccgagugcgccugcgucaacggcuccugcuucaccgucaugaccgacggccccuccgacggccaggccuccuacaagaucuuccgcaucgagaagggcaagaucgucaaguccgucgagaugaacgcccccaacuaccacuacgaggagugcuccugcuaccccgacuccuccgagaucaccugcgucugccgcgacaacuggcacggcuccaaccgccccugggucuccuucaaccagaaccucgaguaccagaucggcuacaucugcuccggcaucuucggcgacaacccccgccccaacgacaagaccggcuccugcggccccgucuccuccaacggcgccaacggcgucaagggcuucuccuucaaguacggcaacggcgucuggaucggccgcaccaaguccaucuccucccgcaacggcuucgagaugaucugggaccccaacggcuggaccggcaccgacaacaacuucuccaucaagcaggacaucgucggcaucaacgagugguccggcuacuccggcuccuucguccagcaccccgagcucaccggccucgacugcauccgccccugcuucugggucgagcucauccgcggccgccccaaggagaacaccaucuggaccuccggcuccuccaucuccuucugcggcgucaacuccgacaccgucggcugguccuggcccgacggcgccgagcuccccuucaccaucgacaaguga

SEQ ID NO: 115533 - RNA, 1410 nt, Artificial Sequence
  derived and/or modified CDS sequence (opt2) from neuraminidase__InfluenzaA__ADM14758
augaaccccaaccagaagaucaucaccaucggcuccgucugcaugaccaucggcauggccaaccucauccuccagaucggcaacaucaucuccaucuggaucucccacuccauccagcucggcaaccagaaccagaucgagaccugcaaccaguccgucaucaccuacgagaacaacaccugggucaaccagaccuacgucaacaucuccaacaccaacuucgccgccggccaguccgucgucuccgucaagcucgccggcaacuccucccucugccccgucuccggcugggccaucuacuccaaggacaacuccauccgcaucggcuccaagggcgacgucuucgucauccgcgagcccuucaucuccugcuccccccucgagugccgcaccuucuuccucacccagggcgcccuccucaacgacaagcacuccaacggcaccaucaaggaccgcucccccuaccgcacccucauguccugccccaucggcgagguccccucccccuacaacucccgcuucgaguccgucgccugguccgccuccgccugccacgacggcaucaacuggcucaccaucggcaucuccggccccgacaacggcgccgucgccguccucaaguacaacggcaucaucaccgacaccaucaaguccuggcgcaacaacauccuccgcacccaggaguccgagugcgccugcgucaacggcuccugcuucaccgucaugaccgacggccccuccgacggccaggccuccuacaagaucuuccgcaucgagaagggcaagaucgucaaguccgucgagaucaacgcccccaacuaccacuacgaggagugcuccugcuaccccgacuccuccgagaucaccugcgucugccgcgacaacuggcacggcuccaaccgccccugggucuccuucaaccagaaccucgaguaccagaucggcuacaucugcuccggcaucuucggcgacaacccccgccccaacgacaagaccggcuccugcggccccgucuccuccaacggcgccaacggcgucaagggcuucuccuucaaguacggcaacggcgucuggaucggccgcaccaaguccaucuccucccgcaacggcuucgagaugaucugggaccccaacggcuggaccggcaccgacaacaacuucuccaucaagcaggacaucgucggcaucaacgagugguccggcuacuccggcuccuucguccagcaccccgagcucaccggccucgacugcauccgccccugcuucugggucgagcucauccgcggccgccccaaggagaacaccaucuggaccuccggcuccuccaucuccuucugcggcgucaacuccgacaccgucggcugguccuggcccgacggcgccgagcuccccuucaccaucgacaaguga

SEQ ID NO: 115534 - RNA, 1410 nt, Artificial Sequence; identical to SEQ ID NO: 115533
  derived and/or modified CDS sequence (opt2) from neuraminidase__InfluenzaA__ADM14767

SEQ ID NO: 115535 - RNA, 1410 nt, Artificial Sequence; identical to SEQ ID NO: 112774
  derived and/or modified CDS sequence (opt2) from neuraminidase__InfluenzaA__ADM14777

SEQ ID NO: 115536 - RNA, 1410 nt, Artificial Sequence; identical to SEQ ID NO: 112774
  derived and/or modified CDS sequence (opt2) from neuraminidase__InfluenzaA__ADM14814

SEQ ID NO: 115537 - RNA, 1410 nt, Artificial Sequence; identical to SEQ ID NO: 112774
  derived and/or modified CDS sequence (opt2) from neuraminidase__InfluenzaA__ADM14823

SEQ ID NO: 115538 - RNA, 1410 nt, Artificial Sequence; identical to SEQ ID NO: 114397
  derived and/or modified CDS sequence (opt2) from neuraminidase__InfluenzaA__ADM14841

SEQ ID NO: 115539 - RNA, 1410 nt, Artificial Sequence; identical to SEQ ID NO: 114397
  derived and/or modified CDS sequence (opt2) from neuraminidase__InfluenzaA__ADM14859

SEQ ID NO: 115540 - RNA, 1410 nt, Artificial Sequence; identical to SEQ ID NO: 113911
  derived and/or modified CDS sequence (opt2) from neuraminidase__InfluenzaA__ADM14868

SEQ ID NO: 115541 - RNA, 1410 nt, Artificial Sequence; identical to SEQ ID NO: 114397
  derived and/or modified CDS sequence (opt2) from neuraminidase__InfluenzaA__ADM14878

SEQ ID NO: 115542 - RNA, 1410 nt, Artificial Sequence; identical to SEQ ID NO: 112774
  derived and/or modified CDS sequence (opt2) from neuraminidase__InfluenzaA__ADM14887

SEQ ID NO: 115543 - RNA, 1410 nt, Artificial Sequence
  derived and/or modified CDS sequence (opt2) from neuraminidase__InfluenzaA__ADM14896
augaaccccaaccagaagaucaucaccaucggcuccgucugcaugaccaucggcauggccaaccucauccuccagaucggcaacaucaucuccaucuggaucucccacuccauccagcucggcaaccagaaccagaucgagaccugcaaccaguccgucaucaccuacgagaacaacaccugggucaaccagaccuacgucaacaucuccaacaccaacuucgccgccggccaguccgucgucuccgucaagcucgccggcaacuccucccucugccccgucuccggcugggccaucuacuccaaggacaacuccauccgcaucggcuccaagggcgacguccucgucauccgcgagcccuucaucuccugcuccccccucgagugccgcaccuucuuccucacccagggcgcccuccucaacgacaagcacuccaacggcaccaucaaggaccgcucccccuaccgcacccucauguccugccccaucggcgagguccccucccccuacaacucccgcuucgaguccgucgccugguccgccuccgccugccacgacggcaucaacuggcucaccaucggcaucuccggccccgacaacggcgccgucgccguccucaaguacaacggcaucaucaccgacaccaucaaguccuggcgcaacaacauccuccgcacccaggaguccgagugcgccugcgucaacggcuccugcuucaccgucaugaccgacggccccuccgacggccaggccuccuacaagaucuuccgcaucgagaagggcaagaucgucaaguccgucgagaugaacgcccccaacuaccacuacgaggagugcuccugcuaccccgacuccuccgagaucaccugcgucugccgcgacaacuggcacggcuccaaccgccccugggucuccuucaaccagaaccucgaguaccagaucggcuacaucugcuccggcaucuucggcgacaacccccgccccaacgacaagaccggcuccugcggccccgucuccuccaacggcgccaacggcgucaagggcuucuccuucaaguacggcaacggcgucuggaucggccgcaccaaguccaucuccucccgcaacggcuucgagaugaucugggaccccaacggcuggaccggcaccgacaacaacuucuccaucaagcaggacaucgucggcaucaacgagugguccggcuacuccggcuccuucguccagcaccccgagcucaccggccucgacugcauccgccccugcuucugggucgagcucauccgcggccgccccaaggagaacaccaucuggaccuccggcuccuccaucuccuucugcggcgucaacuccgacaccgucggcugguccuggcccgacggcgccgagcuccccuucaccaucgacaaguga

SEQ ID NO: 115544 - RNA, 1410 nt, Artificial Sequence; identical to SEQ ID NO: 112774
  derived and/or modified CDS sequence (opt2) from neuraminidase__InfluenzaA__ADM14905

SEQ ID NO: 115545 - RNA, 1410 nt, Artificial Sequence; identical to SEQ ID NO: 112774
  derived and/or modified CDS sequence (opt2) from neuraminidase__InfluenzaA__ADM14923

SEQ ID NO: 115546 - RNA, 1410 nt, Artificial Sequence; identical to SEQ ID NO: 114062
  derived and/or modified CDS sequence (opt2) from neuraminidase__InfluenzaA__ADM14932

SEQ ID NO: 115547 - RNA, 1410 nt, Artificial Sequence; identical to SEQ ID NO: 112774
  derived and/or modified CDS sequence (opt2) from neuraminidase__InfluenzaA__ADM14950

SEQ ID NO: 115548 - RNA, 1410 nt, Artificial Sequence; identical to SEQ ID NO: 113792
  derived and/or modified CDS sequence (opt2) from neuraminidase__InfluenzaA__ADM14959

SEQ ID NO: 115549 - RNA, 1410 nt, Artificial Sequence
  derived and/or modified CDS sequence (opt2) from neuraminidase__InfluenzaA__ADM14977
augaaccccaaccagaagaucaucaccaucggcuccgucugcaugaccaucggcauggccaaccucauccuccagaucggcaacaucaucuccaucuggaucucccacuccauccagcucggcaaccagaaccagaucgagaccugcaaccaguccgucaucaccuacgagaacaacaccugggucaaccagaccuacgucaacaucuccaacaccaacuucgccgccggccaguccgucgucuccgucaagcucgccggcaacuccucccucugccccgucaacggcugggccaucuacuccaaggacaacuccguccgcaucggcuccaagggcgacgucuucgucauccgcgagcccuucaucuccugcuccccccucgagugccgcaccuucuuccucacccagggcgcccuccucaacgacaagcacuccaacggcaccaucaaggaccgcucccccuaccgcacccucauguccugccccaucggcgagguccccucccccuacaacucccgcuucgaguccgucgccugguccgccuccgccugccacgacggcaucaacuggcucaccaucggcaucuccggccccgacaacggcgccgucgccguccucaaguacaacggcaucaucaccgacaccaucaaguccuggcgcaacaacauccuccgcacccaggaguccgagugcgccugcgucaacggcuccugcuucaccgucaugaccgacggccccuccaacggccaggccuccuacaagaucuuccgcaucgagaagggcaagaucgucaaguccgucgagaugaacgcccccaacuaccacuacgaggagugcuccugcuaccccgacuccuccgagaucaccugcgucugccgcgacaacuggcacggcuccaaccgccccugggucuccuucaaccagaaccucgaguaccagaucggcuacaucugcuccggcaucuucggcgacaacccccgccccaacgacaagaccggcuccugcggccccgucuccuccaacggcgccaacggcgucaagggcuucuccuucaaguacggcaacggcgucuggaucggccgcaccaaguccaucuccucccgcaacggcuucgagaugaucugggaccccaacggcuggaccggcaccgacaacaacuucuccaucaagcaggacaucgucggcaucaacgagugguccggcuacuccggcuccuucguccagcaccccgagcucaccggccucgacugcauccgccccugcuucugggucgagcucauccgcggccgccccaaggagaacaccaucuggaccuccggcuccuccaucuccuucugcggcgucaacuccgacaccgucggcugguccuggcccgacggcgccgagcuccccuucaccaucgacaaguga

SEQ ID NO: 115550 - RNA, 1410 nt, Artificial Sequence; identical to SEQ ID NO: 114397
  derived and/or modified CDS sequence (opt2) from neuraminidase__InfluenzaA__ADM14987

SEQ ID NO: 115551 - RNA, 1410 nt, Artificial Sequence; identical to SEQ ID NO: 113941
  derived and/or modified CDS sequence (opt2) from neuraminidase__InfluenzaA__ADM26787

SEQ ID NO: 115552 - RNA, 1410 nt, Artificial Sequence; identical to SEQ ID NO: 114520
  derived and/or modified CDS sequence (opt2) from neuraminidase__InfluenzaA__ADM26798

SEQ ID NO: 115553 - RNA, 1410 nt, Artificial Sequence
  derived and/or modified CDS sequence (opt2) from neuraminidase__InfluenzaA__ADM26809
augaaccccaaccagaagaucaucaccaucggcuccgucucccucaccaucuccaccaucugcuucuucaugcagaucgccauccucaucaccaccgucacccuccacuucaagcaguacgaguucaacuccccccccaacaaccaggucaugcucugcgagcccaccaucaucgagcgcaacaucaccgagaucgucuaccucaccaacaccaccaucgagaaggagaucugccccaagcucgccgaguaccgcaacugguccaagccccagugcgacaucaccggcuucgcccccuucuccaaggacaacuccauccgccucuccgccggcggcgacaucugggucacccgcgagcccuacgucuccugcgaccccgacaagugcuaccaguucgcccucggccagggcaccaccgucaacaacguccacuccaacaacaccguccgcgaccgcacccccuaccgcacccuccucaugaacgagcucggcguccccuuccaccucggcaccaagcaggucugcaucgccugguccuccuccuccugccacgacggcaaggccuggcuccacgucugcaucaccggcgacgacaagaacgccaccgccuccuucaucuacaacggccgccucgucgacuccgucgucuccugguccaaggagauccuccgcacccaggaguccgagugcgucugcaucaacggcaccugcaccgucgucaugaccgacggcuccgccuccggcaaggccgacaccaagauccucuucaucgaggagggcaagaucguccacaccuccacccucuccggcuccgcccagcacgucgaggagugcuccugcuacccccgcuaccccggcguccgcugcgucugccgcgacaacuggaagggcuccaaccgccccaucgucgacaucaacaucaaggaccacuccaucgucuccuccuacgucugcuccggccucgucggcgacaccccccgcaagaacgacuccuccuccuccucccacugccucgaccccaacaacgaggagggcggccacggcgucaagggcugggccuucgacgacggcaacgacgucuggaugggccgcaccaucuccgagaagucccgccucggcuacgagaccuucaaggucaucgagggcugguccaaccacaaguccaagcuccagaucaaccgccaggucaucgucgaccgcggcaaccgcuccggcuacuccggcaucuucuccgucgagggcaaguccugcaucaaccgcugcuucuacgucgagcucauccgcggccgcaaggaggagaccgagguccucuggaccuccaacuccaucgucgucuucugcggcaccuccggcaccuacggcaccggcuccuggcccgacggcgccgaccucaaccucaugcccaucuga

SEQ ID NO: 115554 - RNA, 1410 nt, Artificial Sequence
  derived and/or modified CDS sequence (opt2) from neuraminidase__InfluenzaA__ADM26820
augaaccccaaccagaagaucaucaccaucggcuccgucucccucaccaucuccaccaucugcuucuucaugcagaucgccauccucaucaccaccgucacccuccacuucaagcaguacgaguucaacuccccccccaacaaccaggucaugcucugcgagcccaccaucaucgagcgcaacaucaccgagaucgucuaccucaccaacaccaccaucgagaaggagaucugccccaagcucgccgaguaccgcaacugguccaagccccagugcgacaucaccggcuucgcccccuucuccaaggacaacuccauccgccucuccgccggcggcgacaucugggucacccgcgagcccuacgucuccugcgaccccgacaagugcuaccaguucgcccucggccagggcaccacccucaacaacguccacuccaacaacaccguccgcgaccgcacccccuaccgcacccuccucaugaacgagcucggcguccccuuccaccucggcaccaagcaggucugcaucgccugguccuccuccuccugccacgacggcaaggccuggcuccacgucugcaucaccggcgacgacaagaacgccaccgccuccuucaucuacaacggccgccucgucgacuccgucgucuccugguccaaggagauccuccgcacccaggaguccgagugcgucugcaucaacggcaccugcaccgucgucaugaccgacggcuccgccuccggcaaggccgacaccaagauccucuucaucgaggagggcaagaucguccacaccuccacccucuccggcuccgcccagcacgucgaggagugcuccugcuacccccgcuaccccggcguccgcugcgucugccgcgacaacuggaagggcuccaaccgccccaucgucgacaucaacaucaaggaccacuccaucgucuccuccuacgucugcuccggccucgucggcgacaccccccgcaagaacgacuccuccuccuccucccacugccucgaccccaacaacgaggagggcggccacggcgucaagggcugggccuucgacgacggcaacgacgucuggaugggccgcaccaucaacgagaccucccgccucggcuacgagaccuucaaggucaucgagggcugguccaaccccaaguccaagcuccagaucaaccgccaggucaucgucgaccgcggcaaccgcuccggcuacuccggcaucuucuccgucgagggcaaguccugcaucaaccgcugcuucuacgucgagcucauccgcggccgcaaggaggagaccgagguccucuggaccuccaacuccaucgucgucuucugcggcaccuccggcaccuacggcaccggcuccuggcccgacggcgccgaccucaaccucaugcccaucuga

SEQ ID NO: 115555 - RNA, 1350 nt, Artificial Sequence
  derived and/or modified CDS sequence (opt2) from neuraminidase__InfluenzaA__ADM31427
augaaccccaaccagaagaucaucaccaucggcuccgucugcaugaucaucggcaucgucucccucaugcuccagaucggcaacaugaucuccaucugggucucccacuccauccagaccggcaaccagcaccaggccgagcccauccgcaacaccaacuuccucaccgagaacgccgucgccuccgucacccucgccggcaacuccucccucugccccauccgcggcugggccguccacuccaaggacaacuccauccgcaucggcuccaagggcgacgucuucgucauccgcgagcccuucaucuccugcucccacauggagugccgcaccuucuuccucacccagggcgcccuccucaacgacaagcacuccaacggcaccgucaaggaccgcuccccccaccgcacccucauguccugccccgucggcgaggcccccucccccuacaacucccgcuucgaguccgucgccugguccgccuccgccugccacgacggcaucuccuggcucaccaucggcaucuccggccccgacaacggcgccgucgccguccucaaguacaacggcaucaucaccgacaccaucaaguccuggggcaacaacauccuccgcacccaggaguccgagugcgccugcgucaacggcuccugcuucaccgucaugaccgacggccccuccaacggccaggccuccuacaagaucuucaagaucgagaagggcaaggucgucaaguccgucgagcucaacgcccccaacuaccacuacgaggagugcuccugcuaccccgacuccggcgagaucaucugcgucugccgcgacaacuggcacggcuccaaccgccccugggucuccuucaaccagaaccucgaguaccagaucggcuacaucugcuccggcgucuucggcgacaacccccgccccaacgacggcaccggcuccugcggccccaugucccccaacggcgccuacggcaucaagggcuucuccuucaaguacggcaacggcgucuggaucggccgcaccaaguccaccaacucccgcuccggcuucgagaugaucugggaccccaacggcuggaccggcaccgacuccgaguucuccgucaagcaggacaucgucgccaucaccgacugguccggcuacuccggcuccuucguccagcaccccgagcucaccggccucgacugcauccgccccugcuucugggucgagcucauccgcggccgccccaaggaguccaccaucuggaccuccggcuccuccaucuccuucugcggcgucaacuccgacaccgucuccugguccuggcccgacggcgccgagcuccccuucaccaucgacaaguga

SEQ ID NO: 115556 - RNA, 1410 nt, Artificial Sequence
  derived and/or modified CDS sequence (opt2) from neuraminidase__InfluenzaA__ADM31481
augaaccccaaccagaagaucaucaccaucggcuccgucugcaugaccaucggcauggccaaccucauccuccagaucggcaacaucaucuccaucuggaucucccacuccauccagcucggcaaccagaaccagaucgagaccugcaaccaguccgucaucaccuacgagaacaacaccugggucaaccagaccuacgucaacaucuccaacaccaacuucgccgccggccaguccgucgucuccgucaagcucgccggcaacuccucccucugccccgucuccggcugggccaucuacuccaaggacaacuccauccgcaucggcuccaagggcgacgucuucgucauccgcgagcccuucaucuccugcuccccccucgagugccgcaccuucuuccucacccagggcgcccuccucaacgacaagcacuccaacggcaccaucaaggaccgcucccccuaccgcacccucauguccugccccaucggcgagguccccucccccuacaacucccgcuucgaguccgucgccugguccgccuccgccugccacgacggcaucaacuggcucaccaucggcaucuccggccccgacaagggcgccgucgccguccucaaguacaacggcaucaucaccgacaccaucaaguccuggcgcaacaacauccuccgcacccaggaguccgagugcgccugcgucaacggcuccugcuucaccgucaugaccgacggccccuccgacggccaggccuccuacaagaucuuccgcaucgagaagggcaagaucgucaaguccgucgagaugaacgcccccaacuaccacuacgaggagugcuccugcuaccccgacuccuccgagaucaccugcgucugccgcgacaacuggcacggcuccaaccgccccugggucuccuucaaccagaaccucgaguaccagaucggcuacaucugcuccggcaucuucggcgacaacccccgccccaacgacaagaccggcuccugcggccccgucuccuccaacggcgccaacggcgucaagggcuucuccuucaaguacggcaacggcgucuggaucggccgcaccaaguccaucuccucccgcaacggcuucgagaugaucugggaccccaacggcuggaccggcaccgacaacaacuucuccaucaagcaggacaucgucggcaucaacgagugguccggcuacuccggcuccuucguccagcaccccgagcucaccggccucgacugcauccgccccugcuucugggucgagcucauccgcggccgccccaaggagaacaccaucuggaccuccggcuccuccaucuccuucugcggcgucaacuccgacaccgucggcugguccuggcccgacggcgccgagcuccccuucaccaucgacaaguga

SEQ ID NO: 115557 - RNA, 1410 nt, Artificial Sequence; identical to SEQ ID NO: 113357
  derived and/or modified CDS sequence (opt2) from neuraminidase__InfluenzaA__ADM31491

SEQ ID NO: 115558 - RNA, 1410 nt, Artificial Sequence; identical to SEQ ID NO: 114979
  derived and/or modified CDS sequence (opt2) from neuraminidase__InfluenzaA__ADM31501

SEQ ID NO: 115559 - RNA, 1410 nt, Artificial Sequence; identical to SEQ ID NO: 112774
  derived and/or modified CDS sequence (opt2) from neuraminidase__InfluenzaA__ADM31511

SEQ ID NO: 115560 - RNA, 1410 nt, Artificial Sequence; identical to SEQ ID NO: 114975
  derived and/or modified CDS sequence (opt2) from neuraminidase__InfluenzaA__ADM31521

SEQ ID NO: 115561 - RNA, 1410 nt, Artificial Sequence; identical to SEQ ID NO: 112774
  derived and/or modified CDS sequence (opt2) from neuraminidase__InfluenzaA__ADM31531

SEQ ID NO: 115562 - RNA, 1410 nt, Artificial Sequence; identical to SEQ ID NO: 114062
  derived and/or modified CDS sequence (opt2) from neuraminidase__InfluenzaA__ADM31541

SEQ ID NO: 115563 - RNA, 1410 nt, Artificial Sequence; identical to SEQ ID NO: 112774
  derived and/or modified CDS sequence (opt2) from neuraminidase__InfluenzaA__ADM31551

SEQ ID NO: 115564 - RNA, 1410 nt, Artificial Sequence; identical to SEQ ID NO: 112774
  derived and/or modified CDS sequence (opt2) from neuraminidase__InfluenzaA__ADM31561

SEQ ID NO: 115565 - RNA, 1410 nt, Artificial Sequence; identical to SEQ ID NO: 112774
  derived and/or modified CDS sequence (opt2) from neuraminidase__InfluenzaA__ADM31571

SEQ ID NO: 115566 - RNA, 1410 nt, Artificial Sequence; identical to SEQ ID NO: 113951
  derived and/or modified CDS sequence (opt2) from neuraminidase__InfluenzaA__ADM31581

SEQ ID NO: 115567 - RNA, 1410 nt, Artificial Sequence; identical to SEQ ID NO: 112774
  derived and/or modified CDS sequence (opt2) from neuraminidase__InfluenzaA__ADM31601

SEQ ID NO: 115568 - RNA, 1410 nt, Artificial Sequence; identical to SEQ ID NO: 114062
  derived and/or modified CDS sequence (opt2) from neuraminidase__InfluenzaA__ADM31611

SEQ ID NO: 115569 - RNA, 1410 nt, Artificial Sequence
  derived and/or modified CDS sequence (opt2) from neuraminidase__InfluenzaA__ADM31621
augaaccccaaccagaagaucaucaccaucggcuccgucugcaugaccaucggcauggccaaccucauccuccagaucggcaacaucaucuccaucuggaucucccacuccauccagcucggcaaccagaaccagaucgagaccugcaaccaguccgucaucaccuacgagaacaacaccugggucaaccagaccuacgucaacaucuccaacaccaacuucgccgccggccaguccgucgucuccgucaagcucgccggcaacuccucccucugccccgucuccggcugggccaucuacuccaaggacaacuccauccgcaucggcuccaagggcgacgucuucgucauccgcgagcccuucaucuccugcuccucccucgagugccgcaccuucuuccucacccagggcgcccuccucaacgacaagcacuccaacggcaccaucaaggaccgcucccccuaccgcacccucauguccugccccaucggcgagguccccucccccuacaacucccgcuucgaguccgucgccugguccgccuccgccugccacgacggcaucaacuggcucaccaucggcaucuccggccccgacaacggcgccgucgccguccucaaguacaacggcaucaucaccgacaccaucaaguccuggcgcaacaacauccuccgcacccaggaguccgagugcgccugcgucaacggcuccugcuucaccgucaugaccgacggccccuccgacggccaggccuccuacaagaucuuccgcaucgagaagggcaagaucgucaaguccgucgagaugaacgcccccaacuaccacuacgaggagugcuccugcuaccccgacuccuccgagaucaccugcgucugccgcgacaacuggcacggcuccaaccgccccugggucuccuucaaccagaaccucgaguaccagaucggcuacaucugcuccggcaucuucggcgacaacccccgccccaacgacaagaccggcuccugcggccccgucuccuccaacggcgccaacggcgucaagggcuucuccuucaaguacggcaacggcgucuggaucggccgcaccaaguccaucuccucccgcaacggcuucgagaugaucugggaccccaacggcuggaccggcaccgacaacaacuucuccaucaagcaggacaucgucggcaucaacgagugguccggcuacuccggcuccuucguccagcaccccgagcucaccggccucgacugcauccgccccugcuucugggucgagcucauccgcggccgccccaaggagaacaccaucuggaccuccggcuccuccaucuccuucugcggcgucaacuccgacaccgucggcugguccuggcccgacggcgccgagcuccccuucaccaucgacaaguga

SEQ ID NO: 115570 - RNA, 1410 nt, Artificial Sequence; identical to SEQ ID NO: 114062
  derived and/or modified CDS sequence (opt2) from neuraminidase__InfluenzaA__ADM31631

SEQ ID NO: 115571 - RNA, 1410 nt, Artificial Sequence; identical to SEQ ID NO: 113951
  derived and/or modified CDS sequence (opt2) from neuraminidase__InfluenzaA__ADM31641

SEQ ID NO: 115572 - RNA, 1410 nt, Artificial Sequence; identical to SEQ ID NO: 114236
  derived and/or modified CDS sequence (opt2) from neuraminidase__InfluenzaA__ADM31651

SEQ ID NO: 115573 - RNA, 1410 nt, Artificial Sequence; identical to SEQ ID NO: 113951
  derived and/or modified CDS sequence (opt2) from neuraminidase__InfluenzaA__ADM31661

SEQ ID NO: 115574 - RNA, 1410 nt, Artificial Sequence
  derived and/or modified CDS sequence (opt2) from neuraminidase__InfluenzaA__ADM31671
augaaccccaaccagaagaucaucaccaucggcuccgucugcaugaccaucggcauggccaaccucauccuccagaucggcaacaucaucuccaucuggaucucccacuccacccagcucggcaaccagaaccagaucgagaccugcaaccaguccgucaucaccuacgagaacaacaccugggucaaccagaccuacgucaacaucuccaacaccaacuucgccgccggccaguccgucgucuccgccaagcucgccggcaacuccucccucugccccgucuccggcugggccaucuacuccaaggacaacuccauccgcaucggcuccaagggcgacgucuucgucauccgcgagcccuucaucuccugcuccccccucgagugccgcaccuucuuccucacccagggcgcccuccucaacgacaagcacuccaacggcaccaucaaggaccgcucccccuaccgcacccucauguccugccccaucggcgagguccccucccccuacaacucccgcuucgaguccgucgccugguccgccuccgccugccacgacggcaucaacuggcucaccaucggcaucuccggccccgacaacggcgccgucgccguccucaaguacaacggcaucaucaccgacaccaucaaguccuggcgcaacaacauccuccgcacccaggaguccgagugcgccugcgucaacggcuccugcuucaccgucaugaccgacggccccuccgacggccaggccuccuacaagaucuuccgcaucgagaagggcaagaucgucaaguccgucgagaugaacgcccccaacuaccacuacgaggagugcuccugcuaccccgacuccuccgagaucaccugcgucugccgcgacaacuggcacggcuccaaccgccccugggucuccuucaaccagaaccucgaguaccagaucggcuacaucugcuccggcaucuucggcgacaacccccgccccaacgacaagaccggcuccugcggccccgucuccuccaacggcgccaacggcgucaagggcuucuccuucaaguacggcaacggcgucuggaucggccgcaccaaguccaucuccucccgcaacggcuucgagaugaucugggaccccaacggcuggaccggcaccgacaacaacuucuccaucaagcaggacaucgucggcaucaacgagugguccggcuacuccggcuccuucguccagcaccccgagcucaccggccucgacugcauccgccccugcuucugggucgagcucauccgcggccgccccaaggagaacaccaucuggaccuccggcuccuccaucuccuucugcggcgucaacuccgacaccgucggcugguccuggcccgacggcgccgagcuccccuucaccaucgacaaguga

SEQ ID NO: 115575 - RNA, 1410 nt, Artificial Sequence; identical to SEQ ID NO: 114062
  derived and/or modified CDS sequence (opt2) from neuraminidase__InfluenzaA__ADM31681

SEQ ID NO: 115576 - RNA, 1410 nt, Artificial Sequence
  derived and/or modified CDS sequence (opt2) from neuraminidase__InfluenzaA__ADM31691
augaaccccaaccagaagauccucaccaucggcuccgucugcaugaccaucggcauggccaaccucauccuccagaucggcaacaucaucuccaucuggaucucccacuccauccagcucggcaaccagaaccagaccgagaccugcaaccaguccgucaucaccuacgagaacaacaccugggucaaccagaccuacgucaacaucuccaacaccaacuucgccgccggccaguccgucgucuccgucaagcucgccggcaacuccucccucugccccgucuccggcugggccaucuacuccaaggacaacuccauccgcaucggcuccaagggcgacgucuucgucauccgcgagcccuucaucuccugcuccccccucgagugccgcaccuucuuccucacccagggcgcccuccucaacgacaagcacuccaacggcaccaucaaggaccgcucccccuaccgcacccucauguccugccccaucggcgagguccccucccccuacaacucccgcuucgaguccgucgccugguccgccuccgccugccacgacggcaucaacuggcucaccaucggcaucuccggccccgacaacggcgccgucgccguccucaaguacaacggcaucaucaccgacaccaucaaguccuggcgcaacaacauccuccgcacccaggaguccgagugcgccugcgucaacggcuccugcuucaccgucaugaccgacggccccuccgacggccaggccuccuacaagaucuuccgcaucgagaagggcaagaucgucaaguccgucgagaugaacgcccccaacuaccacuacgaggagugcuccugcuaccccgacuccuccgagaucaccugcgucugccgcgacaacuggcacggcuccaaccgccccugggucuccuucaaccagaaccucgaguaccagaucggcuacaucugcuccggcaucuucggcgacaacccccgccccaacgacaagaccggcuccugcggccccgucuccuccaacggcgccaacggcgucaagggcuucuccuucaaguacggcaacggcgucuggaucggccgcaccaaguccaucuccucccgcaacggcuucgagaugaucugggaccccaacggcuggaccggcaccgacaacaacuucuccaucaagcaggacaucgucggcaucaacgagugguccggcuacuccggcuccuucguccagcaccccgagcucaccggccucgacugcauccgccccugcuucugggucgagcucauccgcggccgccccaaggagaacaccaucuggaccuccggcuccuccaucuccuucugcggcgucaacuccgacaccgucggcugguccuggcccgacggcgccgagcuccccuucaccaucgacaaguga

SEQ ID NO: 115577 - RNA, 1410 nt, Artificial Sequence; identical to SEQ ID NO: 112774
  derived and/or modified CDS sequence (opt2) from neuraminidase__InfluenzaA__ADM31701

SEQ ID NO: 115578 - RNA, 1410 nt, Artificial Sequence; identical to SEQ ID NO: 112774
  derived and/or modified CDS sequence (opt2) from neuraminidase__InfluenzaA__ADM31711

SEQ ID NO: 115579 - RNA, 1410 nt, Artificial Sequence; identical to SEQ ID NO: 114062
  derived and/or modified CDS sequence (opt2) from neuraminidase__InfluenzaA__ADM31721

SEQ ID NO: 115580 - RNA, 1410 nt, Artificial Sequence
  derived and/or modified CDS sequence (opt2) from neuraminidase__InfluenzaA__ADM31731
augaaccccaaccagaagaucaucaucaucggcuccgucugcaugaccaucggcauggccaaccucauccuccagaucggcaacaucaucuccaucuggaucucccacuccauccagcucggcaaccagaaccagaucgagaccugcaaccaguccgucaucaccuacgagaacaacaccugggucaaccagaccuacgucaacaucuccaacaccaacuucgccgccggccaguccgucgucuccgucaagcucgccggcaacuccucccucugccccgucuccggcugggccaucuacuccaaggacaacuccauccgcaucggcuccaagggcgacgucuucgucauccgcgagcccuucaucuccugcuccccccucgagugccgcaccuucuuccucacccagggcgcccuccucaacgacaagcacuccaacggcaccaucaaggaccgcucccccuaccgcacccucauguccugccccaucggcgagguccccucccccuacaacucccgcuucgaguccgucgccugguccgccuccgccugccacgacggcaucaacuggcucaccaucggcaucuccggccccgacaacggcgccgucgccguccucaaguacaacggcaucaucaccgacaccaucaaguccuggcgcaacaacauccuccgcacccaggaguccgagugcgccugcgucaacggcuccugcuucaccgucaugaccgacggccccuccgacggccaggccuccuacaagaucuuccgcaucgagaagggccgcaucgucaaguccgucgagaugaacgcccccaacuaccacuacgaggagugcuccugcuaccccgacuccuccgagaucaccugcgucugccgcgacaacuggcacggcuccaaccgccccugggucuccuucaaccagaaccucgaguaccagaucggcuacaucugcuccggcaucuucggcgacaacccccgccccaacgacaagaccggcuccugcggccccgucuccuccaacggcgccaacggcgucaagggcuucuccuucaaguacggcaacggcgucuggaucggccgcaccaaguccaucuccucccgcaacggcuucgagaugaucugggaccccaacggcuggaccggcaccgacaacaacuucuccaucaagcaggacaucgucggcaucaacgagugguccggcuacuccggcuccuucguccagcaccccgagcucaccggccucgacugcauccgccccugcuucugggucgagcucauccgcggccgccccaaggagaacaccaucuggaccuccggcuccuccaucuccuucugcggcgucaacuccgacaccgucggcugguccuggcccgacggcgccgagcuccccuucaccaucgacaaguga

SEQ ID NO: 115581 - RNA, 1410 nt, Artificial Sequence; identical to SEQ ID NO: 115149
  derived and/or modified CDS sequence (opt2) from neuraminidase__InfluenzaA__ADM31741

SEQ ID NO: 115582 - RNA, 1410 nt, Artificial Sequence; identical to SEQ ID NO: 112774
  derived and/or modified CDS sequence (opt2) from neuraminidase__InfluenzaA__ADM31751

SEQ ID NO: 115583 - RNA, 1410 nt, Artificial Sequence
  derived and/or modified CDS sequence (opt2) from neuraminidase__InfluenzaA__ADM31761
augaaccccaaccagaagaucaucaccaucggcuccgucugcaugaccaucggcauggccaaccucauccuccagaucggcaacaucaucuccaucuggaucucccacuccauccagcucggcaaccagaaccagaucgagaccugcaaccaguccgucaucaccuacgagaacaacaccugggucaaccagaccuacgucaacaucuccaacaccaacuucgccgccggccaguccgucgucuccgucaagcucgccggcaacuccucccucugccccgucuccggcugggccaucuacuccaaggacaacuccauccgcaucggcuccaagggcgacgucuucgucauccgcgagcccuucaucuccugcuccccccucgagugccgcaccuucuuccucacccagggcgcccuccucaacgacaagcacuccaacggcaccaucaaggaccgcucccccuaccgcacccucauguccugccccaucggcgagguccccucccccuacaacucccgcuucgaguccgucgccugguccgccuccgccugccacgacggcaucaacuggcucaccaucggcaucuccggccccgacaacggcgccgucgccguccucaaguacaacggcaucaucaccgacaccaucaaguccuggcgcaacaacauccuccgcacccaggaguccgagugcgccugcgucaacggcuccugcuucaccgucaugaccgacggccccuccgacggccaggccuccuacaagaucuuccgcaucgagaagggcaagaucgucaaguccgucgagaugaacgcccccaacuaccacuacgaggagugcuccugcuaccccgacuccuccgagaucaccugcgucugccgcgacaacuggcacggcuccaaccgccccugggucuccuucaaccacaaccucgaguaccagaucggcuacaucugcuccggcaucuucggcgacaacccccgccccaacgacaagaccggcuccugcggccccgucuccuccaacggcgccaacggcgucaagggcuucuccuucaaguacggcaacggcgucuggaucggccgcaccaaguccaucuccucccgcaacggcuucgagaugaucugggaccccaacggcuggaccggcaccgacaacaaguucuccaucaagcaggacaucgucggcaucuccgagugguccggcuacuccggcuccuucguccagcaccccgagcucaccggccucgacugcauccgccccugcuucugggucgagcucauccgcggccgccccaaggagaacaccaucuggaccuccggcuccuccaucuccuucugcggcgucaacuccgacaccgucggcugguccuggcccgacggcgccgagcuccccuucaccaucgacaaguga

SEQ ID NO: 115584 - RNA, 1410 nt, Artificial Sequence
  derived and/or modified CDS sequence (opt2) from neuraminidase__InfluenzaA__ADM31771
augaaccccaaccagaagauccucaccaucggcuccgucugcaugaccaucggcauggccaaccucauccuccagaucggcaacaucaucuccaucuggaucucccacuccauccagcucggcaaccagaaccagaccgagaccugcaaccaguccgucaucaucuacgagaacaacaccugggucaaccagaccuacgucaacaucuccaacaccaacuucgccgccggccaguccgucgucuccgucaagcucgccggcaacuccucccucugccccgucuccggcugggccaucuacuccaaggacaacuccauccgcaucggcuccaagggcgacgucuucgucauccgcgagcccuucaucuccugcuccccccucgagugccgcaccuucuuccucacccagggcgcccuccucaacgacaagcacuccaacggcaccaucaaggaccgcucccccuaccgcacccucauguccugccccaucggcgagguccccucccccuacaacucccgcuucgaguccgucgccugguccgccuccgccugccacgacggcaucaacuggcucaccaucggcaucuccggccccgacaacggcgccgucgccguccucaaguacaacggcaucaucaccgacaccaucaaguccuggcgcaacaacauccuccgcacccaggaguccgagugcgccugcgucaacggcuccugcuucaccgucaugaccgacggccccuccgacggccaggccuccuacaagaucuuccgcaucgagaagggcaagaucgucaaguccgucgagaugaacgcccccaacuaccacuacgaggagugcuccugcuaccccgacuccuccgagaucaccugcgucugccgcgacaacuggcacggcuccaaccgccccugggucuccuucaaccagaaccucgaguaccagaucggcuacaucugcuccggcaucuucggcgacaacccccgccccaacgacaagaccggcuccugcggccccgucuccuccaacggcgccaacggcgucaagggcuucuccuucaaguacggcaacggcgucuggaucggccgcaccaaguccaucuccucccgcaacggcuucgagaugaucugggaccccaacggcuggaccggcaccgacaacaacuucuccaucaagcaggacaucgucggcaucaacgagugguccggcuacuccggcuccuucguccagcaccccgagcucaccggccucgacugcauccgccccugcuucugggucgagcucauccgcggccgccccaaggagaacaccaucuggaccuccggcuccuccaucuccuucugcggcgucaacuccgacaccgucggcugguccuggcccgacggcgccgagcuccccuucaccaucgacaaguga

SEQ ID NO: 115585 - RNA, 1410 nt, Artificial Sequence
  derived and/or modified CDS sequence (opt2) from neuraminidase__InfluenzaA__ADM31801
augaaccccaaccagaagaucaucaccaucggcuccgucugcaugaccaucggcauggccaaccucauccuccagaucggcaacaucaucuccaucuggaucucccacuccauccagcucggcaaccagaaccagaucgagaccugcaaccaguccgucaucaccuacgagaacaacaccugggucaaccagaccuacgucaacaucaacaacaccaacuucgccgccggccaguccgucgucuccgucaagcucgccggcaacuccucccucugccccgucuccggcugggccaucuacuccaaggacaacuccauccgcaucggcuccaagggcgacgucuucgucauccgcgagcccuucaucuccugcuccccccucgagugccgcaccuucuuccucacccagggcgcccuccucaacgacaagcacuccaacggcaccaucaaggaccgcucccccuaccgcacccucauguccugccccaucggcgagguccccucccccuacaacucccgcuucgaguccgucgccugguccgccuccgccugccacgacggcaucaacuggcucaccaucggcaucuccggccccgacaacggcgccgucgccguccucaaguacaacggcaucaucaccgacaccaucaaguccuggcgcaacaacauccuccgcacccaggaguccgagugcgccugcgucaacggcuccugcuucaccgucaugaccgacggccccuccgacggccaggccuccuacaagaucuuccgcaucgagaagggcaagaucgucaaguccgucgagaugaacgcccccaacuaccacuacgaggagugcuccugcuaccccgacuccuccgagaucaccugcgucugccgcgacaacuggcacggcuccaaccgccccugggucuccuucaaccagaaccucgaguaccagaucggcuacaucugcuccggcaucuucggcgacaacccccgccccaacgacaagaccggcuccugcggccccgucuccuccaacggcgccaacggcgucaagggcuucuccuucaaguacggcaacggcgucuggaucggccgcaccaaguccaucuccucccgcaacggcuucgagaugaucugggaccccaacggcuggaccggcaccgacaacaaguucuccaucaagcaggacaucgucggcaucaacgagugguccggcuacuccggcuccuucguccagcaccccgagcucaccggccucgacugcauccgccccugcuucugggucgagcucauccgcggccgccccaaggagaacaccaucuggaccuccggcuccuccaucuccuucugcggcgucaacuccgacaccgucggcugguccuggcccgacggcgccgagcuccccuucaccaucgacaaguga

SEQ ID NO: 115586 - RNA, 1410 nt, Artificial Sequence
  derived and/or modified CDS sequence (opt2) from neuraminidase__InfluenzaA__ADM31811
augaaccccaaccagaagaucaucaccaucggcuccgucugcaugaccaucggcauggccaaccucauccuccagaucggcaacaucaucuccaucuggaucucccacuccauccagcucggcaaccagaaccagaucgagaccugcaaccaguccgucaucaccuacgagaacaacaccugggucaaccagaccuacgucaacaucuccaacaccaacuucgccgccggccaguccgucgucuccgucaaguucgccggcaacuccucccucugccccgucuccggcugggccaucuacuccaaggacaacuccauccgcaucggcuccaagggcgacgucuucgucauccgcgagcccuucaucuccugcuccccccucgagugccgcaccuucuuccucacccagggcgcccuccucaacgacaagcacuccaacggcaccaucaaggaccgcucccccuaccgcacccucauguccugccccaucggcgagguccccucccccuacaacucccgcuucgaguccgucgccugguccgccuccgccugccacgacggcaucaacuggcucaccaucggcaucuccggccccgacaacggcgccgucgccguccucaaguacaacggcaucaucaccgacaccaucaaguccuggcgcaacaacauccuccgcacccaggaguccgagugcgccugcgucaacggcuccugcuucaccgucaugaccgacggccccuccgacggccaggccuccuacaagaucuuccgcaucgagaagggcaagaucgucaaguccgucgagaugaacgcccccaacuaccacuacgaggagugcuccugcuaccccgacuccuccgagaucaccugcgucugccgcgacaacuggcacggcuccaaccgccccugggucuccuucaaccagaaccucgaguaccagaucggcuacaucugcuccggcaucuucggcgacaacccccgccccaacgacaagaccggcuccugcggccccgucuccuccaacggcgccaacggcgucaagggcuucuccuucaaguacggcaacggcgucuggaucggccgcaccaaguccaucuccucccgcaacggcuucgagaugaucugggaccccaacggcuggaccggcaccgacaacaaguucuccaucaagcaggacaucgucggcaucaacgagugguccggcuacuccggcuccuucguccagcaccccgagcucaccggccucgacugcauccgccccugcuucugggucgagcucauccgcggccgccccaaggagaacaccaucuggaccuccggcuccuccaucuccuucugcggcgucaacuccgacaccgucggcugguccuggcccgacggcgccgagcuccccuucaccaucgacaaguga

SEQ ID NO: 115587 - RNA, 1410 nt, Artificial Sequence; identical to SEQ ID NO: 113951
  derived and/or modified CDS sequence (opt2) from neuraminidase__InfluenzaA__ADM31821

SEQ ID NO: 115588 - RNA, 1410 nt, Artificial Sequence; identical to SEQ ID NO: 112774
  derived and/or modified CDS sequence (opt2) from neuraminidase__InfluenzaA__ADM31831

SEQ ID NO: 115589 - RNA, 1410 nt, Artificial Sequence; identical to SEQ ID NO: 112774
  derived and/or modified CDS sequence (opt2) from neuraminidase__InfluenzaA__ADM31841

SEQ ID NO: 115590 - RNA, 1410 nt, Artificial Sequence
  derived and/or modified CDS sequence (opt2) from neuraminidase__InfluenzaA__ADM31851
augaaccccaaccagaagauccucaccaucggcuccgucugcaugaccaucggcauggccaaccucauccuccagaucggcaacaucaucuccaucuggaucucccacuccauccagcucggcaaccagaaccagaccgagaccugcaaccaguccgucaucaccuacgagaacaacaccugggucaaccagaccuacgucaacaucuccaacaccaacuucgccgccggccaguccgucgucuccgucaagcucgccggcaacuccucccucugccccgucuccggcugggccaucuacuccaaggacaacuccauccgcaucggcuccaagggcgacgucuucgucauccgcgagcccuucaucuccugcuccccccucgagugccgcaccuucuuccucacccagggcgcccuccucaacgacaagcacuccaacggcaccaucaaggaccgcucccccuaccgcacccucauguccugccccaucggcgagguccccucccccuacaacucccgcuucgaguccgucgccugguccgccuccgccugccacgacggcaucaacuggcucaccaucggcaucuccggccccgacaacggcgccgucgccguccucaaguacaacggcaucaucaccgacaccaucaaguccuggcgcaacaacauccuccgcacccaggaguccgagugcgccugcgucaacggcuccugcuucaccgucaugaccgacggccccuccgacggccaggccuccuacaagaucuuccgcaucgagcgcggcaagaucgucaaguccgucgagaugaacgcccccaacuaccacuacgaggagugcuccugcuaccccgacuccuccgagaucaccugcgucugccgcgacaacuggcacggcuccaaccgccccugggucuccuucaaccagaaccucgaguaccagaucggcuacaucugcuccggcaucuucggcgacaacccccgccccaacgacaagaccggcuccugcggccccgucuccuccaacggcgccaacggcgucaagggcuucuccuucaaguacggcaacggcgucuggaucggccgcaccaaguccaucuccucccgcaacggcuucgagaugaucugggaccccaacggcuggaccggcaccgacaacaacuucuccaucaagcaggacaucgucggcaucaacgagugguccggcuacuccggcuccuucguccagcaccccgagcucaccggccucgacugcauccgccccugcuucugggucgagcucauccgcggccgccccaaggagaacaccaucuggaccuccggcuccuccaucuccuucugcggcgucaacuccgacaccgucggcugguccuggcccgacggcgccgagcuccccuucaccaucgacaaguga

SEQ ID NO: 115591 - RNA, 1410 nt, Artificial Sequence; identical to SEQ ID NO: 112774
  derived and/or modified CDS sequence (opt2) from neuraminidase__InfluenzaA__ADM31861

SEQ ID NO: 115592 - RNA, 1410 nt, Artificial Sequence; identical to SEQ ID NO: 112774
  derived and/or modified CDS sequence (opt2) from neuraminidase__InfluenzaA__ADM31871

SEQ ID NO: 115593 - RNA, 1410 nt, Artificial Sequence
  derived and/or modified CDS sequence (opt2) from neuraminidase__InfluenzaA__ADM31881
augaaccccaaccagaagaucaucaccaucggcuccgucugcaugaccaucggcauggccaaccucauccuccagaucggcaacaccaucuccaucuggaucucccacuccauccagcucggcaaccagaaccagaucgagaccugcaaccaguccgucaucaccuacgagaacaacaccugggucaaccagaccuacgucaacaucuccaacaccaacuucgccgccggccaguccgucgucuccgucaagcucgccggcaacuccucccucugccccgucuccggcugggccaucuacuccaaggacaacuccauccgcaucggcuccaagggcgacgucuucgucauccgcgagcccuucaucuccugcuccccccucgagugccgcaccuucuuccucacccagggcgcccuccucaacgacaagcacuccaacggcaccaucaaggaccgcucccccuaccgcacccucauguccugccccaucggcgagguccccucccccuacaacucccgcuucgaguccgucgccugguccgccuccgccugccacgacggcaucaacuggcucaccaucggcaucuccggccccgacaacggcgccgucgccguccucaaguacaacggcaucaucaccgacaccaucaaguccuggcgcaacaacauccuccgcacccaggaguccgagugcgccugcgucaacggcuccugcuucaccgucaugaccgacggccccuccgacggccaggccuccuacaagaucuuccgcaucgagaagggcaagaucgucaaguccgucgagaugaacgcccccaacuaccacuacgaggagugcuccugcuaccccgacuccuccgagaucaccugcgucugccgcgacaacuggcacggcuccaaccgccccugggucuccuucaaccagaaccucgaguaccagaucggcuacaucugcuccggcaucuucggcgacaacccccgccccaacgacaagaccggcuccugcggccccgucuccuccaacggcgccaacggcgucaagggcuucuccuucaaguacggcaacggcgucuggaucggccgcaccaaguccaucuccucccgcaacggcuucgagaugaucugggaccccaacggcuggaccggcaccgacaacaacuucuccaucaagcaggacaucgucggcaucaacgagugguccggcuacuccggcuccuucguccagcaccccgagcucaccggccucgacugcauccgccccugcuucugggucgagcucauccgcggccgccccaaggagaacaccaucuggaccuccggcuccuccaucuccuucugcggcgucaacuccgacaccgucggcugguccuggcccgacggcgccgagcuccccuucaccaucgacaaguga

SEQ ID NO: 115594 - RNA, 1410 nt, Artificial Sequence; identical to SEQ ID NO: 112774
  derived and/or modified CDS sequence (opt2) from neuraminidase__InfluenzaA__ADM31891

SEQ ID NO: 115595 - RNA, 1410 nt, Artificial Sequence; identical to SEQ ID NO: 112764
  derived and/or modified CDS sequence (opt2) from neuraminidase__InfluenzaA__ADM31901

SEQ ID NO: 115596 - RNA, 1410 nt, Artificial Sequence; identical to SEQ ID NO: 113997
  derived and/or modified CDS sequence (opt2) from neuraminidase__InfluenzaA__ADM31911

SEQ ID NO: 115597 - RNA, 1410 nt, Artificial Sequence; identical to SEQ ID NO: 113997
  derived and/or modified CDS sequence (opt2) from neuraminidase__InfluenzaA__ADM31921

SEQ ID NO: 115598 - RNA, 1410 nt, Artificial Sequence; identical to SEQ ID NO: 114455
  derived and/or modified CDS sequence (opt2) from neuraminidase__InfluenzaA__ADM31931

SEQ ID NO: 115599 - RNA, 1410 nt, Artificial Sequence; identical to SEQ ID NO: 112764
  derived and/or modified CDS sequence (opt2) from neuraminidase__InfluenzaA__ADM31941

SEQ ID NO: 115600 - RNA, 1410 nt, Artificial Sequence; identical to SEQ ID NO: 114455
  derived and/or modified CDS sequence (opt2) from neuraminidase__InfluenzaA__ADM31951

SEQ ID NO: 115601 - RNA, 1410 nt, Artificial Sequence
  derived and/or modified CDS sequence (opt2) from neuraminidase__InfluenzaA__ADM31961
augaaccccaaccagaagaucaucaccaucggcuccgucugcauggccaucggcauggccaaccucauccuccagaucggcaacaucaucuccaucuggaucucccacuccauccagcucggcaaccagaaccagaucgagaccugcaaccaguccgucaucaccuacgagaacaacaccugggucaaccagaccuacgucaacaucuccaacaccaacuucgccgccggccaguccgucgucuccgucaagcucgccggcaacuccucccucugccccgucuccggcugggccaucuacuccaaggacaacuccauccgcaucggcuccaagggcgacgucuucgucauccgcgagcccuucaucuccugcuccccccucgagugccgcaccuucuuccucacccagggcgcccuccucaacgacaagcacuccaacggcaccaucaaggaccgcucccccuaccgcacccucauguccugccccaucggcgagguccccucccccuacaacucccgcuucgaguccgucgccugguccgccuccgccugccacgacggcaucaacuggcucaccaucggcaucuccggccccgacaacggcgccgucgccguccucaaguacaacggcaucaucaccgacaccaucaaguccuggcgcaacaacauccuccgcacccaggaguccgagugcgccugcgucaacggcuccugcuucaccgucaugaccgacggccccuccgacggccaggccuccuacaagaucuuccgcaucgagaagggcaagaucgucaaguccgucgagaugaacgcccccaacuaccacuacgaggagugcuccugcuaccccgacuccuccgagaucaccugcgucugccgcgacaacuggcacggcuccaaccgccccugggucuccuucaaccagaaccucgaguaccagaucggcuacaucugcuccggcaucuucggcgacaacccccgccccaacgacaagaccggcuccugcggccccgucuccuccaacggcgccaacggcgucaagggcuucuccuucaaguacggcaacggcgucuggaucggccgcaccaaguccaucuccucccgcaacggcuucgagaugaucugggaccccaacggcuggaccggcaccgacaacaacuucuccaucaagcaggacaucgucggcaucaacgagugguccggcuacuccggcuccuucguccagcaccccgagcucaccggccucgacugcauccgccccugcuucugggucgagcucauccgcggccgccccaaggagaacaccaucuggaccuccggcuccuccaucuccuucugcggcgucaacuccgacaccgucggcugguccuggcccgacggcgccgagcuccccuucaccaucgacaaguga

SEQ ID NO: 115602 - RNA, 1410 nt, Artificial Sequence
  derived and/or modified CDS sequence (opt2) from neuraminidase__InfluenzaA__ADM31971
augaaccccaaccagaagaucaucaccaucggcuccgucugcaugaccaucggcauggccaaccucauccuccagaucggcaacaucaucuccaucuggaucucccacuccauccagcucggcaaccagaaccagaucgagaccugcaaccaguccgucaucaccuacgagaacaacaccugggucaaccagaccuacgucaacaucuccaacaccaacuucgccgccggccaguccgucgucuccaugaagcucgccggcaacuccucccucugccccgucuccggcugggccaucuacuccaaggacaacuccguccgcaucggcuccaagggcgacgucuucgucauccgcgagcccuucaucuccugcuccccccucgagugccgcaccuucuuccucacccagggcgcccuccucaacgacaagcacuccaacggcaccaucaaggaccgcucccccuaccgcacccucauguccugccccaucggcgagguccccucccccuacaacucccgcuucgaguccgucgccugguccgccuccgccugccacgacggcaucaacuggcucaccaucggcaucuccggccccgacaacggcgccgucgccguccucaaguacaacggcgucaucaccgacaccaucaaguccuggcgcaacaacauccuccgcacccaggaguccgagugcgccugcgucaacggcuccugcuucaccgucaugaccgacggccccuccaacggccaggccuccuacaagaucuuccgcaucgagaagggcaagaucgucaaguccgucgagaugaacgcccccaacuaccacuacgaggagugcuccugcuaccccgacuccuccgagaucaccugcgucugccgcgacaacuggcacggcuccaaccgccccugggucuccuucaaccagaaccucgaguaccagaucggcuacaucugcuccggcaucuucggcgacaacccccgccccaacgacaagaccggcuccugcggccccgucuccuccaacggcgccaacggcgucaagggcuucuccuucaaguacggcaacggcgucuggaucggccgcaccaaguccaucuccucccgcaacggcuucgagaugaucugggaccccaacggcuggaccggcaccgacaacaacuucuccaucaagcaggacaucgucggcaucaacgagugguccggcuacuccggcuccuucguccagcaccccgagcucaccggccucgacugcauccgccccugcuucugggucgagcucauccgcggccgccccaaggagaacaccaucuggaccuccggcuccuccaucuccuucugcggcgucaacuccgacaccgucggcugguccuggcccgacggcgccgagcuccccuucaccaucgacaaguga

SEQ ID NO: 115603 - RNA, 1410 nt, Artificial Sequence; identical to SEQ ID NO: 113997
  derived and/or modified CDS sequence (opt2) from neuraminidase__InfluenzaA__ADM31981

SEQ ID NO: 115604 - RNA, 1410 nt, Artificial Sequence; identical to SEQ ID NO: 112764
  derived and/or modified CDS sequence (opt2) from neuraminidase__InfluenzaA__ADM31991

SEQ ID NO: 115605 - RNA, 1410 nt, Artificial Sequence; identical to SEQ ID NO: 112764
  derived and/or modified CDS sequence (opt2) from neuraminidase__InfluenzaA__ADM32001

SEQ ID NO: 115606 - RNA, 1410 nt, Artificial Sequence; identical to SEQ ID NO: 112764
  derived and/or modified CDS sequence (opt2) from neuraminidase__InfluenzaA__ADM32011

SEQ ID NO: 115607 - RNA, 1410 nt, Artificial Sequence; identical to SEQ ID NO: 112774
  derived and/or modified CDS sequence (opt2) from neuraminidase__InfluenzaA__ADM32021

SEQ ID NO: 115608 - RNA, 1410 nt, Artificial Sequence; identical to SEQ ID NO: 113744
  derived and/or modified CDS sequence (opt2) from neuraminidase__InfluenzaA__ADM32031

SEQ ID NO: 115609 - RNA, 1410 nt, Artificial Sequence; identical to SEQ ID NO: 114498
  derived and/or modified CDS sequence (opt2) from neuraminidase__InfluenzaA__ADM32051

SEQ ID NO: 115610 - RNA, 1410 nt, Artificial Sequence; identical to SEQ ID NO: 112774
  derived and/or modified CDS sequence (opt2) from neuraminidase__InfluenzaA__ADM32061

SEQ ID NO: 115611 - RNA, 1410 nt, Artificial Sequence; identical to SEQ ID NO: 112774
  derived and/or modified CDS sequence (opt2) from neuraminidase__InfluenzaA__ADM32071

SEQ ID NO: 115612 - RNA, 1410 nt, Artificial Sequence; identical to SEQ ID NO: 112774
  derived and/or modified CDS sequence (opt2) from neuraminidase__InfluenzaA__ADM32081

SEQ ID NO: 115613 - RNA, 1410 nt, Artificial Sequence; identical to SEQ ID NO: 113997
  derived and/or modified CDS sequence (opt2) from neuraminidase__InfluenzaA__ADM32091

SEQ ID NO: 115614 - RNA, 1410 nt, Artificial Sequence; identical to SEQ ID NO: 112774
  derived and/or modified CDS sequence (opt2) from neuraminidase__InfluenzaA__ADM32101

SEQ ID NO: 115615 - RNA, 1410 nt, Artificial Sequence; identical to SEQ ID NO: 112774
  derived and/or modified CDS sequence (opt2) from neuraminidase__InfluenzaA__ADM32111

SEQ ID NO: 115616 - RNA, 1410 nt, Artificial Sequence; identical to SEQ ID NO: 114455
  derived and/or modified CDS sequence (opt2) from neuraminidase__InfluenzaA__ADM32554

SEQ ID NO: 115617 - RNA, 1410 nt, Artificial Sequence; identical to SEQ ID NO: 112764
  derived and/or modified CDS sequence (opt2) from neuraminidase__InfluenzaA__ADM32564

SEQ ID NO: 115618 - RNA, 1410 nt, Artificial Sequence; identical to SEQ ID NO: 113997
  derived and/or modified CDS sequence (opt2) from neuraminidase__InfluenzaA__ADM32574

SEQ ID NO: 115619 - RNA, 1410 nt, Artificial Sequence; identical to SEQ ID NO: 112774
  derived and/or modified CDS sequence (opt2) from neuraminidase__InfluenzaA__ADM32584

SEQ ID NO: 115620 - RNA, 1410 nt, Artificial Sequence; identical to SEQ ID NO: 114455
  derived and/or modified CDS sequence (opt2) from neuraminidase__InfluenzaA__ADM32594

SEQ ID NO: 115621 - RNA, 1410 nt, Artificial Sequence; identical to SEQ ID NO: 112774
  derived and/or modified CDS sequence (opt2) from neuraminidase__InfluenzaA__ADM32604

SEQ ID NO: 115622 - RNA, 1410 nt, Artificial Sequence; identical to SEQ ID NO: 112774
  derived and/or modified CDS sequence (opt2) from neuraminidase__InfluenzaA__ADM32614

SEQ ID NO: 115623 - RNA, 1410 nt, Artificial Sequence; identical to SEQ ID NO: 112774
  derived and/or modified CDS sequence (opt2) from neuraminidase__InfluenzaA__ADM32624

SEQ ID NO: 115624 - RNA, 1410 nt, Artificial Sequence; identical to SEQ ID NO: 114455
  derived and/or modified CDS sequence (opt2) from neuraminidase__InfluenzaA__ADM32634

SEQ ID NO: 115625 - RNA, 1410 nt, Artificial Sequence; identical to SEQ ID NO: 112774
  derived and/or modified CDS sequence (opt2) from neuraminidase__InfluenzaA__ADM32644

SEQ ID NO: 115626 - RNA, 1410 nt, Artificial Sequence; identical to SEQ ID NO: 112774
  derived and/or modified CDS sequence (opt2) from neuraminidase__InfluenzaA__ADM32664

SEQ ID NO: 115627 - RNA, 1410 nt, Artificial Sequence; identical to SEQ ID NO: 113997
  derived and/or modified CDS sequence (opt2) from neuraminidase__InfluenzaA__ADM32674

SEQ ID NO: 115628 - RNA, 1410 nt, Artificial Sequence; identical to SEQ ID NO: 112774
  derived and/or modified CDS sequence (opt2) from neuraminidase__InfluenzaA__ADM32684

SEQ ID NO: 115629 - RNA, 1410 nt, Artificial Sequence; identical to SEQ ID NO: 112764
  derived and/or modified CDS sequence (opt2) from neuraminidase__InfluenzaA__ADM32694

SEQ ID NO: 115630 - RNA, 1410 nt, Artificial Sequence; identical to SEQ ID NO: 112774
  derived and/or modified CDS sequence (opt2) from neuraminidase__InfluenzaA__ADM32704

SEQ ID NO: 115631 - RNA, 1410 nt, Artificial Sequence; identical to SEQ ID NO: 114498
  derived and/or modified CDS sequence (opt2) from neuraminidase__InfluenzaA__ADM32714

SEQ ID NO: 115632 - RNA, 1410 nt, Artificial Sequence; identical to SEQ ID NO: 114498
  derived and/or modified CDS sequence (opt2) from neuraminidase__InfluenzaA__ADM32724

SEQ ID NO: 115633 - RNA, 1410 nt, Artificial Sequence; identical to SEQ ID NO: 112774
  derived and/or modified CDS sequence (opt2) from neuraminidase__InfluenzaA__ADM32734

SEQ ID NO: 115634 - RNA, 1410 nt, Artificial Sequence; identical to SEQ ID NO: 113997
  derived and/or modified CDS sequence (opt2) from neuraminidase__InfluenzaA__ADM32744

SEQ ID NO: 115635 - RNA, 1410 nt, Artificial Sequence; identical to SEQ ID NO: 114498
  derived and/or modified CDS sequence (opt2) from neuraminidase__InfluenzaA__ADM32754

SEQ ID NO: 115636 - RNA, 1410 nt, Artificial Sequence; identical to SEQ ID NO: 113997
  derived and/or modified CDS sequence (opt2) from neuraminidase__InfluenzaA__ADM32764

SEQ ID NO: 115637 - RNA, 1410 nt, Artificial Sequence
  derived and/or modified CDS sequence (opt2) from neuraminidase__InfluenzaA__ADM32774
augaaccccaaccagaagaucaucaucaucggcuccgucugcaugaccaucggcauggccaaccucauccuccagaucggcaacaucaucuccaucuggaucucccacuccauccagcucggcaaccagaaccagaucgagaccugcaaccaguccgucaccaccuacgagaacaacaccugggucaaccagaccuacgucaacaucuccaacaccaacuucgccgccggccaguccgucgucuccgucaagcucgccggcaacuccucccucugccccgucuccggcugggccaucuacuccaaggacaacuccauccgcaucggcuccaagggcgacgucuucgucauccgcgagcccuucaucuccugcuccccccucgagugccgcaccuucuuccucacccagggcgcccuccucaacgacaagcacuccaacggcaccaucaaggaccgcucccccuaccgcacccucauguccugccccaucggcgagguccccucccccuacaacucccgcuucgaguccgucgccugguccgccuccgccugccacgacggcaucaacuggcucaccaucggcaucuccggccccgacaacggcgccgucgccguccucaaguacaacggcaucaucaccgacaccaucaaguccuggcgcaacaacauccuccgcacccaggaguccgagugcgccugcgucaacggcuccugcuucaccgucaugaccgacggccccuccgacggccaggccuccuacaagaucuuccgcaucgagaagggcaagaucgucaaguccgucgagaugaacgcccccaacuaccacuacgaggagugcuccugcuaccccgacuccuccgagaucaccugcgucugccgcgacaacuggcacggcuccaaccgccccugggucuccuucaaccagaaccucgaguaccagaucggcuacaucugcuccggcaucuucggcgacaacccccgccccaacgacaagaccggcuccugcggccccgucuccuccaacggcgccaacggcgucaagggcuucuccuucaaguacggcaacggcgucuggaucggccgcaccaaguccaucuccucccgcaacggcuucgagaugaucugggaccccaacggcuggaccggcaccgacaacaacuucuccaucaagcaggacaucgucggcaucaacgagugguccggcuacuccggcuccuucguccagcaccccgagcucaccggccucgacugcauccgccccugcuucugggucgagcucauccgcggccgccccaaggagaacaccaucuggaccuccggcuccuccaucuccuucugcggcgucaacuccgacaccgucggcugguccuggcccgacggcgccgagcuccccuucaccaucgacaaguga

SEQ ID NO: 115638 - RNA, 1410 nt, Artificial Sequence; identical to SEQ ID NO: 113744
  derived and/or modified CDS sequence (opt2) from neuraminidase__InfluenzaA__ADM32784

SEQ ID NO: 115639 - RNA, 1410 nt, Artificial Sequence; identical to SEQ ID NO: 113997
  derived and/or modified CDS sequence (opt2) from neuraminidase__InfluenzaA__ADM32794

SEQ ID NO: 115640 - RNA, 1410 nt, Artificial Sequence
  derived and/or modified CDS sequence (opt2) from neuraminidase__InfluenzaA__ADM32804
augaaccccaaccagaagaucaucaccaucggcuccgucugcaugaccaucggcauggccaaccucauccuccagaucggcaacaucaucuccaucuggaucucccacuccauccagcucggcaaccagaaccagaucgagaccugcaaccaguccgucaucaccuacgagaacaacaccugggucaaccagaccuacgucaacaucuccaacaccaacuucgccgccggccaguccgucgucuccgucaagcucgucggcaacuccucccucugccccgucuccggcugggccaucuacuccaaggacaacuccguccgcaucggcuccaagggcgacgucuucgucauccgcgagcccuucaucuccugcuccccccucgagugccgcaccuucuuccucacccagggcgcccuccucaacgacaagcacuccaacggcaccaucaaggaccgcucccccuaccgcacccucauguccugccccaucggcgagguccccucccccuacaacucccgcuucgaguccgucgccugguccgccuccgccugccacgacggcaucaacuggcucaccaucggcaucuccggccccgacaacggcgccgucgccguccucaaguacaacggcaucaucaccgacaccaucaaguccuggcgcaacaacauccuccgcacccaggaguccgagugcgccugcgucaacggcuccugcuucaccgucaugaccgacggccccuccaacggccaggccuccuacaagaucuuccgcaucgagaagggcaagaucgucaaguccgucgagaugaacgcccccaacuaccacuacgaggagugcuccugcuaccccgacuccuccgagaucaccugcgucugccgcgacaacuggcacggcuccaaccgccccugggucuccuucaaccagaaccucgaguaccagaucggcuacaucugcuccggcaucuucggcgacaacccccgccccaacgacaagaccggcuccugcggccccgucuccuccaacggcgccaacggcgucaagggcuucuccuucaaguacggcaacggcgucuggaucggccgcaccaaguccaucuccucccgcaacggcuucgagaugaucugggaccccaacggcuggaccggcaccgacaacaacuucuccaucaagcaggacaucgucgagaucaacgagugguccggcuacuccggcuccuucguccagcaccccgagcucaccggccucgacugcauccgccccugcuucugggucgagcucauccgcggccgccccaaggagaacaccaucuggaccuccggcuccuccaucuccuucugcggcgucaacuccgacaccgucggcugguccuggcccgacggcgccgagcuccccuucaccaucgacaaguga

SEQ ID NO: 115641 - RNA, 1410 nt, Artificial Sequence
  derived and/or modified CDS sequence (opt2) from neuraminidase__InfluenzaA__ADM32814
augaaccccaaccagaagaucaucaccaucggcuccgucugcaugaccaucggcauggccaaccucauccuccagaucggcaacaucaucuccaucuggaucucccacuccauccagcucggcaaccagaaccaggucgagaccugcaaccaguccgucaucaccuacgagaacaacaccugggucaaccagaccuacgucaacaucuccaacaccaacuucgccgccggccaguccgucgucuccgucaagcucgccggcaacuccucccucugccccgucuccggcugggccaucuacuccaaggacaacuccauccgcaucggcuccaagggcgacgucuucgucauccgcgagcccuucaucuccugcuccccccucgagugccgcaccuucuuccucacccagggcgcccuccucaacgacaagcacuccaacggcaccaucaaggaccgcucccccuaccgcacccucauguccugccccaucggcgagguccccucccccuacaacucccgcuucgaguccgucgccugguccgccuccgccugccacgacggcaucaacuggcucaccaucggcaucuccggccccgacaacggcgccgucgccguccucaaguacaacggcaucaucaccgacaccaucaaguccuggcgcaacaacauccuccgcacccaggaguccgagugcgccugcgucaacggcuccugcuucaccgucaugaccgacggccccuccgacggccaggccuccuacaagaucuuccgcaucgagaagggcaagaucgucaaguccgucgagaugaacgcccccaacuaccacuacgaggagugcuccugcuaccccgacuccuccgagaucaccugcgucugccgcgacaacuggcacggcuccaaccgccccugggucuccuucaaccagaaccucgaguaccagaucggcuacaucugcuccggcaucuucggcgacaacccccgccccaacgacaagaccggcuccugcggccccgucuccuccaacggcgccaacggcgucaagggcuucuccuucaaguacggcaacggcgucuggaucggccgcaccaaguccaucuccucccgcaacggcuucgagaugaucugggaccccaacggcuggaccggcaccgacaacaacuucuccaucaagcaggacaucgucggcaucaacgagugguccggcuacuccggcuccuucguccagcaccccgagcucaccggccucgacugcauccgccccugcuucugggucgagcucauccgcggccgccccaaggagaacaccaucuggaccuccggcuccuccaucuccuucugcggcgucaacuccgacaccgucggcugguccuggcccgacggcgccgagcuccccuucaccaucgacaaguga

SEQ ID NO: 115642 - RNA, 1410 nt, Artificial Sequence; identical to SEQ ID NO: 112774
  derived and/or modified CDS sequence (opt2) from neuraminidase__InfluenzaA__ADM32824

SEQ ID NO: 115643 - RNA, 1410 nt, Artificial Sequence; identical to SEQ ID NO: 113997
  derived and/or modified CDS sequence (opt2) from neuraminidase__InfluenzaA__ADM32834

SEQ ID NO: 115644 - RNA, 1410 nt, Artificial Sequence; identical to SEQ ID NO: 112764
  derived and/or modified CDS sequence (opt2) from neuraminidase__InfluenzaA__ADM32844

SEQ ID NO: 115645 - RNA, 1410 nt, Artificial Sequence
  derived and/or modified CDS sequence (opt2) from neuraminidase__InfluenzaA__ADM32854
augaaccccaaccagaagaucaucaccaucggcuccgucugcaccaccaucggcauggccaaccucauccuccagaucggcaacaucaucuccaucuggaucucccacuccauccaguucggcaaccagaaccagaucgagaccugcaaccaguccgucaucaccuacgagaacaacaccugggucaaccagaccuacgucaacaucuccaacaccaacuucgccgccggccaguccgucgucuccgucaagcucgucggcaacuccucccucugccccgucuccggcugggccaucuacuccaaggacaacuccguccgcaucggcuccaagggcgacgucuucgucauccgcgagcccuucaucuccugcuccccccucgagugccgcaccuucuuccucacccagggcgcccuccucaacgacaagcacuccaacggcaccaucaaggaccgcucccccuaccgcacccucauguccugccccaucggcgagguccccucccccuacaacucccgcuucgaguccgucgccugguccgccuccgccugccacgacggcaucaacuggcucaccaucggcaucuccggccccgacaacggcgccgucgccguccucaaguacaacggcaucaucaccgacaccaucaaguccuggcgcaacaacauccuccgcacccaggaguccgagugcgccugcgucaacggcuccugcuucaccgucaugaccgacggccccuccaacggccaggccuccuacaagaucuuccgcaucgagaagggcaagaucgucaaguccgucgagaugaacgcccccaacuaccacuacgaggagugcuccugcuaccccgacuccuccgagaucaccugcgucugccgcgacaacuggcacggcuccaaccgccccugggucuccuucaaccagaaccucgaguaccagaucggcuacaucugcuccggcaucuucggcgacaacccccgccccaacgacaagaccggcuccugcggccccgucuccuccaacggcgccaacggcgucaagggcuucuccuucaaguacggcaacggcgucuggaucggccgcaccaaguccaucuccucccgcaacggcuucgagaugaucugggaccccaacggcuggaccggcaccgacaacaacuucuccaucaagcaggacaucgucggcaucaacgagugguccggcuacuccggcuccuucguccagcaccccgagcucaccggccucgacugcauccgccccugcuucugggucgagcucauccgcggccgccccaaggagaacaccaucuggaccuccggcuccuccaucuccuucugcggcgucaacuccgacaccgucggcugguccuggcccgacggcgccgagcuccccuucaccaucgacaaguga

SEQ ID NO: 115646 - RNA, 1410 nt, Artificial Sequence; identical to SEQ ID NO: 112764
  derived and/or modified CDS sequence (opt2) from neuraminidase__InfluenzaA__ADM32864

SEQ ID NO: 115647 - RNA, 1410 nt, Artificial Sequence; identical to SEQ ID NO: 112774
  derived and/or modified CDS sequence (opt2) from neuraminidase__InfluenzaA__ADM32874

SEQ ID NO: 115648 - RNA, 1410 nt, Artificial Sequence
  derived and/or modified CDS sequence (opt2) from neuraminidase__InfluenzaA__ADM32884
augaaccccaaccagaagaucaucaccaucggcuccgucugcaugaccaucggcauggccaaccucauccuccagaucggcaacaucaucuccaucuggaucucccacuccauccagcucggcaaccagaaccagaucgagaccugcaaccaguccgucaucaccuacgagaacaacaccugggucaaccagaccuacgucaacaucuccaacaccaacuucgccgucggccaguccgucgucuccgucaagcucgccggcaacuccucccucugccccgucuccggcugggccaucuacuccaaggacaacuccauccgcaucggcuccaagggcgacgucuucgucauccgcgagcccuucaucuccugcuccccccucgagugccgcaccuucuuccucacccagggcgcccuccucaacgacaagcacuccaacggcaccaucaaggaccgcucccccuaccgcacccucauguccugccccaucggcgagguccccucccccuacaacucccgcuucgaguccgucgccugguccgccuccgccugccacgacggcaucaacuggcucaccaucggcaucuccggccccgacaacggcgccgucgccguccucaaguacaacggcaucaucaccgacaccaucaaguccuggcgcaacaacauccuccgcacccaggaguccgagugcgccugcgucaacggcuccugcuucaccgucaugaccgacggccccuccgacggccaggccuccuacaagaucuuccgcaucgagaagggcaagaucgucaaguccgucgagaugaacgcccccaacuaccacuacgaggagugcuccugcuaccccgacuccuccgagaucaccugcgucugccgcgacaacuggcacggcuccaaccgccccugggucuccuucaaccagaaccucgaguaccagaucggcuacaucugcuccggcaucuucggcgacaacccccgccccaacgacaagaccggcuccugcggccccgucuccuccaacggcgccaacggcgucaagggcuucuccuucaaguacggcaacggcgucuggaucggccgcaccaaguccaucuccucccgcaacggcuucgagaugaucugggaccccaacggcuggaccggcaccgacaacaaguucuccaucaagcaggacaucgucggcaucaacgagugguccggcuacuccggcuccuucguccagcaccccgagcucaccggccucgacugcauccgccccugcuucugggucgagcucauccgcggccgccccaaggagaacaccaucuggaccuccggcuccuccaucuccuucugcggcgucaacuccgacaccgucggcugguccuggcccgacggcgccgagcuccccuucaccaucgacaaguga

SEQ ID NO: 115649 - RNA, 1410 nt, Artificial Sequence; identical to SEQ ID NO: 112774
  derived and/or modified CDS sequence (opt2) from neuraminidase__InfluenzaA__ADM32921

SEQ ID NO: 115650 - RNA, 1410 nt, Artificial Sequence; identical to SEQ ID NO: 112774
  derived and/or modified CDS sequence (opt2) from neuraminidase__InfluenzaA__ADM32931

SEQ ID NO: 115651 - RNA, 1410 nt, Artificial Sequence
  derived and/or modified CDS sequence (opt2) from neuraminidase__InfluenzaA__ADM32941
augaaccccaaccagaagaucaucaucaucggcuccgucugcaugaccaucggcauggccaaccucauccuccagaucggcaacaucaucuccaucuggaucucccacuccauccagcucggcaaccagaaccagaucgagaccugcaaccaguccgucaucaccuacgagaacaacaccugggucaaccagaccuacgucaacaucuccaacaccaacuucgccgccggccaguccgucgucuccgucaagcucgccggcaacuccucccucugccccgucuccggcugggccaucuacuccaaggacaacuccauccgcaucggcuccaagggcgacgucuucgucauccgcgagcccuucaucuccugcuccccccucgagugccgcaccuucuuccucacccagggcgcccuccucaacgacaagcacuccaacggcaccaucaaggaccgcucccccuaccgcacccucauguccugccccaucggcgagguccccucccccuacaacucccgcuucgaguccgucgccugguccgccuccgccugccacgacggcaucaacuggcucaccaucggcaucuccggccccgacaacggcgccgucgccguccucaaguacaacggcaucaucaccgacaccaucaaguccuggcgcaacaacauccuccgcacccaggaguccgagugcgccugcgucaacggcuccugcuucaccgucaugaccgacggccccuccgacggccaggccuccuacaagaucuuccgcaucgagaagggcaagaucgucaaguccgucgagaugaacgcccccaacuaccacuacgaggagugcuccugcuaccccgacuccuccgagaucaccugcgucugccgcgacaacuggcacggcuccaaccgccccugggucuccuucaaccagaaccucgaguaccagaucggcuacaucugcuccggcaucuucggcgacaacccccgccccaacgacaagaccggcuccugcggccccgucuccuccaacggcgccaacggcgucaagggcuucuccuucaaguacggcaacggcgucuggaucggccgcaccaaguccaucaacucccgcaacggcuucgagaugaucugggaccccaacggcuggaccggcaccgacaacaacuucuccaucaagcaggacaucgucggcaucaacgagugguccggcuacuccggcuccuucguccagcaccccgagcucaccggccucgacugcauccgccccugcuucugggucgagcucauccgcggccgccccaaggagaacaccaucuggaccuccggcuccuccaucuccuucugcggcgucaacuccgacaccgucggcugguccuggcccgacggcgccgagcuccccuucaccaucgacaaguga

SEQ ID NO: 115652 - RNA, 1410 nt, Artificial Sequence; identical to SEQ ID NO: 112774
  derived and/or modified CDS sequence (opt2) from neuraminidase__InfluenzaA__ADM32951

SEQ ID NO: 115653 - RNA, 1410 nt, Artificial Sequence; identical to SEQ ID NO: 113357
  derived and/or modified CDS sequence (opt2) from neuraminidase__InfluenzaA__ADM32960

SEQ ID NO: 115654 - RNA, 1410 nt, Artificial Sequence; identical to SEQ ID NO: 112774
  derived and/or modified CDS sequence (opt2) from neuraminidase__InfluenzaA__ADM32969

SEQ ID NO: 115655 - RNA, 1410 nt, Artificial Sequence; identical to SEQ ID NO: 112774
  derived and/or modified CDS sequence (opt2) from neuraminidase__InfluenzaA__ADM32979

SEQ ID NO: 115656 - RNA, 1410 nt, Artificial Sequence; identical to SEQ ID NO: 114676
  derived and/or modified CDS sequence (opt2) from neuraminidase__InfluenzaA__ADM32988

SEQ ID NO: 115657 - RNA, 1410 nt, Artificial Sequence; identical to SEQ ID NO: 114676
  derived and/or modified CDS sequence (opt2) from neuraminidase__InfluenzaA__ADM32997

SEQ ID NO: 115658 - RNA, 1410 nt, Artificial Sequence; identical to SEQ ID NO: 112774
  derived and/or modified CDS sequence (opt2) from neuraminidase__InfluenzaA__ADM33006

SEQ ID NO: 115659 - RNA, 1410 nt, Artificial Sequence; identical to SEQ ID NO: 114676
  derived and/or modified CDS sequence (opt2) from neuraminidase__InfluenzaA__ADM33015

SEQ ID NO: 115660 - RNA, 1410 nt, Artificial Sequence
  derived and/or modified CDS sequence (opt2) from neuraminidase__InfluenzaA__ADM33025
augaaccccaaccagaagaucaucaccaucggcuccgucugcaugaccaucggcauggccaaccucauccuccagaucggcaacaucaucuccaucuggaucucccacuccauccagcucggcaaccagaaccagaucgagaccugcaaccaguccgucaucaccuacgagaacaacaccugggucaaccagaccuacgucaacaucuccaacaccaacuucgccgccggccaguccgucgucuccgucaagcucgccggcaacuccucccucugccccgucuccggcugggccaucuacuccaaggacaacuccauccgcaucggcuccaagggcgacgucuucgucauccgcgagcccuucaucuccugcuccccccucgagugccgcaccuucuuccucacccagggcgcccuccucaacgacaagcacuccaacggcaccaucaaggaccgcucccccuaccgcacccucauguccugccccaucggcgagguccccucccccuacaacucccgcuucgaguccgucgccugguccgccuccgccugccacgacggcaucaacuggcucaccaucggcaucuccggccccgacaacggcgccgucgccguccucaaguacaacggcaucaucaccgacaccaucaaguccuggcgcuccaacauccuccgcacccaggaguccgagugcgccugcgucaacggcuccugcuucaccgucaugaccgacggccccuccgacggccaggccuccuacaagaucuuccgcaucgagaagggcaagaucgucaaguccgucgagaugaacgcccccaacuaccacuacgaggagugcuccugcuaccccgacuccuccgagaucaccugcgucugccgcgacaacuggcacggcuccaaccgccccugggucuccuucaaccagaaccucgaguaccagaucggcuacaucugcuccggcaucuucggcgacaacccccgccccaacgacaagaccggcuccugcggccccgucuccuccaacggcgccaacggcgucaagggcuucuccuucaaguacggcaacggcgucuggaucggccgcaccaaguccaucuccucccgcaacggcuucgagaugaucugggaccccaacggcuggaccggcaccgacaacaacuucuccaucaagcaggacaucgucggcaucaacgagugguccggcuacuccggcuccuucguccagcaccccgagcucaccggccucgacugcauccgccccugcuucugggucgagcucauccgcggccgccccaaggagaacaccaucuggaccuccggcuccuccaucuccuucugcggcgucaacuccgacaccgucggcugguccuggcccgacggcgccgagcuccccuucaccaucgacaaguga

SEQ ID NO: 115661 - RNA, 1410 nt, Artificial Sequence; identical to SEQ ID NO: 112774
  derived and/or modified CDS sequence (opt2) from neuraminidase__InfluenzaA__ADM33042

SEQ ID NO: 115662 - RNA, 1410 nt, Artificial Sequence; identical to SEQ ID NO: 112774
  derived and/or modified CDS sequence (opt2) from neuraminidase__InfluenzaA__ADM33062

SEQ ID NO: 115663 - RNA, 1410 nt, Artificial Sequence
  derived and/or modified CDS sequence (opt2) from neuraminidase__InfluenzaA__ADM33071
augaaccccaaccagaagaucaucaccaucggcuccgucugcaugaccaucggcauggccaaccucauccuccagaucggcaacaucaucuccaucuggaucucccacuccauccagcucggcaaccagaaccagaucgagaccugcaaccaguccgucaucaccuacgagaacaacaccugggucaaccagaccuacgucaacaucuccaacaccaacuucgccgccggccaguccgucgucuccgucaagcucgccggcaacuccucccucugccccgucuccggcugggccaucuacuccaaggacaacuccauccgcaucggcuccaagggcgacgucuucgucauccgcgagcccuucaucuccugcuccccccucgagugccgcaccuucuuccucacccagggcgcccuccucaacgacaagcacuccaacggcaccaucaaggaccgcucccccuaccgcacccucauguccugccccaucggcgagguccccucccccuacaacucccgcuucgaguccgucgccugguccgccuccgccugccacgacggcaucaacuggcucaccaucggcaucuccggccccgacaacggcgccgucgccguccucaaguacaacggcaucaucaccgacaccaucaaguccuggcgcaacaacauccuccgcacccaggaguccgagugcgccugcgucaacggcuccugcuucaccgucaugaccgacggccccuccgacggccaggccuccuacaagaucuuccgcaucgagaagggcaagaucgucaaguccgucgagaugaacgcccccaacuaccacuacgaggagugcuccugcuaccccgacuccuccaagaucaccugcgucugccgcgacaacuggcacggcuccaaccgccccugggucuccuucaaccagaaccucgaguaccagaucggcuacaucugcuccggcaucuucggcgacaacccccgccccaacgacaagaccggcuccugcggccccgucuccuccaacggcgccaacggcgucaagggcuucuccuucaaguacggcaacggcgucuggaucggccgcaccaaguccaucuccucccgcaacggcuucgagaugaucugggaccccaacggcuggaccggcaccgacaacaacuucuccaucaagcaggacaucgucggcaucaacgagugguccggcuacuccggcuccuucguccagcaccccgagcucaccggccucgacugcauccgccccugcuucugggucgagcucauccgcggccgccccaaggagaacaccaucuggaccuccggcuccuccaucuccuucugcggcgucaacggcgacaccgucggcugguccuggcccgacggcgccgagcuccccuucaccaucgacaaguga

SEQ ID NO: 115664 - RNA, 1410 nt, Artificial Sequence; identical to SEQ ID NO: 112774
  derived and/or modified CDS sequence (opt2) from neuraminidase__InfluenzaA__ADM33081

SEQ ID NO: 115665 - RNA, 1410 nt, Artificial Sequence; identical to SEQ ID NO: 113847
  derived and/or modified CDS sequence (opt2) from neuraminidase__InfluenzaA__ADM33091

SEQ ID NO: 115666 - RNA, 1410 nt, Artificial Sequence; identical to SEQ ID NO: 113847
  derived and/or modified CDS sequence (opt2) from neuraminidase__InfluenzaA__ADM33101

SEQ ID NO: 115667 - RNA, 1410 nt, Artificial Sequence; identical to SEQ ID NO: 113847
  derived and/or modified CDS sequence (opt2) from neuraminidase__InfluenzaA__ADM33111

SEQ ID NO: 115668 - RNA, 1410 nt, Artificial Sequence; identical to SEQ ID NO: 112774
  derived and/or modified CDS sequence (opt2) from neuraminidase__InfluenzaA__ADM33121

SEQ ID NO: 115669 - RNA, 1410 nt, Artificial Sequence; identical to SEQ ID NO: 112774
  derived and/or modified CDS sequence (opt2) from neuraminidase__InfluenzaA__ADM33130

SEQ ID NO: 115670 - RNA, 1410 nt, Artificial Sequence; identical to SEQ ID NO: 112774
  derived and/or modified CDS sequence (opt2) from neuraminidase__InfluenzaA__ADM33139

SEQ ID NO: 115671 - RNA, 1410 nt, Artificial Sequence; identical to SEQ ID NO: 112774
  derived and/or modified CDS sequence (opt2) from neuraminidase__InfluenzaA__ADM33149

SEQ ID NO: 115672 - RNA, 1410 nt, Artificial Sequence; identical to SEQ ID NO: 112774
  derived and/or modified CDS sequence (opt2) from neuraminidase__InfluenzaA__ADM33159

SEQ ID NO: 115673 - RNA, 1410 nt, Artificial Sequence; identical to SEQ ID NO: 112774
  derived and/or modified CDS sequence (opt2) from neuraminidase__InfluenzaA__ADM33169

SEQ ID NO: 115674 - RNA, 1410 nt, Artificial Sequence; identical to SEQ ID NO: 112774
  derived and/or modified CDS sequence (opt2) from neuraminidase__InfluenzaA__ADM33179

SEQ ID NO: 115675 - RNA, 1410 nt, Artificial Sequence; identical to SEQ ID NO: 112774
  derived and/or modified CDS sequence (opt2) from neuraminidase__InfluenzaA__ADM33188

SEQ ID NO: 115676 - RNA, 1410 nt, Artificial Sequence; identical to SEQ ID NO: 112774
  derived and/or modified CDS sequence (opt2) from neuraminidase__InfluenzaA__ADM33197

SEQ ID NO: 115677 - RNA, 1410 nt, Artificial Sequence; identical to SEQ ID NO: 112774
  derived and/or modified CDS sequence (opt2) from neuraminidase__InfluenzaA__ADM33206

SEQ ID NO: 115678 - RNA, 1410 nt, Artificial Sequence; identical to SEQ ID NO: 112774
  derived and/or modified CDS sequence (opt2) from neuraminidase__InfluenzaA__ADM33215

SEQ ID NO: 115679 - RNA, 1410 nt, Artificial Sequence; identical to SEQ ID NO: 112774
  derived and/or modified CDS sequence (opt2) from neuraminidase__InfluenzaA__ADM33224

SEQ ID NO: 115680 - RNA, 1410 nt, Artificial Sequence; identical to SEQ ID NO: 112774
  derived and/or modified CDS sequence (opt2) from neuraminidase__InfluenzaA__ADM33234

SEQ ID NO: 115681 - RNA, 1410 nt, Artificial Sequence; identical to SEQ ID NO: 113198
  derived and/or modified CDS sequence (opt2) from neuraminidase__InfluenzaA__ADM33243

SEQ ID NO: 115682 - RNA, 1410 nt, Artificial Sequence; identical to SEQ ID NO: 112774
  derived and/or modified CDS sequence (opt2) from neuraminidase__InfluenzaA__ADM33253

SEQ ID NO: 115683 - RNA, 1410 nt, Artificial Sequence; identical to SEQ ID NO: 113198
  derived and/or modified CDS sequence (opt2) from neuraminidase__InfluenzaA__ADM33262

SEQ ID NO: 115684 - RNA, 1410 nt, Artificial Sequence; identical to SEQ ID NO: 112804
  derived and/or modified CDS sequence (opt2) from neuraminidase__InfluenzaA__ADM33272

SEQ ID NO: 115685 - RNA, 1410 nt, Artificial Sequence; identical to SEQ ID NO: 112804
  derived and/or modified CDS sequence (opt2) from neuraminidase__InfluenzaA__ADM33282

SEQ ID NO: 115686 - RNA, 1410 nt, Artificial Sequence; identical to SEQ ID NO: 112774
  derived and/or modified CDS sequence (opt2) from neuraminidase__InfluenzaA__ADM33292

SEQ ID NO: 115687 - RNA, 1410 nt, Artificial Sequence; identical to SEQ ID NO: 112774
  derived and/or modified CDS sequence (opt2) from neuraminidase__InfluenzaA__ADM33302

SEQ ID NO: 115688 - RNA, 1410 nt, Artificial Sequence; identical to SEQ ID NO: 112764
  derived and/or modified CDS sequence (opt2) from neuraminidase__InfluenzaA__ADM33312

SEQ ID NO: 115689 - RNA, 1410 nt, Artificial Sequence; identical to SEQ ID NO: 112804
  derived and/or modified CDS sequence (opt2) from neuraminidase__InfluenzaA__ADM33322

SEQ ID NO: 115690 - RNA, 1410 nt, Artificial Sequence; identical to SEQ ID NO: 112804
  derived and/or modified CDS sequence (opt2) from neuraminidase__InfluenzaA__ADM33332

SEQ ID NO: 115691 - RNA, 1410 nt, Artificial Sequence; identical to SEQ ID NO: 112804
  derived and/or modified CDS sequence (opt2) from neuraminidase__InfluenzaA__ADM33342

SEQ ID NO: 115692 - RNA, 1410 nt, Artificial Sequence
  derived and/or modified CDS sequence (opt2) from neuraminidase__InfluenzaA__ADM33367
augaaccccaaccagaagaucaucaccaucggcuccgucugcaugaccaucggcauggccaaccucauccuccagaucggcaacaucaucuccaucuggaucucccacuccauccagcucggcaaccagaaccagaucgagaccugcaaccaguccgucgucaccuacgagaacaacaccugggucaaccagaccuacgucaacaucuccaacaccaacuucgccgccggccaguccgucgucuccgucaagcucgccggcaacuccucccucugccccgucggcggcugggccaucuacuccaaggacaacuccguccgcaucggcuccaagggcgacgucuucgucauccgcgagcccuucaucuccugcuccccccucgagugccgcaccuucuuccucacccagggcgcccuccucaacgacaagcacuccaacggcaccaucaaggaccgcucccccuaccgcacccucauguccugccccaucggcgagguccccucccccuacaacucccgcuucgaguccgucgccugguccgccuccgccugccacgacggcaucaacuggcucaccaucggcaucuccggccccgacaacggcgccgucgccguccucaaguacaacggcaucaucaccgacaccaucaaguccuggcgcaacaacauccuccgcacccaggaguccgagugcgccugcgucaacggcuccugcuucaccgucaugaccgacggccccuccaacggccaggccuccuacaagaucuuccgcaucgagaagggcaagaucgucaaguccgucgagaugaacgcccccaacuaccacuacgaggagugcuccugcuaccccgacuccuccgagaucaccugcgucugccgcgacaacuggcacggcuccaaccgccccugggucuccuucaaccagaaccucgaguaccagaucggcuacaucugcuccggcaucuucggcgacaacccccgccccaacgacaagaccggcuccugcggccccgucuccuccaacggcgccaacggcgucaagggcuucuccuucaaguacggcaacggcgucuggaucggccgcaccaaguccaucuccucccgcaacggcuucgagaugaucugggaccccaacggcuggaccggcaccgacaacaacuucuccaucaagcaggacaucgucggcaucaacgagugguccggcuacuccggcuccuucguccagcaccccgagcucaccggccucgacugcauccgccccugcuucugggucgagcucauccgcggccgccccaaggagaacaccaucuggaccuccggcuccuccaucuccuucugcggcgucaacuccgacaccgucggcugguccuggcccgacggcgccgagcuccccuucaccaucgacaaguga

SEQ ID NO: 115693 - RNA, 1410 nt, Artificial Sequence; identical to SEQ ID NO: 112804
  derived and/or modified CDS sequence (opt2) from neuraminidase__InfluenzaA__ADM33377

SEQ ID NO: 115694 - RNA, 1410 nt, Artificial Sequence; identical to SEQ ID NO: 112804
  derived and/or modified CDS sequence (opt2) from neuraminidase__InfluenzaA__ADM33387

SEQ ID NO: 115695 - RNA, 1410 nt, Artificial Sequence; identical to SEQ ID NO: 112774
  derived and/or modified CDS sequence (opt2) from neuraminidase__InfluenzaA__ADM33397

SEQ ID NO: 115696 - RNA, 1410 nt, Artificial Sequence; identical to SEQ ID NO: 112774
  derived and/or modified CDS sequence (opt2) from neuraminidase__InfluenzaA__ADM33407

SEQ ID NO: 115697 - RNA, 1410 nt, Artificial Sequence; identical to SEQ ID NO: 112804
  derived and/or modified CDS sequence (opt2) from neuraminidase__InfluenzaA__ADM33417

SEQ ID NO: 115698 - RNA, 1410 nt, Artificial Sequence; identical to SEQ ID NO: 112774
  derived and/or modified CDS sequence (opt2) from neuraminidase__InfluenzaA__ADM33427

SEQ ID NO: 115699 - RNA, 1410 nt, Artificial Sequence
  derived and/or modified CDS sequence (opt2) from neuraminidase__InfluenzaA__ADM33437
augaaccccaaccagaagaucaucaccaucggcuccgucugcaugaccaucggcauggccaaccucauccuccagaucggcaacaucaucuccaucuggaucucccacuccauccagcucggcaaccagaaccagaucgagaccugcaaccaguccgucaucaccuacgagaacaacaccugggucaaccagaccuacgucaacaucuccaacaccaacuucgccgccggccaguccgucgucuccgucaagcucgccggcaacuccucccucugccccgucuccggcugggccaucuacuccaaggacaacuccauccgcaucggcuccaagggcgacgucuucgucauccgcgagcccuucaucuccugcuccccccucgagugccgcaccuucuuccucacccagggcgcccuccucaacgacaagcacuccaacggcaccaucaaggaccgcucccccuaccgcacccucauguccugccccaucggcgagguccccuccgccuacaacucccgcuucgaguccgucgccugguccgccuccgccugccacgacggcaucaacuggcucaccaucggcaucuccggccccgacaacggcgccgucgccguccucaaguacaacggcaucaucaccgacaccaucaaguccuggcgcaacaacauccuccgcacccaggaguccgagugcgccugcgucaacggcuccugcuucaccgucaugaccgacggccccuccgacggccaggccuccuacaagaucuuccgcaucgagaagggcaagaucgucaaguccgucgagaugaacgcccccaacuaccacuacgaggagugcuccugcuaccccgacuccuccgagaucaccugcgucugccgcgacaacuggcacggcuccaaccgccccugggucuccuucaaccagaaccucgaguaccagaucggcuacaucugcuccggcaucuucggcgacaacccccgccccaacgacaagaccggcuccugcggccccgucuccuccaacggcgccaacggcgucaagggcuucuccuucaaguacggcaacggcgucuggaucggccgcaccaaguccaucuccucccgcaacggcuucgagaugaucugggaccccaacggcuggaccggcaccgacaacaacuucuccaucaagcaggacaucgucggcaucaacgagugguccggcuacuccggcuccuucguccagcaccccgagcucaccggccucgacugcauccgccccugcuucugggucgagcucauccgcggccgccccaaggagaacaccaucuggaccuccggcuccuccaucuccuucugcggcgucaacuccgacaccgucggcugguccuggcccgacggcgccgagcuccccuucaccaucgacaaguga

SEQ ID NO: 115700 - RNA, 1410 nt, Artificial Sequence; identical to SEQ ID NO: 113128
  derived and/or modified CDS sequence (opt2) from neuraminidase__InfluenzaA__ADM33443

SEQ ID NO: 115701 - RNA, 1410 nt, Artificial Sequence; identical to SEQ ID NO: 112774
  derived and/or modified CDS sequence (opt2) from neuraminidase__InfluenzaA__ADM52446

SEQ ID NO: 115702 - RNA, 1410 nt, Artificial Sequence; identical to SEQ ID NO: 112774
  derived and/or modified CDS sequence (opt2) from neuraminidase__InfluenzaA__ADM52456

SEQ ID NO: 115703 - RNA, 1410 nt, Artificial Sequence; identical to SEQ ID NO: 114979
  derived and/or modified CDS sequence (opt2) from neuraminidase__InfluenzaA__ADM52466

SEQ ID NO: 115704 - RNA, 1410 nt, Artificial Sequence; identical to SEQ ID NO: 112774
  derived and/or modified CDS sequence (opt2) from neuraminidase__InfluenzaA__ADM52486

SEQ ID NO: 115705 - RNA, 1410 nt, Artificial Sequence; identical to SEQ ID NO: 112764
  derived and/or modified CDS sequence (opt2) from neuraminidase__InfluenzaA__ADM52496

SEQ ID NO: 115706 - RNA, 1410 nt, Artificial Sequence; identical to SEQ ID NO: 112774
  derived and/or modified CDS sequence (opt2) from neuraminidase__InfluenzaA__ADM52506

SEQ ID NO: 115707 - RNA, 1410 nt, Artificial Sequence; identical to SEQ ID NO: 112764
  derived and/or modified CDS sequence (opt2) from neuraminidase__InfluenzaA__ADM52516

SEQ ID NO: 115708 - RNA, 1410 nt, Artificial Sequence; identical to SEQ ID NO: 112764
  derived and/or modified CDS sequence (opt2) from neuraminidase__InfluenzaA__ADM52527

SEQ ID NO: 115709 - RNA, 1410 nt, Artificial Sequence; identical to SEQ ID NO: 113997
  derived and/or modified CDS sequence (opt2) from neuraminidase__InfluenzaA__ADM52537

SEQ ID NO: 115710 - RNA, 1410 nt, Artificial Sequence; identical to SEQ ID NO: 114498
  derived and/or modified CDS sequence (opt2) from neuraminidase__InfluenzaA__ADM52547

SEQ ID NO: 115711 - RNA, 1410 nt, Artificial Sequence; identical to SEQ ID NO: 112764
  derived and/or modified CDS sequence (opt2) from neuraminidase__InfluenzaA__ADM52557

SEQ ID NO: 115712 - RNA, 1410 nt, Artificial Sequence; identical to SEQ ID NO: 112764
  derived and/or modified CDS sequence (opt2) from neuraminidase__InfluenzaA__ADM52567

SEQ ID NO: 115713 - RNA, 1410 nt, Artificial Sequence; identical to SEQ ID NO: 112764
  derived and/or modified CDS sequence (opt2) from neuraminidase__InfluenzaA__ADM52577

SEQ ID NO: 115714 - RNA, 1410 nt, Artificial Sequence; identical to SEQ ID NO: 112774
  derived and/or modified CDS sequence (opt2) from neuraminidase__InfluenzaA__ADM52587

SEQ ID NO: 115715 - RNA, 1410 nt, Artificial Sequence; identical to SEQ ID NO: 112774
  derived and/or modified CDS sequence (opt2) from neuraminidase__InfluenzaA__ADM52597

SEQ ID NO: 115716 - RNA, 1410 nt, Artificial Sequence; identical to SEQ ID NO: 112764
  derived and/or modified CDS sequence (opt2) from neuraminidase__InfluenzaA__ADM52607

SEQ ID NO: 115717 - RNA, 1410 nt, Artificial Sequence; identical to SEQ ID NO: 112764
  derived and/or modified CDS sequence (opt2) from neuraminidase__InfluenzaA__ADM52617

SEQ ID NO: 115718 - RNA, 1410 nt, Artificial Sequence; identical to SEQ ID NO: 114455
  derived and/or modified CDS sequence (opt2) from neuraminidase__InfluenzaA__ADM52627

SEQ ID NO: 115719 - RNA, 1410 nt, Artificial Sequence; identical to SEQ ID NO: 113997
  derived and/or modified CDS sequence (opt2) from neuraminidase__InfluenzaA__ADM52637

SEQ ID NO: 115720 - RNA, 1410 nt, Artificial Sequence; identical to SEQ ID NO: 113997
  derived and/or modified CDS sequence (opt2) from neuraminidase__InfluenzaA__ADM52647

SEQ ID NO: 115721 - RNA, 1410 nt, Artificial Sequence; identical to SEQ ID NO: 112764
  derived and/or modified CDS sequence (opt2) from neuraminidase__InfluenzaA__ADM52657

SEQ ID NO: 115722 - RNA, 1410 nt, Artificial Sequence; identical to SEQ ID NO: 113997
  derived and/or modified CDS sequence (opt2) from neuraminidase__InfluenzaA__ADM52667

SEQ ID NO: 115723 - RNA, 1410 nt, Artificial Sequence; identical to SEQ ID NO: 112764
  derived and/or modified CDS sequence (opt2) from neuraminidase__InfluenzaA__ADM52687

SEQ ID NO: 115724 - RNA, 1410 nt, Artificial Sequence; identical to SEQ ID NO: 112764
  derived and/or modified CDS sequence (opt2) from neuraminidase__InfluenzaA__ADM52697

SEQ ID NO: 115725 - RNA, 1410 nt, Artificial Sequence; identical to SEQ ID NO: 114455
  derived and/or modified CDS sequence (opt2) from neuraminidase__InfluenzaA__ADM52707

SEQ ID NO: 115726 - RNA, 1410 nt, Artificial Sequence
  derived and/or modified CDS sequence (opt2) from neuraminidase__InfluenzaA__ADM52717
augaaccccaaccagaagaucaucaccaucggcuccgucugcaugaccaucggcauggccaaccucauccuccagaucggcaacaucaucuccaucuggaucucccacuccauccagcucggcaaccagaaccagaucgagaccugcaaccaguccgucaucaccuacgagaacaacaccugggucaaccagaccuacgucaacaucuccaacaccaacuucgccgccggccaguccgccgucuccgucaagcucgucggcaacuccucccucugccccgucuccggcugggccaucuacuccaaggacaacuccguccgcaucggcuccaagggcgacgucuucgucauccgcgagcccuucaucuccugcuccccccucgagugccgcaccuucuuccucacccagggcgcccuccucaacgacaagcacuccaacggcaccaucaaggaccgcucccccuaccgcacccucauguccugccccaucggcgagguccccucccccuacaacucccgcuucgaguccgucgccugguccgccuccgccugccacgacggcaucaacuggcucaccaucggcaucuccggccccgacaacggcgccgucgccguccucaaguacaacggcaucaucaccgacaccaucaaguccuggcgcaacaacauccuccgcacccaggaguccgagugcgccugcgucaacggcuccugcuucaccgucaugaccgacggccccuccaacggccaggccuccuacaagaucuuccgcaucgagaagggcaagaucgucaaguccgucgagaugaacgcccccaacuaccacuacgaggagugcuccugcuaccccgacuccuccgagaucaccugcgucugccgcgacaacuggcacggcuccaaccgccccugggucuccuucaaccagaaccucgaguaccagaucggcuacaucugcuccggcaucuucggcgacaacccccgccccaacgacaagaccggcuccugcggccccgucuccuccaacggcgccaacggcgucaagggcuucuccuucaaguacggcaacggcgucuggaucggccgcaccaaguccaucuccucccgcaacggcuucgagaugaucugggaccccaacggcuggaccggcaccgacaacaacuucuccaucaagcaggacaucgucggcaucaacgagugguccggcuacuccggcuccuucguccagcaccccgagcucaccggccucgacugcauccgccccugcuucugggucgagcucauccgcggccgccccaaggagaacaccaucuggaccuccggcuccuccaucuccuucugcggcgucaacuccgacaccgucggcugguccuggcccgacggcgccgagcuccccuucaccaucgacaaguga

SEQ ID NO: 115727 - RNA, 1410 nt, Artificial Sequence
  derived and/or modified CDS sequence (opt2) from neuraminidase__InfluenzaA__ADM86402
augaaccccaaccagaagaucaucaccaucggcuccgucugcaugaccaucggcauggccaaccucauccuccagaucggcaacaucaucuccaucuggaucucccacuccauccagcucggcaaccagaaccagaucgagaccugcaaccaguccgucaucaccuacgagaacaacaccugggucaaccagaccuacgucaacaucuccaacaccaacuucgccgccggccaguccgucgccuccgucaagcucgccggcaacuccucccucugccccgucuccggcugggccaucuacuccaaggacaacuccguccgcaucggcuccaagggcgacgucuucgucauccgcgagcccuucaucuccugcuccccccucgagugccgcaccuucuuccucacccagggcgcccuccucaacgacaagcacuccaacggcaccgucaaggaccgcucccccuaccgcacccucauguccugccccaucggcgagguccccucccccuacaacucccgcuucgaguccgucgccugguccgccuccgccugccacgacggcaucaacuggcucaccaucggcaucuccggccccgacaacggcgccgucgccguccucaaguacaacggcaucaucaccgacaccaucaaguccuggcgcaacaacauccuccgcacccaggaguccgagugcgccugcgucaacggcuccugcuucaccgucaugaccgacggccccuccgacggccaggccuccuacaagaucuuccgcaucgagaagggcaagaucgucaaguccgucgagaugaacgcccccaacuaccacuacgaggagugcuccugcuaccccgacuccuccgagaucaccugcgucugccgcgacaacuggcacggcuccaaccgccccugggucuccuucaaccagaaccucgaguaccagaucggcuacaucugcuccggcaucuucggcgacaacccccgccccaacgacaagaccggcuccugcggccccgucuccuccaacggcgccaacggcgucaagggcuucuccuucaaguacggcaacggcgucuggaucggccgcaccaaguccaucuccucccgcaacggcuucgagaugaucugggaccccaacggcuggaccggcaccgacaacaacuucuccaucaagcaggacaucgucggcaucaacgagugguccggcuacuccggcuccuucguccagcaccccgagcucaccggccucgacugcauccgccccugcuucugggucgagcucauccgcggccgccccaaggagaacaccaucuggaccuccggcuccuccaucuccuucugcggcgucaacuccgacaccgucggcugguccuggcccgacggcgccgagcuccccuucaccaucgacaaguga

SEQ ID NO: 115728 - RNA, 1410 nt, Artificial Sequence; identical to SEQ ID NO: 112774
  derived and/or modified CDS sequence (opt2) from neuraminidase__InfluenzaA__ADM86412

SEQ ID NO: 115729 - RNA, 1410 nt, Artificial Sequence
  derived and/or modified CDS sequence (opt2) from neuraminidase__InfluenzaA__ADM86422
augaaccccaaccagaagaucaucaccaucggcuccgucugcaugaccaucggcauggccaaccucauccuccagaucggcaacaucaucuccaucuggaucucccacuccauccagcucggcaaccagaaccagaucgagaccugcaaccaguccgucaucaccuacgagaacaacaccugggucaaccagaccuacgucaacaucuccaacaccaacuucgucgccggccaguccgucgucuccgucaagcucgccggcaacuccucccucugccccgucuccggcugggccaucuacuccaaggacaacuccauccgcaucggcuccaagggcgacgucuucgucauccgcgagcccuucaucuccugcuccccccucgagugccgcaccuucuuccucacccagggcgcccuccucaacgacaagcacuccaacggcaccaucaaggaccgcucccccuaccgcacccucauguccugccccaucggcgagguccccucccccuacaacucccgcuucgaguccgucgccugguccgccuccgccugccacgacggcaucaacuggcucaccaucggcaucuccggccccgacaacggcgccgucgccguccucaaguacaacggcaucaucaccgacaccaucaaguccuggcgcaacaacauccuccgcacccaggaguccgagugcgccugcgucaacggcuccugcuucaccgucaugaccgacggccccuccgacggccaggccuccuacaagaucuuccgcaucgagaagggcaaggucgucaaguccgucgagaugaacgcccccaacuaccacuacgaggagugcuccugcuaccccgacuccuccgagaucaccugcgucugccgcgacaacuggcacggcuccaaccgccccugggucuccuucaaccagaaccucgaguaccagaucggcuacaucugcuccggcaucuucggcgacaacccccgccccaacgacaagaccggcuccugcggccccgucuccuccaacggcgccaacggcgucaagggcuucuccuucaaguacggcaacggcgucuggaucggccgcaccaaguccaucuccucccgcaacggcuucgagaugaucugggaccccaacggcuggaccggcaccgacaacaacuucuccaucaagcaggacaucgucggcaucaacgagugguccggcuacuccggcuccuucguccagcaccccgagcucaccggccucgacugcauccgccccugcuucugggucgagcucauccgcggccgccccaaggagaacaccaucuggaccuccggcuccuccaucuccuucugcggcgucaacuccgacaccgucggcugguccuggcccgacggcgccgagcuccccuucaccaucgacaaguga

SEQ ID NO: 115730 - RNA, 1410 nt, Artificial Sequence; identical to SEQ ID NO: 113628
  derived and/or modified CDS sequence (opt2) from neuraminidase__InfluenzaA__ADM86432

SEQ ID NO: 115731 - RNA, 1410 nt, Artificial Sequence
  derived and/or modified CDS sequence (opt2) from neuraminidase__InfluenzaA__ADM86443
augaaccccaaccagaagaucaucaccaucggcuccgucugcaugaccaucggcauggccaaccucauccuccagaucggcaacaucaucuccaucuggaucucccacuccauccagcucggcaaccagaaccagaucgagaccugcaaccaguccgucaucaccuacgagaacaacaccugggucaaccagaccuacgucaacaucuccaacaccaacuucgccgccggccaguccgucgucuccgucaagcucgccggcaacuccucccucugccccgucuccggcugggccaucuacuccaaggacaacuccauccgcaucggcuccaagggcgacgucuucgucauccgcgagcccuucaucuccugcuccccccucgagugccgcaccuucuuccucacccagggcgcccuccucaacgacaagcacuccaacggcaccaucaaggaccgcucccccuaccgcacccucauguccugccccaucggcgagguccccucccccuacaacucccgcuucgaguccgucgccugguccgccuccgccugccacgacggcaucaacuggcucaccaucggcaucuccggccccgacaacggcgccgucgccguccucaaguacaacggcaucaucaccgacaccaucaaguccuggcgcaacaacauccuccgcacccaggaguccgagugcgucugcgucaacggcuccugcuucaccgucaugaccgacggccccuccgacggccaggccuccuacaagaucuuccgcaucgagaagggcaagaucgucaaguccgucgagaugaacgcccccaacuaccacuacgaggagugcuccugcuaccccgacuccuccgagaucaccugcgucugccgcgacaacuggcacggcuccaaccgccccugggucuccuucaaccagaaccucgaguaccagaucggcuacaucugcuccggcaucuucggcgacaacccccgccccaacgacaagaccggcuccugcggccccgucuccuccaacggcgccaacggcgucaagggcuucuccuucaaguacggcaacggcgucuggaucggccgcaccaaguccaucuccucccgcaacggcuucgagaugaucugggaccccaacggcuggaccggcaccgacaacaacuucuccaucaagcaggacaucgucggcaugaacgagugguccggcuacuccggcuccuucguccagcaccccgagcucaccggccucgacugcauccgccccugcuucugggucgagcucauccgcggccgccccaaggagaacaccaucuggaccuccggcuccuccaucuccuucugcggcgucaacuccgacaccgucggcugguccuggcccgacggcgccgagcuccccuucaccaucgacaaguga

SEQ ID NO: 115732 - RNA, 1410 nt, Artificial Sequence; identical to SEQ ID NO: 113357
  derived and/or modified CDS sequence (opt2) from neuraminidase__InfluenzaA__ADM86453

SEQ ID NO: 115733 - RNA, 1350 nt, Artificial Sequence
  derived and/or modified CDS sequence (opt2) from neuraminidase__InfluenzaA__ADM95377
augaaccccaaccagaagaucaucaccaucggcuccaucugcauggucaccggcaucgucucccucaugcuccaggucggcuccaugaucuccaucugggucucccacuccauccacaccggcaaccagcaccaggccgagcccaucuccaacaccaacuuccucaccgagaaggccgucgccuccgucaagcucgccggcaacuccucccucugccccaucaacggcugggccgucuacuccaaggacaacuccauccgcaucggcuccaagggcgacgucuucgucauccgcgagcccuucaucuccugcucccaccucgagugccgcaccuucuuccucacccagggcgcccuccucaacgacaagcacuccaacggcaccgucaaggaccgcuccccccaccgcacccucauguccugccccaugggcgaggcccccucccccuacaacucccgcuucgaguccgucgccugguccgccuccgccugccacgacggcaccuccuggcucaccaucggcaucuccggccccgacaacggcgccgucgccguccucaaguacaacggcaucaucaccgacaccaucaaguccuggcgcaacaacauccuccgcacccaggaguccgagugcgccugcgucaacggcuccugcuucaccgucaugaccgacggccccuccaacggccaggccucccacaagaucuucaagauggagaagggcaaggucaucaaguccgucgagcucgacgcccccaacuaccacuacgaggagugcuccugcuaccccgacgccggcgagaucaccugcgucugccgcgacaacuggcacggcuccaaccgccccugggucuccuucaaccagaaccucgaguaccagaucggcuacaucugcuccggcgucuucggcgacaacccccgccccaacgacggcaccggcuccugcggccccgucuccuccaacggcgccuacggcgucaagggcuucuccuucaaguacggcaacggcgucuggaucggccgcaccaaguccaccaacucccgcuccggcuucgagaugaucugggaccccaacggcuggaccgagaccgacucccgcuucuccgucaagcaggacaucgucgccaucaccgacugguccggcuacuccggcuccuucguccagcaccccgagcucaccggccucgacugcauccgccccugcuucugggucgagcucauccgcggccgccccaaggaguccaccaucuggaccuccggcuccuccaucuccuucugcggcgucaacuccgacaccgucggcugguccuggcccgacggcgccgagcuccccuucaccaucgacaaguga

SEQ ID NO: 115734 - RNA, 1410 nt, Artificial Sequence; identical to SEQ ID NO: 112774
  derived and/or modified CDS sequence (opt2) from neuraminidase__InfluenzaA__ADM95650

SEQ ID NO: 115735 - RNA, 1410 nt, Artificial Sequence; identical to SEQ ID NO: 112774
  derived and/or modified CDS sequence (opt2) from neuraminidase__InfluenzaA__ADM95651

SEQ ID NO: 115736 - RNA, 1410 nt, Artificial Sequence
  derived and/or modified CDS sequence (opt2) from neuraminidase__InfluenzaA__ADM95652
augaaccccaaccagaagaucaucaccaucggcuccgucugcaugaccaucggcauggccaaccucauccuccagaucggcaacaucaucuccaucuggaucucccacuccauccagcucggcaaccagaaccagaucgagaccugcaaccaguccgucaucaccuacgagaacaacaccugggucaaccagaccuacgucaacaucuccaacaccaacuucgccgccggccaguccgucgucuccgucaaguucgccggcaacuccucccucugccccgucuccggcugggccaucuacuccaaggacaacuccauccgcaucggcuccaagggcgacgucuucgucauccgcgagcccuucaucuccugcuccccccucgagugccgcaccuucuuccucacccagggcgcccuccucaacgacaagcacuccaacggcaccaucaaggaccgcucccccuaccgcacccucauguccugccccaucggcgagguccccucccccuacaacucccgcuucgaguccgucgccugguccgccuccgccugccacgacggcaucaacuggcucaccaucggcaucuccggccccgacaacggcgccgucgccguccucaaguacaacggcaucaucaccgacaccaucaaguccuggcgcaacaacauccuccgcacccaggaguccgagugcgccugcgucaacggcuccugcuucaccgucaugaccgacggccccuccgacggccaggccuccuacaagaucuuccgcaucgagaagggcaagaucgucaaguccgucgagaugaacgcccccaacuaccacuacgaggagugcuccugcuaccccgacuccuccgagaucaccugcgucugccgcgacaacuggcacggcuccaaccgccccugggucuccuucaaccagaaccucgaguaccagaucggcuacaucugcuccggcaucuucggcgacaacccccgccccaacgacaagaccggcaacugcggccccgucuccuccaacggcgccaacggcgucaagggcuucuccuucaaguacggcaacggcgucuggaucggccgcaccaaguccaucuccucccgcaacggcuucgagaugaucugggaccccaacggcuggaccggcaccgacaacaacuucuccaucaagcaggacaucgucggcaucaacgagugguccggcuacuccggcuccuucguccagcaccccgagcucaccggccucgacugcauccgccccugcuucugggucgagcucauccgcggccgccccaaggagaacaccaucuggaccuccggcuccuccaucuccuucugcggcgucaacuccgacaccgucggcugguccuggcccgacggcgccgagcuccccuucaccaucgacaaguga

SEQ ID NO: 115737 - RNA, 1410 nt, Artificial Sequence
  derived and/or modified CDS sequence (opt2) from neuraminidase__InfluenzaA__ADM95654
augaaccccaaccagaagaucaucaccaucggcuccgucugcaugaccaucggcauggccaaccucauccuccagaucggcaacaucaucuccaucuggaucucccacuccauccagcucggcaaccagaaccagaucgagaccugcaaccaguccgucaucaccuacgagaacaacaccugggucaaccagaccuacgucaacaucuccaacaccaacuucgccgccggccaguccgucgucuccgucaagcucgccggcaacuccucccucugccccgucuccggcugggccaucuacuccaaggacaacuccauccgcaucggcuccaagggcgacgucuucgucauccgcgagcccuucaucuccugcuccccccucgagugccgcaccuucuuccucacccagggcgcccuccucaacgacaagcacuccaacggcaccaucaaggaccgcucccccuaccgcacccucauguccugccccaucggcgagguccccucccccuacaacucccgcuucgaguccgucgccugguccgccuccgccugccacgacggcaucaacuggcucaccaucggcaucuccggccccgacaacggcgccgucgccguccucaaguacaacggcaucaucaccgacaccaucaaguccuggcgcaacaacauccuccgcacccaggaguccgagugcgccugcgucaacggcuccugcuucaccgucaugaccgacggccccuccgacggccaggccuccuacaagaucuuccgcaucgagaagggcaagaucgucaaguccgucgagaugaacgcccccaacuaccacuacgaggagugcuccugcuaccccgacuccuccgagaucaccugcgucugccgcgacaacuggcacggcuccaaccgccccugggucuccuucaaccagaaccucgaguaccagaucggcuacaucugcuccggcaucuucggcgacaacccccgccccaacgacaagaccggcuccugcggccccgucuccuccaacggcgccaacggcgucaagggcuucuccuucaaguacggcaacggcgucuggaucggccgcaccaaguccaucuccucccgccacggcuucgagaugaucugggaccccaacggcuggaccggcaccgacaacaacuucuccaucaagcaggacaucgucggcaccaacgagugguccggcuacuccggcuccuucguccagcaccccgagcucaccggccucgacugcauccgccccugcuucugggucgagcucauccgcggccgccccaaggagaacaccaucuggaccuccggcuccuccaucuccuucugcggcgucaacuccgacaccgucggcugguccuggcccgacggcgccgagcuccccuucaccaucgacaaguga

SEQ ID NO: 115738 - RNA, 1410 nt, Artificial Sequence
  derived and/or modified CDS sequence (opt2) from neuraminidase__InfluenzaA__ADM95655
augaaccccaaccagaagaucaucaccaucggcuccgucugcaugaccaucggcauggccaaccucauccuccagaucggcaacaucaucuccaucuggaucucccacuccauccagcucggcaaccagaaccagaucgagaccugcaaccaguccgucaucaccuacgagaacaacaccugggucaaccagaccuacgucaacaucuccaacaccaacuucgccgccggccaguccgucgucuccgucaagcucgccggcaacuccucccucugccccgucuccggcugggccaucuacuccaaggacaacuccauccgcaucggcuccaagggcgacgucuucgucauccgcgagcccuucaucuccugcuccccccucgagugccgcaccuucuuccucacccagggcgcccuccucaacgacaagcacuccaacggcaccaucaaggaccgcucccccuaccgcacccucauguccugccccaucggcgagguccccucccccuacaacucccgcuucgaguccgucgccugguccgccuccgccugccacgacggcaucaacuggcucaccaucggcaucuccggccccgacaacggcgccgucgccguccucaaguacaacggcaucaucaccgacaccaucaaguccuggcgcaacaacauccuccgcacccaggaguccgagugcgccugcgucaacggcuccugcuucaccgucaugaccgacggccccuccgacggccaggccuccuacaagaucuuccgcaucgagaagggcaagaucgucaaguccgucgagaugaacgcccccaacuaccacuacgaggagugcuccugcuaccccgacuccuccgagaucaccugcgucugccgcgacaacuggcacggcuccaaccgccccugggucuccuucaaccagaaccucgaguaccagaucggcuacaucugcuccggcaucuucggcgacaacccccgccccuccgacaagaccggcuccugcggccccgucuccuccaacggcgccaacggcgucaagggcuucuccuucaaguacggcaacggcgucuggaucggccgcaccaaguccaucuccucccgcaacggcuucgagaugaucugggaccccaacggcuggaccggcaccgacaacgacuucuccaucaagcaggacaucgucggcaucaacgagugguccggcuacuccggcuccuucguccagcaccccgagcucaccggccucgacugcauccgccccugcuucugggucgagcucauccgcggccgccccaaggagaacaccaucuggaccuccggcuccuccaucuccuucugcggcgucaacuccgacaccgucggcugguccuggcccgacggcgccgagcuccccuucaccaucgacaaguga

SEQ ID NO: 115739 - RNA, 1410 nt, Artificial Sequence; identical to SEQ ID NO: 114386
  derived and/or modified CDS sequence (opt2) from neuraminidase__InfluenzaA__ADM95656

SEQ ID NO: 115740 - RNA, 1410 nt, Artificial Sequence; identical to SEQ ID NO: 113951
  derived and/or modified CDS sequence (opt2) from neuraminidase__InfluenzaA__ADM95658

SEQ ID NO: 115741 - RNA, 1410 nt, Artificial Sequence
  derived and/or modified CDS sequence (opt2) from neuraminidase__InfluenzaA__ADM95659
augaaccccaaccagaagaucaucaccaucggcuccgucugcaugaccaucggcauggccaaccucauccuccagaucggcaacaucaucuccaucuggaucucccacuccauccagcucggcaaccagaaccagaucgagaccugcaaccaguccgucaucaccuacgagaacaacaccugggucaaccagaccuacgucaacaucuccaacaccaacuucgccgccggccaguccgucgucuccgucaagcucgccggcaacuccucccucugccccgucuccggcugggccaucuacuccaaggacaacuccauccgcaucggcuccaagggcgacgucuucgucauccgcgagcccuucaucuccugcuccccccucgagugccgcaccuucuuccucacccagggcgcccuccucaacgacaagcacuccaacggcaccaucaaggaccgcucccccuaccgcacccucauguccugccccaucggcgagguccccucccccuacaacucccgcuucgaguccgucgccugguccgccuccgccugccacgacggcaucaacuggcucaccaucggcaucuccggccccgacaacggcgccgucgccguccucaaguacaacggcaucaucaccgacaccaucaaguccuggcgcaacaacauccuccgcacccaggaguccgagugcgccugcgucaacggcuccugcuucaccgucaugaccgacggccccuccgacggccaggccuccuacaagaucuuccgcaucgagaagggcaagaucgucaaguccgucgagaugaacgcccccaacuaccacuacgaggagugcuccugcuaccccgacuccuccgagaucaccugcgucugccgcgacaacuggcacggcuccaaccgccccugggucuccuucaaccagaaccucgaguaccagaucggcuacaucugcuccggcaucuucggcgacaacccccgccccaacgacaagaccggcuccugcggccccgucuccuccaacggcgccaacggcgucaagggcuucuccuucaaguacggcaacggcgucuggaucggccgcaccaaguccaucuccucccgcuccggcuucgagaugaucugggaccccaacggcuggaccggcaccgacaacaacuucuccaucaagcaggacaucaucggcaccaacgagugguccggcuacuccggcuccuucguccagcaccccgagcucaccggccucgacugcauccgccccugcuucugggucgagcucauccgcggccgccccaaggagaacaccaucuggaccuccggcuccuccaucuccuucugcggcgucaacuccgacaccgucggcugguccuggcccgacggcgccgagcuccccuucaccaucgacaaguga

SEQ ID NO: 115742 - RNA, 1410 nt, Artificial Sequence; identical to SEQ ID NO: 112774
  derived and/or modified CDS sequence (opt2) from neuraminidase__InfluenzaA__ADM95660

SEQ ID NO: 115743 - RNA, 1410 nt, Artificial Sequence
  derived and/or modified CDS sequence (opt2) from neuraminidase__InfluenzaA__ADM95661
augaaccccaaccagaagaucaucaccaucggcuccgucugcaugaccaucggcauggccaaccucauccuccagaucggcaacaucaucuccaucuggaucucccacuccauccagcucggcaaccagaaccagaucgagaccugcaaccaguccgucaucaccuacgagaacaacaccugggucaaccagaccuacgucaacaucuccaacaccaacuucgccgccggccaguccgucgucuccgucaagcucgccggcaacuccucccucugccccgucuccggcugggccaucuacuccaaggacaacuccauccgcaucggcuccaagggcgacgucuucgucauccgcgagcccuucaucuccugcuccccccucgagugccgcaccuucuuccucacccagggcgcccuccucaacgacaagcacuccaacggcaccaucaaggaccgcucccccuaccgcacccucauguccugccccaucggcgagguccccucccccuacaacucccgcuucgaguccgucgccugguccgccuccgccugccacgacggcaucaacuggcucaccaucggcaucuccggccccgacaacggcgccgucgccguccucaaguacaacggcaucaucaccgacaccaucaaguccuggcgcaacaacauccuccgcacccaggaguccgagugcgccugcgucaacggcuccugcuucaccgucaugaccgacggccccuccgacggccaggccuccuacaagaucuuccgcaucgagaagggcaagaucgucaaguccgucgagaugaacgcccccaacuaccacuacgaggagugcuccugcuaccccgacuccuccgagaucaccugcgucugccgcgacaacuggcacggcuccaaccgccccugggucuccuucaaccagaaccucgaguaccagaucggcuacaucugcuccggcaucuucggcgacaacccccgccccaacgacaagaccggcuccugcggccccgucuccuccaacggcgccaacggcgucaagggcuucuccuucaaguacggcaacggcgucuggaucggccgcaccaaguccaucuccucccgcaacggcuucgagaugaucugggaccccaacggcuggaccggcaccgacaacaacuucuccaucaagcaggacaucgucggcaccaacgagugguccggcuacuccggcuccuucguccagcaccccgagcucaccggccucgacugcauccgccccugcuucugggucgagcucauccgcggccgccccaaggagaacaccaucuggaccuccggcuccaucaucuccuucugcggcgucaacuccgacaccgucggcugguccuggcccgacggcgccgagcuccccuucaccaucgacaaguga

SEQ ID NO: 115744 - RNA, 1410 nt, Artificial Sequence; identical to SEQ ID NO: 114386
  derived and/or modified CDS sequence (opt2) from neuraminidase__InfluenzaA__ADM95662

SEQ ID NO: 115745 - RNA, 1410 nt, Artificial Sequence
  derived and/or modified CDS sequence (opt2) from neuraminidase__InfluenzaA__ADM95663
augaaccccaaccagaagaucaucaccaucggcuccgucugcaugaccaucggcauggccaaccucauccuccagaucggcaacaucaucuccaucuggaucucccacuccauccagcucggcaaccagaaccagaucgagaccugcaaccaguccgucaucaccuacgagaacaacaccugggucaaccagaccuacgucaacaucuccaacaccaacuucgccgccggccaguccgucgucuccgucaagcucgccggcaacuccucccucugccccgucaacggcugggccaucuacuccaaggacaacuccauccgcaucggcuccaagggcgacgucuucgucauccgcgagcccuucaucuccugcuccccccucgagugccgcaccuucuuccucacccagggcgcccuccucaacgacaagcacuccaacggcaccaucaaggaccgcucccccuaccgcacccucauguccugccccaucggcgagguccccucccccuacaacucccgcuucgaguccgucgccugguccgccuccgccugccacgacggcaucaacuggcucaccaucggcaucuccggccccgacaacggcgccgucgccguccucaaguacaacggcaucaucaccgacaccaucaaguccuggcgcaacaacauccuccgcacccaggaguccgagugcgccugcgucaacggcuccugcuucaccgucaugaccgacggccccuccgacggccaggccuccuacaagaucuuccgcaucgagaagggcaagaucgucaaguccaucgagaugaacgcccccaacuaccacuacgaggagugcuccugcuaccccgacuccuccgagaucaccugcgucugccgcgacaacuggcacggcuccaaccgccccugggucuccuucaaccagaaccucgaguaccagaucggcuacaucugcuccggcaucuucggcgacaacccccgccccaacgacaagaccggcuccugcggccccgucuccuccaacggcgccaacggcgucaagggcuucuccuucaaguacggcaacggcgucuggaucggccgcaccaaguccaucuccucccgcaacggcuucgagaugaucugggaccccaacggcuggaccggcaccgacaacaacuucuccaucaagcaggacaucgucggcaccaacgagugguccggcuacuccggcuccuucguccagcaccccgagcucaccggccucgacugcauccgccccugcuucugggucgagcucauccgcggccgccccaaggagaacaccaucuggaccuccggcuccaucaucuccuucugcggcgucaacuccgacaccgucggcugguccuggcccgacggcgccgagcuccccuucaccaucgacaaguga

SEQ ID NO: 115746 - RNA, 1410 nt, Artificial Sequence; identical to SEQ ID NO: 114386
  derived and/or modified CDS sequence (opt2) from neuraminidase__InfluenzaA__ADM95664

SEQ ID NO: 115747 - RNA, 1410 nt, Artificial Sequence; identical to SEQ ID NO: 114386
  derived and/or modified CDS sequence (opt2) from neuraminidase__InfluenzaA__ADM95665

SEQ ID NO: 115748 - RNA, 1410 nt, Artificial Sequence
  derived and/or modified CDS sequence (opt2) from neuraminidase__InfluenzaA__ADM95666
augaaccccaaccagaagaucaucaccaucggcuccgucugcaugaccaucggcauggccaaccucauccuccagaucggcaacaucaucuccaucuggaucucccacuccauccagcucggcaaccagaaccagaucgagaccugcaaccaguccgucaucaccuacgagaacaacaccugggucaaccagaccuacgucaacaucuccaacaccaacuucgccgccggccaguccgucgucuccgucaagcucgccggcaacuccucccucugccccgucaacggcugggccaucuacuccaaggacaacuccauccgcaucggcuccaagggcgacgucuucgucauccgcgagcccuucaucuccugcuccccccucgagugccgcaccuucuuccucacccagggcgcccuccucaacgacaagcacuccaacggcaccaucaaggaccgcucccccuaccgcacccucauguccugccccaucggcgagguccccucccccuacaacucccgcuucgaguccgucgccugguccgccuccgccugccacgacggcaucaacuggcucaccaucggcaucuccggccccgacaacggcgccgucgccguccucaaguacaacggcaucaucaccgacaccaucaaguccuggcgcaacaacauccuccgcacccaggaguccgagugcgccugcgucaacggcuccugcuucaccgucaugaccgacggccccuccgacggccaggccuccuacaagaucuucaagaucgagaagggcaagaucgucaaguccgucgagaugaacgcccccaacuaccacuacgaggagugcuccugcuaccccgacuccuccgagaucaccugcgucugccgcgacaacuggcacggcuccaaccgccccugggucuccuucaaccagaaccucgaguaccagaucggcuacaucugcuccggcaucuucggcgacaacccccgccccaacgacaagaccggcuccugcggccccgucuccuucaacggcgccaacggcgucaagggcuucuccuucaaguacggcaacggcgucuggaucggccgcaccaaguccaucuccucccgcaacggcuucgagaugaucugggaccccaacggcuggaccggcaccgacaacaacuucuccaucaagcaggacaucgucggcaccaacgagugguccggcuacuccggcuccuucguccagcaccccgagcucaccggccucgacugcauccgccccugcuucugggucgagcucauccgcggccgccccaaggagaacaccaucuggaccuccggcuccaucaucuccuucugcggcgucaacuccgacaccgucggcugguccuggcccgacggcgccgagcuccccuucaccaucgacaaguga

SEQ ID NO: 115749 - RNA, 1410 nt, Artificial Sequence; identical to SEQ ID NO: 114386
  derived and/or modified CDS sequence (opt2) from neuraminidase__InfluenzaA__ADM95667

SEQ ID NO: 115750 - RNA, 1410 nt, Artificial Sequence; identical to SEQ ID NO: 114386
  derived and/or modified CDS sequence (opt2) from neuraminidase__InfluenzaA__ADM95668

SEQ ID NO: 115751 - RNA, 1410 nt, Artificial Sequence; identical to SEQ ID NO: 112774
  derived and/or modified CDS sequence (opt2) from neuraminidase__InfluenzaA__ADM95669

SEQ ID NO: 115752 - RNA, 1410 nt, Artificial Sequence; identical to SEQ ID NO: 112774
  derived and/or modified CDS sequence (opt2) from neuraminidase__InfluenzaA__ADM95670

SEQ ID NO: 115753 - RNA, 1410 nt, Artificial Sequence
  derived and/or modified CDS sequence (opt2) from neuraminidase__InfluenzaA__ADM95672
augaaccccaaccagaagaucaucaccaucggcuccgucugcaugaccaucggcauggccaaccucauccuccagaucggcaacaucaucuccaucuggaucucccacaccauccagcucggcaaccagaaccagaucgagaccugcaaccaguccgucaucaccuacgagaacaacaccugggucaaccagaccuacgucaacaucuccaacaccaacuucgccgccggccaguccgucgucuccgucaagcucgccggcaacuccucccucugccccgucuccggcugggccaucuacuccaaggacaacuccauccgcaucggcuccaagggcgacgucuucgucauccgcgagcccuucaucuccugcuccccccucgagugccgcaccuucuuccucacccagggcgcccuccucaacgacaagcacuccaacggcaccaucaaggaccgcucccccuaccgcacccucauguccugccccaucggcgagguccccucccccuacaacucccgcuucgaguccgucgccugguccgccuccgccugccacgacggcaucaacuggcucaccaucggcaucuccggccccgacaacggcgccgucgccguccucaaguacaacggcaucaucaccgacaccaucaaguccuggcgcaacaacauccuccgcacccaggaguccgagugcgccugcgucaacggcuccugcuucaccgucaugaccgacggccccuccgacggccaggccuccuacaagaucuuccgcaucgagaagggcaagaucgucaaguccgucgagaugaacgcccccaacuaccacuacgaggagugcuccugcuaccccgacuccuccgagaucaccugcgucugccgcgacaacuggcacggcuccaaccgccccugggucuccuucaaccagaaccucgaguaccagaucggcuacaucugcuccggcaucuucggcgacaacccccgccccaacgacaagaccggcuccugcggccccgucuccuccaacggcgccaacggcgucaagggcuucuccuucaaguacggcaacggcgucuggaucggccgcaccaaguccaucuccucccgcaacggcuucgagaugaucugggaccccaacggcuggaccggcaccgacaacaacuucuccaucaagcaggacaucgucggcaccaacgagugguccggcuacuccggcuccuucguccagcaccccgagcucaccggccucgacugcauccgccccugcuucugggucgagcucauccgcggccgccccaaggagaacaccaucuggaccuccggcuccuccaucuccuucugcggcgucaacuccgacaccgucggcugguccuggcccgacggcgccgagcuccccuucaccaucgacaaguga

SEQ ID NO: 115754 - RNA, 1410 nt, Artificial Sequence; identical to SEQ ID NO: 112774
  derived and/or modified CDS sequence (opt2) from neuraminidase__InfluenzaA__ADM95673

SEQ ID NO: 115755 - RNA, 1410 nt, Artificial Sequence; identical to SEQ ID NO: 114386
  derived and/or modified CDS sequence (opt2) from neuraminidase__InfluenzaA__ADM95674

SEQ ID NO: 115756 - RNA, 1410 nt, Artificial Sequence; identical to SEQ ID NO: 112774
  derived and/or modified CDS sequence (opt2) from neuraminidase__InfluenzaA__ADM95675

SEQ ID NO: 115757 - RNA, 1410 nt, Artificial Sequence
  derived and/or modified CDS sequence (opt2) from neuraminidase__InfluenzaA__ADM95677
augaaccccaaccagaagaucaucaccaucggcuccgucugcaugaccaucggcauggccaaccucauccuccagaucggcaacaucaucuccaucuggaucucccacuccauccagcucggcaaccagaaccagaucgagaccugcaaccaguccgucaucaccuacgagaacaacaccugggucaaccagaccuacgucaacaucuccaacaccaacuucgccgccggccaguccgucgucuccgucaagcucgccggcaacuccucccucugccccgucaacggcugggccaucuacuccaaggacaacuccauccgcaucggcuccaagggcgacgucuucgucauccgcgagcccuucaucuccugcuccccccucgagugccgcaccuucuuccucacccagggcgcccuccucaacgacaagcacuccaacggcaccaucaaggaccgcucccccuaccgcacccucauguccugccccaucggcgagguccccucccccuacaacucccgcuucgaguccgucgccugguccgccuccgccugccacgacggcaucaacuggcucaccaucggcaucuccggccccgacaacggcgccgucgccguccucaaguacaacggcaucaucaccgacaccaucaaguccuggcgcaacaacauccuccgcacccaggaguccgagugcgccugcgucaacggcuccugcuucaccgucaugaccgacggccccuccgacggccaggccuccuacaagaucuuccgcaucgagaagggcaagaucgucaaguccgucgagaugaacgcccccaacuaccacuacgaggagugcuccugcuaccccgacuccuccgagaucaccugcgucugccgcgacaacuggcacggcuccaaccgccccugggucuccuucaaccagaaccucgaguaccagaucggcuacaucugcuccggcaucuucggcgacaacccccgccccaacgacaagaccggcuccugcggccccgucuccuccaacggcgccaacggcgucaagggcuucuccuucaaguacggcaacggcgucuggaucggccgcaccaaguccaucuccucccgcaacggcuucgagaugaucugggaccccaacggcuggaccggcaccgacaacaacuucuccaucaagcaggacaucgucggcaccaacgagugguccggcuacuccggcuccuucguccagcaccccgagcucaccggccucgacugcauccgccccugcuucugggucgagcucauccgcggccgccccaaggagaacaccaucuggaccuccggcuccaucaucuccuucugcggcgucaacuccgacaccgucggcugguccuggcccgacggcgccgagcuccccuucaccaucgacaaguga

SEQ ID NO: 115758 - RNA, 1410 nt, Artificial Sequence
  derived and/or modified CDS sequence (opt2) from neuraminidase__InfluenzaA__ADM95678
augaaccccaaccagaagaucaucaccaucggcuccgucugcaugaccaucggcauggccaaccucauccuccagaucggcaacaucaucuccaucuggaucucccacuccauccagcucggcaaccagaaccagaucgagaccugcaaccaguccgucaucaccuacgagaacaacaccugggucaaccagaccuacgucaacaucuccaacaccaacuucgccgccggccaguccgucgucuccgucaaguucgccggcaacuccucccucugccccgucuccggcugggccaucuacuccaaggacaacuccauccgcaucggcuccaagggcgacgucuucgucauccgcgagcccuucaucuccugcuccccccucgagugccgcaccuucuuccucacccagggcgcccuccucaacgacaagcacuccaacggcaccaucaaggaccgcucccccuaccgcacccucauguccugccccaucggcgagguccccucccccuacaacucccgcuucgaguccgucgccugguccgccuccgccugccacgacggcaucaacuggcucaccaucggcaucuccggccccgacaacggcgccgucgccguccucaaguacaacggcaucaucaccgacaccaucaaguccuggcgcaacaacauccuccgcacccaggaguccgagugcgccugcgucaacggcuccugcuucaccgucaugaccgacggccccuccgacggccaggccuccuacaagaucuuccgcaucgagaagggcaagaucgucaaguccgucgagaugaacgcccccaacuaccacuacgaggagugcuccugcuaccccgacuccuccgagaucaccugcgucugccgcgacaacuggcacggcuccaaccgccccugggucuccuucaaccagaaccucgaguaccagaucggcuacaucugcuccggcaucuucggcgacaacccccgccccaacgacaagaccggcuccugcggccccgucuccuccaacggcgccaacggcgucaagggcuucuccuucaaguacggcaacggcgucuggaucggccgcaccaaguccaucuccucccgcaacggcuucgagaugaucugggaccccaacggcuggaccggcaccgacaacaacuucuccaucaagcaggacaucgucggcaucaacgagugguccggcuacuccggcuccuucguccagcaccccgagcucaccggccucgacugcauccgccccugcuucugggucgagcucauccgcggccgccccaaggagaacaccaucuggaccuccggcuccuccaucuccuucugcggcgucaacuccgacaccgucggcugguccuggcccgacggcgccgagcuccccuucaccaucgacaaguga

SEQ ID NO: 115759 - RNA, 1410 nt, Artificial Sequence; identical to SEQ ID NO: 115757
  derived and/or modified CDS sequence (opt2) from neuraminidase__InfluenzaA__ADM95679

SEQ ID NO: 115760 - RNA, 1410 nt, Artificial Sequence; identical to SEQ ID NO: 115757
  derived and/or modified CDS sequence (opt2) from neuraminidase__InfluenzaA__ADM95680

SEQ ID NO: 115761 - RNA, 1410 nt, Artificial Sequence; identical to SEQ ID NO: 112774
  derived and/or modified CDS sequence (opt2) from neuraminidase__InfluenzaA__ADM95681

SEQ ID NO: 115762 - RNA, 1410 nt, Artificial Sequence
  derived and/or modified CDS sequence (opt2) from neuraminidase__InfluenzaA__ADM95682
augaaccccaaccagaagaucaucaccaucggcuccgucugcaugaccaucggcauggccaaccucauccuccagaucggcaacaucaucuccaucuggaucucccacuccauccagcucggcaaccagaaccagaucgagaucugcaaccaguccgucaucaccuacgagaacaacaccugggucaaccagaccuacgucaacaucuccaacaccaacuucgccgccggccaguccgucgucuccgucaagcucgccggcaacuccucccucugccccgucuccggcugggccaucuacuccaaggacaacuccauccgcaucggcuccaagggcgacgucuucgucauccgcgagcccuucaucuccugcuccccccucgagugccgcaccuucuuccucacccagggcgcccuccucaacgacaagcacuccaacggcaccaucaaggaccgcucccccuaccgcacccucauguccugccccaucggcgagguccccucccccuacaacucccgcuucgaguccgucgccugguccgccuccgccugccacgacggcaucaacuggcucaccaucggcaucuccggccccgacaacggcgccgucgccguccucaaguacaacggcaucaucaccgacaccaucaaguccuggcgcaacaacauccuccgcacccaggaguccgagugcgccugcgucaacggcuccugcuucaccgucaugaccgacggccccuccgacggccaggccuccuacaagaucuuccgcaucgagaagggcaagaucgucaaguccgucgagaugaacgcccccaacuaccacuacgaggagugcuccugcuaccccgacuccuccgagaucaccugcgucugccgcgacaacuggcacggcuccaaccgccccugggucuccuucaaccagaaccucgaguaccagaucggcuacaucugcuccggcaucuucggcgacaacccccgccccaacgacaagaccggcuccugcggccccgucuccuccaacggcgccaacggcgucaagggcuucuccuucaaguacggcaacggcgucuggaucggccgcaccaaguccaucuccucccgcaacggcuucgagaugaucugggaccccaacggcuggaccggcaccgacaacaacuucuccaucaagcaggacaucgucggcaccaacgagugguccggcuacuccggcuccuucguccagcaccccgagcucaccggccucgacugcauccgccccugcuucugggucgagcucauccgcggccgccccaaggagaacaccaucuggaccuccggcuccuccaucuccuucugcggcgucaacuccgacaccgucggcugguccuggcccgacggcgccgagcuccccuucaccaucgacaaguga

SEQ ID NO: 115763 - RNA, 1410 nt, Artificial Sequence
  derived and/or modified CDS sequence (opt2) from neuraminidase__InfluenzaA__ADM95683
augaaccccaaccagaagaucaucaccaucggcuccgucugcaugaccaucggcauggccaaccucauccuccagaucggcaacaucaucuccaucuggaucucccacuccauccagcucggcaaccagaaccagaucgagaccugcaaccaguccgucaucaccuacgagaacaacaccugggucaaccagaccuacgucaacaucuccaacaccaacuucgccgccggccaguccgucgucuccgucaagcucgccggcaacuccucccucugccccgucuccggcugggccaucuacuccaaggacaacuccauccgcaucggcuccaagggcgacgucuucgucauccgcgagcccuucaucuccugcuccccccucgagugccgcaccuucuuccucacccagggcgcccuccucaacgacaagcacuccaacggcaccaucaaggaccgcucccccuaccgcacccucauguccugccccaucggcgagguccccucccccuacaacucccgcuucgaguccgucgccugguccgccuccgccugccacgacggcaucaacuggcucaccaucggcaucuccggccccgacaacggcgccgucgccguccucaaguacaacggcaucaucaccgacaccaucaaguccuggcgcaacaacauccuccgcacccaggaguccgagugcgccugcgucaacggcuccugcuucaccgucaugaccgacggccccuccgacggccaggccuccuacaagaucuuccgcaucgagaagggcaagaucgucaaguccgucgagaugaacgcccccaacuaccacuacgaggagugcuccugcuaccccgacuccuccgagaucaccugcgucugccgcgacaacuggcacggcuccaaccgccccugggucuccuucaaccagaaccucgaguaccagaucggcuacaucugcuccggcaucuucggcgacaacccccgccccaacgacaagaccggcuccugcggccccgucuccuccaacggcgccaacggcgucaagggcuucuccuucaaguacggcaacggcgucuggaucggccgcaccaaguccaucuccucccgcaacggcuucgagaugaucugggaccccaacggcuggaccggcaccgacaacaacuucuccaucaagcaggacaucgucggcaucaacgagugguccggcuacuccggcuccuucguccagcaccccgagcucaccggccucgacugcauccgccccugcuucugggucgagcucauccgcggccgccccaaggagaacaccaucuggaccuccggcuccuccauguccuucugcggcgucaacuccgacaccgucggcugguccuggcccgacggcgccgagcuccccuucaccaucgacaaguga

SEQ ID NO: 115764 - RNA, 1410 nt, Artificial Sequence; identical to SEQ ID NO: 112774
  derived and/or modified CDS sequence (opt2) from neuraminidase__InfluenzaA__ADM95684

SEQ ID NO: 115765 - RNA, 1410 nt, Artificial Sequence
  derived and/or modified CDS sequence (opt2) from neuraminidase__InfluenzaA__ADM95685
augaaccccaaccagaagaucaucaccaucggcuccgucugcaugaccaucggcauggccaaccucauccuccagaucggcaacaucaucuccaucuggaucucccacuccauccagcucggcaaccagaaccagaucgagaccugcaaccaguccgucaucaccuacgagaacaacaccugggucaaccagaccuacgucaacaucuccaacaccaacuucgccgccggccaguccgucgucuccgucaagcucgccggcaacuccucccucugccccgucuccggcugggccaucuacuccaaggacaacuccauccgcaucggcuccaagggcgacgucuucgucauccgcgagcccuucaucuccugcuccccccucgagugccgcaccuucuuccucacccagggcgcccuccucaacgacaagcacuccaacggcaccaucaaggaccgcucccccuaccgcacccucauguccugccccaucggcgagguccccucccccuacaacucccgcuucgaguccgucgccugguccgccuccgccugccacgacggcaucaacuggcucaccaucggcaucuccggccccgacaacggcgccgucgccguccucaaguacaacggcaucaucaccgacaccaucaaguccuggcgcaacaacauccuccgcacccaggaguccgagugcgccugcgucaacggcuccugcuucaccgucaugaccgacggccccuccgacggccaggccuccuacaagaucuuccgcaucgagaagggcaagaucgucaaguccgucgagaugaacgcccccaacuaccacuacgaggagugcuccugcuaccccgacuccuccgagaucaccugcgucugccgcgacaacuggcacggcuccaaccgccccugggucuccuucaaccagaaccucgaguaccagaucggcuacaucugcuccggcaucuucggcgacaacccccgccccaacgacaagaccggcuccugcggccccgucuccuccaacggcgccaacggcgucaagggcuucuccuucaaguacggcaacggcgucuggaucggccgcaccaaguccaucuccucccgccacggcuucgagaugaucugggaccccaacggcuggaccggcaccgacaacaacuucuccaucaagcaggacaucgucggcaccaacgagugguccggcuacuccggcuccuucguccagcaccccgagcucaccggccucgacugcauccgccccugcuucugggucgagcucauccgcggccgccccaaggagaacaccgucuggaccuccggcuccuccaucuccuucugcggcgucaacuccgacaccgucggcugguccuggcccgacggcgccgagcuccccuucaccaucgacaaguga

SEQ ID NO: 115766 - RNA, 1410 nt, Artificial Sequence
  derived and/or modified CDS sequence (opt2) from neuraminidase__InfluenzaA__ADM95686
augaaccccaaccagaagaucaucaccaucggcuccgucugcaugaccaucggcauggccaaccucauccuccagaucggcaacaucaucuccaucuggaucucccacuccauccagcucggcaaccagaaccagaucgagaccugcaaccaguccgucaucaccuacgagaacaacaccugggucaaccagaccuacgucaacaucuccaacaccaacuucgccgccggccaguccgucgucuccgucaagcucgccggcaacuccucccucugccccgucuccggcugggccaucuacuccaaggacaacuccauccgcaucggcuccaagggcgacgucuucgucauccgcgagcccuucaucuccugcuccccccucgagugccgcaccuucuuccucacccagggcgcccuccucaacgacaagcacuccaacggcaccaucaaggaccgcucccccuaccgcacccucauguccugccccaucggcgagguccccucccccuacaacucccgcuucgaguccgucgccugguccgccuccgccugccacgacggcaucaacuggcucaccaucggcaucuccggccccgacaacggcgccgucgccguccucaaguacaacggcaucaucaccgacaccaucaaguccuggcgcaacaacauccuccgcacccaggaguccgagugcgccugcgucaacggcuccugcuucaccgucaugaccgacggccccuccgacggccaggccuccuacaagaucuuccgcaucgagaagggcaagaucgucaaguccgucgagaugaacgcccccaacuaccacuacgaggagugcuccugcuaccccgacuccuccgagaucaccugcgucugccgcgacaacuggcacggcuccaaccgccccugggucuccuucaaccagaaccucgaguaccagaucggcuacaucugcuccggcaucuucggcgacaacccccgccccaacgacaagaccggcuccugcggccccgucuccuccaacggcgccaacggcgucaagggcuucuccuucaaguacggcaacggcgucuggaucggccgcaccaaguccaucuccucccgcaacggcuucgagaugaucugggaccccaacggcuggaccggcaccgacaacgacuucuccaucaagcaggacaucgucggcaucaacgagugguccggcuacuccggcuccuucguccagcaccccgagcucaccggccucgacugcauccgccccugcuucugggucgagcucauccgcggccgccccaaggagaacaccaucuggaccuccggcuccuccaucuccuucugcggcgucaacuccgacaccgucggcugguccuggcccgacggcgccgagcuccccuucaccaucgacaaguga

SEQ ID NO: 115767 - RNA, 1410 nt, Artificial Sequence; identical to SEQ ID NO: 112774
  derived and/or modified CDS sequence (opt2) from neuraminidase__InfluenzaA__ADM95687

SEQ ID NO: 115768 - RNA, 1410 nt, Artificial Sequence
  derived and/or modified CDS sequence (opt2) from neuraminidase__InfluenzaA__ADM95688
augaaccccaaccagaagaucaucaccaucggcuccgucugcaugaccaucggcauggccaaccucauccuccagaucggcaacaucaucuccaucuggaucucccacuccauccagcucggcaaccagaaccagaucgagaccugcaaccaguccgucaucaccuacgagaacaacaccugggucaaccagaccuacgucaacaucuccaacaccaacuucgccgccggccaguccgucgucuccgucaagcucgccggcaacuccucccucugccccgucuccggcugggccaucuacuccaaggacaacuccauccgcaucggcuccaagggcgacgucuucgucauccgcgagcccuucaucuccugcuccccccucgagugccgcaccuucuuccucacccagggcgcccuccucaacgacaagcacuccaacggcaccaucaaggaccgcucccccuaccgcacccucauguccugccccaucggcgagguccccucccccuacaacucccgcuucgaguccgucgccugguccgccuccgccugccacgacggcaucaacuggcucaccaucggcaucuccggccccgacaacggcgccgucgccguccucaaguacaacggcaucaucaccgacaccaucaaguccuggcgcaacaacauccuccgcacccaggaguccgagugcgccugcgucaacggcuccugcuucaccgucaugaccgacggccccuccgacggccaggccuccuacaagaucuuccgcaucgagaagggcaagaucgucaaguccgucgagaugaacgcccccaacuaccacuacgaggagugcuccugcuaccccgacuccuccgagaucaccugcgucugccgcgacaacuggcacggcuccaaccgccccugggucuccuucaaccagaaccucgaguaccagaucggcuacaucugcuccggcaucuucggcgacaacccccgccccaacgacaagaccggcuccugcggccccgucuccuccaacggcgccaacggcgucaagggcuucuccuucaaguacggcaacggcgucuggaucggccgcaccaaguccaucuccucccgcaacggcuucgagaugaucugggaccccaacggcuggaccggcaccgacaacaacuucuccaucaagcaggacaucgucggcaccaacgagugguccggcuacuccggcuccuucguccagcaccccgagcucacccgccucgacugcauccgccccugcuucugggucgagcucauccgcggccgccccaaggagaacaccaucuggaccuccggcuccaucaucuccuucugcggcgucaacuccgacaccgucggcugguccuggcccgacggcgccgagcuccccuucaccaucgacaaguga

SEQ ID NO: 115769 - RNA, 1410 nt, Artificial Sequence; identical to SEQ ID NO: 115766
  derived and/or modified CDS sequence (opt2) from neuraminidase__InfluenzaA__ADM95689

SEQ ID NO: 115770 - RNA, 1410 nt, Artificial Sequence
  derived and/or modified CDS sequence (opt2) from neuraminidase__InfluenzaA__ADM95690
augaaccccaaccagaagaucaucaccaucggcuccgucugcaugaccaucggcauggccaaccucauccuccagaucggcaacaucaucuccaucuggaucucccacuccauccagcucggcaaccagaaccagaucgagaccugcaaccaguccgucaucaccuacgagaacaacaccugggucaaccagaccuacgucaacaucuccaacaccaacuucgccgccggccaguccgucgucuccgucaagcucgccggcaacuccucccucugccccgucuccggcugggccaucuacuccaaggacaacuccauccgcaucggcuccaagggcgacgucuucgucauccgcgagcccuucaucuccugcuccccccucgagugccgcaccuucuuccucacccagggcgcccuccucaacgacaagcacuccaacggcaccaucaaggaccgcucccccuaccgcacccucauguccugccccaucggcgagguccccucccccuacaacucccgcuucgaguccgucgccugguccgccuccgccugccacgacggcaucaacuggcucaccaucggcaucuccggccccgacaacggcgccgucgccguccucaaguacaacggcaucaucaccgacaccaucaaguccuggcgcaacaacauccuccgcacccaggaguccgagugcgccugcgucaacggcuccugcuucaccgucaugaccgacggccccuccgacggccaggccuccuacaagaucuuccgcaucgagaagggcaagaucgucaaguccgucgagaugaacgcccccaacuaccacuacgaggagugcuccugcuaccccgacuccuccgagaucaccugcgucugccgcgacaacuggcacggcuccaaccgccccugggucuccuucaaccagaaccucgaguaccagaucggcuacaucugcuccggcaucuucggcgacaacccccgccccaacgacaagaccggcuccugcggccccgucuccuccaacggcgccaacggcgucaagggcuucuccuucaaguacggcaacggcgucuggaucggccgcaccaaguccaucuccucccgcaacggcuucgagaugaucugggaccccaacggcuggaccggcaccgacaacaacuucuccaucaagcaggacaucaucggcaccaacgagugguccggcuacuccggcuccuucguccagcaccccgagcucaccggccucgacugcauccgccccugcuucugggucgagcucauccgcggccgccccaaggagaacaccaucuggaccuccggcuccuccaucuccuucugcggcgucaacuccgacaccgucggcugguccuggcccgacggcgccgagcuccccuucaccaucgacaaguga

SEQ ID NO: 115771 - RNA, 1410 nt, Artificial Sequence; identical to SEQ ID NO: 112774
  derived and/or modified CDS sequence (opt2) from neuraminidase__InfluenzaA__ADM95691

SEQ ID NO: 115772 - RNA, 1410 nt, Artificial Sequence
  derived and/or modified CDS sequence (opt2) from neuraminidase__InfluenzaA__ADM95692
augaaccccaaccagaagaucaucaccaucggcuccgucugcaugaccaucggcauggccaaccucauccuccagaucggcaacaucaucuccaucuggaucucccacuccauccagcucggcaaccagaaccagaucgagaccugcaaccaguccgucaucaccuacgagaacaacaccugggucaaccagaccuacgucaacaucaucaacaccaacuucgccgccggccaguccgucgucuccgucaagcucgccggcaacuccucccucugccccgucuccggcugggccaucuacuccaaggacaacuccauccgcaucggcuccaagggcgacgucuucgucauccgcgagcccuucaucuccugcuccccccucgagugccgcaccuucuuccucacccagggcgcccuccucaacgacaagcacuccaacggcaccaucaaggaccgcucccccuaccgcacccucauguccugccccaucggcgagguccccucccccuacaacucccgcuucgaguccgucgccugguccgccuccgccugccacgacggcaucaacuggcucaccaucggcaucuccggccccgacaacggcgccgucgccguccucaaguacaacggcaucaucaccgacaccaucaaguccuggcgcaacaacauccuccgcacccaggaguccgagugcgccugcgucaacggcuccugcuucaccgucaugaccgacggccccuccgacggccaggccuccuacaagaucuuccgcaucgagaagggcaagaucgucaaguccgucgagaugaacgcccccaacuaccacuacgaggagugcuccugcuaccccgacuccuccgagaucaccugcgucugccgcgacaacuggcacggcuccaaccgccccugggucuccuucaaccagaaccucgaguaccagaucggcuacaucugcuccggcaucuucggcgacaacccccgccccaacgacaagaccggcuccugcggccccgucuccuccaacggcgccaacggcgucaagggcuucuccuucaaguacggcaacggcgucuggaucggccgcaccaaguccaucuccucccgcaacggcuucgagaugaucugggaccccaacggcuggaccggcaccgacaacaacuucuccaucaagcaggacaucgucggcaucaacgagugguccggcuacuccggcuccuucguccagcaccccgagcucaccggccucgacugcauccgccccugcuucugggucgagcucauccgcggccgccccaaggagaacaccaucuggaccuccggcuccuccaucuccuucugcggcgucaacuccgacaccgucggcugguccuggcccgacggcgccgagcuccccuucaccaucgacaaguga

SEQ ID NO: 115773 - RNA, 1410 nt, Artificial Sequence; identical to SEQ ID NO: 112774
  derived and/or modified CDS sequence (opt2) from neuraminidase__InfluenzaA__ADM95693

SEQ ID NO: 115774 - RNA, 1410 nt, Artificial Sequence; identical to SEQ ID NO: 112774
  derived and/or modified CDS sequence (opt2) from neuraminidase__InfluenzaA__ADM95694

SEQ ID NO: 115775 - RNA, 1410 nt, Artificial Sequence; identical to SEQ ID NO: 112774
  derived and/or modified CDS sequence (opt2) from neuraminidase__InfluenzaA__ADM95695

SEQ ID NO: 115776 - RNA, 1410 nt, Artificial Sequence; identical to SEQ ID NO: 115766
  derived and/or modified CDS sequence (opt2) from neuraminidase__InfluenzaA__ADM95696

SEQ ID NO: 115777 - RNA, 1410 nt, Artificial Sequence; identical to SEQ ID NO: 114386
  derived and/or modified CDS sequence (opt2) from neuraminidase__InfluenzaA__ADM95697

SEQ ID NO: 115778 - RNA, 1413 nt, Artificial Sequence
  derived and/or modified CDS sequence (opt2) from neuraminidase__InfluenzaA__ADM95698
augaaccccaaccagaagaucaucaccaucggcuccaucuccaucgccaucggcaucaucucccucaugcuccagaucggcaacaucaucuccaucugggccucccacuccauccagaccggcucccagaacaacaccggcaucugcaaccagcgcaucaucaccuacgagaacaacaccugggucaaccacaccuacgucaacaucaacaacaccaacgucgucgccgaggaggacaagaccuccgucacccucgccggcaacuccucccucugcuccaucuccggcugggccaucuacaccaaggacaacuccauccgcaucggcuccaagggcgacgucuucgucauccgcgagcccuucaucuccugcucccaccucgagugccgcaccuucuuccucacccagggcgcccuccucaacgacaagcacuccaacggcaccgucaaggaccgcucccccuaccgcgcccucauguccugcccccucggcgaggcccccucccccuacaacuccaaguucgaguccgucgccugguccgccuccgccugccacgacggcaugggcuggcucaccaucggcaucuccggccccgacaacggcgccgucgccguccucaaguacaacggcaucaucaccggcaccaucaaguccuggaagaagcagauccuccgcacccaggaguccgagugcgucugcaugaacggcuccugcuucaccaucaugaccgacggccccuccaacaaggccgccuccuacaagaucuucaagaucgagaagggcaaggucaccaaguccaucgagcucaacgcccccaacuuccacuacgaggagugcuccugcuaccccgacaccggcaucgucaugugcgucugccgcgacaacuggcacggcuccaaccgccccugggucuccuucaaccagaaccucgacuaccagaucggcuacaucugcuccggcgucuucggcgacaacccccgccccgaggacggcgagggcuccugcaaccccgucaccgucgacggcgccaacggcgucaagggcuucuccuacaaguacgacaacggcgucuggaucggccgcaccaaguccaaccgccuccgcaagggcuucgagaugaucugggaccccaacggcuggaccaacaccgacuccgacuucuccgucaagcaggacgucgucgccaucaccgacugguccggcuacuccggcuccuucguccagcaccccgagcucaccggccucgacugcauccgccccugcuucugggucgagcucguccgcggccagccccgcgagaacaccaccaucuggaccuccggcuccuccaucuccuucugcggcgucaacuccgacaccgccaacugguccuggcccgacggcgccgagcuccccuucaccaucgacaaguga

SEQ ID NO: 115779 - RNA, 1413 nt, Artificial Sequence
  derived and/or modified CDS sequence (opt2) from neuraminidase__InfluenzaA__ADM95699
augaaccccaaccagaagaucaucaccaucggcuccaucuccaucgccaucggcaucaucucccucaugcuccagaucggcaacaucaucuccaucugggccucccacuccauccagaccggcucccagaacaacaccggcaucugcaaccagcgcaucaucaccuacgagaacaacaccugggucaaccacaccuacgucaacaucaacaacaccaacgucgucgccgaggaggacaagaccuccgucacccucgccggcaacuccucccucugcuccaucuccggcugggccaucuacaccaaggacaacuccauccgcaucggcuccaagggcgacgucuucgucauccgcgagcccuucaucuccugcucccaccucgagugccgcaccuucuuccucacccagggcgcccuccucaacgacaagcacuccaacggcaccgucaaggaccgcucccccuaccgcgcccucauguccugcccccucggcgaggcccccucccccuacaacuccaaguucgaguccgucgccugguccgccuccgccugccacgacggcaugggcuggcucaccaucggcaucuccggccccgacaacggcgccgucgccguccucaaguacaacggcaucaucaccggcaccaucaaguccuggaagaagcagauccuccgcacccaggaguccgagugcgucugcaugaacggcuccugcuucaccaucaugaccgacggccccuccaacaaggccgccuccuacaagaucuucaagaucgagaagggcaaggucaccaaguccaucgagcucaacgcccccaacuucuacuacgaggagugcuccugcuaccccgacaccggcaucgucaugugcgucugccgcgacaacuggcacggcuccaaccgccccugggucuccuucaaccagaaccucgacuaccagaucggcuacaucugcuccggcgucuucggcgacaacccccgccccgaggacggcgagggcuccugcaaccccgucaccgucgacggcgccaacggcgucaagggcuucuccuacaaguacgacaacggcgucuggaucggccgcaccaaguccaaccgccuccgcaagggcuucgagaugaucugggaccccaacggcuggaccaacaccgacuccgacuucuccgucaagcaggacgucgucgccaucaccgacugguccggcuacuccggcuccuucguccagcaccccgagcucaccggccucgacugcauccgccccugcuucugggucgagcucguccgcggccucccccgcgagaacaccaccaucuggaccuccggcuccuccaucuccuucugcggcgucaacuccgacaccgccaacugguccuggcccgacggcgccgagcuccccuucaccaucgacaaguga

SEQ ID NO: 115780 - RNA, 1413 nt, Artificial Sequence
  derived and/or modified CDS sequence (opt2) from neuraminidase__InfluenzaA__ADM95701
augaaccccaaccagaagaucaucaccaucggcuccaucuccaucgccaucggcaucaucucccucaugcuccagaucggcaacaucaucuccaucugggccucccacuccauccagaccggcucccagaacaacaccggcaucugcaaccagcgcaucaucaccuacgagaacaacaccugggucaaccacaccuacgucaacaucaacaacaccaacgucgucgccgaggaggacaagaccuccgucacccucgccggcaacuccucccucugcuccaucuccggcugggccaucuacaccaaggacaacuccauccgcaucggcuccaagggcgacgucuucgucauccgcgagcccuucaucuccugcucccaccucgagugccgcaccuucuuccucacccagggcgcccuccucaacgacaagcacuccaacggcaccgucaaggaccgcucccccuaccgcgcccucauguccugcccccucggcgaggcccccucccccuacaacuccaaguucgaguccgucgccugguccgccuccgccugccacgacggcaugggcuggcucaccaucggcaucuccggccccgacaacggcgccgucgccguccucaaguacaacggcaucaucaccggcaccaucaaguccuggaagaagcagauccuccgcacccaggaguccgagugcgucugcaugaacggcuccugcuucaccaucaugaccgacggccccuccaacaaggccgccuccuacaagaucuucaagaucgagaagggcaaggucaccaaguccaucgagcucaacgcccccaacuuccacuacgaggagugcuccugcuaccccgacaccggcaucgucaugugcgucugccgcgacaacuggcacggcuccaaccgccccugggucuccuucaaccagaaccucgacuaccagaucggcuacaucugcuccggcgucuucggcgacaacccccgccccgaggacggcgagggcuccugcaaccccgucaccgucgacggcgccaacggcgucaagggcuucuccuacaaguacgacaacggcgucuggaucggccgcaccaaguccaaccgccuccgcaagggcuucgagaugaucugggaccccaacggcuggaccaacaccgacuccgacuucuccgucaagcaggacgucgucgccaucaccgacugguccggcuacuccggcuccuucguccagcaccccgagcucaccggccucgacugcauccgccccugcuucugggucgagcucguccgcggccucccccgcgagaacaccaccaucuggaccuccggcuccuccaucuccuucugcggcgucaacuccgacaccgccaacugguccuggcccgacggcgccgagcuccccuucaccaucgacaaguga

SEQ ID NO: 115781 - RNA, 1413 nt, Artificial Sequence
  derived and/or modified CDS sequence (opt2) from neuraminidase__InfluenzaA__ADM95702
augaaccccaaccagaagaucaucaccaucggcuccaucuccaucgccaucggcaucaucucccucaugcuccagaucggcaacaucaucuccaucugggccucccacuccauccagaccggccgccagaacaacaccggcaucugcaaccagcgcaucaucaccuacgagaacuccaccugggucaaccacaccuacgucaacaucaacaacaccaaggucgucgccggcgaggacaagaccuccgucacccucgccggcaacuccucccucugcuccaucuccggcugggccaucuacaccaaggacaacuccauccgcaucggcuccaagggcgacgucuucgucauccgcgagcccuucaucuccugcucccaccucgagugccgcaccuucuuccucacccagggcgcccuccucaacgacaagcacuccaacggcaccgucaaggaccgcucccccuaccgcgcccucauguccugcccccucggcgaggcccccucccccuacaacuccaaguucgaguccgucgccugguccgccuccgccugccacgacggcaugggcuggcucaccaucggcaucuccggccccgacaacggcgccgucgccguccucaaguacaacggcaucaucaccggcaccaucaaguccuggaagaagcagauccuccgcacccaggaguccgagugcgucugcaugaacggcuccugcuucaccaucaugaccgacggccccuccaacaaggccgccuccuacaagaucuucaagaucgagaagggcaaggucaccaaguccaucgagcucaacgcccccaacuucuacuacgaggagugcuccugcuaccccgacaccggcaucgucaugugcgucugccgcgacaacuggcacggcuccaaccgccccugggucuccuucaaccagaaccucgacuaccagaucggcuacaucugcuccggcgucuucggcgacaacccccgccccgaggacggcgagggcuccugcaaccccgucaccgucgacggcgccaacggcgucaagggcuucuccuacaaguacggcaacggcgucuggaucggccgcaccaaguccaaccgccuccgcaagggcuucgaggucaucugggaccccaacggcuggaccaacaccgacuccgacuucuccgucaagcaggacgucgucgccaucaccgacugguccggcuacuccggcuccuucguccagcaccccgagcucaccggccucgacugcauccgccccugcuucugggucgagcucguccgcggccucccccgcgagaacaccaccaucuggaccuccggcuccuccaucuccuucugcggcgucaacuccgacaccgccaacugguccuggcccgacggcgccgagcuccccuucaccaucgacaaguga

SEQ ID NO: 115782 - RNA, 1413 nt, Artificial Sequence
  derived and/or modified CDS sequence (opt2) from neuraminidase__InfluenzaA__ADM95704
augaaccccaaccagaagaucaucaccaucggcuccaucuccaucgccaucggcaucaucucccucaugcuccagaucggcaacaucgucuccaucugggccucccacuccauccagaccggcucccagaacaacaccggcaucugcaaccagcgcaucaucaccuacgagaacaacaccugggucaaccacaccuacgucaacaucaacaacaccaacgucgucgccgaggaggacaagaccuccgucacccucgccggcaacuccucccucugcuccaucuccggcugggccaucuacaccaaggacaacuccauccgcaucggcuccaagggcgacgucuucgucauccgcgagcccuucaucuccugcucccaccucgagugccgcaccuucuuccucacccagggcgcccuccucaacgacaagcacuccaacggcaccgucaaggaccgcucccccuaccgcgcccucauguccugcccccucggcgaggcccccucccccuacaacuccaaguucgaguccgucgccugguccgccuccgccugccacgacggcaugggcuggcucaccaucggcaucuccggccccgacaacggcgccgucgccguccucaaguacaacggcaucaucaccggcaccaucaaguccuggaagaagcagauccuccgcacccaggaguccgagugcgucugcaugaacggcuccugcuucaccaucaugaccgacggccccuccaaccgcgccgccuccuacaagaucuucaagaucgagaagggcaaggucaccaaguccaucgagcucaacgcccccaacuuccacuacgaggagugcuccugcuaccccgacaccggcaucgucaugugcgucugccgcgacaacuggcacggcuccaaccgccccugggucuccuucaaccagaaccucgacuaccagaucggcuacaucugcuccggcgucuucggcgacaacccccgccccgaggacggcgagggcuccugcaaccccgucaccgucgacggcgccaacggcgucaagggcuucuccuacaaguacgacaacggcgucuggaucggccgcaccaaguccaaccgccuccgcaagggcuucgagaugaucugggaccccaacggcuggaccaacaccgacuccgacuucuccgucaagcaggacgucgucgccaucaccgacugguccggcuacuccggcuccuucguccagcaccccgagcucaccggccucgacugcauccgccccugcuucugggucgagcucguccgcggccucccccgcgagaacaccaccaucuggaccuccggcuccuccaucuccuucugcggcgucaacuccgacaccgccaacugguccuggcccgacggcgccgagcuccccuucaccaucgacaaguga

SEQ ID NO: 115783 - RNA, 1413 nt, Artificial Sequence
  derived and/or modified CDS sequence (opt2) from neuraminidase__InfluenzaA__ADM95705
augaaccccaaccagaagaucaucaccaucggcuccaucuccaucgccaucggcaucaucucccucaugcuccagaucggcaacaucaucuccaucugggccucccacuccauccagaccggccgccagaacaacaccggcaucugcaaccagcgcaucaucaccuacgagaacuccaccugggucaaccacaccuacgucaacaucaacaacaccaaggucgucgccggcgaggacaagaccuccgucacccucgccggcaacuccucccucugcuccaucuccggcugggccaucuacaccaaggacaacuccauccgcaucggcuccaagggcgacgucuucgucauccgcgagcccuucaucuccugcucccaccucgagugccgcaccuucuuccucacccagggcgcccuccucaacgacaagcacuccaacggcaccgucaaggaccgcucccccuaccgcgcccucauguccugcccccucggcgaggcccccucccccuacaacuccaaguucgaguccgucgccugguccgccuccgccugccacgacggcaugggcuggcucaccaucggcaucuccggccccgacaacggcgccgucgccguccucaaguacaacggcaucaucaccggcaccaucaaguccuggaagaagcagauccuccgcacccaggaguccgagugcgucugcaugaacggcuccugcuucaccaucaugaccgacggccccuccaacaaggccgccuccuacaagaucuucaagaucgagaagggcaaggucaccaaguccaucgagcucaacgcccccaacuucuacuacgaggagugcuccugcuaccccgacaccggcaucgucaugugcgucugccgcgacaacuggcacggcuccaaccgccccugggucuccuucaaccagaaccucgacuaccagaucggcuacaucugcuccggcgucuucggcgacaacccccgccccgaggacggcgagggcuccugcaaccccgucaccgucgacggcgccaacggcgucaagggcuucuccuacaaguacggcaacggcgucuggaucggccgcaccaaguccaaccgccuccgcaagggcuucgagaugaucugggaccccaacggcuggaccaacaccgacuccgacuucuccgucaagcaggacgucgucgccaucaccgacugguccggcuacuccggcuccuucguccagcaccccgagcucaccggccucgacugcauccgccccugcuucugggucgagcucguccgcggccucccccgcgagaacaccaccaucuggaccuccggcuccuccaucuccuucugcggcgucaacuccgacaccgccaacugguccuggcccgacggcgccgagcuccccuucaccaucgacaaguga

SEQ ID NO: 115784 - RNA, 1413 nt, Artificial Sequence; identical to SEQ ID NO: 115783
  derived and/or modified CDS sequence (opt2) from neuraminidase__InfluenzaA__ADM95706

SEQ ID NO: 115785 - RNA, 1413 nt, Artificial Sequence; identical to SEQ ID NO: 115783
  derived and/or modified CDS sequence (opt2) from neuraminidase__InfluenzaA__ADM95707

SEQ ID NO: 115786 - RNA, 1413 nt, Artificial Sequence; identical to SEQ ID NO: 113497
  derived and/or modified CDS sequence (opt2) from neuraminidase__InfluenzaA__ADM95708

SEQ ID NO: 115787 - RNA, 1410 nt, Artificial Sequence
  derived and/or modified CDS sequence (opt2) from neuraminidase__InfluenzaA__ADM95710
augaaccccaaccagaagaucaucaccaucggcuccgucucccucaccaucuccaccaucugcuucuucaugcagaucgccauccucaucaccaccgucacccuccacuucaagcaguacgaguucaacuccccccccaacaaccaggucaugcucugcgagcccaccaucaucgagcgcaacaucaccgagaucgucuaccucaccaacaccaccaucgagaaggagaucugccccaagcucgccgaguaccgcaacugguccaagccccagugcgacaucaccggcuucgcccccuucuccaaggacaacuccauccgccucuccgccggcggcgacaucugggucacccgcgagcccuacgucuccugcgaccccgacaagugcuaccaguucgcccucggccagggcaccacccucaacaacguccacuccaacaacaccguccgcgaccgcacccccuaccgcacccuccucaugaacgagcucggcguccccuuccaccucggcaccaagcaggucugcaucgccugguccuccuccuccugccacgacggcaaggccuggcuccacgucugcaucaccggcgacgacaagaacgccaccgccuccuucaucuacaacggccgccucgucgacuccgucgucuccugguccaaggagauccuccgcacccaggaguccgagugcgucugcaucaacggcaccugcaccgucgucaugaccgacggcuccgccuccggcaaggccgacaccaagauccucuucaucgaggagggcaagaucguccacaccuccacccucuccggcuccgcccagcacgucgaggagugcuccugcuacccccgcuaccccggcguccgcugcgucugccgcgacaacuggaagggcuccaaccgccccaucgucgacaucaacaucaaggaccacaacaucgucuccuccuacgucugcuccggccucgucggcgacaccccccgcaagaacgacuccuccuccuccucccacugccucgaccccaacaacgaggagggcggccacggcgucaagggcugggccuucgacgacggcaacgacgucuggaugggccgcaccaucuccgagaagucccgccucggcuacgagaccuucaaggucaucgagggcugguccaaccccaaguccaagcuccagaucaaccgccaggucaucgucgaccgcggcaaccgcuccggcuacuccggcaucuucuccgucgagggcaaguccugcaucaaccgcugcuucuacgucgagcucauccgcggccgcaaggaggagaccgacguccucuggaccuccaacuccaucgucgucuucugcggcaccuccggcaccuacggcaccggcuccuggcccgacggcgccgacaucaaccucaugcccaucuga

SEQ ID NO: 115788 - RNA, 1410 nt, Artificial Sequence; identical to SEQ ID NO: 112635
  derived and/or modified CDS sequence (opt2) from neuraminidase__InfluenzaA__ADM95711

SEQ ID NO: 115789 - RNA, 1410 nt, Artificial Sequence; identical to SEQ ID NO: 112635
  derived and/or modified CDS sequence (opt2) from neuraminidase__InfluenzaA__ADM95712

SEQ ID NO: 115790 - RNA, 1410 nt, Artificial Sequence; identical to SEQ ID NO: 112635
  derived and/or modified CDS sequence (opt2) from neuraminidase__InfluenzaA__ADM95713

SEQ ID NO: 115791 - RNA, 1410 nt, Artificial Sequence
  derived and/or modified CDS sequence (opt2) from neuraminidase__InfluenzaA__ADM95714
augaaccccaaccagaagaucaucaccaucggcuccgucucccucaccaucuccaccaucugcuucuucaugcagaucgccauccucaucaccaccgucacccuccacuucaagcaguacgaguucaacuccccccccaacaaccaggucaugcucugcgagcccaccaucaucgagcgcaacaucaccgagaucgucuaccucaccaacaccaccaucgagaaggagaucugccccaagcucgccgaguaccgcaacugguccaagccccagugcgacaucaccggcuucgcccccuucuccaaggacaacuccauccgccucuccgccggcggcgacaucugggucacccgcgagcccuacgucuccugcgaccccgacaagugcuaccaguucgcccucggccagggcaccacccucaacaacguccacuccaacaacaccguccgcgaccgcacccccuaccgcacccuccucaugaacgagcucggcguccccuuccaccucggcaccaagcaggucugcaucgccugguccuccuccuccugccacgacggcaaggccuggcuccacgucugcaucaccggcgacgacaagaacgccaccgccuccuucaucuacaacggccgccucgucgacuccgucgucuccugguccaaggagauccuccgcacccaggaguccgagugcgucugcaucaacggcaccugcaccgucgucaugaccgacggcuccgccuccggcaaggccgacaccaagauccucuucaucgaggagggcaagaucguccacaccuccacccucuccggcuccgcccagcacgucgaggagugcuccugcuacccccgcuaccccggcguccgcugcgucugccgcgacaacuggaagggcuccaaccgccccaucgucgacaucaacaucaaggaccacuccaucgucuccuccuacgucugcuccggccucgucggcgacaccccccgcaagaacgacuccuccuccuccucccacugccucgaccccaacaacgaggagggcggccacggcgucaagggcugggccuucgacgacggcaacgacgucuggaugggccgcaccaucuccgagaagucccgccucggcuacgagaccuucaaggucaucgagggcugguccaaccccaaguccaagcuccagaucaaccgccaggucaucgucgaccgcggcaaccgcuccggcuacuccggcaucuucuccgucgagggcaaguccugcaucaaccgcugcuucuacgucgagcucauccgcggccgcaaggaggagaccgacguccucuggaccuccaacuccaucgucgucuucugcggcaccuccggcaccuacggcaccggcuccuggcccgacggcgccgacaucaaccucaugcccaucuga

SEQ ID NO: 115792 - RNA, 1410 nt, Artificial Sequence; identical to SEQ ID NO: 112635
  derived and/or modified CDS sequence (opt2) from neuraminidase__InfluenzaA__ADM95715

SEQ ID NO: 115793 - RNA, 1410 nt, Artificial Sequence; identical to SEQ ID NO: 115791
  derived and/or modified CDS sequence (opt2) from neuraminidase__InfluenzaA__ADM95716

SEQ ID NO: 115794 - RNA, 1410 nt, Artificial Sequence; identical to SEQ ID NO: 115791
  derived and/or modified CDS sequence (opt2) from neuraminidase__InfluenzaA__ADM95717

SEQ ID NO: 115795 - RNA, 1410 nt, Artificial Sequence; identical to SEQ ID NO: 112635
  derived and/or modified CDS sequence (opt2) from neuraminidase__InfluenzaA__ADM95718

SEQ ID NO: 115796 - RNA, 1410 nt, Artificial Sequence
  derived and/or modified CDS sequence (opt2) from neuraminidase__InfluenzaA__ADM95719
augaaccccaaccagaagaucaucaccaucggcuccgucucccucaccaucuccaccaucugcuucuucaugcagaucgccauccucaucaccaccgucacccuccacuucaagcaguacgaguucaacuccccccccaacaaccaggucaugcucugcgagcccaccaucaucgagcgcaacaucaccgagaucgucuaccucaccaacaccaccaucgagaaggagaucugccccaagcucgccgaguaccgcaacugguccaagccccagugcgacaucaccggcuucgcccccuucuccaaggacaacuccauccgccucuccgccggcggcgacaucugggucacccgcgagcccuacgucuccugcgaccccgacaagugcuaccaguucgcccucggccagggcaccacccucaacaacguccacuccaacaacaccguccgcgaccgcacccccuaccgcacccuccucaugaacgagcucggcguccccuuccaccucggcaccaagcaggucugcaucgccugguccuccuccuccugccacgacggcaaggccuggcuccacgucugcaucaccggcgacgacaagaacgccaccgccuccuucaucuacaacggccgccucgucgacuccgucgucuccugguccaaggagauccuccgcacccaggaguccgagugcgucugcaucaacggcaccugcaccgucgucaugaccgacggcuccgccuccggcaaggccgacaccaagauccucuucaucgaggagggcaagaucguccacaccuccacccucuccggcuccgcccagcacgucgaggagugcuccugcuacccccgcuaccccggcguccgcugcgucugccgcgacaacuggaagggcuccaaccgccccaucgucgacaucaacaucaaggaccacuccaucgucuccuccuacgucugcuccggccucgucggcgacaccccccgcaagaacgacuccuccuccuccucccacugccucgaccccaacaacgaggagggcggccacggcgucaagggcugggccuucgacgacggcaacgacgucuggaugggccgcaccaucuccgagaagucccgcuccggcuacgagaccuucaaggucaucgagggcugguccaaccccaaguccaagcuccagaucaaccgccaggucaucgucgaccgcggcaaccgcuccggcuacuccggcaucuucuccgucgagggcaaguccugcaucaaccgcugcuucuacgucgagcucauccgcggccgcaaggaggagaccgagguccucuggaccuccaacuccaucgucgucuucugcggcaccuccggcaccuacggcaccggcuccuggcccgacggcgccgacaucaaccucaugcccaucuga

SEQ ID NO: 115797 - RNA, 1410 nt, Artificial Sequence; identical to SEQ ID NO: 112635
  derived and/or modified CDS sequence (opt2) from neuraminidase__InfluenzaA__ADM95720

SEQ ID NO: 115798 - RNA, 1410 nt, Artificial Sequence; identical to SEQ ID NO: 112635
  derived and/or modified CDS sequence (opt2) from neuraminidase__InfluenzaA__ADM95721

SEQ ID NO: 115799 - RNA, 1410 nt, Artificial Sequence; identical to SEQ ID NO: 112635
  derived and/or modified CDS sequence (opt2) from neuraminidase__InfluenzaA__ADM95723

SEQ ID NO: 115800 - RNA, 1410 nt, Artificial Sequence
  derived and/or modified CDS sequence (opt2) from neuraminidase__InfluenzaA__ADM95724
augaaccccaaccagaagaucaucaccaucggcuccgucucccucaccaucuccaccaucugcuucuucaugcagaucgccauccucaucaccaccgucacccuccacuucaagcaguacgaguucaacuccccccccaacaaccaggucaugcucugcgagcccaccaucaucgagcgcaacaucaccgagaucgucuaccucaccaacaccaccaucgagaaggagaucugccccaagcucgccgaguaccgcaacugguccaagccccagugcgacaucaccggcuucgcccccuucuccaaggacaacuccauccgccucuccgccggcggcgacaucugggucacccgcgagcccuacgucuccugcgaccccgacaagugcuaccaguucgcccucggccagggcaccacccucaacaacguccacuccaacaacaccguccgcgaccgcacccccuaccgcacccuccucaugaacgagcucggcguccccuuccaccucggcaccaagcaggucugcaucgccugguccuccuccuccugccacgacggcaaggccuggcuccacgucugcaucaccggcgacgacaagaacgccaccgccuccuucaucuacaacggccgccucgucgacuccgucgucuccugguccaaggagauccuccgcacccaggaguccgagugcgucugcaucaacggcaccugcaccgucgucaugaccgacggcuccgccuccggcaaggccgacaccaagauccucuucaucgaggagggcaagaucguccacaccuccacccucuccggcuccgcccagcacgucgaggagugcuccugcuacccccgcuaccccggcguccgcugcgucugccgcgacaacuggaagggcuccaaccgccccaucgucgacaucaacaucaaggaccacuccaucgucuccuccuacgucugcuccggccucgucggcgacaccccccgcaagaacgacuccuccuccuccucccacugccucgaccccaacaacgaggagggcggccacggcgucaagggcugggccuucgacgacggcaacgacgucuggaugggccgcaccaucuccgagaagucccgccucggcuacgagaccuucaaggucaucgagggcugguccaaccccaacuccaagcuccagaucaaccgccaggucaucgucgaccgcggcaaccgcuccggcuacuccggcaucuucuccgucgagggcaaguccugcaucaaccgcugcuucuacgucgagcucauccgcggccgcaaggaggagaccgagguccucuggaccuccaacuccaucgucgucuucugcggcaccuccggcaccuacggcaccggcuccuggcccgacggcgccgacaucaaccucaugcccaucuga

SEQ ID NO: 115801 - RNA, 1410 nt, Artificial Sequence
  derived and/or modified CDS sequence (opt2) from neuraminidase__InfluenzaA__ADM95725
augaaccccaaccagaagaucaucaccaucggcuccgucucccucaccaucuccaccaucugcuucuucaugcagaucgccauccucaucaccaccgucacccuccacuucaagcaguacgaguucaaccccccccccaacaaccaggucaugcucugcgagcccaccaucaucgagcgcaacaucaccgagaucgucuaccucaccaacaccaccaucgagaaggaggucugccccaagcucgccgaguaccgcaacugguccaagccccagugcgacaucaccggcuucgcccccuucuccaaggacaacuccauccgccucuccgccggcggcgacaucugggucacccgcgagcccuacgucuccugcgaccccgacaagugcuaccaguucgcccucggccagggcaccacccucaacaacguccacuccaacaacaccguccgcgaccgcacccccuaccgcacccuccucaugaacgagcucggcguccccuuccaccucggcaccaagcaggucugcaucgccugguccuccuccuccugccacgacggcaaggccuggcuccacgucugcaucaccggcgacgacaagaacgccaccgccuccuucaucuacaacggccgccucgucgacuccgucgucuccugguccaaggagauccuccgcacccaggaguccgagugcgucugcaucaacggcaccugcaccgucgucaucaccgacggcuccgccuccggcaaggccgacaccaagauccucuucaucgaggagggcaagaucguccacaccuccacccucuccggcuccgcccagcacgucgaggagugcuccugcuacccccgcuaccccggcguccgcugcgucugccgcgacaacuggaagggcuccaaccgccccaucgucgacaucaacaucaaggaccacuccaucgucuccuccuacgucugcuccggccucgucggcgacaccccccgcaagaacgacuccuccuccuccucccacugccucgaccccaacaacgaggagggcggccacggcgucaagggcugggccuucgacgacggcaacgacgucuggaugggccgcaccaucuccgagaagucccgccucggcuacgagaccuucaaggucaucgagggcugguccaaccccaaguccaagcuccagaucaaccgccaggucaucgucgaccgcggcaaccgcuccggcuacuccggcaucuucuccgucgagggcaaguccugcaucaaccgcugcuucuacgucgagcucauccgcggccgcaaggaggagaccgacguccucuggaccuccaacuccaucgucgucuucugcggcaccuccggcaccuacggcaccggcuccuggcccgacggcgccgacaucaaccucaugcccaucuga

SEQ ID NO: 115802 - RNA, 1410 nt, Artificial Sequence
  derived and/or modified CDS sequence (opt2) from neuraminidase__InfluenzaA__ADM95726
augaaccccaaccagaagaucaucaccaucggcuccgucucccucaccaucuccaccaucugcuucuucaugcagaucgccauccucaucaccgccgucacccuccacuucaagcaguacgaguucaacuccccccccaacaaccaggucaugcucugcgagcccaccaucaucgagcgcaacaucaccgagaucgucuaccucaccaacaccaccaucgagaaggagaucugccccaagcucgccgaguaccgcaacugguccaagccccagugcgacaucaccggcuucgcccccuucuccaaggacaacuccauccgccucuccgccggcggcgacaucugggucacccgcgagcccuacgucuccugcgaccccgacaagugcuaccaguucgcccucggccagggcaccacccucaacaacguccacuccaacaacaccguccgcgaccgcacccccuaccgcacccuccucaugaacgagcucggcguccccuuccaccucggcaccaagcaggucugcaucgccugguccuccuccuccugccacgacggcaaggccuggcuccacgucugcaucaccggcgacgacaagaacgccaccgccuccuucaucuacaacggccgccucgucgacuccgucgucuccugguccaaggagauccuccgcacccaggaguccgagugcgucugcaucaacggcaccugcaccgucgucaugaccgacggcuccgccuccggcaaggccgacaccaagauccucuucaucgaggagggcaagaucguccacaccuccacccucuccggcuccgcccagcacgucgaggagugcuccugcuacccccgcuaccccggcguccgcugcgucugccgcgacaacuggaagggcuccaaccgccccaucgucgacaucaacaucaaggaccacuccaucgucuccuccuacgucugcuccggccucgucggcgacaccccccgcaagaacgacuccuccuccuccucccacugccucgaccccaacaacgaggagggcggccacggcgucaagggcugggccuucgacgacggcaacgacgucuggaugggccgcaccaucuccgagaagucccgccucggcuacgagaccuucaaggucaucgagggcugguccaaccccaaguccaagcuccagaucaaccgccaggucaucgucgaccgcggcaaccgcuccggcuacuccggcaucuucuccgucgagggcaaguccugcaucaaccgcugcuucuacgucgagcucauccgcggccgcaaggaggagaccgacguccucuggaccuccaacuccaucgucgucuucugcggcaccuccggcaccuacggcaccggcuccuggcccgacggcgccgacaucaaccucaugcccaucuga

SEQ ID NO: 115803 - RNA, 1410 nt, Artificial Sequence; identical to SEQ ID NO: 112635
  derived and/or modified CDS sequence (opt2) from neuraminidase__InfluenzaA__ADM95727

SEQ ID NO: 115804 - RNA, 1410 nt, Artificial Sequence
  derived and/or modified CDS sequence (opt2) from neuraminidase__InfluenzaA__ADM95728
augaaccccaaccagaagaucaucaccaucggcuccgucucccucaccaucuccaccaucugcuucuucaugcagaucgccauccucaucaccaccgucacccuccacuucaagcaguacgaguucaacuccccccccaacaaccaggucaugcucugcgagcccaccaucaucgagcgcaacaucaccgagaucgucuaccucaccaacaccaccaucgagaaggagaucugccccgagcucgccgaguaccgcaacugguccaagccccagugcgacaucaccggcuucgcccccuucuccaaggacaacuccauccgccucuccgccggcggcgacaucugggucacccgcgagcccuacgucuccugcgaccccgacaagugcuaccaguucgcccucggccagggcaccacccucaacaacguccacuccaacaacaccguccgcgaccgcacccccuaccgcacccuccucaugaacgagcucggcguccccuuccaccucggcaccaagcaggucugcaucgccugguccuccuccuccugccacgacggcaaggccuggcuccacgucugcaucaccggcgacgacaagaacgccaccgccuccuucaucuacaacggccgccucgucgacuccgucgucuccugguccaaggagauccuccgcacccaggaguccgagugcgucugcaucaacggcaccugcaccgucgucaugaccgacggcuccgccuccggcaaggccgacaccaagauccucuucaucgaggagggcaagaucguccacaccuccacccucuccggcuccgcccagcacgucgaggagugcuccugcuacccccgcuaccccggcguccgcugcgucugccgcgacaacuggaagggcuccaaccgccccaucgucgacaucaacaucaaggaccacuccaucgucuccuccuacgucugcuccggccucgucggcgacaccccccgcaagaacgacuccuccuccuccucccacugccucgaccccaacaacgaggagggcggccacggcgucaagggcugggccuucgacgacggcaacgacgucuggaugggccgcaccaucuccgagaagucccgccucggcuacgagaccuucaaggucaucgagggcugguccaaccccaaguccaagcuccagaucaaccgccaggucaucgucgaccgcggcaaccgcuccggcuacuccggcaucuucuccgucgagggcaaguccugcaucaaccgcugcuucuacgucgagcucauccgcggccgcaaggaggagaccgagguccucuggaccuccaacuccaucgucgucuucugcggcaccuccggcaccuacggcaccggcuccuggcccgacggcgccgacaucaaccucaugcccaucuga

SEQ ID NO: 115805 - RNA, 1410 nt, Artificial Sequence
  derived and/or modified CDS sequence (opt2) from neuraminidase__InfluenzaA__ADM95729
augaaccccaaccagaagaucaucaccaucggcuccgucucccucaccaucuccaccaucugcuucuucaugcagaucgccauccucaucaccaccgucacccuccacuucaagcaguacgaguucaacuccccccccaacaaccaggucaugcucugcgagcccaccaucaucgagcgcaacaucaccgagaucgucuaccucaccaacaccaccaucgagaaggagaucugccccaagcucgccgaguaccgcaacugguccaagccccagugcgacaucaccggcuucgcccccuucuccaaggacaacuccauccgccucuccgccggcggcgacaucugggucacccgcgagcccuacgucuccugcgaccccgacaagugcuaccaguucgcccucggccagggcaccacccucaacaacguccacuccaacaacaccguccgcgaccgcacccccuaccgcacccuccucaugaacgagcucggcguccccuuccaccucggcaccaagcaggucugcaucgccugguccuccuccuccugccacgacggcaaggccuggcuccacgucugcaucaccggcgacgacaagaacgccaccgccuccuucaucuacaacggccgccucgucgacuccgucgucuccugguccaaggagauccuccgcacccaggaguccgagugcgucugcaucaacggcaccugcaccgucgucaugaccgacggcuccgccuccggcaaggccgacaccaagauccucuucaucgaggagggcaagaucguccacaccuccacccucuccggcuccgcccagcacgucgaggagugcuccugcuacccccgcuaccccggcguccgcugcgucugccgcgacaacuggaagggcuccaaccgccccaucgucgacaucaacaucaaggaccacuccaucgucuccuccuacgucugcuccggccucgucggcgacaccccccgcaagaacgacuccuccucccgcucccacugccucgaccccaacaacgaggagggcggccacggcgucaagggcugggccuucgacgacggcaacgacgucuggaugggccgcaccaucuccgagaagucccgccucggcuacgagaccuucaaggucaucgagggcugguccaaccccaaguccaagcuccagaucaaccgccaggucaucgucgaccgcggcaaccgcuccggcuacuccggcaucuucuccgucgagggcaaguccugcaucaaccgcugcuucuacgucgagcucauccgcggccgcaaggaggagaccgagguccucuggaccuccaacuccaucgucgucuucugcggcaccuccggcaccuacggcaccggcuccuggcccgacggcgccgacaucaaccucaugcccaucuga

SEQ ID NO: 115806 - RNA, 1410 nt, Artificial Sequence
  derived and/or modified CDS sequence (opt2) from neuraminidase__InfluenzaA__ADM95730
augaaccccaaccagaagaucaucaccaucggcuccgucucccucaccaucuccaccaucugcuucuucaugcagaucgccauccucaucaccaccgucacccuccacuucaagcaguacgaguucaacuccccccccuccaaccaggucaugcucugcgagcccaccaucaucgagcgcaacaucaccgagaucgucuaccucaccaacaccaccaucgagaaggagaucugccccaagcucgccgaguaccgcaacugguccaagccccagugcgacaucaccggcuucgcccccuucuccaaggacaacuccauccgccucuccgccggcggcgacaucugggucacccgcgagcccuacgucuccugcgaccccgacaagugcuaccaguucgcccucggccagggcaccacccucaacaacguccacuccaacaacaccguccgcgaccgcacccccuaccgcacccuccucaugaacgagcucggcguccccuuccaccucggcaccaagcaggucugcaucgccugguccuccuccuccugccacgacggcaaggccuggcuccacgucugcaucaccggcgacgacaagaacgccaccgccuccuucaucuacaacggccgccucgucgacuccgucgucuccugguccaaggagauccuccgcacccaggaguccgagugcgucugcaucaacggcaccugcaccgucgucaugaccgacggcuccgccuccggcaaggccgacaccaagauccucuucaucgaggagggcaagaucguccacaccuccacccucuccggcuccgcccagcacgucgaggagugcuccugcuacccccgcuaccccggcguccgcugcgucugccgcgacaacuggaagggcuccaaccgccccaucgucgacaucaacaucaaggaccacuccaucgucuccuccuacgucugcuccggccucgucggcgacaccccccgcaagaacgacuccuccuccuccucccacugccucgaccccaacaacgaggagggcggccacggcgucaagggcugggccuucgacgacggcaacgacgucuggaugggccgcaccaucuccgagaagucccgccucggcuacgagaccuucaaggucaucgagggcugguccaaccccaaguccaagcuccagaucaaccgccaggucaucgucgaccgcggcaaccgcuccggcuacuccggcaucuucuccgucgagggcaaguccugcaucaaccgcugcuucuacgucgagcucauccgcggccgcaaggaggagaccgagguccucuggaccuccaacuccaucgucgucuucugcggcaccuccggcaccuacggcaccggcuccuggcccgacggcgccgacaucaaccucaugcccaucuga

SEQ ID NO: 115807 - RNA, 1410 nt, Artificial Sequence
  derived and/or modified CDS sequence (opt2) from neuraminidase__InfluenzaA__ADM95732
augaaccccaaccagaagaucaucaccaucggcuccgucucccucaccaucuccaccaucugcuucuucaugcagaucgccauccucaucaccaccgucacccuccacuucaagcaguacgaguucaacuccccccccaacaaccaggucaugcucugcgagcccaccaucaucgagcgcaacaucaccgagaucgucuaccucaccaacaccaccaucgagaaggagaucugccccaagcucgccgaguaccgcaacugguccaagccccagugcgacaucaccggcuucgcccccuucuccaaggacaacuccauccgccucuccgccggcggcgacaucugggucacccgcgagcccuacgucuccugcgaccccgacaagugcuaccaguucgcccucggccagggcaccacccucaacaacguccacuccaacgacaccguccgcgaccgcacccccuaccgcacccuccucaugaacgagcucggcguccccuuccaccucggcaccaagcaggucugcaucgccugguccuccuccuccugccacgacggcaaggccuggcuccacgucugcaucaccggcgacgacaagaacgccaccgccuccuucaucuacaacggccgccucgucgacuccaucgucuccugguccaaggagauccuccgcacccaggaguccgagugcgucugcaucaacggcaccugcaccgucgucaugaccgacggcuccgccuccggcaaggccgacaccaagauccucuucaucgaggagggcaagaucguccacaccuccacccucuccggcuccgcccagcacgucgaggagugcuccugcuacccccgcuaccccggcguccgcugcgucugccgcgacaacuggaagggcuccaaccgccccaucgucgacaucaacaucaaggaccgcuccaucgucuccuccuacgucugcuccggccucgucggcgacaccccccgcaagaacgacuccuccuccuccucccacugccucgaccccaacaacgaggagggcggccacggcgucaagggcugggccuucgacgacggcaacgacgucuggaugggccgcaccaucuccgagaagucccgccucggcuacgagaccuucaaggucaucgagggcugguccaaccacaaguccaagcuccagaucaaccgccaggucaucgucgaccgcggcaaccgcuccggcuacuccggcaucuucuccgucgagggcaaguccugcaucaaccgcugcuucuacgucgagcucauccgcggccgcaaggaggagaccgagguccucuggaccuccaacuccaucgucgucuucugcggcaccuccggcaccuacggcaccggcuccuggcccgacggcgccgacaucaaccucaugcccaucuga

SEQ ID NO: 115808 - RNA, 1410 nt, Artificial Sequence; identical to SEQ ID NO: 112635
  derived and/or modified CDS sequence (opt2) from neuraminidase__InfluenzaA__ADM95733

SEQ ID NO: 115809 - RNA, 1410 nt, Artificial Sequence; identical to SEQ ID NO: 112635
  derived and/or modified CDS sequence (opt2) from neuraminidase__InfluenzaA__ADM95734

SEQ ID NO: 115810 - RNA, 1410 nt, Artificial Sequence; identical to SEQ ID NO: 112635
  derived and/or modified CDS sequence (opt2) from neuraminidase__InfluenzaA__ADM95735

SEQ ID NO: 115811 - RNA, 1410 nt, Artificial Sequence; identical to SEQ ID NO: 112635
  derived and/or modified CDS sequence (opt2) from neuraminidase__InfluenzaA__ADM95736

SEQ ID NO: 115812 - RNA, 1410 nt, Artificial Sequence
  derived and/or modified CDS sequence (opt2) from neuraminidase__InfluenzaA__ADM95737
augaaccccaaccagaagaucaucaccaucggcuccgucucccucaccaucuccaccaucugcuucuucaugcagaucgccauccucaucaccaccgucacccuccacuucaagcaguacgaguucaacuccccccccaacaaccaggucaugcucugcgagcccaccaucaucgagcgcaacaucaccgagaucgucuaccucaccaacaccaccaucgagaaggagaucugccccaagcucgccgaguaccgcaacugguccaagccccagugcgacaucaccggcuucgcccccuucuccaaggacaacuccauccgccucuccgccggcggcgacaucugggucacccgcgagcccuacgucuccugcgaccccgacaagugcuaccaguucgcccucggccagggcaccacccucaacaacguccacuccaacaacaccguccgcgaccgcacccccuaccgcacccuccucaugaacgagcucggcguccccuuccaccucggcaccaagcaggucugcaucgccugguccuccuccuccugccacgacggcaaggccuggcuccacgucugcaucaccggcgacgacaagaacgccaccgccuccuucaucuacaacggccgccucgucgacuccgucgucuccugguccaaggagauccuccgcacccaggaguccgagugcgucugcaucaacggcaccugcaccgucgucaugaccgacggcuccgccuccggccgcgccgacaccaagauccucuucaucgaggagggcaagaucguccacaccuccacccucuccggcuccgcccagcacgucgaggagugcuccugcuacccccgcuaccccggcguccgcugcgucugccgcgacaacuggaagggcuccaaccgccccaucgucgacaucaacaucaaggaccacuccaucgucuccuccuacgucugcuccggccucgucggcgacaccccccgcaagaacgacuccuccuccuccucccacugccucgaccccaacaacgaggagggcggccacggcgucaagggcugggccuucgacgacggcaacgacgucuggaugggccgcaccaucuccgagaagucccgccucggcuacgagaccuucaaggucaucgagggcugguccaaccccaaguccaagcuccagaucaaccgccaggucaucgucgaccgcggcaaccgcuccggcuacuccggcaucuucuccgucgagggcaaguccugcaucaaccgcugcuucuacgucgagcucauccgcggccgcaaggaggagaccgacguccucuggaccuccaacuccaucgucgucuucugcggcaccuccggcaccuacggcaccggcuccuggcccgacggcgccgacaucaaccucaugcccaucuga

SEQ ID NO: 115813 - RNA, 1410 nt, Artificial Sequence; identical to SEQ ID NO: 112635
  derived and/or modified CDS sequence (opt2) from neuraminidase__InfluenzaA__ADM95738

SEQ ID NO: 115814 - RNA, 1410 nt, Artificial Sequence; identical to SEQ ID NO: 112635
  derived and/or modified CDS sequence (opt2) from neuraminidase__InfluenzaA__ADM95739

SEQ ID NO: 115815 - RNA, 1410 nt, Artificial Sequence
  derived and/or modified CDS sequence (opt2) from neuraminidase__InfluenzaA__ADM95740
augaaccccaaccagaagaucaucaccaucggcuccgucucccucaccaucuccaccaucugcuucuucaugcagaucgccauccucaucaccaccgucacccuccacuucaagcaguacgaguucaacuccccccccaacaaccaggucaugcucugcgagcccaccaucaucgagcgcaacaucaccgagaucgucuaccucaccaacaccaccaucgagaaggagaucugccccaagcucgccgaguaccgcaacugguccaagccccagugcgacaucaccggcuucgcccccuucuccaaggacaacuccauccgccucuccgccggcggcgacaucugggucacccgcgagcccuacgucuccugcgaccccgacaagugcuaccaguucgcccucggccagggcaccacccucaacaacguccacuccaacaacaccguccgcgaccgcacccccuaccgcacccuccucaugaacgagcucggcguccccuuccaccucggcaccaagcaggucugcaucgccugguccuccuccuccugccacgacggcaaggccuggcuccacgucugcaucaccggcgacgacaagaacgccaccgccuccuucaucuacaacggccgccucgucgacuccgucgucuccugguccaaggagauccuccgcacccaggaguccgagugcgucugcaucaacggcaccugcaccgucgucaugaccgacggcuccgccuccggcaaggccgacaccaagauccucuucaucgaggagggcaagaucguccacaccuccacccucuccggcuccgcccagcacgucgaggagugcuccugcuacccccgcuaccccggcguccgcugcgucugccgcgacaacuggaagggcuccaaccgccccaucgucgacaucaacaucaaggaccacuccaucgucuccuccuacgucugcuccggccucgucggcgacaccccccgcaagaacgacuccuccuccuccucccacugccucgaccccaacgacgaggagggcggccacggcgucaagggcugggccuucgacgacggcaacgacgucuggaugggccgcaccaucuccgagaagucccgccucggcuacgagaccuucaaggucaucgagggcugguccaaccccaaguccaagcuccagaucaaccgccaggucaucgucgaccgcggcaaccgcuccggcuacuccggcaucuucuccgucgagggcaaguccugcaucaaccgcugcuucuacgucgagcucauccgcggccgcaaggaggagaccaagguccucuggaccuccaacuccaucgucgucuucugcggcaccuccggcaccuacggcaccggcuccuggcccgacggcgccgacaucaaccucaugcccaucuga

SEQ ID NO: 115816 - RNA, 1410 nt, Artificial Sequence; identical to SEQ ID NO: 115791
  derived and/or modified CDS sequence (opt2) from neuraminidase__InfluenzaA__ADM95741

SEQ ID NO: 115817 - RNA, 1410 nt, Artificial Sequence; identical to SEQ ID NO: 112635
  derived and/or modified CDS sequence (opt2) from neuraminidase__InfluenzaA__ADM95742

SEQ ID NO: 115818 - RNA, 1410 nt, Artificial Sequence
  derived and/or modified CDS sequence (opt2) from neuraminidase__InfluenzaA__ADM95743
augaaccccaaccagaagaucaucaccaucggcuccgucucccucaccaucuccaccaucugcuucuucaugcagaucgccauccucaucaccaccgucacccuccacuucaagcaguacgaguucaacuccucccccaacaaccaggucaugcucugcgagcccaccaucaucgagcgcaacaucaccgagaucgucuaccucaccaacaccaccaucgagaaggagaucugccccaagcucgccgaguaccgcaacugguccaagccccagugcgacaucaccggcuucgcccccuucuccaaggacaacuccauccgccucuccgccggcggcgacaucugggucacccgcgagcccuacgucuccugcgaccccgacaagugcuaccaguucgcccucggccagggcaccacccucaacaacguccacuccaacaacaccguccgcgaccgcacccccuaccgcacccuccucaugaacgagcucggcguccccuuccaccucggcaccaagcaggucugcaucgccugguccuccuccuccugccacgacggcaaggccuggcuccacgucugcaucaccggcgacgacaagaacgccaccgccuccuucaucuacaacggccgccucgucgacuccgucgucuccugguccaaggagauccuccgcacccaggaguccgagugcgucugcaucaacggcaccugcaccgucgucaugaccgacggcuccgccuccggcaaggccgacaccaagauccucuucaucgaggagggcaagaucguccacaccuccacccucuccggcuccgcccagcacgucgaggagugcuccugcuacccccgcuaccccggcguccgcugcgucugccgcgacaacuggaagggcuccaaccgccccaucgucgacaucaacaucaaggaccacuccaucgucuccuccuacgucugcuccggccucgucggcgacaccccccgcaagaacgacuccuccuccuccucccacugccucgaccccaacaacgaggagggcggccacggcgucaagggcugggccuucgacgacggcaacgacgucuggaugggccgcaccaucuccgagaagucccgccucggcuacgagaccuucaaggucaucgagggcugguccaaccccaaguccaagcuccagaucaaccgccaggucaucgucgaccgcggcaaccgcuccggcuacuccggcaucuucuccgucgagggcaaguccugcaucaaccgcugcuucuacgucgagcucauccgcggccgcaaggaggagaccgagguccucuggaccuccaacuccaucgucgucuucugcggcaccuccggcaccuacggcaccggcuccuggcccgacggcgccgacaucaaccucaugcccaucuga

SEQ ID NO: 115819 - RNA, 1410 nt, Artificial Sequence; identical to SEQ ID NO: 112635
  derived and/or modified CDS sequence (opt2) from neuraminidase__InfluenzaA__ADM95744

SEQ ID NO: 115820 - RNA, 1410 nt, Artificial Sequence; identical to SEQ ID NO: 112774
  derived and/or modified CDS sequence (opt2) from neuraminidase__InfluenzaA__ADN05229

SEQ ID NO: 115821 - RNA, 1413 nt, Artificial Sequence; identical to SEQ ID NO: 113497
  derived and/or modified CDS sequence (opt2) from neuraminidase__InfluenzaA__ADN06292

SEQ ID NO: 115822 - RNA, 1413 nt, Artificial Sequence; identical to SEQ ID NO: 114966
  derived and/or modified CDS sequence (opt2) from neuraminidase__InfluenzaA__ADN06303

SEQ ID NO: 115823 - RNA, 1413 nt, Artificial Sequence
  derived and/or modified CDS sequence (opt2) from neuraminidase__InfluenzaA__ADN06314
augaaccccaaccagaagaucaucaccaucggcuccaucuccaucgccaucggcaucaucucccucaugcuccagaucggcaacaucaucuccaucugggccucccacuccauccagaccggcucccagaacaacaccggcaucugcaaccagcgcaucaucaccuacgagaacuccaccugggucaaccacaccuacgucaacaucaacaacaccaacgucgucgccggcgaggacaagaccuccgucacccucgccggcaacuccucccucugcuccaucuccggcugggccaucuacaccaaggacaacuccauccgcaucggcuccaagggcgaggucuucgucauccgcgagcccuucaucuccugcucccaccucgagugccgcaccuucuuccucacccagggcgcccuccucaacgacaagcacuccaacggcaccgucaaggaccgcucccccuaccgcgcccucauguccugcccccucggcgaggcccccucccccuacaacuccaaguucgaguccgucgccugguccgccuccgccugccacgacggcaugggcuggcucaccaucggcaucuccggccccgacaacggcgccgucgccguccucaaguacaacggcaucaucaccggcaccaucaaguccuggaagaagcagauccuccgcacccaggaguccgagugcgucugcaugaacggcuccugcuucaccaucaugaccgacggccccuccaacaaggccgccuccuacaagaucuucaagaucgagaagggcaaggucaccaaguccaucgagcucaacgcccccaacuucuacuacgaggagugcuccugcuaccccgacaccggcaucgucaugugcgucugccgcgacaacuggcacggcuccaaccgccccugggucuccuucaaccagaaccucgacuaccagaucggcuacaucugcuccggcgucuucggcgacaacccccgccccgaggacggcgagggcuccugcaaccccgucaccgucgacggcgccaacggcgucaagggcuucuccuacaaguacggcaacggcgucuggaucggccgcaccaaguccaaccgccuccgcaagggcuucgagaugaucugggaccccaacggcuggaccaacaccgacuccgacuucuccgucaagcaggacgucgucgccaucaccgacugguccggcuacuccggcuccuucguccagcaccccgagcucaccggccucgacugcauccgccccugcuucugggucgagcucguccgcggccucccccgcgagaacaccaccaucuggaccuccggcuccuccaucuccuucugcggcgucaacggcgacaccgccaacugguccuggcccgacggcgccgagcuccccuucaccaucgacaaguga

SEQ ID NO: 115824 - RNA, 1413 nt, Artificial Sequence; identical to SEQ ID NO: 114966
  derived and/or modified CDS sequence (opt2) from neuraminidase__InfluenzaA__ADN06325

SEQ ID NO: 115825 - RNA, 1413 nt, Artificial Sequence
  derived and/or modified CDS sequence (opt2) from neuraminidase__InfluenzaA__ADN06347
augaaccccaaccagaagaucaucaccaucggcuccaucuccaucgccaucggcaucaucucccucaugcuccagaucggcaacaucaucuccaucugggccucccacuccauccagaccgagucccagaacaacaccggcaucugcaaccagcgcaucaucaccuacgagaacuccaccugggucaaccacaccuacgucaacaucaacaacaccaacgucgucgccggcgaggacaagaccuccgucacccucgccggcaacuccucccucugcuccaucuccggcugggccaucuacaccaaggacaacuccauccgcaucggcuccaagggcgacgucuucgucauccgcgagcccuucaucuccugcucccaccucgagugccgcaccuucuuccucacccagggcgcccuccucaacgacaagcacuccaacggcaccgucaaggaccgcucccccuaccgcgcccucauguccugcccccucggcgaggcccccucccccuacaacuccaaguucgaguccgucgccugguccgccuccgccugccacgacggcaugggcuggcucaccaucggcaucuccggccccgacaacggcgccgucgccguccucaaguacaacggcaucaucaccggcaccaucaaguccuggaagaagcagauccuccgcacccaggaguccgagugcgucugcaugaacggcuccugcuucaccaucaugaccgacggccccuccaacaaggccgccuccuacaagaucuucaagaucgagaagggcaaggucaccaaguccaucgagcucaacgcccccaacuucuacuacgaggagugcuccugcuaccccgacaccggcaucgucaugugcgucugccgcgacaacuggcacggcuccaaccgccccugggucuccuucaaccagaaccucgacuaccagaugggcuacaucugcuccggcgucuucggcgacaacccccgccccgaggacggcgagggcuccugcaaccccgucaacgucgacggcgccaacggcgucaagggcuucuccuacaaguacggcaacggcgucuggaucggccgcaccaaguccaaccgccuccgcaagggcuucgagaugaucugggaccccaacggcuggaccaacaccgacuccgacuucuccgucaagcaggacgucgucgccaucaccgacugguccggcuacuccggcuccuucguccagcaccccgagcucaccggccucgacugcauccgccccugcuucugggucgagcucguccgcggccucccccgcgagaacaccaccaucuggaccuccggcuccuccaucuccuucugcggcgucaacuccgacaccgccaacugguccuggcccgacggcgccgagcuccccuucaccaucgacaaguga

SEQ ID NO: 115826 - RNA, 1410 nt, Artificial Sequence; identical to SEQ ID NO: 115446
  derived and/or modified CDS sequence (opt2) from neuraminidase__InfluenzaA__ADN06369

SEQ ID NO: 115827 - RNA, 1410 nt, Artificial Sequence; identical to SEQ ID NO: 112774
  derived and/or modified CDS sequence (opt2) from neuraminidase__InfluenzaA__ADN26031

SEQ ID NO: 115828 - RNA, 1410 nt, Artificial Sequence; identical to SEQ ID NO: 112774
  derived and/or modified CDS sequence (opt2) from neuraminidase__InfluenzaA__ADN26032

SEQ ID NO: 115829 - RNA, 1410 nt, Artificial Sequence; identical to SEQ ID NO: 112774
  derived and/or modified CDS sequence (opt2) from neuraminidase__InfluenzaA__ADN26033

SEQ ID NO: 115830 - RNA, 1410 nt, Artificial Sequence; identical to SEQ ID NO: 112774
  derived and/or modified CDS sequence (opt2) from neuraminidase__InfluenzaA__ADN26034

SEQ ID NO: 115831 - RNA, 1410 nt, Artificial Sequence; identical to SEQ ID NO: 112774
  derived and/or modified CDS sequence (opt2) from neuraminidase__InfluenzaA__ADN26035

SEQ ID NO: 115832 - RNA, 1410 nt, Artificial Sequence; identical to SEQ ID NO: 112774
  derived and/or modified CDS sequence (opt2) from neuraminidase__InfluenzaA__ADN26036

SEQ ID NO: 115833 - RNA, 1410 nt, Artificial Sequence
  derived and/or modified CDS sequence (opt2) from neuraminidase__InfluenzaA__ADN26037
augaaccccaaccagaagaucaucaccaucggcuccgucugcaugaccaucggcauggccaaccucauccuccagaucggcaacaucaucuccaucuggaucucccacuccauccagcucggcaaccagaaccagaucgagaccugcaaccaguccgucaucaccuacgagaacaacaccugggucaaccagaccuacgucaacaucuccaacaccaacuucgccgccggccaguccgucgucuccgucaagcucgccggcaacuccucccucugccccgucuccggcugggccaucuacuccaaggacaacuccguccgcaucggcuccaagggcgacgucuucgucauccgcgagcccuucaucuccugcuccccccucgagugccgcaccuucuuccucacccagggcgcccuccucaacgacaagcacuccaacggcaccaucaaggaccgcucccccuaccgcacccucauguccugccccaucggcgagguccccucccccuacaacucccgcuucgaguccgucgccugguccgccuccgccugccacgacggcaucaacuggcucaccaucggcaucuccggccccgacaacggcgccgucgccguccucaaguacaacggcaucaucaccgacaccaucaaguccuggcgcaacaacauccuccgcacccaggaguccgagugcgccugcgucaacggcuccugcuucaccgucaugaccgacggccccuccaacggccaggccuccuacaagaucuuccgcaucgagaagggcaagaucgucaaguccgucgagaugaacgcccccaacuaccacuacgaggagugcuccugcuaccccgacuccuccgagaucaccugcgucugccgcgacaacuggcacggcuccaaccgccccugggucuccuucaaccagaaccucgaguaccagaucggcuacaucugcuccggcaucuucggcgacaacccccgccccaucgacaagaccggcuccugcggccccgucuccuccaacggcgccaacggcgucaagggcuucuccuucaaguacggcaacggcgucuggaucggccgcaccaaguccaucuccucccgcaacggcuucgagaugaucugggaccccaacggcuggaccggcaccgacaacaacuucuccaucaagcaggacaucgucggcaucaacgagugguccggcuacuccggcuccuucguccagcaccccgagcucaccggccucgacugcauccgccccugcuucugggucgagcucauccgcggccgccccaaggagaacaccaucuggaccuccggcuccuccaucuccuucugcggcgucaacuccgacaccgucggcugguccuggcccgacggcgccgagcuccccuucaccaucgacaaguga

SEQ ID NO: 115834 - RNA, 1410 nt, Artificial Sequence; identical to SEQ ID NO: 112774
  derived and/or modified CDS sequence (opt2) from neuraminidase__InfluenzaA__ADN26038

SEQ ID NO: 115835 - RNA, 1410 nt, Artificial Sequence; identical to SEQ ID NO: 112774
  derived and/or modified CDS sequence (opt2) from neuraminidase__InfluenzaA__ADN26041

SEQ ID NO: 115836 - RNA, 1410 nt, Artificial Sequence; identical to SEQ ID NO: 112774
  derived and/or modified CDS sequence (opt2) from neuraminidase__InfluenzaA__ADN26042

SEQ ID NO: 115837 - RNA, 1410 nt, Artificial Sequence
  derived and/or modified CDS sequence (opt2) from neuraminidase__InfluenzaA__ADN26043
augaaccccaaccagaagaucaucaccaucggcuccgucugcaugaccaucggcauggccaaccucauccuccagaucggcaacaucaucuccaucuggaucucccacuccauccagcucggcaaccagaaccagaucgagaccugcaaccaguccgucaucaccuacgagaacaacaccugggucaaccagaccuacgucaacaucuccaacaccaacuucgccgccggccaguccgucgucuccgucaagcucgccggcaacuccucccucugccccgucuccggcugggccaucuacuccaaggacaacuccauccgcaucggcuccaagggcgacgucuucgucauccgcgagcccuucaucuccugcuccccccucgagugccgcaccuucuuccucacccagggcgcccuccucaacgacaagcacuccaacggcaccaucaaggaccgcucccccuaccgcacccucauguccugccccaucggcgagguccccucccccuacaacucccgcuucgaguccgucgccugguccgccuccgccugccacgacggcaucaacuggcucaccaucggcaucuccggccccgacaacggcgccgucgccguccucaaguacaacggcaucaucaccgacaccaucaaguccuggcgcaacaacauccuccgcacccaggaguccgagugcgccugcgucaacggcuccugcuucaccgucaugaccgacggccccuccgacggccaggccuccuacaagaucuuccgcaucgagaagggcaagaucgucaaguccgucgagaugaacgcccccaacuaccacuacgaggagugcuccugcuaccccgacuccuccgagaucaccugcgucugccgcgacaacuggcacggcuccaaccgccccugggucuccuucaaccagaaccucgaguaccaggucggcuacaucugcuccggcaucuucggcgacaacccccgccccaacgacaagaccggcuccugcggccccgucuccuccaacggcgccaacggcgucaagggcuucuccuucaaguacggcaacggcgucuggaucggccgcaccaaguccaucuccucccgcaacggcuucgagaugaucugggaccccaacggcuggaccggcaccgacaacaacuucuccaucaagcaggacaucgucggcaucaacgagugguccggcuacuccggcuccuucguccagcaccccgagcucaccggccucgacugcauccgccccugcuucugggucgagcucauccgcggccgccccaaggagaacaccaucuggaccuccggcuccuccaucuccuucugcggcgucaacuccgacaccgucggcugguccuggcccgacggcgccgagcuccccuucaccaucgacaaguga

SEQ ID NO: 115838 - RNA, 1410 nt, Artificial Sequence; identical to SEQ ID NO: 112774
  derived and/or modified CDS sequence (opt2) from neuraminidase__InfluenzaA__ADN26044

SEQ ID NO: 115839 - RNA, 1410 nt, Artificial Sequence; identical to SEQ ID NO: 112774
  derived and/or modified CDS sequence (opt2) from neuraminidase__InfluenzaA__ADN26045

SEQ ID NO: 115840 - RNA, 1410 nt, Artificial Sequence
  derived and/or modified CDS sequence (opt2) from neuraminidase__InfluenzaA__ADN26047
augaaccccaaccagaagaucaucaccaucggcuccgucugcaugaccaucggcauggccaaccucauccuccagaucggcaacaucaucuccaucuggaucucccacuccauccagcucggcaaccagaaccagaucgagaccugcaaccaguccgucaucaccuacgagaacaacaccugggucaaccagaccuacgucaacaucuccaacaccaacuucgccgccggccaguccauggucuccgucaagcucaccggcaacuccucccucugccccgucuccggcugggccaucuacuccaaggacaacuccguccgcaucggcuccaagggcgacgucuucgucauccgcgagcccuucaucuccugcuccccccucgagugccgcaccuucuuccucacccagggcgcccuccucaacgacaagcacuccaacggcaccaucaaggaccgcucccccuaccgcacccucauguccugccccaucggcgagguccccucccccuacaacucccgcuucgaguccgucgccugguccgccuccgccugccacgacggcaucaacuggcucaccaucggcaucuccggccccgacaacggcgccgucgccguccucaaguacaacggcaucaucaccgacaccaucaaguccuggcgcaacaacauccuccgcacccaggaguccgagugcgccugcgucaacggcuccugcuucaccgucaugaccgacggccccuccaacggccaggccuccuacaagaucuuccgcaucgagaagggcaagaucgucaaguccgucgagaugaacgcccccaacuaccacuacgaggagugcuccugcuaccccgacuccuccgagaucaccugcgucugccgcgacaacuggcacggcuccaaccgccccugggucuccuucaaccagaaccucgaguaccagaucggcuacaucugcuccggcaucuucggcgacaacccccgccccaacgacaagaccggcuccugcggccccgucuccuccaacggcgccaacggcgucaagggcuucuccuucaaguacggcaacggcgucuggaucggccgcaccaaguccaucuccucccgcaacggcuucgagaugaucugggaccccaacggcuggaccggcaccgacaacaacuucuccaucaagcaggacaucgucggcaucaacgagugguccggcuacuccggcuccuucguccagcaccccgagcucaccggccucgacugcauccgccccugcuucugggucgagcucauccgcggccgccccaaggagaacaccaucuggaccuccggcuccuccaucuccuucugcggcgucaacuccgacaccgucggcugguccuggcccgacggcgccgagcuccccuucaccaucgacaaguga

SEQ ID NO: 115841 - RNA, 1410 nt, Artificial Sequence; identical to SEQ ID NO: 112774
  derived and/or modified CDS sequence (opt2) from neuraminidase__InfluenzaA__ADN26048

SEQ ID NO: 115842 - RNA, 1410 nt, Artificial Sequence; identical to SEQ ID NO: 112774
  derived and/or modified CDS sequence (opt2) from neuraminidase__InfluenzaA__ADN26049

SEQ ID NO: 115843 - RNA, 1410 nt, Artificial Sequence; identical to SEQ ID NO: 112774
  derived and/or modified CDS sequence (opt2) from neuraminidase__InfluenzaA__ADN26050

SEQ ID NO: 115844 - RNA, 1410 nt, Artificial Sequence; identical to SEQ ID NO: 112774
  derived and/or modified CDS sequence (opt2) from neuraminidase__InfluenzaA__ADN26051

SEQ ID NO: 115845 - RNA, 1410 nt, Artificial Sequence; identical to SEQ ID NO: 112774
  derived and/or modified CDS sequence (opt2) from neuraminidase__InfluenzaA__ADN26052

SEQ ID NO: 115846 - RNA, 1410 nt, Artificial Sequence; identical to SEQ ID NO: 112764
  derived and/or modified CDS sequence (opt2) from neuraminidase__InfluenzaA__ADN26053

SEQ ID NO: 115847 - RNA, 1410 nt, Artificial Sequence; identical to SEQ ID NO: 112774
  derived and/or modified CDS sequence (opt2) from neuraminidase__InfluenzaA__ADN26054

SEQ ID NO: 115848 - RNA, 1410 nt, Artificial Sequence; identical to SEQ ID NO: 112774
  derived and/or modified CDS sequence (opt2) from neuraminidase__InfluenzaA__ADN26057

SEQ ID NO: 115849 - RNA, 1410 nt, Artificial Sequence; identical to SEQ ID NO: 112774
  derived and/or modified CDS sequence (opt2) from neuraminidase__InfluenzaA__ADN26058

SEQ ID NO: 115850 - RNA, 1410 nt, Artificial Sequence; identical to SEQ ID NO: 112774
  derived and/or modified CDS sequence (opt2) from neuraminidase__InfluenzaA__ADN26059

SEQ ID NO: 115851 - RNA, 1410 nt, Artificial Sequence; identical to SEQ ID NO: 113141
  derived and/or modified CDS sequence (opt2) from neuraminidase__InfluenzaA__ADN26060

SEQ ID NO: 115852 - RNA, 1410 nt, Artificial Sequence; identical to SEQ ID NO: 112774
  derived and/or modified CDS sequence (opt2) from neuraminidase__InfluenzaA__ADN26061

SEQ ID NO: 115853 - RNA, 1410 nt, Artificial Sequence; identical to SEQ ID NO: 112774
  derived and/or modified CDS sequence (opt2) from neuraminidase__InfluenzaA__ADN26063

SEQ ID NO: 115854 - RNA, 1410 nt, Artificial Sequence; identical to SEQ ID NO: 112774
  derived and/or modified CDS sequence (opt2) from neuraminidase__InfluenzaA__ADN26064

SEQ ID NO: 115855 - RNA, 1410 nt, Artificial Sequence; identical to SEQ ID NO: 113847
  derived and/or modified CDS sequence (opt2) from neuraminidase__InfluenzaA__ADN26065

SEQ ID NO: 115856 - RNA, 1410 nt, Artificial Sequence; identical to SEQ ID NO: 112774
  derived and/or modified CDS sequence (opt2) from neuraminidase__InfluenzaA__ADN26066

SEQ ID NO: 115857 - RNA, 1410 nt, Artificial Sequence; identical to SEQ ID NO: 112774
  derived and/or modified CDS sequence (opt2) from neuraminidase__InfluenzaA__ADN26067

SEQ ID NO: 115858 - RNA, 1410 nt, Artificial Sequence; identical to SEQ ID NO: 112774
  derived and/or modified CDS sequence (opt2) from neuraminidase__InfluenzaA__ADN26069

SEQ ID NO: 115859 - RNA, 1410 nt, Artificial Sequence; identical to SEQ ID NO: 112774
  derived and/or modified CDS sequence (opt2) from neuraminidase__InfluenzaA__ADN26070

SEQ ID NO: 115860 - RNA, 1410 nt, Artificial Sequence; identical to SEQ ID NO: 112774
  derived and/or modified CDS sequence (opt2) from neuraminidase__InfluenzaA__ADN26072

SEQ ID NO: 115861 - RNA, 1410 nt, Artificial Sequence; identical to SEQ ID NO: 112774
  derived and/or modified CDS sequence (opt2) from neuraminidase__InfluenzaA__ADN26073

SEQ ID NO: 115862 - RNA, 1410 nt, Artificial Sequence; identical to SEQ ID NO: 112774
  derived and/or modified CDS sequence (opt2) from neuraminidase__InfluenzaA__ADN26075

SEQ ID NO: 115863 - RNA, 1410 nt, Artificial Sequence; identical to SEQ ID NO: 112774
  derived and/or modified CDS sequence (opt2) from neuraminidase__InfluenzaA__ADN26076

SEQ ID NO: 115864 - RNA, 1410 nt, Artificial Sequence; identical to SEQ ID NO: 112774
  derived and/or modified CDS sequence (opt2) from neuraminidase__InfluenzaA__ADN26077

SEQ ID NO: 115865 - RNA, 1410 nt, Artificial Sequence; identical to SEQ ID NO: 112774
  derived and/or modified CDS sequence (opt2) from neuraminidase__InfluenzaA__ADN26078

SEQ ID NO: 115866 - RNA, 1410 nt, Artificial Sequence; identical to SEQ ID NO: 112774
  derived and/or modified CDS sequence (opt2) from neuraminidase__InfluenzaA__ADN26079

SEQ ID NO: 115867 - RNA, 1410 nt, Artificial Sequence; identical to SEQ ID NO: 112774
  derived and/or modified CDS sequence (opt2) from neuraminidase__InfluenzaA__ADN26080

SEQ ID NO: 115868 - RNA, 1410 nt, Artificial Sequence; identical to SEQ ID NO: 112774
  derived and/or modified CDS sequence (opt2) from neuraminidase__InfluenzaA__ADN26081

SEQ ID NO: 115869 - RNA, 1410 nt, Artificial Sequence; identical to SEQ ID NO: 112774
  derived and/or modified CDS sequence (opt2) from neuraminidase__InfluenzaA__ADN26082

SEQ ID NO: 115870 - RNA, 1410 nt, Artificial Sequence; identical to SEQ ID NO: 112774
  derived and/or modified CDS sequence (opt2) from neuraminidase__InfluenzaA__ADN26083

SEQ ID NO: 115871 - RNA, 1410 nt, Artificial Sequence; identical to SEQ ID NO: 114676
  derived and/or modified CDS sequence (opt2) from neuraminidase__InfluenzaA__ADN26084

SEQ ID NO: 115872 - RNA, 1410 nt, Artificial Sequence; identical to SEQ ID NO: 112774
  derived and/or modified CDS sequence (opt2) from neuraminidase__InfluenzaA__ADN26085

SEQ ID NO: 115873 - RNA, 1410 nt, Artificial Sequence; identical to SEQ ID NO: 112774
  derived and/or modified CDS sequence (opt2) from neuraminidase__InfluenzaA__ADN26086

SEQ ID NO: 115874 - RNA, 1410 nt, Artificial Sequence; identical to SEQ ID NO: 112774
  derived and/or modified CDS sequence (opt2) from neuraminidase__InfluenzaA__ADN26087

SEQ ID NO: 115875 - RNA, 1410 nt, Artificial Sequence; identical to SEQ ID NO: 112774
  derived and/or modified CDS sequence (opt2) from neuraminidase__InfluenzaA__ADN26088

SEQ ID NO: 115876 - RNA, 1410 nt, Artificial Sequence; identical to SEQ ID NO: 112774
  derived and/or modified CDS sequence (opt2) from neuraminidase__InfluenzaA__ADN26090

SEQ ID NO: 115877 - RNA, 1410 nt, Artificial Sequence; identical to SEQ ID NO: 112774
  derived and/or modified CDS sequence (opt2) from neuraminidase__InfluenzaA__ADN26091

SEQ ID NO: 115878 - RNA, 1410 nt, Artificial Sequence; identical to SEQ ID NO: 112774
  derived and/or modified CDS sequence (opt2) from neuraminidase__InfluenzaA__ADN26092

SEQ ID NO: 115879 - RNA, 1410 nt, Artificial Sequence; identical to SEQ ID NO: 112774
  derived and/or modified CDS sequence (opt2) from neuraminidase__InfluenzaA__ADN26093

SEQ ID NO: 115880 - RNA, 1410 nt, Artificial Sequence
  derived and/or modified CDS sequence (opt2) from neuraminidase__InfluenzaA__ADN26094
augaaccccaaccagaagaucaucaccaucggcuccgucugcaugaccaucggcauggccaaccucauccuccagaucggcaacaucaucuccaucuggaucucccacuccauccagcucggcaaccagaaccagaucgagaccugcaaccaguccgucaucaccuacgagaacaacaccugggucaaccagaccuacgucaacaucuccaacaccaacuucgccgccggccaguccgucgucuccgucaagcucgccggcaacuccucccucugccccgucuccggcugggccaucuacuccaaggacaacuccauccgcaucggcuccaagggcgacgucuucgucauccgcgagcccuucaucuccugcuccccccucgagugccgcaccuucuuccucacccagggcgcccuccucaacgacaagcacuccaacggcaccaucaaggaccgcucccccuaccgcacccucauguccugccccaucggcgagguccccucccccuacaacucccgcuucgaguccgucgccugguccgccuccgccugccacgacggcaucaacuggcucaccaucggcaucuccggccccgacaacggcgccgucgccguccucaaguacaacggcaucaucaccgacaccaucaaguccuggcgcaacaacauccuccgcacccaggaguccgagugcgccugcgucaacggcuccugcuucaccgucaugaccgacggccccuccgacggccaggccuccuacaagaucuuccgcaucgagaagggcaagaucgucaaguccgucgagaugaacgcccccaacuaccacuacgaggagugcuccugcuaccccgacuccuccgagaucaccugcgucugccgcgacaacuggcacggcuccaaccgccccugggucuccuucaaccagaaccucgaguaccagaucggcuacaucugcuccggcaucuucggcgacaacccccgccccaacgacaagaccggcuccugcggccccgucuccuccaacggcgccaacggcgucaagggcuucuccuucaaguacggcaacggcgucuggaucggccgcaccaaguccaucuccucccgcaacggcuucgagaugaucugggaccccaacggcuggaccggcaaggacaacaacuucuccaucaagcaggacaucgucggcaucaacgagugguccggcuacuccggcuccuucguccagcaccccgagcucaccggccucgacugcauccgccccugcuucugggucgagcucauccgcggccgccccaaggagaacaccaucuggaccuccggcuccuccaucuccuucugcggcgucaacuccgacaccgucggcugguccuggcccgacggcgccgagcuccccuucaccaucgacaaguga

SEQ ID NO: 115881 - RNA, 1410 nt, Artificial Sequence; identical to SEQ ID NO: 114676
  derived and/or modified CDS sequence (opt2) from neuraminidase__InfluenzaA__ADN26095

SEQ ID NO: 115882 - RNA, 1410 nt, Artificial Sequence
  derived and/or modified CDS sequence (opt2) from neuraminidase__InfluenzaA__ADN26096
augaaccccaaccagaagaucaucaccaucggcuccgucugcaugaccaucggcauggccaaccucauccuccagaucggcaacaucaucuccaucuggaucucccacuccauccagcucggcaaccagaaccagaucgagaccugcaaccaguccgucaucaccuacgagaacaacaccugggucaaccagaccuacgucaacaucuccaacaccaacuucgccgccggccaguccgucgucuccgucaagcucgccggcaacuccucccucugccccgucaacggcugggccaucuacuccaaggacaacuccauccgcaucggcuccaagggcgacgucuucgucauccgcgagcccuucaucuccugcuccccccucgagugccgcaccuucuuccucacccagggcgcccuccucaacgacaagcacuccaacggcaccaucaaggaccgcucccccuaccgcacccucauguccugccccaucggcgagguccccucccccuacaacucccgcuucgaguccgucgccugguccgccuccgccugccacgacggcaucaacuggcucaccaucggcaucuccggccccgacaacggcgccgucgccguccucaaguacaacggcaucaucaccgacaccaucaaguccuggcgcaacaacauccuccgcacccaggaguccgagugcgccugcgucaacggcuccugcuucaccgucaugaccgacggccccuccgacggccaggccuccuacaagaucuuccgcaucgagaagggcaagaucgucaaguccgucgagaugaacgcccccaacuaccacuacgaggagugcuccugcuaccccgacuccuccgagaucaccugcgucugccgcgacaacuggcacggcuccaaccgccccugggucuccuucaaccagaaccucgaguaccagaucggcuacaucugcuccggcaucuucggcgacaacccccgccccaacgacaagaccggcuccugcggccccgucuccuccaacggcgccaacggcgucaagggcuucuccuucaaguacggcaacggcgucuggaucggccgcaccaagaacaucuccucccgcaacggcuucgagaugaucugggaccccaacggcuggaccggcaccgacaacaacuucuccaucaagcaggacaucgucggcaucaacgagugguccggcuacuccggcuccuucguccagcaccccgagcucaccggccucgacugcauccgccccugcuucugggucgagcucauccgcggccgccccaaggagaacaccaucuggaccuccggcuccuccaucuccuucugcggcgucaacuccgacaccgucggcugguccuggcccgacggcgccgagcuccccuucaccaucgacaaguga

SEQ ID NO: 115883 - RNA, 1410 nt, Artificial Sequence; identical to SEQ ID NO: 112774
  derived and/or modified CDS sequence (opt2) from neuraminidase__InfluenzaA__ADN26097

SEQ ID NO: 115884 - RNA, 1410 nt, Artificial Sequence; identical to SEQ ID NO: 112774
  derived and/or modified CDS sequence (opt2) from neuraminidase__InfluenzaA__ADN26098

SEQ ID NO: 115885 - RNA, 1410 nt, Artificial Sequence; identical to SEQ ID NO: 112774
  derived and/or modified CDS sequence (opt2) from neuraminidase__InfluenzaA__ADN26099

SEQ ID NO: 115886 - RNA, 1410 nt, Artificial Sequence; identical to SEQ ID NO: 112774
  derived and/or modified CDS sequence (opt2) from neuraminidase__InfluenzaA__ADN26100

SEQ ID NO: 115887 - RNA, 1410 nt, Artificial Sequence; identical to SEQ ID NO: 112774
  derived and/or modified CDS sequence (opt2) from neuraminidase__InfluenzaA__ADN26101

SEQ ID NO: 115888 - RNA, 1410 nt, Artificial Sequence
  derived and/or modified CDS sequence (opt2) from neuraminidase__InfluenzaA__ADN26102
augaaccccaaccagaagaucaucaccaucggcuccgucugcaugaccaucggcauggccaaccucauccuccagaucggcaacaucaucuccaucuggaucucccaccucauccagcucggcaaccagaaccagaucgagaccugcaaccaguccgucaucaccuacgagaacaacaccugggucaaccagaccuacgucaacaucuccaacaccaacuucgccgccggccaguccgucgucuccgucaagcucgccggcaacuccucccucugccccgucuccggcugggccaucuacuccaaggacaacuccauccgcaucggcuccaagggcgacgucuucgucauccgcgagcccuucaucuccugcuccccccucgagugccgcaccuucuuccucacccagggcgcccuccucaacgacaagcacuccaacggcaccaucaaggaccgcucccccuaccgcacccucauguccugccccaucggcgagguccccucccccuacaacucccgcuucgaguccgucgccugguccgccuccgccugccacgacggcaucaacuggcucaccaucggcaucuccggccccgacaacggcgccgucgccguccucaaguacaacggcaucaucaccgacaccaucaaguccuggcgcaacaacauccuccgcacccaggaguccgagugcgccugcgucaacggcuccugcuucaccgucaugaccgacggccccuccgacggccaggccuccuacaagaucuucaagaucgagaagggcaagaucgucaaguccgucgagaugaacgcccccaacuaccacuacgaggagugcuccugcuaccccgacuccuccgagaucaccugcgucugccgcgacaacuggcacggcuccaaccgccccugggucuccuucaaccagaaccucgaguaccagaucggcuacaucugcuccggcaucuucggcgacaacccccgccccaacgacaagaccggcuccugcggccccgucuccuccaacggcgccaacggcgucaagggcuucuccuucaaguacggcaacggcgucuggaucggccgcaccaaguccaucuccucccgcaacggcuucgagaugaucugggaccccaacggcuggaccggcaccgacaacaacuucuccaucaagcaggacaucgucggcaucaacgagugguccggcuacuccggcuccuucguccagcaccccgagcucaccggccucgacugcauccgccccugcuucugggucgagcucauccgcggccgccccaaggagaacuccaucuggaccuccggcuccuccaucuccuucugcggcgucaacuccgacaccgucggcugguccuggcccgacggcgccgagcuccccuucaccaucgacaaguga

SEQ ID NO: 115889 - RNA, 1410 nt, Artificial Sequence; identical to SEQ ID NO: 112774
  derived and/or modified CDS sequence (opt2) from neuraminidase__InfluenzaA__ADN26103

SEQ ID NO: 115890 - RNA, 1410 nt, Artificial Sequence; identical to SEQ ID NO: 112774
  derived and/or modified CDS sequence (opt2) from neuraminidase__InfluenzaA__ADN26104

SEQ ID NO: 115891 - RNA, 1410 nt, Artificial Sequence; identical to SEQ ID NO: 112774
  derived and/or modified CDS sequence (opt2) from neuraminidase__InfluenzaA__ADN26105

SEQ ID NO: 115892 - RNA, 1410 nt, Artificial Sequence; identical to SEQ ID NO: 112774
  derived and/or modified CDS sequence (opt2) from neuraminidase__InfluenzaA__ADN26106

SEQ ID NO: 115893 - RNA, 1410 nt, Artificial Sequence; identical to SEQ ID NO: 114676
  derived and/or modified CDS sequence (opt2) from neuraminidase__InfluenzaA__ADN26107

SEQ ID NO: 115894 - RNA, 1410 nt, Artificial Sequence; identical to SEQ ID NO: 114676
  derived and/or modified CDS sequence (opt2) from neuraminidase__InfluenzaA__ADN26108

SEQ ID NO: 115895 - RNA, 1410 nt, Artificial Sequence; identical to SEQ ID NO: 112774
  derived and/or modified CDS sequence (opt2) from neuraminidase__InfluenzaA__ADN26109

SEQ ID NO: 115896 - RNA, 1410 nt, Artificial Sequence; identical to SEQ ID NO: 113748
  derived and/or modified CDS sequence (opt2) from neuraminidase__InfluenzaA__ADN26110

SEQ ID NO: 115897 - RNA, 1410 nt, Artificial Sequence; identical to SEQ ID NO: 114676
  derived and/or modified CDS sequence (opt2) from neuraminidase__InfluenzaA__ADN26111

SEQ ID NO: 115898 - RNA, 1410 nt, Artificial Sequence; identical to SEQ ID NO: 113748
  derived and/or modified CDS sequence (opt2) from neuraminidase__InfluenzaA__ADN26112

SEQ ID NO: 115899 - RNA, 1410 nt, Artificial Sequence; identical to SEQ ID NO: 114676
  derived and/or modified CDS sequence (opt2) from neuraminidase__InfluenzaA__ADN26113

SEQ ID NO: 115900 - RNA, 1410 nt, Artificial Sequence
  derived and/or modified CDS sequence (opt2) from neuraminidase__InfluenzaA__ADN26114
augaaccccaaccagaagaucaucaccaucggcuccgucugcaugaccaucggcauggccaaccucauccuccagaucggcaacaucaucuccaucuggaucucccacuccauccagcucggcaaccagaaccagaucgagaccugcaaccaguccgucaucaccuacgagaacaacaccugggucaaccagaccuacgucaacaucaacaacaccaacuucgccgccggccaguccgucgucuccgucaagcucgccggcaacuccucccucugccccgucuccggcugggccaucuacuccaaggacaacuccauccgcaucggcuccaagggcgacgucuucgucauccgcgagcccuucaucuccugcuccccccucgagugccgcaccuucuuccucacccagggcgcccuccucaacgacaagcacuccaacggcaccaucaaggaccgcucccccuaccgcacccucauguccugccccaucggcgagguccccucccccuacaacucccgcuucgaguccgucgccugguccgccuccgccugccacgacggcaucaacuggcucaccaucggcaucuccggccccgacaacggcgccgucgccguccucaaguacaacggcaucaucaccgacaccaucaaguccuggcgcaacaacauccuccgcacccaggaguccgagugcgccugcgucaacggcuccugcuucaccgucaugaccgacggccccuccgacggccaggccuccuacaagaucuuccgcaucgagaagggcaagaucgucaaguccgucgagaugaacgcccccaacuaccacuacgaggagugcuccugcuaccccgacuccuccgagaucaccugcgucugccgcgacaacuggcacggcuccaaccgccccugggucuccuucaaccagaaccucgaguaccagaucggcuacaucugcuccggcaucuucggcgacaacccccgccccaacgacaagaccggcuccugcggccccgucuccuccaacggcgccaacggcgucaagggcuucuccuucaaguacggcaacggcgucuggaucggccgcaccaaguccaucuccucccgcaacggcuucgagaugaucugggaccccaacggcuggaccggcaccgacaacaacuucuccaucaagcaggacaucgucggcaucaacgagugguccggcuacuccggcuccuucguccagcaccccgagcucaccggccucgacugcauccgccccugcuucugggucgagcucauccgcggccgccccaaggagaacaccaucuggaccuccggcuccuccaucuccuucugcggcgucaacuccgacaccgucggcugguccuggcccgacggcgccgagcuccccuucaccaucgacaaguga

SEQ ID NO: 115901 - RNA, 1410 nt, Artificial Sequence; identical to SEQ ID NO: 112774
  derived and/or modified CDS sequence (opt2) from neuraminidase__InfluenzaA__ADN26115

SEQ ID NO: 115902 - RNA, 1410 nt, Artificial Sequence
  derived and/or modified CDS sequence (opt2) from neuraminidase__InfluenzaA__ADN26116
augaaccccaaccagaagaucaucaccaucggcuccgucugcaugaccaucggcauggccaaccucauccuccagaucggcaacaucaucuccaucuggaucucccacuccauccagcucggcaaccagaaccagaucgagaccugcaaccaguccgucaucaccuacgagaacaacaccugggucaaccagaccuacgucaacaucuccaacaccaacuucgccgccggccaguccgucgucuccgucaagcucgccggcaacuccucccucugccccgucaacggcugggccaucuacuccaaggacaacuccauccgcaucggcuccaagggcgacgucuucgucauccgcgagcccuucaucuccugcuccccccucgagugccgcaccuucuuccucacccagggcgcccuccucaacgacaagcacuccaacggcaccaucaaggaccgcucccccuaccgcacccucauguccugccccaucggcgagguccccucccccuacaacucccgcuucgaguccgucgccugguccgccuccgccugccacgacggcaucaacuggcucaccaucggcaucuccggccccgacaacggcgccgucgccguccucaaguacaacggcaucaucaccgacaccaucaaguccuggcgcaacaacauccuccgcacccaggaguccgagugcgccugcgucaacggcuccugcuucaccgucaugaccgacggccccuccgacggccaggccuccuacaagaucuuccgcaucgagaagggcaagaucgucaaguccgucgagaugaacgcccccaacuaccacuacgaggagugcuccugcuaccccgacuccuccgagaucaccugcgucugccgcgacaacuggcacggcuccaaccgccccugggucuccuucaaccagaaccucgaguaccagaucggcuacaucugcuccggcaucuucggcgacaacccccgccccaacgacaagaccggcuccugcggccccgucuccuccaacggcgccaacggcgucaagggcuucuccuucaaguacggcaacggcgucuggaucggccgcaccaaguccaucuccucccgcaacggcuucgagaugaucugggaccccaacggcuggaccggcaccgacaacaacuucuccaucaagcaggacaucgucggcaucaacgagugguccggcuacuccggcuccuucguccagcaccccgagcucacccgccucgacugcauccgccccugcuucugggucgagcucauccgcggccgccccaaggagaacaccaucuggaccuccggcuccuccaucuccuucugcggcgucaacuccgacaccgucggcugguccuggcccgacggcgccgagcuccccuucaccaucgacaaguga

SEQ ID NO: 115903 - RNA, 1410 nt, Artificial Sequence; identical to SEQ ID NO: 114676
  derived and/or modified CDS sequence (opt2) from neuraminidase__InfluenzaA__ADN26117

SEQ ID NO: 115904 - RNA, 1410 nt, Artificial Sequence; identical to SEQ ID NO: 114676
  derived and/or modified CDS sequence (opt2) from neuraminidase__InfluenzaA__ADN26118

SEQ ID NO: 115905 - RNA, 1410 nt, Artificial Sequence; identical to SEQ ID NO: 112774
  derived and/or modified CDS sequence (opt2) from neuraminidase__InfluenzaA__ADN26119

SEQ ID NO: 115906 - RNA, 1410 nt, Artificial Sequence; identical to SEQ ID NO: 113748
  derived and/or modified CDS sequence (opt2) from neuraminidase__InfluenzaA__ADN26120

SEQ ID NO: 115907 - RNA, 1410 nt, Artificial Sequence; identical to SEQ ID NO: 114676
  derived and/or modified CDS sequence (opt2) from neuraminidase__InfluenzaA__ADN26121

SEQ ID NO: 115908 - RNA, 1410 nt, Artificial Sequence; identical to SEQ ID NO: 112774
  derived and/or modified CDS sequence (opt2) from neuraminidase__InfluenzaA__ADN26122

SEQ ID NO: 115909 - RNA, 1410 nt, Artificial Sequence; identical to SEQ ID NO: 112774
  derived and/or modified CDS sequence (opt2) from neuraminidase__InfluenzaA__ADN26123

SEQ ID NO: 115910 - RNA, 1410 nt, Artificial Sequence; identical to SEQ ID NO: 112774
  derived and/or modified CDS sequence (opt2) from neuraminidase__InfluenzaA__ADN26124

SEQ ID NO: 115911 - RNA, 1410 nt, Artificial Sequence; identical to SEQ ID NO: 113748
  derived and/or modified CDS sequence (opt2) from neuraminidase__InfluenzaA__ADN26125

SEQ ID NO: 115912 - RNA, 1410 nt, Artificial Sequence; identical to SEQ ID NO: 113748
  derived and/or modified CDS sequence (opt2) from neuraminidase__InfluenzaA__ADN26126

SEQ ID NO: 115913 - RNA, 1410 nt, Artificial Sequence; identical to SEQ ID NO: 113539
  derived and/or modified CDS sequence (opt2) from neuraminidase__InfluenzaA__ADN26127

SEQ ID NO: 115914 - RNA, 1410 nt, Artificial Sequence; identical to SEQ ID NO: 112774
  derived and/or modified CDS sequence (opt2) from neuraminidase__InfluenzaA__ADN26128

SEQ ID NO: 115915 - RNA, 1410 nt, Artificial Sequence; identical to SEQ ID NO: 113748
  derived and/or modified CDS sequence (opt2) from neuraminidase__InfluenzaA__ADN26129

SEQ ID NO: 115916 - RNA, 1410 nt, Artificial Sequence; identical to SEQ ID NO: 114676
  derived and/or modified CDS sequence (opt2) from neuraminidase__InfluenzaA__ADN26130

SEQ ID NO: 115917 - RNA, 1410 nt, Artificial Sequence
  derived and/or modified CDS sequence (opt2) from neuraminidase__InfluenzaA__ADN26131
augaaccccaaccagaagaucaucaccaucggcuccgucugcaugaccaucggcauggccaaccucauccuccagaucggcaacaucaucuccaucuggaucucccacuccauccagcucggcaaccagaaccagaucgagaccugcaaccaguccgucaucaccuacgagaacaacaccugggucaaccagaccuacgucaacaucuccaacaccaacuucgccgccggccaguccgucgucuccgucaagcucgccggcaacuccucccucugccccgucuccggcugggccaucuacuccaaggacaacuccauccgcaucggcuccaagggcgacgucuucgucauccgcgagcccuucaucuccugcuccccccucgagugccgcaccuucuuccucacccagggcgcccuccucaacgacaagcacuccaacggcaccaucaaggaccgcucccccuaccgcacccucauguccugccccaucggcgagguccccucccccuacaacucccgcuucgaguccgucgccugguccgccuccgccugccacgacggcaucaacuggcucaccaucggcaucuccggccccgacaacggcgccgucgccguccucaaguacaacggcaucaucaccgacaccaucaaguccuggcgcaacaacauccuccgcacccaggaguccgagugcgccugcgucaacggcuccugcuucaccgucaugaccgacggccccuccgacggccaggccuccuacaagaucuuccgcaucgagaagggcaagaucgucaaguccgucgagaugaacgcccccaacuaccacuacgaggagugcuccugcuaccccgacuccuccgagaucaccugcgucugccgcgacaacuggcacggcuccaaccgccccugggucuccuucaaccagaaccucgaguaccagaucggcuacaucugcuccggcaucuucggcgacaacccccgccccaacgacaagaagggcuccugcggccccgucuccuccaacggcgccaacggcgucaagggcuucuccuucaaguacggcaacggcgucuggaucggccgcaccaaguccaucuccucccgcaacggcuucgagaugaucugggaccccaacggcuggaccggcaccgacaacaacuucuccaucaagcaggacaucgucggcaucaacgagugguccggcuacuccggcuccuucguccagcaccccgagcucaccggccucgacugcauccgccccugcuucugggucgagcucauccgcggccgccccaaggagaacaccaucuggaccuccggcuccuccaucucccucugcggcgucaacuccgacaccgucggcugguccuggcccgacggcgccgagcuccccuucaccaucgacaaguga

SEQ ID NO: 115918 - RNA, 1410 nt, Artificial Sequence; identical to SEQ ID NO: 114676
  derived and/or modified CDS sequence (opt2) from neuraminidase__InfluenzaA__ADN26132

SEQ ID NO: 115919 - RNA, 1410 nt, Artificial Sequence; identical to SEQ ID NO: 113748
  derived and/or modified CDS sequence (opt2) from neuraminidase__InfluenzaA__ADN26134

SEQ ID NO: 115920 - RNA, 1410 nt, Artificial Sequence; identical to SEQ ID NO: 112774
  derived and/or modified CDS sequence (opt2) from neuraminidase__InfluenzaA__ADN26135

SEQ ID NO: 115921 - RNA, 1410 nt, Artificial Sequence; identical to SEQ ID NO: 112774
  derived and/or modified CDS sequence (opt2) from neuraminidase__InfluenzaA__ADN26136

SEQ ID NO: 115922 - RNA, 1410 nt, Artificial Sequence; identical to SEQ ID NO: 112774
  derived and/or modified CDS sequence (opt2) from neuraminidase__InfluenzaA__ADN26137

SEQ ID NO: 115923 - RNA, 1410 nt, Artificial Sequence; identical to SEQ ID NO: 114676
  derived and/or modified CDS sequence (opt2) from neuraminidase__InfluenzaA__ADN26138

SEQ ID NO: 115924 - RNA, 1410 nt, Artificial Sequence; identical to SEQ ID NO: 113748
  derived and/or modified CDS sequence (opt2) from neuraminidase__InfluenzaA__ADN26140

SEQ ID NO: 115925 - RNA, 1410 nt, Artificial Sequence
  derived and/or modified CDS sequence (opt2) from neuraminidase__InfluenzaA__ADN26141
augaaccccaaccagaagaucaucaccaucggcuccgucugcaugaccaucggcauggccaaccucauccuccagaucggcaacaucaucuccaucuggaucucccacuccauccagcucggcaaccagaaccgcaucgagaccugcaaccaguccgucaucaccuacgagaacaacaccugggucaaccagaccuacgucaacaucuccaacaccaacuucgccgccggccaguccgucgucuccgucaagcucgccggcaacuccucccucugccccgucuccggcugggccaucuacuccaaggacaacuccauccgcaucggcuccaagggcgacgucuucgucauccgcgagcccuucaucuccugcuccccccucgagugccgcaccuucuuccucacccagggcgcccuccucaacgacaagcacuccaacggcaccaucaaggaccgcucccccuaccgcacccucauguccugccccaucggcgagguccccucccccuacaacucccgcuucgaguccgucgccugguccgccuccgccugccacgacggcaucaacuggcucaccaucggcaucuccggccccgacaacggcgccgucgccguccucaaguacaacggcaucaucaccgacaccaucaaguccuggcgcaacaacauccuccgcacccaggaguccgagugcgccugcgucaacggcuccugcuucaccgucaugaccgacggccccuccgacggccaggccuccuacaagaucuuccgcaucgagaagggcaagaucgucaaguccgucgagaugaacgcccccaacuaccacuacgaggagugcuccugcuaccccgacuccuccgagaucaccugcgucugccgcgacaacuggcacggcuccaaccgccccugggucuccuucaaccagaaccucgaguaccagaucggcuacaucugcuccggcaucuucggcgacaacccccgccccaacgacaagaccggcuccugcggccccgucuccuccaacggcgccaacggcgucaagggcuucuccuucaaguacggcaacggcgucuggaucggccgcaccaaguccaucuccucccgcaacggcuucgagaugaucugggaccccaacggcuggaccggcaccgacaacaacuucuccaucaagcaggacaucgucggcaucaacgagugguccggcuacuccggcuccuucguccagcaccccgagcucaccggccucgacugcauccgccccugcuucugggucgagcucauccgcggccgccccaaggagaacaccaucuggaccuccggcuccuccaucuccuucugcggcgucaacuccgacaccgucggcugguccuggcccgacggcgccgagcuccccuucaccaucgacaaguga

SEQ ID NO: 115926 - RNA, 1410 nt, Artificial Sequence
  derived and/or modified CDS sequence (opt2) from neuraminidase__InfluenzaA__ADN26142
augaaccccaaccagaagaucaucaccaucggcuccgucugcaugaccaucggcauggccaaccucauccuccagaucggcaacaucaucuccaucuggaucucccacuccauccagcucggcaaccagaaccagaucgagaccugcaaccaguccgucaucaccuacgagaacaacaccugggucaaccagaccuacgucaacaucuccaacaacaacuucgccgccggccaguccgucgucuccgucaagcucgccggcaacuccucccucugccccgucaacggcugggccaucuacuccaaggacaacuccauccgcaucggcuccaagggcgacgucuucgucauccgcgagcccuucaucuccugcuccccccucgagugccgcaccuucuuccucacccagggcgcccuccucaacgacaagcacuccaacggcaccaucaaggaccgcucccccuaccgcacccucauguccugccccaucggcgagguccccucccccuacaacucccgcuucgaguccgucgccugguccgccuccgccugccacgacggcaucaacuggcucaccaucggcaucuccggccccgacaacggcgccgucgccguccucaaguacaacggcaucaucaccgacaccaucaaguccuggcgcaacaacauccuccgcacccaggaguccgagugcgccugcgucaacggcuccugcuucaccgucaugaccgacggccccuccgacggccaggccuccuacaagaucuuccgcaucgagaagggcaagaucgucaaguccgucgagaugaacgcccccaacuaccacuacgaggagugcuccugcuaccccgacuccuccgagaucaccugcgucugccgcgacaacuggcacggcuccaaccgccccugggucuccuucaaccagaaccucgaguaccagaucggcuacaucugcuccggcaucuucggcgacaacccccgccccaacgacaagaccggcuccugcggccccgucuccuccaacggcgccaacggcgucaagggcuucuccuucaaguacggcaacggcgucuggaucggccgcaccaaguccaucuccucccgcaacggcuucgagaugaucugggaccccaacggcuggaccggcaccgacaacaacuucuccaucaagcaggacaucgucggcaucaacgagugguccggcuacuccggcuccuucguccagcaccccgagcucaccggccucgacugcauccgccccugcuucugggucgagcucauccgcggccgccccaaggagaacaccaucuggaccuccggcuccuccaucuccuucugcggcgucaacuccgacaccgucggcugguccuggcccgacggcgccgagcuccccuucaccaucgacaaguga

SEQ ID NO: 115927 - RNA, 1410 nt, Artificial Sequence; identical to SEQ ID NO: 112774
  derived and/or modified CDS sequence (opt2) from neuraminidase__InfluenzaA__ADN26143

SEQ ID NO: 115928 - RNA, 1410 nt, Artificial Sequence; identical to SEQ ID NO: 114676
  derived and/or modified CDS sequence (opt2) from neuraminidase__InfluenzaA__ADN26144

SEQ ID NO: 115929 - RNA, 1410 nt, Artificial Sequence; identical to SEQ ID NO: 114676
  derived and/or modified CDS sequence (opt2) from neuraminidase__InfluenzaA__ADN26145

SEQ ID NO: 115930 - RNA, 1410 nt, Artificial Sequence; identical to SEQ ID NO: 112774
  derived and/or modified CDS sequence (opt2) from neuraminidase__InfluenzaA__ADN26146

SEQ ID NO: 115931 - RNA, 1410 nt, Artificial Sequence; identical to SEQ ID NO: 114676
  derived and/or modified CDS sequence (opt2) from neuraminidase__InfluenzaA__ADN26147

SEQ ID NO: 115932 - RNA, 1410 nt, Artificial Sequence; identical to SEQ ID NO: 112774
  derived and/or modified CDS sequence (opt2) from neuraminidase__InfluenzaA__ADN26148

SEQ ID NO: 115933 - RNA, 1410 nt, Artificial Sequence; identical to SEQ ID NO: 114676
  derived and/or modified CDS sequence (opt2) from neuraminidase__InfluenzaA__ADN26149

SEQ ID NO: 115934 - RNA, 1410 nt, Artificial Sequence
  derived and/or modified CDS sequence (opt2) from neuraminidase__InfluenzaA__ADN26150
augaaccccaaccagaagaucaucaccaucggcuccgucugcaugaccaucggcauggccucccucauccuccagaucggcaacaucaucuccaucuggaucucccacuccauccagcucggcaaccagaaccagaucgagaccugcaaccaguccgucaucaccuacgagaacaacaccugggucaaccagaccuacgucaacaucuccaacaccaacuucgccgccggccaguccgucgucuccgucaagcucgccggcaacuccucccucugccccgucuccggcugggccaucuacuccaaggacaacuccauccgcaucggcuccaagggcgacgucuucgucauccgcgagcccuucaucuccugcuccccccucgagugccgcaccuucuuccucacccagggcgcccuccucaacgacaagcacuccaacggcaccaucaaggaccgcucccccuaccgcacccucauguccugccccaucggcgagguccccucccccuacaacucccgcuucgaguccgucgccugguccgccuccgccugccacgacggcaucaacuggcucaccaucggcaucuccggccccgacaacggcgccgucgccguccucaaguacaacggcaucaucaccgacaccaucaaguccuggcgcaacaacauccuccgcacccaggaguccgagugcgccugcgucaacggcuccugcuucaccgucaugaccgacggccccuccgacggccaggccuccuacaagaucuuccgcaucgagaagggcaagaucgucaaguccgucgagaugaacgcccccaacuaccacuacgaggagugcuccugcuaccccgacuccuccgagaucaccugcgucugccgcgacaacuggcacggcuccaaccgccccugggucuccuucaaccagaaccucgaguaccagaucggcuacaucugcuccggcaucuucggcgacaacccccgccccaacgacaagaccggcuccugcggccccgucuccuccaacggcgccaacggcgucaagggcuucuccuucaaguacggcaacggcgucuggaucggccgcaccaaguccaucuccucccgcaacggcuucgagaugaucugggaccccaacggcuggaccggcaccgacaacaacuucuccaucaagcaggacaucgucggcaucaacgagugguccggcuacuccggcuccuucguccagcaccccgagcucaccggccucgacugcauccgccccugcuucugggucgagcucauccgcggccgccccaaggagaacaccaucuggaccuccggcuccuccaucuccuucugcggcgucaacuccgacaccgucggcugguccuggcccgacggcgccgagcuccccuucaccaucgacaaguga

SEQ ID NO: 115935 - RNA, 1410 nt, Artificial Sequence; identical to SEQ ID NO: 113748
  derived and/or modified CDS sequence (opt2) from neuraminidase__InfluenzaA__ADN26151

SEQ ID NO: 115936 - RNA, 1410 nt, Artificial Sequence
  derived and/or modified CDS sequence (opt2) from neuraminidase__InfluenzaA__ADN26152
augaaccccaaccagaagaucaucaccaucggcuccgucugcaugaccaucggcauggccaaccucauccuccagaucggcaacaucaucuccaucuggaucucccacuccauccagcucggcaaccagaaccagaucgagaccugcaaccaguccgucaucaccuacgagaacaacaccugggucaaccagaccuacgucaacaucuccaacaccaacuucgccgccggccaguccgucgucuccaugaagcucgccggcaacuccucccucugccccgucaacggcugggccaucuacuccaaggacaacuccauccgcaucggcuccaagggcgacgucuucgucauccgcgagcccuucaucuccugcuccccccucgagugccgcaccuucuuccucacccagggcgcccuccucaacgacaagcacuccaacggcaccaucaaggaccgcucccccuaccgcacccucauguccugccccaucggcgagguccccucccccuacaacucccgcuucgaguccgucgccugguccgccuccgccugccacgacggcaucaacuggcucaccaucggcaucuccggccccgacaacggcgccgucgccguccucaaguacaacggcaucaucaccgacaccaucaaguccuggcgcaacaacauccuccgcacccaggaguccgagugcgccugcgucaacggcuccugcuucaccgucaugaccgacggccccuccgacggccaggccuccuacaagaucuuccgcaucgagaagggcaagaucgucaaguccgucgagaugaacgcccccaacuaccacuacgaggagugcuccugcuaccccgacuccuccgagaucaccugcgucugccgcgacaacuggcacggcuccaaccgccccugggucuccuucaaccagaaccucgaguaccagaucggcuacaucugcuccggcaucuucggcgacaacccccgccccaacgacaagaccggcuccugcggccccgucuccuccaacggcgccaacggcgucaagggcuucuccuucaaguacggcaacggcgucuggaucggccgcaccaaguccaucuccucccgcaacggcuucgagaugaucugggaccccaacggcuggacccgcaccgacaacaacuucuccaucaagcaggacaucgucggcaucaacgagugguccggcuacuccggcuccuucguccagcaccccgagcucaccggccucgacugcauccgccccugcuucugggucgagcucauccgcggccgccccaaggagaacaccaucuggaccuccggcuccuccaucuccuucugcggcgucaacuccgacaccgucggcugguccuggcccgacggcgccgagcuccccuucaccaucgacaaguga

SEQ ID NO: 115937 - RNA, 1410 nt, Artificial Sequence; identical to SEQ ID NO: 114676
  derived and/or modified CDS sequence (opt2) from neuraminidase__InfluenzaA__ADN26153

SEQ ID NO: 115938 - RNA, 1410 nt, Artificial Sequence; identical to SEQ ID NO: 113357
  derived and/or modified CDS sequence (opt2) from neuraminidase__InfluenzaA__ADN26154

SEQ ID NO: 115939 - RNA, 1410 nt, Artificial Sequence; identical to SEQ ID NO: 112774
  derived and/or modified CDS sequence (opt2) from neuraminidase__InfluenzaA__ADN26155

SEQ ID NO: 115940 - RNA, 1410 nt, Artificial Sequence; identical to SEQ ID NO: 113748
  derived and/or modified CDS sequence (opt2) from neuraminidase__InfluenzaA__ADN26157

SEQ ID NO: 115941 - RNA, 1410 nt, Artificial Sequence; identical to SEQ ID NO: 112774
  derived and/or modified CDS sequence (opt2) from neuraminidase__InfluenzaA__ADN26159

SEQ ID NO: 115942 - RNA, 1410 nt, Artificial Sequence; identical to SEQ ID NO: 112774
  derived and/or modified CDS sequence (opt2) from neuraminidase__InfluenzaA__ADN26161

SEQ ID NO: 115943 - RNA, 1410 nt, Artificial Sequence
  derived and/or modified CDS sequence (opt2) from neuraminidase__InfluenzaA__ADN26162
augaaccccaaccagaagaucaucaccaucuccuccgucugcaugaccgucggcauggccaaccucauccuccagaucggcaacaucaucuccaucuggaucucccacuccauccagcucggcaaccagaaccagaucgagaccugcaaccaguccgucaucaccuacgagaacaacaccugggucaaccagaccuacgucaacaucuccaacaccaacuucgccgccggccaguccgucgucuccgucaagcucgccggcaacuccucccucugccccgucuccggcugggccaucuacuccaaggacaacuccauccgcaucggcuccaagggcgacgucuucgucauccgcgagcccuucaucuccugcuccccccucgagugccgcaccuucuuccucacccagggcgcccuccucaacgacaagcacuccaacggcaccaucaaggaccgcucccccuaccgcacccucauguccugccccaucggcgagguccccucccccuacaacucccgcuucgaguccgucgccugguccgccuccgccugccacgacggcaucaacuggcucaccaucggcaucuccggccccgacaacggcgccgucgccguccucaaguacaacggcaucaucaccgacaccaucaaguccuggcgcaacaacauccuccgcacccaggaguccgagugcgccugcgucaacggcuccugcuucaccgucaugaccgacggccccuccgacggccaggccuccuacaagaucuuccgcaucgagaagggcaagaucgucaaguccgucgagaugaacgcccccaacuaccacuacgaggagugcuccugcuaccccgacuccuccgagaucaccugcgucugccgcgacaacuggcacggcuccaaccgccccugggucuccuucaaccagaaccucgaguaccagaucggcuacaucugcuccggcaucuucggcgacaacccccgccccaacgacaagaccggcuccugcggccccgucuccuccaacggcgccaacggcgucaagggcuucuccuucaaguacggcaacggcgucuggaucggccgcaccaaguccaucuccucccgcaacggcuucgagaugaucugggaccccaacggcuggaccggcaccgacaacaacuucuccaucaagcaggacaucgucggcaucaacgagugguccggcuacuccggcuccuucguccagcaccccgagcucaccggccucgacugcauccgccccugcuucugggucgagcucauccgcggccgccccaaggagaacaccaucuggaccuccggcuccuccaucuccuucugcggcgucaacuccgacaccgucggcugguccuggcccgacggcgccgagcuccccuucaccaucgacaaguga

SEQ ID NO: 115944 - RNA, 1410 nt, Artificial Sequence
  derived and/or modified CDS sequence (opt2) from neuraminidase__InfluenzaA__ADN26163
augaaccccaaccagaagaucaucaccaucggcuccgucugcaugaccaucggcauggccaaccucauccuccagaucggcaacaucaucuccaucuggaucucccacuccauccagcucggcaaccagaaccagaucgagaccugcaaccaguccgucaucaccuacgagaacaacaccugggucaaccagaccuacgucaacaucuccaacaccaacuucgccgccggccaguccgucgucuccgucaagcucgccggcaacuccucccucugccccgucuccggcugggccaucuacuccaaggacaacuccauccgcaucggcuccaagggcgacgucuucgucauccgcgagcccuucaucuccugcuccccccucgagugccgcaccuucuuccucacccagggcgcccuccucaacgacaagcacuccaacggcaccaucaaggaccgcucccccuaccgcacccucauguccugccccaucggcgagguccccucccccuacaacucccgcuucgaguccgucgccugguccgccuccgccugccacgacggcaucaacuggcucaccaucggcaucuccggccccgacaacggcgccgucgccguccucaaguacaacggcaucaucaccgacaccaucaaguccuggcgcaacaacauccuccgcacccaggaguccgagugcgccugcgucaacggcuccugcuucaccgucaugaccgacggccccuccgacggccaggccuccuacaagaucuuccgcaucgagaagggcaagaucgucaaguccgucgagaugaacgcccccaacuaccacuacgaggagugcuccugcuaccccgacuccuccgagaucaccugcgucugccgcgacaacuggcacggcuccaaccgccccugggucuccuucaaccagaaccucgaguaccagaucggcuacaucugcuccggcaucuucggcgacaacccccgccccaacgacaagaccggcuccugcggccccgucuccuccaacggcgccaacggcgucaagggcuucuccuucaaguacggcaacggcgucuggaucggccgcaccaaguccaucuccucccgcaacggcuucgagaugaucugggaccccaacggcuggaccggcaccgacaacaacuucuccaucaagcaggacaucaucggcaucaacgagugguccggcuacuccggcuccuucguccagcaccccgagcucaccggccucgacugcauccgccccugcuucugggucgagcucauccgcggccgccccaaggagaacaccaucuggaccuccggcuccuccaucuccuucugcggcgucaacuccgacaccgucggcugguccuggcccgacggcgccgagcuccccuucaucaucgacaaguga

SEQ ID NO: 115945 - RNA, 1410 nt, Artificial Sequence
  derived and/or modified CDS sequence (opt2) from neuraminidase__InfluenzaA__ADN26164
augaaccccaaccagaagaucaucaccaucggcuccgucugcaugaccaucggcauggccaaccucauccuccagaucggcaacaucaucuccaucuggaucucccacuccauccagcucggcaaccagaaccagaucgagaccugcaaccaguccgucaucaccuacgagaacaacaccugggucaaccagaccuacgucaacaucuccaacaccaacuucgccgccggccaguccgucgucuccgucaagcucgccggcaacuccucccucugccccgucuccggcugggccaucuacuccaaggacaacuccauccgcaucggcuccaagggcgacgucuucgucauccgcgagcccuucaucuccugcuccccccucgagugccgcaccuucuuccucacccagggcgcccuccucaacgacaagcacuccaacggcaccaucaaggaccgcucccccuaccgcacccucauguccugccccaucggcgagguccccucccccuacaacucccgcuucgaguccgucgccugguccgccuccgccugccacgacggcaucaacuggcucaccaucggcaucuccggccccgacaacggcgccgucgccguccucaaguacaacggcaucaucaccgacaccaucaaguccuggcgcaacaacauccuccgcacccaggaguccgagugcgccugccucaacggcuccugcuucaccgucaugaccgacggccccuccgacggccaggccuccuacaagaucuuccgcaucgagaagggcaagaucgucaaguccgucgagaugaacgcccccaacuaccacuacgaggagugcuccugcuaccccgacuccuccgagaucaccugcgucugccgcgacaacuggcacggcuccaaccgccccugggucuccuucaaccagaaccucgaguaccagaucggcuacaucugcuccggcaucuucggcgacaacccccgccccaacgacaagaccggcuccugcggccccgucuccuccaacggcgccaacggcgucaagggcuucuccuucaaguacggcaacggcgucuggaucggccgcaccaaguccaucuccucccgcaacggcuucgagaugaucugggaccccaacggcuggaccggcaccgacaacgacuucuccaucaagcaggacaucgucggcaucaacgagugguccggcuacuccggcuccuucguccagcaccccgagcucaccggccucgacugcauccgccccugcuucugggucgagcucauccgcggccgccccaaggagaacaccaucuggaccuccggcuccuccaucuccuucugcggcgucaacuccgacaccgucggcugguccuggcccgacggcgccgagcuccccuucaccaucgacaaguga

SEQ ID NO: 115946 - RNA, 1410 nt, Artificial Sequence; identical to SEQ ID NO: 114731
  derived and/or modified CDS sequence (opt2) from neuraminidase__InfluenzaA__ADN26168

SEQ ID NO: 115947 - RNA, 1410 nt, Artificial Sequence; identical to SEQ ID NO: 113997
  derived and/or modified CDS sequence (opt2) from neuraminidase__InfluenzaA__ADN26178

SEQ ID NO: 115948 - RNA, 1410 nt, Artificial Sequence; identical to SEQ ID NO: 112774
  derived and/or modified CDS sequence (opt2) from neuraminidase__InfluenzaA__ADN26868

SEQ ID NO: 115949 - RNA, 1410 nt, Artificial Sequence; identical to SEQ ID NO: 112774
  derived and/or modified CDS sequence (opt2) from neuraminidase__InfluenzaA__ADN26869

SEQ ID NO: 115950 - RNA, 1410 nt, Artificial Sequence; identical to SEQ ID NO: 112774
  derived and/or modified CDS sequence (opt2) from neuraminidase__InfluenzaA__ADN26870

SEQ ID NO: 115951 - RNA, 1410 nt, Artificial Sequence
  derived and/or modified CDS sequence (opt2) from neuraminidase__InfluenzaA__ADN26871
augaaccccaaccagaagaucaucaccaucggcuccgucugcaugaccaucggcauggccaaccucauccuccagaucggcaacaucaucuccaucuggaucucccacuccauccagcucggcaaccagaaccagaucgagaccuacaaccaguccgucaucaccuacgagaacaacaccugggucaaccagaccuacgucaacaucuccaacaccaacuucgccgccggccaguccgucgucuccgucaagcucgccggcaacuccucccucugccccgucuccggcugggccaucuacuccaaggacaacuccauccgcaucggcuccaagggcgacgucuucgucauccgcgagcccuucaucuccugcuccccccucgagugccgcaccuucuuccucacccagggcgcccuccucaacgacaagcacuccaacggcaccaucaaggaccgcucccccuaccgcacccucauguccugccccaucggcgagguccccucccccuacaacucccgcuucgaguccgucgccugguccgccuccgccugccacgacggcaucaacuggcucaccaucggcaucuccggccccgacaacggcgccgucgccguccucaaguacaacggcaucaucaccgacaccaucaaguccuggcgcaacaacauccuccgcacccaggaguccgagugcgccugcgucaacggcuccugcuucaccgucaugaccgacggccccuccgacggccaggccuccuacaagaucuuccgcaucgagaagggcaagaucgucaaguccgucgagaugaacgcccccaacuaccacuacgaggagugcuccugcuaccccgacuccuccgagaucaccugcgucugccgcgacaacuggcacggcuccaaccgccccugggucuccuucaaccagaaccucgaguaccagaucggcuacaucugcuccggcaucuucggcgacaacccccgccccaacgacaagaccggcuccugcggccccgucuccuccaacggcgccaacggcgucaagggcuucuccuucaaguacggcaacggcgucuggaucggccgcaccaaguccaucuccucccgcaacggcuucgagaugaucugggaccccaacggcuggaccggcaccgacaacaacuucuccaucaagcaggacaucgucggcaucaacgagugguccggcuacuccggcuccuucguccagcaccccgagcucaccggccucgacugcauccgccccugcuucugggucgagcucauccgcggccgccccaaggagaacaccaucuggaccuccggcuccuccaucuccuucugcggcgucaacuccgacaccgucggcugguccuggcccgacggcgccgagcuccccuucaccaucgacaaguga

SEQ ID NO: 115952 - RNA, 1410 nt, Artificial Sequence
  derived and/or modified CDS sequence (opt2) from neuraminidase__InfluenzaA__ADN26872
augaaccccaaccagaagaucaucaccaucggcuccgucugcaugaccaucggcauggccaaccucauccuccagaucggcaacaucaucuccaucuggaucucccacuccauccagcucggcaaccagaaccagaucgagaccugcaaccaguccgucaucaccuacgagaacaacaccugggucaaccagaccuacgucaacaucuccaacaccaacuucgccgccggccucuccgucgucuccgucaagcucgccggcaacuccucccucugccccgucuccggcugggccaucuacuccaaggacaacuccauccgcaucggcuccaagggcgacgucuucgucauccgcgagcccuucaucuccugcuccccccucgagugccgcaccuucuuccucacccagggcgcccuccucaacgacaagcacuccaacggcaccaucaaggaccgcucccccuaccgcacccucauguccugccccaucggcgagguccccucccccuacaacucccgcuucgaguccgucgccugguccgccuccgccugccacgacggcaucuccuggcucaccaucggcaucuccggccccgacaacggcgccgucgccguccucaaguacaacggcaucaucaccgacaccaucaaguccuggcgcaacaacauccuccgcacccaggaguccgagugcgccugcgucaacggcuccugcuucaccgucaugaccgacggccccuccgacggccaggccuccuacaagaucuuccgcaucgagaagggcaagaucgucaaguccgucgagaugaacgcccccaacuaccacuacgaggagugcuccugcuaccccgacuccuccgagaucaccugcgucugccgcgacaacuggcacggcuccaaccgccccugggucuccuucaaccagaaccucgaguaccagaucggcuacaucugcuccggcaucuucggcgacaacccccgccccaacgacaagaccggcuccugcggccccgucuccuccaacggcgccaacggcgucaagggcuucuccuucaaguacggcaacggcgucuggaucggccgcaccaaguccaucuccucccgcaacggcuucgagaugaucugggaccccaacggcuggaccggcaccgacaacaacuucuccaucaagcaggacaucgucggcaucaacgagugguccggcuacuccggcuccuucguccagcaccccgagcucaccggccucgacugcauccgccccugcuucugggucgagcucauccgcggccgccccaaggagaacaccaucuggaccuccggcuccuccaucuccuucugcggcgucaacuccgacaccgucggcugguccuggcccgacggcgccgagcuccccuucaccaucgacaaguga

SEQ ID NO: 115953 - RNA, 1410 nt, Artificial Sequence; identical to SEQ ID NO: 112774
  derived and/or modified CDS sequence (opt2) from neuraminidase__InfluenzaA__ADN26873

SEQ ID NO: 115954 - RNA, 1410 nt, Artificial Sequence; identical to SEQ ID NO: 112774
  derived and/or modified CDS sequence (opt2) from neuraminidase__InfluenzaA__ADN26874

SEQ ID NO: 115955 - RNA, 1410 nt, Artificial Sequence; identical to SEQ ID NO: 112774
  derived and/or modified CDS sequence (opt2) from neuraminidase__InfluenzaA__ADN26875

SEQ ID NO: 115956 - RNA, 1410 nt, Artificial Sequence; identical to SEQ ID NO: 112774
  derived and/or modified CDS sequence (opt2) from neuraminidase__InfluenzaA__ADN26876

SEQ ID NO: 115957 - RNA, 1410 nt, Artificial Sequence; identical to SEQ ID NO: 112774
  derived and/or modified CDS sequence (opt2) from neuraminidase__InfluenzaA__ADN26877

SEQ ID NO: 115958 - RNA, 1410 nt, Artificial Sequence; identical to SEQ ID NO: 112774
  derived and/or modified CDS sequence (opt2) from neuraminidase__InfluenzaA__ADN26878

SEQ ID NO: 115959 - RNA, 1410 nt, Artificial Sequence; identical to SEQ ID NO: 113911
  derived and/or modified CDS sequence (opt2) from neuraminidase__InfluenzaA__ADN26879

SEQ ID NO: 115960 - RNA, 1410 nt, Artificial Sequence; identical to SEQ ID NO: 112774
  derived and/or modified CDS sequence (opt2) from neuraminidase__InfluenzaA__ADN26880

SEQ ID NO: 115961 - RNA, 1410 nt, Artificial Sequence; identical to SEQ ID NO: 112774
  derived and/or modified CDS sequence (opt2) from neuraminidase__InfluenzaA__ADN26881

SEQ ID NO: 115962 - RNA, 1410 nt, Artificial Sequence; identical to SEQ ID NO: 112774
  derived and/or modified CDS sequence (opt2) from neuraminidase__InfluenzaA__ADN26882

SEQ ID NO: 115963 - RNA, 1410 nt, Artificial Sequence; identical to SEQ ID NO: 112774
  derived and/or modified CDS sequence (opt2) from neuraminidase__InfluenzaA__ADN26883

SEQ ID NO: 115964 - RNA, 1413 nt, Artificial Sequence
  derived and/or modified CDS sequence (opt2) from neuraminidase__InfluenzaA__ADN89064
augaaccccaaccagaagaucaucaccaucggcuccaucuccaucgccaucggcaucaucucccucaugcuccagaucggcaacaucaucuccaucugggccucccacuccauccagaccggcucccagaacaacaccggcaucugcaaccagcgcaucaucaccuacgagaacuccaccugggucaaccacaccuacgucaacaucaacaacaccaacgucgucgccggcgaggacaagaccuccgucacccucgccggcaacuccucccucugcuccaucuccggcugggccaucuacaccaaggacaacuccauccgcaucggcuccaagggcgacgucuucgucauccgcgagcccuucaucuccugcucccaccucgagugccgcaccuucuuccucacccagggcgcccuccucaacgacaagcacuccaacggcaccgucaaggaccgcucccccuaccgcgcccucauguccugcccccucggcgaggcccccucccccuacaacuccaaguucgaguccgucgccugguccgccuccgccugccacgacggcaugggcuggcucaccaucggcaucuccggccccgacaacggcgccgucgccguccucaaguacaacggcaucaucaccggcaccaucaaguccuggaagaagcagauccuccgcacccaggaguccgagugcgucugcaugaacggcuccugcuucaccaucaugaccgacggccccuccaacaaggccgccuccuacaagaucuucaagaucgagaagggcaaggucaccaaguccaucgagcucaacgcccccaacuucuacuacgaggagugcuccugcuaccccgacaccggcaucgucaugugcgucugccgcgacaacuggcacggcuccaaccgccccugggucuccuucaaccagaaccucgacuaccagaucggcuacaucugcuccggcgucuucggcgacaacccccgccccgaggacggcgagggcuccugcaaccccgucaccgucgacggcgccaacggcgucaagggcuucuccuacaaguacggcaacggcgucuggaucggccgcaccaaguccaaccgccuccgccgcggcuucgagaugaucugggaccccaacggcuggaccaacaccgacuccgacuucuccgucaagcaggacgucgucgccaucaccgacugguccggcuacuccggcuccuucguccagcaccccgagcucaccggccucgacugcauccgccccugcuucugggucgagcucguccgcggccucccccgcgagaacaccaccaucuggaccuccggcuccuccaucuccuucugcggcgucaacuccgacaccgccaacugguccuggcccgacggcgccgagcuccccuucaccaucgacaaguga

SEQ ID NO: 115965 - RNA, 1413 nt, Artificial Sequence; identical to SEQ ID NO: 113497
  derived and/or modified CDS sequence (opt2) from neuraminidase__InfluenzaA__ADN89075

SEQ ID NO: 115966 - RNA, 1413 nt, Artificial Sequence
  derived and/or modified CDS sequence (opt2) from neuraminidase__InfluenzaA__ADN89086
augaaccccaaccagaagaucaucaccaucggcuccaucuccaucgccaucggcaucaucucccucaugcuccagaucggcaacaucaucuccaucugggccucccacuccauccagaccggcucccagaacaacaccggcaucugcaaccagcgcaucaucaccuacgagaacuccaccugggucaaccacaccuacgucaacaucaacaacaccaacgucgucgccggcgaggacaagaccuccgucacccucgccggcaacuccucccucugcuccaucuccggcugggccaucuacaccaaggacaacuccauccgcaucggcuccaagggcgacgucuucgucauccgcgagcccuucaucuccugcucccaccucgagugccgcaccuucuuccucacccagggcgcccuccucaacgacaagcacuccaacggcaccgucaaggaccgcucccccuaccgcgcccucauguccugcccccucggcgaggcccccucccccuacaacuccaaguucgaguccgucgccugguccgccuccgccugccacgacggcaugggcuggcucaccaucggcaucuccggccccgacaacggcgccgucgccguccucaaguacaacggcaucaucaccggcaccaucaaguccuggaagaagcagauccuccgcacccaggaguccgagugcgucugcaugaacggcuccugcuucaccaucaugaccgacggccccuccaacaagaccgccuccuacaagaucuucaagaucgagaagggcaaggucaccaaguccaucgagcucaacgcccccaacuucuacuacgaggagugcuccugcuaccccgacaccggcaucgucaugugcgucugccgcgacaacuggcacggcuccaaccgccccugggucuccuucaaccagaaccucgacuaccagaucggcuacaucugcuccggcgucuucggcgacaacccccgccccgaggacggcgagggcuccugcaaccccgucaccgucgacggcgccaacggcgucaagggcuucuccuacaaguacggcaacggcgucuggaucggccgcaccaaguccaaccgccuccgcaagggcuucgagaugaucugggaccccaacggcuggaccaacaccgacuccgacuucuccgucaagcaggacgucgucgccaucaccgacugguccggcuacuccggcuccuucguccagcaccccgagcucaccggccucgacugcauccgccccugcuucugggucgagcucguccgcggccucccccgcgagaacaccaccaucuggaccuccggcuccuccaucuccuucugcggcgucaacuccgacaccgccaacugguccuggcccgacggcgccgagcuccccuucaccaucgacaaguga

SEQ ID NO: 115967 - RNA, 1413 nt, Artificial Sequence; identical to SEQ ID NO: 113497
  derived and/or modified CDS sequence (opt2) from neuraminidase__InfluenzaA__ADN89097

SEQ ID NO: 115968 - RNA, 1413 nt, Artificial Sequence
  derived and/or modified CDS sequence (opt2) from neuraminidase__InfluenzaA__ADN89108
augaaccccaaccagaagaucaucaccaucggcuccaucuccaucgccaucggcaucaucucccucaugcuccagaucggcaacaucaucuccaucugggccucccacuccauccagaccggcucccagaacaacaccggcaucugcaaccagcgcaucaucaccuacgagaacuccaccugggucaaccacaccuacgucaacaucaacaacaccaacgucgucgccggcgaggacaagaccuccgucacccucgccggcaacuccucccucugcuccaucuccggcugggccaucuacaccaaggacaacuccauccgcaucggcuccaagggcgacgucuucgucauccgcgagcccuucaucuccugcucccaccucgagugccgcaccuucuuccucacccagggcgcccuccucaacgacaagcacuccaacggcaccgucaaggaccgcucccccuaccgcgcccucauguccugcccccucggcgaggcccccucccccuacaacuccaaguucgaguccgucgccugguccgccuccgccugccacgacggcaugggcuggcucaccaucggcaucuccggccccgacaacggcgccgucgccguccucaaguacaacggcaucaucaccggcaccaucaaguccuggaagaagcagauccuccgcacccaggaguccgagugcgucugcaugaacggcuccugcuucaccaucaugaccgacggccccuccaacaaggccgccuccuacaagaucuucaagaucgagaagggcaaggucaccaaguccaucgagcucaacgcccccaacuucuacuacgaggagugcuccugcuaccccgacaccggcaucgucaugugcgucugccgcgacaacuggcacggcuccaaccgccccugggucuccuucaaccagaaccucgacuaccagaucggcuacaucugcuccggcgucuucggcgacaacccccgccccgaggacggcgagggcuccugcaaccccgucaccgucgacggcgccaacggcgucaagggcuucuccuacaaguacggcaacggcgucuggaucggccgcaccaaguccaaccgccuccgcaagggcuucgagaugaucugggaccccaacggcuggaccaacaccgacuccgacuucuccgucaagcaggacgucgucuccaucaccgacugguccggcuacuccggcuccuucguccagcaccccgagcucaccggccucgacugcauccgccccugcuucugggucgagcucguccgcggccucccccgcgagaacaccaccaucuggaccuccggcuccuccaucuccuucugcggcgucaacuccgacaccgccaacugguccuggcccgacggcgccgagcuccccuucaccaucgacaaguga

SEQ ID NO: 115969 - RNA, 1413 nt, Artificial Sequence
  derived and/or modified CDS sequence (opt2) from neuraminidase__InfluenzaA__ADN89119
augaaccccaaccagaagaucaucaccaucggcuccaucuccaucgccaucggcaucaucucccucaugcuccagaucggcaacaucaucuccaucugggccucccacuccauccagaccggcucccagaacaacaccggcaucugcaaccagcgcaucaucaccuacgagaacuccaccugggucaaccacaccuacgucaacaucaacaacaccaacgucgucgccggcgaggacaagaccuccgucacccucgccggcaacuccucccucugcuccaucuccggcugggccaucuacaccaaggacaacuccauccgcaucggcuccaagggcgacgucuucgucauccgcgagcccuucaucuccugcucccaccucgagugccgcaccuucuuccucacccagggcgcccuccucaacgacaagcacuccaacggcaccgucaaggaccgcucccccuaccgcgcccucauguccugcccccucggcgaggcccccucccccuacaacuccaaguucgaguccgucgccugguccgccuccgccugccacgacggcaugggcuggcucaccaucggcaucuccggccccgacaacggcgccgucgccguccucaaguacaacggcaucaucaccggcaccaucaaguccuggaagaagcagauccuccgcacccaggaguccgagugcgucugcaugaacggcuccugcuucaccaucaugaccgacggccccuccaacaaggccgccuccuacaagaucuucaagaucgagaagggcaaggucaccaaguccaucgagcucaacgcccccaacuucuacuacgaggagugcuccugcuaccccgacaccggcaucgucaugugcgucugccgcgacaacuggcacggcuccaaccgccccugggucuccuucaaccagaaccucgacuaccagaucggcuacaucugcuccggcgucuucggcgacaacccccgccccgaggacggcgagggcuccugcaaccccgucaccgucaacggcgccgacggcgucaagggcuucuccuacaaguacggcaacggcgucuggaucggccgcaccaaguccaaccgccuccgcaagggcuucgagaugaucugggaccccaacggcuggaccaacaccgacuccgacuucuccgucaagcaggacgucgucgccaucaccgacugguccggcuacuccggcuccuucguccagcaccccgagcucaccggccucgacugcacccgccccugcuucugggucgagcucguccgcggccucccccgcgagaacaccaccaucuggaccuccggcuccuccaucuccuucugcggcgucaacuccgacaccgccaacugguccuggcccgacggcgccgagcuccccuucaccaucgacaaguga

SEQ ID NO: 115970 - RNA, 1413 nt, Artificial Sequence
  derived and/or modified CDS sequence (opt2) from neuraminidase__InfluenzaA__ADN89130
augaaccccaaccagaagaucaucaccaucggcuccaucuccaucgccaucggcaucaucucccucaugcuccagaucggcaacaucaucuccaucugggccucccacuccauccagaccggcucccagaacaacaccggcaucugcaaccagcgcaucaucaccuacgagaacuccaccugggucaaccacaccuacgucaacaucaacaacaccaacgucgucgccggcgaggacaagaccuccgucacccucgccggcaacuccucccucugcuccaucuccggcugggccaucuacaccaaggacaacuccauccgcaucggcuccaagggcgacgucuucgucauccgcgagcccuucaucuccugcucccaccucgagugccgcaccuucuuccucacccagggcgcccuccucaacgacaagcacuccaacggcaccgucaaggaccgcucccccuaccgcgcccucauguccugcccccucggcgaggcccccucccccuacaacuccaacuucgaguccgucgccugguccgccuccgccugccacgacggcaugggcuggcucaccaucggcaucuccggccccgacaacggcgccgucgccguccucaaguacaacggcaucaucaccggcaccaucaaguccuggaagaagcagauccuccgcacccaggaguccgagugcgucugcaugaacggcuccugcuucaccaucaugaccgacggccccuccaacaaggccgccuccuacaagaucuucaagaucgagaagggcaaggucaccaaguccaucgagcucaacgcccccaacuucuacuacgaggagugcuccugcuaccccgacaccggcaucgucaugugcgucugccgcgacaacuggcacggcuccaaccgccccugggucuccuucaaccagaaccucgacuaccagaucggcuacaucugcuccggcgucuucggcgacaacccccgccccgaggacggcgagggcuccugcaaccccgucaccgucgacggcgccaacggcgucaagggcuucuccuacaaguacggcaacggcgucuggaucggccgcaccaaguccaaccgccuccgcaagggcuucgagaugaucugggaccccaacggcuggaccaacaccgacuccgacuucuccgucaagcaggacgucgucgccaucaccgacugguccggcuacuccggcuccuucguccagcaccccgagcucaccggccucgacugcauccgccccugcuucugggucgagcucguccgcggccucccccgcgagaacaccaccaucuggaccuccggcuccuccaucuccuucugcggcgucaacggcgacaccgccaacugguccuggcccgacggcgccgagcuccccuucaccaucgacaaguga

SEQ ID NO: 115971 - RNA, 1413 nt, Artificial Sequence; identical to SEQ ID NO: 115968
  derived and/or modified CDS sequence (opt2) from neuraminidase__InfluenzaA__ADN89141

SEQ ID NO: 115972 - RNA, 1413 nt, Artificial Sequence
  derived and/or modified CDS sequence (opt2) from neuraminidase__InfluenzaA__ADN89152
augaaccccaaccagaagaucaucaccaucggcuccaucuccaucgccaucggcaucaucucccucaugcuccagaucggcaacaucaucuccaucugggccucccacuccauccagaccggcucccagaacaacaccggcaucugcaaccagcgcaucaucaccuacgagaacuccaccugggucaaccacaccuacgucaacaucaacaacaccaacgucgucgccggcgaggacaagaccuccgucacccucgccggcaacuccucccucugcuccaucuccggcugggccaucuacaccaaggacaacuccauccgcaucggcuccaagggcgacgucuucgucauccgcgagcccuucaucuccugcucccaccucgagugccgcaccuucuuccucacccagggcgcccuccucaacgacaagcacuccaacggcaccgucaaggaccgcucccccuaccgcgcccucauguccugcccccucggcgaggcccccucccccuacaacuccaaguucgaguccgucgccugguccgccuccgccugccacgacggcaugggcuggcucaccaucggcaucuccggccccgacaacggcgccgucgccguccucaaguacaacggcaucaucaccggcaccaucaaguccuggaagaagcagauccuccgcacccaggaguccgagugcgucugcaugaacggcuccugcuucaccaucaugaccgacggccccuccaacaaggccgccuccuacaagaucuucaagaucgagaagggcaaggucaccaaguccaucgagcucaacgcccccaacuucuacuacgaggagugcuccugcuaccccgacaccggcaucgucaugugcgucugccgcgacaacuggcacggcuccaaccgccccugggucuccuucaaccagaaccucgacuaccagaucggcuacaucugcuccggcgucuucggcgacaacccccgccccgaggacggcgagggcuccugcaaccccgucaccaucgacggcgccaacggcgucaagggcuucuccuacaaguacggcaacggcgucuggaucggccgcaccaaguccaaccgccuccgcaagggcuucgagaugaucugggaccccaacggcuggaccaacaccgacuccgacuucuccgucaagcaggacgucgucgccaucaccgacugguccggcuacuccggcuccuucguccagcaccccgagcucaccggccucgacugcauccgccccugcuucugggucgagcucguccgcggccucccccgcgagaacaccaccaucuggaccuccggcuccuccaucuccuucugcggcgucaacuccgacaccgccaacugguccuggcccgacggcgccgagcuccccuucaccaucgacaaguga

SEQ ID NO: 115973 - RNA, 1413 nt, Artificial Sequence
  derived and/or modified CDS sequence (opt2) from neuraminidase__InfluenzaA__ADN89163
augaaccccaaccagcgcaucaucaccaucggcuccaucuccaucgccaucggcaucaucucccucaugcuccagaucggcaacaucaucuccaucugggccucccacuccauccagaccggcucccagaacaacaccggcaucugcaaccagcgcaucaucaccuacgagaacuccaccugggucaaccacaccuacgucaacaucaacaacaccaacgucgucgccggcgaggacaagaccuccgucacccucgccggcaacuccucccucugcuccaucuccggcugggccaucuacaccaaggacaacuccauccgcaucggcuccaagggcgacgucuucgucauccgcgagcccuucaucuccugcucccaccucgagugccgcaccuucuuccucacccagggcgcccuccucaacgacaagcacuccaacggcaccgccaaggaccgcucccccuaccgcgcccucauguccugcccccucggcgaggcccccucccccuacaacuccaaguucgaguccgucgccugguccgccuccgccugccacgacggcaugggcuggcucaccaucggcaucuccggccccgacaacggcgccgucgccguccucaaguacaacggcaucaucaccggcaccaucaaguccuggaagaagcagauccuccgcacccaggaguccgagugcgucugcaugaacggcuccugcuucaccaucaugaccgacggccccuccaacaaggccgccuccuacaagaucuucaagaucgagaagggcaaggucaccaaguccaucgagcucaacgcccccaacuucuacuacgaggagugcuccugcuaccccgacaccggcaucgucaugugcgucugccgcgacaacuggcacggcuccaaccgccccugggucuccuucaaccagaaccucgacuaccagaucggcuacaucugcuccggcgucuucggcgacaacccccgccccgaggacggcgagggcuccugcaaccccgucaccgucgacggcgccaacggcgucaagggcuucuccuacaaguacggcaacggcgucuggaucggccgcaccaaguccaaccgccuccgcaagggcuucgagaugaucugggaccccaacggcuggaccaacaccgacuccgacuucuccgucaagcaggacgucgucgccaucaccgacugguccggcuacuccggcuccuucguccagcaccccgagcucaccggccucgacugcauccgccccugcuucugggucgagcucguccgcggccucccccgcgagaacaccaccaucuggaccuccggcuccuccaucuccuucugcggcgucaacuccgacaccgccaacugguccuggcccgacggcgccgagcuccccuucaccaucgacaaguga

SEQ ID NO: 115974 - RNA, 1413 nt, Artificial Sequence; identical to SEQ ID NO: 114966
  derived and/or modified CDS sequence (opt2) from neuraminidase__InfluenzaA__ADN89174

SEQ ID NO: 115975 - RNA, 1413 nt, Artificial Sequence; identical to SEQ ID NO: 115968
  derived and/or modified CDS sequence (opt2) from neuraminidase__InfluenzaA__ADN89185

SEQ ID NO: 115976 - RNA, 1413 nt, Artificial Sequence
  derived and/or modified CDS sequence (opt2) from neuraminidase__InfluenzaA__ADN89196
augaaccccaaccagaagaucaucaccaucggcuccaucuccaucgccaucggcaucaucucccucaugcuccagaucggcuccaucaucuccaucugggccucccacuccauccagaccggcucccagaacaacaccggcaucugcaaccagcgcaucaucaccuacgagaacuccaccugggucaaccacaccuacgucaacaucaacaacaccaacgucgucgccggcgaggacaagaccuccgucacccucgccggcaacuccucccucugcuccaucuccggcugggccaucuacaccaaggacaacuccauccgcaucggcuccaagggcgacgucuucgucauccgcgagcccuucaucuccugcucccaccucgagugccgcaccuucuuccucacccagggcgcccuccucaacgacaagcacuccaacggcaccgucaaggaccgcucccccuaccgcgcccucauguccugcccccucggcgaggcccccucccccuacaacuccaaguucgaguccgucgccugguccgccuccgccugccacgacggcaugggcuggcucaccaucggcaucuccggccccgacaacggcgccgucgccguccucaaguacaacggcaucaucaccggcaccaucaaguccuggaagaagcagauccuccgcacccaggaguccgagugcgucugcaugaacggcuccugcuucaccaucaugaccgacggccccuccaacaaggccgccuccuacaagaucuucaagaucgagaagggcaaggucaccaaguccaucgagcucaacgcccccaacuucuacuacgaggagugcuccugcuaccccgacaccggcaucgucaugugcgucugccgcgacaacuggcacggcuccaaccgccccugggucuccuucaaccagaaccucgacuaccagaugggcuacaucugcuccggcgucuucggcgacaacccccgccccgaggacggcgagggcuccugcaaccccgucaccgucgacggcgccaacggcgucaagggcuucuccuacaaguacggcaacggcgucuggaucggccgcaccaaguccaaccgccuccgcaagggcuucgagaugaucugggaccccaacggcuggaccaacaccgacuccgacuucucccucaagcaggacgucgucgccaucaccgacugguccggcuacuccggcuccuucguccagcaccccgagcucaccggccucgacugcauccgccccugcuucugggucgagcucguccgcggccucccccgcgagaacaccaccaucuggaccuccggcuccuccaucuccuucugcggcgucaacuccgacaccgccaacugguccuggcccgacggcgccgagcuccccuucaccaucgacaaguga

SEQ ID NO: 115977 - RNA, 1413 nt, Artificial Sequence; identical to SEQ ID NO: 115976
  derived and/or modified CDS sequence (opt2) from neuraminidase__InfluenzaA__ADN89207

SEQ ID NO: 115978 - RNA, 1413 nt, Artificial Sequence
  derived and/or modified CDS sequence (opt2) from neuraminidase__InfluenzaA__ADN89218
augaaccccaaccagaagaucaucaccaucggcuccaucuccaucgccaucggcaucaucucccucaugcuccagaucggcaacaucaucuccaucugggccucccacuccauccagcccggcucccagaacaacaccggcaucugcaaccagcgcaucaucaccuacgagaacuccaccugggucaaccacaccuacgucaacaucaacaacaccaacgucgucgccggcgaggacaagaccuccgucacccucgccggcaacuccucccucugcuccaucuccggcugggccaucuacaccaaggacaacuccauccgcaucggcuccaagggcgacgucuucgucauccgcgagcccuucaucuccugcucccaccucgagugccgcaccuucuuccucacccagggcgcccuccucaacgacaagcacuccaacggcaccgucaaggaccgcucccccuaccgcgcccucauguccugcccccucggcgaggcccccucccccuacaacuccaaguucgaguccgucgccugguccgccuccgccugccacgacggcaugggcuggcucaccaucggcaucuccggccccgacaacggcgccgucgccguccucaaguacaacggcaucaucaccggcaccaucaaguccuggaagaagcagauccuccgcacccaggaguccgagugcgucugcaugaacggcuccugcuucaccaucaugaccgacggccccuccaacaaggccgccuccuacaagaucuucaagaucgagaagggcaaggucaccaaguccaucgagcucaacgcccccaacuucuacuacgaggagugcuccugcuaccccgacaccggcaucgucaugugcgucugccgcgacaacuggcacggcuccaaccgccccugggucuccuucaaccagaaccucgacuaccagaucggcuacaucugcuccggcgucuucggcgacaacccccgccccgaggacggcgagggcuccugcaaccccgucaccgucgacggcgccaacggcgucaagggcuucuccuacaaguacggcaacggcgucuggaucggccgcaccaaguccaaccgccuccgcaagggcuucgagaugaucugggaccccaacggcuggaccaacaccgacuccgacuucuccgucaagcaggacgucgucgccaucaccgacugguccggcuacuccggcuccuucguccagcaccccgagcucaccggccucgacugcauccgccccugcuucugggucgagcucguccgcggccucccccgcgagaacaccaccaucuggaccuccggcuccuccaucuccuucugcggcgucaacggcgacaccgccaacugguccuggcccgacggcgccgagcuccccuucaccaucgacaaguga

SEQ ID NO: 115979 - RNA, 1413 nt, Artificial Sequence
  derived and/or modified CDS sequence (opt2) from neuraminidase__InfluenzaA__ADN89229
augaaccccaaccagaagaucaucaccaucggcuccaucuccaucgccaucggcaucaucucccucaugcuccagaucggcaacaucaucuccaucugggccucccacuccauccagaccggcucccagaacaacaccggcaucugcaaccagcgcaucaucaccuacgagaacuccaccugggucaaccacaccuacgucaacaucaacaacaccaacgucgucgccggcgaggacaagaccuccgucacccucgccggcaacuccucccucugcuccaucuccggcugggccaucuacaccaaggacaacuccauccgcaucggcuccaagggcgacgucuucgucauccgcgagcccuucaucuccugcucccaccucgagugccgcaccuucuuccucacccagggcgcccuccucaacgacaagcacuccaacggcaccgucaaggaccgcucccccuaccgcgcccucauguccugcccccucggcgaggcccccucccccuacaacuccaaguucgaguccgucgccugguccgccuccgccugccacgacggcaugggcuggcucaccaucggcaucuccggccccgacaacggcgccgucgccguccucaaguacaacggcaucaucaccggcaccaucaaguccuggaagaagcagauccuccgcacccaggaguccgagugcgucugcaugaacggcuccugcuucaccaucaugaccgacggccccuccaacaaggccgccuccuacaagaucuucaagaucgagaagggcaaggucaccaaguccaucgagcucaacgcccccaacuucuacuacgaggagugcuccugcuaccccgacaccggcaucgucaugugcgucugccgcgacaacuggcacggcuccaaccgccccugggucuccuucaaccagaaccucgacuaccagaucggcuacaucugcuccggcgucuucggcgacaacccccgccccgaggacggcgagggcuccugcaaccccgucaccgucgacggcgccaacggcgucaagggcuucuccuacaaguacggcaacggcgucuggaucggccgcaccaaguccaaccgccuccgcaagggcuucgagaugaucugggaccccaacggcuggaccaacaccgacuccgacuucuccgucaagcaggacgucgucgccaccaccgacugguccggcuacuccggcuccuucguccagcaccccgagcucaccggccucgacugcauccgccccugcuucugggucgagcucguccgcggccucccccgcgagaacaccaccaucuggaccuccggcuccuccaucuccuucugcggcgucaacuccgacaccgccaacugguccuggcccgacggcgccgagcuccccuucaccaucgacaaguga

SEQ ID NO: 115980 - RNA, 1413 nt, Artificial Sequence
  derived and/or modified CDS sequence (opt2) from neuraminidase__InfluenzaA__ADN89240
augaaccccaaccagaagaucaucaccaucggcuccaucuccaucgccaucggcaucaucucccucaugcuccagaucggcaacaucaucuccaucugggccucccacuccauccagaccggcucccagaacaacaccggcaucugcaaccagcgcaucaucaccuacgagaacuccaccugggucaaccacaccuacgucaacaucaacaacaccaacgucgucgccggcgaggacaagaccuccgucacccucgccggcaacuccucccucugcuccaucuccggcugggccaucuacaccaaggacaacuccauccgcaucggcuccaagggcgacgucuucgucauccgcgagcccuucaucuccugcucccaccucgagugccgcaccuucuuccucacccagggcgcccuccucaacgacaagcacuccaacggcaccgucaaggaccgcucccccuaccgcgcccucauguccugcccccucggcgaggcccccucccccuacaacuccaaguucgaguccgucgccugguccgccuccgccugccacgacggcaugggcuggcucaccaucggcaucuccggccccgacaacggcgccgucgccguccucaaguacaacggcaucaucaccggcaccaucaaguccuggaagaagcagauccuccgcacccaggaguccgagugcgucugcaugaacggcuccugcuucaccaucaugaccgacggccccuccaacaaggccgccuccuacaagaucuucaagaucgagaagggcaaggucaccaaguccaucgagcucaacgcccccaacuucuacuacgaggagugcuccugcuaccccgacaccggcaucgucaugugcgucugccgcgacaacuggcacggcuccaaccgccccugggucuccuucaaccagaaccucgacuaccagaucggcuacaucugcuccggcgucuucggcgacaacccccgccccgaggacggcgagggcuccugcaaccccgucaccgucgacggcgccaacggcgucaagggcuucuccuacaaguacggcaacggcgucuggaucggccgcaccaaguccaaccgccuccgcaagggcuucgagaugaucugggaccccaacggcuggaccaacaccgacuccgacuucuccgucaagcaggacgucgucgccaucaccgacugguccggcuacuccggcuccuucguccagcaccccgagcucaccggccucgacugcauccgccccugcuucugggucgagcucguccgcggccucccccgcgagaacaccaccaucuggaccuccggcuccuccaucuccuucugcggcgucaacggcgacaccgccaacugguccuggcccgacggcgccgagcuccccuucaccaucgacaaguga

SEQ ID NO: 115981 - RNA, 1413 nt, Artificial Sequence; identical to SEQ ID NO: 113497
  derived and/or modified CDS sequence (opt2) from neuraminidase__InfluenzaA__ADN89251

SEQ ID NO: 115982 - RNA, 1413 nt, Artificial Sequence; identical to SEQ ID NO: 113497
  derived and/or modified CDS sequence (opt2) from neuraminidase__InfluenzaA__ADN89262

SEQ ID NO: 115983 - RNA, 1413 nt, Artificial Sequence; identical to SEQ ID NO: 113497
  derived and/or modified CDS sequence (opt2) from neuraminidase__InfluenzaA__ADN89273

SEQ ID NO: 115984 - RNA, 1413 nt, Artificial Sequence; identical to SEQ ID NO: 113497
  derived and/or modified CDS sequence (opt2) from neuraminidase__InfluenzaA__ADN89284

SEQ ID NO: 115985 - RNA, 1413 nt, Artificial Sequence; identical to SEQ ID NO: 113497
  derived and/or modified CDS sequence (opt2) from neuraminidase__InfluenzaA__ADN89295

SEQ ID NO: 115986 - RNA, 1413 nt, Artificial Sequence; identical to SEQ ID NO: 113497
  derived and/or modified CDS sequence (opt2) from neuraminidase__InfluenzaA__ADN89306

SEQ ID NO: 115987 - RNA, 1413 nt, Artificial Sequence
  derived and/or modified CDS sequence (opt2) from neuraminidase__InfluenzaA__ADN89317
augaaccccaaccagcgcaucaucaccaucggcuccaucuccaucgccaucggcaucaucucccucaugcuccagaucggcaacaucaucuccaucugggccucccacuccauccagaccggcucccagaacaacaccggcaucugcaaccagcgcaucaucaccuacgagaacuccaccugggucaaccacaccuacgucaacaucaacuccaccaacgucgucgccggcgaggacaagaccuccgucacccucgccggcaacuccucccucugcuccaucuccggcugggccaucuacaccaaggacaacuccauccgcaucggcuccaagggcgacgucuucgucauccgcgagcccuucaucuccugcucccaccucgagugccgcaccuucuuccucacccagggcgcccuccucaacgacaagcacuccaacggcaccgucaaggaccgcucccccuaccgcgcccucauguccugcccccucggcgaggcccccucccccuacaacuccaaguucgaguccgucgccugguccgccuccgccugccacgacggcaugggcuggcucaccaucggcaucuccggccccgacaacggcgccgucgccguccucaaguacaacggcaucaucaccggcaccaucaaguccuggaagaagcagauccuccgcacccaggaguccgagugcgucugcaugaacggcuccugcuucaccaucaugaccgacggccccuccaacaaggccgccuccuacaagaucuucaagaucgagaagggcaaggucaccaaguccaucgagcucaacgcccccaacuucuacuacgaggagugcuccugcuaccccgacaccggcaucgucaugugcgucugccgcgacaacuggcacggcuccaaccgccccugggucuccuucaaccagaaccucgacuaccagaucggcuacaucugcuccggcgucuucggcgacaacccccgccccgaggacggcgagggcuccugcaaccccgucaccgucgacggcgccaacggcgucaagggcuucuccuacaaguacggcaacggcgucuggaucggccgcaccaaguccaaccgccuccgcaagggcuucgagaugaucugggaccccaacggcuggaccaacaccgacuccgacuucuccgucaagcaggacgucgucgccaucaccgacugguccggcuacuccggcuccuucguccagcaccccgagcucaccggccucgacugcauccgccccugcuucugggucgagcucguccgcggccucccccgcgagaacaccaccaucuggaccuccggcuccuccaucuccuucugcggcgucaacggcgacaccgccaacugguccuggcccgacggcgccgagcuccccuucaccaucgacaaguga

SEQ ID NO: 115988 - RNA, 1413 nt, Artificial Sequence
  derived and/or modified CDS sequence (opt2) from neuraminidase__InfluenzaA__ADN89328
augaaccccaaccagaagaucaucaccaucggcuccaucuccaucgccaucggcaucaucucccucaugcuccagaucggcuccaucaucuccaucugggccucccacuccauccagaccggcucccagaacaacaccggcaucugcaaccagcgcaucaucaccuacgagaacuccaccugggucaaccacaccuacgucaacaucaacaacaccaacgucgucgccggcgaggacaagaccuccgucacccucgccggcaacuccucccucugcuccaucuccggcugggccaucuacaccaaggacaacuccauccgcaucggcuccaagggcgacgucuucgucauccgcgagcccuucaucuccugcucccaccucgagugccgcaccuucuuccucacccagggcgcccuccucaacgacaagcacuccaacggcaccgucaaggaccgcucccccuaccgcgcccucauguccugcccccucggcgaggcccccucccccuacaacuccaaguucgaguccgucgccugguccgccuccgccugccacgacggcaugggcuggcucaccaucggcaucuccggccccgacaacggcgccgucgccguccucaaguacaacggcaucaucaccggcaccaucaaguccuggaagaagcagauccuccgcacccaggaguccgagugcgucugcaugaacggcuccugcuucaccaucaugaccgacggccccuccaacaaggccgccuccuacaagaucuucaagaucgagaagggcaaggucaccaaguccaucgagcucaacgcccccaacuucuacuacgaggagugcuccugcuaccccgacaccggcaucgucaugugcgucugccgcgacaacuggcacggcuccaaccgccccugggucuccuucaaccagaaccucgacuaccagaucggcuacaucugcuccggcgucuucggcgacaacccccgccccgaggacggcgagggcuccugcaaccccgucaccgucgacggcgccaacggcgucaagggcuucuccuacaaguacggcaacggcgucuggaucggccgcaccaaguccaaccgccuccgcaagggcuucgagaugaucugggaccccaacggcuggaccaacaccgacuccgacuucuccgucaagcaggacgucgucgccaucaccgacugguccggcuacuccggcuccuucguccagcaccccgagcucaccggccucgacugcauccgccccugcuucugggucgagcucguccgcggccucccccgcgagaacaccaccaucugggccuccggcuccuccaucuccuucugcggcgucaacuccgacaccgccaacugguccuggcccgacggcgccgagcuccccuucaccaucgacaaguga

SEQ ID NO: 115989 - RNA, 1413 nt, Artificial Sequence; identical to SEQ ID NO: 115973
  derived and/or modified CDS sequence (opt2) from neuraminidase__InfluenzaA__ADN89339

SEQ ID NO: 115990 - RNA, 1413 nt, Artificial Sequence; identical to SEQ ID NO: 115979
  derived and/or modified CDS sequence (opt2) from neuraminidase__InfluenzaA__ADN89350

SEQ ID NO: 115991 - RNA, 1413 nt, Artificial Sequence
  derived and/or modified CDS sequence (opt2) from neuraminidase__InfluenzaA__ADN89361
augaaccccaaccagaagaucaucaccaucggcuccaucuccaucgccaucggcaucaucucccucaugcuccagaucggcuccaucaucuccaucugggccucccacuccauccagaccggcucccagaacaacaccggcaucugcaaccagcgcaucaucaccuacgagaacuccaccugggucaaccacaccuacgucaacaucaacaacaccaacgucgucgccggcgaggacaagaccuccgucacccucgccggcaacuccucccucugcuccaucuccggcugggccaucuacaccaaggacaacuccauccgcaucggcuccaagggcgacgucuucaucauccgcgagcccuucaucuccugcucccaccucgagugccgcaccuucuuccucacccagggcgcccuccucaacgacaagcacuccaacggcaccgucaaggaccgcucccccuaccgcgcccucauguccugcccccucggcgaggcccccucccccuacaacuccaaguucgaguccgucgccugguccgccuccgccugccacgacggcaugggcuggcucaccaucggcaucuccggccccgacaacggcgccgucgccguccucaaguacaacggcaucaucaccggcaccaucaaguccuggaagaagcagauccuccgcacccaggaguccgagugcgucugcaugaacggcuccugcuucaccaucaugaccgacggccccuccaacaaggccgccuccuacaagaucuucaagaucgagaagggcaaggucaccaaguccaucgagcucaacgcccccaacuucuacuacgaggagugcuccugcuaccccgacaccggcaucgucaugugcgucugccgcgacaacuggcacggcuccaaccgccccugggucuccuucaaccagaaccucgacuaccagaucggcuacaucugcuccggcgucuucggcgacaacccccgccccgaggacggcgagggcuccugcaaccccgucaccgucgacggcgccaacggcgucaagggcuucuccuacaaguacggcaacggcgucuggaucggccgcaccaaguccaaccgccuccgcaagggcuucgagaugaucugggaccccaacggcuggaccaacaccgacuccgacuucuccgucaagcaggacgucgucgccaucaccgacugguccggcuacuccggcuccuucguccagcaccccgagcucaccggccucgacugcauccgccccugcuucugggucgagcucguccgcggccucccccgcgagaacaccaccaucuggaccuccggcuccuccaucuccuucugcggcgucaacuccgacaccgccaacugguccuggcccgacggcgccgagcuccccuucaccaucgacaaguga

SEQ ID NO: 115992 - RNA, 1413 nt, Artificial Sequence
  derived and/or modified CDS sequence (opt2) from neuraminidase__InfluenzaA__ADN89372
augaaccccaaccagaagaucaucaccaucggcuccaucuccaucgccaucggcaucaucucccucaugcuccagaucggcaacaucaucuccaucugggccucccacuccauccagaccggcucccagaacaacaccggcaucugcaaccagcgcaucaucaccuacgagaacuccaccugggucaaccacaccuacgucaacaucaacaacaccaacaucgucgccggcgaggacaagaccuccgucacccucgccggcaacuccucccucugcuccaucuccggcugggccaucuacaccaaggacaacuccauccgcaucggcuccaagggcgacgucuucgucauccgcgagcccuucaucuccugcucccaccucgagugccgcaccuucuuccucacccagggcgcccuccucaacgacaagcacuccaacggcaccgucaaggaccgcucccccuaccgcgcccucauguccugcccccucggcgaggcccccucccccuacaacuccaaguucgaguccgucgccugguccgccuccgccugccacgacggcaugggcuggcucaccaucggcaucuccggccccgacaacggcgccgucgccguccucaaguacaacggcaucaucaccggcaccaucaaguccuggaagaagcagauccuccgcacccaggaguccgagugcgucugcaugaacggcuccugcuucaccaucaugaccgacggccccuccaacaaggccgccuccuacaagaucuucaagaucgagaagggcaaggucaccaaguccaucgagcucaacgcccccaacuucuacuacgaggagugcuccugcuaccccgacaccggcaucgucaugugcgucugccgcgacaacuggcacggcuccaaccgccccugggucuccuucaaccagaaccucgacuaccagaucggcuacaucugcuccggcgucuucggcgacaacccccgccccgaggacggcgagggcuccugcaaccccgucaccgucaacggcgccgacggcgucaagggcuucuccuacaaguacggcaacggcgucuggaucggccgcaccaaguccaaccgccuccgcaagggcuucgagaugaucugggaccccaacggcuggaccaacaccgacuccgacuucuccgucaagcaggacgucgucgccaucaccgacugguccggcuacuccggcuccuucguccagcaccccgagcucaccggccucgacugcauccgccccugcuucugggucgagcucguccgcggccucccccgcgagaacaccaccaucuggaccuccggcuccuccaucuccuucugcggcgucaacuccgacaccgccaacugguccuggcccgacggcgccgagcuccccuucaccaucgacaaguga

SEQ ID NO: 115993 - RNA, 1413 nt, Artificial Sequence; identical to SEQ ID NO: 115968
  derived and/or modified CDS sequence (opt2) from neuraminidase__InfluenzaA__ADN89383

SEQ ID NO: 115994 - RNA, 1413 nt, Artificial Sequence
  derived and/or modified CDS sequence (opt2) from neuraminidase__InfluenzaA__ADN89405
augaaccccaaccagaagaucaucaccaucggcuccaucuccaucgccaucggcaucaucucccucaugcuccagaucggcuccaucaucuccaucugggccucccacuccauccagaccggcucccagaacaacaccggcaucugcaaccagcgcaucaucaccuacgagaacuccaccugggucaaccacaccuacgucaacaucaacaacaccaacgucgucgccggcgaggacaagaccuccgucacccucgccggcaacuccucccucugcuccaccuccggcugggccaucuacaccaaggacaacuccauccgcaucggcuccaagggcgacgucuucgucauccgcgagcccuucaucuccugcucccaccucgagugccgcaccuucuuccucacccagggcgcccuccucaacgacaagcacuccaacggcaccgucaaggaccgcucccccuaccgcgcccucauguccugcccccucggcgaggcccccucccccuacaacuccaaguucgaguccgucgccugguccgccuccgccugccacgacggcaugggcuggcucaccaucggcaucuccggccccgacaacggcgccgucgccguccucaaguacaacggcaucaucaccggcaccaucaaguccuggaagaagcagauccuccgcacccaggaguccgagugcgucugcaugaacggcuccugcuucaccaucaugaccgacggccccuccaacaaggccgccuccuacaagaucuucaagaucgagaagggcaaggucaccaaguccaucgagcucaacgcccccaacuucuacuacgaggagugcuccugcuaccccgacaccggcaucgucaugugcgucugccgcgacaacuggcacggcuccaaccgccccugggucuccuucaaccagaaccucgacuaccagaucggcuacaucugcuccggcgucuucggcgacaacccccgccccgaggacggcgagggcuccugcaaccccgucaccgucgacggcgccaacggcgucaagggcuucuccuacaaguacggcaacggcgucuggaucggccgcaccaaguccaaccgccuccgcaagggcuucgagaugaucugggaccccaacggcuggaccaacaccgacuccgacuucuccgucaagcaggacgucgucgccaucaccgacugguccggcuacuccggcuccuucguccagcaccccgagcucaccggccucgacugcauccgccccugcuucugggucgagcucguccgcggccucccccgcgagaacaccaccaucuggaccuccggcuccuccaucuccuucugcggcgucaacuccgacaccgccaacugguccuggcccgacggcgccgagcuccccuucaccaucgacaaguga

SEQ ID NO: 115995 - RNA, 1413 nt, Artificial Sequence
  derived and/or modified CDS sequence (opt2) from neuraminidase__InfluenzaA__ADN89416
augaaccccaaccagaagaucaucaccaucggcuccaucuccaucgccaucggcaucaucucccucaugcuccagaucggcaacaucaucuccaucugggccucccacuccauccagaccggcucccagaacaacaccggcaucugcaaccagcgcaucaucaccuacgagaacuccaccugggucaaccacaccuacgucaacaucaacaacaccaacgucgucgccggcgaggacaagaccuccgucacccucgccggcaacuccucccucugcuccaucuccggcugggccaucuacaccaaggacaacuccauccgcaucggcuccaagggcgacgucuucgucauccgcgagcccuucaucuccugcucccaccucgagugccgcaccuucuuccucacccagggcgcccuccucaacgacaagcacuccaacggcaccgucaaggaccgcucccccuaccgcgcccucauguccugcccccucggcgaggcccccucccccuacaacuccaaguucgaguccgucgccugguccgccuccgccugccacgacggcaugggcuggcucaccaucggcaucuccggccccgacaacggcgccgucgccguccucaaguacaacggcaucaucaccggcaccaucaaguccuggaagaagcagauccuccgcacccaggaguccgagugcgucugcaugaacggcuccugcuucaccaucaugaccgacggccccuccaacaaggccgccuccuacaagaucuucaagaucgagaagggcaaggucaccaaguccaucgagcucaacgcccccaacuucuacuacgaggagugcuccugcuaccccgacaccggcaucgucaugugcgucugccgcgacaacuggcacggcuccaaccgccccugggucuccuucaaccagaaccucgacuaccagaucggcuacaucugcuccggcguccucggcgacaacccccgccccgaggacggcgagggcuccugcaaccccgucaccgucgacggcgccaacggcgucaagggcuucuccuacaaguacggcaacggcgucuggaucggccgcaccaaguccaaccgccuccgcaagggcuucgagaugaucugggaccccaacggcuggaccaacaccgacuccgacuucuccgucaagcaggacgucgucgccaucaccgacugguccggcuacuccggcuccuucguccagcaccccgagcucaccggccucgacugcauccgccccugcuucugggucgagcucguccgcggccucccccgcgagaacaccaccaucuggaccuccggcuccuccaucuccuucugcggcgucaacggcgacaccgccaacugguccuggcccgacggcgccgagcuccccuucaccaucgacaaguga

SEQ ID NO: 115996 - RNA, 1413 nt, Artificial Sequence
  derived and/or modified CDS sequence (opt2) from neuraminidase__InfluenzaA__ADN89427
augaaccccaaccagaagaucaucaccaucggcuccaucuccaucgccaucggcaucaucucccucaugcuccagaucggcuccaucaucuccaucugggccucccacuccauccagaccggcucccagaacaacaccggcaucugcaaccagcgcaucaucaccuacgagaacuccaccugggucaaccacaccuacgucaacaucaacaacaccaacgucgucgccggcgaggacaagaccuccgucacccucgccggcaacuccucccucugcuccaucuccggcugggccaucuacaccaaggacaacuccauccgcaucggcuccaagggcgacgucuucgucauccgcgagcccuucaucuccugcucccaccucgagugccgcaccuucuuccucacccagggcgcccuccucaacgacaagcacuccaacggcaccgucaaggaccgcucccccuaccgcgcccucauguccugcccccucggcgaggcccccucccccuacaacuccaaguucgaguccgucgccugguccgccuccgccugccacgacggcaugggcuggcucaccaucggcaucuccggccccgacaacggcgccgucgccguccucaaguacaacggcaucaucaccggcaccaucaaguccuggaagaagcagauccuccgcacccaggaguccgagugcgucugcaugaacggcuccugcuucaccaucaugaccgacggccccuccaacaaggccgccuccuacaagaucuucaagaucgagaagggcaaggucaccaaguccaucgagcucaacgcccccaacuucuacuacgaggagugcuccugcuaccccgacaccggcaucgucaugugcgucugccgcgacaacuggcacggcuccaaccgccccugggucuccuucaaccagaaccucgacuaccagaucggcuacaucugcuccggcgucuucggcgacaacccccgccccgaggacggcgagggcuccugcaaccccgucaccgucgacggcgccaacggcgucaagggcuucuccuacaaguacggcaacggcgucuggaucggccgcaccaaguccaaccgccuccgcaagggcuucgagaugaucugggaccccaacggcuggaccaacaccgacuccgacuucuccgucaagcaggacgucgucgccaucaccgacugguccggcuacuccggcuccuucguccagcaccccgagcucaccggccucgacugcauccgccccugcuucugggucgagcucguccgcggccucccccgcgagaacaccaccaucuggaccuccggcuccuccaucuccuucugcggcgucgacuccgacgccgccgacugguccuggcccgacggcgccgagcuccccuucaccaucgacaaguga

SEQ ID NO: 115997 - RNA, 1413 nt, Artificial Sequence; identical to SEQ ID NO: 113497
  derived and/or modified CDS sequence (opt2) from neuraminidase__InfluenzaA__ADN89438

SEQ ID NO: 115998 - RNA, 1413 nt, Artificial Sequence
  derived and/or modified CDS sequence (opt2) from neuraminidase__InfluenzaA__ADN89449
augaaccccaaccagaagaucaucaccaucggcuccaucuccaucgccaucggcaucaucucccucaugcuccagaucggcaacaucaucuccaucugggccucccacuccauccagaccggcucccagaacaacaccggcaucugcaaccagcgcaucaucaccuacgagaacuccaccugggucaaccacaccuacgucaacaucaacaacaccaacgucgucgccggcgaggacaagcccuccgucacccucgccggcaacuccucccucugcuccaucuccggcugggccaucuacaccaaggacaacuccauccgcaucggcuccaagggcgacgucuucgucauccgcgagcccuucaucuccugcucccaccucgagugccgcaccuucuuccucacccagggcgcccuccucaacgacaagcacuccaacggcaccgucaaggaccgcucccccuaccgcgcccucauguccugcccccucggcgaggcccccucccccuacaacuccaaguucgaguccgucgccugguccgccuccgccugccacgacggcaugggcuggcucaccaucggcaucuccggccccgacaacggcgccgucgccguccucaaguacaacggcaucaucaccggcaccaucaaguccuggaagaagcagauccuccgcacccaggaguccgagugcgucugcaugaacggcuccugcuucaccaucaugaccgacggccccuccaacaaggccgccuccuacaagaucuucaagaucgagaagggcaaggucaccaaguccaucgagcucaacgcccccaacuucuacuacgaggagugcuccugcuaccccgacaccggcaucgucaugugcgucugccgcgacaacuggcacggcuccaaccgccccugggucuccuucaaccagaaccucgacuaccagaucggcuacaucugcuccggcgucuucggcgacaacccccgccccgaggacggcgagggcuccugcaaccccgucaccgucgacggcgccaacggcgucaagggcuucuccuacaaguacggcaacggcgucuggaucggccgcaccaaguccaaccgccuccgcaagggcuucgagaugaucugggaccccaacggcuggaccaacaccgacuccgacuucuccgucaagcaggacgucgucgccaucaccgacugguccggcuacuccggcuccuucguccagcaccccgagcucaccggccucgacugcauccgccccugcuucugggucgagcucguccgcggccucccccgcgagaacaccaccaucuggaccuccggcuccuccaucuccuucugcggcgucaacuccgacaccgccaacugguccuggcccgacggcgccgagcuccccuucaccaucgacaaguga

SEQ ID NO: 115999 - RNA, 1413 nt, Artificial Sequence; identical to SEQ ID NO: 114966
  derived and/or modified CDS sequence (opt2) from neuraminidase__InfluenzaA__ADN89460

SEQ ID NO: 116000 - RNA, 1413 nt, Artificial Sequence; identical to SEQ ID NO: 113497
  derived and/or modified CDS sequence (opt2) from neuraminidase__InfluenzaA__ADN89482

SEQ ID NO: 116001 - RNA, 1413 nt, Artificial Sequence
  derived and/or modified CDS sequence (opt2) from neuraminidase__InfluenzaA__ADN89493
augaaccccaaccagaagaucaucaccaucggcuccaucuccaucgccaucggcaucaucucccucaugcuccagaucggcaacaucaucuccaucugggccucccacuccauccagaccgagucccagaacaacaccggcaucugcaaccagcgcaucaucaccuacgagaacuccaccugggucaaccacaccuacgucaacaucaacaacaccaacgucgucgccggcgaggacaagaccuccgucacccucgccggcaacuccucccucugcuccaucuccggcugggccaucuacaccaaggacaacuccauccgcaucggcuccaagggcgacgucuucgucauccgcgagcccuucaucuccugcucccaccucgagugccgcaccuucuuccucacccagggcgcccuccucaacgacaagcacuccaacggcaccgucaaggaccgcucccccuaccgcgcccucauguccugcccccucggcgaggcccccucccccuacaacuccaaguucgaguccgucgccugguccgccuccgccugccacgacggcaugggcuggcucaccaucggcaucuccggccccgacaacggcgccgucgccguccucaaguacaacggcaucaucaccggcaccaucaaguccuggaagaagcagauccuccgcacccaggaguccgagugcgucugcaugaacggcuccugcuucaccaucaugaccgacggccccuccaacaaggccgccuccuacaagaucuucaagaucgagaagggcaaggucaccaaguccaucgagcucaacgcccccaacuucuacuacgaggagugcuccugcuaccccgacaccggcaucgucaugugcgucugccgcgacaacuggcacggcuccaaccgccccugggucuccuucaaccagaaccucgacuaccagaugggcuacaucugcuccggcgucuucggcgacaacccccgccccgaggacggcgagggcuccugcaaccccgucaccgucgacggcgccaacggcgucaagggcuucuccuacaaguacggcaacggcgucuggaucggccgcaccaaguccaaccgccuccgcaagggcuucgagaugaucugggaccccaacggcuggaccaacaccgacuccgacuucuccgucaagcaggacgucgucgccaucaccgacugguccggcuacuccggcuccuucguccagcaccccgagcucaccggccucgacugcauccgccccugcuucugggucgagcucguccgcggccucccccgcgagaacaccaccaucuggaccuccggcuccuccaucuccuucugcggcgucaacuccgacaccgccaacugguccuggcccgacggcgccgagcuccccuucaccaucgacaaguga

SEQ ID NO: 116002 - RNA, 1413 nt, Artificial Sequence; identical to SEQ ID NO: 113497
  derived and/or modified CDS sequence (opt2) from neuraminidase__InfluenzaA__ADN89504

SEQ ID NO: 116003 - RNA, 1413 nt, Artificial Sequence
  derived and/or modified CDS sequence (opt2) from neuraminidase__InfluenzaA__ADN89515
augaaccccaaccagaagaucaucaccaucggcuccaucuccaucgccaucggcaucaucucccucaugcuccagaucggcaacaucaucuccaucugggccucccacuccauccagaccggcucccagaacaacaccggcaucugcaaccagcgcaucaucaccuacgagaacuccaccugggucaaccacaccuacgucaacaucaacaacaccaacgucgucgccggcgaggacaagaccuccgucacccucgccggcaacuccucccucugcuccaucuccggcugggccaucuacaccaaggacaacuccauccgcaucggcuccaagggcgacgucuucgucauccgcgagcccuucaucuccugcucccaccucgagugccgcaccuucuuccucacccagggcgcccuccucaacgacaagcacuccaacggcaccgucaaggaccgcucccccuaccgcgcccucauguccugcccccucggcgaggcccccucccccuacaacuccaaguucgaguccgucgccugguccgccuccgccugccacgacggcaugggcuggcucaccaucggcaucuccggccccgacaacggcgccgucgccguccucaaguacaacggcaucaucaccggcaccaucaaguccuggaagaagcagauccuccgcacccaggaguccgagugcgucugcaugaacggcuccugcuucaccaucaugaccgacggccccuccaacaaggccgccuccuacaagaucuucaagaucgagaagggcaaggucaccaaguccaucgagcucaacgcccccaacuucuacuacgaggagugcuccugcuaccccgacaccggcaucgucaugugcgucugccgcgacaacuggcacggcuccaaccgccccugggucuccuucaaccagaaccucgacuaccagaucggcuacaucugcuccggcgucuucggcgacaacccccgccccgaggacggcgagggcuccugcaaccccgucaccgucgacggcgccaacggcgucaagggcuucuccuacaaguacggcaacggcgucuggaucggccgcaccaaguccaaccgccuccgcaagggcuucgagaugaucugggaccccaacggcuggaccaacaccgacuccgacuucaccgucaagcaggacgucgucgccaucaccgacugguccggcuacuccggcuccuucguccagcaccccgagcucaccggccucgacugcauccgccccugcuucugggucgagcucguccgcggccucccccgcgagaacaccaccaucuggaccuccggcuccuccaucuccuucugcggcgucaacuccgacaccgccaacugguccuggcccgacggcgccgagcuccccuucaccaucgacaaguga

SEQ ID NO: 116004 - RNA, 1413 nt, Artificial Sequence; identical to SEQ ID NO: 113497
  derived and/or modified CDS sequence (opt2) from neuraminidase__InfluenzaA__ADN89526

SEQ ID NO: 116005 - RNA, 1413 nt, Artificial Sequence; identical to SEQ ID NO: 115968
  derived and/or modified CDS sequence (opt2) from neuraminidase__InfluenzaA__ADN89537

SEQ ID NO: 116006 - RNA, 1413 nt, Artificial Sequence; identical to SEQ ID NO: 113497
  derived and/or modified CDS sequence (opt2) from neuraminidase__InfluenzaA__ADN89548

SEQ ID NO: 116007 - RNA, 1413 nt, Artificial Sequence; identical to SEQ ID NO: 113497
  derived and/or modified CDS sequence (opt2) from neuraminidase__InfluenzaA__ADN89570

SEQ ID NO: 116008 - RNA, 1413 nt, Artificial Sequence
  derived and/or modified CDS sequence (opt2) from neuraminidase__InfluenzaA__ADN89581
augaaccccaaccagaagaucaucaccaucggcuccaucuccaucgccaucggcaucaucucccucaugcuccagaucggcaacaucaucuccaucugggccucccacuccauccagaccggcucccagaacaacaccggcaucugcaaccagcgcaucaucaccuacgagaacuccaccugggucaaccacaccuacgucaacaucaacaacaccaacgucgucgccggcgaggacaagaccuccgucacccucgccggcaacuccucccucugcuccaucuccggcugggccaucuacaccaaggacaacuccauccgcaucggcuccaagggcgacgucuucgucauccgcgagcccuucaucuccugcucccaccucgagugccgcaccuucuuccucacccagggcgcccuccucaacgacaagcacuccaacggcaccgucaaggaccgcucccccuaccgcgcccucauguccugcccccucggcgaggcccccucccccuacaacuccaaguucgaguccgucgccugguccgccuccgccugccacgacggcaugggcuggcucaccaucggcaucuccggccccgacaacggcgccgucgccguccucaaguacaacggcaucaucaccggcaccaucaaguccuggaagaagcagauccuccgcacccaggaguccgagugcgucugcaugaacggcuccugcuucaccaucaugaccgacggccccuccaacaagaccgccuccuacaagaucuucaagaucgagaagggcaaggucaccaaguccaucgagcucaacgcccccaacuucuacuacgaggagugcuccugcuaccccgacaccggcaucgucaugugcgucugccgcgacaacuggcacggcuccaaccgccccugggucuccuucaaccagaaccucgacuaccagaucggcuacaucugcuccggcgucuucggcgacaacccccgccccgaggacggcgagggcuccugcaaccccgucaccgucgacggcgccaacggcgucaagggcuucuccuacaaguacggcaacggcgucuggaucggccgcaccaaguccaaccgccuccgcaagggcuucgagaugaucugggaccccaacggcuggaccaacaccgacuccgacuucuccgucaagcaggacgucgucgccaucaccgacugguccggcuacuccggcuccuucguccagcaccccgagcucaccggccucgacugcauccgccccugcuucugggucgagcucguccgcggccucccccgcgagaacaccaccaucuggaccuccggcuccuccaucuccuucugcggcgucaacggcgacaccgccaacugguccuggcccgacggcgccgagcuccccuucaccaucgacaaguga

SEQ ID NO: 116009 - RNA, 1413 nt, Artificial Sequence; identical to SEQ ID NO: 114966
  derived and/or modified CDS sequence (opt2) from neuraminidase__InfluenzaA__ADN89592

SEQ ID NO: 116010 - RNA, 1413 nt, Artificial Sequence; identical to SEQ ID NO: 114966
  derived and/or modified CDS sequence (opt2) from neuraminidase__InfluenzaA__ADN89603

SEQ ID NO: 116011 - RNA, 1413 nt, Artificial Sequence; identical to SEQ ID NO: 115976
  derived and/or modified CDS sequence (opt2) from neuraminidase__InfluenzaA__ADN89614

SEQ ID NO: 116012 - RNA, 1413 nt, Artificial Sequence; identical to SEQ ID NO: 115995
  derived and/or modified CDS sequence (opt2) from neuraminidase__InfluenzaA__ADN89625

SEQ ID NO: 116013 - RNA, 1413 nt, Artificial Sequence; identical to SEQ ID NO: 113497
  derived and/or modified CDS sequence (opt2) from neuraminidase__InfluenzaA__ADN89636

SEQ ID NO: 116014 - RNA, 1413 nt, Artificial Sequence; identical to SEQ ID NO: 113497
  derived and/or modified CDS sequence (opt2) from neuraminidase__InfluenzaA__ADN89647

SEQ ID NO: 116015 - RNA, 1413 nt, Artificial Sequence; identical to SEQ ID NO: 113497
  derived and/or modified CDS sequence (opt2) from neuraminidase__InfluenzaA__ADN89658

SEQ ID NO: 116016 - RNA, 1413 nt, Artificial Sequence; identical to SEQ ID NO: 114966
  derived and/or modified CDS sequence (opt2) from neuraminidase__InfluenzaA__ADN89669

SEQ ID NO: 116017 - RNA, 1413 nt, Artificial Sequence; identical to SEQ ID NO: 113497
  derived and/or modified CDS sequence (opt2) from neuraminidase__InfluenzaA__ADN89680

SEQ ID NO: 116018 - RNA, 1413 nt, Artificial Sequence; identical to SEQ ID NO: 113497
  derived and/or modified CDS sequence (opt2) from neuraminidase__InfluenzaA__ADN89691

SEQ ID NO: 116019 - RNA, 1413 nt, Artificial Sequence; identical to SEQ ID NO: 115995
  derived and/or modified CDS sequence (opt2) from neuraminidase__InfluenzaA__ADN89702

SEQ ID NO: 116020 - RNA, 1413 nt, Artificial Sequence; identical to SEQ ID NO: 113497
  derived and/or modified CDS sequence (opt2) from neuraminidase__InfluenzaA__ADN89713

SEQ ID NO: 116021 - RNA, 1413 nt, Artificial Sequence; identical to SEQ ID NO: 113497
  derived and/or modified CDS sequence (opt2) from neuraminidase__InfluenzaA__ADN89724

SEQ ID NO: 116022 - RNA, 1413 nt, Artificial Sequence; identical to SEQ ID NO: 113497
  derived and/or modified CDS sequence (opt2) from neuraminidase__InfluenzaA__ADN89735

SEQ ID NO: 116023 - RNA, 1413 nt, Artificial Sequence; identical to SEQ ID NO: 113497
  derived and/or modified CDS sequence (opt2) from neuraminidase__InfluenzaA__ADN89746

SEQ ID NO: 116024 - RNA, 1413 nt, Artificial Sequence; identical to SEQ ID NO: 113497
  derived and/or modified CDS sequence (opt2) from neuraminidase__InfluenzaA__ADN89757

SEQ ID NO: 116025 - RNA, 1413 nt, Artificial Sequence; identical to SEQ ID NO: 113497
  derived and/or modified CDS sequence (opt2) from neuraminidase__InfluenzaA__ADN89768

SEQ ID NO: 116026 - RNA, 1413 nt, Artificial Sequence; identical to SEQ ID NO: 115972
  derived and/or modified CDS sequence (opt2) from neuraminidase__InfluenzaA__ADN89779

SEQ ID NO: 116027 - RNA, 1413 nt, Artificial Sequence; identical to SEQ ID NO: 113497
  derived and/or modified CDS sequence (opt2) from neuraminidase__InfluenzaA__ADN89790

SEQ ID NO: 116028 - RNA, 1413 nt, Artificial Sequence
  derived and/or modified CDS sequence (opt2) from neuraminidase__InfluenzaA__ADN89801
augaaccccaaccagaagaucaucaccaucggcuccaucuccaucgccaucggcaccaucucccucaugcuccagaucggcaacaucaucuccaucugggccucccacuccauccagaccggcucccagaacaacaccggcaucugcaaccagcgcaucaucaccuacaagaacuccaccugggucaaccacaccuacgucaacaucaacaacaccaacgucgucgccggcgaggacaagaccuccgucacccucgccggcaacuccucccucugcuccaucuccggcugggccaucuacaccaaggacaacuccauccgcaucggcuccaagggcgacgucuucgucauccgcgagcccuucaucuccugcucccaccucgagugccgcaccuucuuccucacccagggcgcccuccucaacgacaagcacuccaacggcaccgucaaggaccgcucccccuaccgcgcccucauguccugcccccucggcgaggcccccucccccuacaacuccaaguucgaguccgucgccugguccgccuccgccugccacgacggcaugggcuggcucaccaucggcaucuccggccccgacaacggcgccgucgccguccucaaguacaacggcaucaucaccggcaccaucaaguccuggaagaagcagauccuccgcacccaggaguccgagugcgucugcaugaacggcuccugcuucaccaucaugaccgacggccccuccaacaaggccgccuccuacaagaucuucaagaucgagaagggcaaggucaccaaguccaucgagcucaacgcccccaacuucuacuacgaggagugcuccugcuaccccgacaccggcaucgucaugugcgucugccgcgacaacuggcacggcuccaaccgccccugggucuccuucaaccagaaccucgacuaccagaucggcuacaucugcuccggcgucuucggcgacaacccccgccccgaggacggcgagggcuccugcaaccccgucaccgucgacggcgccaacggcgucaagggcuucuccuacaaguacggcaacggcgucuggaucggccgcaccaaguccaaccgccuccgcaagggcuucgagaugaucugggaccccaacggcuggaccaacaccgacuccgacuucuccgucaagcaggacgucgucgccaucaccgacugguccggcuacuccggcuccuucguccagcaccccgagcucaccggccucgacugcauccgccccugcuucugggucgagcucguccgcggccucccccgcgagaacaccaccaucuggaccuccggcuccuccaucuccuucugcggcgucaacuccgacaccgccaacugguccuggcccgacggcgccgagcuccccuucaccaucgacaaguga

SEQ ID NO: 116029 - RNA, 1413 nt, Artificial Sequence
  derived and/or modified CDS sequence (opt2) from neuraminidase__InfluenzaA__ADN89823
augaaccccaaccagaagaucaucaccaucggcuccaucuccaucgccaucggcaucaucucccucaugcuccagaucggcuccaucaucuccaucugggccucccacuccauccacaccggcucccagaacaacaccggcaucugcaaccagcgcaucaucaccuacgagaacuccaccugggucaaccacaccuacgucaacaucaacaacaccaacgucgucgccggcgaggacaagaccuccgucacccucgccggcaacuccucccucugcuccaucuccggcugggccaucuacaccaaggacaacuccauccgcaucggcuccaagggcgacgucuucgucauccgcgagcccuucaucuccugcucccaccucgagugccgcaccuucuuccucacccagggcgcccuccucaacgacaagcacuccaacggcaccgucaaggaccgcucccccuaccgcgcccucauguccugcccccucggcgaggcccccucccccuacaacuccaaguucgaguccgucgccugguccgccuccgccugccacgacggcaugggcuggcucaccaucggcaucuccggccccgacaacggcgccgucgccguccucaaguacaacggcaucaucaccggcaccaucaaguccuggaagaagcagauccuccgcacccaggaguccgagugcgucugcaugaacggcuccugcuucaccaucaugaccgacggccccuccaacaaggccgccuccuacaagaucuucaagaucgagaagggcaaggucaccaaguccaucgagcucaacgcccccaacuucuacuacgaggagugcuccugcuaccccgacaccggcaucgucaugugcgucugccgcgacaacuggcacggcuccaaccgccccugggucuccuucaaccagaaccucgacuaccagaucggcuacaucugcuccggcgucuucggcgacaacccccgccccgaggacggcgagggcuccugcaaccccgucaccgucgacggcgccaacggcgucaagggcuucuccuacaaguacggcaacggcgucuggaucggccgcaccaaguccaaccgccuccgcaagggcuucgagaugaucugggaccccaacggcuggaccaacaccgacuccgacuucuccgucaagcaggacgucgucgccaucaccgacugguccggcuacuccggcuccuucguccagcaccccgagcucaccggccucgacugcauccgccccugcuucugggucgagcucguccgcggccucccccgcgagaacaccaccaucuggaccuccggcuccuccaucuccuucugcggcgucaacuccgacaccgccaacugguccuggcccgacggcgccgagcuccccuucaccaucgacaaguga

SEQ ID NO: 116030 - RNA, 1413 nt, Artificial Sequence; identical to SEQ ID NO: 114966
  derived and/or modified CDS sequence (opt2) from neuraminidase__InfluenzaA__ADN89834

SEQ ID NO: 116031 - RNA, 1413 nt, Artificial Sequence; identical to SEQ ID NO: 115968
  derived and/or modified CDS sequence (opt2) from neuraminidase__InfluenzaA__ADN89845

SEQ ID NO: 116032 - RNA, 1413 nt, Artificial Sequence; identical to SEQ ID NO: 113497
  derived and/or modified CDS sequence (opt2) from neuraminidase__InfluenzaA__ADN89856

SEQ ID NO: 116033 - RNA, 1410 nt, Artificial Sequence; identical to SEQ ID NO: 115446
  derived and/or modified CDS sequence (opt2) from neuraminidase__InfluenzaA__ADN89867

SEQ ID NO: 116034 - RNA, 1410 nt, Artificial Sequence; identical to SEQ ID NO: 115446
  derived and/or modified CDS sequence (opt2) from neuraminidase__InfluenzaA__ADN89878

SEQ ID NO: 116035 - RNA, 1410 nt, Artificial Sequence; identical to SEQ ID NO: 115446
  derived and/or modified CDS sequence (opt2) from neuraminidase__InfluenzaA__ADN89889

SEQ ID NO: 116036 - RNA, 1410 nt, Artificial Sequence; identical to SEQ ID NO: 115446
  derived and/or modified CDS sequence (opt2) from neuraminidase__InfluenzaA__ADN89900

SEQ ID NO: 116037 - RNA, 1410 nt, Artificial Sequence; identical to SEQ ID NO: 115446
  derived and/or modified CDS sequence (opt2) from neuraminidase__InfluenzaA__ADN89911

SEQ ID NO: 116038 - RNA, 1410 nt, Artificial Sequence
  derived and/or modified CDS sequence (opt2) from neuraminidase__InfluenzaA__ADN89922
augaaccccaaccagaagaucaucaccaucggcuccgucucccucaccaucuccaccaucugcuucuucaugcagaucgccauccucaucaccaccgucacccuccacuucaagcaguacaaguucaacuccccccccaacaaccaggucaugcucugcgagcccaccaucaucgagcgcaacaucaccgagaucgucuaccucaccaacaccaccaucgagaaggagaucugccccaagcucgccgaguaccgcaacugguccaagccccagugcgacaucaccggcuucgcccccuucuccaaggacaacuccauccgccucuccgccggcggcgacaucugggucacccgcgagcccuacgucuccugcgaccccgacaagugcuaccaguucgcccucggccagggcaccacccucaacaacguccacuccaacaacaccguccgcgaccgcacccccuaccgcacccuccucaugaacgagcucggcguccccuuccaccucggcaccaagcaggucugcaucgccugguccuccuccuccugccacgacggcaaggccuggcuccacgucugcaucaccggcgacgacaagaacgccaccgccuccuucaucuacaacggccgccucgucgacuccgucgucuccugguccaaggagauccuccgcacccaggaguccgagugcgucugcaucaacggcaccugcaccgucgucaugaccgacggcuccgccuccggcaaggccgacaccaagauccucuucaucgaggagggcaagaucguccacaccuccacccucuccggcuccgcccagcacgucgaggagugcuccugcuacccccgcuaccccggcguccgcugcgucugccgcgacaacuggaagggcuccaaccgccccaucgucgacaucaacaucaaggaccacuccaucgucuccuccuacgucugcuccggccucgucggcgacaccccccgcaagaacgacuccuccuccuccucccacugccucgaccccaacaacgaggagggcggccacggcgucaagggcugggccuucgacgacggcaacgacgucuggaugggccgcaccaucaacgagaccucccgccucggcuacgagaccuucaaggucaucgagggcugguccaaccccaaguccaagcuccagaucaaccgccaggucaucgucgaccgcggcaaccgcuccggcuacuccggcaucuucuccgucgagggcaaguccugcaucaaccgcugcuucuacgucgagcucauccgcggccgcaaggaggagaccgagguccucuggaccuccaacuccaucgucgucuucugcggcaccuccggcaccuacggcaccggcuccuggcccgacggcgccgaccucaacaucaugcccaucuga

SEQ ID NO: 116039 - RNA, 1410 nt, Artificial Sequence; identical to SEQ ID NO: 115446
  derived and/or modified CDS sequence (opt2) from neuraminidase__InfluenzaA__ADN89933

SEQ ID NO: 116040 - RNA, 1410 nt, Artificial Sequence; identical to SEQ ID NO: 115446
  derived and/or modified CDS sequence (opt2) from neuraminidase__InfluenzaA__ADN89955

SEQ ID NO: 116041 - RNA, 1410 nt, Artificial Sequence; identical to SEQ ID NO: 115446
  derived and/or modified CDS sequence (opt2) from neuraminidase__InfluenzaA__ADN89966

SEQ ID NO: 116042 - RNA, 1410 nt, Artificial Sequence; identical to SEQ ID NO: 115446
  derived and/or modified CDS sequence (opt2) from neuraminidase__InfluenzaA__ADN89977

SEQ ID NO: 116043 - RNA, 1410 nt, Artificial Sequence; identical to SEQ ID NO: 115446
  derived and/or modified CDS sequence (opt2) from neuraminidase__InfluenzaA__ADN89988

SEQ ID NO: 116044 - RNA, 1410 nt, Artificial Sequence; identical to SEQ ID NO: 115446
  derived and/or modified CDS sequence (opt2) from neuraminidase__InfluenzaA__ADN89999

SEQ ID NO: 116045 - RNA, 1410 nt, Artificial Sequence; identical to SEQ ID NO: 115446
  derived and/or modified CDS sequence (opt2) from neuraminidase__InfluenzaA__ADN90010

SEQ ID NO: 116046 - RNA, 1410 nt, Artificial Sequence; identical to SEQ ID NO: 115446
  derived and/or modified CDS sequence (opt2) from neuraminidase__InfluenzaA__ADN90021

SEQ ID NO: 116047 - RNA, 1410 nt, Artificial Sequence; identical to SEQ ID NO: 115446
  derived and/or modified CDS sequence (opt2) from neuraminidase__InfluenzaA__ADN90032

SEQ ID NO: 116048 - RNA, 1410 nt, Artificial Sequence; identical to SEQ ID NO: 115446
  derived and/or modified CDS sequence (opt2) from neuraminidase__InfluenzaA__ADN90043

SEQ ID NO: 116049 - RNA, 1410 nt, Artificial Sequence; identical to SEQ ID NO: 115446
  derived and/or modified CDS sequence (opt2) from neuraminidase__InfluenzaA__ADN90054

SEQ ID NO: 116050 - RNA, 1410 nt, Artificial Sequence; identical to SEQ ID NO: 115446
  derived and/or modified CDS sequence (opt2) from neuraminidase__InfluenzaA__ADN90065

SEQ ID NO: 116051 - RNA, 1410 nt, Artificial Sequence; identical to SEQ ID NO: 115446
  derived and/or modified CDS sequence (opt2) from neuraminidase__InfluenzaA__ADN90076

SEQ ID NO: 116052 - RNA, 1410 nt, Artificial Sequence; identical to SEQ ID NO: 115446
  derived and/or modified CDS sequence (opt2) from neuraminidase__InfluenzaA__ADN90087

SEQ ID NO: 116053 - RNA, 1410 nt, Artificial Sequence; identical to SEQ ID NO: 115446
  derived and/or modified CDS sequence (opt2) from neuraminidase__InfluenzaA__ADN90098

SEQ ID NO: 116054 - RNA, 1410 nt, Artificial Sequence; identical to SEQ ID NO: 115446
  derived and/or modified CDS sequence (opt2) from neuraminidase__InfluenzaA__ADN90109

SEQ ID NO: 116055 - RNA, 1410 nt, Artificial Sequence; identical to SEQ ID NO: 115446
  derived and/or modified CDS sequence (opt2) from neuraminidase__InfluenzaA__ADN90120

SEQ ID NO: 116056 - RNA, 1410 nt, Artificial Sequence; identical to SEQ ID NO: 115446
  derived and/or modified CDS sequence (opt2) from neuraminidase__InfluenzaA__ADN90131

SEQ ID NO: 116057 - RNA, 1410 nt, Artificial Sequence; identical to SEQ ID NO: 115446
  derived and/or modified CDS sequence (opt2) from neuraminidase__InfluenzaA__ADN90142

SEQ ID NO: 116058 - RNA, 1410 nt, Artificial Sequence; identical to SEQ ID NO: 115446
  derived and/or modified CDS sequence (opt2) from neuraminidase__InfluenzaA__ADN90153

SEQ ID NO: 116059 - RNA, 1410 nt, Artificial Sequence; identical to SEQ ID NO: 115446
  derived and/or modified CDS sequence (opt2) from neuraminidase__InfluenzaA__ADN90164

SEQ ID NO: 116060 - RNA, 1410 nt, Artificial Sequence; identical to SEQ ID NO: 115446
  derived and/or modified CDS sequence (opt2) from neuraminidase__InfluenzaA__ADN90186

SEQ ID NO: 116061 - RNA, 1410 nt, Artificial Sequence; identical to SEQ ID NO: 115446
  derived and/or modified CDS sequence (opt2) from neuraminidase__InfluenzaA__ADN90197

SEQ ID NO: 116062 - RNA, 1410 nt, Artificial Sequence
  derived and/or modified CDS sequence (opt2) from neuraminidase__InfluenzaA__ADN90208
augaaccccaaccagaagaucaucaccaucggcuccgucucccucaccaucuccaccaucugcuucuucaugcagaucgccauccucaucaccaccgucacccuccacuucaagcaguacaaguucaacuccccccccaacaaccaggucaugcucugcgagcccaccaucaucgagcgcaacaucaccgagaucgucuaccucaccaacaccaccaucgagaaggagaucugccccaagcucgccgaguaccgcaacugguccaagccccagugcgacaucaccggcuucgcccccuucuccaaggacaacuccauccgccucuccgccggcggcgacaucugggucacccgcgagcccuacgucuccugcgaccccgacaagugcuaccaguucgcccucggccagggcaccacccucaacaacguccacuccaacaacaccguccgcgaccgcacccccuaccgcacccuccucaugaacgagcucggcguccccuuccaccucggcaccaagcaggucugcaucgccugguccuccuccuccugccacgacggcaaggccuggcuccacgucugcaucaccggcgacgacaagaacgccaccgccuccuucaucuacaacggccgccucgucgacuccgucgucuccugguccaaggagauccuccgcacccaggaguccgagugcgucugcaucaacggcaccugcaccgucgucaugaccgacggcuccgccuccggcaaggccgacaccaagauccucuucaucgaggagggcaagaucguccacaccuccacccucuccggcuccgcccagcacgucgaggagugcuccugcuacccccgcuaccccggcguccgcugcgucugccgcgacaacuggaagggcuccaaccgccccaucgucgacaucaacaucaaggaccacuccaucgucuccuccuacgucugcuccggccucgucggcgacaccccccgcaagaacgacuccuccuccuccucccacugccucgaccccaacaacgaggagggcggccacggcgucaagggcugggccuucgacgacggcaacgacgucuggaugggccgcaccaucaacgagaccucccgccucggcuacgagaccuucaaggucaucgagggcugguccaaccccaaguccaagcuccagaucaaccgccaggucaucgucgaccgcuccaaccgcuccggcuacuccggcaucuucuccgucgagggcaaguccugcaucaaccgcugcuucuacgucgagcucauccgcggccgcaaggaggagaccgagguccucuggaccuccaacuccaucgucgucuucugcggcaccuccggcaccuacggcaccggcuccuggcccgacggcgccgaccucaaccucaugcccaucuga

SEQ ID NO: 116063 - RNA, 1410 nt, Artificial Sequence; identical to SEQ ID NO: 115446
  derived and/or modified CDS sequence (opt2) from neuraminidase__InfluenzaA__ADN90219

SEQ ID NO: 116064 - RNA, 1410 nt, Artificial Sequence
  derived and/or modified CDS sequence (opt2) from neuraminidase__InfluenzaA__ADN92469
augaaccccaaccagaagaucaucaccaucggcuccgucucccucaccaucuccaccaucugcuucuucaugcagaucgccauccucaucaccaccgucacccuccacuucaagcaguacgaguucaacuccccccccaacaaccaggucaugcucugcgagcccaccaucaucgagcgcaacaucaccgagaucgucuaccucaccaacaccaccaucgagaaggagaucugccccaagcucgccgaguaccgcaacugguccaagccccagugcgacaucaccggcuucgcccccuucuccaaggacaacuccauccgccucuccgccggcggcgacaucugggucacccgcgagcccuacgucuccugcgaccccgacaagugcuaccaguucgcccucggccagggcaccacccucaacaacguccacuccaacaacaccguccgcgaccgcacccccuaccgcacccuccucaugaacgagcucggcguccccuuccaccucggcaccaagcaggucugcaucgccugguccuccuccuccugccacgacggcaaggccuggcuccacgucugcaucaccggcgacgacaagaacgccaccgccuccuucaucuacaacggccgccucgucgacuccgucgucuccugguccaaggagauccuccgcacccaggaguccgagugcgucugcaucaacggcaccugcaccgucgucaugaccgacggcuccgccuccgagaaggccgacaccaagauccucuucaucgaggagggcaagaucguccacaccuccacccucuccggcuccgcccagcacgucgaggagugcuccugcuacccccgcuaccccggcguccgcugcgucugccgcgacaacuggaagggcuccaaccgccccaucgucgacaucaacaucaaggaccacuccaucgucuccuccuacgucugcuccggccucgucggcgacaccccccgcaagaacgacuccuccuccuccucccacugccucgaccccaacaacgaggagggcggccacggcgucaagggcugggccuucgacgacggcaacgacgucuggaugggccgcaccaucuccgagaagucccgccucggcuacgagaccuucaaggucaucgagggcugguccaaccccaaguccaagcuccagaucaaccgccaggucaucgucgaccgcggcaaccgcuccggcuacuccggcaucuucuccgucgagggcaaguccugcaucaaccgcugcuucuacgucgagcucauccgcggccgcaaggaggagaccgagguccucuggaccuccaacuccaucgucgucuucugcggcaccuccggcaccuacggcaccggcuccuggcccgacggcgccgacaucaaccucaugcccaucuga

SEQ ID NO: 116065 - RNA, 1410 nt, Artificial Sequence; identical to SEQ ID NO: 115291
  derived and/or modified CDS sequence (opt2) from neuraminidase__InfluenzaA__ADN92480

SEQ ID NO: 116066 - RNA, 1410 nt, Artificial Sequence; identical to SEQ ID NO: 115291
  derived and/or modified CDS sequence (opt2) from neuraminidase__InfluenzaA__ADN92491

SEQ ID NO: 116067 - RNA, 1410 nt, Artificial Sequence
  derived and/or modified CDS sequence (opt2) from neuraminidase__InfluenzaA__ADN92502
augaaccccaaccagaagaucaucaccaucggcuccgucucccucaccaucuccaccaucugcuucuucaugcagaucgccauccucaucaccaccgucacccuccacuucaagcaguacgaguucaacuccccccccaacaaccaggucaugcucugcgagcccaccaucaucgagcgcaacaucaccgagaucgucuaccucaccaacaccaccaucgagaaggagaucugccccaagcucgccgaguaccgcaacugguccaagccccagugcgacaucaccggcuucgcccccuucuccaaggacaacuccauccgccucuccgccggcggcgacaucugggucacccgcgagcccuacgucuccugcgaccccgacaagugcuaccaguucgcccucggccagggcaccacccucaacaacguccacuccaacaacaccguccgcgaccgcacccccuaccgcacccuccucaugaacgagcucggcguccccuuccaccucggcaccaagcaggucugcaucgccugguccuccuccuccugccacgacggcaaggccuggcuccacgucugcaucaccggcgacgacaagaacgccaccgccuccuucaucuacaacggccgccucgucgacuccgucgucuccugguccaaggagauccuccgcacccaggaguccgagugcgucugcaucaacggcaccugcaccgucgucaugaccgacggcuccgccuccggcaaggccgacaccaagauccucuucaucgaggagggcaagaucguccacaccuccacccucuccggcuccgcccagcacgucgaggagugcuccugcuacccccgcuaccccggcguccgcugcgucugccgcgacaacuggaagggcuccaaccgccccaucgucgacaucaacaucaaggaccacuccaucgucuccuccuacgucugcuccggccucgucggcgacaccccccgcaagaacgacuccuccuccuccucccacugccucgaccccaacaacgaggagggcggcaacggcgucaagggcugggccuucgacgacggcaacgacgucuggaugggccgcaccaucuccgagaagucccgccucggcuacgagaccuucaaggucaucgagggcugguccaaccccaaguccaagcuccagaucaaccgccaggucaucgucgaccgcggcaaccgcuccggcuacuccggcaucuucuccgucgagggcaaguccugcaucaaccgcugcuucuacgucgagcucauccgcggccgcaaggaggagaacgagguccucuggaccuccaacuccaucgucgucuucugcggcaccuccggcaccuacggcaccggcuccuggcccgacggcgccgacaucaaccucaugcccaucuga

SEQ ID NO: 116068 - RNA, 1410 nt, Artificial Sequence; identical to SEQ ID NO: 112774
  derived and/or modified CDS sequence (opt2) from neuraminidase__InfluenzaA__ADN92512

SEQ ID NO: 116069 - RNA, 1410 nt, Artificial Sequence; identical to SEQ ID NO: 112774
  derived and/or modified CDS sequence (opt2) from neuraminidase__InfluenzaA__ADN92522

SEQ ID NO: 116070 - RNA, 1410 nt, Artificial Sequence; identical to SEQ ID NO: 112774
  derived and/or modified CDS sequence (opt2) from neuraminidase__InfluenzaA__ADN92532

SEQ ID NO: 116071 - RNA, 1410 nt, Artificial Sequence; identical to SEQ ID NO: 112774
  derived and/or modified CDS sequence (opt2) from neuraminidase__InfluenzaA__ADN92542

SEQ ID NO: 116072 - RNA, 1410 nt, Artificial Sequence; identical to SEQ ID NO: 112774
  derived and/or modified CDS sequence (opt2) from neuraminidase__InfluenzaA__ADN92552

SEQ ID NO: 116073 - RNA, 1410 nt, Artificial Sequence; identical to SEQ ID NO: 112774
  derived and/or modified CDS sequence (opt2) from neuraminidase__InfluenzaA__ADO00733

SEQ ID NO: 116074 - RNA, 1410 nt, Artificial Sequence
  derived and/or modified CDS sequence (opt2) from neuraminidase__InfluenzaA__ADO00743
augaaccccaaccagaagaucaucaccaucggcuccgucugcaugaccaucggcauggccaaccucauccuccagaucggcaacaucaucuccaucuggaucucccacuccauccagcucggcaaccagaaccagaucgagaccugcaaccaguccgucaucaccuacgagaacaacaccugggucaaccagaccuacgucaacaucuccaacaccaacuucgccgccggccaguccgucgucuccgccaagcucgccggcaacuccucccucugccccgucuccggcugggccaucuacuccaaggacaacuccauccgcaucggcuccaagggcgacgucuucgucauccgcgagcccuucaucuccugcuccccccucgagugccgcaccuucuuccucacccagggcgcccuccucaacgacaagcacuccaacggcaccaucaaggaccgcucccccuaccgcacccucauguccugccccaucggcgagguccccucccccuacaacucccgcuucgaguccgucgccugguccgccuccgccugccacgacggcaucaacuggcucaccaucggcaucuccggccccgacaacggcgccgucgccguccucaaguacaacggcaucaucaccgacaccaucaaguccuggcgcaacaacauccuccgcacccaggaguccgagugcgccugcgucaacggcuccugcuucaccgucaugaccgacggccccuccgacggccaggccuccuacaagaucuuccgcaucgagaagggcaagaucgucaaguccgucgagaugaacgcccccaacuaccacuacgaggagugcuccugcuaccccgacuccuccgagaucaccugcgucugccgcgacaacuggcacggcuccaaccgccccugggucuccuucaaccagaaccucgaguaccagaucggcuacaucugcuccggcaucuucggcgacaacccccgccccaacgacaagaccggcuccugcggccccgucuccuccaacggcgccaacggcgucaagggcuucuccuucaaguacggcaacggcgucuggaucggccgcaccaaguccaucuccucccgcaacggcuucgagaugaucugggaccccaacggcuggaccggcaccgacaacaacuucuccauccgccaggacaucgucggcaucaacgagugguccggcuacuccggcuccuucguccagcaccccgagcucaccggccucgacugcauccgccccugcuucugggucgagcucauccgcggccgccccaaggagaacaccaucuggaccuccggcuccuccaucuccuucugcggcgucaacuccgacaccgucggcugguccuggcccgacggcgccgagcuccccuucaccaucgacaaguga

SEQ ID NO: 116075 - RNA, 1410 nt, Artificial Sequence; identical to SEQ ID NO: 113951
  derived and/or modified CDS sequence (opt2) from neuraminidase__InfluenzaA__ADO00753

SEQ ID NO: 116076 - RNA, 1410 nt, Artificial Sequence; identical to SEQ ID NO: 112774
  derived and/or modified CDS sequence (opt2) from neuraminidase__InfluenzaA__ADO12146

SEQ ID NO: 116077 - RNA, 1410 nt, Artificial Sequence; identical to SEQ ID NO: 112774
  derived and/or modified CDS sequence (opt2) from neuraminidase__InfluenzaA__ADO12156

SEQ ID NO: 116078 - RNA, 1410 nt, Artificial Sequence; identical to SEQ ID NO: 112774
  derived and/or modified CDS sequence (opt2) from neuraminidase__InfluenzaA__ADO12166

SEQ ID NO: 116079 - RNA, 1410 nt, Artificial Sequence; identical to SEQ ID NO: 112774
  derived and/or modified CDS sequence (opt2) from neuraminidase__InfluenzaA__ADO12176

SEQ ID NO: 116080 - RNA, 1410 nt, Artificial Sequence; identical to SEQ ID NO: 112774
  derived and/or modified CDS sequence (opt2) from neuraminidase__InfluenzaA__ADO12186

SEQ ID NO: 116081 - RNA, 1410 nt, Artificial Sequence; identical to SEQ ID NO: 112774
  derived and/or modified CDS sequence (opt2) from neuraminidase__InfluenzaA__ADO12196

SEQ ID NO: 116082 - RNA, 1410 nt, Artificial Sequence; identical to SEQ ID NO: 112774
  derived and/or modified CDS sequence (opt2) from neuraminidase__InfluenzaA__ADO12206

SEQ ID NO: 116083 - RNA, 1410 nt, Artificial Sequence; identical to SEQ ID NO: 112774
  derived and/or modified CDS sequence (opt2) from neuraminidase__InfluenzaA__ADO12216

SEQ ID NO: 116084 - RNA, 1410 nt, Artificial Sequence; identical to SEQ ID NO: 112774
  derived and/or modified CDS sequence (opt2) from neuraminidase__InfluenzaA__ADO12226

SEQ ID NO: 116085 - RNA, 1410 nt, Artificial Sequence; identical to SEQ ID NO: 112774
  derived and/or modified CDS sequence (opt2) from neuraminidase__InfluenzaA__ADO12246

SEQ ID NO: 116086 - RNA, 1410 nt, Artificial Sequence; identical to SEQ ID NO: 112774
  derived and/or modified CDS sequence (opt2) from neuraminidase__InfluenzaA__ADO12266

SEQ ID NO: 116087 - RNA, 1410 nt, Artificial Sequence
  derived and/or modified CDS sequence (opt2) from neuraminidase__InfluenzaA__ADO12276
augaaccccaaccagaagaucaucaccaucggcuccgucugcaugaccaucggcauggccaaccucauccuccagaucggcaacaucaucuccaucuggaucucccacuccauccagcucggcaaccagaaccagaucgagaccugcaaccaguccgucaucaccuacgagaacaacaccugggucaaccagaccuacgucaacaucuccaacaccaacuucgccgccggccaguccgucgucuccgucaagcucgccggcaacuccucccucugccccgucuccggcugggccaucuacuccaaggacaacuccauccgcaucggcuccaagggcgacgucuucgucauccgcgagcccuucaucuccugcuccccccucgagugccgcaccuucuuccucacccagggcgcccuccucaacgacaagcacuccaacggcaccaucaaggaccgcucccccuaccgcacccucauguccugccccaucggcgagguccccucccccuacaacucccgcuucgaguccgucgccugguccgccuccgccugccacgacggcaucaacuggcucaccaucggcaucuccggccccgacaacggcgccgucgccguccucaaguacaacggcaucaucaccgacaccaucaaguccuggcgcaacaacauccuccgcacccaggaguccgagugcgccugcgucaacggcuccugcuucaccgucaugaccgacggccccuccgacggccaggccuccuacaagaucuuccgcaucgagaagggcaagaucgucaaguccgucgagaugaacgcccccaacuaccacuacgaggagugcuccugcuaccccgacuccuccgagaucaccugcgucugccgcgacaacuggcacggcuccaaccgccccugggucuccuucaaccagaaccucgaguaccagaucggcuacaucugcuccggcaucuucggcgacaacccccgccccaacgacaaguccggcuccugcggccccgucuccuccaacggcgccaacggcgucaagggcuucuccuucaaguacggcaacggcgucuggaucggccgcaccaaguccaucuccucccgcaacggcuucgagaugaucugggaccccaacggcuggaccggcaccgacaacaacuucuccaucaagcaggacaucgucggcaucaacgagugguccggcuacuccggcuccuucguccagcaccccgagcucaccggccucgacugcauccgccccugcuucugggucgagcucauccgcggccgccccaaggagaacaccaucuggaccuccggcuccuccaucuccuucugcggcgucaacuccgacaccgucggcugguccuggcccgacggcgccgagcuccccuucaccaucgacaaguga

SEQ ID NO: 116088 - RNA, 1410 nt, Artificial Sequence; identical to SEQ ID NO: 112774
  derived and/or modified CDS sequence (opt2) from neuraminidase__InfluenzaA__ADO12286

SEQ ID NO: 116089 - RNA, 1410 nt, Artificial Sequence; identical to SEQ ID NO: 112774
  derived and/or modified CDS sequence (opt2) from neuraminidase__InfluenzaA__ADO12296

SEQ ID NO: 116090 - RNA, 1410 nt, Artificial Sequence; identical to SEQ ID NO: 112774
  derived and/or modified CDS sequence (opt2) from neuraminidase__InfluenzaA__ADO12306

SEQ ID NO: 116091 - RNA, 1410 nt, Artificial Sequence
  derived and/or modified CDS sequence (opt2) from neuraminidase__InfluenzaA__ADO12316
augaaccccaaccagaagaucaucaccaucggcuccgucugcaugaccaucggcauggccaaccucauccuccagaucggcaacaucaucuccaucuggaucucccacuccauccagcucggcaaccagaaccagaucgagaccugcaaccaguccgucaucaccuacgagaacaacaccugggucaaccagaccuacgucaacaucuccaacaccaacuucgccgccggccaguccgucgucuccgucaagcucgccggcaacuccucccucugccccgucuccggcugggccaucuacuccaaggacaacuccauccgcaucggcuccaagggcgacgucuucgucauccgcgagcccuucaucuccugcuccccccucgagugccgcaccuucuuccucacccagggcgcccuccucaacgacaagcacuccaacggcaccaucaaggaccgcucccccuaccgcacccucauguccugccccaucggcgagguccccucccccuacaacucccgcuucgaguccgucgccugguccgccuccgccugccacgacggcaucaacuggcucaccaucggcaucuccggccccgacaacggcgccgucgccguccucaaguacaacggcaucaucaccgacaccaucaaguccuggcgcaacaacauccuccgcacccaggaguccgagugcgccugcgucaacggcuccugcuucaccgucaugaccgacggccccuccgacggccaggccuccuacaagaucuuccgcaucgagaagggcaagaucgucaaguccgucgagaugaacgcccccaacuaccacuacgaggagugcuccugcuaccccgacuccuccgagaucaccugcgucugccgcgacaacuggcacggcuccaaccgccccugggucuccuucaaccagaaccucgaguaccagaucggcuacaucugcuccggcaucuucggcgacaacccccgccccaacgacaagaccggcuccugcggccccgucuccuccaacggcgccaacggcgucaagggcuucuccuucaaguacggcgacggcgucuggaucggccgcaccaaguccaucuccucccgcaacggcuucgagaugaucugggaccccaacggcuggaccggcaccgacaacaacuucuccaucaagcaggacaucgucggcaucaacgagugguccggcuacuccggcuccuucguccagcaccccgagcucaccggccucgacugcauccgccccugcuucugggucgagcucauccgcggccgccccaaggagaacaccaucuggaccuccggcuccuccaucuccuucugcggcgucaacuccgacaccgucggcugguccuggcccgacggcgccgagcuccccuucaccaucgacaaguga

SEQ ID NO: 116092 - RNA, 1410 nt, Artificial Sequence; identical to SEQ ID NO: 112774
  derived and/or modified CDS sequence (opt2) from neuraminidase__InfluenzaA__ADO12326

SEQ ID NO: 116093 - RNA, 1410 nt, Artificial Sequence; identical to SEQ ID NO: 112774
  derived and/or modified CDS sequence (opt2) from neuraminidase__InfluenzaA__ADO12336

SEQ ID NO: 116094 - RNA, 1410 nt, Artificial Sequence; identical to SEQ ID NO: 112774
  derived and/or modified CDS sequence (opt2) from neuraminidase__InfluenzaA__ADO12346

SEQ ID NO: 116095 - RNA, 1410 nt, Artificial Sequence; identical to SEQ ID NO: 112774
  derived and/or modified CDS sequence (opt2) from neuraminidase__InfluenzaA__ADO12356

SEQ ID NO: 116096 - RNA, 1410 nt, Artificial Sequence; identical to SEQ ID NO: 112774
  derived and/or modified CDS sequence (opt2) from neuraminidase__InfluenzaA__ADO12366

SEQ ID NO: 116097 - RNA, 1410 nt, Artificial Sequence; identical to SEQ ID NO: 112774
  derived and/or modified CDS sequence (opt2) from neuraminidase__InfluenzaA__ADO12376

SEQ ID NO: 116098 - RNA, 1410 nt, Artificial Sequence; identical to SEQ ID NO: 112774
  derived and/or modified CDS sequence (opt2) from neuraminidase__InfluenzaA__ADO12386

SEQ ID NO: 116099 - RNA, 1410 nt, Artificial Sequence; identical to SEQ ID NO: 112774
  derived and/or modified CDS sequence (opt2) from neuraminidase__InfluenzaA__ADO12396

SEQ ID NO: 116100 - RNA, 1410 nt, Artificial Sequence; identical to SEQ ID NO: 112774
  derived and/or modified CDS sequence (opt2) from neuraminidase__InfluenzaA__ADO12406

SEQ ID NO: 116101 - RNA, 1410 nt, Artificial Sequence; identical to SEQ ID NO: 113541
  derived and/or modified CDS sequence (opt2) from neuraminidase__InfluenzaA__ADO12416

SEQ ID NO: 116102 - RNA, 1410 nt, Artificial Sequence; identical to SEQ ID NO: 112774
  derived and/or modified CDS sequence (opt2) from neuraminidase__InfluenzaA__ADO12426

SEQ ID NO: 116103 - RNA, 1410 nt, Artificial Sequence; identical to SEQ ID NO: 112774
  derived and/or modified CDS sequence (opt2) from neuraminidase__InfluenzaA__ADO12436

SEQ ID NO: 116104 - RNA, 1410 nt, Artificial Sequence; identical to SEQ ID NO: 112774
  derived and/or modified CDS sequence (opt2) from neuraminidase__InfluenzaA__ADO12446

SEQ ID NO: 116105 - RNA, 1410 nt, Artificial Sequence; identical to SEQ ID NO: 112774
  derived and/or modified CDS sequence (opt2) from neuraminidase__InfluenzaA__ADO12456

SEQ ID NO: 116106 - RNA, 1410 nt, Artificial Sequence; identical to SEQ ID NO: 112774
  derived and/or modified CDS sequence (opt2) from neuraminidase__InfluenzaA__ADO12466

SEQ ID NO: 116107 - RNA, 1410 nt, Artificial Sequence; identical to SEQ ID NO: 112774
  derived and/or modified CDS sequence (opt2) from neuraminidase__InfluenzaA__ADO12476

SEQ ID NO: 116108 - RNA, 1410 nt, Artificial Sequence; identical to SEQ ID NO: 112774
  derived and/or modified CDS sequence (opt2) from neuraminidase__InfluenzaA__ADO12486

SEQ ID NO: 116109 - RNA, 1410 nt, Artificial Sequence; identical to SEQ ID NO: 112774
  derived and/or modified CDS sequence (opt2) from neuraminidase__InfluenzaA__ADO12496

SEQ ID NO: 116110 - RNA, 1410 nt, Artificial Sequence; identical to SEQ ID NO: 112774
  derived and/or modified CDS sequence (opt2) from neuraminidase__InfluenzaA__ADO12506

SEQ ID NO: 116111 - RNA, 1410 nt, Artificial Sequence; identical to SEQ ID NO: 112774
  derived and/or modified CDS sequence (opt2) from neuraminidase__InfluenzaA__ADO12516

SEQ ID NO: 116112 - RNA, 1410 nt, Artificial Sequence; identical to SEQ ID NO: 112774
  derived and/or modified CDS sequence (opt2) from neuraminidase__InfluenzaA__ADO12526

SEQ ID NO: 116113 - RNA, 1410 nt, Artificial Sequence; identical to SEQ ID NO: 112774
  derived and/or modified CDS sequence (opt2) from neuraminidase__InfluenzaA__ADO12536

SEQ ID NO: 116114 - RNA, 1410 nt, Artificial Sequence; identical to SEQ ID NO: 112774
  derived and/or modified CDS sequence (opt2) from neuraminidase__InfluenzaA__ADO12546

SEQ ID NO: 116115 - RNA, 1410 nt, Artificial Sequence; identical to SEQ ID NO: 112774
  derived and/or modified CDS sequence (opt2) from neuraminidase__InfluenzaA__ADO12556

SEQ ID NO: 116116 - RNA, 1410 nt, Artificial Sequence; identical to SEQ ID NO: 112774
  derived and/or modified CDS sequence (opt2) from neuraminidase__InfluenzaA__ADO12566

SEQ ID NO: 116117 - RNA, 1410 nt, Artificial Sequence; identical to SEQ ID NO: 112774
  derived and/or modified CDS sequence (opt2) from neuraminidase__InfluenzaA__ADO12576

SEQ ID NO: 116118 - RNA, 1410 nt, Artificial Sequence
  derived and/or modified CDS sequence (opt2) from neuraminidase__InfluenzaA__ADO12586
augaaccccaaccagaagaucaucaccaucggcuccgucugcaugaccaucggcauggccaaccucauccuccagaucggcaacaucaucuccaucuggaucucccacuccauccagcucggcaaccagaaccagaucgagaccugcaaccaguccgucaucaccuacgagaacaacaccugggucaaccagaccuacgucaacaucuccaacaccaacuucgccgccggccaguccgucgucuccgucaagcucgccggcaacuccucccucugccccgucuccggcugggccaucuacuccaaggacaacuccauccgcaucggcuccaagggcgacgucuucgucauccgcgagcccuucaucuccugcuccccccucgagugccgcaccuucuuccucacccagggcgcccuccucaacgacaagcacuccaacggcaccaucaaggaccgcucccccuaccgcacccucauguccugccccaucggcgagguccccucccccuacaacucccgcuucgaguccgucgccugguccgccuccgccugccacgacggcaucaacuggcucaccaucggcaucuccggccccgacuccggcgccgucgccguccucaaguacaacggcaucaucaccgacaccaucaaguccuggcgcaacaacauccuccgcacccaggaguccgagugcgccugcgucaacggcuccugcuucaccgucaugaccgacggccccuccgacggccaggccuccuacaagaucuuccgcaucgagaagggcaagaucgucaaguccgucgagaugaacgcccccaacuaccacuacgaggagugcuccugcuaccccgacuccuccgagaucaccugcgucugccgcgacaacuggcacggcuccaaccgccccugggucuccuucaaccagaaccucgaguaccagaucggcuacaucugcuccggcaucuucggcgacaacccccgccccaacgacaagaccggcuccugcggccccgucuccuccaacggcgccaacggcgucaagggcuucuccuucaaguacggcaacggcgucuggaucggccgcaccaaguccaucuccucccgcaacggcuucgagaugaucugggaccccaacggcuggaccggcaccgacaacaacuucuccaucaagcaggacaucgucggcaucaacgagugguccggcuacuccggcuccuucguccagcaccccgagcucaccggccucgacugcauccgccccugcuucugggucgagcucauccgcggccgccccaaggagaacaccaucuggaccuccggcuccuccaucuccuucugcggcgucaacuccgacaccgucggcugguccuggcccgacggcgccgagcuccccuucaccaucgacaaguga

SEQ ID NO: 116119 - RNA, 1410 nt, Artificial Sequence; identical to SEQ ID NO: 116118
  derived and/or modified CDS sequence (opt2) from neuraminidase__InfluenzaA__ADO12596

SEQ ID NO: 116120 - RNA, 1410 nt, Artificial Sequence; identical to SEQ ID NO: 112774
  derived and/or modified CDS sequence (opt2) from neuraminidase__InfluenzaA__ADO12606

SEQ ID NO: 116121 - RNA, 1410 nt, Artificial Sequence; identical to SEQ ID NO: 112774
  derived and/or modified CDS sequence (opt2) from neuraminidase__InfluenzaA__ADO12616

SEQ ID NO: 116122 - RNA, 1410 nt, Artificial Sequence; identical to SEQ ID NO: 112774
  derived and/or modified CDS sequence (opt2) from neuraminidase__InfluenzaA__ADO12626

SEQ ID NO: 116123 - RNA, 1410 nt, Artificial Sequence; identical to SEQ ID NO: 112774
  derived and/or modified CDS sequence (opt2) from neuraminidase__InfluenzaA__ADO14355

SEQ ID NO: 116124 - RNA, 1401 nt, Artificial Sequence
  derived and/or modified CDS sequence (opt2) from neuraminidase__InfluenzaA__ADO21028
augaaccccaaccagaagaucaucgccaucggcuccgucucccucaccaucgccaccaucugcuuccucaugcagaucgccauccucgccaccaccaugacccuccacuucaagcagaacgagugcuccaaccccuccaacaaccaggucguccccugcgagcccaccaucaucgagcgcaacaucguccaccucaacuccaccaccaucgagaaggagaucugccccaaggucgccgaguacaagaacugguccaagccccagugccagaucaccggcuccgcccccuucuccaagggcaacuccauccgccucuccgccggcggcgacaucugggucacccgcgagcccuacgucuccugcucccucggcaagugcuaccaguucgcccucggccagggcaccacccucaagaacaagcacuccaacggcaccacccacgaccgcgucccccaccgcacccuccucauguccgagcucggcguccccuuccaccucggcaccaagcaggucugcaucgccugguccuccuccuccugccacgacggcaaggccuggcuccacgucugcgucaccggcgacgacaagaacgccaccgccuccaucaucuacgacggcaugcucgucgacuccaucggcuccugguccaagaacauccuccgcacccaggaguccgagugcgucugcaucaacggcaccugcaccgucgucaugaccgacggcuccgccuccggcaaggccgacacccgcauccucuucauccgcgagggcaagaucguccacaucuccccccucuccggcuccgcccagcacgucgaggagugcuccugcuacccccgcuaccccgagguccgcugcgucugccgcgacaacuggaagggcuccaaccgccccguccucuacaucaacauggccgacuacuccaucgaguccuccuacgucugcuccggccucgucggcgacaccccccgcaacgacgacuccuacuccuccuccaacugccgcgaccccaacaacgagcgcggcgcccccggcgucaagggcugggccuucgacaacggcaacgacaucuggaugggccgcaccaucaaggaggacucccgcuccggcuacgagaccuuccgcgucgucggcggcuggaccaccgccaacuccaagucccagaucaaccgccaggucaucgucgacuccgacaacugguccggcuacuccggcaucuucuccgucgagggcaagaacugcaucaaccgcugcuucuacgucgagcucauccgcggccgcccccaggagacccgcgucugguggaccuccaacuccaucaucgucuucugcggcaccuccggcaccuacggcaccggcuccuggcccgacggcgccaacaucaacuucaugcccaucuga

SEQ ID NO: 116125 - RNA, 1401 nt, Artificial Sequence
  derived and/or modified CDS sequence (opt2) from neuraminidase__InfluenzaA__ADO21039
augaaccccaaccagaagaucaucgccaucggcuccgucucccucaccaucgccaccaucugcuuccucaugcagaucgccauccucgccaccaccaugacccuccacuucaagcagaacgagugcuccaaccccuccaacaaccaggucguccccugcgagcccaccaucaucgagcgcaacaucguccaccucaacuccaccaccaucgagaaggagaucugccccaaggucgccgaguacaagaacugguccaagccccagugccagaucaccggcuccgcccccuucuccaagggcaacuccauccgccucuccgccggcggcgacaucugggucacccgcgagcccuacgucuccugcucccucggcaagugcuaccaguucgcccucggccagggcaccacccucaagaacaagcacuccaacggcaccacccacgaccgcgacccccaccgcacccuccucauguccgagcucggcguccccuuccaccucggcaccaagcaggucugcaucgccugguccuccuccuccugccacgacggcaaggccuggcuccacgucugcgucaccggcgacgacaagaacgccaccgccuccaucaucuacgacggcaugcucgucgacuccaucggcuccugguccaagaacauccuccgcacccaggaguccgagugcgucugcaucaacggcaccugcaccgucgucaugaccgacggcuccgccuccggcaaggccgacacccgcauccucuucauccgcgagggcaagaucguccacaucuccccccucuccggcuccgcccagcacgucgaggagugcuccugcuacccccgcuaccccgagguccgcugcgucugccgcgacaacuggaagggcuccaaccgccccguccucuacaucaacauggccgacuacaccaucgaguccuccuacgucugcuccggccucgucggcgacaccccccgcaacgacgacuccuacuccuccuccaacugccgcgaccccaacaacgagcgcggcgcccccggcgucaagggcugggccuucgacaacggcaacgacaucuggaugggccgcaccaucaaggaggacucccgcuccggcuacgagaccuuccgcgucgucggcggcuggaccaccgccaacuccaagucccagaucaaccgccaggucaucgucgacuccgacaacugguccggcuacuccggcaucuucuccgucgagggcaagaacugcaucaaccgcugcuucuacgucgagcucauccgcggccgcccccaggagacccgcgucugguggaccuccaacuccaucaucgucuucugcggcaccuccggcaccuacggcaccggcuccuggcccgacggcgccaacaucaacuucaugcccaucuga

SEQ ID NO: 116126 - RNA, 1401 nt, Artificial Sequence
  derived and/or modified CDS sequence (opt2) from neuraminidase__InfluenzaA__ADO21050
augaaccccaaccagaagaucaucgccaucggcuccgucucccucaccaucgccaccaucugcuuccucaugcagaucgccauccucgccaccaccaugacccuccacuucaagcagaacgagugcuccaaccccuccaacaaccaggucguccccugcgagcccaccaucaucgagcgcaacaucguccaccucaacuccaccaccaucgagaaggagaucugccccaaggucgccgaguacaagaacugguccaagccccagugccagaucaccggcuccgcccccuucuccaagggcaacuccauccgccucuccgccggcggcgacaucugggucacccgcgagcccuacgucuccugcucccucggcaagugcuaccaguucgcccucggccagggcaccacccucaagaacaagcacuccaacggcaccacccacgaccgcggcccccaccgcacccuccucauguccgagcucggcguccccuuccaccucggcaccaagcaggucugcaucgccugguccuccuccuccugccacgacggcaaggccuggcuccacgucugcgucaccggcgacgacaagaacgccaccgccuccaucaucuacgacggcaugcucgucgacuccaucggcuccugguccaagaacauccuccgcacccaggaguccgagugcgucugcaucaacggcaccugcaccgucgucaugaccgacggcuccgccuccggcaaggccgacacccgcauccucuucauccgcgagggcaagaucguccacaucuccccccucuccggcuccgcccagcacgucgaggagugcuccugcuacccccgcuaccccgagguccgcugcgucugccgcgacaacuggaagggcuccaaccgccccguccucuacaucaacauggccgacuacuccaucgaguccuccuacgucugcuccggccucgucggcgacaccccccgcaacgacgacuccuacuccuccuccaacugccgcgaccccaacaacgaguccggcgcccccggcgucaagggcugggccuucgacaacggcaacgacaucuggaugggccgcaccaucaaggaggacucccgcuccggcuacgagaccuuccgcgucgucggcggcuggaccaccgccaacuccaagucccagaucaaccgccaggucaucgucgacuccgacaacugguccggcuacuccggcaucuucuccgucgagggcaagaacugcaucaaccgcugcuucuacgucgagcucauccgcggccgcccccaggagacccgcgucugguggaccuccaacuccaucaucgucuucugcggcaccuccggcaccuacggcaccggcuccuggcccgacggcgccaacaucaacuucaugcccaucuga

SEQ ID NO: 116127 - RNA, 1410 nt, Artificial Sequence
  derived and/or modified CDS sequence (opt2) from neuraminidase__InfluenzaA__ADO25095
augaaccccaaccagaagaucaucaccaucggcuccgucugcaugaccaucggcauggccaaccucauccuccagaucggcaacaucaucuccaucuggaucucccacuccauccagcucggcaaccagaaccagaucgagaccugcaaccaguccaucaucaccuacgagaacaacaccugggucaaccagaccuacgucaacaucuccaacaccaacuucgccgccggccaguccgucgucuccgucaagcucgccggcaacuccucccucugccccgucuccggcugggccaucuacuccaaggacaacuccauccgcaucggcuccaagggcgacgucuucgucauccgcgagcccuucaucuccugcuccccccucgagugccgcaccuucuuccucacccagggcgcccuccucaacgacaagcacuccaacggcaccaucaaggaccgcucccccuaccgcacccucauguccugccccaucggcgagguccccucccccuacaacucccgcuucgaguccgucgccugguccgccuccgccugccacgacggcaucaacuggcucaccaucggcaucuccggccccgacaacggcgccgucgccguccucaaguacaacggcaucaucaccgacaccaucaaguccuggcgcaacaacauccuccgcacccaggaguccgagugcgccugcgucaacggcuccugcuucaccgucaugaccgacggccccuccgacggccaggccuccuacaagaucuuccgcaucgagaagggcaagaucgucaaguccgucgagaugaacgcccccaacuaccacuacgaggagugcuccugcuaccccgacuccuccgagaucaccugcgucugccgcgacaacuggcacggcuccaaccgccccugggucuccuucaaccagaaccucgaguaccagaucggcuacaucugcuccggcaucuucggcgacaacccccgccccaacgacaagaccggcuccugcggccccgucuccuccaacggcgccaacggcgucaagggcuucuccuucaaguacggcaacggcgucuggaucggccgcaccaaguccaucuccucccgcuccggcuucgagaugaucugggaccccaacggcuggaccggcaccgacaacaacuucuccaucaagcaggacaucgucggcaucaacgagugguccggcuacuccggcuccuucguccagcaccccgagcucaccggccucgacugcauccgccccugcuucugggucgagcucauccgcggccgccccaaggagaacaccaucuggaccuccggcuccuccaucuccuucugcggcgucaacuccgacaccgucggcugguccuggcccgacggcgccgagcuccccuucaccaucgacaaguga

SEQ ID NO: 116128 - RNA, 1410 nt, Artificial Sequence
  derived and/or modified CDS sequence (opt2) from neuraminidase__InfluenzaA__ADO25105
augaaccccaaccagaagaucaucaccaucggcuccgucugcaugaccaucggcauggccaaccucauccuccagaucggcaacaucaucuccaucuggaucucccacuccauccagcucggcaaccagaaccagaucggcaccugcaaccaguccgucaucaccuacgagaccaacaccugggucaaccagaccuacgucaacaucuccaacaccaacuucgccgccggccaguccgucgucuccgucaagcucgccggcaacuccucccucugccccgucuccggcugggccaucuacuccaaggacaacuccauccgcaucggcuccaagggcgacgucuucgucauccgcgagcccuucaucuccugcuccccccucgagugccgcaccuucuuccucacccagggcgcccuccucaacgacaagcacuccaacggcaccaucaaggaccgcucccccuaccgcacccucauguccugccccaucggcgagguccccucccccuacaacucccgcuucgaguccgucgccugguccgccuccgccugccacgacggcaucaacuggcucaccaucggcaucuccggccccgacaacggcgccgucgccguccucaaguacaacggcaucaucaccgacaccaucaaguccuggcgcaacaacauccuccgcacccaggaguccgagugcgccugcgucaacggcuccugcuucaccgucaugaccgacggccccuccgaccgccaggccuccuacaagaucuuccgcaucgagaagggcaagaucgucaaguccgucgagaugaacgcccccaacuaccacuacgaggagugcuccugcuaccccgacuccuccgagaucaccugcgucugccgcgacaacuggcacggcuccaaccgccccugggucuccuucaaccagaaccucgaguaccagaucggcuacaucugcuccggcaucuucggcgacaacccccgccccaacgacaagaccggcuccugcggccccgucuccuccaacggcgccaacggcgucaagggcuucuccuucaaguacggcaacggcgucuggaucggccgcaccaaguccaucuccucccgcaacggcuucgagaugaucugggaccccaacggcuggaccggcaccgacaacaacuucuccaucaagcaggacaucgucggcaucaacgagugguccggcuacuccggcuccuucguccagcaccccgagcucaccggccucgacugcauccgccccugcuucugggucgagcucauccgcggccgccccaaggagaacaccaucuggaccuccggcuccuccaucuccuucugcggcgucaacuccgacaccgucggcugguccuggcccgacggcgccgagcuccccuucaccaucgacaaguga

SEQ ID NO: 116129 - RNA, 1410 nt, Artificial Sequence; identical to SEQ ID NO: 114555
  derived and/or modified CDS sequence (opt2) from neuraminidase__InfluenzaA__ADO25115

SEQ ID NO: 116130 - RNA, 1410 nt, Artificial Sequence; identical to SEQ ID NO: 114555
  derived and/or modified CDS sequence (opt2) from neuraminidase__InfluenzaA__ADO25125

SEQ ID NO: 116131 - RNA, 1410 nt, Artificial Sequence
  derived and/or modified CDS sequence (opt2) from neuraminidase__InfluenzaA__ADO25135
augaaccccaaccagaagaucaucaccaucggcuccgucugcaugaccaucggcauggccaaccucguccuccagaucggcaacaucaucuccaucuggaucucccacuccauccagcucggcaaccagaaccagaucgagaccugcaaccaguccgucaucaccuacgagaacaacaccugggucaaccagaccuacgucaacaucuccaacaccaacuucgccgccggccaguccgucgucuccgucaagcucgccggcaacuccucccucugccccgucuccggcugggccaucuacuccaaggacaacuccauccgcaucggcuccaagggcgacgucuucgucauccgcgagcccuucaucuccugcuccccccucgagugccgcaccuucuuccucacccagggcgcccuccucaacgacaagcacuccaacggcaccaucaaggaccgcucccccuaccgcacccucauguccugccccaucggcgagguccccucccccuacaacucccgcuucgaguccgucgccugguccgccuccgccugccacgacggcaucaacuggcucaccaucggcaucuccggccccgacaacggcgccgucgccguccucaaguacaacggcaucaucaccgacaccaucaaguccuggcgcaacaacauccuccgcacccaggaguccgagugcgccugcgucaacggcuccugcuucaccgucaugaccgacggccccuccgacggccaggccuccuacaagaucuuccgcaucgagaagggcaagaucgucaaguccgucgagaugaacgcccccaacuaccacuacgaggagugcuccugcuaccccgacuccuccgagaucaccugcgucugccgcgacaacuggcacggcuccaaccgccccugggucuccuucaaccagaaccucgaguaccagaucggcuacaucugcuccggcaucuucggcgacaacccccgccccaacgacaagaccggcuccugcggccccgucuccuccaacggcgccaacggcgucaagggcuucuccuucaaguacggcaacggcgucuggaucggccgcaccaaguccaucuccucccgcaacggcuucgagaugaucugggaccccaacggcuggaccggcaccgacaacaacuucuccaucaagcaggacaucgucggcaucaacgagugguccggcuacuccggcuccuucguccagcaccccgagcucaccggccucgacugcauccgccccugcuucugggucgagcucauccgcggccgccccaaggagaacaccaucuggaccuccggcuccuccaucuccuucugcggcgucaacuccgacaccgucggcugguccuggcccgacggcgccgagcuccccuucaccaucgacaaguga

SEQ ID NO: 116132 - RNA, 1410 nt, Artificial Sequence; identical to SEQ ID NO: 114125
  derived and/or modified CDS sequence (opt2) from neuraminidase__InfluenzaA__ADO25145

SEQ ID NO: 116133 - RNA, 1410 nt, Artificial Sequence; identical to SEQ ID NO: 112774
  derived and/or modified CDS sequence (opt2) from neuraminidase__InfluenzaA__ADO25155

SEQ ID NO: 116134 - RNA, 1410 nt, Artificial Sequence; identical to SEQ ID NO: 112774
  derived and/or modified CDS sequence (opt2) from neuraminidase__InfluenzaA__ADO25165

SEQ ID NO: 116135 - RNA, 1410 nt, Artificial Sequence; identical to SEQ ID NO: 112774
  derived and/or modified CDS sequence (opt2) from neuraminidase__InfluenzaA__ADO25175

SEQ ID NO: 116136 - RNA, 1410 nt, Artificial Sequence
  derived and/or modified CDS sequence (opt2) from neuraminidase__InfluenzaA__ADO25185
augaaccccaaccagaagaucaucaccaucggcuccgucugcaugaccaucggcauggccaaccucauccuccagaucggcaacaucaucuccaucuggaucucccacuccauccagcucggcaaccagaaccagaucgagaccugcaaccaguccgucaucaccuacgagaacaacaccugggucaaccagaccuacgucaacaucuccaacaccaacuucgccgccggccaguccgucgucuccgucaagcucgccggcaacuccucccucugccccgucuccggcugggccaucuacuccaaggacaacuccauccgcaucggcuccaagggcgacgucuucgucauccgcgagcccuucaucuccugcuccccccucgagugccgcaccuucuuccucacccagggcgcccuccucaacgacaagcacuccaacggcaccaucaaggaccgcucccccuaccgcacccucauguccugccccaucggcgagguccccucccccuacaacucccgcuucgaguccgucgccugguccgccuccgccugccacgacggcaucaacuggcucaccaucggcaucuccggccccgacaacggcgccgucgccguccucaaguacaacggcaucaucaccgacaccaucaaguccuggcgcaacaacauccuccgcacccaggaguccgagugcgccugcgucaacggcuccugcuucaccgucaugaccgacggccccuccgacggccaggccuccuacaagaucuuccgcaucgagaagggcaagaucgucaaguccgucgagaugaacgcccccaacuaccacuacgaggagugcuccugcuaccccgacuccuccgagaucaccugcgucugccgcgacaacuggcacggcuccaaccgccccugggucuccuucaaccagaaccucgaguaccagaucggcuacaucugcuccggcaucuucggcgacaacccccgccccaacgacaagaccggcuccugcggccccgucuccuccaacggcgccaacggcgucaagggcuucuccuucaaguacggcaacggcgucuggaucggccgcaccaaguccauguccucccgcaacggcuucgagaugaucugggaccccaacggcuggaccggcaccgacaacaacuucuccaucaagcaggacaucgucggcaucaacgagugguccggcuacuccggcuccuucguccagcaccccgagcucaccggccucgacugcauccgccccugcuucugggucgagcucauccgcggccgccccaaggagaacaccaucuggaccuccggcuccuccaucuccuucugcggcgucaacuccgacaccgucggcugguccuggcccgacggcgccgagcuccccuucaccaucgacaaguga

SEQ ID NO: 116137 - RNA, 1410 nt, Artificial Sequence; identical to SEQ ID NO: 115203
  derived and/or modified CDS sequence (opt2) from neuraminidase__InfluenzaA__ADO25195

SEQ ID NO: 116138 - RNA, 1410 nt, Artificial Sequence; identical to SEQ ID NO: 113911
  derived and/or modified CDS sequence (opt2) from neuraminidase__InfluenzaA__ADO25205

SEQ ID NO: 116139 - RNA, 1410 nt, Artificial Sequence; identical to SEQ ID NO: 114125
  derived and/or modified CDS sequence (opt2) from neuraminidase__InfluenzaA__ADO25215

SEQ ID NO: 116140 - RNA, 1410 nt, Artificial Sequence; identical to SEQ ID NO: 112774
  derived and/or modified CDS sequence (opt2) from neuraminidase__InfluenzaA__ADO25225

SEQ ID NO: 116141 - RNA, 1410 nt, Artificial Sequence; identical to SEQ ID NO: 114125
  derived and/or modified CDS sequence (opt2) from neuraminidase__InfluenzaA__ADO25235

SEQ ID NO: 116142 - RNA, 1410 nt, Artificial Sequence; identical to SEQ ID NO: 112774
  derived and/or modified CDS sequence (opt2) from neuraminidase__InfluenzaA__ADO25245

SEQ ID NO: 116143 - RNA, 1410 nt, Artificial Sequence; identical to SEQ ID NO: 112774
  derived and/or modified CDS sequence (opt2) from neuraminidase__InfluenzaA__ADO25255

SEQ ID NO: 116144 - RNA, 1410 nt, Artificial Sequence; identical to SEQ ID NO: 114555
  derived and/or modified CDS sequence (opt2) from neuraminidase__InfluenzaA__ADO25265

SEQ ID NO: 116145 - RNA, 1410 nt, Artificial Sequence; identical to SEQ ID NO: 114366
  derived and/or modified CDS sequence (opt2) from neuraminidase__InfluenzaA__ADO25275

SEQ ID NO: 116146 - RNA, 1410 nt, Artificial Sequence; identical to SEQ ID NO: 114125
  derived and/or modified CDS sequence (opt2) from neuraminidase__InfluenzaA__ADO25285

SEQ ID NO: 116147 - RNA, 1413 nt, Artificial Sequence
  derived and/or modified CDS sequence (opt2) from neuraminidase__InfluenzaA__ADO27623
augaaccccaaccagaagaucaucaccaucggcuccaucuccaucgccaucggcaucaucucccucaugcuccagaucggcaacaucaucuccaucugggccucccacuccauccagaccggcucccagaacaacaccggcaucugcaaccagcgcaucaucaccuacgagaacuccaccugggucaaccacaccuacgucaacaucaacaacaccaacgucgccgccggcgaggacaagaccuccgucacccucgccggcaacuccucccucugcuccaucuccggcugggccaucuacaccaaggacaacuccauccgcaucggcuccaagggcgacgucuucgucauccgcgagcccuucaucuccugcucccaccucgagugccgcaccuucuuccucacccagggcgcccuccucaacgacaagcacuccaacggcaccgucaaggaccgcucccccuaccgcgcccucauguccugcccccucggcgaggcccccucccccuacaacuccaaguucgaguccgucgccugguccgccuccgccugccacgacggcaugggcuggcucaccaucggcaucuccggccccgacaacggcgccgucgccguccucaaguacaacggcaucaucaccggcaccaucaaguccuggaagaagcagauccuccgcacccaggaguccgagugcgucugcaugaacggcuccugcuucaccaucaugaccgacggccccuccaacaaggccgccuccuacaagaucuucaagaucgagaagggcaaggucaccaaguccaucgagcucaacgcccccaacuucuacuacgaggagugcuccugcuaccccgacaccggcaucgucaugugcgucugccgcgacaacuggcacggcuccaaccgccccugggucuccuucaaccagaaccucgacuaccagaucggcuacaucugcuccggcgucuucggcgacaacccccgccccgaggacggcgagggcuccugcaaccccgucaccgucgacggcgccaacggcgucaagggcuucuccuacaaguacggcaacggcgucuggaucggccgcaccaaguccaaccgccuccgcaagggcuucgagaugaucugggaccccaacggcuggaccaacaccgacuccgacuucuccgucaagcaggacgucgucgccaucaccgacugguccggcuacuccggcuccuucguccagcaccccgagcucaccggccucgacugcauccgccccugcuucugggucgagcucguccgcggccucccccgcgagaacaccaccaucuggaccuccggcuccuccaucuccuucugcggcgucaacuccgacaccgccaacugguccuggcccgacggcgccgagcuccccuucaccaucgacaaguga

SEQ ID NO: 116148 - RNA, 1410 nt, Artificial Sequence; identical to SEQ ID NO: 112774
  derived and/or modified CDS sequence (opt2) from neuraminidase__InfluenzaA__ADO30410

SEQ ID NO: 116149 - RNA, 1410 nt, Artificial Sequence; identical to SEQ ID NO: 114125
  derived and/or modified CDS sequence (opt2) from neuraminidase__InfluenzaA__ADO30420

SEQ ID NO: 116150 - RNA, 1410 nt, Artificial Sequence; identical to SEQ ID NO: 113482
  derived and/or modified CDS sequence (opt2) from neuraminidase__InfluenzaA__ADP95343

SEQ ID NO: 116151 - RNA, 1410 nt, Artificial Sequence; identical to SEQ ID NO: 112764
  derived and/or modified CDS sequence (opt2) from neuraminidase__InfluenzaA__ADP95353

SEQ ID NO: 116152 - RNA, 1410 nt, Artificial Sequence; identical to SEQ ID NO: 112764
  derived and/or modified CDS sequence (opt2) from neuraminidase__InfluenzaA__ADP95363

SEQ ID NO: 116153 - RNA, 1410 nt, Artificial Sequence; identical to SEQ ID NO: 112764
  derived and/or modified CDS sequence (opt2) from neuraminidase__InfluenzaA__ADP95373

SEQ ID NO: 116154 - RNA, 1410 nt, Artificial Sequence; identical to SEQ ID NO: 112764
  derived and/or modified CDS sequence (opt2) from neuraminidase__InfluenzaA__ADP95383

SEQ ID NO: 116155 - RNA, 1410 nt, Artificial Sequence; identical to SEQ ID NO: 112764
  derived and/or modified CDS sequence (opt2) from neuraminidase__InfluenzaA__ADP95393

SEQ ID NO: 116156 - RNA, 1410 nt, Artificial Sequence
  derived and/or modified CDS sequence (opt2) from neuraminidase__InfluenzaA__ADQ43774
augaaccccaaccagaagaucaucaccaucggcuccggcugcaugaccaucggcauggccaaccucauccuccagaucggcaacaucaucuccaucuggaucucccacuccauccagcucggcaaccagaaccagaucgagaccugcaaccaguccgucaucaccuacgagaacaacaccugggucaaccagaccuacgucaacaucuccaacaccaacuucgccgccggccaguccgucgucuccgucaagcucgccggcaacuccucccucugccccgucuccggcugggccaucuacuccaaggacaacuccauccgcaucggcuccaagggcgacgucuucgucauccgcgagcccuucaucuccugcuccccccucgagugccgcaccuucuuccucacccagggcgcccuccucaacgacaagcacuccaacggcaccaucaaggaccgcucccccuaccgcacccucauguccugccccaucggcgagguccccucccccuacaacucccgcuucgaguccgucgccugguccgccuccgccugccacgacggcaucaacuggcucaccaucggcaucuccggccccgacaacggcgccgucgccguccucaaguacaacggcaucaucaccgacaccaucaaguccuggcgcaacaacauccuccgcacccaggaguccgagugcgccugcgucaacggcuccugcuucaccgucaugaccgacggccccuccgacggccaggccuccuacaagaucuuccgcaucgagaagggcaagaucgucaaguccgucgagaugaaggcccccaacuaccacuacgaggagugcuccugcuaccccgacuccuccgagaucaccugcgucugccgcgacaacuggcacggcuccaaccgccccugggucuccuucaaccagaaccucgaguaccagaucggcuacaucugcuccggcaucuucggcgacaacccccgccccaacgacaagaccggcuccugcggccccgucuccuccaacggcgccaacggcgucaagggcuucuccuucaaguacggcaacggcgucuggaucggccgcaccaaguccaucuccucccgcaacggcuucgagaugaucugggaccccaacggcuggaccggcaccgacaacaacuucuccaucaagcaggacaucgucggcaucaacgagugguccggcuacuccggcuccuucguccagcaccccgagcucaccggccucgacugcauccgccccugcuucugggucgagcucauccgcggccgccccaaggagaacaccaucuggaccuccggcuccuccaucuccuucugcggcgucaacuccgacaccgucggcugguccuggcccgacggcgccgagcuccccuucaccaucgacaaguga

SEQ ID NO: 116157 - RNA, 1410 nt, Artificial Sequence
  derived and/or modified CDS sequence (opt2) from neuraminidase__InfluenzaA__ADQ92578
augaaccccaaccagaagaucaucaccaucggcuccgucucccucaccaucuccaccaucugcuucuucaugcagaucgccauccucaucaccaccgucacccuccacuucaagcaguacgaguucaacuccccccccaacaaccaggucauccucugcgagcccaccaucaucgagcgcaacaucaccgagaucgucuaccucaccaacgccaccaucgagaaggagaucugccccaagcucgccgaguaccgcaacugguccaagccccagugcgacaucaccggcuucgcccccuucuccaaggacaacuccauccgccucuccgccggcggcgacaucugggucacccgcgagcccuacgucuccugcgaccccgacaagugcuaccaguucgcccucggccagggcaccacccucaacaacguccacuccaacaacaccguccgcgaccgcacccccuaccgcacccuccucaugaacgagcucggcguccccuuccaccucggcaccaagcaggucugcaucgccugguccuccuccuccugccacgacggcaaggccuggcuccacgucugcaucaccggcgacgacaagaacgccaccgccuccuucaucuacaacggccgccucgucgacuccgucgucuccugguccaaggagauccuccgcacccaggaguccgagugcgucugcaucaacggcaccugcaccgucgucaugaccgacggcuccgccuccggcaaggccgacaccaagauccucuucaucgaggagggcaagaucguccacaccuccacccucuccggcuccgcccagcacgucgaggagugcuccugcuacccccgcuaccccggcguccgcugcgucugccgcgacaacuggaagggcuccaaccgccccaucgucgacaucaacaucaaggaccacuccaucgucuccuccuacgucugcuccggccucgucggcgacaccccccgcaagaacgacuccuccuccuccucccacugccucgaccccaacaacgaggagggcggccacggcgucaagggcugggccuucgacgacggcaacgacgucuggaugggccgcaccaucuccgagaagucccgccucggcuacgagaccuucaaggucaucgagggcugguccaaccccaaguccaagcuccagaucaaccgccaggucaucgucgaccgcggcaaccgcuccggcuacuccggcaucuucuccgucgagggcaaguccugcaucaaccgcugcuucuacgucgagcucauccgcggccgcaaggaggagaccgagguccucuggaccuccaacuccaucgucgucuucugcggcaccuccggcaccuacggcaccggcuccuggcccgacggcgccgacaucaaccucaugcccaucuga

SEQ ID NO: 116158 - RNA, 1410 nt, Artificial Sequence; identical to SEQ ID NO: 112635
  derived and/or modified CDS sequence (opt2) from neuraminidase__InfluenzaA__ADR32364

SEQ ID NO: 116159 - RNA, 1410 nt, Artificial Sequence
  derived and/or modified CDS sequence (opt2) from neuraminidase__InfluenzaA__ADT64478
augaaccccaaccagaagaucaucaccaucggcuccgucugcaugaccaucggcauggccaaccucauccuccagaucggcaacaucaucuccaucuggaucggccacuccauccagcucggcaaccagaaccagaucgagaccugcaaccaguccgucaucaccuacgagaacaacaccugggucaaccagaccuacgucaacaucuccaacaccaacuucgccgccggccaguccgucgucuccgucaagcucgccggcaacuccucccucugccccgucuccggcugggccaucuacuccaaggacaacuccguccgcaucggcuccaagggcgacgucuucgucauccgcgagcccuucaucuccugcuccccccucgagugccgcaccuucuuccucacccagggcgcccuccucaacgacaagcacuccaacggcaccaucaaggaccgcucccccuaccgcacccucauguccugccccaucggcgagguccccucccccuacaacucccgcuucgaguccgucgccugguccgccuccgccugccacgacggcaucaacuggcucaccaucggcaucuccggccccgacaacggcgccgucgccguccucaaguacaacggcaucaucaccgacaccaucaaguccuggcgcaacaacauccuccgcacccaggaguccgagugcgccugcgucaacggcuccugcuucaccgucaugaccgacggccccuccaacggccaggccuccuacaagaucuuccgcaucgagaagggcaagaucgucaaguccgucgagaugaacgcccccaacuaccacuacgaggagugcuccugcuaccccgacuccuccgagaucaccugcgucugccgcgacaacuggcacggcuccaaccgccccugggucuccuucaaccagaaccucgaguaccagaucggcuacaucugcuccggcaucuucggcgacaacccccgccccaacgacaagaccggcuccugcggccccgucuccuccaacggcgccaacggcgucaagggcuucuccuucaaguacggcaacggcgucuggaucggccgcaccaaguccaucuccucccgcaacggcuucgagaugaucugggaccccaacggcuggaccggcaccgacaacaacuucuccaucaagcaggacaucgucggcaucaacgagugguccggcuacuccggcuccuucguccagcaccccgagcucaccggccucgacugcauccgccccugcuucugggucgagcucauccgcggccgccccaaggagaacaccaucuggaccuccggcuccuccaucuccuucugcggcgucaacuccgacaccgucggcugguccuggcccgacggcgccgagcuccccuucaccaucgacaaguga

SEQ ID NO: 116160 - RNA, 1410 nt, Artificial Sequence
  derived and/or modified CDS sequence (opt2) from neuraminidase__InfluenzaA__ADT78889
augaaccccaaccagaagaucaucaccaucggcuccgucucccucaccaucgccaccgucugcuuccucaugcagaucgccauccucgucaccaccgucacccuccacuucaagcagcacgagugcgacucccccgccuccaaccaggucaugcccugcgagcccaucaucaucgagcgcaacaucaccgagaucgucuaccucaacaacaccaccaucgagaaggagaucugccccaaggucgucgaguaccgcaacugguccaagccccagugccagaucaccggcuucgcccccuucuccaaggacaacuccauccgccucuccgccggcggcgacaucugggucacccgcgagcccuacgucuccugcgaccccggcaagugcuaccaguucgcccucggccagggcaccacccucgacaacaagcacuccaacgacaccauccacgaccgcaucccccaccgcacccuccucaugaacgagcucggcguccccuuccaccucggcacccgccaggucugcgucgccugguccuccuccuccugccacgacggcaaggccuggcuccacgucugcgucaccggcgacgacaagaacgccaccgccuccuucaucuacgacggccgccucgucgacuccaucggcuccuggucccagaacauccuccgcacccaggaguccgagugcgucugcaucaacggcaccugcaccgucgucaugaccgacggcuccgccuccggccgcgccgacacccgcauccucuucaucgaggagggcaagaucguccacaucuccccccucuccggcuccgcccagcacgucgaggagugcuccugcuacccccgcuaccccgacguccgcugcaucugccgcgacaacuggaagggcuccaaccgccccgucaucgacaucaacauggaggacuacuccaucgacuccuccuacgucugcuccggccucgucggcgacaccccccgcaacgacgaccgcuccuccaacuccaacugccgcgaccccaacaacgagcgcggcaaccccggcgucaagggcugggccuucgacaacggcgacgacgucuggaugggccgcaccaucuccaaggaccuccgcuccggcuacgagaccuucaaggucaucggcggcugguccacccccaacuccaagucccagaucaaccgccaggucaucgucgacuccaacaacugguccggcuacuccggcaucuucuccgucgagggcaaguccugcaucaaccgcugcuucuacgucgagcucauccgcggccgccagcaggagacccgcgucugguggaccuccaacuccaucgucgucuucugcggcaccuccggcaccuacggcaccggcuccuggcccgacggcgccaacaucuccuucaugcccaucuga

SEQ ID NO: 116161 - RNA, 1410 nt, Artificial Sequence
  derived and/or modified CDS sequence (opt2) from neuraminidase__InfluenzaA__ADT78899
augaaccccaaccagaagaucaucaccaucggcuccgucucccucaccaucgccaccgucugcuuccucaugcagaucgccauccucgccaccaccgucacccuccacuucaagcagcacgagugcgacucccccgccuccaaccaggucaugcccugcgagcccaucaucaucgagcgcaacaucaccgagaucgucuaccucaacaacaccaccaucgagaaggagaucugccccgaggucgucgaguaccgcaacugguccaagccccagugccagaucaccggcuucgcccccuucuccaaggacaacuccauccgccucuccgccggcggcgacaucugggucaugcgcgagcccuacgucuccugcaaccccggcaagugcuaccaguucgcccucggccagggcaccacccucgacaacaagcacuccaacggcaccauccacgaccgcaucccccaccgcacccuccucaugaacgagcucggcguccccuuccaccucggcaccaagcaggucugcgucgccugguccuccuccuccugccacgacggcaaggccuggcuccacgucugcgucaccggcgacgaccgcaacgccaccgccuccuucaucuacgacggccgccucgucgacuccaucggcuccuggucccagaacauccuccgcacccaggaguccgagugcgucugcaucaacggcaccugcaccgucgucaugaccgacggcuccgccuccggccgcgccgacacccgcauccucuucaucaaggagggcaagaucguccacaucuccccccucuccggcuccgcccagcacaucgaggagugcuccugcuacccccgcuaccccgacguccgcugcaucugccgcgacaacuggaagggcuccaaccgccccgucaucgacaucaacauggaggacuacuccaucgacuccuccuacgucugcuccggccucgucggcgacaccccccgcaacgacgacuccuccuccaacuccaacugccgcgaccccaacaacgagcgcggcaaccccggcgucaagggcugggccuucgacaacggcgacgacgucuggaugggccgcaccaucuccaaggaccuccgcuccggcuacgagaccuucaaggucaucggcggcugguccacccccaacuccaagucccaggucaaccgccaggucaucgucgacaacaacaacugguccggcuacuccggcaucuucuccgucgagggcaaguccugcaucaaccgcugcuucuacgucgagcucauccgcggccgcccccaggagacccgcgucugguggaccuccuccuccaucgucgucuucugcggcaccuccggcaccuacggcaccggcuccuggcccgacggcgccaacaucaacuucaugcccaucuga

SEQ ID NO: 116162 - RNA, 1410 nt, Artificial Sequence
  derived and/or modified CDS sequence (opt2) from neuraminidase__InfluenzaA__ADT78963
augaaccccaaccagaagaucaucaccaucggcuccgucucccucaccaucgccaccgucugcuuccucaugcagaucgccauccucgccaccaccgucacccuccacuucaagcagcacgagugcgacucccccgccuccaaccaggucaugcccugcgagcccaucaucaucgagcgcaacaucaccgagaucgucuaccucaacaacaccaccaucgagaaggagaucugccccgaggucgucgaguaccgcaacugguccaagccccagugccagaucaccggcuucgcccccuucuccaaggacaacuccauccgccucuccgccggcggcgacaucugggucacccgcgagcccuacgucuccugcgaccccggcaagugcuaccaguucgcccucggccagggcaccacccucgacaacaagcacuccaacgacaccauccacgaccgcaucccccaccgcacccuccucaugaacgagcucggcguccccuuccaccucggcacccgccaggucugcgucgccugguccuccuccuccugccacgacggcaaggccuggcuccacgucugcgucaccggcgacgaccgcaacgccaccgccuccuucaucuacgacggccgccucgucgacuccaucggcuccuggucccagaacauccuccgcacccaggaguccgagugcgucugcaucaacggcaccugcaccgucgucaugaccgacggcuccgccuccggccgcgccgacacccgcauccucuucaucaaggagggcaagaucguccacaucuccccccucuccggcuccgcccagcacgucgaggagugcuccugcuacccccgcuaccccgacguccgcugcaucugccgcgacaacuggaagggcuccaaccgccccgucaucgacaucaacauggaggacuacuccaucgacuccuccuacgucugcuccggccucgucggcgacaccccccgcaacgacgaccgcuccuccaacuccaacugccgcgaccccaacaacgagcgcggcaaccccggcgucaagggcugggccuucgacaacggcaacgacgucuggaugggccgcaccaucuccaaggaccuccgcuccggcuacgagaccuucaaggucaucggcggcugguccacccccaacuccaagucccaggucaaccgccaggucaucgucgacaacaacaacugguccggcuacuccggcaucuucuccgucgagggcaaguccugcaucaaccgcugcuucuacgucgagcucauccgcggccgccagcaggagacccgcgucugguggaccuccaacuccaucgucgucuucugcggcaccuccggcaccuacggcaccggcuccuggcccgacggcgccaacaucaacuucaugcccaucuga

SEQ ID NO: 116163 - RNA, 1410 nt, Artificial Sequence
  derived and/or modified CDS sequence (opt2) from neuraminidase__InfluenzaA__ADT79001
augaaccccaaccagaagaucaucaccaucggcuccaucucccucaccaucgccaccaucugcuuccucaugcagaucgccauccucgucaccaccgucacccuccacuucaagcaguacgagugcgacucccccgccaacaaccaggucaugcccugcgagcccaucaucaucgagcgcaacaucaccgagaucgucuaccucaccaacaccaccaucgagaaggagaucugccccaagcucgucgaguaccgcaacugguccaagccccagugcaagaucaccggcuucgcccccuucuccaaggacaacuccauccgccucuccgccggcggcgacaucugggucacccgcgagcccuacgucuccugcgaccccggcaagugcuaccaguucgcccucggccagggcaccacccucgacaacaagcacuccaacgacaccauccacgaccgcaucccccaccgcacccuccucaugaacgagcucggcguccccuuccaccucggcacccgccaggucugcaucgccugguccuccuccuccugccacgacggcaaggccuggcuccacgucugcgucaccggcgacgacaagaacgccaccgccuccuucaucuacgacggccgccucgucgacuccaucggcuccuggucccagaacauccuccgcacccaggaguccgagugcgucugcaucaacggcaccugcaccgucgucaugaccgacggcuccgccuccggcaaggccgacacccgcauccucuucaucgaggagggcaagaucguccacaucuccccccucuccggcuccgcccagcacgucgaggagugcuccugcuacccccgcuaccccggcguccgcugcaucugccgcgacaacuggaagggcuccaaccgccccgucgucgacaucaacgucaaggacuacuccaucgacuccuccuacgucugcuccggccucgucggcgacaccccccgcaacaacgaccgcuccuccuccuccuacugccgcaaccccaacaacgagcgcggcaaccacggcgucaagggcugggccuucgacgacggcaacgacgucuggaugggccgcaccaucuccaaggacucccgcuccggcuacgagaccuucaaggucaucggcggcugguccacccccaacuccaagucccagaucaaccgccaggucaucgucgacuccgacaaccgcuccggcuacuccggcaucuucuccgucgagggcaaguccugcaucaaccgcugcuucuacgucgagcucauccgcggccgcgagcaggagacccgcgucugguggaccuccaacuccaucgucgucuucugcggcaccuccggcaccuacggcaccggcuccuggcccgacggcgccgacaucaaccucaugcccaucuga

SEQ ID NO: 116164 - RNA, 1410 nt, Artificial Sequence; identical to SEQ ID NO: 110154
  derived and/or modified CDS sequence (opt2) from neuraminidase__InfluenzaA__ADT79021

SEQ ID NO: 116165 - RNA, 1410 nt, Artificial Sequence
  derived and/or modified CDS sequence (opt2) from neuraminidase__InfluenzaA__ADT79041
augaaccccaaccagaagaucaucaccaucggcuccgucucccucaccaucgccaccgucugcuuccucaugcagaucgccauccucgucaccaccgucacccuccacuuccgccaguacgagugcgacucccccgccaacaaccaggucaugcccugcgagcccaucaucaucgagcgcaacaucaccgagaucgucuaccucaacaacaccaccaucgagaaggagaucugccccaagcucgucgaguaccgcaacugguccaagccccagugcaagaucaccggcuucgcccccuucuccaaggacaacuccauccgccucuccgccggcggcgacaucugggucacccgcgagcccuacgucuccugcgaccccggcaagugcuaccaguucgcccucggccagggcaccacccucgacaacaagcacuccaacgacaccauccacgaccgcaucccccaccgcacccuccucaugaacgagcucggcguccccuuccaccucggcacccgccaggucugcaucgccugguccuccuccuccugccacgacggcaaggccuggcuccacgucugcgucaccggcgacgacaagaacgccaccgccuccuucaucuacgacggccgccucgucgacuccaucggcuccuggucccagaacauccuccgcacccaggaguccgagugcgucugcaucaacggcaccugcaccgucgucaugaccgacggcuccgccuccggccgcgccgacaccaagauccucuucaucgaggagggcaagaucguccacaucuccccccucuccggcuccgcccagcacgucgaggagugcuccugcuacccccgcuaccccggcguccgcugcaucugccgcgacaacuggaagggcuccaaccgccccgucgucgacaucaacgucgaggacuacuccaucgacuccuccuacgucugcuccggccucgucggcgacaccccccgcaacaacgaccgcuccuccaacuccaacugccgcaaccccaacaacgagcgcggcaaccacggcgucaagggcugggccuucgacgacggcaacgacgucuggaugggccgcaccaucuccaaggaccuccgcuccggcuacgagaccuucaaggucaucggcggcugguccacccccaacuccaagucccagaucaaccgccaggucaucgucgacuccgacaaccgcuccggcuacuccggcaucuucuccgucgagggcaaguccugcaucaaccgcugcuucuacgucgagcucauccgcggccgcgagcaggagacccgcgucugguggaccuccaacuccaucgucgucuucugcggcaccuccggcaccuacggcaccggcuccuggcccgacggcgccgacaucaaccucaugcccaucuga

SEQ ID NO: 116166 - RNA, 1410 nt, Artificial Sequence; identical to SEQ ID NO: 111796
  derived and/or modified CDS sequence (opt2) from neuraminidase__InfluenzaA__ADT79121

SEQ ID NO: 116167 - RNA, 1410 nt, Artificial Sequence
  derived and/or modified CDS sequence (opt2) from neuraminidase__InfluenzaA__ADT79131
augaaccccaaccagaagaucaucaccaucggcuccgucucccucaccaucgccaccgucugcuuccucaugcagaucgccauccucgccaccaccgucacccuccacuucaagcagcacgagugcgacucccccgccuccaaccaggucaugcccugcgagcccaucaucaucgagcgcaacaucaccgagaucgucuaccucaacaacaccaccaucgagaaggagaucugccccgaggucgucgaguaccgcaacugguccaagccccagugccagaucaccggcuucgcccccuucuccaaggacaacuccauccgccucuccgccggcggcgacaucugggucacccgcgagcccuacgucuccugcgaccccggcaagugcuaccaguucgcccucggccagggcaccacccucgacaacaagcacuccaacggcaccauccacgaccgcaucccccaccgcacccuccucaugaacgagcucggcguccccuuccaccucggcaccaagcaggucugcgucgccugguccuccuccuccugccacgacggcaaggccuggcuccacgucugcgucaccggcgacgaccgcaacgccaccgccuccuucaucuacgacggccgccucgaggacuccaucggcuccuggucccagaacauccuccgcacccaggaguccgagugcgucugcaucaacggcaccugcaccgucgucaugaccgacggcuccgccuccggccgcgccgacacccgcauccucuucaucaaggagggcaagaucguccacaucuccccccucuccggcuccgcccagcacaucgaggagugcuccugcuacccccgcuaccccgacguccgcugcaucugccgcgacaacuggaagggcuccaaccgccccguccucgacaucuccauggaggacuacuccaucgacuccuccuacgucugcuccggccucgucggcgacaccccccgcaacgacgacuccuccuccaacuccaacugccgcgaccccaacaacgagcgcggcaaccccggcgucaagggcugggccuucgacaacggcgacgacgucuggaugggccgcaccaucuccaaggaccuccgcuccggcuacgagaccuucaaggucaucggcggcugguccacccccaacuccaagucccaggucaaccgccaggucaucgucgacaacaacaacugguccggcuacuccggcaucuucuccgucgagggcaaguccugcaucaaccgcugcuucuacgucgagcucauccgcggccgcucccaggagacccgcgucugguggaccuccaacuccaucgucgucuucugcggcaccuccggcaccuacggcaccggcuccuggcccgacggcgccaacaucaacuucaugcccaucuga

SEQ ID NO: 116168 - RNA, 1410 nt, Artificial Sequence; identical to SEQ ID NO: 112774
  derived and/or modified CDS sequence (opt2) from neuraminidase__InfluenzaA__ADT79234

SEQ ID NO: 116169 - RNA, 1410 nt, Artificial Sequence; identical to SEQ ID NO: 112764
  derived and/or modified CDS sequence (opt2) from neuraminidase__InfluenzaA__ADT79244

SEQ ID NO: 116170 - RNA, 1410 nt, Artificial Sequence
  derived and/or modified CDS sequence (opt2) from neuraminidase__InfluenzaA__ADU25480
augaaccccaaccagaagaucaucaucaucuccuccaucugccucaucaacggcaucaccucccucauccuccagaucggcaacaucaucuccaucuggaucucccacuccauccagaucggcaaccagaaccagaccgagaccugcucccagaacaucaucaccuacgagaacaacaccugggucaaccagaccuacgucaacaucuccaacaacaacuucgucgccgagcaggccgucgucuccaugaagcucgccggcuccuccccccucugccccgucuccggcugggccaucuacuccaaggacaacuccguccgcaucggcuccaagggcgacgucuucgucauccgcgagcccuucaucuccugcucccaccucgagugccgcaccuucuuccucacccagggcgcccuccucaacgacaagcacuccaacggcaccaucaaggaccgcucccccuaccgcacccucauguccugccccaucggcgagguccccucccccuacaacucccgcuucgaguccgucgccugguccgccuccgccugccacgacggcaccuccuggcucaccaucggcaucuccggccccgacaacggcgccgucgccguccucaaguacaacgacaucaucaccgacaccaucaaguccuggcgcaacaacauccuccgcacccaggaguccgagugcgucugcgucaacggcuccugcuucaccgucaugaccgacggccccuccaacggccaggccuccuacaagaucuucaagaucgagaagggcaaggucgucaaguccgucgagcucaacgcccccaacuaccacuacgaggagugcuccugcuaccccgacuccggcgagaucaucugcgucugccgcgacaacuggcacggcuccaaccgccccugggucuccuucaaccagaaccucgaguaccagaucggcuacaucugcuccggcauccucggcgacaacccccgccccaacgaccgcaccggcuccugcggccccgucucccucaacggcgccaacggcgucaagggcuucuccuucaaguacggcaacggcgucuggaucggccgcaccaaguccuccuccucccgcuccggcuucgagaugaucugggaccccaacggcuggaccgagaccgacaacaacuuccucgucaagcaggacaucgucggcaugaccgacugguccggcuacuccggcuccuucguccagcaccccgagcucaccggcaugaacugcaugcgccccugcuucugggucgagcucauccgcggccgccccaaggagaacaccaucuggaccuccggcuccuccaucuccuucugcggcgucaacuccgacaccgucgacugguccuggcccgacggcgccgagcuccccuucaccaucgacaaguga

SEQ ID NO: 116171 - RNA, 1410 nt, Artificial Sequence; identical to SEQ ID NO: 112774
  derived and/or modified CDS sequence (opt2) from neuraminidase__InfluenzaA__ADU59780

SEQ ID NO: 116172 - RNA, 1410 nt, Artificial Sequence
  derived and/or modified CDS sequence (opt2) from neuraminidase__InfluenzaA__ADU59789
augaaccccaaccagaagaucaucaccaucggcuccgucugcaugaccaucggcauggccaaccucauccuccagaucggcaacaucaucuccaucuggaucucccacuccauccagcucggcaaccagaaccagaucgagaccugcaaccaguccgucaucaccuacgagaacaacaccugggucaaccagaccuacgucaacgucuccaacaccaacuucgccgccggccaguccgucgucuccgucaagcucgccggcaacuccucccucugccccgucuccggcugggccaucuacuccaaggacaacuccauccgcaucggcuccaagggcgacgucuucgucauccgcgagcccuucaucuccugcuccccccucgagugccgcaccuucuuccucacccagggcgcccuccucaacgacaagcacuccaacggcaccaucaaggaccgcucccccuaccgcacccucauguccugccccaucggcgagguccccucccccuacaacucccgcuucgaguccgucgccugguccgccuccgccugccacgacggcaucaacuggcucaccaucggcaucuccggccccgacaacggcgccgucgccguccucaaguacaacggcaucaucaccgacaccaucaaguccuggcgcaacaacauccuccgcacccaggaguccgagugcgccugcgucaacggcuccugcuucaccgucaugaccgacggccccuccgacggccaggccuccuacaagaucuuccgcaucgagaagggcaagaucgucaaguccgucgagaugaacgcccccaacuaccacuacgaggagugcuccugcuaccccgacuccuccgagaucaccugcgucugccgcgacaacuggcacggcuccaaccgccccugggucuccuucaaccagaaccucgaguaccagaucggcuacaucugcuccggcaucuucggcgacaacccccgccccaacgacaagaccggcuccugcggccccgucuccuccaacggcgccaacggcgucaagggcuucuccuucaaguacggcaacggcgucuggaucggccgcaccaaguccaucuccucccgcaacggcuucgagaugaucugggaccccaacggcuggaccggcaccgacaacaacuucuccaucaagcaggacaucgucggcaucaacgagugguccggcuacuccggcuccuucguccagcaccccgagcucaccggccucgacugcauccgccccugcuucugggucgagcucauccgcggccgccccaaggagaacaccaucuggaccuccggcuccuccaucuccuucugcggcgucaacuccgacaccgucggcugguccuggcccgacggcgccgagcuccccuucaccaucgacaaguga

SEQ ID NO: 116173 - RNA, 1410 nt, Artificial Sequence; identical to SEQ ID NO: 112774
  derived and/or modified CDS sequence (opt2) from neuraminidase__InfluenzaA__ADU59829

SEQ ID NO: 116174 - RNA, 1410 nt, Artificial Sequence
  derived and/or modified CDS sequence (opt2) from neuraminidase__InfluenzaA__ADU59838
augaaccccaaccagaagaucaucaucaucggcuccgucugcaugaccaucggcauggccaaccucauccuccagaucggcaacaucaucuccaucuggaucucccacuccauccagcucggcaaccagaaccagaucgagaccugcaaccaguccgucaucaccuacgagaacaacaccugggucaaccagaccuacgucaacaucuccaacaccaacuucgccgccggccaguccgucgucuccgucaagcucgccggcaacuccucccucugccccgucuccggcugggccaucuacuccaaggacaacuccauccgcaucggcuccaagggcgacgucuucgucauccgcgagcccuucaucuccugcuccccccucgagugccgcaccuucuuccucacccagggcgcccuccucaacgacaagcacuccaacggcaccaucaaggaccgcucccccuaccgcacccucauguccugccccaucggcgagguccccucccccuacaacucccgcuucgaguccgucgccugguccgccuccgccugccacgacggcaucaacuggcucaccaucggcaucuccggccccgacaacggcgccgucgccguccucaaguacaacggcaucaucaccgacaccaucaaguccuggcgcaacaacauccuccgcacccaggaguccgagugcgccugcgucaacggcuccugcuucaccgucaugaccgacggccccuccgacggccaggccuccuacaagaucuuccgcaucgagaagggcaagaucgucaaguccgucgagaugaacgcccccaacuaccacuucgaggagugcuccugcuaccccgacuccuccgagaucaccugcgucugccgcgacaacuggcacggcuccaaccgccccugggucuccuucaaccagaaccucgaguaccagaucggcuacaucugcuccggcaucuucggcgacaacccccgccccaacgacaagaccggcuccugcggccccgucuccuccaacggcgccaacggcgucaagggcuucuccuucaaguacggcaacggcgucuggaucggccgcaccaaguccaucuccucccgcaacggcuucgagaugaucugggaccccaacggcuggaccggcaccgacaacaacuucuccaucaagcaggacaucgucggcaucaacgagugguccggcuacuccggcuccuucguccagcaccccgagcucaccggccucgacugcauccgccccugcuucugggucgagcucauccgcggccgccccaaggagaacaccaucuggaccuccggcuccuccaucuccuucugcggcgucaacuccgacaccgucgacugguccuggcccgacggcgccgagcuccccuucaccaucgacaaguga

SEQ ID NO: 116175 - RNA, 1410 nt, Artificial Sequence; identical to SEQ ID NO: 114125
  derived and/or modified CDS sequence (opt2) from neuraminidase__InfluenzaA__ADU59847

SEQ ID NO: 116176 - RNA, 1410 nt, Artificial Sequence; identical to SEQ ID NO: 112774
  derived and/or modified CDS sequence (opt2) from neuraminidase__InfluenzaA__ADU59907

SEQ ID NO: 116177 - RNA, 1410 nt, Artificial Sequence; identical to SEQ ID NO: 112774
  derived and/or modified CDS sequence (opt2) from neuraminidase__InfluenzaA__ADU59917

SEQ ID NO: 116178 - RNA, 1410 nt, Artificial Sequence; identical to SEQ ID NO: 112774
  derived and/or modified CDS sequence (opt2) from neuraminidase__InfluenzaA__ADU59920

SEQ ID NO: 116179 - RNA, 1410 nt, Artificial Sequence; identical to SEQ ID NO: 112774
  derived and/or modified CDS sequence (opt2) from neuraminidase__InfluenzaA__ADU59941

SEQ ID NO: 116180 - RNA, 1410 nt, Artificial Sequence
  derived and/or modified CDS sequence (opt2) from neuraminidase__InfluenzaA__ADU76311
augaaccccaaccagaagaucaucaccaucggcuccgucugcaugaccaucggcauggccaaccucauccuccagaucggcaacaucaucuccaucuggaucucccacuccauccagcucggcaaccagaaccagaucgagaccugcaaccaguccgucaucaccuacgagaacaacaccugggucaaccagaccuacgucaacaucuccaacaccaacuucgccgccggccaguccgucgucuccgucaagcucgccggcaacuccucccucugccccgucuccggcugggccaucuacuccaaggacaacuccauccgcaucggcuccaagggcgacgucuucgucauccgcgagcccuucaucuccugcuccccccucgagugccgcaccuucuuccucacccagggcgcccuccucaacgacaagcacuccaacggcaccaucaaggaccgcucccccuaccgcacccucauguccugccccaucggcgagguccccucccccuacaacucccgcuucgaguccgucgccugguccgccuccgccugccacgacggcaucaacuggcucaccaucggcaucuccggccccgacaacggcgccgucgccguccucaaguacaacggcaucaucaccgacaccaucaaguccuggcgcaacaacauccuccgcacccaggaguccgagugcgccugcgucaacggcuccugcuucaccgucaugaccgacggccccuccgacggccaggccuccuacaagaucuuccgcaucgagaagggcaagaucgucaaguccgucgagaugaacgcccccaacuaccacuacgaggagugcuccugcuaccccgacuccuccgagaucaccugcgucugccgcgacaacuggcacggcuccaaccgccccugggucuccuucaaccagaaccucgaguaccagaucggcuacaucugcuccggcaucuucggcgacaacccccgccccaacgacaagaccggcuccugcggccccgucuccuccaacggcgccaacggcgucaagggcuucuccuucaaguacggcaacggcgucuggaucggccgcaccaaguccaucuccucccgcaacggcuucgagaugaucugggaccccaacggcuggaccggcaccgacaacaacuucuccaucaagcaggacaucgucggcaucaacgagugguccggcuacuccggcuccuucguccagcaccccgagcucaccggccucgacugcauccgccccugcuucugggucgagcucauccgcggccgccccaaggagaacaccaucuggaccuccggcuccuccaucuccuucugcggcgucaacuccgacaccgucggcugguccuggcccgacggcgccaagcuccccuucaccaucgacaaguga

SEQ ID NO: 116181 - RNA, 1410 nt, Artificial Sequence
  derived and/or modified CDS sequence (opt2) from neuraminidase__InfluenzaA__ADU76313
augaaccccaaccagaagaucaucaccaucggcuccgucugcaugaccaucggcauggccaaccucauccuccagaucggcaacaucaucuccaucuggaucucccacuccauccagcucggcaaccagaaccagaucgagaccugcaaccaguccgucaucaccuacgagaacaacaccugggucaaccagaccuacgucaacaucuccaacaccaacuucgccgccggccaguccgucgucuccgucaagcucgccggcaacuccucccucugccccgucuccggcugggccaucuacuccaaggacaacuccauccgcaucggcuccaagggcgacgucuucgucauccgcgagcccuucaucuccugcuccccccucgagugccgcaccuucuuccucacccagggcgcccuccucaacgacaagcacuccaacggcaccaucaaggaccgcucccccuaccgcacccucauguccugccccaucggcgagguccccucccccuacaacucccgcuucgaguccgucgccugguccgccuccgccugccacgacggcaucaacuggcucaccaucggcaucuccggccccgacaacggcgccgucgccguccucaaguacaacggcaucaucaccgacaccaucaaguccuggcgcaacaacauccuccgcacccaggaguccgagugcgccugcgucaacggcuccugcuucaccgucaugaccgacggccccuccgacggccaggccuccuacaagaucuuccgcaucgagaagggcaagaucgucaaguccgucgagaugaacgcccccaacuacuacuacgaggagugcuccugcuaccccgacuccuccgagaucaccugcgucugccgcgacaacuggcacggcuccaaccgccccugggucuccuucaaccagaaccucgaguaccagaucggcuacaucugcuccggcaucuucggcgacaacccccgccccaacgacaagaccggcuccugcggccccgucuccuccaacggcgccaacggcgucaagggcuucuccuucaaguacggcaacggcgucuggaucggccgcaccaaguccaucuccucccgcaacggcuucgagaugaucugggaccccaacggcuggaccggcaccgacaacaacuucuccaucaagcaggacaucgucggcaucaacgagugguccggcuacuccggcuccuucguccagcaccccgagcucaccggccucgacugcauccgccccugcuucugggucgagcucauccgcggccgccccaaggagaacaccaucuggaccuccggcuccuccaucuccuucugcggcgucaacuccgacaccgucggcugguccuggcccgacggcgccaagcuccccuucaccaucgacaaguga

SEQ ID NO: 116182 - RNA, 1410 nt, Artificial Sequence; identical to SEQ ID NO: 116181
  derived and/or modified CDS sequence (opt2) from neuraminidase__InfluenzaA__ADU76314

SEQ ID NO: 116183 - RNA, 1410 nt, Artificial Sequence; identical to SEQ ID NO: 116181
  derived and/or modified CDS sequence (opt2) from neuraminidase__InfluenzaA__ADU76315

SEQ ID NO: 116184 - RNA, 1410 nt, Artificial Sequence; identical to SEQ ID NO: 116181
  derived and/or modified CDS sequence (opt2) from neuraminidase__InfluenzaA__ADU76316

SEQ ID NO: 116185 - RNA, 1410 nt, Artificial Sequence
  derived and/or modified CDS sequence (opt2) from neuraminidase__InfluenzaA__ADU76317
augaaccccaaccagaagaucaucaccaucggcuccgucugcaugaccaucggcauggccaaccucauccuccagaucggcaacaucaucuccaucuggaucucccacuccauccagcucggcaaccagaaccagaucgagaccugcaaccaguccgucaucaccuacgagaacaacaccugggucaaccagaccuacgucaacaucuccaacaccaacuucgccgccggccaguccgucgucuccgucaagcucgccggcaacuccucccucugccccgucuccggcugggccaucuacuccaaggacaacuccauccgcaucggcuccaagggcgacgucuucgucauccgcgagcccuucaucuccugcuccccccucgagugccgcaccuucuuccucacccagggcgcccuccucaacgacaagcacuccaacggcaccaucaaggaccgcucccccuaccgcacccucauguccugccccaucggcgagguccccucccccuacaacucccgcuucgaguccgucgccugguccgccuccgccugccacgacggcaucaacuggcucaccaucggcaucuccggccccgacaacggcgccgucgccguccucaaguacaacggcaucaucaccgacaccaucaaguccuggcgcaacaacauccuccgcacccaggaguccgagugcgccugcgucaacggcuccugcuucaccgucaugaccgacggccccuccgacggccaggccuccuacaagaucuuccgcaucgagaagggcaagaucgucaaguccgucgagaugaacgcccccaacuaccacuacgaggagugcuccugcuaccccgacuccuccgagaucaccugcgucugccgcgacaacuggcacggcuccaaccgccccugggucuccuucaaccagaaccucgaguaccagaucggcuacaucugcuccggcaucuucggcgacaacccccgccccaacgacaagaccggcuccugcggccccgucuccuccaacggcgccaacggcgucaagggcuucuccuucaaguacggcaacggcgucuggaucggccgcaccaaguccaccuccucccgcaacggcuucgagaugaucugggaccccaacggcuggaccggcaccgacaacaacuucuccaucaagcaggacaucgucggcaucaacgagugguccggcuacuccggcuccuucguccagcaccccgagcucaccggccucgacugcauccgccccugcuucugggucgagcucauccgcggccgccccaaggagaacaccaucuggaccuccggcuccuccaucuccuucugcggcgucaacuccgacaccgucggcugguccuggcccgacggcgccgagcuccccuucaccaucgacaaguga

SEQ ID NO: 116186 - RNA, 1410 nt, Artificial Sequence
  derived and/or modified CDS sequence (opt2) from neuraminidase__InfluenzaA__ADU76318
augaaccccaaccagaagaucaucaccaucggcuccgucugcaugaccaucggcauggccaaccucauccuccagaucggcaacaucaucuccaucuggaucucccacuccauccagcucggcaaccagaaccagaucgagaccugcaaccaguccgucaucaccuacgagaacaacaccugggucaaccagaccuacgucaacaucuccaacaccaacuucgccgccggccaguccgucgucuccgucaagcucgccggcaacuccucccucugccccgucuccggcugggccaucuacuccaaggacaacuccauccgcaucggcuccaagggcgacgucuucgucauccgcgagcccuucaucuccugcuccccccucgagugccgcaccuucuuccucacccagggcgcccuccucaacgacaagcacuccaacggcaccaucaaggaccgcucccccuaccgcacccucauguccugccccaucggcgagguccccucccccuacaacucccgcuucgaguccgucgccugguccgccuccgccugccacgacggcaucaacuggcucaccaucggcaucuccggccccgacaacggcgccgucgccguccucaaguacaacggcaucaucaccgacaccaucaaguccuggcgcaacaacauccuccgcacccaggaguccgagugcgccugcgucaacggcuccugcuucaccgucaugaccgacggccccuccgacggccaggccuccuacaagaucuuccgcaucgagaagggcaagaucgucaaguccgucgagaugaacgcccccaacuaccacuacgaggagugcuccugcuaccccgacuccuccgagaucaccugcgucugccgcgacaacuggcacggcuccaaccgccccugggucuccuucaaccacaaccucgaguaccagaucggcuacaucugcuccggcaucuucggcgacaacccccgccccaacgacaagaccggcuccugcggccccgucuccuccaacggcgccaacggcgucaagggcuucuccuucaaguacggcaacggcgucuggaucggccgcaccaaguccaucuccucccgcaacggcuucgagaugaucugggaccccaacggcuggaccggcaccgacaacaacuucuccaucaagcaggacaucgucggcaucaacgagugguccggcuacuccggcuccuucguccagcaccccgagcucaccggccucgacugcauccgccccugcuucugggucgagcucauccgcggccgccccaaggagaacaccaucuggaccuccggcuccuccaucuccuucugcggcgucaacuccgacaccgucggcugguccuggcccgacggcgccgagcuccccuucaccaucgacaaguga

SEQ ID NO: 116187 - RNA, 1410 nt, Artificial Sequence; identical to SEQ ID NO: 114017
  derived and/or modified CDS sequence (opt2) from neuraminidase__InfluenzaA__ADU76319

SEQ ID NO: 116188 - RNA, 1410 nt, Artificial Sequence; identical to SEQ ID NO: 112774
  derived and/or modified CDS sequence (opt2) from neuraminidase__InfluenzaA__ADU76320

SEQ ID NO: 116189 - RNA, 1410 nt, Artificial Sequence; identical to SEQ ID NO: 112774
  derived and/or modified CDS sequence (opt2) from neuraminidase__InfluenzaA__ADU76321

SEQ ID NO: 116190 - RNA, 1410 nt, Artificial Sequence
  derived and/or modified CDS sequence (opt2) from neuraminidase__InfluenzaA__ADU76322
augaaccccaaccagaagaucaucaccaucggcuccgucugcaugaccaucggcauggccaaccucauccuccagaucggcaacaucaucuccaucuggaucucccacuccauccagcucggcaaccagaaccagaucgagaccugcaaccaguccgucaucaccuacgagaacaacaccugggucaaccagaccuacgucaacaucuccaacaccaacuucgccgccggccaguccgucgucuccgucaagcucgccggcaacuccucccucugccccgucuccggcugggccaucuacuccaaggacaacuccauccgcaucggcuccaagggcgacgucuucgucauccgcgagcccuucaucuccugcuccccccucgagugccgcaccuucuuccucacccagggcgcccuccucaacgacaagcacuccaacggcaccaucaaggaccgcucccccuaccgcacccucauguccugccccaucggcgagguccccucccccuacaacucccgcuucgaguccgucgccugguccgccuccgccugccacgacggcaucaacuggcucaccaucggcaucuccggccccgacaacggcgccgucgccguccucaaguacaacggcaucaucaccgacaccaucaaguccuggcgcaacaacauccuccgcacccaggaguccgagugcgccugcgucaacggcuccugcuucaccgucaugaccgacggccccuccgacggccaggccuccuacaagaucuuccgcaucgagaagggcaaggucgucaaguccgucgagaugaacgcccccaacuaccacuacgaggagugcuccugcuaccccgacuccuccgagaucaccugcgucugccgcgacaacuggcacggcuccaaccgccccugggucuccuucaaccagaaccucgaguaccagaucggcuacaucugcuccggcaucuucggcgacaacccccgccccaacgacaagaccggcuccugcggccccgucuccuccaacggcgccaacggcgucaagggcuucuccuucaaguacggcaacggcgucuggaucggccgcaccaaguccaucuccucccgcaacggcuucgagaugaucugggaccccaacggcuggaccggcaccgacaacaacuucuccaucaagcaggacaucgucggcaucaacgagugguccggcuacuccggcuccuucguccagcaccccgagcucaccggccucgacugcauccgccccugcuucugggucgagcucauccgcggccgccccaaggagaacaccaucuggaccuccggcuccaucaucuccuucugcggcgucaacuccgacaccgucggcugguccuggcccgacggcgccgagcuccccuucaccaucgacaaguga

SEQ ID NO: 116191 - RNA, 1410 nt, Artificial Sequence; identical to SEQ ID NO: 116180
  derived and/or modified CDS sequence (opt2) from neuraminidase__InfluenzaA__ADU76323

SEQ ID NO: 116192 - RNA, 1410 nt, Artificial Sequence; identical to SEQ ID NO: 116181
  derived and/or modified CDS sequence (opt2) from neuraminidase__InfluenzaA__ADU76324

SEQ ID NO: 116193 - RNA, 1410 nt, Artificial Sequence; identical to SEQ ID NO: 116180
  derived and/or modified CDS sequence (opt2) from neuraminidase__InfluenzaA__ADU76325

SEQ ID NO: 116194 - RNA, 1410 nt, Artificial Sequence; identical to SEQ ID NO: 116181
  derived and/or modified CDS sequence (opt2) from neuraminidase__InfluenzaA__ADU76326

SEQ ID NO: 116195 - RNA, 1410 nt, Artificial Sequence; identical to SEQ ID NO: 116181
  derived and/or modified CDS sequence (opt2) from neuraminidase__InfluenzaA__ADU76327

SEQ ID NO: 116196 - RNA, 1410 nt, Artificial Sequence; identical to SEQ ID NO: 116180
  derived and/or modified CDS sequence (opt2) from neuraminidase__InfluenzaA__ADU76328

SEQ ID NO: 116197 - RNA, 1410 nt, Artificial Sequence; identical to SEQ ID NO: 116181
  derived and/or modified CDS sequence (opt2) from neuraminidase__InfluenzaA__ADU76329

SEQ ID NO: 116198 - RNA, 1410 nt, Artificial Sequence; identical to SEQ ID NO: 116181
  derived and/or modified CDS sequence (opt2) from neuraminidase__InfluenzaA__ADU76330

SEQ ID NO: 116199 - RNA, 1410 nt, Artificial Sequence; identical to SEQ ID NO: 116181
  derived and/or modified CDS sequence (opt2) from neuraminidase__InfluenzaA__ADU76331

SEQ ID NO: 116200 - RNA, 1410 nt, Artificial Sequence; identical to SEQ ID NO: 116181
  derived and/or modified CDS sequence (opt2) from neuraminidase__InfluenzaA__ADU76332

SEQ ID NO: 116201 - RNA, 1410 nt, Artificial Sequence; identical to SEQ ID NO: 112774
  derived and/or modified CDS sequence (opt2) from neuraminidase__InfluenzaA__ADU76333

SEQ ID NO: 116202 - RNA, 1410 nt, Artificial Sequence; identical to SEQ ID NO: 112774
  derived and/or modified CDS sequence (opt2) from neuraminidase__InfluenzaA__ADU76334

SEQ ID NO: 116203 - RNA, 1410 nt, Artificial Sequence; identical to SEQ ID NO: 112774
  derived and/or modified CDS sequence (opt2) from neuraminidase__InfluenzaA__ADU76335

SEQ ID NO: 116204 - RNA, 1410 nt, Artificial Sequence; identical to SEQ ID NO: 116181
  derived and/or modified CDS sequence (opt2) from neuraminidase__InfluenzaA__ADU76336

SEQ ID NO: 116205 - RNA, 1410 nt, Artificial Sequence; identical to SEQ ID NO: 113541
  derived and/or modified CDS sequence (opt2) from neuraminidase__InfluenzaA__ADU76337

SEQ ID NO: 116206 - RNA, 1410 nt, Artificial Sequence; identical to SEQ ID NO: 114676
  derived and/or modified CDS sequence (opt2) from neuraminidase__InfluenzaA__ADU76338

SEQ ID NO: 116207 - RNA, 1410 nt, Artificial Sequence; identical to SEQ ID NO: 116180
  derived and/or modified CDS sequence (opt2) from neuraminidase__InfluenzaA__ADU76339

SEQ ID NO: 116208 - RNA, 1410 nt, Artificial Sequence; identical to SEQ ID NO: 112774
  derived and/or modified CDS sequence (opt2) from neuraminidase__InfluenzaA__ADU76341

SEQ ID NO: 116209 - RNA, 1410 nt, Artificial Sequence; identical to SEQ ID NO: 112774
  derived and/or modified CDS sequence (opt2) from neuraminidase__InfluenzaA__ADU76342

SEQ ID NO: 116210 - RNA, 1410 nt, Artificial Sequence; identical to SEQ ID NO: 112774
  derived and/or modified CDS sequence (opt2) from neuraminidase__InfluenzaA__ADU76343

SEQ ID NO: 116211 - RNA, 1410 nt, Artificial Sequence; identical to SEQ ID NO: 116181
  derived and/or modified CDS sequence (opt2) from neuraminidase__InfluenzaA__ADU76344

SEQ ID NO: 116212 - RNA, 1410 nt, Artificial Sequence; identical to SEQ ID NO: 116181
  derived and/or modified CDS sequence (opt2) from neuraminidase__InfluenzaA__ADU76345

SEQ ID NO: 116213 - RNA, 1410 nt, Artificial Sequence
  derived and/or modified CDS sequence (opt2) from neuraminidase__InfluenzaA__ADU76346
augaaccccaaccagaagaucaucaccaucggcuccgucugcaugaccaucggcauggccaaccucauccuccagaucggcaacaucaucuccaucuggaucucccacuccauccagcucggcaaccagaaccagaucgagaccugcaaccaguccgucaucaccuacgagaacaacaccugggucaaccagaccuacgucaacaucuccaacaccaacuucgccgccggccaguccgucgucuccgucaagcucgccggcaacuccucccucugccccgucuccggcugggccaucuacuccaaggacaacuccauccgcaucggcuccaagggcgacgucuucgucauccgcgagcccuucaucuccugcuccccccucgagugccgcaccuucuuccucacccagggcgcccuccucaacgacaagcacuccaacggcaccaucaaggaccgcucccccuaccgcacccucauguccugccccaucggcgagguccccucccccuacaacucccgcuucgaguccgucgccugguccgccuccgccugccacgacggcaucaacuggcucaccaucggcaucuccggccccgacaacggcgccgucgccguccucaaguacaacggcaucaucaccgacaccaucaaguccuggcgcaacaacauccuccgcacccaggaguccgagugcgccugcgucaacggcuccugcuucaccgucaugaccgacggccccuccgacggccaggccuccuacaagaucuuccgcaucgagaagggcaagaucgucaaguccgucgagaugaacgcccccaacuaccacuacgaggagugcuccugcuaccccgacuccuccgagaucaccugcgucugccgcgacaacuggcacggcuccaaccgccccugggucuccuucaaccagaaccucgaguaccagaucggcuacaucugcuccggcaucuucggcgacaacccccgccccaacgacaagaccggcuccugcggccccgucuccuccaacggcgccaacggcgucaagggcuucuccuucaaguacggcaacggcgucuggaucggccgcaccaaguccaucuccucccgcaacggcuucgagaugaucugggaccccaacggcuggaccgagaccgacaacaacuucuccaucaagcaggacaucgucggcaucaacgagugguccggcuacuccggcuccuucguccagcaccccgagcucaccggccucgacugcauccgccccugcuucugggucgagcucauccgcggccgccccaaggagaacaccaucuggaccuccggcuccuccaucuccuucugcggcgucaacuccgacaccgucggcugguccuggcccgacggcgccgagcuccccuucaccaucgacaaguga

SEQ ID NO: 116214 - RNA, 1410 nt, Artificial Sequence; identical to SEQ ID NO: 113541
  derived and/or modified CDS sequence (opt2) from neuraminidase__InfluenzaA__ADU76347

SEQ ID NO: 116215 - RNA, 1410 nt, Artificial Sequence
  derived and/or modified CDS sequence (opt2) from neuraminidase__InfluenzaA__ADV17285
augaaccccaaccaggagaucaucaccaucggcuccgucugcaugaccaucggcauggccaaccucauccuccagaucggcaacaucaucuccaucuggaucucccacuccauccagcucggcaaccagaaccagaucgagaccugcaaccaguccgucaucaccuacgagaacaacaccugggucaaccagaccuacgucaacaucuccaacaccaacuucgccgccggccaguccgucgucuccgucaagcucgccggcaacuccucccucugccccgucuccggcugggccaucuacuccaaggacaacuccauccgcaucggcuccaagggcgacgucuucgucauccgcgagcccuucaucuccugcuccccccucgagugccgcaccuucuuccucacccagggcgcccuccucaacgacaagcacuccaacggcaccaucaaggaccgcucccccuaccgcacccucauguccugccccaucggcgagguccccucccccuacaacucccgcuucgaguccgucgccugguccgccuccgccugccacgacggcaucaacuggcucaccaucggcaucuccggccccgacaacggcgccgucgccguccucaaguacaacggcaucaucaccgacaccaucaaguccuggcgcaacaacauccuccgcacccaggaguccgagugcgccugcgucaacggcuccugcuucaccgucaugaccgacggccccuccgacggccaggccuccuacaagaucuuccgcaucgagaagggcaagaucgucaaguccgucgagaugaacgcccccaacuaccacuacgaggagugcuccugcuaccccgacuccuccgagaucaccugcgucugccgcgacaacuggcacggcuccaaccgccccugggucuccuucaaccagaaccucgaguaccagaucggcuacaucugcuccggcaucuucggcgacaacccccgccccaacgacaagaccggcuccugcggccccgucuccuccaacggcgccaacggcgucaagggcuucuccuuccgcuacggcaacggcgucuggaucggccgcaccaaguccaucuccucccgcaacggcuucgagaugaucugggaccccaacggcuggaccggcaccgacaacaacuucuccaucaagcaggacaucgucggcaucaacgagugguccggcuacuccggcuccuucguccagcaccccgagcucaccggccucgacugcauccgccccugcuucugggucgagcucauccgcggccgccccaaggagaacaccaucuggaccuccggcuccuccaucuccuucugcggcgucaacuccgacaccgucggcugguccuggcccgacggcgccgagcuccccuucaccaucgacaaguga

SEQ ID NO: 116216 - RNA, 1410 nt, Artificial Sequence; identical to SEQ ID NO: 112774
  derived and/or modified CDS sequence (opt2) from neuraminidase__InfluenzaA__ADV17295

SEQ ID NO: 116217 - RNA, 1410 nt, Artificial Sequence
  derived and/or modified CDS sequence (opt2) from neuraminidase__InfluenzaA__ADV17305
augaaccccaaccagaagaucaucaccaucggcuccgucugcaugaccaucggcauggccaaccucauccuccagaucggcaacaucaucuccaucuggaucucccacuccauccagcucggcaaccagaaccagaucgagaccugcaaccaguccgucaucaccuacgagaacaacaccugggucaaccagaccuacgucaacaucuccaacaccaacuucgccgccggccaguccgucgucuccgucaagcucgccggcaacuccucccucugccccgucuccggcugggccaucuacuccaaggacaacuccauccgcaucggcuccaagggcgacgucuucgucauccgcgagcccuucaucuccugcuccucccucgagugccgcaccuucuuccucacccagggcgcccuccucaacgacaagcacuccaacggcaccaucaaggaccgcucccccuaccgcacccucauguccugccccaucggcgagguccccucccccuacaacucccgcuucgaguccgucgccugguccgccuccgccugccacgacggcaucaacuggcucaccaucggcaucuccggcuccgacaacggcgccgucgccguccucaaguacaacggcaucaucaccgacaccaucaaguccuggcgcaacaacauccuccgcacccaggaguccgagugcgccugcgucaacggcuccugcuucaccaucaugaccgacggccccuccgacggccaggccuccuacaagaucuuccgcaucgagaagggcaagaucgucaaguccgucgagaugaacgcccccaacuaccacuacgaggagugcuccugcuaccccgacuccuccgagaucaccugcgucugccgcgacaacuggcacggcuccaaccgccccugggucuccuucaaccagaaccucgaguaccagaucggcuacaucugcuccggcaucuucggcgacaacccccgccccaacgacaagaccggcuccugcggccccgucuccuccaacggcgccaacggcgucaagggcuucuccuucaaguacggcaacggcgucuggaucggccgcaccaaguccaucuccucccgcaacggcuucgagaugaucugggaccccaacggcuggaccggcaccgacaacaacuucuccaucaagcaggacaucgucggcaucaacgagugguccggcuacuccggcuccuucguccagcaccccgagcucaccggccucgacugcauccgccccugcuucugggucgagcucauccgcggccgccccaaggagaacaccaucuggaccuccggcuccuccaucuccuucugcggcgucaacuccgacaccgucggcugguccuggcccgacggcgccgagcuccccuucaccaucgacaaguga

SEQ ID NO: 116218 - RNA, 1410 nt, Artificial Sequence; identical to SEQ ID NO: 112774
  derived and/or modified CDS sequence (opt2) from neuraminidase__InfluenzaA__ADV17315

SEQ ID NO: 116219 - RNA, 1410 nt, Artificial Sequence; identical to SEQ ID NO: 114205
  derived and/or modified CDS sequence (opt2) from neuraminidase__InfluenzaA__ADV17325

SEQ ID NO: 116220 - RNA, 1410 nt, Artificial Sequence
  derived and/or modified CDS sequence (opt2) from neuraminidase__InfluenzaA__ADV17335
augaaccccaaccagaagaucaucaccaucggcuccgucugcaugaccaucggcauggccaaccucauccuccagaucggcaacaucaucuccaucuggaucucccacuccauccagcucggcaaccagaaccagaucgagaccugcaaccaguccgucaucaccuacgagaacaacaccugggucaaccagaccuacgucaacaucuccaacaccaacuucgccgccggccaguccgucgucuccgucaagcucgccggcaacuccucccucugccccgucuccggcugggccaucuacuccaaggacaacuccauccgcaucggcuccaagggcgacgucuucgucauccgcgagcccuucaucuccugcuccccccucgagugccgcaccuucuuccucacccagggcgcccuccucaacgacaagcacuccaacggcaccaucaaggaccgcucccccuaccgcacccucauguccugccccaucggcgagguccccucccccuacaacucccgcuucgaguccgucgccugguccgccuccgccugccacgacggcaucaacuggcucaccaucggcaucuccggccccgacaacggcgccgucgccguccucaaguacaacggcaucaucaccgacaccaucaaguccuggcgcaacaacauccuccgcacccaggaguccgagugcgccugcgucaacggcuccugcuucaccgucaugaccgacggccccuccgacggccaggccuccuacaagaucuuccgcaucgagaagggcaagaucgucaaguccgucgagaugaacgcccccaacuaccacuacgaggagugcuccugcuaccccgacuccuccgagaucaccugcgucugccgcgacaacuggcacggcuccaaccgccccugggucuccuucaaccagaaccucgaguaccagaucggcuacaucugcuccggcgucuucggcgacaacccccgccccaacgacaagaccggcuccugcggccccgucuccuccaacggcgccaacggcgucaagggcuucuccuucaaguacggcaacggcgucuggaucggccgcaccaaguccaucuccucccgcaacggcuucgagaugaucugggaccccaacggcuggaccggcaccgacaacaacuucuccaucaagcaggacaucgucggcaucaacgagugguccggcuacuccggcuccuucguccagcaccccgagcucaccggccucgacugcauccgccccugcuucugggucgagcucauccgcggccgccccaaggagaacaccaucuggaccuccggcuccuccaucuccuucugcggcgucaacuccgacaccgucggcugguccuggcccgacggcgccgagugccccuucaccaucgacaaguga

SEQ ID NO: 116221 - RNA, 1410 nt, Artificial Sequence; identical to SEQ ID NO: 112774
  derived and/or modified CDS sequence (opt2) from neuraminidase__InfluenzaA__ADV19022

SEQ ID NO: 116222 - RNA, 1410 nt, Artificial Sequence
  derived and/or modified CDS sequence (opt2) from neuraminidase__InfluenzaA__ADV41679
augaaccccaaccagaagaucaucaccaucggcuccgucugcaugaccaucggcauggccaaccucauccuccagaucggcaacaucaucuccaucuggaucucccacuccauccagcuccgcaaccagaaccagaucgagaccugcaaccaguccgucaucaccuacgagaacaacaccugggucaaccagaccuacgucaacaucuccaacaccaacuucgccgccggccaguccgucgucuccgucaagcucgccggcaacuccucccucugccccgucuccggcugggccaucuacuccaaggacaacuccauccgcaucggcuccaagggcgacgucuucgucauccgcgagcccuucaucuccugcuccccccucgagugccgcaccuucuuccucacccagggcgcccuccucaacgacaagcacuccaacggcaccaucaaggaccgcucccccuaccgcacccucauguccugccccaucggcgagguccccucccccuacaacucccgcuucgaguccgucgccugguccgccuccgccugccacgacggcaucaacuggcucaccaucggcaucuccggccccgacaacggcgccgucgccguccucaaguacaacggcaucaucaccgacaccaucaaguccuggcgcaacaacauccuccgcacccaggaguccgagugcgccugcgucaacggcuccugcuucaccgucaugaccgacggccccuccgacggccaggccuccuacaagaucuuccgcaucgagaagggcaagaucgucaaguccgucgagaugaacgcccccaacuaccacuacgaggagugcuccugcuaccccgacuccuccgagaucaccugcgucugccgcgacaacuggcacggcuccaaccgccccugggucuccuucaaccagaaccucgaguaccagaucggcuacaucugcuccggcaucuucggcgacaacccccgccccaacgacaagaccggcuccugcggccccgucuccuccaacggcgccaacggcgucaagggcuucuccuucaaguacggcaacggcgucuggaucggccgcaccaaguccaucuccucccgcaacggcuucgagaugaucugggaccccaacggcuggaccggcaccgacaacaacuucuccaucaagcaggacaucgucggcaucaacgagugguccggcuacuccggcuccuucguccagcaccccgagcucaccggccucgacugcauccgccccugcuucugggucgagcucauccgcggccgccccaaggagaacaccaucuggaccuccggcuccuccaucuccuucugcggcgucaacuccgacaccgucggcugguccuggcccgacggcgccgagcuccccuucaccaucgacaaguga

SEQ ID NO: 116223 - RNA, 1410 nt, Artificial Sequence
  derived and/or modified CDS sequence (opt2) from neuraminidase__InfluenzaA__ADV76582
augaaccccaaccagaagaucaucaccaucggcuccgucucccucaccaucuccaccgucugcuucuucaugcagaucgccauccucaucaccaccgucacccuccacuucaagcaguacgaguucaacuccccccccaacaaccaggucaugcucugcgagcccaccaucaucgagcgcaacaucaccgagaucgucuaccucaccaacaccaccaucgagaaggagaucugccccaagcucgccgaguaccgcaacugguccaagccccagugcgacaucaccggcuucgcccccuucuccaaggacaacuccauccgccucuccgccggcggcgacaucugggucacccgcgagcccuacgucuccugcgaccccgacaagugcuaccaguucgcccucggccagggcaccacccucaacaacguccacuccaacaacaccguccgcgaccgcacccccuaccgcacccuccucaugaacgagcucggcguccccuuccaccucggcaccaagcaggucugcaucgccugguccuccuccuccugccacgacggcaaggccuggcuccacgucugcaucaccggcgacgacaagaacgccaccgccuccuucaucuacaacggccgccucgucgacuccgucgucuccugguccaaggagauccuccgcacccaggaguccgagugcgucugcaucaacggcaccugcaccgucgucaugaccgacggcuccgccuccggcaaggccgacaccaagauccucuucaucgaggagggcaagaucguccacaccuccacccucuccggcuccgcccagcacgucgaggagugcuccugcuacccccgcuaccccggcguccgcugcgucugccgcgacaacuggaagggcuccaaccgccccaucgucgacaucaacaucaaggaccacuccaucgucuccuccuacgucugcuccggccucgucggcgacaccccccgcaagaacgacuccuccuccuccucccacugccucgaccccaacaacgaggagggcggccacggcgucaagggcugggccuucgacgacggcaacgacgucuggaugggccgcaccaucaacgagaccucccgccucggcuacgagaccuucaaggucaucgagggcugguccaaccccaaguccaagcuccagaucaaccgccaggucaucgucgacaagggcaaccgcuccggcuacuccggcaucuucuccgucgagggcaaguccugcaucaaccgcugcuucuacgucgagcucauccgcggccgcaaggaggagaccgagguccucuggaccuccaacuccaucgucgucuucugcggcaccuccggcaccuacggcaccggcuccuggcccgacggcgccgaccucaaccucaugcccaucuga

SEQ ID NO: 116224 - RNA, 1410 nt, Artificial Sequence; identical to SEQ ID NO: 112635
  derived and/or modified CDS sequence (opt2) from neuraminidase__InfluenzaA__ADV76590

SEQ ID NO: 116225 - RNA, 1410 nt, Artificial Sequence; identical to SEQ ID NO: 112635
  derived and/or modified CDS sequence (opt2) from neuraminidase__InfluenzaA__ADV76601

SEQ ID NO: 116226 - RNA, 1410 nt, Artificial Sequence; identical to SEQ ID NO: 113628
  derived and/or modified CDS sequence (opt2) from neuraminidase__InfluenzaA__ADV76612

SEQ ID NO: 116227 - RNA, 1410 nt, Artificial Sequence; identical to SEQ ID NO: 112635
  derived and/or modified CDS sequence (opt2) from neuraminidase__InfluenzaA__ADV76623

SEQ ID NO: 116228 - RNA, 1410 nt, Artificial Sequence; identical to SEQ ID NO: 112635
  derived and/or modified CDS sequence (opt2) from neuraminidase__InfluenzaA__ADV76634

SEQ ID NO: 116229 - RNA, 1410 nt, Artificial Sequence; identical to SEQ ID NO: 115502
  derived and/or modified CDS sequence (opt2) from neuraminidase__InfluenzaA__ADV76645

SEQ ID NO: 116230 - RNA, 1410 nt, Artificial Sequence
  derived and/or modified CDS sequence (opt2) from neuraminidase__InfluenzaA__ADV76667
augaaccccaaccagaagaucaucaccaucggcuccgucucccucaccaucgccaccgucugcuuccucaugcagaucgccauccucgucaccaccgucacccuccacuucaagcaguacgagugcgacucccccgccuccaaccaggucaugcccugcgagcccaucaucaucgagcgcaacaucaccgagaucgucuaccucaacaacaccaccaucgagaaggagaucugccccaaggucgucgaguaccgcaacugguccaagccccagugccagaucaccggcuucgcccccuucuccaaggacaacuccauccgccucuccgccggcggcgacaucugggucacccgcgagcccuacgucuccugcgaccacggcaagugcuaccaguucgcccucggccagggcaccacccucgacaacaagcacuccaacgacaccauccacgaccgcaucccccaccgcacccuccucaugaacgagcucggcguccccuuccaccucggcacccgccaggucugcaucgccugguccuccuccuccugccacgacggcaaggccuggcuccacgucugcaucaccggcgacgacaagaacgccaccgccuccuucaucuacgacggccgccucgucgacuccaucggcuccuggucccagaacauccuccgcacccaggaguccgagugcgucugcaucaacggcaccugcaccgucgucaugaccgacggcuccgccuccggccgcgccgacacccgcauccucuucaucgaggagggcaagaucguccacaucuccccccucuccggcuccgcccagcacgucgaggagugcuccugcuacccccgcuaccccggcguccgcugcaucugccgcgacaacuggaagggcuccaaccgccccgucgucgacaucaacauggaggacuacuccaucgacuccuccuacgucugcuccggccucgucggcgacaccccccgcaacgacgaccgcuccuccaacuccaagucccgcaaccccaacaacgagcgcggcaaccagggcgucaagggcugggccuucgacaacggcgacgacgucuggaugggccgcaccaucucccgcgaccuccgcuccggcuacgagaccuucaaggucaucggcggcugguccacccccaacuccaagucccagaucaaccgccaggucaucgucgacuccgacaaccgcuccggcuacuccggcaucuucuccgucgagggcaaguccugcaucaaccgcugcuucuacgucgagcucauccgcggccgcaagcaggagacccgcgucugguggaccuccaacuccaucgucgucuucugcggcaccuccggcaccuacggcaccggcuccuggcccgacggcgccaacaucaacuucaugcccaucuga

SEQ ID NO: 116231 - RNA, 1410 nt, Artificial Sequence; identical to SEQ ID NO: 115504
  derived and/or modified CDS sequence (opt2) from neuraminidase__InfluenzaA__ADV76676

SEQ ID NO: 116232 - RNA, 1410 nt, Artificial Sequence; identical to SEQ ID NO: 114645
  derived and/or modified CDS sequence (opt2) from neuraminidase__InfluenzaA__ADV76697

SEQ ID NO: 116233 - RNA, 1410 nt, Artificial Sequence
  derived and/or modified CDS sequence (opt2) from neuraminidase__InfluenzaA__ADV76708
augaaccccaaccagaagaucaucaccaucggcuccgucucccucaccaucuccaccaucugcuucuucaugcagaccgccauccucaucaccaccgucacccuccacuucaagcagugcgaguucaacuccccccccaacaaccaggucaugcucugcgagcccaccaucaucgagcgcaacaucaccgagaucgucuaccucaccaacaucaccaucgagaaggagaucugccccaagcucgccgaguaccgcaacugguccaagccccagugcgacaucaccggcuucgcccccuucuccaaggacaacuccauccgccucuccgccggcggcgacaucugggucacccgcgagcccuacgucuccugcgaccccgacaagugcuaccaguucgcccucggccagggcaccacccucaacaacguccacuccaacaacaccguccgcgaccgcacccccuaccgcacccuccucaugaacgagcucggcguccccuuccaccucggcaccaagcaggucugcaucgccugguccuccuccuccugccacgacggcaaggccuggcuccacgucugcaucaccggcgacgacaagaacgccaccgccuccuucaucuacaacggccgccucgucgacuccgucgucuccugguccaaggagauccuccgcacccaggaguccgagugcgucugcaucaacggcaccugcaccgucgucaugaccgacggcuccgccuccggcaaggccgacaccaagauccucuucaucgaggagggcaagaucguccacaccuccacccucuccggcuccgcccagcacgucgaggagugcuccugcuacccccgcuaccccggcguccgcugcgucugccgcgacaacuggaagggcuccaaccgccccaucgucgacaucaacaucaaggaccacuccaucgucuccuccuacgucugcuccggccucgucggcgacaccccccgcaagaacgacuccuccuccuccucccacugccucgaccccaacaacgaggagggcggccacggcgucaagggcugggccuucgacgacggcaacgacgucuggaugggccgcaccaucuccgagaagucccgccucggcuacgagaccuucaaggucaucgagggcugguccaaccccaaguccaagcuccagaucaaccgccaggucaucgucgaccgcggcaaccgcuccggcuacuccggcaucuucuccgucgagggcaaguccugcaucaaccgcugcuucuacgucgagcucauccgcggccgcaaggaggagaccgagguccucuggaccuccaacuccaucgucgucuucugcggcaccuccggcaccuacggcaccggcuccuggcccgacggcgccgacaucaaccucaugcccaucuga

SEQ ID NO: 116234 - RNA, 1410 nt, Artificial Sequence
  derived and/or modified CDS sequence (opt2) from neuraminidase__InfluenzaA__ADV76719
augaaccccaaccagaagaucaucaccaucggcuccgucucccucaccaucuccaccaucugcuucuucaugcagaucgccauccucaucaccaccgucacccuccacuucaagcaguacgaguucaacuccccccccaacaaccaggucaugcucugcgagcccaccaucaucgagaagaacaucaccgagaucgucuaccucaccaacaccaccaucgagaaggagaucugccccaagcucgccgaguaccgcaacugguccaagccccagugcgacaucaccggcuucgcccccuucuccaaggacaacuccauccgccucuccgccggcggcgacaucugggucacccgcgagcccuacgucuccugcgaccccgacaagugcuaccaguucgcccucggccagggcaccacccucaacaacguccacuccaacaacaccguccgcgaccgcacccccuaccgcacccuccucaugaacgagcucggcguccccuuccaccucggcaccaagcaggucugcaucgccugguccuccuccuccugccacgacggcaaggccuggcuccacgucugcaucaccggcgacgacaagaacgccaccgccuccuucaucuacaacggccgccucgucgacuccgucgucuccugguccaaggagauccuccgcacccaggaguccgagugcgucugcaucaacggcaccugcaccgucgucaugaccgacggcuccgccuccggcaaggccgacaccaagauccucuucaucgaggagggcaagaucguccacaccuccacccucuccggcuccgcccagcacgucgaggagugcuccugcuacccccgcuaccccggcguccgcugcgucugccgcgacaacuggaagggcuccaaccgccccaucgucgacaucaacaucaaggaccacuccaucgucuccuccuacgucugcuccggccucgucggcgacaccccccgcaagaacgacuccuccuccuccucccacugccucgaccccaacaacgaggagggcggccacggcgucaagggcugggccuucgacgacggcaacgacgucuggaugggccgcaccaucuccgagaagucccgccucggcuacgagaccuucaaggucaucgagggcugguccaaccccaaguccaagcuccagaugaaccgccaggucaucgucgaccgcggcaaccgcuccggcuacuccggcaucuucuccgucgagggcaaguccugcaucaaccgcugcuucuacgucgagcucauccgcggccgcaaggaggagaccgagguccucuggaccuccaacuccaucgucgucuucugcggcaccuccggcaccuacggcaccggcuccuggcccgacggcgccgacaucaaccucaugcccaucuga

SEQ ID NO: 116235 - RNA, 1410 nt, Artificial Sequence
  derived and/or modified CDS sequence (opt2) from neuraminidase__InfluenzaA__ADV76730
augaaccccaaccagaagaucaucaccaucggcuccgucucccucaccaucuccaccaucugcuucuucaugcagaucgccauccucaucaccaccgucacccuccacuucaagcaguacgaguucaacuccccccccaacaaccaggucaugcucugcgagcccaccaucaucgagcgcaacaucaccgagaucgucuaccucaccaacaccaccaucgagaaggagaucugccccaagcucgccgaguaccgcaacugguccaagccccagugcgacaucaccggcuucgcccccuucuccaaggacaacuccauccgccucuccgccggcggcgacaucugggucacccgcgagcccuacgucuccugcgaccccgacaagugcuaccaguucgcccucggccagggcaccacccucaacaacguccacuccaacaacaccguccgcgaccgcacccccuaccgcacccuccucaugaacgagcucggcguccccuuccaccucggcaccaagcaggucugcaucgccugguccuccuccuccugccacgacggcaaggccuggcuccacgucugcaucaccggcgacgacaagaacgccaccgccuccuucaucuacaacggccgccucgucgacuccgucgucuccugguccaaggagacccuccgcacccaggaguccgagugcgucugcaucaacggcaccugcaccgucgucaugaccgacggcuccgccuccggcaaggccgacaccaagauccucuucaucgaggagggcaagaucguccacaccuccacccucuccggcuccgcccagcacgucgaggagugcuccugcuacccccgcuaccccggcguccgcugcgucugccgcgacaacuggaagggcuccaaccgccccaucgucgacaucaacaucaaggaccacuccaucgucuccuccuacgucugcuccggccucgucggcgacaccccccgcaaggacgacuccuccuccuccucccacugccucgaccccaacaacgaggagggcggccacggcgucaagggcugggccuucgacgacggcaacgacgucuggaugggccgcaccaucuccgagaagucccgccucggcuacgagaccuucaaggucaucgagggcugguccaaccccaaguccaagcuccagaucaaccgccaggucaucgucgaccgcggcaaccgcuccggcuacuccggcaucuucuccgucgagggcaaguccugcaucaaccgcugcuucuacgucgagcucauccgcggccgcaaggaggagaccgagguccucuggaccuccaacuccaucgucgucuucugcggcaccuccggcaccuacggcaccggcuccuggcccgacggcgccgacaucaaccucaugcccaucuga

SEQ ID NO: 116236 - RNA, 1410 nt, Artificial Sequence
  derived and/or modified CDS sequence (opt2) from neuraminidase__InfluenzaA__ADV78132
augaaccccaaccagaagaucaucaccaucggcuccgucugcaugaccaucggcauggccaaccucauccuccagaucggcaacaucaucuccaucuggaucucccacuccauccagcucggcaaccagucccagaucgagaccugcaaccaguccgucaucaccuacgagaacaacaccuggcucaaccagaccuacgucaacaucuccaacaccaacuucgccgccggccaguccgucgucuccgucaagcucgccggcaacuccucccucugccccgucuccggcugggccaucuacuccaaggacaacuccauccgcaucggcuccaagggcgacgucuucgucauccgcgagcccuucaucuccugcucccccuccgagugccgcaccuucuuccucacccagggcgcccuccucaacgacaagcacuccaacggcaccaucaaggaccgcucccccuaccgcacccucauguccugccccaucggcgagguccccucccccuacaacucccgcuucgaguccgucgccugguccgccuccgccugccacgacggcaucaacuggcucaccaucggcaucuccggccccgacaacggcgccgucgccguccucaaguacaacggcaucaucaccgacaccaucaaguccuggcgcaacaacauccuccgcacccaggaguccgagugcgccugcgucaacggcuccugcuucaccaucaugaccgacggccccuccgacggccaggccuccuacaagaucuuccgcaucgagaagggcaagaucgucaaguccgucggcaugaacgcccccaacuaccacuacgaggagugcuccugcuaccccgacuccuccgagaucaccugcgucugccgcgacaacuggcacggcuccaaccgccccugggucuccuucaaccagaaccucgaguaccagaucggcuacaucugcuccggcaucuucggcgacaacccccgccccaacgacaagaccggcuccugcggccccgucuccuccaacggcgccaacggcgucaagggcuucuccuucaaguacggcaacggcgucuggaucggccgcaccaaguccaucuccucccgcaagggcuucgagaugaucugggaccccaacggcuggaccggcaccgacaacaacuucuccaucaagcaggacaucgucggcaucaacgagugguccggcuacuccggcuccuucguccagcaccccgagcucaccggccucgacugcauccgccccugcuucugggucgagcucauccgcggccgccccaaggagaacaccaucugggccuccggcuccuccaucuccuucugcggcgucaacuccgacaccgucggcugguccuggcccgacggcgccgagcuccccuucaucaucgacaaguga

SEQ ID NO: 116237 - RNA, 1413 nt, Artificial Sequence
  derived and/or modified CDS sequence (opt2) from neuraminidase__InfluenzaA__ADW09104
augaaccccaaccagaagaucaucaccaucggcuccaucuccaucgccaucggcaucaucucccucaugcuccagaucggcaacaucaucuccaucugggccucccacuccauccagaccggcucccagaacaacaccggcaucugcaaccagcgcaucaucaccuacgagaacuccaccugggucaaccacaccuacgucaacaucaacaacaccaacgucgucgccggcgaggacaagaccuccgucacccucgccggcaacuccucccucugcuccaucuccggcugggccaucuacaccaaggacaacuccauccgcaucggcuccaagggcgacgucuucgucauccgcgagcccuucaucuccugcucccaccucgagugccgcaccuucuuccucacccagggcgcccuccucaacgacaagcacuccaacggcaccgucaaggaccgcucccccuaccgcgcccucauguccugcccccucggcgaggcccccucccccuacaacuccaaguucgaguccgucgccugguccgccuccgccugccacgacggcaugggcuggcucaccaucggcaucuccggccccgacaacggcgccgucgccguccucaaguacaacggcaucaucaccggcaccaucaaguccuggaagaagcagauccuccgcacccaggaguccgagugcgucugcaugaacggcuccugcuucaccaucaugaccgacggccccaacaacaaggccgccuccuacaagaucuucaagaucgagaagggcaaggucaccaaguccaucgagcucaacgcccccaacuucuacuacgaggagugcuccugcuaccccgacaccggcaucgucaugugcgucugccgcgacaacuggcacggcuccaaccgccccugggucuccuucaaccagaaccucgacuaccagaucggcuacaucugcuccggcgucuucggcgacaacccccgccccgaggacggcgagggcuccugcaaccccgucaccgucgacggcgccaacggcgucaagggcuucuccuacaaguacggcaacggcgucuggaucggccgcaccaaguccaaccgccuccgcaagggcuucgagaugaucugggaccccaacggcuggaccaacaccgacuccgacuucuccgucaagcaggacgucgucgccaucaccgacugguccggcuacuccggcuccuucguccagcaccccgagcucaccggccucgacugcauccgccccugcuucugggucgagcucguccgcggccucccccgcgagaacaccaccaucuggaccuccggcuccuccaucuccuucugcggcgucaacuccgacaccgccaacugguccuggcccgacggcgccgagcuccccuucaccaucgacaaguga

SEQ ID NO: 116238 - RNA, 1413 nt, Artificial Sequence; identical to SEQ ID NO: 113497
  derived and/or modified CDS sequence (opt2) from neuraminidase__InfluenzaA__ADW09114

SEQ ID NO: 116239 - RNA, 1413 nt, Artificial Sequence
  derived and/or modified CDS sequence (opt2) from neuraminidase__InfluenzaA__ADW09123
augaaccccaaccagaagaucaucaccaucggcuccaucuccaucgccaucggcaucaccucccucaugcuccagaucggcaacaucaucuccaucugggccucccacuccauccagaccggcucccagaacaacaccggcaucugcaaccagcgcaucaucaccuacgagaacuccaccugggucaaccacaccuacgucaacaucaacaacaccaacgucgucgccggcgaggacaagaccuccgucacccucgccggcaacuccucccucugcuccaucuccggcugggccaucuacaccaaggacaacuccauccgcaucggcuccaagggcgacgucuucgucauccgcgagcccuucaucuccugcucccaccucgagugccgcaccuucuuccucacccagggcgcccuccucaacgacaagcacuccaacggcaccgucaaggaccgcucccccuaccgcgcccucauguccugcccccucggcgaggcccccucccccuacaacuccaaguucgaguccgucgccugguccgccuccgccugccacgacggcaugggcuggcucaccaucggcaucuccggccccgacaacggcgccgucgccguccucaaguacaacggcaucaucaccggcaccaucaaguccuggaagaagcagauccuccgcacccaggaguccgagugcgucugcaugaacggcuccugcuucaccaucaugaccgacggccccuccaacaaggccgccuccuacaagaucuucaagaucgagaagggcaaggucaccaaguccaucgagcucaacgcccccaacuucuacuacgaggagugcuccugcuaccccgacaccggcaucgucaugugcgucugccgcgacaacuggcacggcuccaaccgccccugggucuccuucaaccagaaccucgacuaccagaucggcuacaucugcuccggcgucuucggcgacaacccccgccccgaggacggcgagggcuccugcaaccccgucaccgucgacggcgccgacggcgucaagggcuucuccuacaaguacggcaacggcgucuggaucggccgcaccaaguccaaccgccuccgcaagggcuucgagaugaucugggaccccaacggcuggaccaacaccgacuccgacuucuccgucaagcaggacgucgucgccaucaccgacugguccggcuacuccggcuccuucguccagcaccccgagcucaccggccucgacugcauccgccccugcuucugggucgagcucguccgcggccucccccgcgagaacaccaccaucuggaccuccggcuccuccaucuccuucugcggcgucaacuccgacaccgccaacugguccuggcccgacggcgccgagcuccccuucaccaucgacaaguga

SEQ ID NO: 116240 - RNA, 1413 nt, Artificial Sequence
  derived and/or modified CDS sequence (opt2) from neuraminidase__InfluenzaA__ADW09156
augaaccccaaccagaagaucaucaccaucggcuccaucuccaucgccaucggcaucaucucccucaugcuccagaucggcaacaucaucuccaucugggccucccacuccauccagaccggcucccagaacaacaccggcaucugcaaccagcgcaucaucaccuacgagaacuccaccugggucaaccacaccuacgucaacaucaacaacaccaacgucgucgccggcgaggacaagaccuccgucacccucgccggcaacuccucccucugcuccaucuccggcugggccaucuacaccaaggacaacuccauccgcaucggcuccaagggcgacgucuucgucauccgcgagcccuucaucuccugcucccaccucgagugccgcaccuucuuccucacccagggcgcccuccucaacgacaagcacuccaacggcaccgucaaggaccgcucccccuaccgcgcccucauguccugcccccucggcgaggcccccucccccuacaacuccaaguucgaguccgucgccugguccgccuccgccugccacgacggcaugggcuggcucaccaucggcaucuccggccccgacaacggcgccgucgccguccucaaguacaacggcaucaucaccggcaccaucaaguccuggaagaagcagauccuccgcacccaggaguccgagugcgucugcaugaacggcuccugcuucaccaucaugaccgacggccccuccaacaaggccgccuccuacaagaucuucaagaucgagaagggcaaggucaccaaguccaucgagcucaacgcccccaacuucuacuacgaggagugcuccugcuaccccgacaccggcaucgucaugugcgucugccgcgacaacuggcacggcuccaaccgccccugggucuccuucaaccagaaccucgacuaccagaucggcuacaucugcuccggcgucuucggcgacaacccccgccccgaggacggcgagggcuccugcaaccccgucaccgucgacggcgccgacggcgucaagggcuucuccuacaaguacggcaacggcgucuggaucggccgcaccaaguccaaccgccuccgcaagggcuucgagaugaucugggaccccaacggcuggaccaacaccgacuccgacuucuccgucaagcaggacgucgucgccaucaccgacugguccggcuacuccggcuccuucguccagcaccccgagcucaccggccucgacugcauccgccccugcuucugggucgagcucguccgcggccucccccgcgagaacaccaccaucuggaccuccggcuccuccaucuccuucugcggcgucaacuccgacaccgccaacugguccuggcccgacggcgccgagcuccccuucaccaucgacaaguga

SEQ ID NO: 116241 - RNA, 1413 nt, Artificial Sequence
  derived and/or modified CDS sequence (opt2) from neuraminidase__InfluenzaA__ADW09167
augaaccccaaccagaagaucaucaccaucggcuccaucuccaucgccaucggcaucaucucccucaugcuccagaucggcaacaucaucuccaucugggccucccacuccauccagaccggcucccagaacaacaccggcaucugcaaccagcgcaucaucaccuacgagaacuccaccugggucaaccacaccuacgucaacaucaacaacaccaacgucgucgccggcgaggacaagaccuccgucacccucgccggcaacuccucccucugcuccaucuccggcugggccaucuacaccaaggacaacuccauccgcaucggcuccaagggcgacgucuucgucauccgcgagcccuucaucuccugcucccaccucgagugccgcaccuucuuccucacccagggcgcccuccucaacgacaagcacuccaacggcaccgucaaggaccgcucccccuaccgcgcccucauguccugcccccucggcgaggcccccucccccuacaacuccaaguucgaguccgucgccugguccgccuccgccugccacgacggcaugggcuggcucaccaucggcaucuccggccccgacaacggcgccgucgccguccucaaguacaacggcaucaucaccggcaccaucaaguccuggaagaagcagauccuccgcacccaggaguccgagugcgucugcaugaacggcuccugcuucaccaucaugaccgacggccccuccaacaaggccgccuccuacaagaucuucaagaucgagaagggcaaggucaccaaguccaucgagcucaacgcccccaacuucuacuacgaggagugcuccugcuaccccgacaccggcaucgucaugugcgucugccgcgacaacuggcacggcuccaaccgccccugggucuccuucaaccagaaccucgacuaccagaucggcuacaucugcuccggcgucuucggcgacaacccccgccccgaggacggcgagggcuccugcaaccccgucaccgucaacggcgccgacggcgucaagggcuucuccuacaaguacggcaacggcgucuggaucggccgcaccaaguccaaccgccuccgcaagggcuucgagaugaucugggaccccaacggcuggaccaacaccgacuccgacuucuccgucaagcaggacgucgucgccaucaccgacugguccggcuacuccggcuccuucguccagcaccccgagcucaccggccucgacugcauccgccccugcuucugggucgagcucguccgcggccucccccgcgagaacaccaccaucuggaccuccggcuccuccaucuccuucugcggcgucaacuccgacaccgccaacugguccuggcccgacggcgccgagcuccccuucaccaucgacaaguga

SEQ ID NO: 116242 - RNA, 1413 nt, Artificial Sequence; identical to SEQ ID NO: 113497
  derived and/or modified CDS sequence (opt2) from neuraminidase__InfluenzaA__ADW09178

SEQ ID NO: 116243 - RNA, 1413 nt, Artificial Sequence; identical to SEQ ID NO: 113497
  derived and/or modified CDS sequence (opt2) from neuraminidase__InfluenzaA__ADW09189

SEQ ID NO: 116244 - RNA, 1413 nt, Artificial Sequence; identical to SEQ ID NO: 116241
  derived and/or modified CDS sequence (opt2) from neuraminidase__InfluenzaA__ADW09211

SEQ ID NO: 116245 - RNA, 1413 nt, Artificial Sequence
  derived and/or modified CDS sequence (opt2) from neuraminidase__InfluenzaA__ADW09222
augaaccccaaccagaagaucaucaccaucggcuccaucuccaucgccaucggcaucaucucccucaugcuccagaucggcaacaucaucuccaucugggccucccacuccauccagaccggcucccagaacaacaccggcaucugcaaccagcgcaucaucaccuacgagaacuccaccugggucaaccacaccuacgucaacaucaacaacaccaacgucgucgccggcgaggacaagaccuccgucacccucgccggcaacuccucccucugcuccaucuccggcugggccaucuacaccaaggacaacuccauccgcaucggcuccaagggcgacgucuucgucauccgcgagcccuucaucuccugcucccaccucgagugccgcaccuucuuccucacccagggcgcccuccucaacgacaagcacuccaacggcaccgucaaggaccgcucccccuaccgcgcccucauguccugcccccucggcgaggcccccucccccuacaacuccaaguucgaguccgucgccugguccgccuccgccugccacgacggcaugggcuggcucaccaucggcaucuccggccccgacaacggcgccgucgccguccucaaguacaacggcaucaucaccggcaccaucaaguccuggaagaagcagauccuccgcacccaggaguccgagugcgucugcaugaacggcuccugcuucaccaucaugaccgacggccccuccaacaaggccgccuccuacaagaucuucaagaucgagaagggcaaggucaccaaguccaucgagcucaacgcccccaacuucuacuacgaggagugcuccugcuaccccgacaccggcaucgucaugugcgucugccgcgacaacuggcacggcuccaaccgccccugggucuccuucaaccagaaccucgacuaccagaucggcuacaucugcuccggcgucuucggcgacaacccccgccccgaggacggcgagggcuccugcaacuccgucaccgucgacggcgccgacggcgucaagggcuucuccuacaaguacggcaacggcgucuggaucggccgcaccaaguccaaccgccuccgcaagggcuucgagaugaucugggaccccaacggcuggaccaacaccgacuccgacuucuccgucaagcaggacgucgucgccaucaccgacugguccggcuacuccggcuccuucguccagcaccccgagcucaccggccucgacugcauccgccccugcuucugggucgagcucguccgcggccucccccgcgagaacaccaccaucuggaccuccggcuccuccaucuccuucugcggcgucaacuccgacaccgccaacugguccuggcccgacggcgccgagcuccccuucaccaucgacaaguga

SEQ ID NO: 116246 - RNA, 1413 nt, Artificial Sequence
  derived and/or modified CDS sequence (opt2) from neuraminidase__InfluenzaA__ADW09233
augaaccccaaccagaagaucaucaccaucggcuccaucuccaucgccaucggcaccaucucccucaugcuccagaucggcaacaucaucuccaucugggccucccacuccauccagaccggcucccagaacaacaccggcaucugcaaccagcgcaucaucaccuacgagaacuccaccugggucaaccacaccuacgucaacaucaacaacaccaacgucgucgccggcgaggacaagaccuccgucacccucgccggcaacuccucccucugcuccaucuccggcugggccaucuacaccaaggacaacuccauccgcaucggcuccaagggcgacgucuucgucauccgcgagcccuucaucuccugcucccaccucgagugccgcaccuucuuccucacccagggcgcccuccucaacgacaagcacuccaacggcaccgucaaggaccgcucccccuaccgcgcccucauguccugcccccucggcgaggcccccucccccuacaacuccaaguucgaguccgucgccugguccgccuccgccugccacgacggcaugggcuggcucaccaucggcaucuccggccccgacaacggcgccgucgccguccucaaguacaacggcaucaucaccggcaccaucaaguccuggaagaagcagauccuccgcacccaggaguccgagugcgucugcaugaacggcuccugcuucaccaucaugaccgacggccccuccaacaaggccgccuccuacaagaucuucaagaucgagaagggcaaggucaccaaguccaucgagcucaacgcccccaacuucuacuacgaggagugcuccugcuaccccgacaccggcaucgucaugugcgucugccgcgacaacuggcacggcuccaaccgccccugggucuccuucaaccagaaccucgacuaccagaucggcuacaucugcuccggcgucuucggcgacaacccccgccccgaggacggcgagggcuccugcaaccccgucaccgucgacggcgccaacggcgucaagggcuucuccuacaaguacggcaacggcgucuggaucggccgcaccaaguccaaccgccuccgcaagggcuucgagaugaucugggaccccaacggcuggaccaacaccgacuccgacuucuccgucaagcaggacgucgucgccaucaccgacugguccggcuacuccggcuccuucguccagcaccccgagcucaccggccucgacugcauccgccccugcuucugggucgagcucguccgcggccucccccgcgagaacaccaccaucuggaccuccggcuccuccaucuccuucugcggcgucaacuccgacaccgccaacugguccuggcccgacggcgccgagcuccccuucaccaucgacaaguga

SEQ ID NO: 116247 - RNA, 1413 nt, Artificial Sequence; identical to SEQ ID NO: 116240
  derived and/or modified CDS sequence (opt2) from neuraminidase__InfluenzaA__ADW09244

SEQ ID NO: 116248 - RNA, 1413 nt, Artificial Sequence; identical to SEQ ID NO: 116240
  derived and/or modified CDS sequence (opt2) from neuraminidase__InfluenzaA__ADW09255

SEQ ID NO: 116249 - RNA, 1413 nt, Artificial Sequence; identical to SEQ ID NO: 116240
  derived and/or modified CDS sequence (opt2) from neuraminidase__InfluenzaA__ADW09266

SEQ ID NO: 116250 - RNA, 1413 nt, Artificial Sequence; identical to SEQ ID NO: 116240
  derived and/or modified CDS sequence (opt2) from neuraminidase__InfluenzaA__ADW09277

SEQ ID NO: 116251 - RNA, 1413 nt, Artificial Sequence; identical to SEQ ID NO: 113497
  derived and/or modified CDS sequence (opt2) from neuraminidase__InfluenzaA__ADW09288

SEQ ID NO: 116252 - RNA, 1413 nt, Artificial Sequence; identical to SEQ ID NO: 116241
  derived and/or modified CDS sequence (opt2) from neuraminidase__InfluenzaA__ADW09299

SEQ ID NO: 116253 - RNA, 1413 nt, Artificial Sequence; identical to SEQ ID NO: 113497
  derived and/or modified CDS sequence (opt2) from neuraminidase__InfluenzaA__ADW09310

SEQ ID NO: 116254 - RNA, 1413 nt, Artificial Sequence; identical to SEQ ID NO: 113497
  derived and/or modified CDS sequence (opt2) from neuraminidase__InfluenzaA__ADW09330

SEQ ID NO: 116255 - RNA, 1413 nt, Artificial Sequence; identical to SEQ ID NO: 116240
  derived and/or modified CDS sequence (opt2) from neuraminidase__InfluenzaA__ADW10475

SEQ ID NO: 116256 - RNA, 1413 nt, Artificial Sequence; identical to SEQ ID NO: 116241
  derived and/or modified CDS sequence (opt2) from neuraminidase__InfluenzaA__ADW10486

SEQ ID NO: 116257 - RNA, 1413 nt, Artificial Sequence; identical to SEQ ID NO: 113497
  derived and/or modified CDS sequence (opt2) from neuraminidase__InfluenzaA__ADW10497

SEQ ID NO: 116258 - RNA, 1413 nt, Artificial Sequence
  derived and/or modified CDS sequence (opt2) from neuraminidase__InfluenzaA__ADW10508
augaaccccaaccagaagaucaucaccaucggcuccaucuccaucgccaucggcaucaucucccucaugcuccagaucggcaacaucaucuccaucugggccucccacuccauccagaccggcucccagaacaacaccggcaucugcaaccagcgcaucaucaccuacgagaacuccaccugggucaaccacaccuacgucaacaucaacaacaccaacgucgucgccggcgaggacaagaccuccgucacccucgccggcaacuccucccucugcuccaucuccggcugggccaucuacaccaaggacaacuccauccgcaucggcuccaagggcgacgucuucgucauccgcgagcccuucaucuccugcucccaccucgagugccgcaccuucuuccucacccagggcgcccucgucaacgacaagcacuccaacggcaccgucaaggaccgcucccccuaccgcgcccucauguccugcccccucggcgaggcccccucccccuacaacuccaaguucgaguccgucgccugguccgccuccgccugccacgacggcaugggcuggcucaccaucggcaucuccggccccgacaacggcgccgucgccguccucaaguacaacggcaucaucaccggcaccaucaaguccuggaagaagcagauccuccgcacccaggaguccgagugcgucugcaugaacggcuccugcuucaccaucaugaccgacggccccuccaacaaggccgccuccuacaagaucuucaagaucgagaagggcaaggucaccaaguccaucgagcucaacgcccccaacuucuacuacgaggagugcuccugcuaccccgacaccggcaucgucaugugcgucugccgcgacaacuggcacggcuccaaccgccccugggucuccuucaaccagaaccucgacuaccagaucggcuacaucugcuccggcgucuucggcgacaacccccgccccgaggacggcgagggcuccugcaaccccgucaccgucaacggcgccgacggcgucaagggcuucuccuacaaguacggcaacggcgucuggaucggccgcaccaaguccaaccgccuccgcaagggcuucgagaugaucugggaccccaacggcuggaccaacaccgacuccgacuucuccgucaagcaggacgucgucgccaucaccgacugguccggcuacuccggcuccuucguccagcaccccgagcucaccggccucgacugcauccgccccugcuucugggucgagcucguccgcggccucccccgcgagaacaccaccaucuggaccuccggcuccuccaucuccuucugcggcgucaacuccgacaccgccaacugguccuggcccgacggcgccgagcuccccuucaccaucgacaaguga

SEQ ID NO: 116259 - RNA, 1413 nt, Artificial Sequence; identical to SEQ ID NO: 113497
  derived and/or modified CDS sequence (opt2) from neuraminidase__InfluenzaA__ADW10519

SEQ ID NO: 116260 - RNA, 1413 nt, Artificial Sequence; identical to SEQ ID NO: 113497
  derived and/or modified CDS sequence (opt2) from neuraminidase__InfluenzaA__ADW10530

SEQ ID NO: 116261 - RNA, 1413 nt, Artificial Sequence
  derived and/or modified CDS sequence (opt2) from neuraminidase__InfluenzaA__ADW10541
augaaccccaaccagaagaucaucaccaucggcuccaucuccaucgccaucggcaucaucucccucaugcuccagaucggcaacaucaucuccaucugggccucccacuccauccagaccggcucccagaacaacaccggcaucugcaaccagcgcaucaucaccuacgagaacuccaccugggucaaccacaccuacgucaacaucaacaacaccaacgucgucgccggcgaggacaagaccuccgucacccucgccggcaacuccucccucugcuccaucuccggcugggccaucuacaccaaggacaacuccauccgcaucggcuccaagggcgacgucuucgucauccgcgagcccuucaucuccugcucccaccucgagugccgcaccuucuuccucacccagggcgcccuccucaacgacaagcacuccaacggcaccgucaaggaccgcucccccuaccgcgcccucauguccugcccccucggcgaggcccccucccccuacaacuccaaguucgaguccgucgccugguccgccuccgccugccacgacggcaugggcuggcucaccaucggcaucuccggccccgacaacggcgccgucgccguccucaaguacaacggcaucaucaccggcaccaucaaguccuggaagaagcagauccuccgcacccaggaguccgagugcgucugcauggacggcuccugcuucaccaucaugaccgacggccccuccaacaaggccgccuccuacaagaucuucaagaucgagaagggcaaggucaccaaguccaucgagcucaacgcccccaacuucuacuacgaggagugcuccugcuaccccgacaccggcaucgucaugugcgucugccgcgacaacuggcacggcuccaaccgccccugggucuccuucaaccagaaccucgacuaccagaucggcuacaucugcuccggcgucuucggcgacaacccccgccccgaggacggcgagggcuccugcaaccccgucaccgucgacggcgccaacggcgucaagggcuucuccuacaaguacggcaacggcgucuggaucggccgcaccaaguccaaccgccuccgcaagggcuucgagaugaucugggaccccaacggcuggaccaacaccgacuccgacuucuccgucaagcaggacgucgucgccaucaccgacugguccggcuacuccggcuccuucguccagcaccccgagcucaccggccucgacugcauccgccccugcuucugggucgagcucguccgcggccucccccgcgagaacaccaccaucuggaccuccggcuccuccaucuccuucugcggcgucaacuccgacaccgccaacugguccuggcccgacggcgccgagcuccccuucaccaucgacaaguga

SEQ ID NO: 116262 - RNA, 1413 nt, Artificial Sequence
  derived and/or modified CDS sequence (opt2) from neuraminidase__InfluenzaA__ADW10552
augaaccccaaccagaagaucaucaccaucggcuccaucuccaucgccaucggcaucaucucccucaugcuccagaucggcaacaucaucuccaucugggccucccacuccauccagaccggcucccagaacaacaccggcaucugcaaccagcgcaucaucaccuacgagaacuccaccugggucaaccacaccuacgucaacaucaacaacaccaacgucgucgccggcgaggacaagaccuccgucacccucgccggcaacuccucccucugcuccaucuccggcugggccaucuacaccaaggacaacuccauccgcaucggcuccaagggcgacgucuucgucauccgcgagcccuucaucuccugcucccaccucgagugccgcaccuucuuccucacccagggcgcccuccucaacgacaagcacuccaacggcaccgucaaggaccgcucccccuaccgcgcccucauguccugcccccucggcgaggcccccucccccuacaacuccaaguucgaguccgucgccugguccgccuccgccugccacgacggcaugggcuggcucaccaucggcaucuccggccccgacaacggcgccgucgccguccucaaguacaacggcaucaucaccggcaccaucaaguccuggaagaagcagauccuccgcacccaggaguccgagugcgucugcaugaacggcuccugcuucaccaucaugaccgacggccccuccaacaaggccgccuccuacaagaucuucaagaucgagaagggcaaggucaccaaguccaucgagcucaacgcccccgacuucuacuacgaggagugcuccugcuaccccgacaccggcaucgucaugugcgucugccgcgacaacuggcacggcuccaaccgccccugggucuccuucaaccagaaccucgacuaccagaucggcuacaucugcuccggcgucuucggcgacaacccccgccccgaggacggcgagggcuccugcaaccccgucaccgucaacggcgccgacggcgucaagggcuucuccuacaaguacggcaacggcgucuggaucggccgcaccaaguccaaccgccuccgcaagggcuucgagaugaucugggaccccaacggcuggaccaacaccgacuccgacuucuccgucaagcaggacgucgucgccaucaccgacugguccggcuacuccggcuccuucguccagcaccccgagcucaccggccucgacugcauccgccccugcuucugggucgagcucguccgcggccucccccgcgagaacaccaccaucuggaccuccggcuccuccaucuccuucugcggcgucaacuccgacaccgccaacugguccuggcccgacggcgccgagcuccccuucaccaucgacaaguga

SEQ ID NO: 116263 - RNA, 1413 nt, Artificial Sequence; identical to SEQ ID NO: 115973
  derived and/or modified CDS sequence (opt2) from neuraminidase__InfluenzaA__ADW10563

SEQ ID NO: 116264 - RNA, 1413 nt, Artificial Sequence; identical to SEQ ID NO: 113497
  derived and/or modified CDS sequence (opt2) from neuraminidase__InfluenzaA__ADW10574

SEQ ID NO: 116265 - RNA, 1413 nt, Artificial Sequence
  derived and/or modified CDS sequence (opt2) from neuraminidase__InfluenzaA__ADW10585
augaaccccaaccagaagaucaucaccaucggcuccaucuccaucgccaucggcaucaucucccucaugcuccagaucggcuccaucaucuccaucugggccucccacuccauccagaccggcucccagaacaacaccggcaucugcaaccagcgcaucaucaccuacgagaacuccaccugggucaaccacaccuacgucaacaucaacaacaccaacgucgucgccggcgaggacaagaaguccgucacccucgccggcaacuccucccucugcuccaucuccggcugggccaucuacaccaaggacaacuccauccgcaucggcuccaagggcgacgucuucgucauccgcgagcccuucaucuccugcucccaccucgagugccgcaccuucuuccucacccagggcgcccuccucaacgacaagcacuccaacggcaccgucaaggaccgcucccccuaccgcgcccucauguccugcccccucggcgaggcccccucccccuacaacuccaaguucgaguccgucgccugguccgccuccgccugccacgacggcaugggcuggcucaccaucggcaucuccggccccgacaacggcgccgucgccguccucaaguacaacggcaucaucaccggcaccaucaaguccuggaagaagcagauccuccgcacccaggaguccgagugcgucugcaugaacggcuccugcuucaccaucaugaccgacggccccuccaacaaggccgccuccuacaagaucuucaagaucgagaagggcaaggucaccaaguccaucgagcucaacgcccccaacuucuacuacgaggagugcuccugcuaccccgacaccggcaucgucaugugcgucugccgcgacaacuggcacggcuccaaccgccccugggucuccuucaaccagaaccucgaguaccagaucggcuacaucugcuccggcgucuucggcgacaacccccgccccgaggacggcgagggcuccugcaaccccgucaccgucgacggcgccaacggcgucaagggcuucuccuacaaguacggcaacggcgucuggaucggccgcaccaaguccaaccgccuccgcaagggcuucgagaugaucugggaccccaacggcuggaccaacaccgacuccgacuucuccgucaagcaggacgucgucgccaucaccgacugguccggcuacuccggcuccuucguccagcaccccgagcucaccggccucgacugcauccgccccugcuucugggucgagcucguccgcggccucccccgcgagaacaccaccaucuggaccuccggcuccuccaucuccuucugcggcgucaacuccgacaccgccaacugguccuggcccgacggcgccgagcuccccuucaccaucgacaaguga

SEQ ID NO: 116266 - RNA, 1413 nt, Artificial Sequence; identical to SEQ ID NO: 116241
  derived and/or modified CDS sequence (opt2) from neuraminidase__InfluenzaA__ADW10596

SEQ ID NO: 116267 - RNA, 1413 nt, Artificial Sequence; identical to SEQ ID NO: 116240
  derived and/or modified CDS sequence (opt2) from neuraminidase__InfluenzaA__ADW10607

SEQ ID NO: 116268 - RNA, 1413 nt, Artificial Sequence; identical to SEQ ID NO: 116240
  derived and/or modified CDS sequence (opt2) from neuraminidase__InfluenzaA__ADW10618

SEQ ID NO: 116269 - RNA, 1413 nt, Artificial Sequence; identical to SEQ ID NO: 116240
  derived and/or modified CDS sequence (opt2) from neuraminidase__InfluenzaA__ADW10629

SEQ ID NO: 116270 - RNA, 1413 nt, Artificial Sequence; identical to SEQ ID NO: 116240
  derived and/or modified CDS sequence (opt2) from neuraminidase__InfluenzaA__ADW10724

SEQ ID NO: 116271 - RNA, 1413 nt, Artificial Sequence; identical to SEQ ID NO: 116241
  derived and/or modified CDS sequence (opt2) from neuraminidase__InfluenzaA__ADW10735

SEQ ID NO: 116272 - RNA, 1413 nt, Artificial Sequence; identical to SEQ ID NO: 116241
  derived and/or modified CDS sequence (opt2) from neuraminidase__InfluenzaA__ADW10746

SEQ ID NO: 116273 - RNA, 1413 nt, Artificial Sequence
  derived and/or modified CDS sequence (opt2) from neuraminidase__InfluenzaA__ADW10757
augaaccccaaccagaagaucaucaccaucggcuccaucuccaucgccaucggcaucaucucccucaugcuccagaucggcaacaucaucuccaucugggccucccacuccauccagacccgcucccagaacaacaccggcaucugcaaccagcgcaucaucaccuacgagaacuccaccugggucaaccacaccuacgucaacaucaacaacaccaacgucgucgccggcggcgacaagaccuccgucacccucgccggcaacuccucccucugcuccaucuccggcugggccaucuacaccaaggacaacuccauccgcaucggcuccaagggcgacgucuucgucauccgcgagcccuucaucuccugcucccaccucgagugccgcaccuucuuccucacccagggcgcccuccucaacgacaagcacuccaacggcaccgucaaggaccgcucccccuaccgcgcccucauguccugcccccucggcgaggcccccucccccuacaacuccaaguucgaguccgucgccugguccgccuccgccugccacgacggcaugggcuggcucaccaucggcaucuccggccccgacaacggcgccgucgccguccucaaguacaacggcaucaucaccggcaccaucaaguccuggaagaagcagauccuccgcacccaggaguccgagugcgucugcaugaacggcuccugcuucacccucaugaccgacggccccuccaacaaggccgccuccuacaagaucuucaagaucgagaagggcaaggucaccaaguccaucgagcucaacgcccccaacuucuacuacgaggagugcuccugcuaccccgacaccggcaucgucaugugcgucugccgcgacaacuggcacggcuccaaccgccccugggucuccuucaaccagaaccucgacuaccagaucggcuacaucugcuccggcgucuucggcgacaacccccgccccgaggacggcgagggcuccugcaaccccgucaccgucgacggcgccaacggcgucaagggcuucuccuacaaguacggcaacggcgucuggaucggccgcaccaaguccaaccgccuccgcaagggcuucgagaugaucugggaccccaacggcuggaccaacaccgacuccgacuucuccgucaagcaggacgucgucgccaucaccgacugguccggcuacuccggcuccuucguccagcaccccgagcucaccggccucgacugcauccgccccugcuucugggucgagcucguccgcggccucccccgcgagaacaccaccaucuggaccuccggcuccuccaucuccuucugcggcgucaacuccgacaccgccaacugguccuggcccgacggcgccgagcuccccuucaccaucgacaaguga

SEQ ID NO: 116274 - RNA, 1413 nt, Artificial Sequence; identical to SEQ ID NO: 116240
  derived and/or modified CDS sequence (opt2) from neuraminidase__InfluenzaA__ADW10768

SEQ ID NO: 116275 - RNA, 1413 nt, Artificial Sequence; identical to SEQ ID NO: 113497
  derived and/or modified CDS sequence (opt2) from neuraminidase__InfluenzaA__ADW10779

SEQ ID NO: 116276 - RNA, 1413 nt, Artificial Sequence
  derived and/or modified CDS sequence (opt2) from neuraminidase__InfluenzaA__ADW10790
augaaccccaaccagaagaucaucaccaucggcuccaucuccaucgccaucggcaucaucucccucaugcuccagaucggcaacaucaucuccaucugggccucccacuccauccagaccggcucccagaacaacaccggcaucugcaaccagcgcaucaucaccuacgagaacuccaccugggucaaccacaccuacgucaacaucaacaacaccaacgucgucgccggcgaggacaagaccuccgucacccucgccggcaacuccucccucugcuccaucuccggcugggccaucuacaccaaggacaacuccauccgcaucggcuccaagggcgacgucuucgucauccgcgagcccuucaucuccugcucccaccucgagugccgcaccuucuuccucacccagggcgcccuccucaacgacaagcacuccaacggcaccgucaaggaccgcucccccuaccgcgcccucauguccugcccccucggcgaggcccccucccccuacaacuccaaguucgaguccgucgccugguccgccuccgccugccacgacggcaugggcuggcucaccaucggcaucuccggccccgacaacggcgccgucgccguccucaaguacaacggcaucaucaccggcaccaucaaguccuggaagaagcagauccuccgcacccaggaguccgagugcgucugcaugaacggcuccugcuucaccaucaugaccgacggccccuccaacaaggccgccuccuacaagaucuucaagaucgagaagggcaaggucaccaaguccaucgagcucaacgcccccaacuucuacuacgaggagugcuccugcuaccccgacaccggcaucgucaugugcgucugccgcgacaacuggcacggcuccaaccgccccugggucuccuucaaccagaaccucgacuaccagaucggcuacaucugcuccggcgucuucggcgacaacccccgccccgaggacggcgagggcuccugcaaccccgucaccgucgacggcgccaacggcgucaagggcuucuccuacaaguacggcaacggcgucuggaucggccgcaccaaguccaaccgccuccgcaagggcuucgagaugaucugggaccccaacggcuggaccaacaccgacuccgacuucuccgucaagcaggacgucgucgccaucaccgacugguccggcuacuccggcuccuucguccagcaccccgagcucaccggccucgacugcaucauccccugcuucugggucgagcucguccgcggccucccccgcgagaacgccaccaucuggaccuccggcuccuccaucuccuucugcggcgucaacuccgacaccgccaacugguccuggcccgacggcgccgagcuccccuucaccaucgacaaguga

SEQ ID NO: 116277 - RNA, 1413 nt, Artificial Sequence; identical to SEQ ID NO: 114966
  derived and/or modified CDS sequence (opt2) from neuraminidase__InfluenzaA__ADW10801

SEQ ID NO: 116278 - RNA, 1413 nt, Artificial Sequence; identical to SEQ ID NO: 116240
  derived and/or modified CDS sequence (opt2) from neuraminidase__InfluenzaA__ADW10812

SEQ ID NO: 116279 - RNA, 1413 nt, Artificial Sequence; identical to SEQ ID NO: 115992
  derived and/or modified CDS sequence (opt2) from neuraminidase__InfluenzaA__ADW10823

SEQ ID NO: 116280 - RNA, 1413 nt, Artificial Sequence
  derived and/or modified CDS sequence (opt2) from neuraminidase__InfluenzaA__ADW10834
augaaccccaaccagaagaucaucaccaucggcuccaucuccaucgccaucggcaucaucucccucaugcuccagaucggcaacaucaucuccaucugggccucccacuccauccagaccggcucccagaacaacaccggcaucugcaaccagcgcaucaucaccuacgagaacuccaccugggucaaccacaccuacgucaacaucaacaacaccaacgucgucgccggcgaggacaagaccuccgucacccucgccggcaacuccucccucugcuccaucuccggcugggccaucuacaccaaggacaacuccauccgcaucggcuccaagggcgacgucuucgucauccgcgagcccuucaucuccugcucccaccucgagugccgcaccuucuuccucacccagggcgcccuccucaacgacaagcacuccaacggcaccgucaaggaccgcucccccuaccgcgcccucauguccugcccccucggcgaggcccccucccccuacaacuccaaguucgaguccgucgccugguccgccuccgccugccacgacggcaugggcuggcucaccaucggcaucuccggccccgacaacggcgccgucgccguccucaaguacaacggcaucaucaccggcaccaucaaguccuggaagaagcagauccuccgcacccaggaguccgagugcgucugcaugaacggcuccugcuucaccaucaugaccgacggccccuccaacaaggccgccuccuacaagaucuucaagaucgagaagggcaaggucaucaaguccaucgagcucaacgcccccaacuucuacuacgaggagugcuccugcuaccccgacaccggcaucgucaugugcgucugccgcgacaacuggcacggcuccaaccgccccugggucuccuucaaccagaaccucgacuaccagaucggcuacaucugcuccggcgucuucggcgacaacccccgccccgaggacggcgagggcuccugcaaccccgucaccgucgacggcgccaacggcgucaagggcuucuccuacaaguacggcaacggcgucuggaucggccgcaccaaguccaaccgccuccgcaagggcuucgagaugaucugggaccccaacggcuggaccaacaccgacuccgacuucuccgucaagcaggacgucgucgccaucaccgacugguccggcuacuccggcuccuucguccagcaccccgagcucaccggccucgacugcauccgccccugcuucugggucgagcucguccgcggccucccccgcgagaacaccaccaucuggaccuccggcuccuccaucuccuucugcggcgucaacuccgacaccgccaacugguccuggcccgacggcgccgagcuccccuucaccaucgacaaguga

SEQ ID NO: 116281 - RNA, 1413 nt, Artificial Sequence; identical to SEQ ID NO: 116241
  derived and/or modified CDS sequence (opt2) from neuraminidase__InfluenzaA__ADW10845

SEQ ID NO: 116282 - RNA, 1413 nt, Artificial Sequence
  derived and/or modified CDS sequence (opt2) from neuraminidase__InfluenzaA__ADW10856
augaaccccaaccagcgcaucaucaccaucggcuccaucuccaucgccaucggcaucaucucccucaugcuccagaucggcaacaucaucuccaucugggccucccacuccauccagaccggcucccagaacaacaccggcaucugcaaccagcgcaucaucaccuacgagaacuccaccugggucaaccacaccuacgucaacaucaacaacaccaacgucgucgccggcgaggacaagaccuccaugacccucgccggcaacuccucccucugcuccaucuccggcugggccaucuacaccaaggacaacuccauccgcaucggcuccaagggcgacgucuucgucauccgcgagcccuucaucuccugcucccaccucgagugccgcaccuucuuccucacccagggcgcccuccucaacgacaagcacuccaacggcaccgccaaggaccgcucccccuaccgcgcccucauguccugcccccucggcgaggcccccucccccuacaacuccaaguucgaguccgucgccugguccgccuccgccugccacgacggcaugggcuggcucaccaucggcaucuccggccccgacaacggcgccgucgccguccucaaguacaacggcaucaucaccggcaccaucaaguccuggaagaagcagauccuccgcacccaggaguccgagugcgucugcaugaacggcuccugcuucaccaucaugaccgacggccccuccaacaaggccgccuccuacaagaucuucaagaucgagaagggcaaggucaccaaguccaucgagcucaacgcccccaacuucuacuacgaggagugcuccugcuaccccgacaccggcaucgucaugugcgucugccgcgacaacuggcacggcuccaaccgccccugggucuccuucaaccagaaccucgacuaccagaucggcuacaucugcuccggcgucuucggcgacaacccccgccccgaggacggcgagggcuccugcaaccccgucaccgucgacggcgccaacggcgucaagggcuucuccuacaaguacggcaacggcgucuggaucggccgcaccaaguccaaccgccuccgcaagggcuucgagaugaucugggaccccaacggcuggaccaacaccgacuccgacuucuccgucaagcaggacgucgucgccaucaccgacugguccggcuacuccggcuccuucguccagcaccccgagcucaccggccucgacugcauccgccccugcuucugggucgagcucguccgcggccucccccgcgagaacaccaccaucuggaccuccggcuccuccaucuccuucugcggcgucaacuccgacaccgccaacugguccuggcccgacggcgccgagcuccccuucaccaucgacaaguga

SEQ ID NO: 116283 - RNA, 1413 nt, Artificial Sequence; identical to SEQ ID NO: 116240
  derived and/or modified CDS sequence (opt2) from neuraminidase__InfluenzaA__ADW10867

SEQ ID NO: 116284 - RNA, 1413 nt, Artificial Sequence; identical to SEQ ID NO: 116240
  derived and/or modified CDS sequence (opt2) from neuraminidase__InfluenzaA__ADW10878

SEQ ID NO: 116285 - RNA, 1413 nt, Artificial Sequence; identical to SEQ ID NO: 116240
  derived and/or modified CDS sequence (opt2) from neuraminidase__InfluenzaA__ADW10889

SEQ ID NO: 116286 - RNA, 1413 nt, Artificial Sequence; identical to SEQ ID NO: 113497
  derived and/or modified CDS sequence (opt2) from neuraminidase__InfluenzaA__ADW10900

SEQ ID NO: 116287 - RNA, 1410 nt, Artificial Sequence; identical to SEQ ID NO: 114520
  derived and/or modified CDS sequence (opt2) from neuraminidase__InfluenzaA__ADW11155

SEQ ID NO: 116288 - RNA, 1410 nt, Artificial Sequence; identical to SEQ ID NO: 112774
  derived and/or modified CDS sequence (opt2) from neuraminidase__InfluenzaA__ADW23530

SEQ ID NO: 116289 - RNA, 1410 nt, Artificial Sequence
  derived and/or modified CDS sequence (opt2) from neuraminidase__InfluenzaA__ADW54483
augaaccccaaccagaagaucaucaccaucggcuccgucugcaugaccaucggcauggccaaccucaugcuccagaucggcaacaucaucuccaucuggaucucccacuccauccagcucggcaaccagucccagaucgagaccugcaaccaguccgucaucaccuacgagaacaacaccugggucaaccagaccuacgucaacaucuccaacaccaacuucgccgccggccaguccgucgucuccgucaagcucgccggcaacuccucccucugccccgucuccggcugggccaucuacuccaaggacaacuccauccgcaucggcuccaagggcgacgucuucgucauccgcgagcccuucaucuccugcuccccccucgagugccgcaccuucuuccucacccagggcgcccuccucaacgacaagcacuccaacggcaccaucaaggaccgcucccccuaccgcacccucauguccugccccaucggcgagguccccucccccuacaacucccgcuucgaguccgucgccugguccgccuccgccugccacgacggcaucaacuggcucaccaucggcaucuccggccccgacaacggcgccgucgccguccucaaguacaacggcaucaucaccgacaccaucaaguccuggcgcaacaacauccuccgcacccaggaguccgagugcgccugcgucaacggcuccugcuucaccaucaugaccgacggccccuccgacggccaggccuccuacaagaucuuccgcaucgagaagggcaagaucgucaaguccgucgagaugaacgcccccaacuaccacuacgaggagugcuccugcuaccccgacuccuccgagaucaccugcgucugccgcgacaacuggcacggcuccaaccgccccugggucuccuucaaccagaaccucgaguaccagaucggcuacaucugcuccggcaucuucggcgacaacccccgccccaacgacaagaccggcuccugcggccccgucuccuccaacggcgccaacggcgucaagggcuucuccuucaaguacggcaacggcgucuggaucggccgcaccaaguccaucuccucccgcaagggcuucgagaugaucugggaccccaacggcuggaccggcaccgacaacaacuucuccaucaagcaggacaucgucggcaucaacgagugguccggcuacuccggcuccuucguccagcaccccgagcucaccggccucgacugcauccgccccugcuucugggucgagcucauccgcggccgccccaaggagaacaccaucuggaccuccggcuccuccaucuccuucugcggcgucaacuccgacaccgucggcugguccuggcccgacggcgccgagcuccccuucaccaucgacaaguga

SEQ ID NO: 116290 - RNA, 1410 nt, Artificial Sequence
  derived and/or modified CDS sequence (opt2) from neuraminidase__InfluenzaA__ADW54494
augaaccccaaccagaagaucaucaccaucggcuccgucugcaugaccaucggcauggccaaccucauccuccagaucggcaacaucaucuccaucuggaucucccacuccauccagcucggcaaccagaaccagaucgagaccugcaaccaguccgucaucaccuacgagaacaacaccugggucaaccagaccuacgucaacaucuccaacaccaacuucgccgccggccaguccgucgucuccgucaagcucgccggcaacuccucccucugccccgucuccggcugggccaucuacuccaaggacaacuccauccgcaucggcuccaagggcgacgucuucgucauccgcgagcccuucaucuccugcuccccccucgagugccgcaccuucuuccucacccagggcgcccuccucaacgacaagcacuccaacggcaccaucaaggaccgcucccccuaccgcacccucauguccugccccaucggcgagguccccucccccuacaacucccgcuucgaguccgucgccugguccgccuccgccugccacgacggcaucaacuggcucaccaucggcaucuccggccccgacaacggcgccgucgccguccucaaguacaacggcaucaucaccgacaccaucaaguccuggcgcaacaacauccuccgcacccaggaguccgagugcgccugcgucaacggcuccugcuucaccgucaugaccgacggccccuccgacggccaggccuccuacaagaucuuccgcaucgagaagggcaagaucgucaaguccgucgagaugaacgcccccaacuaccacuacgaggagugcuccugcuaccccgacuccuccgagaucaccugcgucugccgcgacaacuggcacggcuccaaccgccccugggucuccuucaaccagaaccucgaguaccgcaucggcuacaucugcuccggcaucuucggcgacaacccccgccccaacgacaagaccggcuccugcggccccgucuccuccaacggcgccaacggcgucaagggcuucuccuucaaguacggcaacggcgucuggaucggccgcaccaaguccaucuccucccgcaacggcuucgagaugaucugggaccccaacggcuggaccggcaccgacaacaacuucuccaucaagcaggacaucaucggcaucaacgagugguccggcuacuccggcuccuucguccagcaccccgagcucaccggccucgacugcauccgccccugcuucugggucgagcucauccgcggccgccccaaggagaacaccaucuggaccuccggcuccuccaucuccuucugcggcgucaacuccgacaccgucggcugguccuggcccgacggcgccgagcuccccuucaccaucgacaaguga

SEQ ID NO: 116291 - RNA, 1410 nt, Artificial Sequence
  derived and/or modified CDS sequence (opt2) from neuraminidase__InfluenzaA__ADW54514
augaaccccaaccagaagaucaucaccaucggcuccgucugcaugaccaucggcauggccaaccucauccuccagaucggcaacaucaucuccaucuggaucucccacuccauccagcucggcaaccagaaccagaucgagaccugcaaccaguccgucaucaccuacgagaacaacaccugggucaaccagaccuacgucaacaucuccaacaccaacuucgccgccggccaguccgucgucuccgucaagcucgccggcaacuccucccucugccccgucuccggcugggccaucuacuccaaggacaacuccauccgcaucggcuccaagggcgacgucuucgucauccgcgagcccuucaucuccugcuccccccucgagugccgcaccuucuuccucacccagggcgcccuccucaacgacaagcacuccaacggcaccaucaaggaccgcucccccuaccgcacccucauguccugccccaucggcgagguccccucccccuacaacucccgcuucgaguccgucgccugguccgccuccgccugccacgacggcaucaacuggcucaccaucggcaucuccggccccgacaacggcgccgucgccguccucaaguacaacggcaucaucaccgacaccaucaaguccuggaagaacaacauccuccgcacccaggaguccgagugcgccugcgucaacggcuccugcuucaccgucaugaccgacggccccuccgacggccaggccuccuacaagaucuuccgcaucgagaagggcaagaucgucaaguccgucgagaugaacgcccccaacuaccacuacgaggagugcuccugcuaccccgacuccuccgagaucaccugcgucugccgcgacaacuggcacggcuccaaccgccccugggucuccuucaaccagaaccucgaguaccgcaucggcuacaucugcuccggcaucuucggcgacaacccccgccccaacgacaagaccggcuccugcggccccgucuccuccaacggcgccaacggcgucaagggcuucuccuucaaguacggcaacggcgucuggaucggccgcaccaaguccaucuccucccgcaacggcuucgagaugaucugggaccccaacggcuggaccggcaccgacaacaacuucuccaagaagcaggacaucaucggcaucaacgagugguccggcuacuccggcuccuucguccagcaccccgagcucaccggccucgacugcauccgccccugcuucugggucgagcucauccgcggccgccccaaggagaacaccaucuggaccuccggcuccuccaucuccuucugcggcgucaacuccgacaccgucggcugguccuggcccgacggcgccgagcuccccuucaccaucgacaaguga

SEQ ID NO: 116292 - RNA, 1410 nt, Artificial Sequence
  derived and/or modified CDS sequence (opt2) from neuraminidase__InfluenzaA__ADW54522
augaaccccaaccagaagaucaucaccaucggcuccgucugcaugaucaucggcauggccaaccucauccuccagaucggcaacaucaucuccaucuggaucucccacuccauccagcucggcaaccagaaccagaucgagaccugcaaccaguccgucaucaccuacgagaacaacaccugggucaaccagaccuacgucaacaucuccaacaccaacuucgccgccggccaguccgucgucuccgucaagcucgccggcaacuccucccucugccccgucuccggcugggccaucuacuccaaggacaacuccauccgcaucggcuccaagggcgacgucuucgucauccgcgagcccuucaucuccugcuccccccucgagugccgcaccuucuuccucacccagggcgcccuccucaacgacaagcacuccaacggcaccaucaaggaccgcucccccuaccgcacccucauguccugccccaucggcgagguccccucccccuacaacucccgcuucgaguccgucgccugguccgccuccgccugccacgacggcaucaacuggcucaccaucggcaucuccggccccgacaacggcgccgucgccguccucaaguacaacggcaucaucaccgacaccaucaaguccuggcgcaacaaccgccuccgcacccaggaguccgagugcgccugcgucaacggcuccugcuucaccgucaugaccgacggccccuccgacggccaggccuccuacaagaucuuccgcaucgagaagggcaagaucgucaaguccgucgagaugaacgcccccaacuaccacuacgaggagugcuccugcuaccccgacuccuccgagaucaccugcgucugccgcgacaacuggcacggcuccaaccgccccugggucuccuucaaccagaaccucgaguaccagaucggcuacaucugcuccggcaucuucggcgacaacccccgccccaacgacaagaccggcuccugcggccccgucuccuccaacggcgccaacggcgucaagggcuucuccuucaaguacggcaacggcgucuggaucggccgcaccaaguccaucuccucccgcaagggcuucgagaugaucugggaccccaacggcuggaccggcaccgacaacaacuucuccaucaagcaggacaucgucggcaucaacgagugguccggcuacuccggcuccuucguccagcaccccgagcucaccggccucgacugcauccgccccugcuucugggucgagcucauccgcggccgccccaaggagaacaccaucuggaccuccggcuccuccaucuccuucugcggcgucaacuccgacaccgucggcugguccuggcccgacggcgccgagcuccccuucaccaucgacaaguga

SEQ ID NO: 116293 - RNA, 1410 nt, Artificial Sequence
  derived and/or modified CDS sequence (opt2) from neuraminidase__InfluenzaA__ADW65826
augaaccccaaccagaagaucaucaccaucggcuccgucugcaugaccaucggcauggccaaccucauccuccagaucggcaacaucaucuccaucuggaucucccacuccauccagcucggcaaccagucccagaucgagaccugcaaccaguccgucaucaccuacgagaacaacaccugggucaaccagaccuacgucaacaucuccaacaccaacuucgccgccggccaguccgucgucuccgucaagcucgccggcaacuccucccucugccccgucuccggcugggccaucuacuccaaggacaacuccauccgcaucggcuccaagggcgacgucuucgucauccgcgagcccuucaucuccugcuccccccucgagugccgcaccuucuuccucacccagggcgcccuccucaacgacaagcacuccaacggcaccaucaaggaccgcucccccuaccgcacccucauguccugccccaucggcgagguccccucccccuacaacucccgcuucgaguccgucgccugguccgccuccgccugccacgacggcaucaacuggcucaccaucggcaucuccggccccgacaacggcgccgucgccguccucaaguacaacggcaucaucaccgacaccaucaaguccuggcgcaacaacauccuccgcacccaggaguccgagugcgccugcgucaacggcuccugcuucaccaucaugaccgacggccccuccgacggccaggccuccuacaagaucuuccgcaucgagaagggcaagaucgucaaguccgucgagaugaacgcccccaacuaccacuacgaggagugcuccugcuaccccgacuccuccgagaucaccugcgucugccgcgacaacuggcacggcuccaaccgccccugggucuccuucaaccagaaccucgaguaccagaucggcuacaucugcuccggcaucuucggcgacaacccccgccccaacgacaagaccggcuccugcggccccgucuccuccaacggcgccaacggcgucaagggcuucuccuucaaguacggcaacggcgucuggaucggccgcaccaaguccaucuccucccgcaagggcuucgagaugaucugggaccccaacggcuggaccggcaccgacaacaacuucuccaucaagcaggacaucgucggcaucaacgagugguccggcuacuccggcuccuucguccagcaccccgagcucaccggccucgacugcauccgccccugcuucugggucgagcucauccgcggccgccccaaggagaacaccaucuggaccuccggcuccuccaucuccuucugcggcgucaacuccgacaccgucggcugguccuggcccgacggcgccgagcuccccuucaccaucgacaaguga

SEQ ID NO: 116294 - RNA, 1410 nt, Artificial Sequence; identical to SEQ ID NO: 112635
  derived and/or modified CDS sequence (opt2) from neuraminidase__InfluenzaA__ADW80519

SEQ ID NO: 116295 - RNA, 1410 nt, Artificial Sequence; identical to SEQ ID NO: 112635
  derived and/or modified CDS sequence (opt2) from neuraminidase__InfluenzaA__ADW82127

SEQ ID NO: 116296 - RNA, 1410 nt, Artificial Sequence; identical to SEQ ID NO: 112635
  derived and/or modified CDS sequence (opt2) from neuraminidase__InfluenzaA__ADW82138

SEQ ID NO: 116297 - RNA, 1410 nt, Artificial Sequence; identical to SEQ ID NO: 112635
  derived and/or modified CDS sequence (opt2) from neuraminidase__InfluenzaA__ADW82149

SEQ ID NO: 116298 - RNA, 1410 nt, Artificial Sequence; identical to SEQ ID NO: 112635
  derived and/or modified CDS sequence (opt2) from neuraminidase__InfluenzaA__ADW82158

SEQ ID NO: 116299 - RNA, 1410 nt, Artificial Sequence; identical to SEQ ID NO: 112635
  derived and/or modified CDS sequence (opt2) from neuraminidase__InfluenzaA__ADW82169

SEQ ID NO: 116300 - RNA, 1410 nt, Artificial Sequence; identical to SEQ ID NO: 112635
  derived and/or modified CDS sequence (opt2) from neuraminidase__InfluenzaA__ADW82180

SEQ ID NO: 116301 - RNA, 1410 nt, Artificial Sequence; identical to SEQ ID NO: 112774
  derived and/or modified CDS sequence (opt2) from neuraminidase__InfluenzaA__ADW82191

SEQ ID NO: 116302 - RNA, 1410 nt, Artificial Sequence; identical to SEQ ID NO: 112774
  derived and/or modified CDS sequence (opt2) from neuraminidase__InfluenzaA__ADW82201

SEQ ID NO: 116303 - RNA, 1410 nt, Artificial Sequence; identical to SEQ ID NO: 112774
  derived and/or modified CDS sequence (opt2) from neuraminidase__InfluenzaA__ADW82211

SEQ ID NO: 116304 - RNA, 1410 nt, Artificial Sequence; identical to SEQ ID NO: 112774
  derived and/or modified CDS sequence (opt2) from neuraminidase__InfluenzaA__ADW82221

SEQ ID NO: 116305 - RNA, 1410 nt, Artificial Sequence; identical to SEQ ID NO: 112774
  derived and/or modified CDS sequence (opt2) from neuraminidase__InfluenzaA__ADW82231

SEQ ID NO: 116306 - RNA, 1410 nt, Artificial Sequence; identical to SEQ ID NO: 112774
  derived and/or modified CDS sequence (opt2) from neuraminidase__InfluenzaA__ADW82241

SEQ ID NO: 116307 - RNA, 1410 nt, Artificial Sequence; identical to SEQ ID NO: 112774
  derived and/or modified CDS sequence (opt2) from neuraminidase__InfluenzaA__ADW82251

SEQ ID NO: 116308 - RNA, 1410 nt, Artificial Sequence; identical to SEQ ID NO: 112774
  derived and/or modified CDS sequence (opt2) from neuraminidase__InfluenzaA__ADW82261

SEQ ID NO: 116309 - RNA, 1410 nt, Artificial Sequence; identical to SEQ ID NO: 112774
  derived and/or modified CDS sequence (opt2) from neuraminidase__InfluenzaA__ADW82271

SEQ ID NO: 116310 - RNA, 1410 nt, Artificial Sequence; identical to SEQ ID NO: 116293
  derived and/or modified CDS sequence (opt2) from neuraminidase__InfluenzaA__ADW95306

SEQ ID NO: 116311 - RNA, 1410 nt, Artificial Sequence; identical to SEQ ID NO: 116293
  derived and/or modified CDS sequence (opt2) from neuraminidase__InfluenzaA__ADW95313

SEQ ID NO: 116312 - RNA, 1410 nt, Artificial Sequence; identical to SEQ ID NO: 116293
  derived and/or modified CDS sequence (opt2) from neuraminidase__InfluenzaA__ADW95320

SEQ ID NO: 116313 - RNA, 1410 nt, Artificial Sequence; identical to SEQ ID NO: 116293
  derived and/or modified CDS sequence (opt2) from neuraminidase__InfluenzaA__ADW95327

SEQ ID NO: 116314 - RNA, 1410 nt, Artificial Sequence
  derived and/or modified CDS sequence (opt2) from neuraminidase__InfluenzaA__ADW95333
augaaccccaaccagaagaucaucaccaucggcuccgucugcaugaccaucggcauggccaaccucauccuccagaucggcaacaucaucuccaucuggaucucccacuccauccagcucggcaaccagucccagaucgagaccugcaaccaguccgucaucaccuacgagaacaacaccugggucaaccagaccuacgucaacaucuccaacaccaacuucgccgccggccaguccgucgucuccgucaagcucgccggcaacuccucccucugccccgucuccggcugggccaucuacuccaaggacaacuccauccgcaucggcuccaagggcgacgucuucgucauccgcgagcccuucaucuccugcuccccccucgagugccgcaccuucuuccucacccagggcgcccuccucaacgacaagcacuccaacggcaccaucaaggaccgcucccccuaccgcacccucauguccugccccaucggcgagguccccucccccuacaacucccgcuucgaguccgucgccugguccgccuccgccugccacgacggcaucaacuggcucaccaucggcaucuccggccccgacaacggcgccgucgccguccucaaguacaacggcaucaucaccgacaccaucaaguccuggcgcaacaacauccuccgcacccaggaguccgagugcgccugcgucaacggcuccugcuucaccaucaugaccgacggccccuccgacggccaggccuccuacaagaucuuccgcaucgagaagggcaagaucgucaaguccgucgagaugaacgcccccaacuaccacuacgaggagugcuccugcuaccccgacuccuccgagaucaccugcgucugccgcgacaacuggcacggcuccaaccgccccugggucuccuucaaccagaaccucgaguaccagaucggcuacaucugcuccggcaucuucggcgacaacccccgccccaacgacaagaccggcuccugcggccccgucuccuccaacggcgccaacggcgucaagggcuucuccuucaaguacggcaacggcgucuggaucggcuccgccaaguccaucuccucccgcaaggccuucgagaugaucugggaccccaacggcuggaccggcaccgacaacaacuucuccaucaagcaguacaucgucggcaucaacgagugguccggcuacuccggcuccuucgucgagcaccccgagcucaccggccucgacugcauccgccccugcuucugggucgagcucauccgcggccgccccaaggagaacaccaucuggaccuccggcuccuccaucuccuucugcggcgucaacuccgacaccgucggcugguccuggcccgacggcgccgagcuccccuucaccaucgacaaguga

SEQ ID NO: 116315 - RNA, 1410 nt, Artificial Sequence
  derived and/or modified CDS sequence (opt2) from neuraminidase__InfluenzaA__ADX20813
augaaccccaaccagaagaucaucaccaucggcuccgucugcaugaccaucggcauggccaaccucauccuccagaucggcaacaucaucuccaucuggaucucccacuccauccagcucggcaaccagaaccagaucgagaccugcaaccaguccgucaucaccuacgagaacaacaccugggucaaccagaccuacgucaacaucuccaacaccaacuucgccgccggccaguccgucgucuccgucaagcucgccggcaacuccucccucugccccgucuccggcugggccaucuacuccaaggacaacuccauccgcaucggcuccaagggcgacgucuucgucauccgcgagcccuucaucuccugcuccccccucgagugccgcaccuucuuccucacccagggcgcccuccucaacgacaagcacuccaacggcaccaucaaggaccgcucccccuaccgcacccucauguccugccccaucggcgagguccccucccccuacaacucccgcuucgagcucgucgccugguccgccuccgccugccacgacggcaucaacuggcucaccaucggcaucuccggccccgacaacggcgccgucgccguccucaaguacaacggcaucaucaccgacaccaucaaguccuggcgcaacaacauccuccgcacccaggaguccgagugcgccugcgucaacggcuccugcuucaccgucaugaccgacggccccuccgacggccagaccuccuacaagaucuuccgcaucgagaagggcaagaucgucaaguccgucgagaugaacgcccccaacuacuacuacgaggagugcuccugcuaccccgacuccuccgagaucaccugcgucugccgcgacaacuggcacggcuccaaccgccccugggucuccuucaaccagaaccucgaguaccagaucggcuacaucugcuccggcaucuucggcgacaacccccgccccaacgacaagaccggcuccugcggccccgucuccuccaacggcgccaacggcgucaagggcuucuccuucaaguacggcaacggcgucuggaucggccgcaccaaguccaucuccucccgcaagggcuucgagaugaucugggaccccaacggcuggaccggcaccgacaacaacuucuccaucaagcaggacaucgucggcaucaacgagugguccggcuacuccggcuccuucguccagcaccccgagcucaccggccucgacugcauccgccccugcuucugggucgagcucauccgcggccgccccaaggagaacaccaucuggaccuccggcuccuccaucuccuucugcggcgucaacuccgacaccgucggcugguccuggcccgacggcgccgagcuccccuucaccaucgacaaguga

SEQ ID NO: 116316 - RNA, 1410 nt, Artificial Sequence
  derived and/or modified CDS sequence (opt2) from neuraminidase__InfluenzaA__ADX20814
augaaccccaaccagaagaucaucaccaucggcuccgucugcaugaccaucggcauggccaaccucauccuccagaucggcaacaucaucuccaucuggaucucccacuccauccagcucggcaaccagucccagaucgagaccugcaaccaguccgucaucaccuacgagaacaacaccugggucaaccagaccuacgucaacaucuccaacaccaacuucgccgccggccaguccgucgucuccgucaagcucgccggcaacuccucccucugccccgucuccggcugggccaucuacuccaaggacaacuccauccgcaucggcuccaagggcgacgucuucgucauccgcgagcccuucaucuccugcuccccccucgagugccgcaccuucuuccucacccagggcgcccuccucaacgacaagcacuccaacggcaccaucaaggaccgcucccccuaccgcacccucauguccugccccaucggcgagguccccucccccuacaacucccgcuucgaguccgucgccugguccgccuccgccugccacgacggcaucaacuggcucaccaucggcaucuccggccccgacaacggcgccgucgccguccucaaguacaacggcaucaucaccgacaccaucaaguccuggcgcaacaacauccuccgcacccaggaguccgagugcgccugcgucaacggcuccugcuucaccaucaugaccgacggccccuccgacggccaggccuccuacaagaucuuccgcaucgagaagggcaagaucgucaaguccgucgagaugaacgcccccaacuacuacuacgaggagugcuccugcuaccccgacuccuccgagaucaccugcgucugccgcgacaacuggcacggcuccaaccgccccugggucuccuucaaccagaaccucgaguaccagaucggcuacaucugcuccggcaucuucggcgacaacccccgccccaacgacaagaccggcuccugcggccccgucuccuccaacggcgccaacggcgucaagggcuucuccuucaaguacggcaacggcgucuggaucggccgcaccaaguccaucuccucccgcaagggcuucgagaugaucugggaccccaacggcuggaccggcaccgacaacaacuucuccaucaagcaggacaucgucggcaucaacgagugguccggcuacuccggcuccuucguccagcaccccgagcucaccggccucgacugcauccgccccugcuucugggucgagcucauccgcggccgccccaaggagaacaccaucuggaccuccggcuccuccaucuccuucugcggcgucaacuccgacaccgucggcugguccuggcccgacggcgccgagcuccccuucaccaucgacaaguga

SEQ ID NO: 116317 - RNA, 1410 nt, Artificial Sequence; identical to SEQ ID NO: 112635
  derived and/or modified CDS sequence (opt2) from neuraminidase__InfluenzaA__ADX21091

SEQ ID NO: 116318 - RNA, 1410 nt, Artificial Sequence; identical to SEQ ID NO: 112774
  derived and/or modified CDS sequence (opt2) from neuraminidase__InfluenzaA__ADX21101

SEQ ID NO: 116319 - RNA, 1410 nt, Artificial Sequence; identical to SEQ ID NO: 113641
  derived and/or modified CDS sequence (opt2) from neuraminidase__InfluenzaA__ADX36112

SEQ ID NO: 116320 - RNA, 1410 nt, Artificial Sequence
  derived and/or modified CDS sequence (opt2) from neuraminidase__InfluenzaA__ADX87386
augaaccccaaccagcgcaucaucaccaucggcuccgucucccucaccaucuccaccaucugcuucuucaugcagaucgccauccucaucaccaccgucacccuccacuucaagcaguacgaguucaacuccccccccaacaaccaggucaugcucugcgagcccaccaucaucgagcgcaacaucaccgagaucgucuaccucaccaacaccaccaucgagaaggagaucugccccaagcucgccgaguaccgcaacugguccaagccccagugcgacaucaccggcuucgcccccuucuccaaggacaacuccauccgccucuccgccggcggcgacaucugggucacccgcgagcccuacgucuccugcgaccccgacaagugcuaccaguucgcccucggccagggcaccacccucaacaacguccacuccaacaacaccguccgcgaccgcacccccuaccgcacccuccucaugaacgagcucggcguccccuuccaccucggcaccaagcaggucugcaucgccugguccuccuccuccugccacgacggcaaggccuggcuccacgucugcaucaccggcgacgacaagaacgccaccgccuccuucaucuacaacggccgccucgucgacuccgucgucuccugguccaaggagauccuccgcacccaggaguccgagugcgucugcaucaacggcaccugcaccgucgucaugaccgacggcuccgccuccggcaaggccgacaccaagauccucuucaucgaggagggcaagaucguccacaccuccacccucuccggcuccgcccagcacgucgaggagugcuccugcuacccccgcuaccccggcguccgcugcgucugccgcgacaacuggaagggcuccaaccgccccaucgucgacaucaacaucaaggaccacuccaucgucuccuccuacgucugcuccggccucgucggcgacaccccccgcaagaacgacuccuccuccuccucccacugccucgaccccaacaacgaggagggcggccacggcgucaagggcugggccuucgacgacggcaacgacgucuggaugggccgcaccaucuccgagaagucccgccucggcuacgagaccuucaaggucaucgagggcugguccaaccccaaguccaagcuccagaucaaccgccaggucaucgucgaccgcggcaaccgcuccggcuacuccggcaucuucuccgucgagggcaaguccugcaucaaccgcugcuucuacgucgagcucauccgcggccgcaaggaggagaccgagguccucuggaccuccaacuccaucgucgucuucugcggcaccuccggcaccuacggcaccggcuccuggcccgacggcgccgacaucaaccucaugcccgucuga

SEQ ID NO: 116321 - RNA, 1410 nt, Artificial Sequence
  derived and/or modified CDS sequence (opt2) from neuraminidase__InfluenzaA__ADX96270
augaaccccaaccagaagaucaucaccaucggcuccgucugcaugaccaucggcauggccaaccucauccuccagaucggcaacaucaucuccaucuggaucucccacuccauccagcucggcaaccagaaccagaucgagaccugcaaccaguccaucaucaccuacgagaacaacaccugggucaaccagaccuacgucaacaucuccaacaccaacuucgccgccggccaguccgucgccuccgucaagcucgccggcaacuccucccucugccccgucuccggcugggccaucuacuccaaggacaacuccguccgcaucggcuccaagggcgacgucuucgucauccgcgagcccuucaucuccugcuccccccucgagugccgcaccuucuuccucacccagggcgcccuccucaacgacaagcacuccaacggcaccaucaaggaccgcucccccuaccgcacccucauguccugccccaucggcgagguccccucccccuacaacucccgcuucgaguccgucgccugguccgccuccgccugccacgacggcaucaacuggcucaccaucggcaucuccggccccgacaacggcgccgucgccguccucaaguacaacggcaucaucaccgacaccaucaaguccuggcgcaacaacauccuccgcacccaggaguccgagugcgccugcgucaacggcuccugcuucaccgucaugaccgacggccccuccgacggccaggccuccuacaagaucuuccgcaucgagaagggcaagaucgucaaguccgucgagaugaacgcccccaacuaccacuacgaggagugcuccugcuaccccgacuccuccgagaucaccugcgucugccgcgacaacuggcacggcuccaaccgccccugggucuccuucaaccagaaccucgaguaccagaucggcuacaucugcuccggcaucuucggcgacaacccccgccccaacgacaagaccggcuccugcggccccgucuccuccaacggcgccaacggcgucaagggcuucuccuucaaguacggcaacggcgucuggaucggccgcaccaaguccaucuccucccgcaacggcuucgagaugaucugggaccccaacggcuggaccggcaccgacaacaacuucuccaucaagcaggacaucgucggcaucaacgagugguccggcuacuccggcuccuucguccagcaccccgagcucaccggccucgacugcauccgccccugcuucugggucgagcucauccgcggccgccccaaggagaacaccaucuggaccuccggcuccuccaucuccuucugcggcgucaacuccgacaccgucggcugguccuggcccgacggcgccgagcuccccuucaccaucgacaaguga

SEQ ID NO: 116322 - RNA, 1410 nt, Artificial Sequence; identical to SEQ ID NO: 116321
  derived and/or modified CDS sequence (opt2) from neuraminidase__InfluenzaA__ADX96280

SEQ ID NO: 116323 - RNA, 1410 nt, Artificial Sequence; identical to SEQ ID NO: 113357
  derived and/or modified CDS sequence (opt2) from neuraminidase__InfluenzaA__ADX96290

SEQ ID NO: 116324 - RNA, 1410 nt, Artificial Sequence; identical to SEQ ID NO: 112774
  derived and/or modified CDS sequence (opt2) from neuraminidase__InfluenzaA__ADX96300

SEQ ID NO: 116325 - RNA, 1410 nt, Artificial Sequence; identical to SEQ ID NO: 112774
  derived and/or modified CDS sequence (opt2) from neuraminidase__InfluenzaA__ADX96310

SEQ ID NO: 116326 - RNA, 1410 nt, Artificial Sequence
  derived and/or modified CDS sequence (opt2) from neuraminidase__InfluenzaA__ADX96330
augaaccccaaccagaagaucaucaccaucggcuccgucugcaugaccaucggcauggccaaccucauccuccagaucggcaacggcaucuccaucuggaucucccacuccauccagcucggcaaccagaaccagaucgagaccugcaaccaguccgucaucaccuacgagaacaacaccugggucaaccagaccuacgucaacaucuccaacaccaacuucgccgccggccaguccgucgucuccgucaagcucgccggcaacuccucccucugccccgucuccggcugggccaucuacuccaaggacaacuccauccgcaucggcuccaagggcgacgucuucgucauccgcgagcccuucaucuccugcuccccccucgagugccgcaccuucuuccucacccagggcgcccuccucaacgacaagcacuccaacggcaccaucaaggaccgcucccccuaccgcacccucauguccugccccaucggcgagguccccucccccuacaacucccgcuucgaguccgucgccugguccgccuccgccugccacgacggcaucaacuggcucaccaucggcaucuccggccccgacaacggcgccgucgccguccucaaguacaacggcaucaucaccgacaccaucaaguccuggcgcaacaacauccuccgcacccaggaguccgagugcgccugcgucaacggcuccugcuucaccgucaugaccgacggccccuccgacggccaggccuccuacaagaucuuccgcaucgagaagggcaagaucgucaaguccgucgagaugaacgcccccaacuaccacuacgaggagugcuccugcuaccccgacuccaacgagaucaccugcgucugccgcgacaacuggcacggcuccaaccgccccugggucuccuucaaccagaaccucgaguaccagaucggcuacaucugcuccggcaucuucggcgacaacccccgccccaacgacaagaccggcuccugcggccccgucuccuccaacggcgccaacggcgucaagggcuucuccuucaaguacggcaacggcgucuggaucggccgcaccaaguccaucuccucccgcaacggcuucgagaugaucugggaccccaacggcuggaccggcaccgacaacaacuucuccaucaagcaggacaucgucggcaucaacgagugguccggcuacuccggcuccuucguccagcaccccgagcucaccggccucgacugcauccgccccugcuucugggucgagcucauccgcggccgccccaaggagaacaccaucuggaccuccggcuccuccaucuccuucugcggcgucaacuccgacaccgucggcugguccuggcccgacggcgccgagcuccccuucaccaucgacaaguga

SEQ ID NO: 116327 - RNA, 1410 nt, Artificial Sequence; identical to SEQ ID NO: 112774
  derived and/or modified CDS sequence (opt2) from neuraminidase__InfluenzaA__ADX96339

SEQ ID NO: 116328 - RNA, 1410 nt, Artificial Sequence
  derived and/or modified CDS sequence (opt2) from neuraminidase__InfluenzaA__ADX96349
augaaccccaaccagaagaucaucaccaucggcuccgucugcaugaccaucggcauggccaaccucauccuccagaucggcaacaucaucuccaucuggaucucccacuccauccagcucggcaaccagaaccagaucgagaccugcaaccaguccgucaucaccuacgagaacaacaccugggucaaccagaccuacgucaacaucuccaacaccaacuucgccgccggccaguccgucgucuccgucaagcucgccggcaacuccucccucugccccgucuccggcugggccaucuacuccaaggacaacuccauccgcaucggcuccaagggcgacgucuucgucauccgcgagcccuucaucuccugcuccccccucgagugccgcaccuucuuccucacccagggcgcccuccucaacgacaagcacuccaacggcaccaucaaggaccgcucccccuaccgcacccucauguccugccccaucggcgagguccccucccccuacaacucccgcuucgaguccgucgccugguccgccuccgccugccacgacggcaucaacuggcucaccaucggcaucuccggccccgacaacggcgccgucgccguccucaaguacaacggcaucaucaccgacaccaucaaguccuggcgcaacaacauccuccgcacccaggaguccgagugcgccugcgucaacggcuccugcuucaccgucaugaccgacggccccuccgacggccaggccuccuacaagaucuuccgcaucgagaagggcaagaucgucaaguccgucgagaugaacgcccccaacuaccacuacgaggagugcuccugcuaccccgacuccaacgagaucaccugcgucugccgcgacaacuggcacggcuccaaccgccccugggucuccuucaaccagaaccucgaguaccagaucggcuacaucugcuccggcaucuucggcgacaacccccgccccaacgacaagaccggcuccugcggccccgucuccuccaacggcgccaacggcgucaagggcuucuccuucaaguacggcaacggcgucuggaucggccgcaccaaguccaucuccucccgcaacggcuucgagaugaucugggaccccaacggcuggaccggcaccgacaacaacuucuccaucaagcaggacaucgucggcaucaacgagugguccggcuacuccggcuccuucguccagcaccccgagcucaccggccucgacugcauccgccccugcuucugggucgagcucauccgcggccgccccaaggagaacaccaucuggaccuccggcuccuccaucuccuucugcggcgucaacuccgacaccgucggcugguccuggcccgacggcgccgagcuccccuucaccaucgacaaguga

SEQ ID NO: 116329 - RNA, 1410 nt, Artificial Sequence; identical to SEQ ID NO: 112774
  derived and/or modified CDS sequence (opt2) from neuraminidase__InfluenzaA__ADX96359

SEQ ID NO: 116330 - RNA, 1410 nt, Artificial Sequence; identical to SEQ ID NO: 112774
  derived and/or modified CDS sequence (opt2) from neuraminidase__InfluenzaA__ADX96369

SEQ ID NO: 116331 - RNA, 1410 nt, Artificial Sequence
  derived and/or modified CDS sequence (opt2) from neuraminidase__InfluenzaA__ADX96380
augaaccccaaccagaagaucaucaccaucggcuccgucugcaugaccaucggcauggccaaccucauccuccagaucggcaacaucaucuccaucuggcccguccacuccauccagcucggcaaccagaaccagaucgagaccugcaaccaguccgucaucaccuacgagaacaacaccugggucaaccagaccuacgucaacaucuccaacaccaacuucgccgccggccaguccgucgucuccaugaagcucgccggcaacuccucccucugccccgucggcggcugggccaucuacuccaaggacaacuccguccgcaucggcuccaagggcgacgucuucgucauccgcgagcccuucaucuccugcuccccccucgagugccgcaccuucuuccucacccagggcgcccuccucaacgacaagcacuccaacggcaccaucaaggaccgcucccccuaccgcacccucauguccugccccaucggcgagguccccucccccuacaacucccgcuucgaguccgucgccugguccgccuccgccugccacgacggcaucaacuggcucaccaucggcaucuccggccccgacaacggcgccgucgccguccucaaguacaacggcaucaucaccgacaccaucaaguccuggcgcaacaacauccuccgcacccaggaguccgagugcgccugcgucaacggcuccugcuucaccgucaugaccgacggccccuccgacggccaggccuccuacaagaucuuccgcaucgagaagggcaagaucgucgaguccgucgagaugaacgcccccaacuaccacuacgaggagugcuccugcuaccccgacuccuccgagaucaccugcgucugccgcgacaacuggcacggcuccaaccgccccugggucuccuucaaccagaaccucgaguaccagaucggcuacaucugcuccggcaucuucggcgacaacccccgccccaacgacaagaccggcuccugcggccccgucuccuccaacggcgccaacggcgucaagggcuucuccuucaaguacggcaacggcgucuggaucggccgcaccaaguccaucuccucccgcaacggcuucgagaugaucugggaccccaacggcuggaccggcaccgacaacaacuucuccaucaagcaggacaucgucggcaucaacgagugguccggcuacuccggcuccuucguccagcaccccgagcucaccggccucgacugcauccgccccugcuucugggucgagcucauccgcggccgccccaaggagaacaccaucuggaccuccggcuccuccaucuccuucugcggcgucaacuccgacaccgucggcugguccuggcccgacggcgccgagcuccccuucaccaucgacaaguga

SEQ ID NO: 116332 - RNA, 1410 nt, Artificial Sequence
  derived and/or modified CDS sequence (opt2) from neuraminidase__InfluenzaA__ADX96390
augaaccccaaccagaagaucaucaccaucggcuccgucugcaugaccaucggcauggccaaccucauccuccagaucggcaacaucaucuccaucuggcucucccacuccauccagcucggcaaccagaaccagaucgagaccugcaaccaguccgucaucaccuacgagaacaacaccugggucaaccagaccuacgucaacaucuccaacaccaacuucgccgccggccaguccgucgucuccgucaagcucgccggcaacuccucccucugccccgucuccggcugggccaucuacuccaaggacaacuccauccgcaucggcuccaagggcgacgucuucgucauccgcgagcccuucaucuccugcuccccccucgagugccgcaccuucuuccucacccagggcgcccuccucaacgacaagcacuccaacggcaccaucaaggaccgcucccccuaccgcacccucauguccugccccaucggcgagguccccucccccuacaacucccgcuucgaguccgucgccugguccgccuccgccugccacgacggcaucaacuggcucaccaucggcaucuccggccccgacaacggcgccgucgccguccucaaguacaacggcaucaucaccgacaccaucaaguccuggcgcaacaacauccuccgcacccaggaguccgagugcgccugcgucaacggcuccugcuucaccgucaugaccgacggccccuccgacggccaggccuccuacaagaucuuccgcaucgagaagggcaagaucgucaaguccgucgagaugaacgcccccaacuaccacuacgaggagugcuccugcuaccccgacuccuccgagaucaccugcgucugccgcgacaacuggcacggcuccaaccgccccugggucuccuucaaccagaaccucgaguaccagaucggcuacaucugcuccggcaucuucggcgacaacccccgccccaacgacaagaccggcuccugcggccccgucuccuccaacggcgccaacggcgucaagggcuucuccuucaaguacggcaacggcgucuggaucggccgcaccaaguccaucuccucccgcaacggcuucgagaugaucugggaccccaacggcuggaccggcaccgacaacaacuucuccaucaagcaggacaucgucggcaucaacgagugguccggcuacuccggcuccuucguccagcaccccgagcucaccggccucgacugcauccgccccugcuucugggucgagcucauccgcggccgccccaaggagaacaccaucuggaccuccggcuccuccaucuccuucugcggcgucaacuccgacaccgucggcugguccuggcccgacggcgccgagcuccccuucaccaucgacaaguga

SEQ ID NO: 116333 - RNA, 1410 nt, Artificial Sequence; identical to SEQ ID NO: 112774
  derived and/or modified CDS sequence (opt2) from neuraminidase__InfluenzaA__ADX96400

SEQ ID NO: 116334 - RNA, 1410 nt, Artificial Sequence; identical to SEQ ID NO: 112774
  derived and/or modified CDS sequence (opt2) from neuraminidase__InfluenzaA__ADX96410

SEQ ID NO: 116335 - RNA, 1410 nt, Artificial Sequence; identical to SEQ ID NO: 112774
  derived and/or modified CDS sequence (opt2) from neuraminidase__InfluenzaA__ADX96419

SEQ ID NO: 116336 - RNA, 1410 nt, Artificial Sequence
  derived and/or modified CDS sequence (opt2) from neuraminidase__InfluenzaA__ADX96429
augaaccccaaccagaagaucaucaccaucggcuccgucugcaugaccaucggcauggccaaccucauccuccagaucggcaacaucaucuccaucuggaucucccacuccauccagcucggcaaccagaaccagaucgagaccugcaaccaguccgucaucaccuacgagaacaacaccugggucaaccagaccuacgucaacaucuccaacaccaacuucgccgccggccaguccgucgucuccgucaagcucgccggcaacuccucccucugccccgucuccggcugggccaucuacuccaaggacaacuccguccgcaucggcuccaagggcgacgucuucgucauccgcgagcccuucaucuccugcuccccccucgagugccgcaccuucuuccucacccagggcgcccuccucaacgacaagcacuccaacggcaccaucaaggaccgcucccccuaccgcacccucauguccugccccaucggcgagguccccucccccuacaacucccgcuucgaguccgucgccugguccgccuccgccugccacgacggcaucaacuggcucaccaucggcaucuccggccccgacaacggcgccgucgccguccucaaguacaacggcaucaucaccgacaccaucaaguccuggcgcaacaacauccuccgcacccaggaguccgagugcgccugcgucaacggcuccugcuucaccgucaugaccgacggccccuccaacggccaggccuccuacaagaucuuccgcaucgagaagggcaagaucgucaaguccgucgagaugaacgcccccaacuaccacuacgaggagugcuccugcuaccccgacuccuccgagaucaccugcgucugccgcgacaacuggcacggcuccaaccgccccugggucuccuucaaccagaaccucgaguaccagaucggcuacaucugcuccggcaucuucggcgacaacccccgccccaacgacaagaccggcuccugcggccccgucuccuccaacggcgccaacggcgucaagggcuucuccuucaaguacggcaacggcgucuggaucggccgcaccaaguccaucuccucccgcaacggcuucgagaugaucugggaccccaacggcuggaccggcaccgacaacaacuucuccaucaagcaggacaucguccgcaucaacgagugguccggcuacuccggcuccuucguccagcaccccgagcucaccggccucgacugcauccgccccugcuucugggucgagcucauccgcggccgccccaaggagaacaccaucuggaccuccggcuccuccaucuccuucugcggcgucaacuccgacaccgucggcugguccuggcccgacggcgccgagcuccccuucaccaucgacaaguga

SEQ ID NO: 116337 - RNA, 1410 nt, Artificial Sequence; identical to SEQ ID NO: 112774
  derived and/or modified CDS sequence (opt2) from neuraminidase__InfluenzaA__ADX96449

SEQ ID NO: 116338 - RNA, 1410 nt, Artificial Sequence; identical to SEQ ID NO: 112774
  derived and/or modified CDS sequence (opt2) from neuraminidase__InfluenzaA__ADX96469

SEQ ID NO: 116339 - RNA, 1410 nt, Artificial Sequence; identical to SEQ ID NO: 112774
  derived and/or modified CDS sequence (opt2) from neuraminidase__InfluenzaA__ADX96489

SEQ ID NO: 116340 - RNA, 1410 nt, Artificial Sequence; identical to SEQ ID NO: 112774
  derived and/or modified CDS sequence (opt2) from neuraminidase__InfluenzaA__ADX96499

SEQ ID NO: 116341 - RNA, 1410 nt, Artificial Sequence
  derived and/or modified CDS sequence (opt2) from neuraminidase__InfluenzaA__ADX96509
augaaccccaaccagaagaucaucaccaucggcuccgucugcaugaccaucggcauggccaaccucauccuccagaucggcaacaucaucuccaucuggaucucccacuccauccagcucggcaaccagaaccagaucgagaccugcaaccaguccgucaucaccuacgagaacaacaccugggucaaccagaccuacgucaacaucuccaacaccaacuucgccgccggccaguccgucgucuccgucaagcucgccggcaacuccucccucugccccgucuccggcugggccaucuacuccaaggacaacuccauccgcaucggcuccaacggcgacgucuucgucauccgcgagcccuucaucuccugcuccccccucgagugccgcaccuucuuccucacccagggcgcccuccucaacgacaagcacuccaacggcaccaucaaggaccgcucccccuaccgcacccucauguccugccccaucggcgagguccccucccccuacaacucccgcuucgaguccgucgccugguccgccuccgccugccacgacggcaucaacuggcucaccaucggcaucuccggccccgacaacggcgccgucgccguccucaaguacaacggcaucaucaccgacaccaucaaguccuggcgcaacaacauccuccgcacccaggaguccgagugcgccugcgucaacggcuccugcuucaccgucaugaccgacggccccuccgacggccaggccuccuacaagaucuuccgcaucgagaagggcaagaucgucaaguccgucgagaugaacgcccccaacuaccacuacgaggagugcuccugcuaccccgacuccuccgagaucaccugcgucugccgcgacaacuggcacggcuccaaccgccccugggucuccuucaaccagaaccucgaguaccagaucggcuacaucugcuccggcaucuucggcgacaacccccgccccaacgacaagaccggcuccugcggccccgucuccuccaacggcgccaacggcgucaagggcuucuccuucaaguacggcaacggcgucuggaucggccgcaccaaguccaucuccucccgcaacggcuucgagaugaucugggaccccaacggcuggaccggcaccgacaacaacuucuccaucaagcaggacaucgucggcaucaacgagugguccggcuacuccggcuccuucguccagcaccccgagcucaccggccucgacugcauccgccccugcuucugggucgagcucauccgcggccgccccaaggagaacaccaucuggaccuccggcuccuccaucuccuucugcggcgucaacuccgacaccgucggcugguccuggcccgacggcgccgagcuccccuucaccaucgacaaguga

SEQ ID NO: 116342 - RNA, 1410 nt, Artificial Sequence; identical to SEQ ID NO: 112774
  derived and/or modified CDS sequence (opt2) from neuraminidase__InfluenzaA__ADX96519

SEQ ID NO: 116343 - RNA, 1410 nt, Artificial Sequence; identical to SEQ ID NO: 112774
  derived and/or modified CDS sequence (opt2) from neuraminidase__InfluenzaA__ADX96529

SEQ ID NO: 116344 - RNA, 1410 nt, Artificial Sequence; identical to SEQ ID NO: 112774
  derived and/or modified CDS sequence (opt2) from neuraminidase__InfluenzaA__ADX96539

SEQ ID NO: 116345 - RNA, 1410 nt, Artificial Sequence; identical to SEQ ID NO: 112774
  derived and/or modified CDS sequence (opt2) from neuraminidase__InfluenzaA__ADX96549

SEQ ID NO: 116346 - RNA, 1410 nt, Artificial Sequence; identical to SEQ ID NO: 112774
  derived and/or modified CDS sequence (opt2) from neuraminidase__InfluenzaA__ADX96559

SEQ ID NO: 116347 - RNA, 1410 nt, Artificial Sequence; identical to SEQ ID NO: 112774
  derived and/or modified CDS sequence (opt2) from neuraminidase__InfluenzaA__ADX96569

SEQ ID NO: 116348 - RNA, 1410 nt, Artificial Sequence; identical to SEQ ID NO: 112764
  derived and/or modified CDS sequence (opt2) from neuraminidase__InfluenzaA__ADX96579

SEQ ID NO: 116349 - RNA, 1410 nt, Artificial Sequence; identical to SEQ ID NO: 112774
  derived and/or modified CDS sequence (opt2) from neuraminidase__InfluenzaA__ADX96589

SEQ ID NO: 116350 - RNA, 1410 nt, Artificial Sequence; identical to SEQ ID NO: 112774
  derived and/or modified CDS sequence (opt2) from neuraminidase__InfluenzaA__ADX96599

SEQ ID NO: 116351 - RNA, 1410 nt, Artificial Sequence
  derived and/or modified CDS sequence (opt2) from neuraminidase__InfluenzaA__ADX96609
augaaccccaaccagaagaucaucaccaucggcuccgucugcaugaccaucggcauggccaaccucauccuccagaucggcaacaucaucuccaucuggaucucccacuccauccagcucggcaaccagaaccagaucgagaccugcaaccaguccgucaucaccuacgagaacaacaccugggucaaccagaccuacgucaacaucuccaacaccaacuucgccgccggccaguccgucgucuccgucaagcucgccggcaacuccucccucugccccgucggcggcugggccaucuacuccaaggacaacuccguccgcaucggcuccaagggcgacgucuucgucauccgcgagcccuucaucuccugcuccccccucgagugccgcaccuucuuccucacccagggcgcccuccucaacgacaagcacuccaacggcaccaucaaggaccgcucccccuaccgcacccucauguccugccccaucggcgagguccccucccccuacaacucccgcuucgaguccgucgccugguccgccuccgccugccacgacggcaucaacuggcucaccaucggcaucuccggccccgacaacggcgccgucgccguccucaaguacaacggcaucaucaccgacaccaucaaguccuggcgcaacaacauccuccgcacccaggaguccgagugcgccugcgucaacggcuccugcuucaccgucaugaccgacggccccuccaacggccaggccuccuacaagaucuuccgcaucgagaagggcaagaucgucaaguccgucgagaugaacgcccccaacuaccacuacgaggagugcuccugcuaccccgacuccuccgagaucaccugcgucugccgcgacaacuggcacggcuccaaccgccccugggucuccuucaaccagaaccucgaguaccagaucggcuacaucugcuccggcaucuucggcgacaacccccgccccaacgacaagaccggcuccugcggccccgucuccuccaacggcgccaacggcgucaagggcuucuccuucaaguacggcgacggcgucuggaucggccgcaccaaguccaucuccucccgcaacggcuucgagaugaucugggaccccaacggcuggaccggcaccgacaacaacuucuccaucaagcaggacaucgucggcaucaacgagugguccggcuacuccggcuccuucguccagcaccccgagcucaccggccucgacugcauccgccccugcuucugggucgagcucauccgcggccgccccaaggagaacaccaucuggaccuccggcuccuccaucuccuucugcggcgucaacuccgacaccgucggcugguccuggcccgacggcgccgagcuccccuucaccaucgacaaguga

SEQ ID NO: 116352 - RNA, 1410 nt, Artificial Sequence; identical to SEQ ID NO: 112764
  derived and/or modified CDS sequence (opt2) from neuraminidase__InfluenzaA__ADX96619

SEQ ID NO: 116353 - RNA, 1410 nt, Artificial Sequence; identical to SEQ ID NO: 112774
  derived and/or modified CDS sequence (opt2) from neuraminidase__InfluenzaA__ADX96629

SEQ ID NO: 116354 - RNA, 1410 nt, Artificial Sequence; identical to SEQ ID NO: 112774
  derived and/or modified CDS sequence (opt2) from neuraminidase__InfluenzaA__ADX96639

SEQ ID NO: 116355 - RNA, 1410 nt, Artificial Sequence; identical to SEQ ID NO: 112774
  derived and/or modified CDS sequence (opt2) from neuraminidase__InfluenzaA__ADX96649

SEQ ID NO: 116356 - RNA, 1410 nt, Artificial Sequence; identical to SEQ ID NO: 112764
  derived and/or modified CDS sequence (opt2) from neuraminidase__InfluenzaA__ADX96659

SEQ ID NO: 116357 - RNA, 1410 nt, Artificial Sequence; identical to SEQ ID NO: 112774
  derived and/or modified CDS sequence (opt2) from neuraminidase__InfluenzaA__ADX96669

SEQ ID NO: 116358 - RNA, 1410 nt, Artificial Sequence; identical to SEQ ID NO: 112774
  derived and/or modified CDS sequence (opt2) from neuraminidase__InfluenzaA__ADX96679

SEQ ID NO: 116359 - RNA, 1410 nt, Artificial Sequence; identical to SEQ ID NO: 112774
  derived and/or modified CDS sequence (opt2) from neuraminidase__InfluenzaA__ADX96689

SEQ ID NO: 116360 - RNA, 1410 nt, Artificial Sequence; identical to SEQ ID NO: 112774
  derived and/or modified CDS sequence (opt2) from neuraminidase__InfluenzaA__ADX96699

SEQ ID NO: 116361 - RNA, 1410 nt, Artificial Sequence
  derived and/or modified CDS sequence (opt2) from neuraminidase__InfluenzaA__ADX96709
augaaccccaaccagaagaucaucaccaucggcuccgucugcaugaccaucggcauggccaaccucauccuccagaucggcaacaucaucuccaucuggaucucccacuccauccagcucggcaaccagaaccagaucgagaccugcaaccaguccgucaucaccuacgagaacaacaccugggucaaccagaccuacgucaacaucuccaacaccaacuucgccgccggccaguccgucgucuccgucaagcucgccggcaacuccucccucugccccgucuccggcugggccaucuacuccaaggacaacuccauccgcaucggcuccaagggcgacgucuucgucauccgcgagcccuucaucuccugcuccccccucgagugccgcaccuucuuccucacccagggcgcccuccucaacgacaagcacuccaacggcaccaucaaggaccgcucccccuaccgcacccucauguccugccccaucggcgagguccccucccccuacaacucccgcuucgaguccgucgccugguccgccuccgccugccacgacggcaucaacuggcucaccaucggcaucuccggccccgacaacggcgccgucgccguccucaaguacaacggcaucaucaccgacaccaucaaguccuggcgcaacaacauccuccgcacccaggaguccgagugcgccugcgucaacggcuccugcuucaccgucaugaccgacggccccuccgacggccaggccuccuacaagaucuuccgcaucgagaagggcaagaucgucaaguccgucgagaucaacgcccccaacuaccacuacgaggagugcuccugcuaccccgacuccuccgagaucaccugcgucugccgcgacaacuggcacggcuccaaccgccccugggucuccuucaaccagaaccucgaguaccagaucggcuacaucugcuccggcaucuucggcgacaacccccgccccaacgacgagaccggcuccugcggccccgucuccuccaacggcgccaacggcgucaagggcuucuccuucaaguacggcaacggcgucuggaucggccgcaccaaguccaucuccucccgcaacggcuucgagaugaucugggaccccaacggcuggaccggcaccgacaacaacuucuccaucaagcaggacaucgucggcaucaacgagugguccggcuacuccggcuccuucguccagcaccccgagcucaccggccucgacugcauccgccccugcuucugggucgagcucauccgcggccgccccaaggagaacaccaucuggaccuccggcuccuccaucuccuucugcggcgucaacuccgacaccgucggcugguccuggcccgacggcgccgagcuccccuucaccaucgacaaguga

SEQ ID NO: 116362 - RNA, 1410 nt, Artificial Sequence
  derived and/or modified CDS sequence (opt2) from neuraminidase__InfluenzaA__ADX96719
augaaccccaaccagaagaucaucaccaucggcuccgucugcaugaccaucggcauggccaaccucauccuccagaucggcaacaucaucuccaucuggaucucccacuccauccagcucggcaaccagaaccagaucgagaccugcaaccaguccgucaucaccuacgagaacaacaccugggucaaccagaccuacgucaacaucuccaacaccaacuucgccgccggccaguccgucgucuccgucaaguucgccggcaacuccucccucugccccgucuccggcugggccaucuacuccaaggacaacuccauccgcaucggcuccaagggcgacgucuucgucauccgcgagcccuucaucuccugcuccccccucgagugccgcaccuucuuccucacccagggcgcccuccucaacgacaagcacuccaacggcaccaucaaggaccgcucccccuaccgcacccucauguccugccccaucggcgagguccccucccccuacaacucccgcuucgaguccgucgccugguccgccuccgccugccacgacggcaucaacuggcucaccaucggcaucuccggccccgacaacggcgccgucgccguccucaaguacaacggcaucaucaccgacaccaucaaguccuggcgcaacaacauccuccgcacccaggaguccgagugcgccugcgucaacggcuccugcuucaccgucaugaccgacggccccuccgacggccaggccuccuacaagaucuuccgcaucgagaagggcaagaucgucaaguccgucgagaugaacgcccccaacuaccacuacgaggagugcuccugcuaccccgacuccuccgagaucaccugcgucugccgcgacaacuggcacggcuccaaccgccccugggucuccuucaaccagaaccucgaguaccagaucggcuacaucugcuccggcaucuucggcgacaacccccgccccaacgacaagaccggcuccugcggccccgucuccuccaacggcgccaacggcgucaagggcuucuccuucaaguacggcaacggcgucuggaucggccgcaccaaguccaucuccucccgcaacggcuucgagaugaucugggaccccaacggcuggaccggcaccgacaacaacuucuccaucaagcaggacaucgucggcaucaacgagugguccggcuacuccggcuccuucguccagcaccccgagcucaccggccucgacugcauccgccccugcuucugggucgagcucauccgcggccgccccaaggaguccaccgucuggaccuccggcuccuccaucuccuucugcggcgucaacuccgacaccgucggcugguccuggcccgacggcgccgagcuccccuucaccaucgacaaguga

SEQ ID NO: 116363 - RNA, 1410 nt, Artificial Sequence; identical to SEQ ID NO: 112774
  derived and/or modified CDS sequence (opt2) from neuraminidase__InfluenzaA__ADX96729

SEQ ID NO: 116364 - RNA, 1410 nt, Artificial Sequence
  derived and/or modified CDS sequence (opt2) from neuraminidase__InfluenzaA__ADX96739
augaaccccaaccagaagaucaucaccaucggcuccgucugcaugaccaucggcauggccaaccucauccuccagaucggcaacaucaucuccaucuggaucucccacuccauccagcucggcaaccagaaccagaucgagaccugcaaccaguccgucaucaccuacgagaacaacaccugggucaaccagaccuacgucaacaucuccaacaccaacuucgccgccggccaguccgucgucuccgucaagcucgccggcaacuccucccucugccccgucuccggcugggccaucuacuccaaggacaacuccauccgcaucggcuccaagggcgacgucuucgucauccgcgagcccuucaucuccugcuccccccucgagugccgcaccuucuuccucacccagggcgcccuccucaacgacaagcacuccaacggcaccaucaaggaccgcucccccuaccgcacccucauguccugccccaucggcgagguccccucccccuacaacucccgcuucgaguccgucgccugguccgccuccgccugccacgacggcaucaacuggcucaccaucggcaucuccggccccgacaacggcgccgucgccguccucaaguacaacggcaucaucaccgacaccaucaaguccuggcgcaacaacauccuccgcacccaggaguccgagugcgccugcgucaacggcuccugcuucaccgucaugaccgacggccccuccgacggccaggccuccuacaagaucuuccgcaucgagaagggcaagaucgucaaguccgucgagaugaacgcccccaacuaccacuacgaggagugcuccugcuaccccgacuccuccgagaucaccugcgucugccgcgacaacuggcacggcuccaaccgccccugggucuccuucaaccagaaccucgaguaccagaucggcuacaucugcuccggcaucuucggcgacaacccccgccccaacgacaagaccggcuccugcggccccgucuccuccaacggcgccaacggcgucaagggcuucuccuucaaguacggcaacggcgucuggaucggccgcaccaaguccaucuccucccgcaacggcuucgagaugaucugggaccccaacggcuggaccggcaccgacaacaacuucuccaucaagcaggacaucgucggcaucaacgagugguccggcuacuccggcuccuucguccagcaccccgagcucaccggccucgacugcauccgccccugcuucugggucgagcucauccgcggccgccccaaggagaacaccaucuggaccuccggcuccuccaucuccuucugcggcgucaaguccgacaccgucggcugguccuggcccgacggcgccgagcuccccuucaccaucgacaaguga

SEQ ID NO: 116365 - RNA, 1410 nt, Artificial Sequence; identical to SEQ ID NO: 112774
  derived and/or modified CDS sequence (opt2) from neuraminidase__InfluenzaA__ADX96749

SEQ ID NO: 116366 - RNA, 1410 nt, Artificial Sequence; identical to SEQ ID NO: 112774
  derived and/or modified CDS sequence (opt2) from neuraminidase__InfluenzaA__ADX96759

SEQ ID NO: 116367 - RNA, 1410 nt, Artificial Sequence; identical to SEQ ID NO: 113748
  derived and/or modified CDS sequence (opt2) from neuraminidase__InfluenzaA__ADX96769

SEQ ID NO: 116368 - RNA, 1410 nt, Artificial Sequence; identical to SEQ ID NO: 112774
  derived and/or modified CDS sequence (opt2) from neuraminidase__InfluenzaA__ADX96779

SEQ ID NO: 116369 - RNA, 1410 nt, Artificial Sequence
  derived and/or modified CDS sequence (opt2) from neuraminidase__InfluenzaA__ADX96789
augaaccccaaccagaagaucaucaccaucggcuccgucugcaugaccaucggcauggccaaccucauccuccagaucggcaacaucaucuccaucuggaucucccacuccauccagcucggcaaccagaaccagaucgagaccugcaaccaguccgucaucaccuacgagaacaacaccugggucaaccagaccuacgucaacaucuccaacaccaacuucgccgccggccaguccgucgucucccucaagcucgccggcaacuccucccucugccccgucuccggcugggccaucuacuccaaggacaacuccauccgcaucggcuccaagggcgacgucuucgucauccgcgagcccuucaucuccugcuccccccucgagugccgcaccuucuuccucacccagggcgcccuccucaacgacaagcacuccaacggcaccaucaaggaccgcucccccuaccgcacccucauguccugccccaucggcgagguccccucccccuacaacucccgcuucgaguccgucgccugguccgccuccgccugccacgacggcaucaacuggcucaccaucggcaucuccggccccgacaacggcgccgucgccguccucaaguacaacggcaucaucaccgacaccaucaaguccuggcgcaacaacauccuccgcacccaggaguccgagugcgccugcgucaacggcuccugcuucaccgucaugaccgacggccccuccgacggccaggccuccuacaagaucuuccgcaucgagaagggcaagaucgucaaguccgucgagaugaacgcccccaacuaccacuacgaggagugcuccugcuaccccgacuccuccgagaucaccugcgucugccgcgacaacuggcacggcuccaaccgccccugggucuccuucaaccagaaccucgaguaccagaucggcuacaucugcuccggcaucuucggcgacaacccccgccccaacgacaagaccggcuccugcggccccgucuccuccaacggcgccaacggcgucaagggcuucuccuucaaguacggcaacggcgucuggaucggccgcaccaaguccaucuccucccgcaacggcuucgagaugaucugggaccccaacggcuggaccggcaccgacaacaacuucuccaucaagcaggacaucgucggcaucaacgagugguccggcuacuccggcuccuucguccagcaccccgagcucaccggccucgacugcauccgccccugcuucugggucgagcucauccgcggccgccccaaggagaacaccaucuggaccuccggcuccuccaucuccuucugcggcgucaacuccgacaccgucggcugguccuggcccgacggcgccgagcuccccuucaccaucgacaaguga

SEQ ID NO: 116370 - RNA, 1410 nt, Artificial Sequence; identical to SEQ ID NO: 112774
  derived and/or modified CDS sequence (opt2) from neuraminidase__InfluenzaA__ADX96799

SEQ ID NO: 116371 - RNA, 1410 nt, Artificial Sequence; identical to SEQ ID NO: 112929
  derived and/or modified CDS sequence (opt2) from neuraminidase__InfluenzaA__ADX96809

SEQ ID NO: 116372 - RNA, 1410 nt, Artificial Sequence; identical to SEQ ID NO: 112774
  derived and/or modified CDS sequence (opt2) from neuraminidase__InfluenzaA__ADX96819

SEQ ID NO: 116373 - RNA, 1410 nt, Artificial Sequence; identical to SEQ ID NO: 113997
  derived and/or modified CDS sequence (opt2) from neuraminidase__InfluenzaA__ADX96829

SEQ ID NO: 116374 - RNA, 1410 nt, Artificial Sequence
  derived and/or modified CDS sequence (opt2) from neuraminidase__InfluenzaA__ADX96839
augaaccccaaccagaagaucaucaccaucggcuccgucugcaugaccaucggcauggccaaccucauccuccagaucggcaacaucaucuccaucuggaucucccacuccauccagcucggcaaccagaaccagaucgagaccugcaaccaguccgucaucaccuacgagaacaacaccugggucaaccagaccuacgucaacaucuccaacaccaacuucgccgccggccaguccgucgucuccgucaagcucgccggcaacuccucccucugccccgucuccggcugggccaucuacuccaaggacaacaacguccgcaucggcuccaagggcgacgucuucgucauccgcgagcccuucaucuccugcuccccccucgagugccgcaccuucuuccucacccagggcgcccuccucaacgacaagcacuccaacggcaccaucaaggaccgcucccccuaccgcacccucauguccugccccaucggcgagguccccucccccuacaacucccgcuucgaguccgucgccugguccgccuccgccugccacgacggcaucaacuggcucaccaucggcaucuccggccccgacaacggcgccgucgccguccucaaguacaacggcaucaucaccgacaccaucaaguccuggcgcaacaacauccuccgcacccaggaguccgagugcgccugcgucaacggcuccugcuucaccgucaugaccgacggccccuccgacggccaggccuccuacaagaucuuccgcaucgagaagggcaagaucgucaaguccgucgagaugaacgcccccaacuaccacuacgaggagugcuccugcuaccccgacuccuccgagaucaccugcgucugccgcgacaacuggcacggcuccaaccgccccugggucuccuucaaccagaaccucgaguaccagaucggcuacaucugcuccggcaucuucggcgacaacccccgccccaacgacaagaccggcuccugcggccccgucuccuccaacggcgccaacggcgucaagggcuucuccuucaaguacggcaacggcgucuggaucggccgcaccaaguccaucuccucccgcaacggcuucgagaugaucugggaccccaacggcuggaccggcaccgacaacaacuucuccaucaagcaggacaucgucggcaucaacgagugguccggcuacuccggcuccuucguccagcaccccgagcucaccggccucgacugcauccgccccugcuucugggucgagcucauccgcggccgccccaaggagaacaccaucuggaccuccggcuccuccaucuccuucugcggcgucaacuccgacaccgucggcugguccuggcccgacggcgccgagcuccccuucaccaucgacaaguga

SEQ ID NO: 116375 - RNA, 1410 nt, Artificial Sequence; identical to SEQ ID NO: 112774
  derived and/or modified CDS sequence (opt2) from neuraminidase__InfluenzaA__ADX96849

SEQ ID NO: 116376 - RNA, 1410 nt, Artificial Sequence; identical to SEQ ID NO: 112774
  derived and/or modified CDS sequence (opt2) from neuraminidase__InfluenzaA__ADX96859

SEQ ID NO: 116377 - RNA, 1410 nt, Artificial Sequence; identical to SEQ ID NO: 113997
  derived and/or modified CDS sequence (opt2) from neuraminidase__InfluenzaA__ADX96869

SEQ ID NO: 116378 - RNA, 1410 nt, Artificial Sequence; identical to SEQ ID NO: 112774
  derived and/or modified CDS sequence (opt2) from neuraminidase__InfluenzaA__ADX96879

SEQ ID NO: 116379 - RNA, 1410 nt, Artificial Sequence; identical to SEQ ID NO: 112774
  derived and/or modified CDS sequence (opt2) from neuraminidase__InfluenzaA__ADX96899

SEQ ID NO: 116380 - RNA, 1410 nt, Artificial Sequence
  derived and/or modified CDS sequence (opt2) from neuraminidase__InfluenzaA__ADX96909
augaaccccaaccagaagaucaucaccaucggcuccgucugcaugaccaucggcauggccaaccucauccuccagaucggcaacaucaucuccaucuggaucucccacuccauccagcucggcaaccagaaccagaucgagaccugcaaccaguccgucaucaccuacgagaacaacaccugggucaaccagaccuacgucaacaucuccaacaccaacuucgccgccggccaguccgucgucuccgucaagcucgccggcaacuccucccucugccccgucuccggcugggccaucuacuccaaggacaacuccauccgcaucggcuccaagggcgacgucuucgucauccgcgagcccuucaucuccugcuccccccucgagugccgcaccuucuuccucacccagggcgcccuccucaacgacaagcacuccaacggcaccaucaaggaccgcucccccuaccgcacccucauguccugccccaucggcgagguccccucccccuacaacucccgcuucgaguccgucgccugguccgccuccgccugccacgacggcaucaacuggcucaccaucggcaucuccggccccgacaacggcgccgucgccguccucaaguacaacggcaucaucaccgacaccaucaaguccuggcgcaacgacauccuccgcacccaggaguccgagugcgccugcgucaacggcuccugcuucaccgucaugaccgacggccccuccgacggccaggccuccuacaagaucuuccgcaucgagaagggcaagaucgucaaguccgucgagaucaacgcccccaacuaccacuacgaggagugcuccugcuaccccgacuccuccgagaucaccugcgucugccgcgacaacuggcacggcuccaaccgccccugggucuccuucaaccagaaccucgaguaccagaucggcuacaucugcuccggcaucuucggcgacaacccccgccccaacgacaagaccggcuccugcggccccgucuccuccaacggcgccaacggcgucaagggcuucuccuucaaguacggcaacggcgucuggaucggccgcaccaaguccaucaacucccgcaacggcuucgagaugaucugggaccccaacggcuggaccggcaccgacaacaacuucuccaucaagcaggacaucgucggcaucaacgagugguccggcuacuccggcuccuucguccagcaccccgagcucaccggccucgacugcauccgccccugcuucugggucgagcucauccgcggccgccccaaggagaacaccaucuggaccuccggcuccuccaucuccuucugcggcgucaacuccgacaccgucggcugguccuggcccgacggcgccgagcuccccuucaccaucgacaaguga

SEQ ID NO: 116381 - RNA, 1410 nt, Artificial Sequence; identical to SEQ ID NO: 112774
  derived and/or modified CDS sequence (opt2) from neuraminidase__InfluenzaA__ADX96919

SEQ ID NO: 116382 - RNA, 1410 nt, Artificial Sequence; identical to SEQ ID NO: 112774
  derived and/or modified CDS sequence (opt2) from neuraminidase__InfluenzaA__ADX96929

SEQ ID NO: 116383 - RNA, 1410 nt, Artificial Sequence; identical to SEQ ID NO: 112774
  derived and/or modified CDS sequence (opt2) from neuraminidase__InfluenzaA__ADX96939

SEQ ID NO: 116384 - RNA, 1410 nt, Artificial Sequence; identical to SEQ ID NO: 113357
  derived and/or modified CDS sequence (opt2) from neuraminidase__InfluenzaA__ADX96949

SEQ ID NO: 116385 - RNA, 1410 nt, Artificial Sequence; identical to SEQ ID NO: 112774
  derived and/or modified CDS sequence (opt2) from neuraminidase__InfluenzaA__ADX96959

SEQ ID NO: 116386 - RNA, 1410 nt, Artificial Sequence
  derived and/or modified CDS sequence (opt2) from neuraminidase__InfluenzaA__ADX96969
augaaccccaaccagaugaucaucaccaucggcuccgucugcaugaccaucggcauggccaaccucauccuccagaucggcaacaucaucuccaucuggaucucccacuccauccagcucggcaaccagaaccagaucgagaccugcaaccaguccgucaucaccuacgagaacaacaccugggucaaccagaccuacgucaacaucuccaacaccaacuucgccgccggccaguccgucgucuccgucaagcucgccggcaacuccucccucugccccgucuccggcugggccaucuacuccaaggacaacuccguccgcaucggcuccaagggcgacgucuucgucauccgcgagcccuucaucuccugcuccccccucgagugccgcaccuucuuccucacccagggcgcccuccucaacgacaagcacuccaacggcaccaucaaggaccgcucccccuaccgcacccucauguccugccccaucggcgagguccccucccccuacaacucccgcuucgaguccgucgccugguccgccuccgccugccacgacggcaucaacuggcucaccaucggcaucuccggccccgacaacggcgccgucgccguccucaaguacaacggcaucaucaccgacaccaucaaguccuggcgcaacaacauccuccgcacccaggaguccgagugcgccugcgucaacggcuccugcuucaccgucaugaccgacggccccuccaacggccaggccuccuacaagaucuuccgcaucgagaagggcaagaucgucaaguccgucgagaugaacgcccccaacuaccacuacgaggagugcuccugcuaccccgacuccuccgagaucaccugcgucugccgcgacaacuggcacggcuccaaccgccccugggucuccuucaaccagaaccucgaguaccagaucggcuacaucugcuccggcaucuucggcgacaacccccgccccaacgacaagaccggcuccugcggccccgucuccuccaacggcgccaacggcgucaagggcuucuccuucaaguacggcaacggcgucuggaucggccgcaccaaguccaucuccucccgcaacggcuucgagaugaucugggaccccaacggcuggaccggcaccgacaacaacuucuccaucaagcaggacaucgucggcaucaacgagugguccggcuacuccggcuccuucguccagcaccccgagcucaccggccucgacugcauccgccccugcuucugggucgagcucauccgcggccgccccaaggagaacaccaucuggaccuccggcuccuccaucuccuucugcggcgucaacuccgacaccgucggcugguccuggcccgacggcgccgagcuccccuucaccaucgacaaguga

SEQ ID NO: 116387 - RNA, 1410 nt, Artificial Sequence; identical to SEQ ID NO: 113997
  derived and/or modified CDS sequence (opt2) from neuraminidase__InfluenzaA__ADX96979

SEQ ID NO: 116388 - RNA, 1410 nt, Artificial Sequence; identical to SEQ ID NO: 113997
  derived and/or modified CDS sequence (opt2) from neuraminidase__InfluenzaA__ADX96989

SEQ ID NO: 116389 - RNA, 1407 nt, Artificial Sequence
  derived and/or modified CDS sequence (opt2) from neuraminidase__InfluenzaA__ADX96999
augaaccccaaccagaagaucaucaccaucggcuccgucugcaugaccaucggcauggccaaccucauccuccagaucggcaucaucuccaucuggaucucccacuccauccagcucggcaaccagaaccagaucgagaccugcaaccaguccgucaucaccuacgagaacaacaccugggucaaccagaccuacgucaacaucuccaacaccaacuucgccgccggccaguccgucgucuccgucaagcucgccggcaacuccucccucugccccgucuccggcugggccaucuacuccaaggacaacuccauccgcaucggcuccaagggcgacgucuucgucauccgcgagcccuucaucuccugcuccccccucgagugccgcaccuucuuccucacccagggcgcccuccucaacgacaagcacuccaacggcaccaucaaggaccgcucccccuaccgcacccucauguccugccccaucggcgagguccccucccccuacaacucccgcuucgaguccgucgccugguccgccuccgccugccacgacggcaucaacuggcucaccaucggcaucuccggccccgacaacggcgccgucgccguccucaaguacaacggcaucaucaccgacaccaucaaguccuggcgcaacaacauccuccgcacccaggaguccgagugcgccugcgucaacggcuccugcuucaccgucaugaccgacggccccuccaacggccaggccuccuacaagaucuuccgcaucgagaagggcaagaucgucaaguccgucgagaugaacgcccccaacuaccacuacgaggagugcuccugcuaccccgacuccuccgagaucaccugcgucugccgcgacaacuggcacggcuccaaccgccccugggucuccuucaaccagaaccucgaguaccagaucggcuacaucugcuccggcaucuucggcgacaacccccgccccaacgacaagaccggcuccugcggccccgucuccuccaacggcgccaacggcgucaagggcuucuccuucaaguacggcaacggcgucuggaucggccgcaccaaguccaucuccucccgcaacggcuucgagaugaucugggaccccaacggcuggaccggcaccgacaacaacuucuccaucaagcaggacaucgucggcaucaacgagugguccggcuacuccggcuccuucguccagcaccccgagcucaccggccucgacugcauccgccccugcuucugggucgagcucauccgcggccgccccaaggagaacaccaucuggaccuccggcuccuccaucuccuucugcggcgucaacuccgacaccgucggcugguccuggcccgacggcgccgagcuccccuucaccaucgacaaguga

SEQ ID NO: 116390 - RNA, 1410 nt, Artificial Sequence; identical to SEQ ID NO: 112774
  derived and/or modified CDS sequence (opt2) from neuraminidase__InfluenzaA__ADX97009

SEQ ID NO: 116391 - RNA, 1410 nt, Artificial Sequence; identical to SEQ ID NO: 112929
  derived and/or modified CDS sequence (opt2) from neuraminidase__InfluenzaA__ADX97020

SEQ ID NO: 116392 - RNA, 1410 nt, Artificial Sequence
  derived and/or modified CDS sequence (opt2) from neuraminidase__InfluenzaA__ADX97030
augaaccccaaccagaagaucaucaccaucggcuccgucugcaugaucaucggcauggccaaccucaugcuccagaucggcaacaucaucuccaucuggaucucccacuccauccagcucggcaaccagaaccagaucgagaccugcaaccaguccgucaucaccuacgagaacaacaccugggucaaccagaccuacgucaacaucuccaacaccaacuucgccgccggccaguccgucgucuccgucaagcucgccggcaacuccucccucugccccgucuccggcugggccaucuacuccaaggacaacuccguccgcaucggcuccaagggcgacgucuucgucauccgcgagcccuucaucuccugcuccccccucgagugccgcaccuucuuccucacccagggcgcccuccucaacgacaagcacuccaacggcaccaucaaggaccgcucccccuaccgcacccucauguccugccccaucggcgagguccccucccccuacaacucccgcuucgaguccgucgccugguccgccuccgccugccacgacggcaucaacuggcucaccaucggcaucuccggccccgacaacggcgccgucgccguccucaaguacaacggcaucaucaccgacaccaucaaguccuggcgcaacaacauccuccgcacccaggaguccgagugcgccugcgucaacggcuccugcuucaccgucaugaccgacggccccuccgacggccaggccuccuacaagaucuuccgcaucgagaagggcaagaucgucaaguccgucgagaugaacgcccccaacuaccacuacgaggagugcuccugcuaccccgacuccuccgagaucaccugcgucugccgcgacaacuggcacggcuccaaccgccccugggucuccuucaaccagaaccucgaguaccagaucggcuacaucugcuccggcaucuucggcgacaacccccgccccaacgacaagaccggcuccugcggccccgucuccuccaacggcgccaacggcgucaagggcuucuccuucaaguacggcaacggcgucuggaucggccgcaccaaguccaucuccucccgcaacggcuucgagaugaucugggaccccaacggcuggaccggcaccgacaacaacuucuccaucaagcaggacaucgucggcaucaacgagugguccggcuacuccggcuccuucguccagcaccccgagcucaccggccucgacugcauccgccccugcuucugggucgagcucauccgcggccgccccaaggagaacaccaucuggaccuccggcuccuccaucuccuucugcggcgucaacuccgacaccgucggcugguccuggcccgacggcgccgagcuccccuucaccaucgacaaguga

SEQ ID NO: 116393 - RNA, 1410 nt, Artificial Sequence; identical to SEQ ID NO: 114322
  derived and/or modified CDS sequence (opt2) from neuraminidase__InfluenzaA__ADX98643

SEQ ID NO: 116394 - RNA, 1410 nt, Artificial Sequence; identical to SEQ ID NO: 112774
  derived and/or modified CDS sequence (opt2) from neuraminidase__InfluenzaA__ADX98653

SEQ ID NO: 116395 - RNA, 1410 nt, Artificial Sequence
  derived and/or modified CDS sequence (opt2) from neuraminidase__InfluenzaA__ADX98668
augaaccccaaccagaagaucaucaccaucggcuccaucugcaucaccaucggcauggccaaccucauccuccagaucggcaacaucaucuccaucuggaucucccacuccauccagcucggcaaccagaaccagaucgagaccugcaaccaguccgucaucaccuacgagaacaacaccugggucaaccagaccuacgucaacaucuccaacaccaacuucgccgccggccaguccgucgucuccgucaagcucgccggcaacuccucccucugccccgucuccggcugggccaucuacuccaaggacaacuccauccgcaucggcuccaagggcgacgucuucgucauccgcgagcccuucaucuccugcuccccccucgagugccgcaccuucuuccucacccagggcgcccuccucaacgacaagcacuccaacggcaccaucaaggaccgcucccccuaccgcacccucauguccugccccaucggcgagguccccucccccuacaacucccgcuucgaguccgucgccugguccgccuccgccugccacgacggcaucaacuggcucaccaucggcaucuccggccccgacaacggcgccgucgccguccucaaguacaacggcaucaucaccgacaccaucaaguccuggcgcaacaacauccuccgcacccaggaguccgagugcgccugcgucaacggcuccugcuucaccgucaugaccgacggccccuccgacggccaggccuccuacaagaucuuccgcaucgagaagggcaagaucgucaaguccgucgagaugaacgcccccaacuaccacuacgaggagugcuccugcuaccccgacuccuccgagaucaccugcgucugccgcgacaacuggcacggcuccaaccgccccugggucuccuucaaccagaaccucgaguaccagaucggcuacaucugcuccggcaucuucggcgacaacccccgccccaacgacaagaccggcuccugcggccccgucuccuccaacggcgccaacggcgucaagggcuucuccuucaaguacggcaacggcgucuggaucggccgcaccaaguccaucuccucccgcaacggcuucgagaugaucugggaccccaacggcuggaccggcaccgacaacaacuucuccaucaagcaggacaucgucggcaucaacgagugguccggcuacuccggcuccuucguccagcaccccgagcucaccggccucgacugcauccgccccugcuucugggucgagcucauccgcggccgccccaaggagaacaccaucuggaccuccggcuccuccaucuccuucugcggcgucaacuccgacaccgucggcugguccuggcccgacggcgccgagcuccccuucaccaucgacaaguga

SEQ ID NO: 116396 - RNA, 1410 nt, Artificial Sequence; identical to SEQ ID NO: 112774
  derived and/or modified CDS sequence (opt2) from neuraminidase__InfluenzaA__ADX98678

SEQ ID NO: 116397 - RNA, 1410 nt, Artificial Sequence; identical to SEQ ID NO: 112774
  derived and/or modified CDS sequence (opt2) from neuraminidase__InfluenzaA__ADX98698

SEQ ID NO: 116398 - RNA, 1410 nt, Artificial Sequence
  derived and/or modified CDS sequence (opt2) from neuraminidase__InfluenzaA__ADX98708
augaaccccaaccagaagaucaucaccaucggcuccgucugcaugaccaucggcauggccaaccucauccuccagaucggcaacaucaucuccaucuggaucucccacuccauccagcucggcaaccagaaccagaucgagaccugcaaccaguccgucaucaucuacgagaacaacaccugggucaaccagaccuacgucaacaucuccaacaccaacuucgccgccggccaguccgucgucuccgucaagcucgccggcaacuccucccucugccccgucuccggcugggccaucuacuccaaggacaacuccauccgcaucggcuccaagggcgacgucuucgucauccgcgagcccuucaucuccugcuccccccucgagugccgcaccuucuuccucacccagggcgcccuccucaacgacaagcacuccaacggcaccaucaaggaccgcucccccuaccgcacccucauguccugccccaucggcgagguccccucccccuacaacucccgcuucgaguccgucgccugguccgccuccgccugccacgacggcaucaacuggcucaccaucggcaucuccggccccgacaacggcgccgucgccguccucaaguacaacggcaucaucaccgacaccaucaaguccuggcgcaacaacauccuccgcacccaggaguccgagugcgccugcgucaacggcuccugcuucaccgucaugaccgacggccccuccgacggccaggccuccuacaagaucuuccgcaucgagaagggcaagaucgucaaguccgucgagaugaacgcccccaacuaccacuacgaggagugcuccugcuaccccgacuccuccgagaucaccugcgucugccgcgacaacuggcacggcuccaaccgccccugggucuccuucaaccagaaccucgaguaccagaucggcuacaucugcuccggcaucuucggcgacaacccccgccccaacgacaagaccggcuccugcggccccgucuccuccaacggcgccaacggcgucaagggcuucuccuucaaguacggcaacggcgucuggaucggccgcaccaaguccaucuccucccgcaacggcuucgagaugaucugggaccccaacggcuggaccggcaccgacaacaacuucuccaucaagcaggacaucgucggcaucaacgagugguccggcuacuccggcuccuucguccagcaccccgagcucaccggccucgacugcauccgccccugcuucugggucgagcucauccgcggccgccccaaggagaacaccaucuggaccuccggcuccuccaucuccuucugcggcgucaacuccgacaccgucggcugguccuggcccgacggcgccgagcuccccuucaccaucgacaaguga

SEQ ID NO: 116399 - RNA, 1410 nt, Artificial Sequence; identical to SEQ ID NO: 112774
  derived and/or modified CDS sequence (opt2) from neuraminidase__InfluenzaA__ADX98722

SEQ ID NO: 116400 - RNA, 1410 nt, Artificial Sequence; identical to SEQ ID NO: 112774
  derived and/or modified CDS sequence (opt2) from neuraminidase__InfluenzaA__ADX98732

SEQ ID NO: 116401 - RNA, 1410 nt, Artificial Sequence; identical to SEQ ID NO: 112774
  derived and/or modified CDS sequence (opt2) from neuraminidase__InfluenzaA__ADX98742

SEQ ID NO: 116402 - RNA, 1410 nt, Artificial Sequence; identical to SEQ ID NO: 114125
  derived and/or modified CDS sequence (opt2) from neuraminidase__InfluenzaA__ADX98751

SEQ ID NO: 116403 - RNA, 1410 nt, Artificial Sequence; identical to SEQ ID NO: 112774
  derived and/or modified CDS sequence (opt2) from neuraminidase__InfluenzaA__ADX98761

SEQ ID NO: 116404 - RNA, 1410 nt, Artificial Sequence
  derived and/or modified CDS sequence (opt2) from neuraminidase__InfluenzaA__ADX98770
augaaccccaaccagaagaucaucaccaucggcuccgucugcaugaccaucggcauggccaaccucauccuccagaucggcaacaucaucuccaucuggaucucccacuccauccagcucggcaaccagaaccagaucgagaccugcaaccaguccgucaucaccuacgagaacaacaccugggucaaccagaccuacgucaacaucuccaacaccaacuucgccgccggccaguccgucgucuccgucaagcucgccggcaacuccucccucugccccgucuccggcugggccaucuacuccaaggacaacuccauccgcaucggcuccaagggcgacgucuucgucauccgcgagcccuucaucuccugcuccccccucgagugccgcaccuucuuccucacccagggcgcccuccucaacgacaagcacuccaacggcaccaucaaggaccgcucccccuaccgcacccucauguccugccccaucggcgagguccccucccccuacaacucccgcuucgaguccgucgccugguccgccuccgccugccacgacggcaucaacuggcucaccaucggcaucuccggccccgacaacggcgccgucgccguccucaaguacaacggcaucaucaccgacaccaucaaguccuggcgcaacaacauccuccgcacccaggaguccgagugcgccugcgucaacggcuccugcuucaccgucaugaccgacggccccuccgacggccaggccuccuacaagaucuuccgcaucgagaagggcaagaucgucaaguccgucgagaugaacgcccccaacuaccacuacgaggagugcuccugcuaccccgacuccuccgagaucaccugcgucugccgcgacaacuggcacggcuccaaccgccccuggggcuccuucaaccagaaccucgaguaccagaucggcuacaucugcuccggcaucuucggcgacaacccccgccccaacgacaagaccggcuccugcggccccgucuccuccaacggcgccaacggcgucaagggcuucuccuucaaguacggcaacggcgucuggaucggccgcaccaaguccaucuccucccgcaacggcuucgagaugaucugggaccccaacggcuggaccggcaccgacaacaacuucuccaucaagcaggacaucgucggcaucaacgagugguccggcuacuccggcuccuucguccagcaccccgagcucaccggccucgacugcauccgccccugcuucugggucgagcucauccgcggccgccccaaggagaacaccaucuggaccuccggcuccuccaucuccuucugcggcgucaacuccgacaccgucggcugguccuggcccgacggcgccgagcuccccuucaccaucgacaaguga

SEQ ID NO: 116405 - RNA, 1410 nt, Artificial Sequence; identical to SEQ ID NO: 112774
  derived and/or modified CDS sequence (opt2) from neuraminidase__InfluenzaA__ADX98780

SEQ ID NO: 116406 - RNA, 1410 nt, Artificial Sequence
  derived and/or modified CDS sequence (opt2) from neuraminidase__InfluenzaA__ADX98788
augaaccccaaccagaagaucaucaccaucggcuccgucugcaugaccaucggcauggccaaccucguccuccagaucggcaacaucaucuccaucuggaucucccacuccauccagcucggcaaccagaaccagaucgagaccugcaaccaguccgucaucaccuacgagaacaacaccugggucaaccagaccuacgucaacaucuccaacaccaacuucgccgccggccaguccgucgucuccgucaagcucgccggcaacuccucccucugccccgucuccggcugggccaucuacuccaaggacaacuccauccgcaucggcuccaagggcgacgucuucgucauccgcgagcccuucaucuccugcuccccccucgagugccgcaccuucuuccucacccagggcgcccuccucaacgacaagcacuccaacggcaccaucaaggaccgcucccccuaccgcacccucauguccugccccaucggcgagguccccucccccuacaacucccgcuucgaguccgucgccugguccgccuccgccugccacgacggcaucaacuggcucaccaucggcaucuccggccccgacaacggcgccgucgccguccucaaguacaacggcaucaucaccgacaccaucaaguccuggcgcaacaacauccuccgcacccaggaguccgagugcgccugcgucaacggcuccugcuucaccgucaugaccgacggccccuccgacggccaggccuccuacaagaucuuccgcaucgagaagggcaagaucgucaaguccgucgagaugaacgcccccaacuaccacuacgaggagugcuccugcuaccccgacuccuccgagaucaccugcgucugccgcgacaacuggcacggcuccaaccgccccugggucuccuucaaccagaaccucgaguaccagaucggcuacaucugcuccggcaucuucggcgacaacccccgccccaacgacaagaccggcuccugcggccccgucuccuccaacggcgccaacggcgucaagggcuucuccuucaaguacggcaacggcgucuggaucggccgcaccaaguccaucuccucccgcaacggcuucgagaugaucugggaccccaacggcuggaccggcaccgacaacaaguucuccaucaagcaggacaucgucggcaucaacgagugguccggcuacuccggcuccuucguccagcaccccgagcucaccggccucgacugcauccgccccugcuucugggucgagcucauccgcggccgccccaaggagaacaccaucuggaccuccggcuccuccaucuccuucugcggcgucaacuccgacaccgucggcugguccuggcccgacggcgccgagcuccccuucaccaucgacaaguga

SEQ ID NO: 116407 - RNA, 1410 nt, Artificial Sequence
  derived and/or modified CDS sequence (opt2) from neuraminidase__InfluenzaA__ADX98809
augaaccccaaccagaagaucaucaccaucggcuccgucugcaugaccaucggcauggccaaccucauccuccagaucggcaacaucauccucaucuggaucucccacuccauccagcucggcaaccagaaccagaucgagaccugcaaccaguccgucaucaccuacgagaacaacaccugggucaaccagaccuacgucaacaucuccaacaccaacuucgccgccggccaguccgucgucuccgucaagcucgccggcaacuccucccucugccccgucuccggcugggccaucuacuccaaggacaacuccauccgcaucggcuccaagggcgacgucuucgucauccgcgagcccuucaucuccugcuccccccucgagugccgcaccuucuuccucacccagggcgcccuccucaacgacaagcacuccaacggcaccaucaaggaccgcucccccuaccgcacccucauguccugccccaucggcgagguccccucccccuacaacucccgcuucgaguccgucgccugguccgccuccgccugccacgacggcaucaacuggcucaccaucggcaucuccggccccgacaacggcgccgucgccguccucaaguacaacggcaucaucaccgacaccaucaaguccuggcgcaacaacauccuccgcacccaggaguccgagugcgccugcgucaacggcuccugcuucaccgucaugaccgacggccccuccgacggccaggccuccuacaagaucuuccgcaucgagaagggcaagaucgucaaguccgucgagaugaacgcccccaacuaccacuacgaggagugcuccugcuaccccgacuccuccgagaucaccugcgucugccgcgacaacuggcacggcuccaaccgccccugggucuccuucaaccagaaccucgaguaccagaucggcuacaucugcuccggcaucuucggcgacaacccccgccccaacgacaagaccggcuccugcggccccgucuccuccaacggcgccaacggcgucaagggcuucuccuucaaguacggcaacggcgucuggaucggccgcaccaaguccaucuccucccgcaacggcuucgagaugaucugggaccccaacggcuggaccggcaccgacaacaacuucuccaucaagcaggacaucgucggcaucaacgagugguccggcuacuccggcuccuucguccagcaccccgagcucaccggccucgacugcauccgccccugcuucugggucgagcucauccgcggccgccccaaggagaacaccaucuggaccuccggcuccuccaucuccuucugcggcgucaacuccgacaccgucggcugguccuggcccgacggcgccgagcuccccuucaccaucgacaaguga

SEQ ID NO: 116408 - RNA, 1410 nt, Artificial Sequence; identical to SEQ ID NO: 112774
  derived and/or modified CDS sequence (opt2) from neuraminidase__InfluenzaA__ADX98821

SEQ ID NO: 116409 - RNA, 1410 nt, Artificial Sequence; identical to SEQ ID NO: 112774
  derived and/or modified CDS sequence (opt2) from neuraminidase__InfluenzaA__ADX98846

SEQ ID NO: 116410 - RNA, 1410 nt, Artificial Sequence
  derived and/or modified CDS sequence (opt2) from neuraminidase__InfluenzaA__ADX98856
augaaccccaaccagaagaucaugaccaucggcuccgucugcaugaccaucggcauggccaaccucauccuccagaucggcaacaucaucuccaucuggaucucccacuccauccagcucggcauccagaaccagaucgagaccugcaaccaguccgucaucaccuacgagaacaacaccugggucaaccagaccuacgucaacaucuccaacaccaacuucgccgccggccaguccgucgucuccgucaagcucgccggcaacuccucccucugccccgucuccggcugggccaucuacuccaaggacaacuccauccgcaucggcuccaagggcgacgucuucgucauccgcgagcccuucaucuccugcuccccccucgagugccgcaccuucuuccucacccagggcgcccuccucaacgacaagcacuccaacggcaccaucaaggaccgcucccccuaccgcacccucauguccugccccaucggcgagguccccucccccuacaacucccgcuucgaguccgucgccugguccgccuccgccugccacgacggcaucaacuggcucaccaucggcaucuccggccccgacaacggcgccgucgccguccucaaguacaacggcaucaucaccgacaccaucaaguccuggcgcaacaacauccuccgcacccaggaguccgagugcgccugcgucaacggcuccugcuucaccgucaugaccgacggccccuccgacggccaggccuccuacaagaucuuccgcaucgagaagggcaagaucgucaaguccgucgagaugaacgcccccaacuaccacuacgaggagugcuccugcuaccccgacuccuccgagaucaccugcgucugccgcgacaacuggcacggcuccaaccgccccugggucuccuucaaccagaaccucgaguaccagaucggcuacaucugcuccggcaucuucggcgacaacccccgccccaacgacaagaccggcuccugcggccccgucuccuccaacggcgccaacggcgucaagggcuucuccuucaaguacggcaacggcgucuggaucggccgcaccaaguccaucuccucccgcaacggcuucgagaugaucugggaccccaacggcuggaccggcaccgacaacaacuucuccaucaagcaggacaucgucggcaucaacgagugguccggcuacuccggcuccuucguccagcaccccgagcucaccggccucgacugcauccgccccugcuucugggucgagcucauccgcggccgccccaaggagaacaccaucuggaccuccggcuccuccaucuccuucugcggcgucaacuccgacaccgucggcugguccuggcccgacggcgccgagcuccccuucaccaucgacaaguga

SEQ ID NO: 116411 - RNA, 1410 nt, Artificial Sequence; identical to SEQ ID NO: 112774
  derived and/or modified CDS sequence (opt2) from neuraminidase__InfluenzaA__ADX98863

SEQ ID NO: 116412 - RNA, 1410 nt, Artificial Sequence; identical to SEQ ID NO: 112774
  derived and/or modified CDS sequence (opt2) from neuraminidase__InfluenzaA__ADX98873

SEQ ID NO: 116413 - RNA, 1410 nt, Artificial Sequence
  derived and/or modified CDS sequence (opt2) from neuraminidase__InfluenzaA__ADX98883
augaaccccaaccagaagaucaucaccaucggcuccgucugcaugaccaucggcauggccaaccucauccuccagaucggcaacaucaucuccaucuggaucucccacuccauccagcucggcaaccagaaccagaucgagaccugcaaccaguccgucaucaccuacgagaacaacaccugggucaaccagaccuacgucaacaucuccaacaccaacgucgccgccggccaguccgucgucuccgucaagcucgccggcaacuccucccucugccccgucuccggcugggccaucuacuccaaggacaacuccauccgcaucggcuccaagggcgacgccuucgucauccgcgagcccuucaucuccugcuccccccucgagugccgcaccuucuuccucacccagggcgcccuccucaacgacaagcacuccaacggcaccaucaaggaccgcucccccuaccgcacccucauguccugccccaucggcgagguccccucccccuacaacucccgcuucgaguccgucgccugguccgccuccgccugccacgacggcaucaacuggcucaccaucggcaucuccggccccgacaacggcgccgucgccguccucaaguacaacggcaucaucaccgacaccaucaaguccuggcgcaacaacauccuccgcacccaggaguccgagugcgccugcgucaacggcuccugcuucaccgucaugaccgacggccccuccgacggccaggccuccuacaagaucuuccgcaucgagaagggcaagaucgucaaguccgucgagaugaacgcccccaacuaccacuacgaggagugcuccugcuaccccgacuccuccgagaucaccugcgucugccgcgacaacuggcacggcuccaaccgccccugggucuccuucaaccagaaccucgaguaccagaucggcuacaucugcuccggcaucuucggcgacaacccccgccccaacgacaagaccggcuccugcggccccgucuccuccaacggcgccaacggcgucaagggcuucuccuucaaguacggcaacggcgucuggaucggccgcaccaaguccaucuccucccgcuccggcuucgagaugaucugggaccccaacggcuggaccggcaccgacaacaacuucuccaucaagcaggacaucgucggcaucaacgagugguccggcuacuccggcuccuucguccagcaccccgagcucaccggccucgacugcauccgccccugcuucugggucgagcucauccgcggccgccccaaggagaacaccaucuggaccuccggcuccuccaucuccuucugcggcgucaacuccgacaccgucggcugguccuggcccgacggcgccgagcuccccuucaccaucgacaaguga

SEQ ID NO: 116414 - RNA, 1410 nt, Artificial Sequence; identical to SEQ ID NO: 112774
  derived and/or modified CDS sequence (opt2) from neuraminidase__InfluenzaA__ADX98893

SEQ ID NO: 116415 - RNA, 1410 nt, Artificial Sequence; identical to SEQ ID NO: 112774
  derived and/or modified CDS sequence (opt2) from neuraminidase__InfluenzaA__ADX98903

SEQ ID NO: 116416 - RNA, 1410 nt, Artificial Sequence; identical to SEQ ID NO: 114327
  derived and/or modified CDS sequence (opt2) from neuraminidase__InfluenzaA__ADX98913

SEQ ID NO: 116417 - RNA, 1410 nt, Artificial Sequence; identical to SEQ ID NO: 114205
  derived and/or modified CDS sequence (opt2) from neuraminidase__InfluenzaA__ADX98923

SEQ ID NO: 116418 - RNA, 1410 nt, Artificial Sequence; identical to SEQ ID NO: 114211
  derived and/or modified CDS sequence (opt2) from neuraminidase__InfluenzaA__ADX98933

SEQ ID NO: 116419 - RNA, 1410 nt, Artificial Sequence; identical to SEQ ID NO: 112774
  derived and/or modified CDS sequence (opt2) from neuraminidase__InfluenzaA__ADX98943

SEQ ID NO: 116420 - RNA, 1410 nt, Artificial Sequence; identical to SEQ ID NO: 114731
  derived and/or modified CDS sequence (opt2) from neuraminidase__InfluenzaA__ADX98953

SEQ ID NO: 116421 - RNA, 1410 nt, Artificial Sequence; identical to SEQ ID NO: 112774
  derived and/or modified CDS sequence (opt2) from neuraminidase__InfluenzaA__ADX98963

SEQ ID NO: 116422 - RNA, 1410 nt, Artificial Sequence
  derived and/or modified CDS sequence (opt2) from neuraminidase__InfluenzaA__ADX98973
augaaccccaaccagaagaucaucaccaucggcuccgucugcaugaccaucggcauggccaaccucauccuccagaucggcaacaucaucuccaucuggaucucccacuccauccagcucggcaaccagaaccagaucgagaccugcaaccaguccgucaucaccuacgagaacaacaccugggucaaccagaccuacgucaacaucuccaacaccaacuucgccgccggccaguccgucgucuccgucaagcucgccggcaacuccucccucugccccgucuccggcugggccaucuacuccaaggacaacuccauccgcaucggcuccaagggcgacgucuucgucauccgcgagcccuucaucuccugcuccccccucgagugccgcaccuucuuccucacccagggcgcccuccucaacgacaagcacuccaacggcaccaucaaggaccgcucccccuaccgcacccucaugaucugccccaucggcgagguccccucccccuacaacucccgcuucgaguccgucgccugguccgccuccgccugccacgacggcaucaacuggcucaccaucggcaucuccggccccgacaacggcgccgucgccguccucaaguacaacggcaucaucaccgacaccaucaaguccuggcgcaacaacauccuccgcacccaggaguccgagugcgccugcgucaacggcuccugcuucaccgucaugaccgacggccccuccgacggccaggccuccuacaagaucuuccgcaucgagaagggcaagaucgucaaguccgucgagaugaacgcccccaacuaccacuacgaggagugcuccugcuaccccgacuccuccgagaucaccugcgucugccgcgacaacuggcacggcuccaaccgccccugggucuccuucaaccagaaccucgaguaccagaucggcuacaucugcuccggcaucuucggcgacaacccccgccccaacgacaagaccggcuccugcggccccgucuccuccaacggcgccaacggcgucaagggcuucuccuucaaguacggcaacggcgucuggaucggccgcaccaaguccaucuccucccgcaacggcuucgagaugaucugggaccccaacggcuggaccggcaccgacaacaacuucuccaucaagcaggacaucgucggcaucaacgagugguccggcuacuccggcuccuucguccagcaccccgagcucaccggccucgacugcauccgccccugcuucugggucgagcucauccgcggccgccccaaggagaacaccaucuggaccuccggcuccuccaucuccuucugcggcgucaacuccgacaccgucggcugguccuggcccgacggcgccgagcuccccuucaccaucgacaaguga

SEQ ID NO: 116423 - RNA, 1410 nt, Artificial Sequence; identical to SEQ ID NO: 112774
  derived and/or modified CDS sequence (opt2) from neuraminidase__InfluenzaA__ADX98983

SEQ ID NO: 116424 - RNA, 1410 nt, Artificial Sequence; identical to SEQ ID NO: 112774
  derived and/or modified CDS sequence (opt2) from neuraminidase__InfluenzaA__ADX98993

SEQ ID NO: 116425 - RNA, 1410 nt, Artificial Sequence; identical to SEQ ID NO: 112774
  derived and/or modified CDS sequence (opt2) from neuraminidase__InfluenzaA__ADX99003

SEQ ID NO: 116426 - RNA, 1365 nt, Artificial Sequence
  derived and/or modified CDS sequence (opt2) from neuraminidase__InfluenzaA__ADX99584
augaaccccaaccagaagaucaccaccaucggcuccaucugccucgucgucggccucaucucccucauccuccagaucggcaacaucaucuccaucuggaucucccacuccauccagaccggcucccagaaccacaccggcaucugcaaccagaacaucaucaccuacaagaacuccaccugggucaaggacaccaccuccgucauccucaccggcaacuccucccucugccccauccgcggcugggccaucuacuccaaggacaacuccauccgcaucggcuccaagggcgacgucuucgucauccgcgagcccuucaucuccugcucccaccucgagugccgcaccuucuuccucacccagggcgcccuccucaacgacaagcacuccaacggcaccgucaaggaccgcucccccuaccgcgcccucauguccugccccgucggcgaggcccccucccccuacaacucccgcuucgaguccgucgccugguccgccuccgccugccacgacggcaugggcuggcucaccaucggcaucuccggccccgacaacggcgccgucgccguccucaaguacaacggcaucaucaccgagaccaucaaguccuggcgcaagaagauccuccgcacccaggaguccgagugcgccugcgucaacggcuccugcuucaccaucaugaccgacggccccuccgacggccucgccuccuacaagaucuucaagaucgagaagggcaaggucaccaaguccaucgagcucaacgcccccaacucccacuacgaggagugcuccugcuaccccgacaccggcaaggucaugugcgucugccgcgacaacuggcacggcuccaaccgccccugggucuccuucgaccagaaccucgacuaccagaucggcuacaucugcuccggcgucuucggcgacaacccccgccccgaggacggcaccggcuccugcggccccgucuacgucgacggcgccaacggcgucaagggcuucuccuaccgcuacggcaacggcgucuggaucggccgcaccaagucccacuccucccgccacggcuucgagaugaucugggaccccaacggcuggaccgagaccgacuccaaguucuccguccgccaggacgucgucgccaugaccgacugguccggcuacuccggcuccuucguccagcaccccgagcucaccggccucgacugcaugcgccccugcuucugggucgagcucauccgcggccgccccaaggagaagaccaucuggaccuccgccuccuccaucuccuucugcggcgucaacuccgacaccgucgacugguccuggcccgacggcgccgagcuccccuucuccaucgacaaguga

SEQ ID NO: 116427 - RNA, 1365 nt, Artificial Sequence; identical to SEQ ID NO: 116426
  derived and/or modified CDS sequence (opt2) from neuraminidase__InfluenzaA__ADX99595

SEQ ID NO: 116428 - RNA, 1365 nt, Artificial Sequence; identical to SEQ ID NO: 116426
  derived and/or modified CDS sequence (opt2) from neuraminidase__InfluenzaA__ADX99606

SEQ ID NO: 116429 - RNA, 1365 nt, Artificial Sequence; identical to SEQ ID NO: 116426
  derived and/or modified CDS sequence (opt2) from neuraminidase__InfluenzaA__ADX99617

SEQ ID NO: 116430 - RNA, 1365 nt, Artificial Sequence; identical to SEQ ID NO: 116426
  derived and/or modified CDS sequence (opt2) from neuraminidase__InfluenzaA__ADX99628

SEQ ID NO: 116431 - RNA, 1365 nt, Artificial Sequence; identical to SEQ ID NO: 116426
  derived and/or modified CDS sequence (opt2) from neuraminidase__InfluenzaA__ADX99639

SEQ ID NO: 116432 - RNA, 1365 nt, Artificial Sequence; identical to SEQ ID NO: 111755
  derived and/or modified CDS sequence (opt2) from neuraminidase__InfluenzaA__ADX99650

SEQ ID NO: 116433 - RNA, 1365 nt, Artificial Sequence; identical to SEQ ID NO: 111755
  derived and/or modified CDS sequence (opt2) from neuraminidase__InfluenzaA__ADX99672

SEQ ID NO: 116434 - RNA, 1365 nt, Artificial Sequence; identical to SEQ ID NO: 111755
  derived and/or modified CDS sequence (opt2) from neuraminidase__InfluenzaA__ADX99683

SEQ ID NO: 116435 - RNA, 1365 nt, Artificial Sequence; identical to SEQ ID NO: 111755
  derived and/or modified CDS sequence (opt2) from neuraminidase__InfluenzaA__ADX99694

SEQ ID NO: 116436 - RNA, 1365 nt, Artificial Sequence; identical to SEQ ID NO: 111755
  derived and/or modified CDS sequence (opt2) from neuraminidase__InfluenzaA__ADX99705

SEQ ID NO: 116437 - RNA, 1365 nt, Artificial Sequence; identical to SEQ ID NO: 111755
  derived and/or modified CDS sequence (opt2) from neuraminidase__InfluenzaA__ADX99846

SEQ ID NO: 116438 - RNA, 1365 nt, Artificial Sequence; identical to SEQ ID NO: 111755
  derived and/or modified CDS sequence (opt2) from neuraminidase__InfluenzaA__ADX99857

SEQ ID NO: 116439 - RNA, 1365 nt, Artificial Sequence; identical to SEQ ID NO: 111755
  derived and/or modified CDS sequence (opt2) from neuraminidase__InfluenzaA__ADX99868

SEQ ID NO: 116440 - RNA, 1365 nt, Artificial Sequence; identical to SEQ ID NO: 111755
  derived and/or modified CDS sequence (opt2) from neuraminidase__InfluenzaA__ADX99879

SEQ ID NO: 116441 - RNA, 1365 nt, Artificial Sequence; identical to SEQ ID NO: 111755
  derived and/or modified CDS sequence (opt2) from neuraminidase__InfluenzaA__ADX99890

SEQ ID NO: 116442 - RNA, 1365 nt, Artificial Sequence; identical to SEQ ID NO: 111755
  derived and/or modified CDS sequence (opt2) from neuraminidase__InfluenzaA__ADX99901

SEQ ID NO: 116443 - RNA, 1365 nt, Artificial Sequence
  derived and/or modified CDS sequence (opt2) from neuraminidase__InfluenzaA__ADX99912
augaaccccaaccagaagaucaucaccaucggcuccaucugccucgucgucggccucaucucccucauccuccagaucggcaacaucaucuccaucuggaucucccacuccauccagaccggcucccagaaccacaccggcaucugcaaccagaacaucaucaccuacaagaacuccaccugggucaaggacaccaccuccgucauccucaccggcaacuccucccucugccccauccgcggcugggccaucuacuccaaggacaacuccauccgcaucggcuccaagggcgacgucuucaucauccgcgagcccuucaucuccugcucccaccucgagugccgcaccuucuuccucacccagggcgcccuccucaacgacaagcacuccuccggcaccgucaaggaccgcucccccuaccgcgcccucauguccugccccgucggcgaggcccccucccccuacaacucccgcuucgaguccgucgccugguccgccuccgccugccacgacggcaugggcuggcucaccaucggcaucuccggccccgacaacggcgccgucgccguccucaaguacaacggcaucaucaccgagaccaucaaguccuggcgcaagaagauccuccgcacccaggaguccgagugcgccugcgucaacggcuccugcuucaccaucaugaccgacggccccuccgacggccucgccuccuacaagaucuucaagaucgagaagggcaaggucaccaaguccaucgagcucaacgcccccaacucccacuacgaggagugcuccugcuaccccgacaccggcaaggucaugugcgucugccgcgacaacuggcacggcuccaaccgccccugggucuccuucgaccagaaccucgacuaccagaucggcuacaucugcuccggcgucuucggcgacaacccccgccccgaggacggcaccggcuccugcggccccgucuacgucgacggcgccaacggcgucaagggcuucuccuaccgcuacggcaacggcgucuggaucggccgcaccaagucccacuccucccgccacggcuucgagaugaucugggaccccaacggcuggaccgagaccgacuccaaguucuccguccgccaggacgucgucgccaugaccgacugguccggcuacuccggcuccuucguccagcaccccgagcucaccggccucgacugcaugcgccccugcuucugggucgagcucauccgcggccgccccaaggagaagaccaucuggaccuccgccuccuccaucuccuucugcggcgucaacuccgacaccgucgacugguccuggcccgacggcgccgagcuccccuucuccaucgacaaguga

SEQ ID NO: 116444 - RNA, 1365 nt, Artificial Sequence; identical to SEQ ID NO: 111755
  derived and/or modified CDS sequence (opt2) from neuraminidase__InfluenzaA__ADX99923

SEQ ID NO: 116445 - RNA, 1365 nt, Artificial Sequence; identical to SEQ ID NO: 111755
  derived and/or modified CDS sequence (opt2) from neuraminidase__InfluenzaA__ADX99934

SEQ ID NO: 116446 - RNA, 1365 nt, Artificial Sequence; identical to SEQ ID NO: 111755
  derived and/or modified CDS sequence (opt2) from neuraminidase__InfluenzaA__ADX99956

SEQ ID NO: 116447 - RNA, 1365 nt, Artificial Sequence; identical to SEQ ID NO: 111755
  derived and/or modified CDS sequence (opt2) from neuraminidase__InfluenzaA__ADX99967

SEQ ID NO: 116448 - RNA, 1365 nt, Artificial Sequence; identical to SEQ ID NO: 111755
  derived and/or modified CDS sequence (opt2) from neuraminidase__InfluenzaA__ADX99978

SEQ ID NO: 116449 - RNA, 1365 nt, Artificial Sequence; identical to SEQ ID NO: 111755
  derived and/or modified CDS sequence (opt2) from neuraminidase__InfluenzaA__ADX99989

SEQ ID NO: 116450 - RNA, 1365 nt, Artificial Sequence; identical to SEQ ID NO: 111755
  derived and/or modified CDS sequence (opt2) from neuraminidase__InfluenzaA__ADY00001

SEQ ID NO: 116451 - RNA, 1365 nt, Artificial Sequence; identical to SEQ ID NO: 111755
  derived and/or modified CDS sequence (opt2) from neuraminidase__InfluenzaA__ADY00012

SEQ ID NO: 116452 - RNA, 1365 nt, Artificial Sequence; identical to SEQ ID NO: 111755
  derived and/or modified CDS sequence (opt2) from neuraminidase__InfluenzaA__ADY00023

SEQ ID NO: 116453 - RNA, 1413 nt, Artificial Sequence
  derived and/or modified CDS sequence (opt2) from neuraminidase__InfluenzaA__ADY04729
augaaccccaaccagaagaucaucaccaucggcuccaucuccaucgccaucggcaucaucucccucaugcuccagaucggcaacaucaucuccaucugggccucccacuccauccagaccggcucccagaaccacaccggcgucugcaaccagcgcaucaucaccuacgagaacuccaccugggucaaccacaccuacgucaacaucaacaacaccaacgucaucgccggcaaggacaagaccuccgucaccauggccggcaacuccucccucugcuccaucuccggcugggccaucuacaccaaggacaacuccauccgcaucggcuccaagggcgacgucuucgucauccgcgagcccuucaucuccugcucccaccucgagugccgcaccuucuuccucacccagggcgcccuccucaacgacaagcacuccaacggcaccgucaaggaccgcucccccuaccgcgcccucauguccugcccccucggcgaggcccccucccccuacaacuccaaguucgaguccgucgccugguccgccuccgccugccacgacggcaugggcuggcucaccaucggcaucuccggccccgacaacggcgccgucgccguccucaaguacaacggcaucaucaccgagaccaucaaguccuggaagaagcagauccuccgcacccaggaguccgagugcgucugcgucaacggcuccugcuucaccaucaugaccgacggccccuccaacggcgccgccuccuacaagaucuucaagaucgagaagggcaaggucaccaaguccaucgagcucaacgcccccaacuuccacuacgaggagugcuccugcuaccccgacaccggcaccgucaugugcgucugccgcgacaacuggcacggcuccaaccgccccugggucuccuucaaccagaaccucgacuaccagaucggcuacaucugcuccggcgucuucggcgacaacccccgccccaaggacggcgagggcuccugcaaccccgucaccgucgacggcgccaacggcgucaagggcuucuccuacaaguacggcaacggcgucuggaucggccgcaccaaguccaaccgccuccgcaagggcuucgagaugaucugggaccccaacggcuggaccgacaccgacuccgacuucuccgucaagcaggacgucgucgccaucaccgacugguccggcuacuccggcuccuucguccagcaccccgagcucaccggccucgacugcauccgccccugcuucugggucgagcucguccgcggccuccccaaggagaacaccaccaucuggaccuccggcuccuccaucuccuucugcggcgucaacuccgacaccgccaacugguccuggcccgacggcgccgagcuccccuucaccaucgacaaguga

SEQ ID NO: 116454 - RNA, 1410 nt, Artificial Sequence; identical to SEQ ID NO: 115554
  derived and/or modified CDS sequence (opt2) from neuraminidase__InfluenzaA__ADY11828

SEQ ID NO: 116455 - RNA, 1410 nt, Artificial Sequence; identical to SEQ ID NO: 112635
  derived and/or modified CDS sequence (opt2) from neuraminidase__InfluenzaA__ADY11839

SEQ ID NO: 116456 - RNA, 1410 nt, Artificial Sequence; identical to SEQ ID NO: 112635
  derived and/or modified CDS sequence (opt2) from neuraminidase__InfluenzaA__ADY17657

SEQ ID NO: 116457 - RNA, 1410 nt, Artificial Sequence; identical to SEQ ID NO: 112635
  derived and/or modified CDS sequence (opt2) from neuraminidase__InfluenzaA__ADY17668

SEQ ID NO: 116458 - RNA, 1410 nt, Artificial Sequence; identical to SEQ ID NO: 112635
  derived and/or modified CDS sequence (opt2) from neuraminidase__InfluenzaA__ADY17679

SEQ ID NO: 116459 - RNA, 1410 nt, Artificial Sequence; identical to SEQ ID NO: 112635
  derived and/or modified CDS sequence (opt2) from neuraminidase__InfluenzaA__ADY17690

SEQ ID NO: 116460 - RNA, 1410 nt, Artificial Sequence; identical to SEQ ID NO: 112635
  derived and/or modified CDS sequence (opt2) from neuraminidase__InfluenzaA__ADY17701

SEQ ID NO: 116461 - RNA, 1410 nt, Artificial Sequence; identical to SEQ ID NO: 112774
  derived and/or modified CDS sequence (opt2) from neuraminidase__InfluenzaA__ADY38722

SEQ ID NO: 116462 - RNA, 1410 nt, Artificial Sequence; identical to SEQ ID NO: 114523
  derived and/or modified CDS sequence (opt2) from neuraminidase__InfluenzaA__ADY38723

SEQ ID NO: 116463 - RNA, 1410 nt, Artificial Sequence; identical to SEQ ID NO: 112774
  derived and/or modified CDS sequence (opt2) from neuraminidase__InfluenzaA__ADY38734

SEQ ID NO: 116464 - RNA, 1410 nt, Artificial Sequence; identical to SEQ ID NO: 114366
  derived and/or modified CDS sequence (opt2) from neuraminidase__InfluenzaA__ADY38753

SEQ ID NO: 116465 - RNA, 1410 nt, Artificial Sequence; identical to SEQ ID NO: 112774
  derived and/or modified CDS sequence (opt2) from neuraminidase__InfluenzaA__ADY38763

SEQ ID NO: 116466 - RNA, 1410 nt, Artificial Sequence; identical to SEQ ID NO: 112774
  derived and/or modified CDS sequence (opt2) from neuraminidase__InfluenzaA__ADZ04600

SEQ ID NO: 116467 - RNA, 1410 nt, Artificial Sequence; identical to SEQ ID NO: 112774
  derived and/or modified CDS sequence (opt2) from neuraminidase__InfluenzaA__ADZ04610

SEQ ID NO: 116468 - RNA, 1410 nt, Artificial Sequence; identical to SEQ ID NO: 112774
  derived and/or modified CDS sequence (opt2) from neuraminidase__InfluenzaA__ADZ04693

SEQ ID NO: 116469 - RNA, 1410 nt, Artificial Sequence; identical to SEQ ID NO: 112774
  derived and/or modified CDS sequence (opt2) from neuraminidase__InfluenzaA__ADZ04701

SEQ ID NO: 116470 - RNA, 1410 nt, Artificial Sequence; identical to SEQ ID NO: 112774
  derived and/or modified CDS sequence (opt2) from neuraminidase__InfluenzaA__ADZ04711

SEQ ID NO: 116471 - RNA, 1410 nt, Artificial Sequence
  derived and/or modified CDS sequence (opt2) from neuraminidase__InfluenzaA__ADZ05393
augaaccccaaccagaagaucaucaccaucgacuccgucugcaugaccaucggcauggccaaccucauccuccagaucggcaacaucaucuccaucuggaucucccacuccauccagcucggcaaccagaaccagaucgagaccugcaaccaguccgucaucaccuacgagaacaacaccugggucaaccagaccuacgucaacaucuccaacaccaacuucgccgccggccaguccgucgucuccgucaagcucgccggcaacuccucccucugccccgucuccggcugggccaucuacuccaaggacaacuccguccgcaucggcuccaagggcgacgucuucgucauccgcgagcccuucaucuccugcuccccccucgagugccgcaccuucuuccucacccagggcgcccuccucaacgacaagcacuccaacggcaccaucaaggaccgcucccccuaccgcacccucauguccugccccaucggcgagguccccucccccuacaacucccgcuucgaguccgucgccugguccgccuccgccugccacgacggcaucaacuggcucaccaucggcaucuccggccccgacaacggcgccgucgccguccucaaguacaacggcaucaucaccgacaccaucaaguccuggcgcaacaacauccuccgcacccaggaguccgagugcgccugcgucaacggcuccugcuucaccgucaugaccgacggccccuccaacggccaggccuccuacaagaucuuccgcaucgagaagggcaagaucgucaaguccgucgagaugaacgcccccaacuaccacuacgaggagugcuccugcuaccccgacuccuccgagaucaccugcgucugccgcgacaacuggcacggcuccaaccgccccugggucuccuucaaccagaaccucgaguaccagaucggcuacaucugcuccggcaucuucggcgacaacccccgccccaacgacaagaccggcuccugcggccccgucuccuccaacggcgccaacggcgucaagggcuucuccuucaaguacggcaacggcgucuggaucggccgcaccaaguccaucuccucccgcaacggcuucgagaugaucugggaccccaacggcuggaccggcaccgacaacaacuucuccaucaagcaggacaucgucggcaucaacgagugguccggcuacuccggcuccuucguccagcaccccgagcucaccggccucgacugcauccgccccugcuucugggucgagcucauccgcggccgccccaaggagaacaccaucuggaccuccggcuccuccaucuccuucugcggcgucaacuccgacaccgucggcugguccuggcccgacggcgccgagcuccccuucaccaucgacaaguga

SEQ ID NO: 116472 - RNA, 1413 nt, Artificial Sequence
  derived and/or modified CDS sequence (opt2) from neuraminidase__InfluenzaA__ADZ05837
augaaccccaaccagaagaucaucaccaucggcuccaucuccaucgccaucggcaucaucucccucaugcuccagaucggcaacaucaucuccaucugggccucccacuccauccagaccggcucccagaacaacaccggcaucugcaaccagcgcaucaucaccugcgagaacuccaccugggucaaccacaccuacgucaacaucaacaacaccaacgucgucgccggcgaggacaagaccuccgucacccucgccggcaacuccucccucugcuccaucuccggcugggccaucuacaccaaggacaacuccauccgcaucggcuccaagggcgacgucuucgucauccgcgagcccuucaucuccugcucccaccucgagugccgcaccuucuuccucacccagggcgcccuccucaacgacaagcacuccaacggcaccgucaaggaccgcucccccuaccgcgcccucauguccugcccccucggcgaggcccccucccccuacaacuccaaguucgaguccgucgccugguccgccuccgccugccacgacggcaugggcuggcucaccaucggcaucuccggccccgacaacggcgccgucgccguccucaaguacaacggcaucaucaccggcaccaucaaguccuggaagaagcagauccuccgcacccaggaguccgagugcgucugcaugaacggcuccugcuucaccaucaugaccgacggccccuccaacaaggccgccuccuacaagaucuucaagaucgagaagggcaaggucaccaaguccaucgagcucaacgcccccaacuucuacuacgaggagugcuccugcuaccccgacaccggcaucgucaugugcgucugccgcgacaacuggcacggcuccaaccgccccugggucuccuucaaccagaaccucgacuaccagaucggcuacaucugcuccggcgucuucggcgacaacccccgccccgaggacggcgagggcuccugcaaccccgucaccgucgacggcgccaacggcgucaagggcuucuccuacaaguacggcaacggcgucuggaucggccgcaccaaguccaaccgccuccgcaagggcuucgagaugaucugggaccccaacggcuggaccaacaccgacuccgacuucuccgucaagcaggacgucgucgccaccaccgacugguccggcuacuccggcuccuucguccagcaccccgagcucaccggccucgacugcauccgccccugcuucugggucgagcucguccgcggccucccccgcgagaacaccaccaucuggaccuccggcuccuccaucuccuucugcggcgucaacuccgacaccgccaacugguccuggcccgacggcgccgagcuccccuucaccaucgacaaguga

SEQ ID NO: 116473 - RNA, 1413 nt, Artificial Sequence; identical to SEQ ID NO: 113497
  derived and/or modified CDS sequence (opt2) from neuraminidase__InfluenzaA__ADZ05848

SEQ ID NO: 116474 - RNA, 1410 nt, Artificial Sequence; identical to SEQ ID NO: 113941
  derived and/or modified CDS sequence (opt2) from neuraminidase__InfluenzaA__ADZ05858

SEQ ID NO: 116475 - RNA, 1410 nt, Artificial Sequence; identical to SEQ ID NO: 112774
  derived and/or modified CDS sequence (opt2) from neuraminidase__InfluenzaA__ADZ47841

SEQ ID NO: 116476 - RNA, 1410 nt, Artificial Sequence; identical to SEQ ID NO: 112774
  derived and/or modified CDS sequence (opt2) from neuraminidase__InfluenzaA__ADZ47851

SEQ ID NO: 116477 - RNA, 1410 nt, Artificial Sequence
  derived and/or modified CDS sequence (opt2) from neuraminidase__InfluenzaA__ADZ47861
augaaccccaaccagaagaucaucaccaucggcuccgucugcaugaccaucggccucgccaaccucauccuccagaucggcaacaucaucuccaucuggaucucccacuccauccagcucggcaaccagaaccagaucgagaccugcaaccaguccgucaucaccuacgagaacaacaccugggucaaccagaccuacgucaacaucuccaacaucaacuucgccgccggccaguccgucgucuccgucaagcucgccggcaacuccucccucugccccgucuccggcugggccaucuacuccaaggacaacuccguccgcaucggcuccaagggcgacgucuucgucauccgcgagcccuucaucuccugcuccccccucgagugccgcaccuucuuccucacccagggcgcccuccucaacgacaagcacuccaacggcaccaucaaggaccgcucccccuaccgcacccucauguccugccccaucggcgagguccccucccccuacaacucccgcuucgaguccgucgccugguccgccuccgccugccacgacggcaucaacuggcucaccaucggcaucuccggccccgacaacggcgccgucgccguccucaaguacaacggcaucaucaccgacaccaucaaguccuggcgcaacaacauccuccgcacccaggaguccgagugcgccugcgucaacggcuccugcuucaccgucaugaccgacggccccuccgacggccaggccuccuacaagaucuuccgcaucgagaagggcaagaucgucaaguccgucgagaugaacgcccccaacuaccacuacgaggagugcuccugcuaccccgacuccuccgagaucaccugcgucugccgcgacaacuggcacggcuccaaccgccccugggucuccuucaaccagaaccucgaguaccgcaucggcuacaucugcuccggcaucuucggcgacaacccccgccccaacgacaagaccggcuccugcggccccgucuccuccaacggcgccaacggcgucaagggcuucuccuucaaguacggcaacggcgucuggaucggccgcaccaaguccaucuccucccgcaacggcuucgagaugaucugggaccccaacggcuggaccggcaccgacaagaacuucuccaucaagcaggacaucgucggcaucaacgagugguccggcuacuccggcuccuucguccagcaccccgagcucaccggccucgacugcauccgccccugcuucugggucgagcucauccgcggccgccccaaggagaacaccaucuggaccuccggcuccuccaucuccuucugcggcgucaacuccgacaccgucggcugguccuggcccgacggcgccgagcuccccuucaccaucgacaaguga

SEQ ID NO: 116478 - RNA, 1413 nt, Artificial Sequence
  derived and/or modified CDS sequence (opt2) from neuraminidase__InfluenzaA__ADZ53101
augaaccccaaccagaagaucaucaccaucggcuccaucuccaucgccaucggcaucaucucccucaugcuccagaucggcaacaucaucuccaucugggccucccacuccauccagaccggcucccagaacaacaccggcaucugcaaccagcgcaucaucaccuacgagaacuccaccugggucaaccacaccuacgucaacaucaacaacaccaaggucgucgccggcgaggacaagaccuccgucacccucgccggcaacuccucccucugcuccaucuccggcugggccaucaacaccaaggacaacuccauccgcaucggcuccaagggcgacgucuucgucauccgcgagcccuucaucuccugcucccaccucgagugccgcaccuucuuccucacccagggcgcccuccucaacgacaagcacuccaacggcaccgucaaggaccgcucccccuaccgcgcccucauguccugcccccucggcgaggcccccucccccuacaacuccaaguucgaguccgucgccugguccgccuccgccugccacgacggcaugggcuggcucaccaucggcaucuccggccccgacaacggcgccgucgccguccucaaguacaacggcaucaucaccggcaccaucaaguccuggaagaagcagauccuccgcacccaggaguccgagugcgucugcaugaacggcuccugcuucaccaucaugaccgacggccccuccaacaaggccgccuccuacaagaucuucaagaucgagaagggcaaggucaccaaguccaucgagcucaacgcccccaacuucuacuacgaggagugcuccugcuaccccgacaccggcaucgucaugugcgucugccgcgacaacuggcacggcuccaaccgccccugggucuccuucaaccagaaccucgacuaccagaucggcuacaucugcuccggcgucuucggcgacaacccccgccccgaggacggcgagggcuccugcaaccccgucaccgucgacggcgccaacggcgucaagggcuucuccuacaaguacggcaacggcgucuggaucggccgcaccaaguccaaccgccuccgcaagggcuucgagaugaucugggaccccaacggcuggaccaacaccgacuccgacuucuccgucaagcaggacgucgucgccaucaccgacugguccggcuacuccggcuccuucguccagcaccccgagcucaccggccucgacugcauccgccccugcuucugggucgagcucguccgcggccucccccgcgagaacaccaccaucuggaccuccggcuccuccaucuccuucugcggcgucaacuccgacaccgccaacugguccuggcccgacggcgccgagcuccccuucaccaucgacaaguga

SEQ ID NO: 116479 - RNA, 1410 nt, Artificial Sequence
  derived and/or modified CDS sequence (opt2) from neuraminidase__InfluenzaA__ADZ53124
augaaccccaaccagaagaucaucaccaucggcuccgucugcaugaccaucggcauggccaaccucauccuccagaucggcaacaucaucuccaucuggaucucccacuccauccagcucggcaaccagaaccagaucgagaccugcaaccaguccgucaucaccuacgagaacaacaccugggucaaccagaccuacgucaacaucuccaacaccaacuucgccgccggccaguccgucgucuccgucaagcucgccggcaacuccucccucugccccgucuccggcugggccaucuacuccaaggacaacuccauccgcaucggcuccaagggcgacgucuucgucauccgcgagcccuucaucuccugcuccccccucgagugccgcaccuucuuccucacccagggcgcccuccucaacgacaagcacuccaacggcaccaucaaggaccgcucccccuaccgcacccucauguccugccccaucggcgagguccccucccccuacaacucccgcuucgaguccgucgccugguccgccuccgccugccacgacggcaucaacuggcucaccaucggcaucuccggccccgacaacggcgccgucgccguccucaaguacaacggcaucaucaccgacaccaucaaguccuggcgcaacaacauccuccgcacccaggaguccgagugcgccugcgucaacggcuccugcuucaccgucaugaccgacggccccuccgacggccaggccuccuacaagaucuuccgcaucgagaagggcaagaucgucaaguccgucgagaugaacgcccccaacuacuacuacgaggagugcuccugcuaccccgacuccuccgagaucaccugcgucugccgcgacaacuggcacggcuccaaccgccccugggucuccuucaaccagaaccucgaguaccagaucggcuacaucugcuccggcaucuucggcgacaacccccgccccaacgacaagaccggcuccugcggccccgucuccuccaacggcgccaacggcgucaagggcuucuccuucaaguacggcaacggcgucuggaucggccgcaccaaguccaucuccucccgcaacggcuucgagaugaucugggaccccaacggcuggaccggcaccgacaacgacuucuccaucaagcaggacaucgucggcaucaacgagugguccggcuacuccggcuccuucguccagcaccccgagcucaccggccucgacugcauccgccccugcuucugggucgagcucauccgcggccgccccaaggagaacaccaucuggaccuccggcuccuccaucuccuucugcggcgucaacuccgacaccgucggcugguccuggcccgacggcgccgagcuccccuucaccaucgacaaguga

SEQ ID NO: 116480 - RNA, 1410 nt, Artificial Sequence; identical to SEQ ID NO: 112774
  derived and/or modified CDS sequence (opt2) from neuraminidase__InfluenzaA__ADZ53130

SEQ ID NO: 116481 - RNA, 1410 nt, Artificial Sequence; identical to SEQ ID NO: 112764
  derived and/or modified CDS sequence (opt2) from neuraminidase__InfluenzaA__ADZ53132

SEQ ID NO: 116482 - RNA, 1410 nt, Artificial Sequence; identical to SEQ ID NO: 112774
  derived and/or modified CDS sequence (opt2) from neuraminidase__InfluenzaA__ADZ53134

SEQ ID NO: 116483 - RNA, 1410 nt, Artificial Sequence; identical to SEQ ID NO: 112774
  derived and/or modified CDS sequence (opt2) from neuraminidase__InfluenzaA__ADZ53136

SEQ ID NO: 116484 - RNA, 1410 nt, Artificial Sequence; identical to SEQ ID NO: 113128
  derived and/or modified CDS sequence (opt2) from neuraminidase__InfluenzaA__ADZ53137

SEQ ID NO: 116485 - RNA, 1410 nt, Artificial Sequence; identical to SEQ ID NO: 112774
  derived and/or modified CDS sequence (opt2) from neuraminidase__InfluenzaA__ADZ53139

SEQ ID NO: 116486 - RNA, 1410 nt, Artificial Sequence
  derived and/or modified CDS sequence (opt2) from neuraminidase__InfluenzaA__ADZ53141
augaaccccaaccagaagaucaucaccaucggcuccgucugcaugaccaucggcauggccaaccucauccuccagaucggcaacaucaucuccaucuggaucucccacuccauccagcucggcaaccagaaccagaucgagaccugcaaccaguccgucaucaccuacgagaacaacaccugggucaaccagaccuacgucaacaucuccaacaccaacuucgccgccggccaguccgucgucuccgucaagcucgccggcaacuccucccucugccccgucuccggcugggccaucuacuccaaggacaacuccauccgcaucggcuccaagggcgacgucuucgucauccgcgagcccuucaucuccugcuccccccucgagugccgcaccuucuuccucacccagggcgcccuccucaacgacaagcacuccaacggcaccaucaaggaccgcucccccuaccgcacccucauguccugccccaucggcgagguccccucccccuacaacucccgcuucgaguccgucgccugguccgccuccgccugccacgacggcaucaacuggcucaccaucggcaucuccggccccgacaacggcgccgucgccguccucaaguacaacggcaucaucaccgacaccaucaaguccuggcgcaacaacauccuccgcacccaggaguccgagugcgccugcgucaacggcuccugcuucaccgucaugaccgacggccccuccgacggccaggccuccuacaagaucuuccgcaucgagaagggcaagaucgucaaguccgucgagaugaacgcccccaacuaccacuacgaggagugcuccugcuaccccgacuccuccgagaucaccugcgucugccgcgacaacuggcacggcuccaaccgccccugggucuccuucaaccagaaccucgaguaccagaucggcuacaucugcuccggcaucuucggcgacaacccccgccccaacgacaagaccggcuccugcggccccgucuccuccaacggcgccaacggcgucaagggcuucuccuucaaguacggcaacggcgucuggaucggccgcaccaaguccaucuccucccgcaacggcuucgagaugaucugggaccccaacggcuggaccggcaccgacaacgacuucuccaucaagcaggacaucgucggcaucaacgagugguccggcuacuccggcuccuucguccagcacuccgagcucaccggccucgacugcauccgccccugcuucugggucgagcucauccgcggccgccccaaggagaacaccaucuggaccuccggcuccuccaucuccuucugcggcgucaacuccgacaccgucggcugguccuggcccgacggcgccgagcuccccuucaccaucgacaaguga

SEQ ID NO: 116487 - RNA, 1410 nt, Artificial Sequence; identical to SEQ ID NO: 112635
  derived and/or modified CDS sequence (opt2) from neuraminidase__InfluenzaA__AEA03712

SEQ ID NO: 116488 - RNA, 1410 nt, Artificial Sequence; identical to SEQ ID NO: 112635
  derived and/or modified CDS sequence (opt2) from neuraminidase__InfluenzaA__AEA03722

SEQ ID NO: 116489 - RNA, 1410 nt, Artificial Sequence; identical to SEQ ID NO: 112635
  derived and/or modified CDS sequence (opt2) from neuraminidase__InfluenzaA__AEA03744

SEQ ID NO: 116490 - RNA, 1410 nt, Artificial Sequence
  derived and/or modified CDS sequence (opt2) from neuraminidase__InfluenzaA__AEA03755
augaaccccaaccagaagaucaucaccaucggcuccgucucccucaccaucuccaccaucugcuucuucaugcagaucgccauccucaucaccaccgucacccuccacuucaagcaguacgaguucaacuccccccccaacaaccaggucaugcucugcgagcccaccaucaucgagcgcaacaucaccgagaucgucuaccucaccaacaccaccaucgagaaggagaucugccccaagcucgccgaguaccgcaacugguccaagccccagugcgacaucaccggcuucgcccccuucuccaaggacaacuccauccgccucuccgccggcggcgacaucugggucacccgcgagcccuacgucuccugcgaccccgacaagugcuaccaguucgcccucggccagggcaccacccucaacaacguccacuccaacaacaccguccgcggccgcacccccuaccgcacccuccucaugaacgagcucggcguccccuuccaccucggcaccaagcaggucugcaucgccugguccuccuccuccugccacgacggcaaggccuggcuccacgucugcaucaccggcgacgacaagaacgccaccgccuccuucaucuacaacggccgccucgucgacuccgucgucuccugguccaaggagauccuccgcacccaggaguccgagugcgucugcaucaacggcaccugcaccgucgucaugaccgacggcuccgccuccggcaaggccgacaccaagauccucuucaucgaggagggcaagaucguccacaccuccacccucuccggcuccgcccagcacgucgaggagugcuccugcuacccccgcuaccccggcguccgcugcgucugccgcgacaacuggaagggcuccaaccgccccaucgucgacaucaacaucaaggaccacuccaucgucuccuccuacgucugcuccggccucgucggcgacaccccccgcaagaacgacuccuccuccuccucccacugccucgaccccaacaacgaggagggcggccacggcgucaagggcugggccuucgacgacggcaacgacgucuggaugggccgcaccaucuccgagaagucccgccucggcuacgagaccuucaaggucaucgagggcugguccaaccccaaguccaagcuccagaucaaccgccaggucaucgucgaccgcggcaaccgcuccggcuacuccggcaucuucuccgucgagggcaaguccugcaucaaccgcugcuucuacgucgagcucauccgcggccgcaaggaggagaccgagguccucuggaccuccaacuccaucgucgucuucugcggcaccuccggcaccuacggcaccggcuccuggcccgacggcgccgacaucaaccucaugcccaucuga

SEQ ID NO: 116491 - RNA, 1410 nt, Artificial Sequence; identical to SEQ ID NO: 112635
  derived and/or modified CDS sequence (opt2) from neuraminidase__InfluenzaA__AEA03766

SEQ ID NO: 116492 - RNA, 1410 nt, Artificial Sequence; identical to SEQ ID NO: 112635
  derived and/or modified CDS sequence (opt2) from neuraminidase__InfluenzaA__AEA03796

SEQ ID NO: 116493 - RNA, 1410 nt, Artificial Sequence; identical to SEQ ID NO: 112635
  derived and/or modified CDS sequence (opt2) from neuraminidase__InfluenzaA__AEA03806

SEQ ID NO: 116494 - RNA, 1410 nt, Artificial Sequence
  derived and/or modified CDS sequence (opt2) from neuraminidase__InfluenzaA__AEA03817
augaaccccaaccagaagaucaucaccaucggcuccgucucccucaccaucuccaccaucugcuucuucaugcagaucgccauccucaucaccaccgucacccuccacuucaagcaguacgaguucaacuccccccccaacaaccaggucaugcucugcgagcccaccaucaucgagcgcaacaucaccgagaucgucuaccucaccaacaccaccaucgagaaggagaucugccccaagcucgccgaguaccgcaacugguccaagccccagugcgacaucaccggcuucgcccccuucuccaaggacaacuccauccgccucuccgccggcggcgacaucugggucacccgcgagcccuacgucuccugcgaccccgaccgcugcuaccaguucgcccucggccagggcaccacccucaacaacguccacuccaacaacaccguccgcgaccgcacccccuaccgcacccuccucaugaacgagcucggcguccccuuccaccucggcaccaagcaggucugcaucgccugguccuccuccuccugccacgacggcaaggccuggcuccacgucugcaucaccggcgacgacaagaacgccaccgccuccuucaucuacaacggccgccucgucgacuccgucgucuccugguccaaggagauccuccgcacccaggaguccgagugcgucugcaucaacggcaccugcaccgucgucaugaccgacggcuccgccuccggcaaggccgacaccaagauccucuucaucgaggagggcaagaucguccacaccuccacccucuccggcuccgcccagcacgucgaggagugcuccugcuacccccgcuaccccggcguccgcugcgucugccgcgacaacuggaagggcuccaaccgccccaucgucgacaucaacaucaaggaccacuccaucgucuccuccuacgucugcuccggccucgucggcgacaccccccgcaagaacgacuccuccuccuccucccacugccucgaccccaacaacgaggagggcggccacggcgucaagggcugggccuucgacgacggcaacgacgucuggaugggccgcaccaucuccgagaagucccgccucggcuacgagaccuucaaggucaucgagggcugguccaaccccaaguccaagcuccagaucaaccgccaggucaucgucgaccgcggcaaccgcuccggcuacuccggcaucuucuccgucgagggcaaguccugcaucaaccgcugcuucuacgucgagcucauccgcggccgcaaggaggagaccgagguccucuggaccuccaacuccaucgucgucuucugcggcaccuccggcaccuacggcaccggcuccuggcccgacggcgccgacaucaaccucaugcccaucuga

SEQ ID NO: 116495 - RNA, 1410 nt, Artificial Sequence; identical to SEQ ID NO: 112635
  derived and/or modified CDS sequence (opt2) from neuraminidase__InfluenzaA__AEA03828

SEQ ID NO: 116496 - RNA, 1410 nt, Artificial Sequence; identical to SEQ ID NO: 112635
  derived and/or modified CDS sequence (opt2) from neuraminidase__InfluenzaA__AEA03838

SEQ ID NO: 116497 - RNA, 1410 nt, Artificial Sequence; identical to SEQ ID NO: 115791
  derived and/or modified CDS sequence (opt2) from neuraminidase__InfluenzaA__AEA03849

SEQ ID NO: 116498 - RNA, 1410 nt, Artificial Sequence; identical to SEQ ID NO: 112635
  derived and/or modified CDS sequence (opt2) from neuraminidase__InfluenzaA__AEA03860

SEQ ID NO: 116499 - RNA, 1410 nt, Artificial Sequence
  derived and/or modified CDS sequence (opt2) from neuraminidase__InfluenzaA__AEA03871
augaaccccaaccagaagaucaucaccaucggcuccgucucccucaccaucuccaccaucugcuucuucaugcagaucgccauccucaucaccaccgucacccuccacuucaagcaguacgaguucaacuccccccccaacaaccaggucaugcucugcgagcccaccaucaucgagcgcaacaucaccgagaucgucuaccucaccaacaccaccaucgagaaggagaucugccccaagcucgccgaguaccgcaacugguccaagccccagugcgacaucaccggcuucgcccccuucuccaaggacaacuccauccgccucuccgccggcggcgacaucugggucacccgcgagcccuacgucuccugcgaccccgacaagugcuaccaguucgcccucggccagggcaccacccucaacaacguccacuccaacaacaccguccgcgaccgcacccccuaccgcacccuccucaugaacgagcucggcguccccuuccaccucggcaccaagcaggucugcaucgccugguccuccuccuccugccacgacggcaaggccuggcuccacgucugcaucaccggcgacgacaagaacgccaccgccuccuucaucuacaacggccgccucgucgacuccgucgucuccugguccaaggagauccuccgcacccaggaguccgagugcgucugcaucaacggcaccugcaccgucgucaucaccgacggcuccgccuccggcaaggccgacaccaagauccucuucaucgaggagggcaagaucguccacaccuccacccucuccggcuccgcccagcacgucgaggagugcuccugcuacccccgcuaccccggcguccgcugcgucugccgcgacaacuggaagggcuccaaccgccccaucgucgacaucaacaucaaggaccacuccaucgucuccuccuacgucugcuccggccucgucggcgacaccccccgcaagaacgacuccuccuccuccucccacugccucgaccccaacaacgaggagggcggccacggcgucaagggcugggccuucgacgacggcaacgacgucuggaugggccgcaccaucuccgagaagucccgccucggcuacgagaccuucaaggucaucgagggcugguccaaccccaaguccaagcuccagaucaaccgccaggucaucgucgaccgcggcaaccgcuccggcuacuccggcaucuucuccgucgagggcaaguccugcaucaaccgcugcuucuacgucgagcucauccgcggccgcaaggaggagaccgagguccucuggaccuccaacuccaucgucgucuucugcggcaccuccggcaccuacggcaccggcuccuggcccgacggcgccgacaucaaccucaugcccaucuga

SEQ ID NO: 116500 - RNA, 1410 nt, Artificial Sequence; identical to SEQ ID NO: 112635
  derived and/or modified CDS sequence (opt2) from neuraminidase__InfluenzaA__AEA03879

SEQ ID NO: 116501 - RNA, 1410 nt, Artificial Sequence
  derived and/or modified CDS sequence (opt2) from neuraminidase__InfluenzaA__AEA03889
augaaccccaaccagaagaucaucaccaucggcuccgucucccucaccaucuccaccaucugcuucuucaugcagaucgccauccucaucaccaccgucacccuccacuucaagcaguacgaguucaacuccccccccaacaaccaggucaugcucugcgagcccaccaucaucgagcgcaacaucaccgagaucgucuaccucaccaacaccaccaucgagaaggagaucugccccaagcucgccgaguaccgcaacugguccaagccccagugcgacaucaccggcuucgcccccuucuccaaggacaacuccauccgccucuccgccggcggcgacaucugggucacccgcgagcccuacgucuccugcgaccccgacaagugcuaccaguucgcccucggccagggcaccacccucaacaacguccacuccaacaacaagguccgcgaccgcacccccuaccgcacccuccucaugaacgagcucggcguccccuuccaccucggcaccaagcaggucugcaucgccugguccuccuccuccugccacgacggcaaggccuggcuccacgucugcaucaccggcgacgacaagaacgccaccgccuccuucaucuacaacggccgccucgucgacuccgucgucuccugguccaaggagauccuccgcacccaggaguccgagugcgucugcaucaacggcaccugcaccgucgucaugaccgacggcuccgccuccggcaaggccgacaccaagauccucuucaucgaggagggcaagaucguccacaccuccacccucuccggcuccgcccagcacgucgaggagugcuccugcuacccccgcuaccccggcguccgcugcgucugccgcgacaacuggaagggcuccaaccgccccaucgucgacaucaacaucaaggaccacuccaucgucuccuccuacgucugcuccggccucgucggcgacaccccccgcaagaacgacuccuccuccuccucccacugccucgaccccaacaacgaggagggcggccacggcgucaagggcugggccuucgacgacggcaacgacgucuggaugggccgcaccaucuccgagaagucccgccucggcuacgagaccuucaaggucaucgagggcugguccaaccccaaguccaagcuccagaucaaccgccaggucaucgucgaccgcggcaaccgcuccggcuacuccggcaucuucuccgucgagggcaaguccugcaucaaccgcugcuucuacgucgagcucauccgcggccgcaaggaggagaccgagguccucuggaccuccaacuccaucgucgucuucugcggcaccuccggcaccuacggcaccggcuccuggcccgacggcgccgacaucaaccucaugcccaucuga

SEQ ID NO: 116502 - RNA, 1410 nt, Artificial Sequence
  derived and/or modified CDS sequence (opt2) from neuraminidase__InfluenzaA__AEA03898
augaaccccaaccagaagaucaucaccaucggcuccgucucccucaccaucuccaccaucugcuucuucaugcagaucgccauccucaucaccaccgucacccuccacuucaagcaguacgaguucaacuccccccccaacaaccaggucaugcucugcgagcccaccaucaucgagcgcaacaucaccgagaucgucuaccucaccaacaccaccaucgagaaggagaucugccccaagcucgccgaguaccgcaacugguccaagccccagugcgacaucaccggcuucgcccccuucuccaaggacaacuccauccgccucuccgccggcggcgacaucugggucacccgcgagcccuacgucuccugcgaccccgacaagugcuaccaguucgcccucggccagggcaccacccucaacaacguccacuccaacaacaccguccgcgaccgcacccccuaccgcacccuccucaugaacgagcucggcguccccuuccaccucggcaccaagcaggucugcaucgccugguccuccuccuccugccacgacggcaaggccuggcuccacgucugcaucaccggcgacgacaagaacgccaccgccuccuucaucuacaacggccgccucgucgacuccgucgucuccugguccaaggagauccuccgcacccaggaguccgagugcgucugcaucaacggcaccugcaccgucgucaugaccgacggcuccgccuccggcaaggccgacaccaagauccucuucaucgaggagggcaagaucguccacaccuccacccucuccggcuccgcccagcacgucgaggagugcuccugcuacccccgcuaccccggcguccgcugcgucugccgcgacaacuggaagggcuccaaccgccccaucgucgacaucaacaucaaggaccacuccaucgucuccuccuacgucugcuccggccucgucggcgacaccccccgcaaguccgacuccuccuccuccucccacugccucgaccccaacaacgaggagggcggccacggcgucaagggcugggccuucgacgacggcaacgacgucuggaugggccgcaccaucuccgagaagucccgccucggcuacgagaccuucaaggucaucgagggcugguccaaccccaaguccaagcuccagaucaaccgccaggucaucgucgaccgcggcaaccgcuccggcuacuccggcaucuucuccgucgagggcaaguccugcaucaaccgcugcuucuacgucgagcucauccgcggccgcaaggaggagaccgagguccucuggaccuccaacuccaucgucgucuucugcggcaccuccggcaccuacggcaccggcuccuggcccgacggcgccgacaucaaccucaugcccaucuga

SEQ ID NO: 116503 - RNA, 1410 nt, Artificial Sequence; identical to SEQ ID NO: 112635
  derived and/or modified CDS sequence (opt2) from neuraminidase__InfluenzaA__AEA03909

SEQ ID NO: 116504 - RNA, 1410 nt, Artificial Sequence
  derived and/or modified CDS sequence (opt2) from neuraminidase__InfluenzaA__AEA03924
augaaccccaaccagaagaucaucaccaucggcuccgucucccucaccaucuccaccaucugcuucuucaugcagaucgccauccucaucaccaccgucacccuccacuucaagcaguacgaguucaacuccccccccaacaaccaggucaugcucugcgagcccaccaucaucgagcgcaacaucaccgagaucgucuaccucaccaacaccaccaucgagaaggagaucugccccaagcucgccgaguaccgcaacugguccaagccccagugcgacaucaccggcuucgcccccuucuccaaggacaacuccauccgccucuccgccggcggcgacaucugggucacccgcgagcccuacgucuccugcgaccccgacaagugcuaccaguucgcccucggccagggcaccacccucaacaacguccacuccaacaacaccguccgcgaccgcacccccuaccgcacccuccucaugaacgagcucggcguccccuuccaccucggcaccaagcaggucugcaucgccugguccuccuccuccugccacgacggcaaggccuggcuccacgucugcaucaccggcgacgacaagaacgccaccgccuccuucaucuacaacggccgccucgucgacuccgucgucuccugguccaaggagauccuccgcacccaggaguccgagugcgucugcaucaacggcaccugcaccgucgucaugaccgacggcuccgccuccggcaaggccgacaccaagauccucuucaucgaggagggcaagaucauccacaccuccacccucuccggcuccgcccagcacgucgaggagugcuccugcuacccccgcuaccccggcguccgcugcgucugccgcgacaacuggaagggcuccaaccgccccaucgucgacaucaacaucaaggaccacuccaucgucuccuccuacgucugcuccggccucgucggcgacaccccccgcaagaacgacuccuccuccuccucccacugccucgaccccaacaacgaggagggcggccacggcgucaagggcugggccuucgacgacggcaacgacgucuggaugggccgcaccaucuccgagaagucccgccucggcuacgagaccuucaaggucaucgagggcugguccaaccccaaguccaagcuccagaucaaccgccaggucaucgucgaccgcggcaaccgcuccggcuacuccggcaucuucuccgucgagggcaaguccugcaucaaccgcugcuucuacgucgagcucauccgcggccgcaaggaggagaccgagguccucuggaccuccaacuccaucgucgucuucugcggcaccuccggcaccuacggcaccggcuccuggcccgacggcgccgacaucaaccucaugcccaucuga

SEQ ID NO: 116505 - RNA, 1410 nt, Artificial Sequence; identical to SEQ ID NO: 112635
  derived and/or modified CDS sequence (opt2) from neuraminidase__InfluenzaA__AEA03935

SEQ ID NO: 116506 - RNA, 1410 nt, Artificial Sequence
  derived and/or modified CDS sequence (opt2) from neuraminidase__InfluenzaA__AEA03946
augaaccccaaccagaagaucaucaccaucggcuccgucucccucaccaucuccaccaucugcuucuucaugcagaucgccauccucaucaccaccgucacccuccacuucaagcaguacgaguucaacuccccccccaacaaccaggucaugcucugcgagcccaccaucaucgagcgcaacaucaccgagaucgucuaccucaccaacaccaccaucgagaaggagaucugccccaagcucgccgaguaccgcaacugguccaagccccagugcgacaucaccggcuucgcccccuucuccaaggacaacuccauccgccucuccgccggcggcgacaucugggucacccgcgagcccuacgucuccugcgaccccgacaagugcuaccaguucgcccucggccagggcaccacccucaacaacguccacuccaacaacaccguccgcgaccgcacccccuaccgcacccuccucaugaacgagcucggcguccccuuccaccucggcaccaagcaggucugcaucgccugguccuccuccuccugccacgacggcaaggccuggcuccacgucugcaucaccggcgacgacaagaacgccaccgccuccuucaucuacaacggccgccucgucgacuccgucgucuccugguccgaggagauccuccgcacccaggaguccgagugcgucugcaucaacggcaccugcaccgucgucaugaccgacggcuccgccuccggcaaggccgacaccaagauccucuucaucgaggagggcaagaucguccacaccuccacccucuccggcuccgcccagcacgucgaggagugcuccugcuacccccgcuaccccggcguccgcugcgucugccgcgacaacuggaagggcuccaaccgccccaucgucgacaucaacaucaaggaccacuccaucgucuccuccuacgucugcuccggccucgucggcgacaccccccgcaagaacgacuccuccuccuccucccacugccucgaccccaacaacgaggagggcggccacggcgucaagggcugggccuucgacgacggcaacgacgucuggaugggccgcaccaucuccgagaagucccgccucggcuacgagaccuucaaggucaucgagggcugguccaaccccaaguccaagcuccagaucaaccgccaggucaucgucgaccgcggcaaccgcuccggcuacuccggcaucuucuccgucgagggcaaguccugcaucaaccgcugcuucuacgucgagcucauccgcggccgcaaggaggagaccgagguccucuggaccuccaacuccaucgucgucuucugcggcaccuccggcaccuacggcaccggcuccuggcccgacggcgccgacaucaaccucaugcccaucuga

SEQ ID NO: 116507 - RNA, 1410 nt, Artificial Sequence
  derived and/or modified CDS sequence (opt2) from neuraminidase__InfluenzaA__AEA03957
augaaccccaaccagaagaucaucaccaucggcuccgucucccucaccaucuccaccaucugcuucuucaugcagaucgccauccucaucaccaccgucacccuccacuucaagcaguacgaguucaacuccccccccaacaaccaggucaugcucugcgagcccaccaucaucgagcgcaacaucaccgagaucgucuaccucaccaacaccaccaucgagaaggagaucugccccaagcucgccgaguaccgcaacugguccaagccccagugcgacaucaccggcuucgcccccuucuccaaggacaacuccauccgccucuccgccggcggcgacaucugggucacccgcgagcccuacgucuccugcgaccccgacaagugcuaccaguucgcccucggccagggcaccacccucaacaacguccacuccaacaacaccguccgcgaccgcacccccuaccgcacccuccucaugaacgagcucggcguccccuuccaccucggcaccaagcaggucugcaucgccugguccuccuccuccugccacgacggcaaggccuggcuccacgucugcaucaccggcgacgacaagaacgccaccgccuccuucaucuacaacggccgccucgucgacuccgucgucuccugguccaaggagauccuccgcacccaggaguccgagugcgucugcaucaacggcaccugcaccgucgucaugaccgacggcuccgccuccggcaaggccgacaccaagauccucuucaucgaggagggcaagaucguccacaccuccacccucuccggcuccgcccagcacgucgaggagugcuccugcuacccccgcuaccccggcguccgcugcgucugccgcgacaacuggaagggcuccaaccgccccaucgucgacaucaacaucaaggaccacuccaucgucuccuccuacgucugcuccggccucgucggcgacaccccccgcaagaacgacuccuccuccuccucccacugccucgaccccaacaacgaggagggcggccacggcgucaagggcugggccuucgacgacggcaacgacgucuggaugggccgcaccaucuccgagaagucccgccucggcuacgagaccuucaaggucaucgagggcugguccaacuccaaguccaagcuccagaucaaccgccaggucaucgucgaccgcggcaaccgcuccggcuacuccggcaucuucuccgucgagggcaaguccugcaucaaccgcugcuucuacgucgagcucauccgcggccgcaaggaggagaccgagguccucuggaccuccaacuccaucgucgucuucugcggcaccuccggcaccuacggcaccggcuccuggcccgacggcgccgacaucaaccucaugcccaucuga

SEQ ID NO: 116508 - RNA, 1410 nt, Artificial Sequence; identical to SEQ ID NO: 112635
  derived and/or modified CDS sequence (opt2) from neuraminidase__InfluenzaA__AEA03989

SEQ ID NO: 116509 - RNA, 1410 nt, Artificial Sequence; identical to SEQ ID NO: 115791
  derived and/or modified CDS sequence (opt2) from neuraminidase__InfluenzaA__AEA04000

SEQ ID NO: 116510 - RNA, 1410 nt, Artificial Sequence; identical to SEQ ID NO: 112635
  derived and/or modified CDS sequence (opt2) from neuraminidase__InfluenzaA__AEA04011

SEQ ID NO: 116511 - RNA, 1410 nt, Artificial Sequence; identical to SEQ ID NO: 115791
  derived and/or modified CDS sequence (opt2) from neuraminidase__InfluenzaA__AEA04022

SEQ ID NO: 116512 - RNA, 1410 nt, Artificial Sequence; identical to SEQ ID NO: 112635
  derived and/or modified CDS sequence (opt2) from neuraminidase__InfluenzaA__AEA04033

SEQ ID NO: 116513 - RNA, 1410 nt, Artificial Sequence; identical to SEQ ID NO: 112635
  derived and/or modified CDS sequence (opt2) from neuraminidase__InfluenzaA__AEA04044

SEQ ID NO: 116514 - RNA, 1410 nt, Artificial Sequence; identical to SEQ ID NO: 112635
  derived and/or modified CDS sequence (opt2) from neuraminidase__InfluenzaA__AEA04049

SEQ ID NO: 116515 - RNA, 1410 nt, Artificial Sequence; identical to SEQ ID NO: 112635
  derived and/or modified CDS sequence (opt2) from neuraminidase__InfluenzaA__AEA04059

SEQ ID NO: 116516 - RNA, 1410 nt, Artificial Sequence; identical to SEQ ID NO: 112635
  derived and/or modified CDS sequence (opt2) from neuraminidase__InfluenzaA__AEA04070

SEQ ID NO: 116517 - RNA, 1410 nt, Artificial Sequence; identical to SEQ ID NO: 115791
  derived and/or modified CDS sequence (opt2) from neuraminidase__InfluenzaA__AEA04081

SEQ ID NO: 116518 - RNA, 1410 nt, Artificial Sequence; identical to SEQ ID NO: 112635
  derived and/or modified CDS sequence (opt2) from neuraminidase__InfluenzaA__AEA04092

SEQ ID NO: 116519 - RNA, 1410 nt, Artificial Sequence; identical to SEQ ID NO: 112635
  derived and/or modified CDS sequence (opt2) from neuraminidase__InfluenzaA__AEA04103

SEQ ID NO: 116520 - RNA, 1410 nt, Artificial Sequence; identical to SEQ ID NO: 112635
  derived and/or modified CDS sequence (opt2) from neuraminidase__InfluenzaA__AEA04125

SEQ ID NO: 116521 - RNA, 1410 nt, Artificial Sequence; identical to SEQ ID NO: 112635
  derived and/or modified CDS sequence (opt2) from neuraminidase__InfluenzaA__AEA04133

SEQ ID NO: 116522 - RNA, 1410 nt, Artificial Sequence
  derived and/or modified CDS sequence (opt2) from neuraminidase__InfluenzaA__AEA04144
augaaccccaaccagaagaucaucaccaucggcuccgucucccucaccaucuccaccaucugcuucuucaugcagaucgccauccucaucaccaccgucacccuccacuucaagcaguacgaguucaacuccccccccaacaaccaggucaugcucugcgagcccaccaucaucgagcgcaacaucaccgagaucgucuaccucaccaacaccaccaucgagaaggagaucugccccaagcucgccgaguaccgcaacugguccaagccccagugcgacaucaccggcuucgcccccuucuccaaggacaacuccauccgccucuccgccggcggcgacaucugggucacccgcgagcccuacgucuccugcgaccccgacaagugcuaccaguucgcccucggccagggcaccacccucaacaacguccacuccaacaacaccguccgcgaccgcacccccuaccgcacccuccucaugaacgagcucggcguccccuuccaccucggcaccaagcaggucugcaucgccugguccuccuccuccugccacgacggcaaggccuggcuccacgucugcaucaccggcgacgacaagaacgccaccgccuccuucaucuacaacggccgccucgucgacuccgucgucuccugguccaaggagauccuccgcacccaggaguccgagugcgucugcaucaacggcaccugcaccgucgucaugaccgacggcuccgccuccggcaaggccgacaccaagauccucuucaucgaggagggcaagaucauccacaccuccacccucuccggcuccgcccagcacgucgaggagugcuccugcuacccccgcuaccccggcguccgcugcgucugccgcgacaacuggaagggcuccaaccgccccaucgucgacaucaacaucaaggaccacuccaucgucuccuccuacgucugcuccggccucgucggcgacaccccccgcaagaacgacuccuccuccuccucccacugccucgaccccaacaacgaggagggcggccacggcgucaagggcugggccuucgacgacggcaacgacgucuggaugggccgcaccaucuccgagaagucccgccucggcuacgagaccuucaaggucaucgagggcugguccaaccccaaguccaagcuccagaucaaccgccaggucaucgucgaccgcggcaaccgcuccggcuacuccggcaucuucuccgucgagggcaaguccugcaucaaccgcugcuucuacgucgagcucauccgcggccgcaaggaggagaccgagguccucuggaccuccaacuccaucaucgucuucugcggcaccuccggcaccuacggcaccggcuccuggcccgacggcgccgacaucaaccucaugcccaucuga

SEQ ID NO: 116523 - RNA, 1410 nt, Artificial Sequence; identical to SEQ ID NO: 112635
  derived and/or modified CDS sequence (opt2) from neuraminidase__InfluenzaA__AEA04155

SEQ ID NO: 116524 - RNA, 1410 nt, Artificial Sequence; identical to SEQ ID NO: 112635
  derived and/or modified CDS sequence (opt2) from neuraminidase__InfluenzaA__AEA04166

SEQ ID NO: 116525 - RNA, 1410 nt, Artificial Sequence
  derived and/or modified CDS sequence (opt2) from neuraminidase__InfluenzaA__AEA04177
augaaccccaaccagaagaucaucaccaucggcuccgucucccucaccaucuccaccaucugcuucuucaugcagaucgccauccucaucaccaccgucacccuccacuucaagcaguacgaguucaacuccccccccaacaaccaggucaugcucugcgagcccaccaucaucgagcgcaacaucaccgagaucgucuaccucaccaacaccaccaucgagaaggagaucugccccaagcucgccgaguaccgcaacugguccaagccccagugcgacaucaccggcuucgcccccuucuccaaggacaacuccauccgccucuccgccggcggcgacaucugggucacccgcgagcccuacgucuccugcgaccccgacaagugcuaccaguucgcccucggccagggcaccacccucaacaacguccacuccaacaacaccguccgcaaccgcacccccuaccgcacccuccucaugaacgagcucggcguccccuuccaccucggcaccaagcaggucugcaucgccugguccuccuccuccugccacgacggcaaggccuggcuccacgucugcaucaccggcgacgacaagaacgccaccgccuccuucaucuacaacggccgccucgucgacuccgucgucuccugguccaaggagauccuccgcacccaggaguccgagugcgucugcaucaacggcaccugcaccgucgucaugaccgacggcuccgccuccggcaaggccgacaccaagauccucuucaucgaggagggcaagaucguccacaccuccacccucuccggcuccgcccagcacgucgaggagugcuccugcuacccccgcuaccccggcguccgcugcgucugccgcgacaacuggaagggcuccaaccgccccaucgucgacaucaacaucaaggaccacuccaucgucuccuccuacgucugcuccggccucgucggcgacaccccccgcaagaacgacuccuccuccuccucccacugccucgaccccaacaacgaggagggcggccacggcgucaagggcugggccuucgacgacggcaacgacgucuggaugggccgcaccaucuccgagaagucccgccucggcuacgagaccuucaaggucaucgagggcugguccaaccccaaguccaagcuccagaucaaccgccaggucaucgucgaccgcggcaaccgcuccggcuacuccggcaucuucuccgucgagggcaaguccugcaucaaccgcugcuucuacgucgagcucauccgcggccgcaaggaggagaccgagguccucuggaccuccaacuccaucgucgucuucugcggcaccuccggcaccuacggcaccggcuccuggcccgacggcgccgacaucaaccucaugcccaucuga

SEQ ID NO: 116526 - RNA, 1410 nt, Artificial Sequence; identical to SEQ ID NO: 112635
  derived and/or modified CDS sequence (opt2) from neuraminidase__InfluenzaA__AEA04188

SEQ ID NO: 116527 - RNA, 1410 nt, Artificial Sequence; identical to SEQ ID NO: 113628
  derived and/or modified CDS sequence (opt2) from neuraminidase__InfluenzaA__AEA04199

SEQ ID NO: 116528 - RNA, 1410 nt, Artificial Sequence; identical to SEQ ID NO: 112635
  derived and/or modified CDS sequence (opt2) from neuraminidase__InfluenzaA__AEA04210

SEQ ID NO: 116529 - RNA, 1410 nt, Artificial Sequence; identical to SEQ ID NO: 113628
  derived and/or modified CDS sequence (opt2) from neuraminidase__InfluenzaA__AEA04229

SEQ ID NO: 116530 - RNA, 1410 nt, Artificial Sequence; identical to SEQ ID NO: 113628
  derived and/or modified CDS sequence (opt2) from neuraminidase__InfluenzaA__AEA04239

SEQ ID NO: 116531 - RNA, 1410 nt, Artificial Sequence
  derived and/or modified CDS sequence (opt2) from neuraminidase__InfluenzaA__AEA04250
augaaccccaaccagaagaucaucaccaucggcuccgucucccucaccaucuccaccaucugcuucuucaugcagaccgccauccucaucaccaccgucacccuccacuucaagcagugcgaguucaacuccccccccaacaaccaggucaugcucugcgagcccaccaucaucgagcgcaacaucaccgagaucgucuaccucaccaacaccaccaucgagaaggagaucugccccaagcucgccgaguaccgcaacugguccaagccccagugcgacaucaccggcuucgcccccuucuccaaggacaacuccauccgccucuccgccggcggcgacaucugggucacccgcgagcccuacgucuccugcgaccccgacaagugcuaccaguucgcccucggccagggcaccacccucaacaacguccacuccaacaacaccguccgcguccgcacccccuaccgcacccuccucaugaacgagcucggcguccccuuccaccucggcaccaagcaggucugcaucgccugguccuccuccuccugccacgacggcaaggccuggcuccacgucugcaucaccggcgacgacaagaacgccaccgccuccuucaucuacaacggccgccucgucgacuccgucgucuccugguccaaggagauccuccgcacccaggaguccgagugcgucugcaucaacggcaccugcaccgucgucaugaccgacggcuccgccuccggcaaggccgacaccaagauccucuucaucgaggagggcaagaucguccacaccuccacccucuccggcuccgcccagcacgucgaggagugcuccugcuacccccgcuaccccggcguccgcugcgucugccgcgacaacuggaagggcuccaaccgccccaucgucgacaucaacaucaaggaccacuccaucgucuccuccuacgucugcuccggccucgucggcgacaccccccgcaagaacgacuccuccuccuccucccacugccucgaccccaacaacgaggagggcggccacggcgucaagggcugggccuucgacgacggcaacgacgucuggaugggccgcaccaucuccgagaagucccgccucggcuacgagaccuucaaggucaucgagggcugguccaaccccaaguccaagcuccagaucaaccgccaggucaucgucgaccgcggcaaccgcuccggcuacuccggcaucuucuccgucgagggcaaguccugcaucaaccgcugcuucuacgucgagcucauccgcggccgcaaggaggagaccgagguccucuggaccuccaacuccaucgucgucuucugcggcaccuccggcaccuacggcaccggcuccuggcccgacggcgccgacaucaaccucaugcccaucuga

SEQ ID NO: 116532 - RNA, 1410 nt, Artificial Sequence; identical to SEQ ID NO: 113628
  derived and/or modified CDS sequence (opt2) from neuraminidase__InfluenzaA__AEA04260

SEQ ID NO: 116533 - RNA, 1410 nt, Artificial Sequence
  derived and/or modified CDS sequence (opt2) from neuraminidase__InfluenzaA__AEA04268
augaaccccaaccagaagaucaucaccaucggcuccgucucccucaccaucuccaccaucugccucuucaugcagaccgccauccucaucaccaccgucacccuccacuucaagcagugcgaguucaacuccccccccaacaaccaggccaugcucugcgagcccaccaucaucgagcgcaacaucaccgagaucgucuaccucaccaacaccaccaucgagaaggagaucugccccaagcucgccgaguaccgcaacugguccaagccccagugcgacaucaccggcuucgcccccuucuccaaggacaacuccauccgccucuccgccggcggcgacaucugggucacccgcgagcccuacgucuccugcgaccccgacaagugcuaccaguucgcccucggccagggcaccacccucaacaacguccacuccaacaacaccguccgcgaccgcacccccuaccgcacccuccucaugaacgagcucggcguccccuuccaccucggcaccaagcaggucugcaucgccugguccuccuccuccugccacgacggcaaggccuggcuccacgucugcaucaccggcgacgacaagaacgccaccgccuccuucaucuacaacggccgccucgucgacuccgucgucuccugguccaaggagauccuccgcacccaggaguccgagugcgucugcaucaacggcaccugcaccgucgucaugaccgacggcuccgccuccggcaaggccgacaccaagauccucuucaucgaggagggcaagaucguccacaccuccacccucuccggcuccgcccagcacgucgaggagugcuccugcuacccccgcuaccccggcguccgcugcgucugccgcgacaacuggaagggcuccaaccgccccaucgucgacaucaacaucaaggaccacuccaucgucuccuccuacgucugcuccggccucgucggcgacaccccccgcaagaacgacuccuccuccuccucccacugccucgaccccaacaacgaggagggcggccacggcgucaagggcugggccuucgacgacggcaacgacgucuggaugggccgcaccaucuccgagaagucccgccucggcuacgagaccuucaaggucaucgagggcugguccaaccccaaguccaagcuccagaucaaccgccaggucaucgucgaccgcggcaaccgcuccggcuacuccggcaucuucuccgucgagggcaaguccugcaucaaccgcugcuucuacgucgagcucauccgcggccgcaaggaggagaccgagguccucuggaccuccaacuccaucgucgucuucugcggcaccuccggcaccuacggcaccggcuccuggcccgacggcgccgacaucaaccucaugcccaucuga

SEQ ID NO: 116534 - RNA, 1410 nt, Artificial Sequence; identical to SEQ ID NO: 113628
  derived and/or modified CDS sequence (opt2) from neuraminidase__InfluenzaA__AEA04276

SEQ ID NO: 116535 - RNA, 1410 nt, Artificial Sequence; identical to SEQ ID NO: 113628
  derived and/or modified CDS sequence (opt2) from neuraminidase__InfluenzaA__AEA04287

SEQ ID NO: 116536 - RNA, 1410 nt, Artificial Sequence; identical to SEQ ID NO: 113628
  derived and/or modified CDS sequence (opt2) from neuraminidase__InfluenzaA__AEA04298

SEQ ID NO: 116537 - RNA, 1410 nt, Artificial Sequence
  derived and/or modified CDS sequence (opt2) from neuraminidase__InfluenzaA__AEA04307
augaaccccaaccagaagaucaucaccaucggcuccgucucccucaccaucuccaccaucugcuucuucaugcagaccgccauccucaucaccaccgucacccuccacuucaagcagugcgaguucaacuccccccccaacaaccaggucaugcucugcgagcccaccaucaucgagcgcaacaucaccgagaucgucuaccucaccaacaccaccaucgagaaggagaucugccccaagcucgccgaguaccgcaacugguccaagccccagugcgacaucaccggcuucgcccccuucuccaaggacaacuccauccgccucuccgccggcggcgacaucugggucacccgcgagcccuacgucuccugcgaccccgacaagugcuaccaguucgcccucggccagggcaccacccucaacaacguccacuccaacaacaccguccgcgaccgcacccccuaccgcacccuccucaugaacgagcucggcguccccuuccaccucggcaccaagcaggucugcaucgccugguccuccuccuccugccacgacggcaaggccuggcuccacgucugcaucaccggcgacgacaagaacgccaccgccuccuucaucuacaacggccgccucgucgacuccgucgucuccugguccaaggagauccuccgcacccaggaguccgagugcgucugcaucaacggcaccugcaccgucgucaugaccgacggcuccgccuccggcaaggccgacaccaagauccucuucaucgaggagggcaagaucguccacaccuccacccucuccggcuccgcccagcacgucgaggagugcuccugcuacccccgcuaccccgacguccgcugcgucugccgcgacaacuggaagggcuccaaccgccccaucgucgacaucaacaucaaggaccacuccaucgucuccuccuacgucugcuccggccucgucggcgacaccccccgcaagaacgacuccuccuccuccucccacugccucgaccccaacaacgaggagggcggccacggcgucaagggcugggccuucgacgacggcaacgacgucuggaugggccgcaccaucuccgagaagucccgccucggcuacgagaccuucaaggucaucgagggcugguccaaccccaaguccaagcuccagaucaaccgccaggucaucgucgaccgcggcaaccgcuccggcuacuccggcaucuucuccgucgagggcaaguccugcaucaaccgcugcuucuacgucgagcucauccgcggccgcaaggaggagaccgagguccucuggaccuccaacuccaucgucgucuucugcggcaccuccggcaccuacggcaccggcuccuggcccgacggcgccgacaucaaccucaugcccaucuga

SEQ ID NO: 116538 - RNA, 1395 nt, Artificial Sequence
  derived and/or modified CDS sequence (opt2) from neuraminidase__InfluenzaA__AEA04357
augaaccccaaccagaagaucaucaccaucggcuccaucugcauggucgucggcaucaucucccucauccuccagaucggcaacaucgucuccaucuggaucucccacuccauccagaccggcaaccagaaccacaccggcaccugcgaccaguccaucaucaccuacaagaacuccaccugggucaaccagaccuacgucaacgucgucgccggcaaggacaccaccuccgucauccucgccggcaacuccucccucugccccauccgcggcugggccaucuacuccaaggacaacggcguccgcaucggcuccaagggcgacgucuucgucauccgcgagcccuucaucuccugcucccaccucgagugccgcaccuucuuccucacccagggcgcccuccucaacgacaagcacuccaacggcaccgucaaggaccgcucccccuaccgcgcccucauguccugccccgucggcgaggcccccucccccuacaacucccgcuucgaguccgucgccugguccgccuccgccugccacgacggcaugggcuggcucaccaucggcaucuccggccccgacgacggcgccgucgccguccucaaguacaacggcaucaucaccgagaccaucaaguccuggcgcaaggagauccuccgcacccaggaguccgagugcgucugcgucaacggcuccugcuucaccaucaugaccgacggccccuccggcggccccgccuccuacaagaucuucaagaucgagaagggcaaggucaccaaguccaucgagcucgacgcccccaacucccacuacgaggagugcuccugcuaccccgacaccuccaaggucaugugcgucugccgcgacaacuggcacggcuccaaccgccccugggucuccuucgaccagaaccucgacuaccagaugggcuacaucugcuccggcgucuucggcgacaacccccgccccaaggacggcaagggcuccugcggccccgucuacgucgacggcgccaacggcgucaagggcuucuccuacaaguacggcaacggcgucuggaucggccgcaccaaguccaucuccucccgccagggcuucgagaugaucugggaccccaacggcuggaccgagaccgacuccaacuucuucaccaagcaggacgucgucgccgucaccgacugguccggcuacuccggcuccuucguccagcaccccgagcucaccggccucgacugcaugcgccccugcuucugggucgagcucauccgcggccgccccaaggagaacaccaucuggaccuccggcuccuccaucuccuucugcggcgucaacuccgacaccgucgacugguccuggcccgacggcgccgagcuccccuucaccaucgacaaguga

SEQ ID NO: 116539 - RNA, 1410 nt, Artificial Sequence; identical to SEQ ID NO: 112503
  derived and/or modified CDS sequence (opt2) from neuraminidase__InfluenzaA__AEA04368

SEQ ID NO: 116540 - RNA, 1410 nt, Artificial Sequence
  derived and/or modified CDS sequence (opt2) from neuraminidase__InfluenzaA__AEA04379
augaaccccaaccagaagaccaucaccaucggcuccgucucccucaccaucgagaccgucugcuuccucaugcagaucgccauccucgccaccaccgucacccuccacuucaagcagcacgagugcgacucccccgccuccaaccaggucaugcccugcgagcccaucaucaucgagcgcaacaucaccgagaucgucuaccucaacaacaccaccaucgagaaggagaucugccccgaggucgucgaguaccgcaacugguccaagccccagugccagaucaccggcuucgcccccuucuccaaggacaacuccauccgccucuccgccggcggcgacaucugggucacccgcgagcccuacgucuccugcgaccccggcaagugcuaccaguucgcccucggccagggcaccacccucgacaacaagcacuccaacggcaccauccacgaccgcaucccccaccgcacccuccucaugaacgagcucggcguccccuuccaccucggcaccaagcaggucugcgucgccugguccuccuccuccugccacgacggcaaggccuggcuccacgucugcgucaccggcgacgaccgcaacgccaccgccuccuucaucuacgacggccgccucgucgacuccaucggcuccuggucccagaacauccuccgcacccaggaguccgagugcgucugcaucaacggcaccugcaccgucgucaugaccgacggcuccgccuccggccgcgccgacacccgcauccucuucaucaaggagggcaagaucguccacaucuccccccucuccggcuccgcccagcacaucgaggagugcuccugcuacccccgcuaccccgacguccgcugcaucugccgcgacaacuggaagggcuccaaccgccccgucaucgacaucaacauggaggacuacuccaucgacuccuccuacgucugcuccggccucgucggcgacaccccccgcaacgacgacuccuccuccaacuccaagucccgcgaccccaacaacgagcgcggcaaccccggcgucaagggcugggccuucgacaacggcgacgacgucuggaugggccgcaccaucuccaaggacucccgcuccggcuacgagaccuucaaggucaucggcggcugguccacccccaacuccaagucccaggucaaccgccaggucaucgucgacaacaacaacugguccggcuacuccggcaucuucuccgucgagggcaaguccugcaucaaccgcugcuucuacgucgagcucauccgcggccgcccccaggagacccgcgucugguggaccuccaacuccaucgucgucuucugcggcaccuccggcaccuacggcaccggcuccuggcccgacggcgccaacaucaacuucaugcccaucuga

SEQ ID NO: 116541 - RNA, 1413 nt, Artificial Sequence; identical to SEQ ID NO: 116240
  derived and/or modified CDS sequence (opt2) from neuraminidase__InfluenzaA__AEA10295

SEQ ID NO: 116542 - RNA, 1410 nt, Artificial Sequence; identical to SEQ ID NO: 112774
  derived and/or modified CDS sequence (opt2) from neuraminidase__InfluenzaA__AEA10306

SEQ ID NO: 116543 - RNA, 1410 nt, Artificial Sequence; identical to SEQ ID NO: 116127
  derived and/or modified CDS sequence (opt2) from neuraminidase__InfluenzaA__AEA10316

SEQ ID NO: 116544 - RNA, 1410 nt, Artificial Sequence; identical to SEQ ID NO: 112774
  derived and/or modified CDS sequence (opt2) from neuraminidase__InfluenzaA__AEA10326

SEQ ID NO: 116545 - RNA, 1410 nt, Artificial Sequence; identical to SEQ ID NO: 114062
  derived and/or modified CDS sequence (opt2) from neuraminidase__InfluenzaA__AEA10335

SEQ ID NO: 116546 - RNA, 1410 nt, Artificial Sequence; identical to SEQ ID NO: 112774
  derived and/or modified CDS sequence (opt2) from neuraminidase__InfluenzaA__AEA10342

SEQ ID NO: 116547 - RNA, 1410 nt, Artificial Sequence
  derived and/or modified CDS sequence (opt2) from neuraminidase__InfluenzaA__AEA10352
augaaccccaaccagaagaucaucaccaucggcuccgucugcaugaccaucggcauggccaaccucauccuccagaucggcaacaucaucuccaucuggaucucccacuccauccagcucggcaaccagaaccagaucgagaccugcaaccaguccgucaucaccuacgagaacaacaccugggucaaccagaccuacgucaacaucuccaacaccaacuucgccgccggccaguccgucgucuccgucaagcucgccggcaacuccucccucugccccgucuccggcugggccaucuacuccaaggacaacuccauccgcaucggcuccaagggcgacgucuucgucauccgcgagcccuucaucuccugcuccccccucgagugccgcaccuucuuccucacccagggcgcccuccucaacgacaagcacuccaacggcaccaucaaggaccgcucccccuaccgcacccucauguccugccccaucggcgagguccccucccccuacaacucccgcuucgaguccgucgccugguccgccuccgccugccacgacggcaucaacuggcucaccaucggcaucuccggccccgacaacggcgccgucgccguccucaaguacaacggcaucaucaccgacaccaucaaguccuggcgcaacaacauccuccgcacccaggaguccgagugcgccugcaucaacggcuccugcuucaccgucaugaccgacggccccuccgacggccaggccuccuacaagaucuuccgcaucgagaagggcaagaucgucaaguccgucgagaugaacgcccccaacuaccacuacgaggagugcuccugcuaccccgacuccuccgagaucaccugcgucugccgcgacaacuggcacggcuccaaccgccccugggucuccuucaaccagaaccucgaguaccagaucggcuacaucugcuccggcaucuucggcgacaacccccgccccaacgacaagaccggcuccugcucccccgucuccuccaacggcgccaacggcgucaagggcuucuccuucaaguacggcaacggcgucuggaucggccgcaccaaguccaucuccucccgcaacggcuucgagaugaucugggaccccaacggcuggaccggcaccgacaacaacuucuccaucaagcaggacaucgucggcaucaacgagugguccggcuacuccggcuccuucguccagcaccccgagcucaccggccucgacugcauccgccccugcuucugggucgagcucauccgcggccgccccaaggagaacaccaucuggaccuccggcuccuccaucuccuucugcggcgucaacuccgacaccgucggcugguccuggcccgacggcgccgagcuccccuucaccaucgacaaguga

SEQ ID NO: 116548 - RNA, 1410 nt, Artificial Sequence; identical to SEQ ID NO: 112774
  derived and/or modified CDS sequence (opt2) from neuraminidase__InfluenzaA__AEA48991

SEQ ID NO: 116549 - RNA, 1410 nt, Artificial Sequence; identical to SEQ ID NO: 115446
  derived and/or modified CDS sequence (opt2) from neuraminidase__InfluenzaA__AEA72707

SEQ ID NO: 116550 - RNA, 1410 nt, Artificial Sequence; identical to SEQ ID NO: 115446
  derived and/or modified CDS sequence (opt2) from neuraminidase__InfluenzaA__AEA72718

SEQ ID NO: 116551 - RNA, 1410 nt, Artificial Sequence; identical to SEQ ID NO: 115446
  derived and/or modified CDS sequence (opt2) from neuraminidase__InfluenzaA__AEA72729

SEQ ID NO: 116552 - RNA, 1410 nt, Artificial Sequence
  derived and/or modified CDS sequence (opt2) from neuraminidase__InfluenzaA__AEA72742
augaaccccaaccagaagaucaucaccaucggcuccgucugcaugaccaucggcauggccaaccucauccuccagaucggcaacaucaucuccaucuggaucucccacuccauccagcucggcaaccagucccagaucgagaccugcaaccaguccgucaucaccuacgagaacaacaccugggucaaccagaccuacgucaacaucuccaacaccaacuucgccgccggccaguccgucgucuccgucaagcucgccggcaacuccucccucugccccgucuccggcugggccaucuacuccaaggacaacuccauccgcaucggcuccaagggcgacgucuucgucauccgcgagcccuucaucuccugcuccccccucgagugccgcaccuucuuccucacccagggcgcccuccucaacgacaagcacuccaacggcaccaucaaggaccgcucccccuaccgcacccucauguccugccccaucggcgagguccccucccccuacaacucccgcuucgaguccgucgccugguccgccuccgccugccacgacggcaucaacuggcucaccaucggcaucuccggccccgacaacggcgccgucgccguccucaaguacaacggcaucaucaccgacaccaucaaguccuggcgcaacaacauccuccgcacccaggaguccgagugcgccugcgucaacggcuccugcuucaccaucaugaccgacggccccuccgacggccaggccuccuacaagaucuuccgcaucgagaagggcaagaucgucaaguccgucgagaugaacgcccccaacuaccacuacgaggagugcuccugcuaccccgacuccuccgagaucaccugcgucugccgcgacaacuggcacggcuccaaccgccccugggucuccuucaaccagaaccucgaguaccagaucggcuacaucugcuccggcaucuucggcgacaacccccgccccaacgacaagaccggcuccugcggccccgucuccuccaacggcgccaacggcgucaagggcuucuccuucaaguacggcaacggcgucuggaucggccgcaccaaguccaucuccucccgcaacggcuucgagaugaucugggaccccaacggcuggaccggcaccgacaacaacuucuccaucaagcaggacaucgucggcaucaacgagugguccggcuacuccggcuccuucguccagcaccccgagcucaccggccucgacugcauccgccccugcuucugggucgagcucauccgcggccgccccaaggagaacaccaucuggaccuccggcuccuccaucuccuucugcggcgucaacuccgacaccgucggcugguccuggcccgacggcgccgagcuccccuucaccaucgacaaguga

SEQ ID NO: 116553 - RNA, 1410 nt, Artificial Sequence; identical to SEQ ID NO: 115049
  derived and/or modified CDS sequence (opt2) from neuraminidase__InfluenzaA__AEA72779

SEQ ID NO: 116554 - RNA, 1410 nt, Artificial Sequence
  derived and/or modified CDS sequence (opt2) from neuraminidase__InfluenzaA__AEA72789
augaaccccaaccagaagaucaucaccaucggcuccgucugcaugaccaucggcauggccaaccucauccuccagaucggcaacaucaucuccaucuggaucucccacuccauccagcucggcaaccagucccagaucgagaccugcaaccaguccgucaucaccuacgagaacaacaccugggucaaccagaccuacgucaacaucuccaacaccaacuucgccgccggccaguccgucgucuccgucaagcucgccggcaacuccucccucugccccgucuccggcugggccaucuacuccaaggacgacuccauccgcaucggcuccaagggcgacgucuucgucauccgcgagcccuucaucuccugcuccccccucgagugccgcaccuucuuccucacccagggcgcccuccucaacgacaagcacuccaacggcaccaucaaggaccgcucccccuaccgcacccucauguccugccccaucggcgagguccccucccccuacaacucccgcuucgaguccgucgccugguccgccuccgccugccacgacggcaucaacuggcucaccaucggcaucuccggccccgacaacggcgccgucgccguccucaaguacaacggcaucaucaccgacaccaucaaguccuggcgcaacaacauccuccgcacccaggaguccgagugcgccugcgucaacggcuccugcuucaccgucaugaccgacggccccuccgacggccaggccuccuacaagaucuuccgcaucgagaagggcaagaucgucaaguccgucgagaugaacgcccccaacuaccacuacgaggagugcuccugcuaccccgacuccuccgagaucaccugcgucugccgcgacaacuggcacggcuccaaccgccccugggucuccuucaaccagaaccucgaguaccagaucggcuacaucugcuccggcaucuucggcgacaacccccgccccaacgacaagaccggcuccugcggccccgucuccuccaacggcgccaacggcgucaagggcuucuccuucaaguacggcaacggcgucuggaucggccgcaccaaguccaucuccucccgcaacggcuucgagaugaucugggaccccaacggcuggaccggcaccgacaacaacuucuccaucaagcaggacaucgucggcaucaacgagugguccggcuacuccggcuccuucguccagcaccccgagcucaccggccucgacugcauccgccccugcuucugggucgagcucauccgcggccgccccaaggagaacaccaucuggaccuccggcuccuccaucuccuucugcggcgucaacuccgacaccgucggcugguccuggcccgacggcgccgagcuccccuucaccaucgacaaguga

SEQ ID NO: 116555 - RNA, 1410 nt, Artificial Sequence; identical to SEQ ID NO: 115446
  derived and/or modified CDS sequence (opt2) from neuraminidase__InfluenzaA__AEA73291

SEQ ID NO: 116556 - RNA, 1410 nt, Artificial Sequence; identical to SEQ ID NO: 115446
  derived and/or modified CDS sequence (opt2) from neuraminidase__InfluenzaA__AEA73302

SEQ ID NO: 116557 - RNA, 1410 nt, Artificial Sequence; identical to SEQ ID NO: 115446
  derived and/or modified CDS sequence (opt2) from neuraminidase__InfluenzaA__AEA73313

SEQ ID NO: 116558 - RNA, 1410 nt, Artificial Sequence; identical to SEQ ID NO: 115446
  derived and/or modified CDS sequence (opt2) from neuraminidase__InfluenzaA__AEA73324

SEQ ID NO: 116559 - RNA, 1410 nt, Artificial Sequence; identical to SEQ ID NO: 115446
  derived and/or modified CDS sequence (opt2) from neuraminidase__InfluenzaA__AEA73335

SEQ ID NO: 116560 - RNA, 1410 nt, Artificial Sequence; identical to SEQ ID NO: 115446
  derived and/or modified CDS sequence (opt2) from neuraminidase__InfluenzaA__AEA73346

SEQ ID NO: 116561 - RNA, 1410 nt, Artificial Sequence; identical to SEQ ID NO: 115446
  derived and/or modified CDS sequence (opt2) from neuraminidase__InfluenzaA__AEA73357

SEQ ID NO: 116562 - RNA, 1410 nt, Artificial Sequence; identical to SEQ ID NO: 115446
  derived and/or modified CDS sequence (opt2) from neuraminidase__InfluenzaA__AEA73368

SEQ ID NO: 116563 - RNA, 1410 nt, Artificial Sequence; identical to SEQ ID NO: 115446
  derived and/or modified CDS sequence (opt2) from neuraminidase__InfluenzaA__AEA73379

SEQ ID NO: 116564 - RNA, 1410 nt, Artificial Sequence; identical to SEQ ID NO: 115446
  derived and/or modified CDS sequence (opt2) from neuraminidase__InfluenzaA__AEA73390

SEQ ID NO: 116565 - RNA, 1410 nt, Artificial Sequence; identical to SEQ ID NO: 115446
  derived and/or modified CDS sequence (opt2) from neuraminidase__InfluenzaA__AEA73401

SEQ ID NO: 116566 - RNA, 1410 nt, Artificial Sequence; identical to SEQ ID NO: 115446
  derived and/or modified CDS sequence (opt2) from neuraminidase__InfluenzaA__AEA73412

SEQ ID NO: 116567 - RNA, 1410 nt, Artificial Sequence; identical to SEQ ID NO: 115446
  derived and/or modified CDS sequence (opt2) from neuraminidase__InfluenzaA__AEA73423

SEQ ID NO: 116568 - RNA, 1410 nt, Artificial Sequence; identical to SEQ ID NO: 115446
  derived and/or modified CDS sequence (opt2) from neuraminidase__InfluenzaA__AEA73455

SEQ ID NO: 116569 - RNA, 1410 nt, Artificial Sequence; identical to SEQ ID NO: 115446
  derived and/or modified CDS sequence (opt2) from neuraminidase__InfluenzaA__AEA73466

SEQ ID NO: 116570 - RNA, 1410 nt, Artificial Sequence
  derived and/or modified CDS sequence (opt2) from neuraminidase__InfluenzaA__AEA73477
augaaccccaaccagaagaucaucaccaucggcuccgucucccucaccaucuccaccaucugcuucuucaugcagaucgccauccucaucaccaccgucacccuccacuucaagcaguacaaguucaacuccccccccaacaaccaggucaugcucugcgagcccaccaucaucgagcgcaacaucaccgagaucgucuaccucaccaacaccaccaucgagaaggagaucugccccaagcucgccgaguaccgcaacugguccaagccccagugcgacaucaccggcuucgcccccuucuccaaggacaacuccauccgccucuccgccggcggcgacaucugggucacccgcgagcccuacgucuccugcgaccccgacaagugcuaccaguucgcccucggccagggcaccacccucaacaacguccacuccaacaacaccguccgcgaccgcacccccuaccgcacccuccucaugaacgagcucggcguccccuuccaccucggcaccaagcaggucugcaucgccugguccuccuccuccugccacgacggcaaggccuggcuccacgucugcaucaccggcgacgacaagaacgccaccgccuccuucaucuacaacggccgccucgucgacuccgucgucuccugguccaaggagauccuccgcacccaggaguccgagugcgucugcaucaacggcaccugcaccgucgucaugaccgacggcuccgccuccggcaaggccgacaccaagauccucuucaucgaggagggcaagaucguccacaccuccacccucuccggcuccgcccagcacgucgaggagugcuccugcuacccccgcuaccccggcguccgcugcgucugccgcgacaacuggaagggcuccaaccgccccaucgucgacaucaacaucaaggaccacuccaucgucuccuccuacgucugcuccggccucgucggcgacaccccccgcaagaacgacuccuccuccuccucccacugccucgaccccaacaacgaggagggcggccacggcgucaagggcugggccuucgacgacggcaacgacgucuggaugggccgcaccaucaacgagaccucccgccucggcuacgagaccuucaaggucaucgagggcugguccaaccccaaguccaagcuccagaucaaccgccaggucaucgucgaccgcggcaaccgcuccggcuacuccggcaucuucuccgucgagggcaaguccugcaucaaccgcugcuucuacgucgagcucauccgcggccgcaaggaggagaccaagguccucuggaccuccaacuccaucgucgucuucugcggcaccuccggcaccuacggcaccggcuccuggcccgacggcgccgaccucaaccucaugcccaucuga

SEQ ID NO: 116571 - RNA, 1410 nt, Artificial Sequence; identical to SEQ ID NO: 115446
  derived and/or modified CDS sequence (opt2) from neuraminidase__InfluenzaA__AEA73488

SEQ ID NO: 116572 - RNA, 1410 nt, Artificial Sequence
  derived and/or modified CDS sequence (opt2) from neuraminidase__InfluenzaA__AEA73499
augaaccccaaccagaagaucaucaccaucggcuccgucucccucaccaucuccaccaucugcuucuucaugcagaucgccauccucaucaccaccgucacccuccacuucaagcaguacaaguucaacuccccccccaacaaccaggucaugcucugcgagcccaccaucaucgagcgcaacaucaccgagaucgucuaccucaccaacaccaccaucgagaaggagaucugccccaagcucgccgaguaccgcaacugguccaagccccagugcgacaucaccggcuucgcccccuucuccaaggacaacuccauccgccucuccgccggcggcgacaucugggucacccgcgagcccuacgucuccugcgaccccgacaagugcuaccaguucgcccucggccagggcaccaccaucaacaacguccacuccaacaacaccguccgcgaccgcacccccuaccgcacccuccucaugaacgagcucggcguccccuuccaccucggcaccaagcaggucugcaucgccugguccuccuccuccugccacgacggcaaggccuggcuccacgucugcaucaccggcgacgacaagaacgccaccgccuccuucaucuacaacggccgccucgucgacuccgucgucuccugguccaaggagauccuccgcacccaggaguccgagugcgucugcaucaacggcaccugcaccgucgucaugaccgacggcuccgccuccggcaaggccgacaccaagauccucuucaucgaggagggcaagaucguccacaccuccacccucuccggcuccgcccagcacgucgaggagugcuccugcuacccccgcuaccccggcguccgcugcgucugccgcgacaacuggaagggcuccaaccgccccaucgucgacaucaacaucaaggaccacuccaucgucuccuccuacgucugcuccggccucgucggcgacaccccccgcaagaacgacuccuccuccuccucccacugccucgaccccaacaacgaggagggcggccacggcgucaagggcugggccuucgacgacggcaacgacgucuggaugggccgcaccaucaacgagaccucccgccucggcuacgagaccuucaaggucaucgagggcugguccaaccccaaguccaagcuccagaucaaccgccaggucaucgucgaccgcggcaaccgcuccggcuacuccggcaucuucuccgucgagggcaaguccugcaucaaccgcugcuucuacgucgagcucauccgcggccgcaaggaggagaccgagguccucuggaccuccaacuccaucgucgucuucugcggcaccuccggcaccuacggcaccggcuccuggcccgacggcgccgaccucaaccucaugcccaucuga

SEQ ID NO: 116573 - RNA, 1410 nt, Artificial Sequence; identical to SEQ ID NO: 115446
  derived and/or modified CDS sequence (opt2) from neuraminidase__InfluenzaA__AEA73510

SEQ ID NO: 116574 - RNA, 1410 nt, Artificial Sequence; identical to SEQ ID NO: 115446
  derived and/or modified CDS sequence (opt2) from neuraminidase__InfluenzaA__AEA73521

SEQ ID NO: 116575 - RNA, 1410 nt, Artificial Sequence; identical to SEQ ID NO: 115446
  derived and/or modified CDS sequence (opt2) from neuraminidase__InfluenzaA__AEA73532

SEQ ID NO: 116576 - RNA, 1410 nt, Artificial Sequence; identical to SEQ ID NO: 115446
  derived and/or modified CDS sequence (opt2) from neuraminidase__InfluenzaA__AEA73543

SEQ ID NO: 116577 - RNA, 1410 nt, Artificial Sequence; identical to SEQ ID NO: 115446
  derived and/or modified CDS sequence (opt2) from neuraminidase__InfluenzaA__AEA73554

SEQ ID NO: 116578 - RNA, 1410 nt, Artificial Sequence; identical to SEQ ID NO: 115446
  derived and/or modified CDS sequence (opt2) from neuraminidase__InfluenzaA__AEA73565

SEQ ID NO: 116579 - RNA, 1413 nt, Artificial Sequence; identical to SEQ ID NO: 113497
  derived and/or modified CDS sequence (opt2) from neuraminidase__InfluenzaA__AEA73576

SEQ ID NO: 116580 - RNA, 1413 nt, Artificial Sequence; identical to SEQ ID NO: 113497
  derived and/or modified CDS sequence (opt2) from neuraminidase__InfluenzaA__AEA73587

SEQ ID NO: 116581 - RNA, 1413 nt, Artificial Sequence; identical to SEQ ID NO: 116240
  derived and/or modified CDS sequence (opt2) from neuraminidase__InfluenzaA__AEA73598

SEQ ID NO: 116582 - RNA, 1413 nt, Artificial Sequence; identical to SEQ ID NO: 113497
  derived and/or modified CDS sequence (opt2) from neuraminidase__InfluenzaA__AEA73609

SEQ ID NO: 116583 - RNA, 1413 nt, Artificial Sequence; identical to SEQ ID NO: 113497
  derived and/or modified CDS sequence (opt2) from neuraminidase__InfluenzaA__AEA73620

SEQ ID NO: 116584 - RNA, 1413 nt, Artificial Sequence
  derived and/or modified CDS sequence (opt2) from neuraminidase__InfluenzaA__AEA73631
augaaccccaaccagaagaucaucaccaucggcuccaucuccaucgccaucggcaucaucucccucaugcuccagaucggcaacaucaucuccaucugggccucccacuccauccagaccggcucccagaacaacaccggcaucugcaaccagcgcaucaucaccuacgagaacuccaccugggucaaccacaccuacgucaacaucaacaacaccaacgucgucgccggcgaggacaagaccuccgucacccucgccggcaacuccucccucugcuccaucuccggcugggccaucuacaccaaggacaacuccauccgcaucggcuccaagggcgacgucuucgucauccgcgagcccuucaucuccugcucccaccucgagugccgcaccuucuuccucacccagggcgcccuccucaacgacaagcacuccaacggcaccgucaaggaccgcucccccuaccgcgcccucauguccugcccccucggcgaggcccccucccccuacaacuccaaguucgaguccgucgccugguccgccuccgccugccacgacggcaugggcuggcucaccaucggcaucuccggccccgacaacggcgccgucgccguccucaaguacaacggcaucaucaccggcaccaucaaguccuggaagaagcagauccuccgcacccaggaguccgagugcgucugcaugaacggcuccugcuucaccaucaugaccgacggccccuccaacaaggccgccuccuacaagaucuucaagaucgagaagggcaaggucaccaaguccaucgagcucaacgcccccaacuucuacuacgaggagugcuccugcuaccccgacaccggcaucgucaugugcgucugccgcgacaacuggcacggcuccaaccgccccugggucuccuucaaccagaaccucgacuaccagaucggcuacaucugcuccggcgucuucggcgacaacccccgccccgaggacggcgagggcuccugcaaccccgucaccgucgacggcgccaacggcgucaagggcuucuccuacaaguacggcaacggcgucuggaucggccgcaucaaguccaaccgccuccgcaagggcuucgagaugaucugggaccccaacggcuggaccaacaccgacuccgacuucuccgucaagcaggacgucgucgccaucaccgacugguccggcuacuccggcuccuucguccagcaccccgagcucaccggccucgacugcauccgccccugcuucugggucgagcucguccgcggccucccccgcgagaacaccaccaucuggaccuccggcuccuccaucuccuucugcggcgucaacuccgacaccgccaacugguccuggcccgacggcgccgagcuccccuucaccaucgacaaguga

SEQ ID NO: 116585 - RNA, 1413 nt, Artificial Sequence
  derived and/or modified CDS sequence (opt2) from neuraminidase__InfluenzaA__AEA73642
augaaccccaaccagcgcaucaucaccaucggcuccaucuccaucgccaucggcaucaucucccucaugcuccagaucggcaacaucaucuccaucugggccucccacuccauccagaccggcucccagaacaacaccggcaucugcaagcagcgcaucaucaccuacgagaacuccaccugggucaaccacaccuacgucaacaucaacaacaccaacgucgucgccggcgaggacaagaccuccgucacccucgccggcaacuccucccucugcuccaucuccggcugggccaucuacaccaaggacaacuccauccgcaucggcuccaagggcgacgucuucgucauccgcgagcccuucaucuccugcucccaccucgagugccgcaccuucuuccucacccagggcgcccuccucaacgacaagcacuccaacggcaccgccaaggaccgcucccccuaccgcgcccucauguccugcccccucggcgaggcccccucccccuacaacuccaaguucgaguccgucgccugguccgccuccgccugccacgacggcaugggcuggcucaccaucggcaucuccggccccgacaacggcgccgucgccguccucaaguacaacggcaucaucaccggcaccaucaaguccuggaagaagcagauccuccgcacccaggaguccgagugcgucugcaugaacggcuccugcuucaccaucaugaccgacggccccuccaacaaggccgccuccuacaagaucuucaagaucgagaagggcaaggucaccaaguccaucgagcucaacgcccccaacuucuacuacgaggagugcuccugcuaccccgacaccggcaucgucaugugcgucugccgcgacaacuggcacggcuccaaccgccccugggucuccuucaaccagaaccucgacuaccagaucggcuacaucugcuccggcgucuucggcgacaacccccgccccgaggacggcgagggcuccugcaaccccgucaccgucgacggcgccaacggcgucaagggcuucuccuacaaguacggcaacggcgucuggcucggccgcaccaaguccaaccgccuccgcaagggcuucgagaugaucugggaccccaacggcuggaccaacaccgacuccgacuucuccgucaagcaggacgucgucgccaucaccgacugguccggcuacuccggcuccuucguccagcaccccgagcucaccggccucgacugcauccgccccugcuucugggucgagcucguccgcggccucccccgcgagaacaccaccaucuggaccuccggcuccuccaucuccuucugcggcgucaacuccgacaccgccaacugguccuggcccgacggcgccgagcuccccuucaccaucgacaaguga

SEQ ID NO: 116586 - RNA, 1413 nt, Artificial Sequence; identical to SEQ ID NO: 113497
  derived and/or modified CDS sequence (opt2) from neuraminidase__InfluenzaA__AEA73653

SEQ ID NO: 116587 - RNA, 1413 nt, Artificial Sequence
  derived and/or modified CDS sequence (opt2) from neuraminidase__InfluenzaA__AEA73664
augaaccccaaccagaagaucaucaccaucggcuccaucuccaucgccaucggcaucaucucccucaugcuccagaucggcaacaucaucuccaucugggccucccacuccauccagaccggcucccagaacaacaccggcaucugcaaccagcgcaucaucaccuacgagaacuccaccugggucaaccacaccuacgucaacaucaacaacaccaacgucgucgccggcgaggacaagaccuccgucacccucgccggcaacuccucccucugcuccaucuccggcugggccaucuacaccaaggacaacuccauccgcaucggcuccaagggcgacgucuucgucauccgcgagcccuucaucuccugcucccaccucgagugccgcaccuucuuccucacccagggcgcccuccucaacgacaagcacuccaacggcaccgucaaggaccgcucccccuaccgcgcccucauguccugcccccucggcgaggcccccucccccuacaacuccaaguucgaguccgucgccugguccgccuccgccugccacgacggcaugggcuggcucaccaucggcaucuccggccccgacaacggcgccgucgccguccucaaguacaacggcaucaucaccggcaccaucaaguccuggaagaagcagauccuccgcacccaggaguccgagugcgucugcaugaacggcuccugcuucaccaucaugaccgacggccccuccaacaaggccgccuccuacaagaucuucaagaucgagaagggcaaggucaccaaguccaucgagcucaacgcccccaacuucuacuacgaggagugcuccugcuaccccgacaccggcaucgucaugugcgucugccgcgacaacuggcacggcuccaaccgccccugggucuccuucaaccagaaccucgacuaccagaucggcuacaucugcuccggcgucuucggcgacaacccccgccccgaggacggcgagggcuccugcaaccccgucaccgucaacggcgccgacggcgucaagggcuucuccuacaaguacggcaacggcgucuggaucggccgcaccaaguccaaccgccuccgcaagggcuucgagaugaucugggaccccaacggcuggaccaacaccgacuccgacuucuccgucaagcaggacgucgucgccaucaccgacugguccggcuacuccggcuccuucguccagcaccccgagcucaccggccucgacugcauccgccccugcuucugggucgagcucguccgcggccuccccaaggagaacaccaccaucuggaccuccggcuccuccaucuccuucugcggcgucaacuccgacaccgccaacugguccuggcccgacggcgccgagcuccccuucaccaucgacaaguga

SEQ ID NO: 116588 - RNA, 1413 nt, Artificial Sequence
  derived and/or modified CDS sequence (opt2) from neuraminidase__InfluenzaA__AEA73675
augaaccccaaccagaagaucaucaccaucggcuccaucuccaucgccaucggcaucaucucccucaugcuccagaucggcaacaucaucuccaucugggccucccacuccauccagaccggcucccagaacaacaccggcaucugcaaccagcgcaucaucaccuacgagaacuccaccugggucaaccacaccuacgucaacaucaacaacaccaacgucgucgccggcgaggacaagaccuccgucacccucgccggcaacuccucccucugcuccaucuccggcugggccaucuacaccaaggacaacuccauccgcaucggcuccaagggcgacgucuucgucauccgcgagcccuucaucuccugcucccaccucgagugccgcaccuucuuccucacccagggcgcccuccucaacgacaagcacuccaacggcaccgucaaggaccgcucccccuaccgcgcccucauguccugcccccucggcgaggcccccucccccuacaacuccaaguucgaguccgucgccugguccgccuccgccugccacgacggcaugggcuggcucaccaucggcaucuccggccccgacaacggcgccgucgccguccucaaguacaacggcaucaucaccggcaccaucaaguccuggaagaagcagauccuccgcacccaggaguccgagugcgucugcaugaacggcuccugcuucaccaucaugaccgacggccccuccaacaaggccgccuccuacaagaucuucaagaucgagaagggcaaggucaccaaguccaucgagcucaacgcccccaacuucuacuacgaggagugcuccugcuaccccgacaccggcaucgucaugugcgucugccgcgacaacuggcacggcuccaaccgccccugggucuccuucaaccagaaccucgacuaccagaucggcuacaucugcuccggcgucuucggcgacaacccccgccccgaggacggcgagggcuccugcaaccccgucaccgucgacggcgccgacggcgucaagggcuucuccuacaaguacggcaacggcgucuggaucggccgcaccaaguccaaccgccuccgcaagggcuucgagaugaucugggaccccaacggcuggaccaacaccgacuccgacuucuccgucaagcaggacgucgucgccaucaccgacugguccggcuacuccggcuccuucguccagcaccccgagcucaccggccucgacugcauccgccccugcuucuggaucgagcucguccgcggccucccccgcgagaacaccaccaucuggaccuccggcuccuccaucuccuucugcggcgucaacuccgacaccgccaacugguccuggcccgacggcgccgagcuccccuucaccaucgacaaguga

SEQ ID NO: 116589 - RNA, 1413 nt, Artificial Sequence; identical to SEQ ID NO: 116240
  derived and/or modified CDS sequence (opt2) from neuraminidase__InfluenzaA__AEA73686

SEQ ID NO: 116590 - RNA, 1413 nt, Artificial Sequence
  derived and/or modified CDS sequence (opt2) from neuraminidase__InfluenzaA__AEA73697
augaaccccaaccagaagaucaucaccaucggcuccaucuccaucgccaucggcaucaucucccucaugcuccagaucggcaacaucaucuccaucugggccucccacuccauccagaccggcucccagaacaacaccggcaucugcaaccagcgcaucaucaccuacgagaacuccaccugggucaaccacaccuacgucaacaucaacaacaccaacaucgucgccggcgaggacaagaccuccgucacccucgccggcaacuccucccucugcuccaucuccggcugggccaucuacaccaaggacaacuccauccgcaucggcuccaagggcgacgucuucgucauccgcgagcccuucaucuccugcucccaccucgagugccgcaccuucuuccucacccagggcgcccuccucaacgacaagcacuccaacggcaccgucaaggaccgcucccccuaccgcgcccucauguccugcccccucggcgaggcccccucccccuacaacuccaaguucgaguccgucgccugguccgccuccgccugccacgacggcaugggcuggcucaccaucggcaucuccggccccgacaacggcgccgucgccguccucaaguacaacggcaucaucaccggcaccaucaaguccuggaagaagcagauccuccgcacccaggaguccgagugcgucugcaugaacggcuccugcuucaccaucaugaccgacggccccuccaacaaggccgccuccuacaagaucuucaagaucgagaagggcaaggucaccaaguccgucgagcucaacgcccccaacuucuacuacgaggagugcuccugcuaccccgacaccggcaucgucaugugcgucugccgcgacaacuggcacggcuccaaccgccccugggucuccuucaaccagaaccucgacuaccagaucggcuacaucugcuccggcgucuucggcgacaacccccgccccgaggacggcgagggcuccugcaaccccgucaccgucaacggcgccgacggcgucaagggcuucuccuacaaguacggcaacggcgucuggaucggccgcaccaaguccaaccgccuccgcaagggcuucgagaugaucugggaccccaacggcuggaccaacaccgacuccgacuucuccgucaagcaggacgucgucgccaucaccgacugguccggcuacuccggcuccuucguccagcaccccgagcucaccggccucgacugcauccgccccugcuucugggucgagcucguccgcggccucccccgcgagaacaccaccaucuggaccuccggcuccuccaucuccuucugcggcgucaacuccgacaccgccaacugguccuggcccgacggcgccgagcuccccuucaccaucgacaaguga

SEQ ID NO: 116591 - RNA, 1413 nt, Artificial Sequence; identical to SEQ ID NO: 116241
  derived and/or modified CDS sequence (opt2) from neuraminidase__InfluenzaA__AEA73708

SEQ ID NO: 116592 - RNA, 1413 nt, Artificial Sequence; identical to SEQ ID NO: 113497
  derived and/or modified CDS sequence (opt2) from neuraminidase__InfluenzaA__AEA73719

SEQ ID NO: 116593 - RNA, 1413 nt, Artificial Sequence; identical to SEQ ID NO: 113497
  derived and/or modified CDS sequence (opt2) from neuraminidase__InfluenzaA__AEA73730

SEQ ID NO: 116594 - RNA, 1413 nt, Artificial Sequence; identical to SEQ ID NO: 113497
  derived and/or modified CDS sequence (opt2) from neuraminidase__InfluenzaA__AEA73741

SEQ ID NO: 116595 - RNA, 1413 nt, Artificial Sequence; identical to SEQ ID NO: 113497
  derived and/or modified CDS sequence (opt2) from neuraminidase__InfluenzaA__AEA73752

SEQ ID NO: 116596 - RNA, 1413 nt, Artificial Sequence; identical to SEQ ID NO: 116240
  derived and/or modified CDS sequence (opt2) from neuraminidase__InfluenzaA__AEA73763

SEQ ID NO: 116597 - RNA, 1410 nt, Artificial Sequence; identical to SEQ ID NO: 112774
  derived and/or modified CDS sequence (opt2) from neuraminidase__InfluenzaA__AEA73774

SEQ ID NO: 116598 - RNA, 1410 nt, Artificial Sequence; identical to SEQ ID NO: 112774
  derived and/or modified CDS sequence (opt2) from neuraminidase__InfluenzaA__AEA73784

SEQ ID NO: 116599 - RNA, 1410 nt, Artificial Sequence; identical to SEQ ID NO: 112774
  derived and/or modified CDS sequence (opt2) from neuraminidase__InfluenzaA__AEA73794

SEQ ID NO: 116600 - RNA, 1410 nt, Artificial Sequence; identical to SEQ ID NO: 112774
  derived and/or modified CDS sequence (opt2) from neuraminidase__InfluenzaA__AEA73804

SEQ ID NO: 116601 - RNA, 1410 nt, Artificial Sequence; identical to SEQ ID NO: 112774
  derived and/or modified CDS sequence (opt2) from neuraminidase__InfluenzaA__AEA73814

SEQ ID NO: 116602 - RNA, 1410 nt, Artificial Sequence; identical to SEQ ID NO: 112774
  derived and/or modified CDS sequence (opt2) from neuraminidase__InfluenzaA__AEA73824

SEQ ID NO: 116603 - RNA, 1410 nt, Artificial Sequence
  derived and/or modified CDS sequence (opt2) from neuraminidase__InfluenzaA__AEA73834
augaaccccaaccagaagaucaucaccaucggcuccaucugcaugaccaucggcauggccaaccucauccuccagaucggcaacaucaucuccaucuggaucucccacuccauccagcucggcaaccagaaccagaucgagaccugcaaccaguccgucaucaccuacgagaacaacaccugggucaaccagaccuacgucaacaucuccaacaccaacuucgccgccggccaguccgucgucuccgucaagcucgccggcaacuccucccucugccccgucuccggcugggccaucuacuccaaggacaacuccauccgcaucggcuccaagggcgacgucuucgucauccgcgagcccuucaucuccugcuccccccucgagugccgcaccuucuuccucacccagggcgcccuccucaacgacaagcacuccaacggcaccaucaaggaccgcucccccuaccgcacccucauguccugccccaucggcgagguccccucccccuacaacucccgcuucgaguccgucgccugguccgccuccgccugccacgacggcaucaacuggcucaccaucggcaucuccggccccgacaacggcgccgucgccguccucaaguacaacggcaucaucaccgacaccaucaaguccuggaagaacaacauccuccgcacccaggaguccgagugcgccugcgucaacggcuccugcuucaccgucaugaccgacggccccuccgacggccaggccuccuacaagaucuuccgcaucgagaagggcaagaucgucaaguccgucgagaugaacgcccccaacuaccacuacgaggagugcuccugcuaccccgacuccuccgagaucaccugcgucugccgcgacaacuggcacggcuccaaccgccccugggucuccuucaaccagaaccucgaguaccagaucggcuacaucugcuccggcaucuucggcgacaacccccgccccaacgacaagaccggcuccugcggccccgucuccuccaacggcgccaacggcgucaagggcuucuccuucaaguacggcaacggcgucuggaucggccgcaccaaguccaucuccucccgcaacggcuucgagaugaucugggaccccaacggcuggaccggcaccgacaacaacuucuccaucaagcaggacaucgucggcaucaacgagugguccggcuacuccggcuccuucguccagcaccccgagcucaccggccucgacugcauccgccccugcuucugggucgagcucauccgcggccgccccaaggagaacaccaucuggaccuccggcuccuccaucuccuucugcggcgucaacuccgacaccgucggcugguccuggcccgacggcgccgagcuccccuucaccaucgacaaguga

SEQ ID NO: 116604 - RNA, 1410 nt, Artificial Sequence; identical to SEQ ID NO: 116136
  derived and/or modified CDS sequence (opt2) from neuraminidase__InfluenzaA__AEA73844

SEQ ID NO: 116605 - RNA, 1410 nt, Artificial Sequence; identical to SEQ ID NO: 112774
  derived and/or modified CDS sequence (opt2) from neuraminidase__InfluenzaA__AEA73854

SEQ ID NO: 116606 - RNA, 1410 nt, Artificial Sequence; identical to SEQ ID NO: 112774
  derived and/or modified CDS sequence (opt2) from neuraminidase__InfluenzaA__AEA73864

SEQ ID NO: 116607 - RNA, 1410 nt, Artificial Sequence; identical to SEQ ID NO: 114555
  derived and/or modified CDS sequence (opt2) from neuraminidase__InfluenzaA__AEA73874

SEQ ID NO: 116608 - RNA, 1410 nt, Artificial Sequence; identical to SEQ ID NO: 114555
  derived and/or modified CDS sequence (opt2) from neuraminidase__InfluenzaA__AEA73884

SEQ ID NO: 116609 - RNA, 1410 nt, Artificial Sequence; identical to SEQ ID NO: 116136
  derived and/or modified CDS sequence (opt2) from neuraminidase__InfluenzaA__AEA73894

SEQ ID NO: 116610 - RNA, 1410 nt, Artificial Sequence
  derived and/or modified CDS sequence (opt2) from neuraminidase__InfluenzaA__AEA73904
augaaccccaaccagaagaucaucaccaucggcuccgucugcaugaccaucggcauggccaaccucguccuccagaucggcaacaucaucuccaucuggaucucccacuccauccagcucggcaaccagaaccagaucgagaccugcaaccaguccgucaucaccuacgagaacaacaccugggucaaccagaccuacgucaacaucuccaacaccaacuucgccgccggccaguccgucgucuccgucaagcucgccggcaacuccucccucugccccgucuccggcugggccaucuacuccaaggacaacuccauccgcaucggcuccaagggcgacgucuucgucauccgcgagcccuucaucuccugcuccccccucgagugccgcaccuucuuccucacccagggcgcccuccucaacgacaagcacuccaacggcaccaucaaggaccgcucccccuaccgcacccucauguccugccccaucggcgagguccccucccccuacaacucccgcuucgaguccgucgccugguccgccuccgccugccacgacggcaucaacuggcucaccaucggcaucuccggccccgacaacggcgccgucgccguccucaaguacaacggcaucaucaccgacaccaucaaguccuggcgcaacaacauccuccgcacccaggaguccgagugcgccugcgucaacggcuccugcuucaccgucaugaccgacggccccuccgacggccaggccuccuacaagaucuuccgcaucgagaagggcaagaucgucaaguccgucgagaugaacgcccccaacuaccacuacgaggagugcuccugcuaccccgacuccuccgagaucaccugcgucugccgcgacaacuggcacggcuccaaccgccccugggucuccuucaaccagaaccucgaguaccagaucggcuacaucugcuccggcaucuucggcgacaacccccgccccaacgacaagaccggcuccugcggccccgucuccuccaacggcgccaacggcgucaagggcuucuccuucaaguacggcaacggcgucuggaucggccgcaccaaguccaucuccucccgcaacggcuucgagaugaucugggaccccaacggcuggaccggcaccgacaacaacuucuccaucaagcaggacaucaucggcaucaacgagugguccggcuacuccggcuccuucguccagcaccccgagcucaccggccucgacugcauccgccccugcuucugggucgagcucauccgcggccgccccaaggagaagaccaucuggaccuccggcuccuccaucuccuucugcggcgucaacuccgacaccgucggcugguccuggcccgacggcgccgagcuccccuucaccaucgacaaguga

SEQ ID NO: 116611 - RNA, 1410 nt, Artificial Sequence; identical to SEQ ID NO: 112774
  derived and/or modified CDS sequence (opt2) from neuraminidase__InfluenzaA__AEA73914

SEQ ID NO: 116612 - RNA, 1410 nt, Artificial Sequence; identical to SEQ ID NO: 114555
  derived and/or modified CDS sequence (opt2) from neuraminidase__InfluenzaA__AEA73924

SEQ ID NO: 116613 - RNA, 1410 nt, Artificial Sequence; identical to SEQ ID NO: 116213
  derived and/or modified CDS sequence (opt2) from neuraminidase__InfluenzaA__AEA73934

SEQ ID NO: 116614 - RNA, 1410 nt, Artificial Sequence
  derived and/or modified CDS sequence (opt2) from neuraminidase__InfluenzaA__AEA73944
augaaccccaaccagaagaucaucaccaucggcuccgucugcaugaccaucggcauggccaaccucauccuccaggucggcaacaucaucuccaucuggaucucccacuccauccagcucggcaaccagaaccagaucgagaccugcaaccaguccgucaucaccuacgagaacaacaccugggucaaccagaccuacgucaacaucuccaacaccaacuucgccgccggccaguccgucgucuccgucaagcucgccggcaacuccucccucugccccgucuccggcugggccaucuacuccaaggacaacuccauccgcaucggcuccaagggcgacgucuucgucauccgcgagcccuucaucuccugcuccccccucgagugccgcaccuucuuccucacccagggcgcccuccucaacgacaagcacuccaacggcaccaucaaggaccgcucccccuaccgcacccucauguccugccccaucggcgagguccccucccccuacaacucccgcuucgaguccgucgccugguccgccuccgccugccacgacggcaucaacuggcucaccaucggcaucuccggccccgacaacggcgccgucgccguccucaaguacaacggcaucaucaccgacaccaucaaguccuggcgcaacaacauccuccgcacccaggaguccgagugcgccugcgucaacggcuccugcuucaccgucaugaccgacggccccuccgacggccaggccuccuacaagaucuuccgcaucgagaagggcaagaucgucaaguccgucgagaugaacgcccccaacuacuacuacgaggagugcuccugcuaccccgacuccuccgagaucaccugcgucugccgcgacaacuggcacggcuccaaccgccccugggucuccuucaaccagaaccucgaguaccagaucggcuacaucugcuccggcaucuucggcgacaacccccgccccaacgacaagaccggcuccugcggccccgucuccuccaacggcgccaacggcgucaagggcuucuccuucaaguacggcaacggcgucuggaucggccgcaccaaguccaucuccucccgcaacggcuucgagaugaucugggaccccaacggcuggaccggcaccgacaacaacuucuccaucaagcaggacaucgucggcaucaacgagugguccggcuacuccggcuccuucguccagcaccccgagcucaccggccucgacugcauccgccccugcuucugggucgagcucauccgcggccgccccaaggagaacaccaucuggaccuccggcuccuccaucuccuucugcggcgucaacuccgacaccgucggcugguccuggcccgacggcgccgagcuccccuucaccaucgacaaguga

SEQ ID NO: 116615 - RNA, 1410 nt, Artificial Sequence; identical to SEQ ID NO: 112774
  derived and/or modified CDS sequence (opt2) from neuraminidase__InfluenzaA__AEA73954

SEQ ID NO: 116616 - RNA, 1410 nt, Artificial Sequence; identical to SEQ ID NO: 112774
  derived and/or modified CDS sequence (opt2) from neuraminidase__InfluenzaA__AEA73964

SEQ ID NO: 116617 - RNA, 1410 nt, Artificial Sequence
  derived and/or modified CDS sequence (opt2) from neuraminidase__InfluenzaA__AEA73974
augaaccccaaccagaagaucaucaccaucggcuccgucugcaugaccaucggcauggccaaccucauccuccagaucggcaacaucaucuccaucuggaucucccacuccauccagcacggcaaccagaaccagaucgagaccugcaaccaguccgucaucaccuacgagaacaacaccugggucaaccagaccuacgucaacaucuccaacaccaacuucgccgccggccaguccgucgucuccgucaagcucgccggcaacuccucccucugccccgucuccggcugggccaucuacuccaaggacaacuccauccgcaucggcuccaagggcgacgucuucgucauccgcgagcccuucaucuccugcuccccccucgagugccgcaccuucuuccucacccagggcgcccuccucaacgacaagcacuccaacggcaccaucaaggaccgcucccccuaccgcacccucauguccugccccaucggcgagguccccucccccuacaacucccgcuucgaguccgucgccugguccgccuccgccugccacgacggcaucaacuggcucaccaucggcaucuccggccccgacaacggcgccgucgccguccucaaguacaacggcaucaucaccgacaccaucaaguccuggcgcaacaacauccuccgcacccaggaguccgagugcgccugcgucaacggcuccugcuucaccgucaugaccgacggccccuccgacggccaggccuccuacaagaucuuccgcaucgagaagggcaagaucgucaaguccgucgagaugaacgcccccaacuaccacuacgaggagugcuccugcuaccccgacuccuccgagaucaccugcgucugccgcgacaacuggcacggcuccaaccgccccugggucuccuucaaccagaaccucgaguaccagaucggcuacaucugcuccggcaucuucggcgacaacccccgccccaacgacaagaccggcuccugcggccccgucuccuccaacggcgccaacggcgucaagggcuucuccuucaaguacggcaacggcgucuggaucggccgcaccaaguccaucuccucccgcaacggcuucgagaugaucugggaccccaacggcuggaccggcaccgacaacaacuucuccaucaagcaggacaucgucggcaucaacgagugguccggcuacuccggcuccuucguccagcaccccgagcucaccggccucgacugcauccgccccugcuucugggucgagcucauccgcggccgccccaaggagaacaccaucuggaccuccggcuccuccaucuccuucugcggcgucaacuccgacaccgucggcugguccuggcccgacggcgccgagcuccccuucaccaucgacaaguga

SEQ ID NO: 116618 - RNA, 1410 nt, Artificial Sequence; identical to SEQ ID NO: 112774
  derived and/or modified CDS sequence (opt2) from neuraminidase__InfluenzaA__AEA73984

SEQ ID NO: 116619 - RNA, 1410 nt, Artificial Sequence; identical to SEQ ID NO: 114125
  derived and/or modified CDS sequence (opt2) from neuraminidase__InfluenzaA__AEA73994

SEQ ID NO: 116620 - RNA, 1410 nt, Artificial Sequence
  derived and/or modified CDS sequence (opt2) from neuraminidase__InfluenzaA__AEA74004
augaaccccaacaagaagaucaucaucaucggcuccgucugcaugaccaucggcauggccaaccucauccuccagaucggcaacaucaucuccaucuggaucucccacuccauccagcucggcaaccagaaccagaucgagaccugcaaccaguccgucaucaccuacgagaacaacaccugggucaaccagaccuacgucaacaucuccaacaccaacuucgccgccggccaguccgucgucuccgucaagcucgccggcaacuccucccucugccccgucuccggcugggccaucuacuccaaggacaacuccauccgcaucggcuccaagggcgacgucuucgucauccgcgagcccuucaucuccugcuccccccucgagugccgcaccuucuuccucacccagggcgcccuccucaacgacaagcacuccaacggcaccaucaaggaccgcucccccuaccgcacccucauguccugccccaucggcgagguccccucccccuacaacucccgcuucgaguccgucgccugguccgccuccgccugccacgacggcaucaacuggcucaccaucggcaucuccggccccgacaacggcgccgucgccguccucaaguacaacggcaucaucaccgacaccaucaaguccuggcgcaacaacauccuccgcacccaggaguccgagugcgccugcgucaacggcuccugcuucaccgucaugaccgacggccccuccgacggccaggccuccuacaagaucuuccgcaucgagaagggcaagaucgucaaguccgucgagaugaacgcccccaacuaccacuacgaggagugcuccugcuaccccgacuccuccgagaucaccugcgucugccgcgacaacuggcacggcuccaaccgccccugggucuccuucaaccagaaccucgaguaccagaucggcuacaucugcuccggcaucuucggcgacaacccccgccccaacgacaagaccggcuccugcggccccgucuccuccaacggcgccaacggcgucaagggcuucuccuucaaguacggcaacggcgucuggaucggccgcaccaaguccaucuccucccgcaacggcuucgagaugaucugggaccccaacggcuggaccggcaccgacaacaacuucuccaucaagcaggacaucgucggcaucaacgagugguccggcuacuccggcuccuucguccagcaccccgagcucaccggccucgacugcauccgccccugcuucugggucgagcucauccgcggccgccccaaggagaacaccaucuggaccuccggcuccuccaucuccuucugcggcgucaacuccgacaccgucggcugguccuggcccgacggcgccgagcuccccuucaccaucgacaaguga

SEQ ID NO: 116621 - RNA, 1410 nt, Artificial Sequence; identical to SEQ ID NO: 113951
  derived and/or modified CDS sequence (opt2) from neuraminidase__InfluenzaA__AEA74014

SEQ ID NO: 116622 - RNA, 1410 nt, Artificial Sequence; identical to SEQ ID NO: 113951
  derived and/or modified CDS sequence (opt2) from neuraminidase__InfluenzaA__AEA74024

SEQ ID NO: 116623 - RNA, 1410 nt, Artificial Sequence; identical to SEQ ID NO: 112774
  derived and/or modified CDS sequence (opt2) from neuraminidase__InfluenzaA__AEA74032

SEQ ID NO: 116624 - RNA, 1410 nt, Artificial Sequence; identical to SEQ ID NO: 112774
  derived and/or modified CDS sequence (opt2) from neuraminidase__InfluenzaA__AEA74034

SEQ ID NO: 116625 - RNA, 1410 nt, Artificial Sequence
  derived and/or modified CDS sequence (opt2) from neuraminidase__InfluenzaA__AEA77302
augaaccccaaccagaagaucaucaccaucggcuccgucucccucaccaucuccaccaucugcuucuucaugcagaucgccauccucaucaccaccgucacccuccacuucaagcaguacgaguucaacuccccccccaacaaccaggucaugcucugcgagcccaccaucaucgagcgcaacaucaccgagaucgucuaccucaccaacaccaccaucgagaaggagaagugccccaagcucgccgaguaccgcaacugguccaagccccagugcgacaucaccggcuucgcccccuucuccaaggacaacuccauccgccucuccgccggcggcgacaucugggucacccgcgagcccuacgucuccugcgaccccgacaagugcuaccaguucgcccucggccagggcaccacccucaacaacguccacuccaacaacaccguccgcgaccgcacccccuaccgcacccuccucaugaacgagcucggcguccccuuccaccucggcaccaagcaggucugcaucgccugguccuccuccuccugccacgacggcaaggccuggcuccacgucugcaucaccggcgacgacaagaacgccaccgccuccuucaucuacaacggccgccucgucgacuccgucgucuccugguccaaggagauccuccgcacccaggaguccgagugcgucugcaucaacggcaccugcaccgucgucaugaccgacggcuccgccuccggcaaggccgacaccaagauccucuucaucgaggagggcaagaucguccacaccuccacccucuccggcuccgcccagcacgucgaggagugcuccugcuacccccgcuaccccggcguccgcugcgucugccgcgacaacuggaagggcuccaaccgccccaucgucgacaucaacaucaaggaccacuccaucgucuccuccuacgucugcuccggccucgucggcgacacccccaagaagaacgacuccuccuccuccucccacugccucgaccccaacaacgaggagggcggccacggcgucaagggcugggccuucgacgacggcaacgacgucuggaugggccgcaccaucuccgagaagucccgccucggcuacgagaccuucaaggucaucgagggcugguccaaccccaaguccaagcuccagaucaaccgccaggucaucgucgaccgcggcaaccgcuccggcuacuccggcaucuucuccgucgagggcaaguccugcaucaaccgcugcuucuacgucgagcucauccgcggccgcaaggaggagaccgagguccucuggaccuccaacuccaucgucgucuucugcggcaccuccggcaccuacggcaccggcuccuggcccgacggcgccgacaucaaccucaugcccaucuga

SEQ ID NO: 116626 - RNA, 1410 nt, Artificial Sequence; identical to SEQ ID NO: 116293
  derived and/or modified CDS sequence (opt2) from neuraminidase__InfluenzaA__AEB21318

SEQ ID NO: 116627 - RNA, 1410 nt, Artificial Sequence
  derived and/or modified CDS sequence (opt2) from neuraminidase__InfluenzaA__AEB21328
augaaccccaaccagaagaucaucaccaucggcuccgucugcaugaccaucggcauggccaaccucauccuccagaucggcaacaucaucuccaucuggaucucccacuccauccagcucggcaaccagucccagaucgagaccugcaaccaguccgucaucaccuacgagaacaacaccugggucaaccagaccuacgucaacaucuccaacaccaacuucgccgccggccaguccgucgucuccgucaagcucgccggcaacuccucccucugccccgucuccggcugggccaucuacuccaaggacaacuccauccgcaucggcuccaagggcgacgucuucgucauccgcgagcccuucaucuccugcuccccccucgagugccgcaccuucuuccucacccagggcgcccuccucaacgacaagcacuccaacggcaccaucaaggaccgcucccccuaccgcacccucauguccugccccaucggcgagguccccucccccuacaacucccgcuucgaguccgucgccugguccgccuccgccugccacgacggcuucaacuggcucaccaucggcaucuccggccccgacaacggcgccgucgccguccucaaguacaacggcaucaucaccgacaccaucaaguccuggcgcaacaacauccuccgcacccaggaguccgagugcgccugcgucaacggcuccugcuucaccaucaugaccgacggccccuccgacggccaggccuccuacaagaucuuccgcaucgagaagggcaagaucgucaaguccgucgagaugaacgcccccaacuaccacuacgaggagugcuccugcuaccccgacuccuccgagaucaccugcgucugccgcgacaacuggcacggcuccaaccgccccugggucuccuucaaccagaaccucgaguaccagaucggcuacaucugcuccggcaucuucggcgacaacccccgccccaacgacaagaccggcuccugcggccccgucuccuccaacggcgccaacggcgucaagggcuucuccuucaaguacggcaacggcgucuggaucggccgcaccaaguccaucuccucccgcaagggcuucgagaugaucugggaccccaacggcuggaccggcaccgacaacaacuucuccaucaagcaggacaucgucggcaucaacgagugguccggcuacuccggcuccuucguccagcaccccgagcucaccggccucgacugcauccgccccugcuucugggucgagcucauccgcggccgccccaaggagaacaccaucuggaccuccggcuccuccauguccuucugcggcgucaacuccgacaccgucggcugguccuggcccgacggcgccgagcuccccuucaccaucgacaaguga

SEQ ID NO: 116628 - RNA, 1410 nt, Artificial Sequence; identical to SEQ ID NO: 116293
  derived and/or modified CDS sequence (opt2) from neuraminidase__InfluenzaA__AEB21340

SEQ ID NO: 116629 - RNA, 1410 nt, Artificial Sequence
  derived and/or modified CDS sequence (opt2) from neuraminidase__InfluenzaA__AEB21350
augaaccccaaccagaagaucaucaccaucggcuccgucugcaugaccaucggcauggccaaccucauccuccagaucggcaacaucaucuccaucuggaucucccacuccauccagcucggcaaccagucccagaucgagaccugcaaccaguccgucaucaccuacgagaacaacaccugggucaaccagaccuacgucaacaucuccaacaccaacuucgccgccggccaguccgucgucuccgucaagcucgccggcaacuccucccucugccccgucuccggcugggccaucuacuccaaggacaacuccauccgcaucggcuccaagggcgacgucuucgucauccgcgagcccuucaucuccugcucccccuccgagugccgcaccuucuuccucacccagggcgcccuccucaacgacaagcacuccaacggcaccaucaaggaccgcucccccuaccgcacccucauguccugccccaucggcgagguccccucccccuacaacucccgcuucgaguccgucgccugguccgccuccgccugccacgacggcaucaacuggcucaccaucggcaucuccggccccgacaacggcgccgucgccguccucaaguacaacggcaucaucaccgacaccaucaaguccuggcgcaacaacauccuccgcacccaggaguccgagugcgccugcgucaacggcuccugcuucaccaucaugaccgacggccccuccgacggccaggccuccuacaagaucuuccgcaucgagaagggcaagaucgucaaguccgucgagaugaacgcccccaacuaccacuacgaggagugcuccugcuaccccgacuccuccgagaucaccugcgucugccgcgacaacuggcacggcuccaaccgccccugggucuccuucaaccagaaccucgaguaccagaucggcuacaucugcuccggcaucuucggcgacaacccccgccccaacgacaagaccggcuccugcggccccgucuccuccaacggcgccaacggcgucaagggcuucuccuucaaguacggcaacggcgucuggaucggccgcaccaaguccaucaucucccgcaagggcuucgagaugaucugggaccccaacggcuggaccggcaccgacaacaacuucuccaucaagcaggacaucgucggcaucaacgagugguccggcuacuccggcuccuucguccagcaccccgagcucaccggccucgacugcauccgccccugcuucugggucgagcucauccgcggccgccccaaggagaacaccaucuggaccuccggcuccuccaucuccuucugcggcgucaacuccgacaccgucggcugguccuggcccgacggcgccgagcuccccuucaccaucgacaaguga

SEQ ID NO: 116630 - RNA, 1410 nt, Artificial Sequence; identical to SEQ ID NO: 116293
  derived and/or modified CDS sequence (opt2) from neuraminidase__InfluenzaA__AEB21360

SEQ ID NO: 116631 - RNA, 1410 nt, Artificial Sequence; identical to SEQ ID NO: 113641
  derived and/or modified CDS sequence (opt2) from neuraminidase__InfluenzaA__AEB40209

SEQ ID NO: 116632 - RNA, 1410 nt, Artificial Sequence; identical to SEQ ID NO: 112635
  derived and/or modified CDS sequence (opt2) from neuraminidase__InfluenzaA__AEB66898

SEQ ID NO: 116633 - RNA, 1413 nt, Artificial Sequence
  derived and/or modified CDS sequence (opt2) from neuraminidase__InfluenzaA__AEB71103
augaaccccaaccagaagaucaucaccaucggcuccgucucccucggccucgucgucuucaacguccuccuccacgucgucuccaucaucgucaccgucgucguccucggcaacgacggcggcaacggcaucugcaacggcaccgucgucaaggaguacaacgagaccguccgcaucgagcgcgucauccaguggcacaacaccuccgucgucgaguacauccccuaccucaacggcggcaccuacaccaacaacaccgaguccgucugcgacgucaagggcuucgcccccuucuccaaggacaacggcguccgcaucggcucccgcggccacgucuucgucauccgcgagcccuucgucuccugcuccccccgcgagugccgcaccuucuuccucacccagggcucccuccucaacgacaagcacuccaacggcaccgucaaggaccgcucccccuucaagacccucauguccgucgaggucggccagucccccaacgucuaccaggcccgcuucgaggccgucgccugguccgccaccgccugccacgacggcaagaaguggaugaccaucggcgucaccggccccgacuccaaggccgucgccgucguccacuacggcggcguccccaccgacaucaucaacuccugggccggcgacauccuccgcacccaggaguccuccugcaccugcauccagggcgacugcuacugggucaugaccgacggccccgccaaccgccaggcccaguaccgcaucuacaaguccaaccagggcaagaucaucggccagauggacaucaacuucaacggcggccacaucgaggagugcuccugcuaccccaacgacggcaaggucgagugcgucugccgcgacaacuggaccggcaccaaccgccccguccucgucaucucccccgaccucuccuacaaggucggcuaccucugcgccggccuccccuccgacaccccccgcggcgaggacgcccaguucuccggcuccugcaccucccccgucggcggccagggcuacggcgucaagggcuucggcuuccgccagggcaacgacgucuggaugggccgcaccaucucccgcaccucccgcuccggcuucgaggucauccgcgucaagaacggcuggacccagaccuccaaggagcagauccgcaagcaggucgucgucgacaaccucaacugguccggcuacuccggcuccuucacccuccccaucgagcucuccggcaaguccugccucguccccugcuucugggucgagaccauccgcggcaagcccgaggagaagaccaucuggaccuccuccuccuccaucgucaugugcggcgucgacuacgaggucgccgacugguccuggcacgacggcgccauccuccccuucgacaucgacaagauguga

SEQ ID NO: 116634 - RNA, 1413 nt, Artificial Sequence; identical to SEQ ID NO: 114966
  derived and/or modified CDS sequence (opt2) from neuraminidase__InfluenzaA__AEB71899

SEQ ID NO: 116635 - RNA, 1410 nt, Artificial Sequence
  derived and/or modified CDS sequence (opt2) from neuraminidase__InfluenzaA__AEB71910
augaaccccaaccagaagaucaucaccaucggcuccgucugcaugaccaucggcauggccaaccucauccuccagaucggcaacaucaucuccaucuggaucucccacuccauccagcucggcaaccagaaccagaucgagaccugcaaccaguccgucaucaccuacgagaacaacaccugggucaaccagaccuacgucaacaucuccaacaccuacuucgccgccggccaguccgucgucuccgucaagcucgccggcaacuccucccucugccccgucuccggcugggccaucuacuccaaggacaacuccauccgcaucggcuccaagggcgacgucuucgucauccgcgagcccuucaucuccugcuccccccucgagugccgcaccuucuuccucacccagggcgcccuccucaacgacaagcacuccaacggcaccaucaaggaccgcucccccuaccgcacccucauguccugccccaucggcgagguccccucccccuacaacucccgcuucgaguccgucgccugguccgccuccgccugccacgacggcaucaacuggcucaccaucggcaucuccggccccgacaacggcgccgucgccguccucaaguacaacggcaucaucaccgacaccaucaaguccuggcgcaacaacauccuccgcacccaggaguccgagugcgccugcgucaacggcuccugcuucaccgucaugaccgacggccccuccgacggccaggccuccuacaagaucuuccgcaucgagaagggcaagaucgucaaguccgucgagaugaacgcccccaacuaccacuacgaggagugcuccugcuaccccgacuccuccgagaucaccugcgucugccgcgacaacuggcacggcuccaaccgccccugggucuccuucaaccagaaccucgaguaccagaucggcuacaucugcuccggcaucuucggcgacaacccccgccccaacgacaagaccggcuccugcggccccgucuccuccaacggcgccaacggcgucaagggcuucuccuucaaguacggcaacggcgucuggaucggccgcaccaaguccaucuccucccgcaacggcuucgagaugaucugggaccccaacggcuggaccggcaccgacaacaacuucuccaucaagcaggacaucgucggcaucaacgagugguccggcuacuccggcuccuucguccagcaccccgagcucaccggccucgacugcauccgccccugcuucugggucgagcucauccgcggccgccccaaggagaacaccaucuggaccuccggcuccuccaucuccuucugcggcgucaacuccgacaccgucggcugguccuggcccgacggcgccgagcuccccuucaccaucgacaaguga

SEQ ID NO: 116636 - RNA, 1410 nt, Artificial Sequence; identical to SEQ ID NO: 112774
  derived and/or modified CDS sequence (opt2) from neuraminidase__InfluenzaA__AEB71919

SEQ ID NO: 116637 - RNA, 1410 nt, Artificial Sequence; identical to SEQ ID NO: 114520
  derived and/or modified CDS sequence (opt2) from neuraminidase__InfluenzaA__AEB71928

SEQ ID NO: 116638 - RNA, 1410 nt, Artificial Sequence
  derived and/or modified CDS sequence (opt2) from neuraminidase__InfluenzaA__AEB71939
augaaccccaaccagaagaucaucaccaucggcuccgucucccucaccaucuccgccaucugcuucuucaugcagaucgccauccucaucaccaccgucacccuccacuucaagcaguacgaguucaacuccccccccaacaaccaggucaugcucugcgagcccaccaucaucgagcgcaacaucaccgagaucgucuaccucaccaacaccaccaucgagaaggagaucugccccaagcucgccgaguaccgcaacugguccaagccccagugcgacaucaccggcuucgcccccuucuccaaggacaacuccauccgccucuccgccggcggcgacaucugggucacccgcgagcccuacgucuccugcgaccccgacaagugcuaccaguucgcccucggccagggcaccacccucaacaacguccacuccaacaacaccguccgcgaccgcacccccuaccgcacccuccucaugaacgagcucggcguccccuuccaccucggcaccaagcaggucugcaucgccugguccuccuccuccugccacgacggcaaggccuggcuccacgucugcaucaccggcgacgacaagaacgccaccgccuccuucaucuacaacggccgccucgucgacuccgucgucuccugguccaaggagauccuccgcacccaggaguccgagugcgucugcaucaacggcaccugcaccgucgucaugaccgacggcuccgccuccggcaaggccgacaccaagauccucuucaucgaggagggcaagaucguccacaccuccacccucuccggcuccgcccagcacgucgaggagugcuccugcuacccccgcuaccccggcguccgcugcgucugccgcgacaacuggaagggcuccaaccgccccaucgucgacaucaacaucaaggaccacuccaucgucuccuccuacgucugcuccggccucgucggcgacaccccccgcaagaacgacuccuccuccuccucccacugccucgaccccaacaacgaggagggcggccacggcgucaagggcugggccuucgacgacggcaacgacgucuggaugggccgcaccaucuccgagaagucccgccucggcuacgagaccuucaaggucaucgagggcugguccaaccacaaguccaagcuccagaucaaccgccaggucaucgucgaccgcggcaaccgcuccggcuacuccggcaucuucuccgucgagggcaaguccugcaucaaccgcugcuucuacgucgagcucauccgcggccgcaaggaggagaccgagguccucuggaccuccaacuccaucgucgucuucugcggcaccuccggcaccuacggcaccggcuccuggcccgacggcgccgaccucaaccucaugcccaucuga

SEQ ID NO: 116639 - RNA, 1410 nt, Artificial Sequence
  derived and/or modified CDS sequence (opt2) from neuraminidase__InfluenzaA__AEB71950
augaaccccaaccagaagaucaucaccaucggcuccgucucccucaccaucuccaccaucugcuucuucaugcagaucgccauccucaucaccaccgucacccuccacuucaagcaguacgaguucaacuccccccccaacaaccaggucaugcucugcgagcccaccaucaucgagcgcaacaucaccgagaucgucuaccucaccaacaccaccaucgagaaggagaucugccccaagcucgccgaguaccgcaacugguccaagccccagugcgacaucaccggcuucgcccccuucuccaaggacaacuccauccgccucuccgccggcggcgacaucugggucacccgcgagcccuacgucuccugcgaccccgacaagugcuaccaguucgcccucggccagggcaccacccucaacaacguccacuccaacaacaccguccgcgaccgcacccccuaccgcacccuccucaugaacgagcucggcguccccuuccaccucggcaccaagcaggucugcaucgccugguccuccuccuccugccacgacggcaaggccuggcuccacgucugcaucaccggcgacgacaagaacgccaccgccuccuucaucuacaacggccgccucgucgacuccgucgucuccugguccaaggagauccuccgcacccaggaguccgagugcgucugcaucaacggcaccugcaccgucgucaugaccgacggcuccgccuccggcaaggccgacaccaagauccucuucaucgaggagggcaagaucguccacaccuccacccucuccggcuccgcccagcacgucgaggagugcuccugcuacccccgcuaccccggcguccgcugcgucugccgcgacaacuggaagggcuccaaccgccccaucgucgacaucaacaucaaggaccacuccaucgucuccuccuacgucugcuccggccucgucggcgacaccccccgcaagaacgacuccuccuccuccucccacugccucgaccccaacaacgaggagggcgaccacggcgucaagggcugggccuucgacgacggcaacgacgucuggaugggccgcaccaucuccgagaagucccgccucggcuacgagaccuucaaggucaucgagggcugguccaaccacaaguccaagcuccagaucaaccgccaggucaucgucgaccgcggcaaccgcuccggcuacuccggcaucuucuccgucgagggcaaguccugcaucaaccgcugcuucuacgucgagcucauccgcggccgcaaggaggagaccgagguccucuggaccuccaacuccaucgucgucuucugcggcaccuccggcaccuacggcaccggcuccuggcccgacggcgccgaccucaaccucaugcccaucuga

SEQ ID NO: 116640 - RNA, 1413 nt, Artificial Sequence; identical to SEQ ID NO: 115973
  derived and/or modified CDS sequence (opt2) from neuraminidase__InfluenzaA__AEB71961

SEQ ID NO: 116641 - RNA, 1410 nt, Artificial Sequence
  derived and/or modified CDS sequence (opt2) from neuraminidase__InfluenzaA__AEB71972
augaaccccaaccagaagaucaucaccaucggcuccgucucccucaccaucuccaccaucugcuucuucaugcagaucgccauccucaucaccaccgucacccuccacuucaagcaguacgaguucaacuccccccccaacaaccaggucaugcucugcgagcccaccaucaucgagcgcaacaucaccgagaucgucuaccucaccaacaccaccaucgucaaggagaucugccccaagcucgccgaguaccgcaacugguccaagccccagugcgacaucaccggcuucgcccccuucuccaaggacaacuccauccgccucuccgccggcggcgacaucugggucacccgcgagcccuacgucuccugcgaccccgacaagugcuaccaguucgcccucggccagggcaccacccucaacaacguccacuccaacaacaccguccgcgaccgcacccccuaccgcacccuccucaugaacgagcucggcguccccuuccaccucggcaccaagcaggucugcaucgccugguccuccuccuccugccacgacggcaaggccuggcuccacgucugcaucaccggcgacgacaagaacgccaccgccuccuucaucuacaacggccgccucgucgacuccgucgucuccugguccaaggagauccuccgcacccaggaguccgagugcgucugcaucaacggcaccugcaccgucgucaugaccgacggcuccgccuccggcaaggccgacaccaagauccucuucaucgaggagggcaagaucguccacaccuccacccucuccggcuccgcccagcacgucgaggagugcuccugcuacccccgcuaccccggcguccgcugcgucugccgcgacaacuggaagggcuccaaccgccccaucgucgacaucaacaucaaggaccacuccaucgucuccuccuacgucugcuccggccucgucggcgacaccccccgcaagaacgacuccuccuccuccucccacugccucgaccccaacaacgaggagggcggccacggcgucaagggcugggccuucgacgacggcaacgacgucuggaugggccgcaccaucuccgagaagucccgccucggcuacgagaccuucaaggucaucgagggcugguccaaccccaaguccaagcuccagaucaaccgccaggucaucgucgaccgcggcaaccgcuccggcuacuccggcaucuucuccgucgagggcaaguccugcaucaaccgcugcuucuacgucgagcucauccgcggccgcaaggaggagaccgagguccucuggaccuccaacuccaucgucgucuucugcggcaccuccggcaccuacggcaccggcuccuggcccgacggcgccgacaucaaccucaugcccaucuga

SEQ ID NO: 116642 - RNA, 1410 nt, Artificial Sequence
  derived and/or modified CDS sequence (opt2) from neuraminidase__InfluenzaA__AEB71983
augaaccccaaccagaagaucaucaccaucggcuccgucucccucaccaucuccaccaucugcuucuucaugcagaucgccauccucaucaccaccgucacccuccacuucaagcaguacgaguucaacuccccccccaacaaccaggucaugcucugcgagcccaccaucaucgagcgcaacaucaccgagaucgucuaccucaccaacaccaccaucgagaaggagaucugccccaagcucgccgaguaccgcaacugguccaagccccagugcgacaucaccggcuucgcccccuucuccaaggacaacuccauccgccucuccgccggcggcgacaucugggucacccgcgagcccuacgucuccugcgaccccgacaagugcuaccaguucgcccucggccagggcaccacccucaacaacguccacuccaacaacaccguccgcgaccgcacccccuaccgcacccuccucaugaacgagcucggcguccccuuccaccucggcaccaagcaggucugcaucgccugguccuccuccuccugccacgacggcaaggccuggcuccacgucugcaucaccggcgacgacaagaacgccaccgccuccuucaucuacaacggccgccucgucgacuccgucgucuccugguccaaggagauccuccgcacccaggaguccgagugcgucugcaucaacggcaccugcaccgucgucaugaccgacggcuccgccuccggcaaggccgacaccaagauccucuucaucgaggagggcaagaucguccacaccuccacccucuccggcuccgcccagcacgucgaggagugcuccugcuacccccgcuaccccggcguccgcugcgucugccgcgacaacuggaagggcuccaaccgccccaucgucgacaucaacaugaaggaccacuccaucgucuccuccuacgucugcuccggccucgucggcgacaccccccgccgcaacgacuccuccuccuccucccacugccucgaccccaacaacgaggagggcggccacggcgucaagggcugggccuucgacgacggcaacgacgucuggaugggccgcaccaucuccgagaagucccgccucggcuacgagaccuucaaggucaucgagggcugguccaaccccaaguccaagcuccagaucaaccgccaggucaucgucgaccgcggcaaccgcuccggcuacuccggcaucuucuccgucgagggcaaguccugcaucaaccgcugcuucuacgucgagcucauccgcggccgcaaggaggagaccgagguccucuggaccuccaacuccaucgucgucuucugcggcaccuccggcaccuacggcaccggcuccuggcccgacggcgccgacaucaaccucaugcccaucuga

SEQ ID NO: 116643 - RNA, 1413 nt, Artificial Sequence
  derived and/or modified CDS sequence (opt2) from neuraminidase__InfluenzaA__AEB71995
augaaccccaaccagaagaucaucaccaucggcuccaucuccaucgccaucggcaucaucucccucaugcuccagaucggcaacaucaucuccaucugggccucccacuccauccagaccggcucccagaacaacaccggcaucugcaaccagcgcaucaucaccuacgagaacuccaccugggucaaccacaccuacaucaacaucaacaacaccaacgucgucgccggcgaggacaagaccuccgucacccucgccggcaacuccucccucugcuccaucuccggcugggccaucuacaccaaggacaacuccauccgcaucggcuccaagggcgacgucuucgucauccgcgagcccuucaucuccugcucccaccucgagugccgcaccuucuuccucacccagggcgcccuccucaacgacaagcacuccaacggcaccgucaaggaccgcucccccuaccgcgcccucauguccugcccccucggcgaggcccccucccccuacaacuccaaguucgaguccgucgccugguccgccuccgccugccacgacggcaugggcuggcucaccaucggcaucuccggccccgacaacggcgccgucgccguccucaaguacaacggcaucaucaccggcaccaucaaguccuggaagaagcagauccuccgcacccaggaguccgagugcgucugcaugaacggcuccugcuucaccaucaugaccgacggccccuccaacaaggccgccuccuacaagaucuucaagaucgagaagggcaaggucaccaaguccaucgagcucaacgcccccaacuucuacuacgaggagugcuccugcuaccccgacaccggcaucgucaugugcgucugccgcgacaacuggcacggcuccaaccgccccugggucuccuucaaccagaaccucgacuaccagaucggcuacaucugcuccggcgucuucggcgacaacccccgccccgaggacggcgagggcuccugcaaccccgucaccgucaacggcgccgacggcgucaagggcuucuccuacaaguacggcaacggcgucuggaucggccgcaccaaguccaaccgccuccgcaagggcuucgagaugaucugggaccccaacggcuggaccaacaccgacuccgacuucuccgucaagcaggacgucgucgccaucaccgacugguccggcuacuccggcuccuucguccagcaccccgagcucaccggccucgagugcauccgccccugcuucugggucgagcucguccgcggccucccccgcgagaacaccaccaucuggaccuccggcuccuccaucuccuucugcggcgucaacuccgacaccgccaacugguccuggcccgacggcgccgagcuccccuucaccaucgacaaguga

SEQ ID NO: 116644 - RNA, 1413 nt, Artificial Sequence; identical to SEQ ID NO: 116241
  derived and/or modified CDS sequence (opt2) from neuraminidase__InfluenzaA__AEC13316

SEQ ID NO: 116645 - RNA, 1410 nt, Artificial Sequence; identical to SEQ ID NO: 112774
  derived and/or modified CDS sequence (opt2) from neuraminidase__InfluenzaA__AEC53262

SEQ ID NO: 116646 - RNA, 1410 nt, Artificial Sequence; identical to SEQ ID NO: 112774
  derived and/or modified CDS sequence (opt2) from neuraminidase__InfluenzaA__AEC53272

SEQ ID NO: 116647 - RNA, 1410 nt, Artificial Sequence; identical to SEQ ID NO: 112774
  derived and/or modified CDS sequence (opt2) from neuraminidase__InfluenzaA__AEC53282

SEQ ID NO: 116648 - RNA, 1410 nt, Artificial Sequence; identical to SEQ ID NO: 112774
  derived and/or modified CDS sequence (opt2) from neuraminidase__InfluenzaA__AEC53292

SEQ ID NO: 116649 - RNA, 1410 nt, Artificial Sequence
  derived and/or modified CDS sequence (opt2) from neuraminidase__InfluenzaA__AEC53302
augaaccccaaccagaagaucaucaccaucggcuccgucugcaugaccaucggcauggccaaccucauccuccagaucggcaacaucaucuccaucuggaucucccacuccauccagcucggcaaccagaaccagaucgagaccugcaaccaguccgucaucaccuacgagaacaacaccugggucaaccagaccuacgucaacaucuccaacaccaacuucgccgccggccaguccgucgucuccgucaagcucgccggcaacuccucccucugccccgucuccggcugggccaucuacuccaaggacaacuccauccgcaucggcuccaagggcgacgucuucgucauccgcgagcccuucaucuccugcuccccccucgagugccgcaccuucuuccucacccagggcgcccuccucaacgacaagcacuccaacggcaccaucaaggaccgcucccccuaccgcacccucauguccugccccaucggcgagguccccucccccuacaacucccgcuucgaguccgucgccugguccgccuccgccugccacgacggcaucaacuggcucaccaucggcaucuccggccccgacaacggcgccgucgccguccucaaguacaacggcaucaucaccgacaucaucaaguccuggcgcaacaacauccuccgcacccaggaguccgagugcgccugcgucaacggcuccugcuucaccgucaugaccgacggccccuccgacggccaggccuccuacaagaucuuccgcaucgagaagggcaagaucgucaaguccgucgagaugaacgcccccaacuaccacuacgaggagugcuccugcuaccccgacuccuccgagaucaccugcgucugccgcgacaacuggcacggcuccaaccgccccugggucuccuucaaccagaaccucgaguaccagaucggcuacaucugcuccggcaucuucggcgacaacccccgccccaacgacaagaccggcuccugcggccccgucuccuccaacggcgccaacggcgucaagggcuucuccuucaaguacggcaacggcgucuggaucggccgcaccaaguccaucuccucccgcaacggcuucgagaugaucugggaccccaacggcuggaccggcaccgacaacaacuucuccaucaagcaggacaucgucggcaucaacgagugguccggcuacuccggcuccuucguccagcaccccgagcucaccggccucgacugcauccgccccugcuucugggucgagcucauccgcggccgccccaaggagaacaccaucuggaccuccggcuccuccaucuccuucugcggcgucaacuccgacaccgucggcugguccuggcccgacggcgccgagcuccccuucaccaucgacaaguga

SEQ ID NO: 116650 - RNA, 1410 nt, Artificial Sequence; identical to SEQ ID NO: 112774
  derived and/or modified CDS sequence (opt2) from neuraminidase__InfluenzaA__AEC53350

SEQ ID NO: 116651 - RNA, 1410 nt, Artificial Sequence; identical to SEQ ID NO: 113482
  derived and/or modified CDS sequence (opt2) from neuraminidase__InfluenzaA__AEC53407

SEQ ID NO: 116652 - RNA, 1410 nt, Artificial Sequence; identical to SEQ ID NO: 112774
  derived and/or modified CDS sequence (opt2) from neuraminidase__InfluenzaA__AEC53427

SEQ ID NO: 116653 - RNA, 1410 nt, Artificial Sequence; identical to SEQ ID NO: 113600
  derived and/or modified CDS sequence (opt2) from neuraminidase__InfluenzaA__AED99967

SEQ ID NO: 116654 - RNA, 1410 nt, Artificial Sequence; identical to SEQ ID NO: 112764
  derived and/or modified CDS sequence (opt2) from neuraminidase__InfluenzaA__AEE27161

SEQ ID NO: 116655 - RNA, 1410 nt, Artificial Sequence; identical to SEQ ID NO: 112774
  derived and/or modified CDS sequence (opt2) from neuraminidase__InfluenzaA__AEE27170

SEQ ID NO: 116656 - RNA, 1410 nt, Artificial Sequence; identical to SEQ ID NO: 112764
  derived and/or modified CDS sequence (opt2) from neuraminidase__InfluenzaA__AEE27180

SEQ ID NO: 116657 - RNA, 1410 nt, Artificial Sequence
  derived and/or modified CDS sequence (opt2) from neuraminidase__InfluenzaA__AEE27190
augaaccccaaccagaagaucaucaccaucggcuccgucugcaugaccaucggcauggccaaccucauccuccagaucggcaacaucaucuccaucuggaucucccacuccauccagcucggcaaccagaaccagaucgagaccugcaaccaguccgucaucaccuacgagaacaacaccugggucaaccagaccuacgucaacaucuccaacaccaacuucgccgccggccaguccgucgucuccgucaagcucgccggcaacuccucccucugccccgucuccggcugggccaucuacuccaaggacaacuccguccgcaucggcuccaagggcgacgucuucgucauccgcgagcccuucaucuccugcuccccccucgagugccgcaccuucuuccucacccagggcgcccuccucaacgacaagcacuccaacggcaccaucaaggaccgcucccccuaccgcacccucauguccugccccaucggcgagguccccucccccuacaacucccgcuucgaguccgucgccugguccgccuccgccugccacgacggcaucaacuggcucaccaucggcaucuccggccccgacaacggcgccgucgccguccucaaguacaacggcgucaucaccgacaccaucaaguccuggcgcaacaacauccuccgcacccaggaguccgagugcgccugcgucaacggcuccugcuucaccgucaugaccgacggccccuccaacggccaggccuccuacaagaucuucaagaucgagaagggcaagaucgucaaguccgucgagaugaacgcccccaacuaccacuacgaggagugcuccugcuaccccgacuccuccgagaucaccugcgucugccgcgacaacuggcacggcuccaaccgccccugggucuccuucaaccagaaccucgaguaccagaucggcuacaucugcuccggcaucuucggcgacaacccccgccccaacgacaagaccggcuccugcggccccgucuccuccaacggcgccaacggcgucaagggcuucuccuucaaguacggcaacggcgucuggaucggccgcaccaaguccaucuccucccgcaacggcuucgagaugaucugggaccccaacggcuggaccggcaccgacaacaacuucuccaucaagcaggacaucgucggcaucaacgagugguccggcuacuccggcuccuucguccagcaccccgagcucaccggccucgacugcauccgccccugcuucugggucgagcucauccgcggccgccccaaggagaacaccaucuggaccuccggcuccuccaucuccuucugcggcgucaacuccgacaccgucggcugguccuggcccgacggcgccgagcuccccuucaccaucgacaaguga

SEQ ID NO: 116658 - RNA, 1410 nt, Artificial Sequence; identical to SEQ ID NO: 113997
  derived and/or modified CDS sequence (opt2) from neuraminidase__InfluenzaA__AEE27200

SEQ ID NO: 116659 - RNA, 1410 nt, Artificial Sequence; identical to SEQ ID NO: 115833
  derived and/or modified CDS sequence (opt2) from neuraminidase__InfluenzaA__AEG64755

SEQ ID NO: 116660 - RNA, 1362 nt, Artificial Sequence
  derived and/or modified CDS sequence (opt2) from neuraminidase__InfluenzaA__AEG64765
augaaccccaaccagaagaucaucaccaucggcuccaucugcauggucgucggcaucaucucccucauccuccagaucggcaacaucaucuccaucuggaucucccacuccauccagaccggcaaccagaaccacaccggcaucugcaaccagggcaucaucaccuacaacgucgucgccggccaggacuccaccuccgucauccucaccggcaacuccucccucugccccauccgcggcugggccauccacuccaaggacaacggcauccgcaucggcuccaagggcgacgucuucgucauccgcgagcccuucaucuccugcucccaccucgagugccgcaccuucuuccucacccagggcgcccuccucaacgacaagcacuccaacggcaccgucaaggaccgcucccccuaccgcgcccucauguccugccccgucggcgaggcccccucccccuacaacucccgcuucgaguccgucgccugguccgccuccgccugccacgacggcaugggcuggcucaccaucggcaucuccggccccgacaacggcgccgucgccguccucaaguacaacggcaucaucaccgagaccaucaaguccuggcgcaagaagauccuccgcacccaggaguccgagugcaccugcgucaacggcuccugcuucaccaucaugaccgacggccccuccgacggccucgccuccuacaagaucuucaagaucgagaagggcaaggucaccaaguccaucgagcucaacgcccccaacucccacuacgaggagugcuccugcuaccccgacaccggcaaggucaugugcgucugccgcgacaacuggcacggcuccaaccgccccugggucuccuucgaccagaaccucgacuaccagaucggcuacaucugcuccggcgucuucggcgacaacccccgccccaaggacggcaccggcuccugcggccccgucuccgccgacggcgccaacggcgucaagggcuucuccuaccgcuacggcaacggcgucuggaucggccgcaccaaguccgacuccucccgccacggcuucgagaugaucugggaccccaacggcuggaccgagaccgacucccgcuucuccguccgccaggacgucgucgccaugaccgaccgcuccggcuacuccggcuccuucguccagcaccccgagcucaccggccucgacugcaugcgccccugcuucugggucgagcucauccgcggccgccccgaggagaagaccaucuggaccuccggcuccaucaucuccuucugcggcgucaacuccgacaccgucgacugguccuggcccgacggcgccgagcuccccuucaccaucgacaaguga

SEQ ID NO: 116661 - RNA, 1410 nt, Artificial Sequence
  derived and/or modified CDS sequence (opt2) from neuraminidase__InfluenzaA__AEG64787
augaaccccaaccagaagaucaucaccaucggcuccgucugcaugaccaucggcauggccaaccucauccuccagaucggcaacaucaucuccaucuggaucucccacuccauccagcucggcaaccagaaccagaucgagaccugcaaccaguccgucaucaccuacgagaacaacaccugggucaaccagaccuacgucaacaucuccaacaccaacuucgccgccggccaguccgucgucuccgucaagcucgccggcaacuccucccucugccccgucuccggcugggccaucuacuccaaggacaacuccauccgcaucggcuccaagggcgacgucuucgucauccgcgagcccuucaucuccugcuccccccucgagugccgcaccuucuuccucacccagggcgcccuccucaacgacaagcacuccaacggcaccaucaaggaccgcucccccuaccgcacccucauguccugccccaucggcgagguccccucccccuacaacucccgcuucgaguccgucgccugguccgccuccgccugccacgacggcaucaacuggcucaccaucggcaucuccggccccgacaacggcgccgucgccguccucaaguacaacggcaucaucaccgacaccaucaaguccuggcgcaacaaccgccuccgcacccaggaguccgagugcgccugcgucaacggcuccugcuucaccgucaugaccgacggccccuccgacggccaggccuccuacaagaucuuccgcaucgagaagggcaagaucgucaaguccgucgagaugaacgcccccaacuaccacuacgaggagugcuccugcuaccccgacuccuccgagaucaccugcgucugccgcgacaacuggcacggcuccaaccgccccugggucuccuucaaccagaaccucgaguaccagaucggcuacaucugcuccggcaucuucggcgacaacccccgccccaacgacaagaccggcuccugcggccccgucuccuccaacggcgccaacggcgucaagggcuucuccuucaaguacggcaacggcgucuggaucggccgcaccaaguccaucuccucccgcaacggcuucgagaugaucugggaccccaacggcuggaccggcaccgacaacgacuucuccaucaagcaggacaucgucggcaucaacgagugguccggcuacuccggcuccuucguccagcaccccgagcucaccggccucgacugcauccgccccugcuucugggucgagcucauccgcggccgccccaaggagaacaccaucuggaccuccggcuccuccaucuccuucugcggcgucaacuccgacaccgucggcugguccuggcccgacggcgccgagcuccccuucaccaucgacaaguga

SEQ ID NO: 116662 - RNA, 1410 nt, Artificial Sequence
  derived and/or modified CDS sequence (opt2) from neuraminidase__InfluenzaA__AEG64837
augaaccccaaccagaagaucaucaccaucggcuccgucucccucaccaucuccaccaucugcuucuucaugcagaucgccauccucaucaccaccgucacccuccacuucaagcaguacgaguucaacuccccccccaacaaccaggucaugcucugcgagcccaccaucaucgagcgcaacaucaccgagaucgucuaccucaccaacaccaccaucgagaaggagaucugccccaagcucgccgaguaccgcaacugguccaagccccagugcgacaucaccggcuucgcccccuucuccaaggacaacuccauccgccucuccgccggcggcgacaucugggucacccgcgagcccuacgucuccugcgaccccgacaagugcuaccaguucgcccucggccagggcaccacccucaacaacguccacuccaacaacaccguccgcgaccgcacccccuaccgcacccuccucaugaacgagcucggcguccccuuccaccucggcaccaagcaggucugcaucgccugguccuccuccuccugccacgacggcaaggccuggcuccacgucugcaucaccggcgacgacaagaacgccaccgccucccucaucuacaacggccgccucgucgacuccgucgucuccugguccaaggagauccuccgcacccaggaguccgagugcgucugcaucaacggcaccugcaccgucgucaugaccgacggcuccgccuccggcaaggccgacaccaagauccucuucaucgaggagggcaagaucguccacaccuccacccucuccggcuccgcccagcacgucgaggagugcuccugcuacccccgcuaccccggcguccgcugcgucugccgcgacaacuggaagggcuccaaccgccccaucgucgacaucaacaucaaggaccacuccaucgucuccuccuacgucugcuccggccucgucggcgacaccccccgcaagaacgacuccuccuccuccucccacugccucgaccccaacaacgaggagggcggccacggcgucaagggcugggccuucgacgacggcaacgacgucuggaugggccgcaccaucaacgagaccucccgccucggcuacgagaccuucaaggucaucgagggcugguccaaccccaaguccaagcuccagaucaaccgccaggucaucgucgaccgcggcaaccgcuccggcuacuccggcaucuucuccgucgagggcaaguccugcaucaaccgcugcuucuacgucgagcucauccgcggccgcaaggaggagaccgagguccucuggaccuccaacuccaucgucgucuucugcggcaccuccggcaccuacggcaccggcuccuggcccgacggcgccgaccucaaccucaugcccaucuga

SEQ ID NO: 116663 - RNA, 1410 nt, Artificial Sequence
  derived and/or modified CDS sequence (opt2) from neuraminidase__InfluenzaA__AEG64848
augaaccccaaccagaagaucaucaccaucggcuccgucucccucaccaucuccaccaucugcuucuucaugcagaucgccauccucaucaccaccgucacccuccacuucaagcaguacgaguucuacuccccccccaacaaccaggucaugcucugcgagcccaccaucaucgagcgcaacaucaccgagaucgucuaccucaccaacaccaccaucgagaaggagaucugccccaagcucgccgaguaccgcaacuggcucaagccccagugcgacaucaccggcuucgcccccuucuccaaggacaacuccauccgccucuccgccggcggcgacaucugggucacccgcgagcccuacgucuccugcgaccccgacaagugcuaccaguucgcccucggccagggcaccacccucaacaacguccacuccaacaacaccguccgcgaccgcacccccuaccgcacccuccucaugaacgagcucggcguccccuuccaccucggcaccaagcaggucugcaucgccugguccuccuccuccugccacgacggcaaggccuggcuccacgucugcaucaccggcgacgacaagaacgccaccgccuccuucaucuacaacggccgccucgucgacuccgucgucuccugguccaaggagauccuccgcacccaggaguccgagugcgucugcaucaacggcaccugcaccgucgucaugaccgacggcuccgccuccggcaaggccgacaccaagauccucuucaucgaggagggcaagaucguccacaccuccacccucuccggcuccgcccagcacgucgaggagugcuccugcuacccccgcuaccccggcguccgcugcgucugccgcgacaacuggaagggcuccaaccgccccaucgucgacaucaacaucaaggaccacuccaucgucuccuccuacgucugcuccggccucgucggcgacaccccccgcaagaacgacuccuccuccuccucccacugccucgaccccaacaacgaggagggcggccacggcgucaagggcugggccuucgacgacggcaacgacgucuggaugggccgcaccaucaacgagaccucccgccucggcuacgagaccuucaaggucaucgagggcugguccaaccccaaguccaagcuccagaucaacaagcaggucaucgucgaccgcggcaaccgcuccggcuacuccggcaucuucuccgucgagggcaaguccugcaucaaccgcugcuucuacgucgagcucauccgcggccgcaaggaggagaccgagguccucuggaccuccaacuccaucgucgucuucugcggcaccuccggcaccuacggcaccggcuccuggcccgacggcgccgaccucaaccucaugcccaucuga

SEQ ID NO: 116664 - RNA, 1410 nt, Artificial Sequence; identical to SEQ ID NO: 110269
  derived and/or modified CDS sequence (opt2) from neuraminidase__InfluenzaA__AEG64859

SEQ ID NO: 116665 - RNA, 1410 nt, Artificial Sequence; identical to SEQ ID NO: 110097
  derived and/or modified CDS sequence (opt2) from neuraminidase__InfluenzaA__AEG64870

SEQ ID NO: 116666 - RNA, 1410 nt, Artificial Sequence; identical to SEQ ID NO: 110289
  derived and/or modified CDS sequence (opt2) from neuraminidase__InfluenzaA__AEG64881

SEQ ID NO: 116667 - RNA, 1410 nt, Artificial Sequence; identical to SEQ ID NO: 110097
  derived and/or modified CDS sequence (opt2) from neuraminidase__InfluenzaA__AEG64892

SEQ ID NO: 116668 - RNA, 1410 nt, Artificial Sequence; identical to SEQ ID NO: 110173
  derived and/or modified CDS sequence (opt2) from neuraminidase__InfluenzaA__AEG64914

SEQ ID NO: 116669 - RNA, 1410 nt, Artificial Sequence; identical to SEQ ID NO: 110173
  derived and/or modified CDS sequence (opt2) from neuraminidase__InfluenzaA__AEG64925

SEQ ID NO: 116670 - RNA, 1410 nt, Artificial Sequence
  derived and/or modified CDS sequence (opt2) from neuraminidase__InfluenzaA__AEG64936
augaaccccaaccagaagaucaucaccaucggcuccgucucccucaccaucgccaccaucugcuuccucaugcagaucgccauccucgucaccaccgucacccuccacuucaagcagcacgagugcaacuccccccccaacaaccaggucaugcucugcgagcccaccaucaucgagcgcaacaucaccgagaucgucuaccucaccaacaccaccaucgagaaggagaucugccccaagcucgccgaguaccgcaacugguccaagccccagugcaacaucaccggcuucgcccccuucuccaaggacaacuccauccgccucuccgccggcggcgacaucugggucacccgcgagcccuacgucuccugcgaccccgacaagugcuaccaguucgcccucggccagggcaccacccucaacaacggccacuccaacgacaccguccacgaccgcacccccuaccgcacccuccucaugaacgagcucggcguccccuuccaccucggcacccgccaggucugcaucgccugguccuccuccuccugccacgacggcaaggccuggcuccacgucugcgucaccggcgaggacaagaacgccaccgccuccuucaucuacaacggccgccucgucgacuccaucggcuccugguccaagaagauccuccgcacccaggaguccgagugcgucugcaucaacggcaccugcaccgucgucaugaccgacggcuccgccuccggcaaggccgacaccaagauccucuucaucgaggagggcaagaucguccacaucuccacccucuccggcuccgcccagcacgucgaggagugcuccugcuacccccgcuaccccggcguccgcugcgucugccgcgacaacuggaagggcuccaaccgccccaucgucgacaucaacgucaaggacuacuccaucgucuccuccuacgucugcuccggccucgucggcgacaccccccgcaagaacgacuccuccuccuccucccacugccucgaccccaacaacgaggagggcggccacggcgucaagggcugggccuucgacgacggcaacgacgucuggaugggccgcaccaucuccgagaagcuccgcuccggcuacgagaccuucaaggucaucgagggcugguccaagcccaacuccaagcuccagaucaaccgccaggucaucgucgagcgcggcaaccgcuccggcuacuccggcaucuucuccgucgagggcaaguccugcaucaaccgcugcuucuacgucgagcucauccgcggccgcaaggaggagaccgaggucugguggaccuccaacuccaucgucgucuucugcggcaccuccggcaccuacggcaccggcuccuggcccgacggcgccgacaucaaccucaugcccaucuga

SEQ ID NO: 116671 - RNA, 1410 nt, Artificial Sequence; identical to SEQ ID NO: 110186
  derived and/or modified CDS sequence (opt2) from neuraminidase__InfluenzaA__AEG64947

SEQ ID NO: 116672 - RNA, 1410 nt, Artificial Sequence; identical to SEQ ID NO: 110173
  derived and/or modified CDS sequence (opt2) from neuraminidase__InfluenzaA__AEG64958

SEQ ID NO: 116673 - RNA, 1410 nt, Artificial Sequence; identical to SEQ ID NO: 110173
  derived and/or modified CDS sequence (opt2) from neuraminidase__InfluenzaA__AEG64969

SEQ ID NO: 116674 - RNA, 1410 nt, Artificial Sequence; identical to SEQ ID NO: 110173
  derived and/or modified CDS sequence (opt2) from neuraminidase__InfluenzaA__AEG64980

SEQ ID NO: 116675 - RNA, 1410 nt, Artificial Sequence
  derived and/or modified CDS sequence (opt2) from neuraminidase__InfluenzaA__AEG64991
augaaccccaaccagaagaucaucaccaucggcuccgucucccucaccaucuccaccaucugcuucuucaugcagaucgccauccucaucaccaccgucacccuccacuucaagcaguacgaguccaacuccccccccaacaaccaggucaugcucugcgagcccaccaucaucgagcgcaacaucaccgagaucgucuaccucaccaacaccaccaucgagaaggagaucugccccaagcucgccgaguaccgcaacugguccaagccccagugcaacaucaccggcuucgcccccuucuccaaggacaacuccauccgccucuccgccggcggcgacaucugggucacccgcgagcccuacgucuccugcgaccccgacaagugcuaccaguucgcccucggccagggcaccacccucaacaacguccacuccaacgacaccguccacgaccgcacccccuaccgcacccuccucaugaacgagcucggcguccccuuccaccucggcaccaagcaggucugcaucgccugguccuccuccuccugccacgacggcaaggccuggcuccacgucugcgucaccggcgacgacaagaacgccaccgccuccuucaucuacaacggccgccucgucgacuccaucgucuccugguccaaggagauccuccgcacccaggaguccgagugcgucugcaucaacggcaccugcaccgucgucaugaccgacggcuccgccuccggcaaggccgacaccaagauccucuucaucgaggagggcaagaucguccacaccuccacccucuccggcuccgcccagcacgucgaggagugcuccugcuacccccgcuaccccggcguccgcugcgucugccgcgacaacuggaagggcuccaaccgccccaucgucgacaucaacaucaaggacuacuccaucgucuccuccuacgucugcuccggccucgucggcgacaccccccgcaagaacgacuccuccuccuccucccacugccucgaccccaacaacgaggagggcggccacggcgucaagggcugggccuucgacgacggcaacgacgucuggaugggccgcaccaucuccgagaagcuccgcuccggcuacgagaccuucaaggucaucgagggcugguccaaccccaacuccaagcuccagaccaaccgccaggucaucgucgaccgcggcaaccgcuccggcuacuccggcaucuucuccgucgagggcaaguccugcaucaaccgcugcuucuacgucgagcucauccgcggccgcaaggaggagaccgagguccucuggaccuccaacuccaucgucgucuucugcggcaccuccggcaccuacggcaccggcuccuggcccgacggcgccgacaucaaccucaugcccaucuga

SEQ ID NO: 116676 - RNA, 1410 nt, Artificial Sequence; identical to SEQ ID NO: 110363
  derived and/or modified CDS sequence (opt2) from neuraminidase__InfluenzaA__AEG65002

SEQ ID NO: 116677 - RNA, 1410 nt, Artificial Sequence
  derived and/or modified CDS sequence (opt2) from neuraminidase__InfluenzaA__AEG65013
augaaccccaaccagaagaucaucaccaucggcuccgucucccucaccaucuccaccaucugcuucuucaugcagaucgccauccucaucaccaccgucacccuccacuucaagcaguacgaguucaacuccccccccaacaaccaggucaugcucugcgagcccaccaucaucgagcgcaacaucaccgagaucgucuaccucaccaacaccaccaucgagaaggagaucugccccaagcucgccgaguaccgcaacugguccaagccccagugcgacaucaccggcuucgcccccuucuccaaggacaacuccauccgccucuccgccggcggcgacaucugggucacccgcgagcccuacgucuccugcgaccccgacaagugcuaccaguucgcccucggccagggcaccacccucaacaacguccacuccaacgacaccguccacgaccgcacccccuaccgcacccuccucaugaacgagcucggcguccccuuccaccucggcaccaagcaggucugcaucgccugguccuccuccuccugccacgacggcaaggccuggcuccacgucugcgucaccggcgacgacaagaacgccaccgccuccuucaucuacaacggccgccucgucgacuccaucgucuccugguccaaggacauccuccgcacccaggaguccgagugcgucugcaucaacggcaccugcaccgucgucaugaccgacggcuccgccuccggcaaggccgacaccaagauccucuucaucgaggagggcaagaucguccacaccuccacccucuccggcuccgcccagcacgucgaggagugcuccugcuacccccgcuaccccggcguccgcugcgucugccgcgacaacuggaagggcuccaaccgccccaucgucgacaucaacaucaaggacuacuccaucgucuccuccuacgucugcuccggccucgucggcgacaccccccgcaagaacgacuccuccuccuccucccacugccucgaccccaacaacgaggagggcggccacggcgucaagggcugggccuucgacgacggcaacgacgucuggaugggccgcaccaucuccgagaagcuccgccucggcuacgagaccuucaaggucaucgagggcugguccaaccccaacuccaagcuccagaccaaccgccaggucaucgucgagcgcggcaaccgcuccggcuacuccggcaucuucuccgucgagggcaaguccugcaucaaccgcugcuucuacgucgagcucauccgcggccgcaaggaggagaccgagguccucuggaccuccaacuccaucgucgucuucugcggcaccuccggcaccuacggcaccggcuccuggcccgacggcgccgacaucaaccucaugcccaucuga

SEQ ID NO: 116678 - RNA, 1410 nt, Artificial Sequence
  derived and/or modified CDS sequence (opt2) from neuraminidase__InfluenzaA__AEG65024
augaaccccaaccagaagaucaucaccaucggcuccgucucccucaccaucuccaccaucugcuucuucaugcagaucgccauccucaucaccaccgucacccuccacuucaagcaguacgaguucaacuccccccccaacaaccacgucaugcucugcgagcccaccaucaucgagcgcaacaucaccgagaucgucuaccucaccaacaccaccaucgagaaggagaucugccccaagcucgccgaguaccgcaacugguccaagccccagugcgacaucaccggcuucgcccccuucuccaaggacaacuccauccgccucuccgccggcggcgacaucugggucacccgcgagcccuacgucuccugcgaccccgacaagugcuaccaguucgcccucggccagggcaccacccucaacaacguccacuccaacgacaccguccacgaccgcacccccuaccgcacccuccucaugaacgagcucggcguccccuuccaccucggcaccaagcaggucugcaucgccugguccuccuccuccugccacgacggcaaggccuggcuccacgucugcgucaccggcgacgacaagaacgccaccgccuccuucaucuacaacggccgccucgucgacuccaucgucuccugguccaaggagauccuccgcacccaggaguccgagugcgucugcaucaacggcaccugcaccgucgucaugaccgacggcuccgccuccggcaaggccgacaccaagauccucuucaucgaggagggcaagaucguccacaccuccacccucuccggcuccgcccagcacgucgaggagugcuccugcuacccccgcuaccccggcguccgcugcgucugccgcgacaacuggaagggcuccaaccgccccaucgucgacaucaacaucaaggacuacuccaucgucuccuccuacgucugcuccggccucgucggcgacaccccccgcaagaacgacuccuccuccuccucccacugccucgaccccaacaacgaggagggcggccacggcgucaagggcugggccuucgacgacggcaacgacgucuggaugggccgcaccaucuccgagaagcuccgccucggcuacgagaccuucaaggucaucgagggcugguccaaccccaacuccaagcuccagaucaaccgccaggucaucgucgaccgcggcaaccgcuccggcuacuccggcaucuucuccgucgagggcaaguccugcaucaaccgcugcuucuacgucgagcucauccgcggccgcaaggaggagaccgagguccucuggaccuccaacuccaucgucgucuucugcggcaccuccggcaccuacggcaccggcuccuggcccgacggcgccgacaucaaccucaugcccaucuga

SEQ ID NO: 116679 - RNA, 1410 nt, Artificial Sequence
  derived and/or modified CDS sequence (opt2) from neuraminidase__InfluenzaA__AEG65035
augaaccccaaccagaagaucaucaccaucggcuccgucucccucaccaucuccaccaucugcuucuucaugcagaucgccauccucaucaccaccgucacccuccacuucaagcaguacgaguucaacuccccccccaacaaccaggucaugcucugcgagcccaccaucaucgagcgcaacaucaccgagaucgucuaccucaccaacaccaccaucgagaaggaggucugccccaagcucgccgaguaccgcaacugguccaagccccagugcaacaucaccggcuucgcccccuucuccaaggacaacuccauccgccucuccgccggcggcgacaucugggucacccgcgagcccuacgucuccugcgaccucgacaagugcuaccaguucgcccucggccagggcaccacccucaacaacguccacuccaacgacaccguccacgaccgcacccccuaccgcacccuccucaugaacgagcucggcguccccuuccaccucggcaccaagcaggucugcaucgccugguccuccuccuccugccacgacggcaaggccuggcuccacgucugcgucaccggcgacgacaagaacgccaccgccuccuucaucuacaacggccgccucgucgacuccaucgucuccugguccaaggagauccuccgcacccaggaguccgagugcgucugcaucaacggcaccugcaccgucgucaugaccgacggcuccgccuccggcaaggccgacaccaagauccucuucaucgaggagggcaagaucguccacaccuccacccucuccggcuccgcccagcacgucgaggagugcuccugcuacccccgcuaccccggcguccgcugcgucugccgcgacaacuggaagggcuccaaccgccccaucgucgacaucaacaucaaggacuacuccaucgucuccuccuacgucugcuccggccucgucggcgacaccccccgcaagaacgacuccuccuccuccucccacugccucgaccccaacaacgaggagggcggccacggcgucaagggcugggccuucgacgacggcaacgacgucuggaugggccgcaccaucuccgagaagcuccgcuccggcuacgagaccuucaaggucaucgagggcugguccaaccccaacuccaagcuccagaucaaccgccaggucaucgucgaccgcggcaaccgcuccggcuacuccggcaucuucuccgucgagggcaaguccugcaucaaccgcugcuucuacgucgagcucauccgcggccgcaaggaggagaacgagguccucuggaccuccaacuccaucgucgucuucugcggcaccuccggcaccuacggcaccggcuccuggcccgacggcgccgacaucaaccucaugcccaucuga

SEQ ID NO: 116680 - RNA, 1410 nt, Artificial Sequence; identical to SEQ ID NO: 110748
  derived and/or modified CDS sequence (opt2) from neuraminidase__InfluenzaA__AEG65057

SEQ ID NO: 116681 - RNA, 1410 nt, Artificial Sequence; identical to SEQ ID NO: 111743
  derived and/or modified CDS sequence (opt2) from neuraminidase__InfluenzaA__AEG65068

SEQ ID NO: 116682 - RNA, 1410 nt, Artificial Sequence
  derived and/or modified CDS sequence (opt2) from neuraminidase__InfluenzaA__AEG65079
augaaccccaaccagaagaucaucaccaucggcuccgucucccucaccaucuccaccaucugcuucuucaugcagaucgccauccucaucaccaccgucacccuccacuucaagcaguacgaguucaacuccccccccaacaaccaggucaugcucugcgagcccaccaucaucgagcgcaacaucaccgagaucgucuaccucaccaacaccaccaucgagaaggagaucugccccaagcucgccgaguaccgcaacugguccaagccccagugcaacaucaccggcuucgcccccuucuccaaggacaacuccauccgccucuccgccggcggcgacaucugggucacccgcgagcccuacgucuccugcgaccccgacaagugcuaccaguucgcccucggccagggcaccacccucaacaacguccacuccaacgacaccguccacgaccgcacccccuaccgcacccuccucaugaacgagcucggcguccccuuccaccucggcaccaagcaggucugcaucgccugguccuccuccuccugccacgacggcaaggccuggcuccacgucugcgucaccggcgacgacaagaacgccaccgccuccuucaucuacaacggccgccucgucgacuccaucgucuccugguccaaggagauccuccgcacccaggaguccgagugcgucugcaucaacggcaccugcaccgucgucaugaccgacggcuccgccuccggcaaggccgacaccaagauccucuucaucgaggagggcaagaucguccacaccuccacccucuccggcuccgccaagcacgucgaggagugcuccugcuacccccgcuaccccggcguccgcugcgucugccgcgacaacuggaagggcuccaaccgccccaucgucgacaucaacaucaaggacuacuccaucgucuccuccuacgucugcuccggccucgucggcgacaccccccgcaagaacgacuccuccuccuccggccacugccucgaccccaacaacgaggagggcggccacggcgucaagggcugggccuucgacgacggcaacgacgucuggaugggccgcaccaucuccgagaagcuccgcuccggcuacgagaccuucaaggucaucgagggcugguccaaccccaacuccaagcuccagaucaaccgccaggucaucgucgaccgcggcaaccgcuccggcuacuccggcaucuucuccgucgagggcaaguccugcaucaaccgcugcuucuacgucgagcucauccgcggccgcaaggaggagaccgagguccucuggaccuccaacuccaucgucgucuucugcggcaccuccggcaccuacggcaccggcuccuggcccgacggcgccgacaucaaccucaugcccaucuga

SEQ ID NO: 116683 - RNA, 1410 nt, Artificial Sequence
  derived and/or modified CDS sequence (opt2) from neuraminidase__InfluenzaA__AEG65090
augaaccccaaccagaagaucaucaccaucggcuccgucucccucaccaucuccaccaucugcuucuucaugcagaucgccauccucaucaccaccgucacccuccacuucaagcaguacgaguucaacuccccccccaacaaccaggucaugcucugcgagcccaccaucaucgagcgcaacaucaccgagaucgucuaccucaccaacaccaccaucgagaaggagaucugccccaagcucgccgaguaccgcaacugguccaagccccagugcaacaucaccggcuucgcccccuucuccaaggacaacuccauccgccucuccgccggcggcgacaucugggucacccgcgagcccuacgucuccugcgaccccgacaagugcuaccaguucgcccucggccagggcaccacccucaacaacguccacuccaacgacaccguccacgaccgcacccccuaccgcacccuccucaugaacgagcucggcguccccuuccaccucggcaccaagcaggucugcaucgccugguccuccuccuccugccacgacggcaaggccuggcuccacgucugcgucaccggcgacgacaagaacgccaccgccuccuucaucuacaacggccgccucgucgacuccaucgucuccugguccaaggagauccuccgcacccaggaguccgagugcgucugcaucaacggcaccugcaccgucgucaugaccgacggcuccgccuccggcaaggccgacaccaagauccucuucaucgaggagggcaagaucauccacaccuccacccucuccggcuccgcccagcacgucgaggagugcuccugcuacccccgcuaccccggcguccgcugcgucugccgcgacaacuggaagggcuccaaccgccccaucgucgacaucaacaucaaggacuacuccaucgucuccuccuacgucugcuccggccucgucggcgacaccccccgcaagaacgacuccuccuccuccucccacugccucgaccccaacaacgaggagggcggccacggcgucaagggcugggccuucgacgacggcaacgacgucuggaugggccgcaccaucuccgagaagcuccgcuccggcuacgagaccuucaaggucaucgagggcugguccaaccccaacuccaagcuccagaucaaccgccaggucaucgucgaccgcggcaaccgcuccggcuacuccggcaucuucuccgucgagggcaaguccugcaucaaccgcugcuucuacgucgagcucauccgcggccgcaaggaggagaccgagguccucuggaccuccaacuccaucgucgucuucugcggcaccuccggcaccuacggcaccggcuccuggcccgacggcgccgacaucucccucaugcccaucuga

SEQ ID NO: 116684 - RNA, 1410 nt, Artificial Sequence
  derived and/or modified CDS sequence (opt2) from neuraminidase__InfluenzaA__AEG65101
augaaccccaaccagaagaucaucaccaucggcuccgucucccucaccaucuccaccaucugcuucuucaugcagaucgccauccucaucaccaccgucacccuccacuucaagcaguacgaguucaacuccccccccgacaaccaggucaugcucugcgagcccaccaucaucgagcgcaacaucaccgagaucgucuaccucaccaacaccaccaucgagaaggagaucugccccaagcucgccgaguaccgcaacugguccaagccccagugcgacaucaccggcuucgcccccuucuccaaggacaacuccauccgccucuccgccggcggcgacaucugggucacccgcgagcccuacgucuccugcgaccccgacaagugcuaccaguucgcccucggccagggcaccacccucaacaacguccacuccaacgacaccguccacgaccgcacccccuaccgcacccuccucaugaacgagcucggcguccccuuccaccucggcaccaagcaggucugcaucgccugguccuccuccuccugccacgacggcaaggccuggcuccacgucugcgucaccggcgacgacaagaacgccaccgccuccuucaucuacaacggccgccucgucgacuccgucgucuccugguccaaggacauccuccgcacccaggaguccgagugcgucugcaucaacggcaccugcaccgucgucaugaccgacggcuccgccuccggcaaggccgacaccaagauccucuucaucgaggagggcaagaucguccacaccuccacccucuccggcuccgcccagcacgucgaggagugcuccugcuacccccgcuaccccggcguccgcugcgucugccgcgacaacuggaagggcuccaaccgccccaucgucgacaucaacaucaagaacuacuccaucgucuccuccuacgucugcuccggccucgucggcgacaccccccgcaagaccgacuccuccuccuccucccacugccucgaccccaacaacgaggagggcggccacggcgucaagggcugggccuucgacgacggcaacgacgucuggaugggccgcaccaucuccgagaagcuccgccucggcuacgagaccuucaaggucaucgagggcugguccaaccccaacuccaagcuccagaucaaccgccaggucaucgucgaccgcggcaaccgcuccggcuacuccggcaucuucuccgucgagggcaaguccugcaucaaccgcugcuucuacgucgagcucauccgcggccgcaaggaggagaccgagguccucuggaccuccaacuccaucgucgucuucugcggcaccuccggcaccuacggcaccggcuccuggcccgacggcgccgacaucaaccucaugcccaucuga

SEQ ID NO: 116685 - RNA, 1410 nt, Artificial Sequence
  derived and/or modified CDS sequence (opt2) from neuraminidase__InfluenzaA__AEG65123
augaaccccaaccagaagaucaucaccaucggcuccgucucccucaccaucuccaccaucugcuucuucaugcagaucgccauccucaucaccaccgucacccuccacuucaagcaguacgaguucaacuccccccccaacaaccaggucaugcucugcgagcccaccaccaucgagcgcaacaucaccgagaucgucuaccucaccaacaccaccaucgagaaggagaucugccccaagcucgccgaguaccgcaacugguccaagccccagugcgacaucaccggcuucgcccccuucuccaaggacaacuccauccgccucuccgccggcggcgacaucugggucacccgcgagcccuacgucuccugcgaccccgacaagugcuaccaguucgcccucggccagggcaccacccucaacaacguccacuccaacgacaccguccacgaccgcacccccuaccgcacccuccucaugaacgagcucggcguccccuuccaccucggcaccaagcaggucugcaucgccugguccuccuccuccugccacgacggcaaggccuggcuccacgucugcgucaccggcgacgacaagaacgccaccgccuccuucaucuacaacggccgccucgucgacuccgucgucuccugguccaaggacauccuccgcacccaggaguccgagugcgucugcaucaacggcaccugcaccgucgucaugaccgacggcuccgccuccggcaaggccgacaccaagauccucuucaucgaggagggcaagaucguccacaccuccacccucuccggcuccgcccagcacgucgaggagugcuccugcuacccccgcuaccccggcguccgcugcgucugccgcgacaacuggaagggcuccaaccgccccaucgucgacaucaacaucaagaacuacuccaucgucuccuccuacgucugcuccggccucgucggcgacaccccccgcaagaccgacuccuccuccuccucccacugccucgaccccaacaacgaggagggcggccacggcgucaagggcugggccuucgacgacggcaacgacgucuggaugggccgcaccaucuccgagaagcuccgccucggcuacgagaccuucaaggucaucgagggcugguccaaccccaacuccaagcuccagaucaaccgccaggucaucgucgaccgcggcaaccgcuccggcuacuccggcaucuucuccgucgagggcaaguccugcaucaaccgcugcuucuacgucgagcucauccgcggccgcaaggaggagaacgagguccucuggaccuccaacuccaucgucgucuucugcggcaccuccggcaccuacggcaccggcuccuggcccgacggcgccgacaucaaccucaugcccaucuga

SEQ ID NO: 116686 - RNA, 1410 nt, Artificial Sequence; identical to SEQ ID NO: 111743
  derived and/or modified CDS sequence (opt2) from neuraminidase__InfluenzaA__AEG65134

SEQ ID NO: 116687 - RNA, 1410 nt, Artificial Sequence
  derived and/or modified CDS sequence (opt2) from neuraminidase__InfluenzaA__AEG65145
augaaccccaaccagaagaucaucaccaucggcuccgucucccucaccaucgccaccaucugcuuccucaugcagaucgccauccucgucaccaccgucacccuccacuucaagcaguacgagugcaacuccccccccaacaaccaggucaugcucugcgagcccaccaucaucgagcgcaacaucaccgagaucgucuaccucaccaacaccaccaucgagaaggagaucugccccaagcucgccgaguaccgcaacugguccaagccccagugcaacaucaccggcuucgcccccuucuccaaggacaacuccauccgccucuccgccggcggcgacaucugggucacccgcgagcccuacgucuccugcgaccccgacaagugcuaccaguucgcccucggccagggcaccacccucaacaacggccacuccaacgacaccguccacgaccgcacccccuaccgcacccuccucaugaacgagcucggcguccccuuccaccucggcacccgccaggucugcaucgccugguccuccuccuccugccacgacggcaaggccuggcuccacgucugcgucaccggcgacgacgagaacgccaccgccuccuucaucuacaacggccgccucgucgacuccaucggcuccugguccaagaagauccuccgcacccaggaguccgagugcgucugcaucaacggcaccugcaccgucgucaugaccgacggcuccgccuccggcaaggccgacaccaagauccucuucaucgaggagggcaagaucguccacaucuccacccucuccggcuccgcccagcacgucgaggagugcuccugcuacccccgcuaccccggcguccgcugcgucugccgcgacaacuggaagggcuccaaccgccccaucgucgacaucaacgucaaggacuacuccaucgucuccuccuacgucugcuccggccucgucggcgacaccccccgcaagaacgacuccuucuccaacucccacugccucgaccccaacaacgaggagggcggccacggcgucaagggcugggccuucgacgacggcaacgacgucuggaugggccgcaccaucuccgagaagcuccgcuccggcuacgagaccuucaaggucaucgagggcugguccaagcccaacuccaagcuccagaucaaccgccaggucaucgucgagcgcggcaaccgcuccggcuacuccggcaucuucuccgucgagggcaaguccugcaucaaccgcugcuucuacgucgagcucauccgcggccgcaaggaggagaccgaggucugguggaccuccaacuccaucgucgucuucugcggcaccuccggcaccuacggcaccggcuccuggcccgacggcgccgacaucaaccucaugcccaucuga

SEQ ID NO: 116688 - RNA, 1410 nt, Artificial Sequence
  derived and/or modified CDS sequence (opt2) from neuraminidase__InfluenzaA__AEG65156
augaaccccaaccagaagaucaucaccaucggcuccgucucccucaccaucgccaccaucugcuuccucaugcagaucgccauccucgucaccaccgucacccuccacuucaagcaguacgagugcaacuccccccccaacaaccaggucaugcucugcgagcccaccaucaucgagcgcaacaucaccgagaucgucuaccucaccaacaccaccaucgagaaggagaucugccccaagcucgccgaguaccgcaacugguccaagccccagugcaacaucaccggcuucgcccccuucuccaaggacaacuccauccgccucuccgccggcggcgacaucugggucacccgcgagcccuacgucuccugcgaccccgacaagugcuaccaguucgcccucggccagggcaccacccucaacaacggccacuccaacgacaccguccacgaccgcacccccuaccgcacccuccucaugaacgagcucggcguccccuuccaccucggcacccgccaggucugcaucgccugguccuccuccuccugccacgacggcaaggccuggcuccacgucugcgucaccggcgacgacgagaacgccaccgccuccuucaucuacaacggccgccucgucgacuccaucggcuccugguccaagaagauccuccgcacccaggaguccgagugcgucugcaucaacggcaccugcaccgucgucaugaccgacggcuccgccuccggcaaggccgacaccaagauccucuucaucgaggagggcaagaucguccacaccuccacccucuccggcuccgcccagcacgucgaggagugcuccugcuacccccgcuaccccggcguccgcugcgucugccgcgacaacuggaagggcuccaaccgccccaucgucgacaucaacgucaaggacuacuccaucgucuccuccuacgucugcuccggccucgucggcgacaccccccgcaagaacgacuccuucuccuccucccacugccucgaccccaacaacgaggagggcggccacggcgucaagggcugggccuucgacgacggcaacgacgucuggaugggccgcaccaucuccgagaagcuccgcuccggcuacgagaccuucaaggucaucgagggcugguccaagcccaacuccaagcuccagaucaaccgccaggucaucgucgagcgcggcaaccgcuccggcuacuccggcaucuucuccgucgagggcaaguccugcaucaaccgcugcuucuacgucgagcucauccgcggccgcaaggaggagaccgaggucugguggaccuccaacuccaucgucgucuucugcggcaccuccggcaccuacggcaccggcuccuggcccgacggcgccgacaucaaccucaugcccaucuga

SEQ ID NO: 116689 - RNA, 1410 nt, Artificial Sequence
  derived and/or modified CDS sequence (opt2) from neuraminidase__InfluenzaA__AEG65167
augaaccccaaccagaagaucaucaccaucggcuccgucucccucaccaucgccaccaucugcuuccucaugcagaucgccauccucgucaccaccgucacccuccacuucaagcaguacgagugcaacuccccccccaacaaccaggucaugcucugcgagcccaccaucaucgagcgcaacaucaccgagaucgucuaccucaccaacaccaccaucgagaaggagaucugccccaagcucgccgaguaccgcaacugguccaagccccagugcaacaucaccggcuucgcccccuucuccaaggacaacuccauccgccucuccgccggcggcgacaucugggucacccgcgagcccuacgucuccugcgaccccgacaagugcuaccaguucgcccucggccagggcaccacccucaacaacggccacuccaacgacaccguccacgaccgcacccccuaccgcacccuccucaugaacgagcucggcguccccuuccaccucggcacccgccaggucugcaucgccugguccuccuccuccugccacgacggcaaggccuggcuccacgucugcgucaccggcgacgacgagaacgccaccgccuccuucaucuacaacggccgccucgucgacuccaucggcuccugguccaagaagauccuccgcacccaggaguccgagugcgucugcaucaacggcaccugcaccgucgucaugaccgacggcuccgccuccggcaaggccgacaccaagauccucuucaucgaggagggcaagaucguccacaucuccacccucuccggcuccgcccgccacgucgaggagugcuccugcuacccccgcuaccccggcguccgcugcgucugccgcgacaacuggaagggcuccaaccgccccaucgucgacaucaacgucaaggacuacuccaucgucuccuccuacgucugcuccggccucgucggcgacaccccccgcaagaacgacuccuucuccuccucccacugccucgaccccaacaacgaggagggcggccacggcgucaagggcugggccuucgacgacggcaacgacgucuggaugggccgcaccaucuccgagaagcuccgcuccggcuacgagaccuucaaggucaucgagggcugguccaagcccaacuccaagcuccagaucaaccgccaggucaucgucgagcgcggcaaccgcuccggcuacuccggcaucuucuccgucgagggcaaguccugcaucaaccgcugcuucuacgucgagcucauccgcggccgcaaggaggagaccgaggucugguggaccuccaacuccaucgucgucuucugcggcaccuccggcaccuacggcaccggcuccuggcccgacggcgccgacaucaaccucaugcccaucuga

SEQ ID NO: 116690 - RNA, 1410 nt, Artificial Sequence
  derived and/or modified CDS sequence (opt2) from neuraminidase__InfluenzaA__AEG65178
augaaccccaaccagaagaucaucaccaucggcuccgucucccucaccaucgccaccaucugcuuccucaugcagaucgccauccucgucaccaccgucacccuccacuucaagcagcacgagugcaacuccccccccaacaaccaggucaugcucugcgagcccaccaucaucgagcgcaacaucaccgagaucgucuaccucaccaacaccaccaucgagaaggagaucugccccaagcucgccgaguaccgcaacugguccaagccccagugcaacaucaccggcuucgcccccuucuccaaggacaacuccauccgccucuccgccggcggcgacaucugggucacccgcgagcccuacgucuccugcgaccccgacaagugcuaccaguucgcccucggccagggcaccacccucaacaacggccacuccaacaacaccguccacgaccgcacccccuaccgcacccuccucaugaacgagcucggcguccccuuccaccucggcacccgccaggucugcaucgccugguccuccuccuccugccacgacggcaaggccuggcuccacgucugcgucaccggcgacgacaagaacgccaccgccuccuucaucuacaacggccgccucgucgacuccaucggcuccugguccaagaacauccuccgcacccaggaguccgagugcgucugcaucaacggcaccugcaccgucgucaugaccgacggcuccgccuccggcaaggccgacaccaagauccucuucaucgaggagggcaagaucguccacaucuccacccucuccggcuccgcccagcacgucgaggagugcuccugcuacccccgcuaccccggcguccgcugcgucugccgcgacaacuggaagggcuccaaccgccccaucgucgacaucaacgucaaggacuacuccaucgucuccuccuacgucugcuccggccucgucggcgacaccccccgcaagaacgacuccuucuccuccucccacugccucgaccccaacaacgaggagggcggccacggcgucaagggcugggccuucgacgacggcaacgacgucuggaugggccgcaccaucuccgagaagcuccgcuccggcuacgagaccuucaaggucaucgagggcugguccaagcccaacuccaagcuccagaucaaccgccaggucaucgucgagcgcggcaaccgcuccggcuacuccggcaucuucuccgucgagggcaaguccugcaucaaccgcugcuucuacgucgagcucauccgcggccgcaaggaggagaccgaggucugguggaccuccaacuccaucgucgucuucugcggcaccuccggcaccuacggcaccggcuccuggcccgacggcgccgacaucaaccucaugcccaucuga

SEQ ID NO: 116691 - RNA, 1410 nt, Artificial Sequence
  derived and/or modified CDS sequence (opt2) from neuraminidase__InfluenzaA__AEG65189
augaaccccaaccagaagaucaucaccaucggcuccgucucccucaccaucuccaccaucugcuucuucaugcagaucgccauccucaucaccaccgucacccuccacuucaagcaguacgaguucaacuccccccccaacaaccaggucaugcucugcgagcccaccaucaucgagcgcaacaucaccgagaucgucuaccucaccaacaccaccaucgagaaggagaucugccccaagcucgccgaguaccgcaacugguccaagccccagugcgacaucaccggcuucgcccccuucuccaaggacaacuccauccgccucuccgccggcggcgacaucugggucacccgcgagcccuacgucuccugcgaccccgacaagugcuaccaguucgcccucggccagggcaccacccucaacaacguccacuccaacgacaccguccacgaccgcacccccuaccgcacccuccucaugaacgagcucggcguccccuuccaccucggcaccaagcaggucugcaucgccugguccuccuccuccugccacgacggcaaggccuggcuccacgucugcgucaccggcgacgacaagaacgccaccgccuccuucaucuacaacggccgccucgucgacuccaucgucuccugguccaaggagauccuccgcacccaggaguccgagugcgucugcaucaacggcaccugcaccgucgucaugaccgacggcuccgccuccggcaaggccgacaccaagauccucuucaucgaggagggcaagaucguccacaccuccacccucuccggcuccgcccagcacgucgaggagugcuccugcuacccccgcuaccccggcguccgcugcgucugccgcgacaacuggaagggcuccaaccgccccaucgucgacaucaacaucaacgacuacuccaucgucuccuccuacgucugcuccggccucgucggcgacaccccccgcaagaacgacuccuccuccuccucccacugccucgaccccaacaacgaggagggcggccacggcgucaagggcugggccuucgacgacggcaacgacgucuggaugggccgcaccaucuccgagaagcuccgcuccggcuacgagaccuucaaggucaucgagggcugguccaaccccaacuccaagcuccagaucaaccgccaggucaucgucgaccgcggcaaccgcuccggcuacuccggcaucuucuccgucgagggcaaguccugcaucaaccgcugcuucuacgucgagcucauccgcggccgcaaggaggagaccgagguccucuggaccuccaacuccaucgucgucuucugcggcaccuccggcaccuacggcaccggcuccuggcccgacggcgccgacaucaaccucaugcccaucuga

SEQ ID NO: 116692 - RNA, 1410 nt, Artificial Sequence
  derived and/or modified CDS sequence (opt2) from neuraminidase__InfluenzaA__AEG65200
augaaccccaaccagaagaucaucaccaucggcuccgucucccucaccaucuccaccaucugcuucuucaugcagaucgccauccucaucaccaccgucacccuccacuucaagcaguacgaguucaacuccccccccaacaaccaggucaugcucugcgagcccaccaucaucgagcgcaacaucaccgagaucgucuaccucaccaacaccaccaucgagaaggagaucugccccaagcucgccgaguaccgcaacugguccaagccccagugcgacaucaccggcuucgcccccuucuccaaggacaacuccauccgccucuccgccggcggcgacaucugggucacccgcgagcccuacgucuccugcgaccccgacaagugcuaccaguucgcccucggccagggcaccacccucaacaacguccacuccaacgacaccguccacgaccgcacccccuaccgcacccuccucaugaacgagcucggcguccccuuccaccucggcaccaagcaggucugcaucgccugguccuccuccuccugccacgacggcaaggccuggcuccacgucugcgucaccggcgacgacaagaacgccaccgccuccuucaucuacaacggccgccucgucgacuccaucgucuccugguccaaggagguccuccgcacccaggaguccgagugcgucugcaucaacggcaccugcaccgucgucaugaccgacggcuccgccuccggcaaggccgacaccaagauccucuucaucgaggagggcaagaucguccacaccuccacccucuccggcuccgcccagcacgucgaggagugcuccugcuacccccgcuaccccggcguccgcugcgucugccgcgacaacuggaagggcuccaaccgccccaucgucgacaucaacaucaaggacuacuccaucgucuccuccuacgucugcuccggccucgucggcgacaccccccgcaagaacgacuccuccuccuccucccacugccucgaccccaacaacgaggagggcggccacggcgucaagggcugggccuucgacgacggcaacgacgucuggaugggccgcaccaucuccgagaagcuccgcuccggcuacgagaccuucaaggucaucgagggcugguccaaccccaacuccaagcuccagaccaaccgccaggucaucgucgaccgcggcaaccgcuccggcuacuccggcaucuucuccgucgagggcaaguccugcaucaaccgcugcuucuacgucgagcucauccgcggccgcaaggaggagaccgagguccucuggaccuccaacuccaucgucgucuucugcggcaccuccggcaccuacggcaccggcuccuggcccgacggcgccgacaucaaccucaugcccaucuga

SEQ ID NO: 116693 - RNA, 1410 nt, Artificial Sequence; identical to SEQ ID NO: 110748
  derived and/or modified CDS sequence (opt2) from neuraminidase__InfluenzaA__AEG65211

SEQ ID NO: 116694 - RNA, 1410 nt, Artificial Sequence; identical to SEQ ID NO: 110750
  derived and/or modified CDS sequence (opt2) from neuraminidase__InfluenzaA__AEG65222

SEQ ID NO: 116695 - RNA, 1410 nt, Artificial Sequence
  derived and/or modified CDS sequence (opt2) from neuraminidase__InfluenzaA__AEG65233
augaaccccaaccagaagaucaucaccaucggcuccgucucccucaccaucuccaccaucugcuucuucaugcagaucgccauccucaucaccaccgucacccuccacuucaagcaguacgaguucaacuccccccccaacaaccaggucaugcucugcgagcccaccaucaucgagcgcaacaucaccgagaucgucuaccucaccaacaccaccaucgagaaggagaucugccccaagcucgccgaguaccgcaacugguccaagccccagugcgacaucaccggcuucgcccccuucuccaaggacaacuccauccgccucuccgccggcggcgacaucugggucacccgcgagcccuacgucuccugcgaccccgacaagugcuaccaguucgcccucggccagggcaccacccucaacaacguccacuccaacgacaccguccacgaccgcacccccuaccgcacccuccucaugaacgagcucggcguccccuuccaccucggcaccaagcaggucugcaucgccugguccuccuccuccugccacgacggcaaggccuggcuccacgucugcgucaccggcgacgacaagaacgccaccgccuccuucaucuacaacggccgccucgucgacuccaucgucuccugguccaagaagauccuccgcacccaggaguccgagugcgucugcaucaacggcaccugcaccgucgucaugaccgacggcuccgccuccggcaaggccgacaccaagauccucuucaucgaggagggcaagaucguccacaccuccacccucuccggcuccgcccagcacgucgaggagugcuccugcuacccccgcuaccccggcguccgcugcgucugccgcgacaacuggaagggcuccaaccgccccaucaucgacaucaacaucaaggacuacuccaucgucuccuccuacgucugcuccggccucgucggcgacaccccccgcaagaacgacuccuccuccuccucccacugccucgaccccaacaacgaggagggcggccacggcgucaagggcugggccuucgacgacggcaacgacgucuggaugggccgcaccaucuccgagaagcuccgcuccggcuacgagaccuucaaggucaucgagggcugguccaaccccaacuccaagcuccagaucaaccgccaggucaucgucgaccgcggcaaccgcuccggcuacuccggcaucuucuccgucgagggcaaguccugcaucaaccgcugcuucuacgucgagcucauccgcggccgcaaggaggagaccgagguccucuggaccuccaacuccaucgucgucuucugcggcaccuccggcaccuacggcaccggcuccuggcccgacggcgccgacaucaaccucaugcccaucuga

SEQ ID NO: 116696 - RNA, 1410 nt, Artificial Sequence
  derived and/or modified CDS sequence (opt2) from neuraminidase__InfluenzaA__AEG65244
augaaccccaaccagaagaucaucaccaucggcuccgucucccucaccaucuccaccaucugcuucuucaugcagaucgccauccucaucaccaccgucacccuccacuucaagcaguacgaguucaacuccccccccaacaaccaggucaugcucugcgagcccaccaucaucgagcgcaacaucaccgagaucgucuaccucaccaacaccaccaucgagaaggagaucugccccaagcucgccgaguaccgcaacugguccaagccccagugcaacaucaccggcuucgcccccuucuccaaggacaacuccauccgccucuccgccggcggcgacaucugggucacccgcgagcccuacgucuccugcgaccccgacaagugcuaccaguucgcccucggccagggcaccacccucaacaacguccacuccaacgacaccguccacgaccgcacccccuaccgcacccuccucaugaacgagcucggcguccccuuccaccucggcacccagcaggucugcaucgccugguccuccuccuccugccacgacggcaaggccuggcuccacgucugcgucaccggcgacgacgagaacgccaccgccuccuucaucuacaacggccgccucgucgacuccaucgucuccugguccaagaagauccuccgcacccaggaguccgagugcgucugcaucaacggcaccugcaccgucgucaugaccgacggcuccgccuccggcaaggccgacaccaagauccucuucaucgaggagggcaagaucguccacaccuccacccucuccggcuccgcccagcacgucgaggagugcuccugcuacccccgcuaccccggcguccgcugcgucugccgcgacaacuggaagggcuccaaccgccccaucgucgacaucaacaucaaggacuacuccaucgccuccuccuacgucugcuccggccucgucggcgacaccccccgcaagaacgacuccuccuccuccucccacugccucgaccccaacaacgaggagggcggccacggcgucaagggcugggccuucgacgacggcaacgacgucuggaugggccgcaccaucuccgagaagcuccgcuccggcuacgagaccuucaaggucaucgagggcugguccaaccccaacuccaagcuccagaucaaccgccaggucaucgucgaccgcggcaaccgcuccggcuacuccggcaucuucuccgucgagggcaaguccugcaucaaccgcugcuucuacgucgagcucauccgcggccgcaaccaggagaccgagguccucuggaccuccaacuccaucgucgucuucugcggcaccuccggcaccuacggcaccggcuccuggcccgacggcgccgacaucaaccucaugcccaucuga

SEQ ID NO: 116697 - RNA, 1410 nt, Artificial Sequence; identical to SEQ ID NO: 110750
  derived and/or modified CDS sequence (opt2) from neuraminidase__InfluenzaA__AEG65255

SEQ ID NO: 116698 - RNA, 1410 nt, Artificial Sequence; identical to SEQ ID NO: 110627
  derived and/or modified CDS sequence (opt2) from neuraminidase__InfluenzaA__AEG65266

SEQ ID NO: 116699 - RNA, 1410 nt, Artificial Sequence; identical to SEQ ID NO: 110627
  derived and/or modified CDS sequence (opt2) from neuraminidase__InfluenzaA__AEG65277

SEQ ID NO: 116700 - RNA, 1410 nt, Artificial Sequence
  derived and/or modified CDS sequence (opt2) from neuraminidase__InfluenzaA__AEG65288
augaaccccaaccagaagaucaucaccaucggcuccgucucccucaccaucgccaccaucugcuuccucaugcagaucgccauccucgucaccaccgucacccuccacuucaagcagcacgagugcaacuccccccccaacaaccaggucaugcucugcgagcccaccaucaucgagcgcaacaucaccgagaucgucuaccucaccaacaccaccaucgagaaggagaucugccccaagcucgucgaguaccgcaacugguccaagccccagugcaacaucaccggcuucgcccccuucuccaaggacaacuccauccgccucuccgccggcggcgacaucugggucacccgcgagcccuacgucuccugcgaccccgacaagugcuaccaguucgcccucggccagggcaccacccucaacaacggccacuccaacgacaccguccacgaccgcacccccuaccgcacccuccucaugaacgagcucggcguccccuuccaccucggcacccgccaggucugcaucgccugguccuccuccuccugccacgacggcaaggccuggcuccacgucugcgucaccggcgacgacaagaacgccaccgccuccuucaucuacaacggccgccucgucgacuccaucggcuccugguccaagaagauccuccgcacccaggaguccgagugcgucugcaucaacggcaccugcaccgucgucaugaccgacggcuccgccuccggcaaggccgacaccaagauccucuucaucgaggagggcaagaucguccacaucuccacccucuccggcuccgcccagcacgucgaggagugcuccugcuacccccgcuaccccggcguccgcugcgucugccgcgacaacuggaagggcuccaaccgccccaucgucgacaucaacgucaaggacuacuccaucgucuccuccuacgucugcuccggccucgucggcgacaccccccgcaagaacaacuccuucuccuccucccacugccucgaccccaacaacgaggagggcggccacggcgucaagggcugggccuucgacgacggcaacgacgucuggaugggccgcaccaucuccgagaagcuccgcuccggcuacgagaccuucaaggucaucgagggcugguccaagcccaacuccaagcuccagaucaaccgccaggucaucgucgagcgcggcaaccgcuccggcuacuccggcaucuucuccgucgagggcaaguccugcaucaaccgcugcuucuacgucgagcucauccgcggccgcaaggaggagaccgaggucugguggaccuccaacuccaucgucgucuucugcggcaccuccggcaccuacggcaccggcuccuggcccgacggcgccgacaucaaccucaugcccaucuga

SEQ ID NO: 116701 - RNA, 1410 nt, Artificial Sequence; identical to SEQ ID NO: 110627
  derived and/or modified CDS sequence (opt2) from neuraminidase__InfluenzaA__AEG65299

SEQ ID NO: 116702 - RNA, 1410 nt, Artificial Sequence; identical to SEQ ID NO: 110750
  derived and/or modified CDS sequence (opt2) from neuraminidase__InfluenzaA__AEG65310

SEQ ID NO: 116703 - RNA, 1410 nt, Artificial Sequence; identical to SEQ ID NO: 110750
  derived and/or modified CDS sequence (opt2) from neuraminidase__InfluenzaA__AEG65321

SEQ ID NO: 116704 - RNA, 1410 nt, Artificial Sequence; identical to SEQ ID NO: 110750
  derived and/or modified CDS sequence (opt2) from neuraminidase__InfluenzaA__AEG65332

SEQ ID NO: 116705 - RNA, 1410 nt, Artificial Sequence; identical to SEQ ID NO: 110750
  derived and/or modified CDS sequence (opt2) from neuraminidase__InfluenzaA__AEG65354

SEQ ID NO: 116706 - RNA, 1410 nt, Artificial Sequence; identical to SEQ ID NO: 110750
  derived and/or modified CDS sequence (opt2) from neuraminidase__InfluenzaA__AEG65365

SEQ ID NO: 116707 - RNA, 1410 nt, Artificial Sequence
  derived and/or modified CDS sequence (opt2) from neuraminidase__InfluenzaA__AEG65376
augaaccccaaccagaagaucaucaccaucggcuccgucucccucaccaucuccaccaucugcuucuucaugcagaucgccauccucaucaccaccgucacccuccacuucaagcaguacgaguucaacuccccccccaacaaccaggucaugcucugcgagcccaccaucaucgagcgcaacaucaccgagaucgucuaccucaccaacaccaccaucgagaaggagaucugccccaagcucgccgaguaccgcaacugguccaagccccagugcaacaucaccggcuucgcccccuucuccaaggacaacuccauccgccucuccgccggcggcgacaucugggucacccgcgagcccuacgucuccugcgaccccgacaagugcuaccaguucgcccucggccagggcaccacccucaacaacguccacuccaacgacaccguccacgaccgcacccccuaccgcacccuccucaugaacgagcucggcguccccuuccaccucggcacccagcaggucugcaucgccugguccuccuccuccugccacgacggcaaggccuggcuccacgucugcgucaccggcgacgacgagaacgccaccgccuccuucaucuacaacggccgccucgucgacuccaucgucuccugguccaagaagauccuccgcacccaggaguccgagugcgucugcaucaacggcaccugcaccgucgucaugaccgacggcuccgccuccggcaaggccgacaccaagauccucuucaucgaggagggcaagaucguccacaccuccacccucuccggcuccgcccagcacgucgaggagugcuccugcuacccccgcuaccccggcguccgcugcgucugccgcgacaacuggaagggcuccaaccgccccaucgucgacaucaacaucaaggacuacuccaucgucuccuccuacgucugcuccggccucgucggcgacaccccccgcaagaacgacuccuccuccuccucccacugccucgaccccaacaacgaggagggcggccacggcgucaagggcugggccuucgacgacggcaacgacgucuggaugggccgcaccaucuccgagaagcuccgcuccggcuacgagaccuucaaggucaucgagggcugguccaaccccaacuccaagcuccagaucaaccgccaggucaucgucgaccgcggcaaccgcuccggcuacuccggcaucuucuccgucgagggcaaguccugcaucaaccgcugcuucuacgucgagcucauccgcggccgcaaccaggagaccgagguccucuggaccuccaacuccaucgucgucuucugcggcaccuccggcaccuacggcaccggcuccuggcccgacggcgccgacaucaaccucaugcccaucuga

SEQ ID NO: 116708 - RNA, 1410 nt, Artificial Sequence; identical to SEQ ID NO: 110627
  derived and/or modified CDS sequence (opt2) from neuraminidase__InfluenzaA__AEG65387

SEQ ID NO: 116709 - RNA, 1410 nt, Artificial Sequence; identical to SEQ ID NO: 110627
  derived and/or modified CDS sequence (opt2) from neuraminidase__InfluenzaA__AEG65398

SEQ ID NO: 116710 - RNA, 1410 nt, Artificial Sequence; identical to SEQ ID NO: 110627
  derived and/or modified CDS sequence (opt2) from neuraminidase__InfluenzaA__AEG65409

SEQ ID NO: 116711 - RNA, 1410 nt, Artificial Sequence; identical to SEQ ID NO: 110627
  derived and/or modified CDS sequence (opt2) from neuraminidase__InfluenzaA__AEG65420

SEQ ID NO: 116712 - RNA, 1410 nt, Artificial Sequence; identical to SEQ ID NO: 110627
  derived and/or modified CDS sequence (opt2) from neuraminidase__InfluenzaA__AEG65431

SEQ ID NO: 116713 - RNA, 1410 nt, Artificial Sequence; identical to SEQ ID NO: 110748
  derived and/or modified CDS sequence (opt2) from neuraminidase__InfluenzaA__AEG65442

SEQ ID NO: 116714 - RNA, 1410 nt, Artificial Sequence; identical to SEQ ID NO: 110750
  derived and/or modified CDS sequence (opt2) from neuraminidase__InfluenzaA__AEG65453

SEQ ID NO: 116715 - RNA, 1410 nt, Artificial Sequence; identical to SEQ ID NO: 110750
  derived and/or modified CDS sequence (opt2) from neuraminidase__InfluenzaA__AEG65464

SEQ ID NO: 116716 - RNA, 1410 nt, Artificial Sequence; identical to SEQ ID NO: 110750
  derived and/or modified CDS sequence (opt2) from neuraminidase__InfluenzaA__AEG65475

SEQ ID NO: 116717 - RNA, 1410 nt, Artificial Sequence
  derived and/or modified CDS sequence (opt2) from neuraminidase__InfluenzaA__AEG65486
augaaccccaaccagaagaucaucaccaucggcuccgucucccucaccaucuccaccaucugcuucuucaugcagaucgccauccucaucaccaccgucacccuccacuucaagcaguacgaguucaacuccccccccaacaaccaggucaugcucugcgagcccaccaucaucgagcgcaacaucaccgagaucgucuaccucaccaacaccaccaucgagaaggagaucugccccaagcucgccgagcaccgcaacugguccaagccccagugcgacaucaccggcuucgcccccuucuccaaggacaacuccauccgccucuccgccggcggcgacaucugggucacccgcgagcccuacgucuccugcgaccccgacaagugcuaccaguucgcccucggccagggcaccacccucaacaacguccacuccaacgacaccguccacgaccgcacccccuaccgcacccuccucaugaacgagcucggcguccccuuccaccucggcaccaagcaggucugcaucgccugguccuccuccuccugccacgacggcaaggccuggcuccacgucugcgucaccggcgacgacaagaacgccaccgccuccuucaucuacaacggccgccucgucgacuccaucgucuccugguccaagaagauccuccgcacccaggaguccgagugcgucugcaucaacggcaccugcaccgucgucaugaccgacggcuccgccuccggcaaggccgacaccaagauccucuucaucgaggagggcaagaucguccacaccuccacccucuccggcuccgcccagcacgucgaggagugcuccugcuacccccgcuaccccggcguccgcugcgucugccgcgacaacuggaagggcuccaaccgccccaucgucgacaucaacaucaaggacuacuccaucgucuccuccuacgucugcuccggccucgucggcgacaccccccgcaagaacgacuccuccuccuccucccacugccucgaccccaacaacgaggagggcggccacggcgucaagggcugggccuucgacgacggcaacgacgucuggaugggccgcaccaucuccgagaagcuccgcuccggcuacgagaccuucaaggucaucgagggcugguccaaccccaacuccaagcuccagaucaaccgccaggucaucgucgaccgcggcaaccgcuccggcuacuccggcaucuucuccgucgagggcaaguccugcaucaaccgcugcuucuacgucgagcucauccgcggccgcaaggaggagaccgagguccucuggaccuccaacuccaucgucgucuucugcggcaccuccggcaccuacggcaccggcuccuggcccgacggcgccgacaucaaccucaugcccaucuga

SEQ ID NO: 116718 - RNA, 1410 nt, Artificial Sequence; identical to SEQ ID NO: 110750
  derived and/or modified CDS sequence (opt2) from neuraminidase__InfluenzaA__AEG65497

SEQ ID NO: 116719 - RNA, 1410 nt, Artificial Sequence; identical to SEQ ID NO: 110750
  derived and/or modified CDS sequence (opt2) from neuraminidase__InfluenzaA__AEG65508

SEQ ID NO: 116720 - RNA, 1410 nt, Artificial Sequence; identical to SEQ ID NO: 110750
  derived and/or modified CDS sequence (opt2) from neuraminidase__InfluenzaA__AEG65519

SEQ ID NO: 116721 - RNA, 1410 nt, Artificial Sequence; identical to SEQ ID NO: 110750
  derived and/or modified CDS sequence (opt2) from neuraminidase__InfluenzaA__AEG65530

SEQ ID NO: 116722 - RNA, 1410 nt, Artificial Sequence; identical to SEQ ID NO: 110750
  derived and/or modified CDS sequence (opt2) from neuraminidase__InfluenzaA__AEG65541

SEQ ID NO: 116723 - RNA, 1410 nt, Artificial Sequence
  derived and/or modified CDS sequence (opt2) from neuraminidase__InfluenzaA__AEG65563
augaaccccaaccagaagaucaucaccaucggcuccgucucccucaccaucuccaccaucugcuucuucaugcagaucgccauccucaucaccaccgucacccuccacuucaagcaguacgaguucaacuccccccccaacaaccaggucaugcucugcgagcccaccaucaucgagcgcaacaucaccgagaucgucuaccucaccaacaccaccaucgagaaggagaucugccccaagcucgccgaguaccgcaacugguccaagccccagugcgacaucaccggcuucgcccccuucuccaaggacaacuccauccgccucuccgccggcggcgacaucugggucacccgcgagcccuacgucuccugcgaccccgaccgcugcuaccaguucgcccucggccagggcaccacccucaacaacguccacuccaacgacaccguccacgaccgcacccccuaccgcacccuccucaugaacgagcucggcguccccuuccaccucggcaccaagcaggucugcaucgccugguccuccuccuccugccacgacggcaaggccuggcuccacgucugcgucaccggcgacgacaagaacgccaccgccuccuucaucuacaacggccgccucgucgacuccaucgucuccugguccaagaagauccuccgcacccaggaguccgagugcgucugcaucaacggcaccugcaccgucgucaugaccgacggcuccgccuccggcaaggccgacaccaagauccucuucaucgaggagggcaagaucguccacaccuccacccucuccggcuccgcccagcacgucgaggagugcuccugcuacccccgcuaccccggcguccgcugcgucugccgcgacaacuggaagggcuccaaccgccccaucgucgacaucaacaucaaggacuacuccaucgucuccuccuacgucugcuccggccucgucggcgacaccccccgcaagaacgacuccuccuccuccucccacugccucgaccccaacaacgaggagggcggccacggcgucaagggcugggccuucgacgacggcaacgacgucuggaugggccgcaccaucuccgagaagcuccgcuccggcuacgagaccuucaaggucaucgagggcugguccaaccccaacuccaagcuccagaucaaccgccaggucaucgucgaccgcggcaaccgcuccggcuacuccggcaucuucuccgucgagggcaaguccugcaucaaccgcugcuucuacgucgagcucauccgcggccgcaaggaggagaccgagguccucuggaccuccaacuccaucgucgucuucugcggcaccuccggcaccuacggcaccggcuccuggcccgacggcgccgacaucaaccucaugcccaucuga

SEQ ID NO: 116724 - RNA, 1410 nt, Artificial Sequence
  derived and/or modified CDS sequence (opt2) from neuraminidase__InfluenzaA__AEG65574
augaaccccaaccagaagaucaucaccaucggcuccgucucccucaccaucuccaccaucugcuucuucaugcagaucgccauccucaucaccaccgucacccuccacuucaagcaguacgaguucaacuccccccccaacaaccaggucaugcucugcgagcccaccaucaucgagcgcaacaucaccgagaucgucuaccucaccaacaccaccaucgagaaggagaucugccccaagcucgccgaguaccgcuccugguccaagccccagugcgacaucaccggcuucgcccccuucuccaaggacaacuccauccgccucuccgccggcggcgacaucugggucacccgcgagcccuacgucuccugcgaccccgaccgcugcuaccaguucgcccucggccagggcaccacccucaacaacguccacuccaacgacaccguccacgaccgcacccccuaccgcacccuccucaugaacgagcucggcguccccuuccaccucggcaccaagcaggucugcaucgccugguccuccuccuccugccacgacggcaaggccuggcuccacgucugcgucaccggcgacgacaagaacgccaccgccuccuucaucuacaacggccgccucgucgacuccaucgucuccugguccaagaagauccuccgcacccaggaguccgagugcgucugcaucaacggcaccugcaccgucgucaugaccgacggcuccgccuccggcaaggccgacaccaagauccucuucaucgaggagggcaagaucguccacaccuccacccucuccggcuccgcccagcacgucgaggagugcuccugcuacccccgcuaccccggcguccgcugcgucugccgcgacaacuggaagggcuccaaccgccccaucgucgacaucaacaucaaggacuacuccaucgucuccuccuacgucugcuccggccucgucggcgacaccccccgcaagaacgacuccuccuccuccucccacugccucgaccccaacaacgaggagggcggccacggcgucaagggcugggccuucgacgacggcaacgacgucuggaugggccgcaccaucuccgagaagcuccgcuccggcuacgagaccuucaaggucaucgagggcugguccaaccccaacuccaagcuccagaucaaccgccaggucaucgucgaccgcggcaaccgcuccggcuacuccggcaucuucuccgucgagggcaaguccugcaucaaccgcugcuucuacgucgagcucauccgcggccgcaaggaggagaccgagguccucuggaccuccaacuccaucgucgucuucugcggcaccuccggcaccuacggcaccggcuccuggcccgacggcgccgacaucaaccucaugcccaucuga

SEQ ID NO: 116725 - RNA, 1410 nt, Artificial Sequence; identical to SEQ ID NO: 116723
  derived and/or modified CDS sequence (opt2) from neuraminidase__InfluenzaA__AEG65585

SEQ ID NO: 116726 - RNA, 1410 nt, Artificial Sequence; identical to SEQ ID NO: 116723
  derived and/or modified CDS sequence (opt2) from neuraminidase__InfluenzaA__AEG65596

SEQ ID NO: 116727 - RNA, 1410 nt, Artificial Sequence
  derived and/or modified CDS sequence (opt2) from neuraminidase__InfluenzaA__AEG65607
augaaccccaaccagaagaucaucaccaucggcuccgucucccucaccaucuccaccaucugcuucuucaugcagaucgccauccucaucaccaccgucacccuccacuucaagcaguacgaguucaacuccccccccaacaaccaggucaugcucugcgagcccaccaucaucgagcgcaacaucaccgagaucgucuaccucaccaacaccaccaucgagaaggagaucugccccaagcucgccgaguaccgcaacugguccaagccccagugcgacaucaccggcuucgcccccuucuccaaggacaacuccauccgccucuccgccggcggcgacaucugggucacccgcgagcccuacgucuccugcgaccccgacaagugcuaccaguucgcccucggccagggcaccacccucaacaacguccacuccaacgacaccguccacgaccgcacccccuaccgcacccuccucaugaacgagcucggcguccccuuccaccucggcaccaagcaggucugcaucgccugguccuccuccuccugccacgacggcaaggccuggcuccacgucugcgucaccggcgacgacaagaacgccaccgccuccuucaucuacaacggccgccucgucgacuccaucgucuccugguccaagaagauccuccgcacccaggaguccgagugcgucugcaucaacggcaccugcaccgucgucaugaccgacggcuccgccuccggcaaggccgacaccaagauccucuucaucgaggagggcaagaucguccacaccuccacccucuccggcuccgcccagcacgucgaggagugcuccugcuacccccgcuaccccggcguccgcugcgucugccgcgacaacuggaagggcuccaaccgccccaucgucgacaucaacaucaaggacuacuccaucgccuccuccuacgucugcuccggccucgucggcgacaccccccgcaagaacgacuccuccuccuccucccacugccucgaccccaacaacgaggagggcggccacggcgucaagggcugggccuucgacgacggcaacgacgucuggaugggccgcaccaucuccgagaagcuccgcuccggcuacgagaccuucaaggucaucgagggcugguccaaccccaacuccaagcuccagaucaaccgccaggucaucgucgaccgcggcaaccgcuccggcuacuccggcaucuucuccgucgagggcaaguccugcaucaaccgcugcuucuacgucgagcucauccgcggccgcaaggaggagaccgagguccucuggaccuccaacuccaucgucgucuucugcggcaccuccggcaccuacggcaccggcuccuggcccgacggcgccgacaucaaccucaugcccaucuga

SEQ ID NO: 116728 - RNA, 1410 nt, Artificial Sequence
  derived and/or modified CDS sequence (opt2) from neuraminidase__InfluenzaA__AEG65629
augaaccccaaccagaagaucaucaccaucggcuccgucucccucaccaucuccaccaucugcuucuucaugcagaucgccauccucaucaccaccgucacccuccacuucaagcaguacgaguucaacuccccccccaacaaccaggucaugcucugcgagcccaccaucaucgagcgcaacaucaccgagaucgucuaccucaccaacaccaccaucgagaaggagaucugccccaagcucgccgaguaccgcaacugguccaagccccagugcgacaucaccggcuucgcccccuucuccaaggacaacuccauccgccucuccgccggcggcgacaucugggucacccgcgagcccuacgucuccugcgaccccgacaagugcuaccaguucgcccucggccagggcaccacccucaacaacguccacuccaacgacaccguccacgaccgcacccccuaccgcacccuccucaugaacgagcucggcguccccuuccaccucggcaccaagcaggucugcaucgccugguccuccuccuccugccacgacggcaaggccuggcuccacgucugcgucaccggcgacgacaagaacgccaccgccuccuucaucuacaacggccgccucgucgacuccaucgucuccugguccaaggagauccuccgcacccaggaguccgagugcgucugcaucaacggcaccugcaccgucgucaugaccgacggcuccgccuccggcaaggccgacaccaagauccucuucaucgaggagggcaagaucguccacaccuccacccucuccggcuccgcccagcacgucgaggagugcuccugcuacccccgcuaccccggcguccgcugcgucugccgcgacaacuggaagggcuccaaccgccccaucgucgacaucaacaucaaggacuacuccaucgucuccuccuacgucugcuccggccucgucggcgacaccccccgcaagaacgacuccuccuccuccucccacugccucgaccccaacgacgaggagggcggccacggcgucaagggcugggccuucgacgacggcaacgacgucuggaugggccgcaccaucuccgagaagcuccgcuccggcuacgagaccuucaaggucaucgagggcugguccaaccccaacuccaagcuccagaucaaccgccaggucaucgucgaccgcggcaaccgcuccggcuacuccggcaucuucuccgucgagggcaaguccugcaucaaccgcugcuucuacgucgagcucauccgcggccgcaaggaggagaucgagguccucuggaccuccaacuccaucgucgucuucugcggcaccuccggcaccuacggcaccggcuccuggcccgacggcgccgacaucaaccucaugcccaucuga

SEQ ID NO: 116729 - RNA, 1410 nt, Artificial Sequence; identical to SEQ ID NO: 116728
  derived and/or modified CDS sequence (opt2) from neuraminidase__InfluenzaA__AEG65640

SEQ ID NO: 116730 - RNA, 1410 nt, Artificial Sequence; identical to SEQ ID NO: 110171
  derived and/or modified CDS sequence (opt2) from neuraminidase__InfluenzaA__AEG65651

SEQ ID NO: 116731 - RNA, 1410 nt, Artificial Sequence; identical to SEQ ID NO: 110750
  derived and/or modified CDS sequence (opt2) from neuraminidase__InfluenzaA__AEG65662

SEQ ID NO: 116732 - RNA, 1410 nt, Artificial Sequence; identical to SEQ ID NO: 110750
  derived and/or modified CDS sequence (opt2) from neuraminidase__InfluenzaA__AEG65673

SEQ ID NO: 116733 - RNA, 1410 nt, Artificial Sequence; identical to SEQ ID NO: 110750
  derived and/or modified CDS sequence (opt2) from neuraminidase__InfluenzaA__AEG65684

SEQ ID NO: 116734 - RNA, 1410 nt, Artificial Sequence; identical to SEQ ID NO: 116707
  derived and/or modified CDS sequence (opt2) from neuraminidase__InfluenzaA__AEG65695

SEQ ID NO: 116735 - RNA, 1410 nt, Artificial Sequence
  derived and/or modified CDS sequence (opt2) from neuraminidase__InfluenzaA__AEG65706
augaaccccaaccagaagaucaucaccaucggcuccgucucccucaccaucuccaccaucugcuucuucaugcagaucgccauccucaucaccaccgucacccuccacuucaagcaguacgaguucaacuccccccccaacaaccaggucaugcucugcgagcccaccaucaucgagcgcaacaucaccgagaucgucuaccucaccaacaccaccaucgagaaggagaucugccccaagcucgccgaguaccgcaacugguccaagccccagugcaacaucaccggcuucgcccccuucuccaaggacaacuccauccgccucuccgccggcggcgacaucugggucacccgcgagcccuacgucuccugcgaccccgacaagugcuaccaguucgcccucggccagggcaccacccucaacaacguccacuccaacgacaccguccacgaccgcacccccuaccgcacccuccucaugaacgagcucggcguccccuuccaccucggcaccaagcaggucugcaucgccugguccuccuccuccugccacgacggcaaggccuggcuccacgucugcgucaccggcgacgacaagaacgccaccgccuccuucaucuacaacggccgccucgucgacuccaucgucuccugguccaaggagauccuccgcacccaggaguccgagugcgucugcaucaacggcaccugcaccgucgucaugaccgacggcuccgccuccggcaaggccgacaccaagauccucuucaucgaggagggcaagaucguccacaccuccacccucuccggcuccgcccagcacgucgaggagugcuccugcuacccccgcuaccccggcguccgcugcgucugccgcgacaacuggaagggcuccaaccgccccaucgucgacaucaacaucaaggacuacuccaucgucuccuccuacgucugcuccggccucgucggcgacaccccccgcaagaacgacuccuccuccuccucccacugccucgaccccaacaacgaggagggcggccacggcgucaagggcugggccuucgacgacggcaacgacgucuggaugggccgcaccaucuccgagaagcuccgcuccggcuacgagaccuucaaggucaucgagggcugguccaaccccaacuccaagcuccagaucaaccgccaggucaucgucgaccgcggcaaccgcuccggcuacuccggcaucuucuccgucgagggcaaguccugcaucaaccgcugcuucuacgucgagcucauccgcggccgcaaggaggagaacgagguccucuggaccuccaacuccaucgucgucuucugcggcaccuccggcaccuacggcaccggcuccuggcccgacggcgccgacaucaaccucaugcccaucuga

SEQ ID NO: 116736 - RNA, 1410 nt, Artificial Sequence
  derived and/or modified CDS sequence (opt2) from neuraminidase__InfluenzaA__AEG65728
augaaccccaaccagaagaucaucaccaucggcuccgucucccucaccaucuccaccaucugcuucuucaugcagaucgccauccucaucaccaccgucacccuccacuucaagcaguacgaguucaacuccccccccaacaaccaggucaugcucugcgagcccaccaucaucgagcgcaacaucaccgagaucgucuaccucaccaacaccaccaucgagaaggagaucugccccaagcucgccgaguaccgcaacugguccaagccccagugcaacaucaccggcuucgcccccuucuccaaggacaacuccauccgccucuccgccggcggcgacaucugggucacccgcgagcccuacgucuccugcgaccccgacaagugcuaccaguucgcccucggccagggcaccacccucaacaacguccacuccaacgacaccguccacgaccgcacccccuaccgcacccuccucaugaacgagcucggcguccccuuccaccucggcaccaagcaggucugcaucgccugguccuccuccuccugccacgacggcaaggccuggcuccacgucugcgucaccggcgacgacaagaacgccaccgccuccuucaucuacaacggccgccucgucgacuccaucgucuccugguccaaggagauccuccgcacccaggaguccgagugcgucugcaucaacggcaccugcaccgucgucaugaccgacggcuccgccuccggcaaggccgacaccaagauccucuucaucgaggagggcaagaucguccacaccuccacccucuccggcuccgcccagcacgucgaggagugcuccugcuacccccgcuaccccggcguccgcugcgucugccgcgacaacuggaagggcuccaaccgccccaucgucgacaucaacaucaaggacuacuccaucgucuccuccuacgucugcuccggccucgucggcgacaccccccgcaagaacgacuccuccuccuccucccacugccucgaccccaacaacgaggagggcggccacggcgucaagggcugggccuucgacgacggcaacgacgucuggaugggccgcaccaucuccgagaagcuccgcuccggcuacgagaccuucaaggucaucgagggcugguccaaccccaacuccaagcuccagaucaaccgccaggucaucgucgaccgcggcaaccgcuccggcuacuccggcaucuucuccgucgagggcaaguccugcaucaaccgcugcuucuacgucgagcucauccgcggccgcaaggaggagaccgagguccucuggaccuccaacuccaucgucgucuucugcggcaccuccggcaccuacggcaccggcuccuggcccgacggcgccgagaucaaccucaugcccaucuga

SEQ ID NO: 116737 - RNA, 1410 nt, Artificial Sequence
  derived and/or modified CDS sequence (opt2) from neuraminidase__InfluenzaA__AEG65739
augaaccccaaccagaagaucaucaccaucggcuccgucucccucaccaucuccaccaucugcuucuucaugcagaucgccauccucaucaccaccgucacccuccacuucaagcaguacgaguucuccuccccccccaacaaccaggucaugcccugcgagcccaccaucaucgagcgcaacaucaccgagaucgucuaccucaccaacaccaccaucgagaaggagaucugccccaagcucgccgaguaccgcaacugguccaagccccagugcgacaucaccggcuucgcccccuucuccaaggacaacuccauccgccucuccgccggcggcgacaucugggucacccgcgagcccuacgucuccugcgaccccgacaagugcuaccaguucgcccucggccagggcaccacccucaacaacguccacuccaacgacaccguccacgaccgcacccccuaccgcacccuccucaugaacgagcucggcguccccuuccaccucggcaccaagcaggucugcaucgccugguccuccuccuccugccacgacggcaaggccuggcuccacgucugcgucaccggcgacgacaagaacgccaccgccuccuucaucuacaacggccgccucgucgacuccaucgucuccugguccaaggagauccuccgcacccaggaguccgagugcgucugcaucaacggcaccugcaccgucgucaugaccgacggcuccgccuccggcaaggccgacaccaagauccucuucaucgaggagggcaagaucguccacaccuccacccucuccggcuccgcccagcacgucgaggagugcuccugcuacccccgcuaccccggcguccgcugcgucugccgcgacaacuggaagggcuccaaccgccccaucgucgacaucaacaugaaggacuacuccaucgucuccuccuacgucugcuccggccucgucggcgacaccccccgcaagaacgacuccuccuccuccucccacugccucgaccccaacaacgaggagggcggccacggcgucaagggcugggccuucgacgacggcaacgacgucuggaugggccgcaccaucuccgagaagcuccgcuccggcuacgagaccuucaaggucaucgagggcugguccaaccccaacuccaagcuccagaucaaccgccaggucaucgucgaccgcggcaaccgcuccggcuacuccggcaucuucuccgucgagggcaaguccugcaucaaccgcugcuucuacgucgagcucauccgcggccgcaaggaggagaccgagguccucuggaccuccaacuccaucgucgucuucugcggcaccuccggcaccuacggcaccggcuccuggcccgacggcgccgacaucaaccucaugcccaucuga

SEQ ID NO: 116738 - RNA, 1410 nt, Artificial Sequence; identical to SEQ ID NO: 112600
  derived and/or modified CDS sequence (opt2) from neuraminidase__InfluenzaA__AEG65750

SEQ ID NO: 116739 - RNA, 1410 nt, Artificial Sequence; identical to SEQ ID NO: 116736
  derived and/or modified CDS sequence (opt2) from neuraminidase__InfluenzaA__AEG65761

SEQ ID NO: 116740 - RNA, 1410 nt, Artificial Sequence
  derived and/or modified CDS sequence (opt2) from neuraminidase__InfluenzaA__AEG65772
augaaccccaaccagaagaucaucaccaucggcuccgucucccucaccaucuccaccaucugcuucuucaugcagaccgccauccucaucaccaccgucacccuccacuucaagcaguacgaguucaacuccccccccaacaaccaggucaugcucugcgagcccaccaucaucgagcgcaacaucaccgagaucgucuaccucaccaacaccaccaucgagaaggagaugugccccaagcucgccgaguaccgcaacugguccaagccccagugcgacaucaccggcuucgcccccuucuccaaggacaacuccauccgccucuccgccggcggcgacaucugggucacccgcgagcccuacgucuccugcgaccccgacaagugcuaccaguucgcccucggccagggcaccacccucaacaacguccacuccaacgacaccguccacgaccgcacccccuaccgcacccuccucaugaacgagcucggcguccccuuccaccucggcaccaagcaggucugcaucgccugguccuccuccuccugccacgacggcaaggccuggcuccacgucugcgucaccggcgacgacaagaacgccaccgccuccuucaucuacaacggccgccucgucgacuccaucgucuccugguccaagaagauccuccgcacccaggaguccgagugcgucugcaucaacggcaccugcaccgucgucaugaccgacggcuccgccuccggcaaggccgacaccaagauccucuucaucgaggagggcaagaucauccacaccuccacccucuccggcuccgcccagcacgucgaggagugcuccugcuacccccgcuaccccggcguccgcugcgucugccgcgacaacuggaagggcuccaaccgccccaucgucgacaucaacaucaaggacuacuccaucgucuccuccuacgucugcuccggccucgucggcgacaccccccgcaagaacgacuccuccuccuccucccacugccucgaccccaacaacgaggagggcggccacggcgucaagggcugggccuucgacgacggcaacgacgucuggaugggccgcaccaucuccgagaagcuccgcuccggcuacgagaccuucaaggucaucgagggcugguccaagcccaacuccaagcuccagaucaaccgccaggucaucgucgaccgcggcaaccgcuccggcuacuccggcaucuucuccgucgagggcaaguccugcaucaaccgcugcuucuacgucgagcucauccgcggccgcaaggaggagaccgagguccucuggaccuccaacuccaucgucgucuucugcggcaccuccggcaccuacggcaccggcuccuggcccgacggcgccgacaucaaccucaugcccaucuga

SEQ ID NO: 116741 - RNA, 1410 nt, Artificial Sequence; identical to SEQ ID NO: 115554
  derived and/or modified CDS sequence (opt2) from neuraminidase__InfluenzaA__AEG65783

SEQ ID NO: 116742 - RNA, 1410 nt, Artificial Sequence
  derived and/or modified CDS sequence (opt2) from neuraminidase__InfluenzaA__AEG65794
augaaccccaaccagaagaucaucaccaucggcuccgucucccucaccaucuccaccaucugcuucuucaugcagaucgccauccucaucaccaccaucacccuccacuucaagcaguacgaguucaacuccccccccaacaaccaggucaugcucugcgagcccaccaucaucgagcgcaacaucaccgagaucgucuaccucaccaacaccaccaucgagaaggagaucugccccaagcucgccgaguaccgcaacugguccaagccccagugcgacaucaccggcuucgcccccuucuccaaggacaacuccauccgccucuccgccggcggcgacaucugggucacccgcgagcccuacgucuccugcgaccccgacaagugcuaccaguucgcccucggccagggcaccacccucaacaacguccacuccaacaacaccguccgcgaccgcacccccuaccgcacccuccucaugaacgagcucggcguccccuuccaccucggcaccaagcaggucugcaucgccugguccuccuccuccugccacgacggcaaggccuggcuccacgucugcaucaccggcgacgacaagaacgccaccgccuccuucaucuacaacggccgccucgucgacuccgucgucuccugguccaaggagauccuccgcacccaggaguccgagugcgucugcaucaacggcaccugcaccgucgucaugaccgacggcuccgccuccggcaaggccgacaccaagauccucuucaucgaggagggcaagaucguccacaccuccacccucuccggcuccgcccagcacgucgaggagugcuccugcuacccccgcuaccccggcguccgcugcgucugccgcgacaacuggaagggcuccaaccgccccaucgucgacaucaacaucaaggaccacuccaucgucuccuccuacgucugcuccggccucgucggcgacaccccccgcaagaacgacuccuccuccuccucccacugccucgaccccaacaacgaggagggcggccacggcgucaagggcugggccuucgacgacggcaacgacgucuggaugggccgcaccaucaacgagaccucccgccucggcuacgagaccuucaaggucaucgagggcugguccaaccccaaguccaagcuccagaucaaccgccaggucaucgucgacaagggcaaccgcuccggcuacuccggcaucuucuccgucgagggcaaguccugcaucaaccgcugcuucuacgucgagcucauccgcggccgcaaggaggagaccgagguccucuggaccuccaacuccaucgucgucuucugcggcaccuccggcaccuacggcaccggcuccuggcccgacggcgccgaccucaaccucaugcccaucuga

SEQ ID NO: 116743 - RNA, 1410 nt, Artificial Sequence; identical to SEQ ID NO: 115554
  derived and/or modified CDS sequence (opt2) from neuraminidase__InfluenzaA__AEG65805

SEQ ID NO: 116744 - RNA, 1410 nt, Artificial Sequence
  derived and/or modified CDS sequence (opt2) from neuraminidase__InfluenzaA__AEG65816
augaaccccaaccagaagaucaucaccaucggcuccgucucccucaccaucuccaccaucugcuucuucaugcagaucgccauccucaucaccaccgucacccuccacuucaagcaguacgaguucaacuccccccccaacaaccaggucaugcucugcgagcccaccaucaucgagcgcaacaucaccgagaucgucuaccucaccaacaccaccaucgagaaggagaucugccccaagcucgccgaguaccgcaacugguccaagccccagugcgacaucaccggcuucgcccccuucuccaaggacaacuccauccgccucuccgccggcggcgacaucugggucacccgcgagcccuacgucuccugcgaccccgacaagugcuaccaguucgcccucggccagggcaccacccucaacaacguccacuccaacaacaccguccgcgaccgcacccccuaccgcacccuccucaugaacgagcucggcguccccuuccaccucggcaccaagcaggucugcaucgccugguccuccuccuccugccacgacggcaaggccuggcuccacgucugcaucaccggcgacgacaagaacgccaccgccuccuucaucuacaacggccgccucgucgacuccgucgucuccugguccaaggagauccuccgcacccaggaguccgagugcgucugcaucaacggcaccugcaccgucgucaugaccgacggcuccgccuccggcgaggccgacaccaagauccucuucaucgaggagggcaagaucguccacaccuccacccucuccggcuccgcccagcacgucgaggagugcuccugcuacccccgcuaccccggcguccgcugcgucugccgcgacaacuggaagggcuccaaccgccccaucgucgacaucaacaucaaggaccacuccaucgucuccuccuacgucugcuccggccucgucggcgacaccccccgcaagaacgacuccuccuccuccucccacugccucgaccccaacaacgaggagggcggccacggcgucaagggcugggccuucgacgacggcaacgacgucuggaugggccgcaccaucaacgagaccucccgccucggcuacgagaccuucaaggucaucgagggcugguccaaccccaaguccaagcuccagaucaaccgccaggucaucgucgaccgcggcaaccgcuccggcuacuccggcaucuucuccgucgagggcaaguccugcaucaaccgcugcuucuacgucgagcucauccgcggccgcaaggaggagaccgagguccucuggaccuccaacuccaucgucgucuucugcggcaccuccggcaccuacggcaccggcuccuggcccgacggcgccgaccucaaccucaugcccaucuga

SEQ ID NO: 116745 - RNA, 1410 nt, Artificial Sequence
  derived and/or modified CDS sequence (opt2) from neuraminidase__InfluenzaA__AEG79808
augaaccccaaccagaagaucaucaccaucggcuccgucugcaugaccaucggcauggccaaccucauccuccagaucggcaacaucaucuccaucuggaucucccacuccauccagcucggcaaccagaaccagaucgagaccugcaaccaguccgucaucaccuacgagaacaacaccugggucaaccagaccuacgucaacaucuccaacaccaacuucgccgccggccaguccgucgucuccgucaagcucgccggcaacuccucccucugccccgucuccggcugggccaucuacuccaaggacaacuccauccgcaucggcuccaagggcgacgucuucgucauccgcgagcccuucaucuccugcuccccccucgagugccgcaccuucuuccucacccagggcgcccuccucaacgacaagcacuccaacggcaccaucaaggaccgcucccccuaccgcacccucauguccugccccaucggcgagguccccucccccuacaacucccgcuucgaguccgucgccugguccgccuccgccugccacgacggcaucaacuggcucaccaucggcaucuccggccccgacaacggcgccgucgccguccucaaguacaacggcaucaucaccgacaccaucaaguccuggcgcaacaacauccuccgcacccaggaguccgagugcgccugcgucaacggcuccugcuucaccaucaugaccgacggccccuccgacggccaggccuccuacaagaucuuccgcaucgagaagggcaagaucgucaaguccgucgagaugaacgcccccaacuaccacuacgaggagugcuccugcuaccccgacuccuccgagaucaccugcgucugccgcgacaacuggcacggcuccaaccgccccugggucuccuucaaccagaaccucgaguaccagaucggcuacaucugcuccggcaucuucggcgacaacccccgccccaacgacaagaccggcuccugcggccccgucuccuccaacggcgccaacggcgucaagggcuucuccuucaaguacggcaacggcgucuggaucggccgcaccaaguccaucuccucccgcaagggcuucgagaugaucugggaccccaacggcuggaccggcaccgacaacaacuucuccaucaagcaggacaucgucggcaucaacgagugguccggcuacuccggcuccuucguccagcaccccgagcucaccggccucgacugcauccgccccugcuucugggucgagcucauccgcggccgccccaaggagaacaccaucuggaccuccggcuccuccaucuccuucugcggcgucaacuccgacaccgucggcugguccuggcccgacggcgccgagcuccccuucaccaucgacaaguga

SEQ ID NO: 116746 - RNA, 1410 nt, Artificial Sequence; identical to SEQ ID NO: 116745
  derived and/or modified CDS sequence (opt2) from neuraminidase__InfluenzaA__AEG79814

SEQ ID NO: 116747 - RNA, 1410 nt, Artificial Sequence
  derived and/or modified CDS sequence (opt2) from neuraminidase__InfluenzaA__AEG79826
augaaccccaaccagaagaucaucaccaucuccuccgucugcaugaccaucggcauggccaaccucauccuccagaucggcaacaucaucuccaucuggaucucccacuccauccagcucggcaaccagaaccagaucgagaccugcaaccaguccgucaucaccuacgagaacaacaccugggucaaccagaccuacgucaacaucuccaacaccaacuucgccgccggccaguccgucgucuccgucaagcucgccggcaacuccucccucugccccgucuccggcugggccaucuacuccaaggacaacuccauccgcaucggcuccaagggcgacgucuucgucauccgcgagcccuucaucuccugcuccccccucgagugccgcaccuucuuccucacccagggcgcccuccucaacgacaagcacuccaacggcaccaucaaggaccgcucccccuaccgcacccucauguccugccccaucggcgagguccccucccccuacaacucccgcuucgaguccgucgccugguccgccuccgccugccacgacggcaucaacuggcucaccaucggcaucuccggccccgacaacggcgccgucgccguccucaaguacaacggcaucaucaccgacaccaucaaguccuggcgcaacaacauccuccgcacccaggaguccgagugcgccugcgucaacggcuccugcuucaccaucaugaccgacggccccuccgacggccaggccuccuacaagaucuuccgcaucgagaagggcaagaucgucaaguccgucgagaugaacgcccccaacuaccacuacgaggagugcuccugcuaccccgacuccuccgagaucaccugcgucugccgcgacaacuggcacggcuccaaccgccccugggucuccuucaaccagaaccucgaguaccagaucggcuacaucugcuccggcaucuucggcgacaacccccgccccaacgacaagaccggcuccugcggccccgucuccuccaacggcgccaacggcgucaagggcuucuccuucaaguacggcaacggcgucuggaucggccgcaccaaguccaucuccucccgcaagggcuucgagaugaucugggaccccaacggcuggaccggcaccgacaacaacuucuccaucaagcaggacaucgucggcaucaacgagugguccggcuacuccggcuccuucguccagcaccccgagcucaccggccucgacugcauccgccccugcuucugggucgagcucauccgcggccgccccaaggagaacaccaucuggaccuccggcuccuccaucuccuucugcggcgucaacuccgacaccaugggcugguccuggcccgacggcgccgagcuccccuucaccaucgacaaguga

SEQ ID NO: 116748 - RNA, 1410 nt, Artificial Sequence
  derived and/or modified CDS sequence (opt2) from neuraminidase__InfluenzaA__AEG79830
augaaccccaaccagaagaucaucaccaucuccuccgucugcaugaccaucggcauggccaaccucauccuccagaucggcaacaucaucuccaucuggaucucccacuccauccagcucggcaaccagaaccagaucgagaccugcaaccaguccgucaucaccuacgagaacaacaccugggucaaccagaccuacgucaacaucuccaacaccaacuucgccgccggccaguccgucgucuccgucaagcucgccggcaacuccucccucugccccgucuccggcugggccaucuacuccaaggacaacuccauccgcaucggcuccaagggcgacgucuucgucauccgcgagcccuucaucuccugcuccccccucgagugccgcaccuucuuccucacccagggcgcccuccucaacgacaagcacuccaacggcaccaucaaggaccgcucccccuaccgcacccucauguccugccccaucggcgagguccccucccccuacaacucccgcuucgaguccgucgccugguccgccuccgccugccacgacggcaucaacuggcucaccaucggcaucuccggccccgacaacggcgccgucgccguccucaaguacaacggcaucaucaccgacaccaucaaguccuggcgcaacaacauccuccgcacccaggaguccgagugcgccugcgucaacggcuccugcuucaccgucaugaccgacggccccuccgacggccaggccuccuacaagaucuuccgcaucgagaagggcaagaucgucaaguccgucgagaugaacgcccccaacuaccacuacgaggagugcuccugcuaccccgacuccuccgagaucaccugcgucugccgcgacaacuggcacggcuccaaccgccccugggucuccuucaaccagaaccucgaguaccagaucggcuacaucugcuccggcaucuucggcgacaacccccgccccaacgacaagaccggcuccugcggccccgucuccuccaacggcgccaacggcgucaagggcuucuccuucaaguacggcaacggcgucuggaucggccgcaccaaguccaucuccucccgcaagggcuucgagaugaucugggaccccaacggcuggaccggcaccgacaacaacuucuccaucaagcaggacaucgucggcaucaacgagugguccggcuacuccggcuccuucguccagcaccccgagcucaccggccucgacugcauccgccccugcuucugggucgagcucauccgcggccgccccaaggagaacaccaucuggaccuccggcuccuccaucuccuucugcggcgucaacuccgacaccgucggcugguccuggcccgacggcgccgagcuccccuucaccaucgacaaguga

SEQ ID NO: 116749 - RNA, 1410 nt, Artificial Sequence; identical to SEQ ID NO: 116293
  derived and/or modified CDS sequence (opt2) from neuraminidase__InfluenzaA__AEG79836

SEQ ID NO: 116750 - RNA, 1410 nt, Artificial Sequence
  derived and/or modified CDS sequence (opt2) from neuraminidase__InfluenzaA__AEH59356
augaaccccaaccagaagaucaucaccaucggcuccgucugcaugaccaucggcauggccaaccucauccuccagaucggcaacaucaucuccaucuggaucucccacuccauccagcucggcaaccagaaccagaucgagaccugcaaccaguccgucaucaccuacgagaacaacaccugggucaaccagaccuacgucaacaucuccaacaccaacuucgccgccggccaguccgucgucuccgucaagcucgccggcaacuccucccucugccccgucuccggcugggccaucuacuccaaggacaacuccauccgcaucggcuccaagggcgacgucuucgucauccgcgagcccuucaucuccugcuccccccucgagugccgcaccuucuuccucacccagggcacccuccucaacgacaagcacuccaacggcaccaucaaggaccgcucccccuaccgcacccucauguccugccccaucggcgagguccccucccccuacaacucccgcuucgaguccgucgccugguccgccuccgccugccacgacggcaucaacuggcucaccaucggcaucuccggccccgacaacggcgccgucgccguccucaaguacaacggcaucaucaccgacaccaucaaguccuggcgcaacaacauccuccgcacccaggaguccgagugcgccugcgucaacggcuccugcuucaccaucaugaccgacggccccuccgacggccaggccuccuacaagaucuuccgcaucgagaagggcaagaucgucaaguccgucgagaugaacgcccccaacuacuacuacgaggagugcuccugcuaccccgacuccuccgagaucaccugcgucugccgcgacaacuggcacggcuccaaccgccccugggucuccuucaaccagaaccucgaguaccagaucggcuacaucugcuccggcaucuucggcgacaacccccgccccaacgacaagaccggcuccugcggccccgucuccuccaacggcgccaacggcgucaagggcuucuccuucaaguacggcaacggcgucuggaucggccgcaccaaguccaucuccucccgcaagggcuucgagaugaucugggaccccaacggcuggaccggcaccgacaacaacuucuccaucaagcaggacaucgucggcaucaacgagugguccggcuacuccggcuccuucguccagcaccccgagcucaccggccucgacugcauccgccccugcuucugggucgagcucauccgcggccgccccaaggagaacaccgucuggaccuccggcuccuccaucuccuucugcggcgucaacuccgacaccgucggcugguccuggcccgacggcgccgagcuccccuucaccaucgacaaguga

SEQ ID NO: 116751 - RNA, 1410 nt, Artificial Sequence; identical to SEQ ID NO: 116745
  derived and/or modified CDS sequence (opt2) from neuraminidase__InfluenzaA__AEH59360

SEQ ID NO: 116752 - RNA, 1410 nt, Artificial Sequence
  derived and/or modified CDS sequence (opt2) from neuraminidase__InfluenzaA__AEH59364
augaaccccaaccagaagaucaucaccaucggcuccgucugcaugaccaucggcauggccaaccucauccuccagaucggcaacaucaucuccaucuggaucucccacuccauccagcucggcaaccagaaccagaucgagaccugcaaccaguccgucaucaccuacgagaacaacaccugggucaaccagaccuacgucaacaucuccaacaccaacuucgccgccggccaguccgucgucuccgucaagcucgccggcaacuccucccucugccccgucuccggcugggccaucuacuccaaggacaacuccauccgcaucggcuccaagggcgacgucuucgucauccgcgagcccuucaucuccugcuccccccucgagugccgcaccuucuuccucacccagggcgcccuccucaacgacaagcacuccaacggcaccaucaaggaccgcucccccuaccgcacccucauguccugccccaucggcgagguccccucccccuacaacucccgcuucgaguccgucgccugguccgccuccgccugccacgacggcaucaacuggcucaccaucggcaucuccggccccgacaacggcgccgucgccguccucaaguacaacggcaucaucaccgacaccaucaaguccuggcgcaacaacauccuccgcacccaggaguccgagugcgccugcgucaacggcuccugcuucaccgucaugaccgacggccccaacgacggccaggccuccuacaagaucuuccgcaucgagaagggcaagaucgucaaguccgucgagaugaacgcccccaacuaccacuacgaggagugcuccugcuaccccgacuccuccgagaucaccugcgucugccgcgacaacuggcacggcgccaaccgccccugggucuccuucaaccagaaccucgaguaccagaucggcuacaucugcuccggcaucuucggcgacaacccccgccccaacgacaagaccggcuccugcggccccgucuccuccaacggcgccaacggcgucaagggcuucuccuucaaguacggcaacggcgucuggaucggccgcaccaaguccaucuccucccgcaacggcuucgagaugaucugggaccccaacggcuggaccggcaccgacaacaacuucuccaucaagcaggacaucgucggcaucaacgagugguccggcuacuccggcuccuucguccagcaccccgagcucaccggccucgacugcauccgccccugcuucugggucgagcucauccgcggccgccccaaggagaacaccaucuggaccuccggcuccuccaucuccuucugcggcgucaacuccgacaccgucggcugguccuggcccgacggcgccgagcuccccuucaccaucgacaaguga

SEQ ID NO: 116753 - RNA, 1410 nt, Artificial Sequence
  derived and/or modified CDS sequence (opt2) from neuraminidase__InfluenzaA__AEH59366
augaaccccaaccagaagaucaucaccaucggcuccgucugcaugaccaucggcauggccaaccucauccuccagaucggcaacaucaucuccaucuggaucucccacuccauccagcucggcaaccagaaccagaucgagaccugcaaccaguccgucaucaccuacgagaacaacaccugggucaaccagaccuacgucaacaucuccaacaccaacuucgccgccggccaguccgucgucuccgucaagcucgccggcaacuccucccucugccccgucuccggcugggccaucuacuccaaggacaacuccauccgcaucggcuccaagggcgacgucuucgucauccgcgagcccuucaucuccugcuccccccucgagugccgcaccuucuuccucacccagggcgcccuccucaacgacaagcacuccaacggcaccaucaaggaccgcucccccuaccgcacccucauguccugccccaucggcggcguccccucccccuacaacucccgcuucgaguccgucgccugguccgccuccgccugccacgacggcaucaacuggcucaccaucggcaucuccggccccgacaacggcgccgucgccguccucaaguacaacggcaucaucaccgacaccaucaaguccuggcgcaacaacauccuccgcacccaggaguccgagugcgccugcgucaacggcuccugcuucaccaucaugaccgacggccccuccgacggccaggccuccuacaagaucuuccgcaucgagaagggcaagaucgucaaguccgucgagaugaacgcccccaacuaccacuacgaggagugcuccugcuaccccgacuccuccgagaucaccugcgucugccgcgacaacuggcacggcuccaaccgccccugggucuccuucaaccagaaccucgaguaccagaucggcuacaucugcuccggcaucuucggcgacaacccccgccccaacgacaagaccggcuccugcggccccgucuccuccaacggcgccaacggcgucaagggcuucuccuucaaguacggcaacggcgucuggaucggccgcaccaaguccaucuccucccgcaagggcuucgagaugaucugggaccccaacggcuggaccggcaccgacaacaacuucuccaucaagcaggacaucgucggcaucaacgagugguccggcuacuccggcuccuucguccagcaccccgagcucaccggccucgacugcauccgccccugcuucugggucgagcucauccgcggccgccccaaggagaacaccaucuggaccuccggcuccuccaucuccuucugcggcgucaacuccgacaccgucggcugguccuggcccgacggcgccgagcuccccuucaccaucgacaaguga

SEQ ID NO: 116754 - RNA, 1410 nt, Artificial Sequence; identical to SEQ ID NO: 116745
  derived and/or modified CDS sequence (opt2) from neuraminidase__InfluenzaA__AEH59368

SEQ ID NO: 116755 - RNA, 1410 nt, Artificial Sequence; identical to SEQ ID NO: 116293
  derived and/or modified CDS sequence (opt2) from neuraminidase__InfluenzaA__AEH59370

SEQ ID NO: 116756 - RNA, 1410 nt, Artificial Sequence; identical to SEQ ID NO: 116752
  derived and/or modified CDS sequence (opt2) from neuraminidase__InfluenzaA__AEH59372

SEQ ID NO: 116757 - RNA, 1410 nt, Artificial Sequence; identical to SEQ ID NO: 116752
  derived and/or modified CDS sequence (opt2) from neuraminidase__InfluenzaA__AEH59376

SEQ ID NO: 116758 - RNA, 1410 nt, Artificial Sequence; identical to SEQ ID NO: 116293
  derived and/or modified CDS sequence (opt2) from neuraminidase__InfluenzaA__AEH59378

SEQ ID NO: 116759 - RNA, 1410 nt, Artificial Sequence; identical to SEQ ID NO: 116752
  derived and/or modified CDS sequence (opt2) from neuraminidase__InfluenzaA__AEH59382

SEQ ID NO: 116760 - RNA, 1410 nt, Artificial Sequence
  derived and/or modified CDS sequence (opt2) from neuraminidase__InfluenzaA__AEH59384
augaaccccaaccagaagaucaucaccaucggcuccgucugcaugaccaucggcauggccaaccucauccuccagaucggcaacaucaucuccaucuggaucucccacuccauccagcucggcaaccagucccagaucgagaccugcaaccaguccgucaucaccuacgagaacaacaccugggucaaccagaccuacgucaacaucuccaacaccaacuucgccgccggccaguccgucgucuccgucaagcucgccggcaacuccucccucugccccgucuccggcugggccaucuacuccaaggacaacuccauccgcaucggcuccaagggcgacgucuucgucauccgcgagcccuucaucuccugcuccccccucgagugccgcaccuucuuccucacccagggcgcccuccucaacgacaagcacuccaacggcaccaucaaggaccgcucccccuaccgcacccucauguccugccccaucggcgagguccccucccccuacaacucccgcuucgaguccgucgccugguccgccuccgccugccacgacggcaucaacuggcucaccaucggcaucuccggccccgacaacggcgccgucgccguccucaaguacaacggcaucaucaccgacaccaucaaguccuggcgcaacaacauccuccgcacccaggaguccgagugcgccugcgucaacggcuccugcuucaccaucaugaccgacggccccuccgacggccaggccuccuacaagaucuuccgcaucgagaagggccgcaucgucaaguccgucgagaugaacgcccccaacuaccacuacgaggagugcuccugcuaccccgacuccuccgagaucaccugcgucugccgcgacaacuggcacggcuccaaccgccccugggucuccuucaaccagaaccucgaguaccagaucggcuacaucugcuccggcaucuucggcgacaacccccgccccaacgacaagaccggcuccugcggccccgucuccuccaacggcgccaacggcgucaagggcuucuccuucaaguacggcaacggcgucuggaucggccgcaccaaguccaucuccucccgcaagggcuucgagaugaucugggaccccaacggcuggaccggcaccgacaacaacuucuccaucaagcaggacaucgucggcaucaacgagugguccggcuacuccggcuccuucguccagcaccccgagcucaccggccucgacugcauccgccccugcuucugggucgagcucauccgcggccgccccaaggagaacaccaucuggaccuccggcuccuccaucuccuucugcggcgucaacuccgacaccgucggcugguccuggcccgacggcgccgagcuccccuucaccaucgacaaguga

SEQ ID NO: 116761 - RNA, 1410 nt, Artificial Sequence
  derived and/or modified CDS sequence (opt2) from neuraminidase__InfluenzaA__AEH59386
augaaccccaaccagaagaucaucaccaucggcuccgucugcaugaccaucggcauggccaaccucauccuccagaucggcaacaucaucuccaucuggaucucccacuccauccagaucggcaaccagaaccagaucgagaccugcaaccaguccgucaucaccuacgagaacaacaccugggucaaccagaccuacgucaacaucuccaacaccaacuucgccgccggccaguccgucgucuccgucaagcucgccggcaacuccucccucugccccgucuccggcugggccaucuacuccaaggacaacuccauccgcaucggcuccaagggcgacgucuucgucauccgcgagcccuucaucuccugcuccccccucgagugccgcaccuucuuccucacccagggcgcccuccucaacgacaagcacuccaacggcaccaucaaggaccgcucccccuaccgcacccucauguccugccccaucggcgagguccccucccccuacaacucccgcuucgaguccgucgccugguccgccuccgccugccacgacggcaucaacuggcucaccaucggcaucuccggccccgacaacggcgccgucgccguccucaaguacaacggcaucaucaccgacaccaucaaguccuggcgcaacaacauccuccgcacccaggaguccgagugcgccugcgucaacggcuccugcuucaccaucaugaccgacggccccuccgacggccaggccuccuacaagaucuuccgcaucgagaagggcaagaucgucaaguccgucgagaugaacgcccccaacuaccacuacgaggagugcuccugcuaccccgacuccuccgagaucaccugcgucugccgcgacaacuggcacggcuccaaccgccccugggucuccuucaaccagaaccucgaguaccagaucggcuacaucugcuccggcaucuucggcgacaacccccgccccaacgacaagaccggcuccugcggccccgucuccuccaacggcgccaacggcgucaagggcuucuccuucaaguacggcaacggcgucuggaucggccgcaccaaguccaucuccucccgcaagggcuucgagaugaucugggaccccaacggcuggaccggcaccgacaacaacuucuccaucaagcaggacaucgucggcaucaacgagugguccggcuacuccggcuccuucguccagcaccccgagcucaccggccucgacugcauccgccccugcuucugggucgagcucauccgcggccgccccaaggagaacaccaucuggaccuccggcuccuccaucuccuucugcggcgucaacuccgacaccgucggcugguccuggcccgacggcgccgagcuccccuucaccaucgacaaguga

SEQ ID NO: 116762 - RNA, 1410 nt, Artificial Sequence; identical to SEQ ID NO: 116752
  derived and/or modified CDS sequence (opt2) from neuraminidase__InfluenzaA__AEH59388

SEQ ID NO: 116763 - RNA, 1410 nt, Artificial Sequence
  derived and/or modified CDS sequence (opt2) from neuraminidase__InfluenzaA__AEH59390
augaaccccaaccagaagaucaucaccaucggcuccgucugcaugaccaucggcauggccaaccucauccuccagaucggcaacaucaucuccaucuggaucucccacuccauccagcucggcaaccagucccagaucgagaccugcaaccaguccgucaucaccuacgagaacaacaccugggucaaccagaccuacgucaacaucuccaacaccaacuucgccgccggccaguccgucgucuccgucaagcucgccggcaacuccucccucugccccgucuccggcugggccaucuacuccaaggacaacuccauccgcaucggcuccaagggcgacgucuucgucauccgcgagcccuucaucuccugcuccccccucgagugccgcaccuucuuccucacccagggcgcccuccucaacgacaagcacuccaacggcaccaucaaggaccgcucccccuaccgcacccucauguccugccccaucggcgagguccccucccccuacaacucccgcuucgaguccgucgccugguccgccuccgccugccacgacggcaucaacuggcucaccaucggcaucuccggccccgacaacggcgccgucgccguccucaaguacaacggcaucaucaccgacaccaucaaguccuggcgcaacaacauccuccgcacccaggaguccgagugcgccugcgucaacggcuccugcuucaccaucaugaccgacggccccuccgacggccaggccuccuacaagaucuuccgcaucgagaagggcaagaucgucaaguccgucgagaugaacgcccccaacuaccacuacgaggagugcuccugcuaccccgacuccuccgagaucaccugcgucugccgcgacaacuggcacggcuccaaccgccccugggucuccuucaaccagaaccucgaguaccagaucggcuacaucugcuccggcaucuucggcgacaacccccgccccaacgacaagaccggcuccugcggccccgucuccuccaacggcgccaacggcgucaagggcuucuccuucaaguacggcaacggcgucuggaucggccgcaccaaguccaucuccucccgcaagggcuucgagaugaucugggaccccaacggcuggaccggcaccgacaacaacuucuccaucaagcaggacaucgucggccucaacgagugguccggcuacuccggcuccuucguccagcaccccgagcucaccggccucgacugcauccgccccugcuucugggucgagcucauccgcggccuccccaaggagaacaccaucuggaccuccggcuccuccaucuccuucugcggcgucaacuccgacaccgucggcugguccuggcccgacggcgccgagcuccccuucaccaucgacaaguga

SEQ ID NO: 116764 - RNA, 1410 nt, Artificial Sequence; identical to SEQ ID NO: 116752
  derived and/or modified CDS sequence (opt2) from neuraminidase__InfluenzaA__AEH59392

SEQ ID NO: 116765 - RNA, 1410 nt, Artificial Sequence; identical to SEQ ID NO: 116752
  derived and/or modified CDS sequence (opt2) from neuraminidase__InfluenzaA__AEH59396

SEQ ID NO: 116766 - RNA, 1410 nt, Artificial Sequence
  derived and/or modified CDS sequence (opt2) from neuraminidase__InfluenzaA__AEH59398
augaaccccaaccagaagaucaucaccaucggcuccgucugcaugaccaucggcgucgccaaccucauccuccagaucggcaacaucaucuccaucuggaucucccacuccauccagcucggcaaccagaaccagaucgagaccugcaaccaguccgucaucaccuacgagaacaacaccugggucaaccagaccuacgucaacaucuccaacaccaacuucgccgccggccaguccgucgucuccgucaagcucgccggcaacuccucccucugccccgucuccggcugggccaucuacuccaaggacaacuccauccgcaucggcuccaagggcgacgucuucgucauccgcgagcccuucaucuccugcuccccccucgagugccgcaccuucuuccucacccagggcgcccuccucaacgacaagcacuccaacggcaccaucaaggaccgcucccccuaccgcacccucauguccugccccaucggcgagguccccucccccuacaacucccgcuucgaguccgucgccugguccgccuccgccugccacgacggcaucaacuggcucaccaucggcaucuccggccccgacaacggcgccgucgccguccucaaguacaacggcaucaucaccgacaccaucaaguccuggcgcaacuacauccuccgcacccaggaguccgagugcgccugcgucaacggcuccugcuucaccaucaugaccgacggccccuccgacggccaggccuccuacaagaucuuccgcaucgagaagggcaaggucgucaaguccgucgagaugaacgcccccaacuaccacuacgaggagugcuccugcuaccccgacuccuccgagaucaccugcgucugccgcgacaacuggcacggcuccaaccgccccugggucuccuucaaccagaaccucgaguaccagaucggcuacaucugcuccggcaucuucggcgacaacccccgccccaacgacaagaccggcuccugcggccccgucuccuccaacggcgccaacggcgucaagggcuucuccuucaaguacggcaacggcgucuggaucggccgcaccaaguccaucuccucccgcaagggcuucgagaugaucugggaccccaacggcuggaccggcaccgacaacaacuucuccaucaagcaggacaucaucggcaucaacgagugguccggcuacuccggcuccuucguccagcaccccgagcucaccggccucgacugcauccgccccugcuucugggucgagcucauccgcggccgccccaaggagaacaccaucuggaccuccggcuccuccaucuccuucugcggcgucaacuccgacaccgucggcugguccuggcccgacggcgccgagcuccccuucaccaucgacaaguga

SEQ ID NO: 116767 - RNA, 1410 nt, Artificial Sequence
  derived and/or modified CDS sequence (opt2) from neuraminidase__InfluenzaA__AEH59400
augaaccccaaccagaagaucaucaccaucggcuccgucugcaugaccaucggcauggccaaccucauccuccagaucggcaacaucaucuccaucuggaucucccacuccauccagcucggcaaccagucccagaucgagaccugcaaccaguccgucaucaccuacgagaacaacaccugggucaaccagaccuacgucaacaucuccaacaccaacuucgccgccggccaguccgucgucuccgucaagcucgccggcaacuccucccucugccccgucuccggcugggccaucuacuccaaggacaacuccauccgcaucggcuccaagggcgacgucuucgucauccgcgagcccuucaucuccugcuccccccucgagugccgcaccuucuuccucacccagggcgcccuccucaacgacaagcacuccaacggcaccaucaaggaccgcucccccuaccgcacccucauguccugccccaucggcgagguccccucccccuacaacucccgcuucgaguccgucgccugguccgccuccgccugccacgacggcaucaacuggcucaccaucggcaucuccggccccgacaacggcgccgucgccguccucaaguacaacggcaucaucaccgacaccaucaaguccuggcgcaacaacauccuccgcacccaggaguccgagugcgccugcgucaacggcuccugcuucaccgucaugaccgacggccccaacgacggccaggccuccuacaagaucuuccgcaucgagaagggcaagaucgucaaguccgucgagaugaacgcccccaacuaccacuacgaggagugcuccugcuaccccgacuccuccgagaucaccugcgucugccgcgacaacuggcacggcgccaaccgccccugggucuccuucaaccagaaccucgaguaccagaucggcuacaucugcuccggcaucuucggcgacaacccccgccccaacgacaagaccggcuccugcggccccgucuccuccaacggcgccaacggcgucaagggcuucuccuucaaguacggcaacggcgucuggaucggccgcaccaaguccaucuccucccgcaacggcuucgagaugaucugggaccccaacggcuggaccggcaccgacaacaacuucuccaucaagcaggacaucgucggcaucaacgagugguccggcuacuccggcuccuucguccagcaccccgagcucaccggccucgacugcauccgccccugcuucugggucgagcucauccgcggccgccccaaggagaacaccaucuggaccuccggcuccuccaucuccuucugcggcgucaacuccgacaccgucggcugguccuggcccgacggcgccgagcuccccuucaccaucgacaaguga

SEQ ID NO: 116768 - RNA, 1410 nt, Artificial Sequence
  derived and/or modified CDS sequence (opt2) from neuraminidase__InfluenzaA__AEH59402
augaaccccaaccagaagaucaucaccaucggcuccgucugcaugaccaucggcauggccaaccucauccuccagaucggcaacaucaucuccaucuggaucucccacuccauccagcucggcaaccagaaccagaucgagaccugcaaccaguccgucaucaccuacgagaacaacaccugggucaaccagaccuacgucaacaucuccaacaccaacuucgccgccggccaguccgucgucuccgucaagcucgccggcaacuccucccucugccccgucuccggcugggccaucuacuccaaggacaacuccauccgcaucggcuccaagggcgacgucuucgucauccgcgagcccuucaucuccugcuccccccucgagugccgcaccuucuuccucacccagggcgcccuccucaacgacaagcacuccaacggcaccaucaaggaccgcucccccuaccgcacccucauguccugccccaucggcgagguccccucccccuacaacucccgcuucgaguccgucgccugguccgccuccgccugccacgacggcaucaacuggcucaccaucggcaucuccggccccgacaacggcgccgucgccguccucaaguacaacggcaucaucaccgacaccaucaaguccuggcgcaacaacauccuccgcacccaggaguccgagugcgccugcgucaacggcuccugcuucaccgucaugaccgacggccccaacgacggccaggccuccuacaagaucuuccgcaucgagaagggcaagaucgucaaguccgucgagaugaacgcccccaacuaccacuacgaggagugcuccugcuaccccgacuccuccgagaucaccugcgucugccgcgacaacuggcacggcgccaaccgccccugggucuccuucaaccagaaccucgaguaccagaucggcuacaucugcuccggcaucuucggcgacaacccccgccccaacgacaagaccggcuccugcggccccgucuccuccaacggcgccaacggcgucaagggcuucuccuucaaguacggcaacggcgucuggaucggccgcaccaaguccaucuccucccgcaacggcuucgagaugaucugggaccccaacggcuggaccgagaccgacaacaacuucuccaucaagcaggacaucgucggcaucaacgagugguccggcuacuccggcuccuucguccagcaccccgagcucaccggccucgacugcauccgccccugcuucugggucgagcucauccgcggccgccccaaggagaacaccaucuggaccuccggcuccuccaucuccuucugcggcgucaacuccgacaccgucggcugguccuggcccgacggcgccgagcuccccuucaccaucgacaaguga

SEQ ID NO: 116769 - RNA, 1410 nt, Artificial Sequence
  derived and/or modified CDS sequence (opt2) from neuraminidase__InfluenzaA__AEH59404
augaaccccaaccagaagaucaucaccaucggcuccgccugcaugaccaucggcauggccaaccucauccuccagaucggcaacaucaucuccaucuggaucucccacuccauccagcucggcaaccagucccagaucgagaccugcaaccaguccgucaucaccuacgagaacaacaccugggucaaccagaccuacgucaacaucuccaacaccaacuucgccgccggccagcccgucgucuccgucaagcucgccggcaacuccucccucugccccgucuccggcugggccaucuacuccaaggacaacuccauccgcaucggcuccaagggcgacgucuucgucauccgcgagcccuucaucuccugcuccccccucgagugccgcaccuucuuccucacccagggcgcccuccucaacgacaagcacuccaacggcaccaucaaggaccgcucccccuaccgcacccucauguccugccccaucggcgagguccccucccccuacaacucccgcuucgaguccgucgccugguccgccuccgccugccacgacggcaucaacuggcucaccaucggcaucuccggccccgacaacggcgccgucgccguccucaaguacaacggcaucaucaccgacaccaucaaguccuggcgcaacaacauccuccgcacccaggaguccgagugcgccugcgucaacggcuccugcuucaccaucaugaccgacggccccuccgacggccaggccuccuacaagaucuuccgcaucgagaagggcaagaucgucaaguccgucgagaugaacgcccccaacuaccacuacgaggagugcuccugcuaccccgacuccuccgagaucaccugcgucugccgcgacaacuggcacggcuccaaccgccccugggucuccuucaaccagaaccucgaguaccagaucggcuacaucugcuccggcaucuucggcgacaacccccgccccaacgacaagaccggcuccugcggccccgucuccuccaacggcgccaacggcgucaagggcuucuccuucaaguacggcaacggcgucuggaucggccgcaccaaguccaucuccucccgcaagggcuucgagaugaucugggaccccaacggcuggaccggcaccgacaacaacuucuccaucaagcaggacaucgucggcaucaacgagugguccggcuacuccggcuccuucguccagcaccccgagcucaccggccucgacugcauccgccccugcuucugggucgagcucauccgcggccgccccaaggagaacaccaucuggaccuccggcuccuccaucuccuucugcggcgucaacuccgacaccgucggcugguccuggcccgacggcgccgagcuccccuucaccaucgacaaguga

SEQ ID NO: 116770 - RNA, 1410 nt, Artificial Sequence
  derived and/or modified CDS sequence (opt2) from neuraminidase__InfluenzaA__AEH59406
augaaccccaaccagaagaucaucaccaucggcuccgucugcaugaccaucggcauggccaaccucauccuccagaucggcaacaucaucuccaucuggaucucccacuccauccagcucggcaaccagucccagaucgagaccugcaaccaguccgucaucaccuacgagaacaacaccugggucaaccagaccuacgucaacaucuccaacaccaacuucgccgccggccaguccgucgucuccgucaagcucgccggcaacuccucccucugccccgucuccggcugggccaucuacuccaaggacaacuccauccgcaucggcuccaagggcgacgucuucgucauccgcgagcccuucaucuccugcuccccccucgagugccgcaccuucuuccucacccagggcgcccuccucaacgacaagcacuccaacggcaccaucaaggaccgcucccccuaccgcacccucauguccugccccaucggcgagguccccucccccuacaacucccgcuucgaguccgucgccugguccgccuccgccugccacgacggcaucaacuggcucaccaucggcaucuccggccccgacaacggcgccgucgccguccucaaguacaacggcaucaucaccgacaccaucaaguccuggcgcaacaacauccuccgcacccaggaguccgagugcgccugcgucaacggcuccugcuucaccaucaugaccgacggccccuccgacggccaggccuccuacaagaucuuccgcaucgagaagggcaagaucgucaaguccgucgagaugaacgcccccaccuaccacuacgaggagugcuccugcuaccccgacuccuccgagaucaccugcgucugccgcgacaacuggcacggcuccaaccgccccugggucuccuucaaccagaaccucgaguaccagaucggcuacaucugcuccggcaucuucggcgacaacccccgccccaacgacaagaccggcuccugcggccccgucuccuucaacggcgccaacggcgucaagggcuucuccuucaaguacggcaacggcgucuggaucggccgcaccaaguccaucuccucccgcaagggcuucgagaugaucugggaccccaacggcuggaccggcaccgacaacaacuucuccaucaagcaggacaucgucggcaucgacgagugguccggcuacuccggcuccuucguccagcaccccgagcucaccggccucgacugcauccgccccugcuucugggucgagcucauccgcggccgccccaaggagaacaccaucuggaccuccggcuccuccaucuccuucugcggcgucaacuccgacaccgucggcugguccuggcccgacggcgccgagcuccccuucaccaucgacaaguga

SEQ ID NO: 116771 - RNA, 1410 nt, Artificial Sequence; identical to SEQ ID NO: 116293
  derived and/or modified CDS sequence (opt2) from neuraminidase__InfluenzaA__AEH59408

SEQ ID NO: 116772 - RNA, 1410 nt, Artificial Sequence
  derived and/or modified CDS sequence (opt2) from neuraminidase__InfluenzaA__AEH59412
augaaccccaaccagaagaucaucaccaucggcuccgucugcaugaccaucggcauggccaaccucauccuccagaucggcaacaucaucuccaucuggaucucccacuccauccagcucggcaaccagucccagaucgagaccugcaaccaguccgucaucaccuacgagaacaacaccugggucaaccagaccuacgucaacaucuccaacaccaacuucgccgccggccaguccgucgucuccgucaagcucgccggcaacuccucccucugccccgucuccggcugggccaucuacuccaaggacaacuccauccgcaucggcuccaagggcgacgucuucgucauccgcgagcccuucaucuccugcuccccccucgagugccgcaccuucuuccucacccagggcgcccuccucaacgacaagcacuccaacggcaccaucaaggaccgcucccccuaccgcacccucauguccugccccaucggcgagguccccucccccuacaacucccgcuucgaguccgucgccugguccgccuccgccugccacgacggcaucaacuggcucaccaucggcaucuccggccccgacaacggcgccgucgccguccucaaguacaacggcaucaucaccgacaccauccgcuccuggcgcaacaacauccuccgcacccaggaguccgagugcgccugcgucaacggcuccugcuucaccaucaugaccgacggccccuccgacggccaggccuccuacaagaucuuccgcaucgagaagggcaagaucaucaaguccgucgagaugaacgcccccaacuaccacuacgaggagugcuccugcuaccccgacuccuccgagaucaccugcgucugccgcgacaacuggcacggcuccaaccgccccugggucuccuucaaccagaaccucgaguaccagaucggcuacaucugcuccggcaucuucggcgacaacccccgccccaacgacaagaccggcuccugcggccccguccucuccaacggcgccaacggcgucaagggcuucuccuucaaguacggcaacggcgucuggaucggccgcaccaaguccaucuccucccgcaagggcuucgagaugaucugggaccccaacggcuggaccggcaccgacaacaacuucuccaucaagcaggacaucgucggcaucaacgagugguccggcuacuccggcuccuucguccagcaccccgagcucaccggccucgacugcauccgccccugcuucugggucgagcucauccgcggccgccccaaggagaacaccaucuggaccuccggcuccuccaucuccuucugcggcgucaacuccgacaccgucggcugguccuggcccgacggcgccgagcuccccuucaccaucgacaaguga

SEQ ID NO: 116773 - RNA, 1410 nt, Artificial Sequence; identical to SEQ ID NO: 116745
  derived and/or modified CDS sequence (opt2) from neuraminidase__InfluenzaA__AEH59416

SEQ ID NO: 116774 - RNA, 1410 nt, Artificial Sequence; identical to SEQ ID NO: 112774
  derived and/or modified CDS sequence (opt2) from neuraminidase__InfluenzaA__AEH59584

SEQ ID NO: 116775 - RNA, 1410 nt, Artificial Sequence; identical to SEQ ID NO: 112774
  derived and/or modified CDS sequence (opt2) from neuraminidase__InfluenzaA__AEH59586

SEQ ID NO: 116776 - RNA, 1410 nt, Artificial Sequence; identical to SEQ ID NO: 112774
  derived and/or modified CDS sequence (opt2) from neuraminidase__InfluenzaA__AEH59588

SEQ ID NO: 116777 - RNA, 1410 nt, Artificial Sequence; identical to SEQ ID NO: 112774
  derived and/or modified CDS sequence (opt2) from neuraminidase__InfluenzaA__AEH59592

SEQ ID NO: 116778 - RNA, 1410 nt, Artificial Sequence; identical to SEQ ID NO: 112774
  derived and/or modified CDS sequence (opt2) from neuraminidase__InfluenzaA__AEH59594

SEQ ID NO: 116779 - RNA, 1410 nt, Artificial Sequence; identical to SEQ ID NO: 112774
  derived and/or modified CDS sequence (opt2) from neuraminidase__InfluenzaA__AEH59596

SEQ ID NO: 116780 - RNA, 1410 nt, Artificial Sequence; identical to SEQ ID NO: 112774
  derived and/or modified CDS sequence (opt2) from neuraminidase__InfluenzaA__AEH59598

SEQ ID NO: 116781 - RNA, 1410 nt, Artificial Sequence; identical to SEQ ID NO: 112774
  derived and/or modified CDS sequence (opt2) from neuraminidase__InfluenzaA__AEH59600

SEQ ID NO: 116782 - RNA, 1410 nt, Artificial Sequence
  derived and/or modified CDS sequence (opt2) from neuraminidase__InfluenzaA__AEH59602
augaaccccaaccagaagaucaucaccaucggcuccgucugcaugaccaucggcauggccaaccucauccuccagaucggcaacaucaucuccaucuggaucucccacuccauccagcucggcucccagaaccagaucgagaccugcaaccaguccgucaucaccuacgagaacaacaccugggucaaccagaccuacgucaacaucuccaacaccaacuucgccgccggccaguccgucgucuccgucaagcucgccggcaacuccucccucugccccgucuccggcugggccaucuacuccaaggacaacuccauccgcaucggcuccaagggcgacgucuucgucauccgcgagcccuucaucuccugcuccccccucgagugccgcaccuucuuccucacccagggcgcccuccucaacgacaagcacuccaacggcaccaucaaggaccgcucccccuaccgcacccucauguccugccccaucggcgagguccccucccccuacaacucccgcuucgaguccgucgccugguccgccuccgccugccacgacggcaucaacuggcucaccaucggcaucuccggccccgacaacggcgccgucgccguccucaaguacaacggcaucaucaccgacaccaucaaguccuggcgcaacaacauccuccgcacccaggaguccgagugcgccugcgucaacggcuccugcuucaccgucaugaccgacggccccuccgacggccaggccuccuacaagaucuuccgcaucgagaagggcaagaucgucaaguccgucgagaugaacgcccccaacuaccacuacgaggagugcuccugcuaccccgacuccuccgagaucaccugcgucugccgcgacaacuggcacggcuccaaccgccccugggucuccuucaaccagaaccucgaguaccagaucggcuacaucugcuccggcaucuucggcgacaacccccgccccaacgacaagaccggcuccugcggccccgucuccuccaacggcgccaacggcgucaagggcuucuccuucaaguacggcaacggcgucuggaucggccgcaccaaguccaucuccucccgcaacggcuucgagaugaucugggaccccaacggcuggaccggcaccgacaacaacuucuccaucaagcaggacaucgucggcaucaacgagugguccggcuacuccggcuccuucguccagcaccccgagcucaccggccucgacugcauccgccccugcuucugggucgagcucauccgcggccgccccaaggagaacaccaucuggaccuccggcuccuccaucuccuucugcggcgucaacuccgacaccgucggcugguccuggcccgacggcgccgagcuccccuucaccaucgacaaguga

SEQ ID NO: 116783 - RNA, 1410 nt, Artificial Sequence; identical to SEQ ID NO: 112774
  derived and/or modified CDS sequence (opt2) from neuraminidase__InfluenzaA__AEH59606

SEQ ID NO: 116784 - RNA, 1410 nt, Artificial Sequence; identical to SEQ ID NO: 112774
  derived and/or modified CDS sequence (opt2) from neuraminidase__InfluenzaA__AEH59616

SEQ ID NO: 116785 - RNA, 1410 nt, Artificial Sequence; identical to SEQ ID NO: 112774
  derived and/or modified CDS sequence (opt2) from neuraminidase__InfluenzaA__AEH59626

SEQ ID NO: 116786 - RNA, 1413 nt, Artificial Sequence; identical to SEQ ID NO: 113497
  derived and/or modified CDS sequence (opt2) from neuraminidase__InfluenzaA__AEH77262

SEQ ID NO: 116787 - RNA, 1410 nt, Artificial Sequence
  derived and/or modified CDS sequence (opt2) from neuraminidase__InfluenzaA__AEH77273
augaaccccaaccagaagaucaucaccaucggcuccgucugcaugaccaucggcauggccaaccucauccuccagaucggcaacaucaccuccaucuggaucucccacuccauccagcucggcaaccagaaccagaucgagaccugcaaccaguccgucaucaccuacgagaacaacaccugggucaaccagaccuacgucaacaucuccaacaccaacuucgccgccggccaguccgucgucuccgucaagcucgccggcaacuccucccucugccccgucuccggcugggccaucuacuccaaggacaacuccauccgcaucggcuccaagggcgacgucuucgucauccgcgagcccuucaucuccugcuccccccucgagugccgcaccuucuuccucacccagggcgcccuccucaacgacaagcacuccaacggcaccaucaaggaccgcucccccuaccgcacccucauguccugccccaucggcgagguccccucccccuacaacucccgcuucgaguccgucgccugguccgccuccgccugccacgacggcaucaacuggcucaccaucggcaucuccggccccgacaacggcgccgucgccguccucaaguacaacggcaucaucaccgacaccaucaaguccuggcgcaacaacauccuccgcacccaggaguccgagugcgccugcgucaacggcuccugcuucaccgucaugaccgacggccccuccgacggccaggccuccuacaagaucuuccgcaucgagaagggcaagaucgucaaguccgucgagaugaacgcccccaacuaccacuacgaggagugcuccugcuaccccgacuccuccgagaucaccugcgucugccgcgacaacuggcacggcuccaaccgccccugggucuccuucaaccagaaccucgaguaccagaucggcuacaucugcuccggcaucuucggcgacaacccccgccccaacgacaagaccggcuccugcggccccgucuccuccaacggcgccaacggcgucaagggcuucuccuucaaguacggcaacggcgucuggaucggccgcaccaaguccaucuccucccgcaacggcuucgagaugaucugggaccccaacggcuggaccggcaccgacaacaacuucuccaucaagcaggacaucgucggcaucaacgagugguccggcuacuccggcuccuucguccagcaccccgagcucaccggccucgacugcauccgccccugcuucugggucgagcucauccgcggccgccccaaggagaacaccaucuggaccuccggcuccuccaucuccuucugcggcgucaacuccgacaccgucggcugguccuggcccgacggcgccgagcuccccuucaccaucgacaaguga

SEQ ID NO: 116788 - RNA, 1410 nt, Artificial Sequence
  derived and/or modified CDS sequence (opt2) from neuraminidase__InfluenzaA__AEH77282
augaaccccaaccagaagaucaucaccaucggcuccgucucccucaccaucgccaccaucugcuuccucaugcagaucgccauccucgucaccaccgucacccuccacuucaagcagcacgagugcaacuccccccccaacaaccaggucaugcucugcgagcccaccaucaucgagcgcaacaucaccgagaucgucuaccucaccaacaccaccaucgagaaggagaucugccccaagcucgccgaguaccgcaacugguccaagccccagugcaacaucaccggcuucgcccccuucuccaaggacaacuccauccgccucuccgccggcggcgacaucugggucacccgcgagcccuacgucuccugcgaccccgacaagugcuaccaguucgcccucggccagggcaccacccucaacaacggccacuccaacgacaccguccacgaccgcacccccuaccgcacccuccucaugaacgagcucggcguccccuuccaccucggcacccgccaggucugcaucgccugguccuccuccuccugccacgacggcaaggccuggcuccacgucugcgucaccggcgacgacaagaacgccaccgccuccuucaucuacaacggccgccucgucgacuccaucggcuccugguccaagaagauccuccgcacccaggaguccgagugcgucugcaucaacggcaccugcaccgucgucaugaccgacggcuccgccuccggcaaggccgacaccaagauccucuucgucgaggagggcaagaucguccacaucuccacccucuccggcuccgcccagcacgucgaggagugcuccugcuacccccgcuaccccggcguccgcugcgucugccgcgacaacuggaagggcuccaaccgccccaucgucgacaucaacgucaaggacuacuccaucgucuccuccuacgucugcuccggccucgucggcgacaccccccgcaagaacgacuccuccuccuccucccacugccucgaccccaacaacgaggagggcggccacggcgucaagggcugggccuucgacgacggcaacgacgucuggaugggccgcaccaucuccgagaagcuccgcuccggcuacgagaccuucaaggucaucgagggcugguccaagcccaacuccaagcuccagaucaaccgccaggucaucgucgagcgcggcaaccgcuccggcuacuccggcaucuucuccgucgagggcaaguccugcaucaaccgcugcuucuacgucgagcucauccgcggccgcaaggaggagaccgaggucugguggaccuccaacuccaucgucgucuucugcggcaccuccggcaccuacggcaccggcuccuggcccgacggcgccgacaucaaccucaugcccaucuga

SEQ ID NO: 116789 - RNA, 1410 nt, Artificial Sequence; identical to SEQ ID NO: 112774
  derived and/or modified CDS sequence (opt2) from neuraminidase__InfluenzaA__AEI29218

SEQ ID NO: 116790 - RNA, 1410 nt, Artificial Sequence; identical to SEQ ID NO: 114141
  derived and/or modified CDS sequence (opt2) from neuraminidase__InfluenzaA__AEI29228

SEQ ID NO: 116791 - RNA, 1410 nt, Artificial Sequence; identical to SEQ ID NO: 110173
  derived and/or modified CDS sequence (opt2) from neuraminidase__InfluenzaA__AEI54350

SEQ ID NO: 116792 - RNA, 1410 nt, Artificial Sequence; identical to SEQ ID NO: 110186
  derived and/or modified CDS sequence (opt2) from neuraminidase__InfluenzaA__AEI54361

SEQ ID NO: 116793 - RNA, 1410 nt, Artificial Sequence; identical to SEQ ID NO: 110750
  derived and/or modified CDS sequence (opt2) from neuraminidase__InfluenzaA__AEI54372

SEQ ID NO: 116794 - RNA, 1410 nt, Artificial Sequence; identical to SEQ ID NO: 110627
  derived and/or modified CDS sequence (opt2) from neuraminidase__InfluenzaA__AEI54383

SEQ ID NO: 116795 - RNA, 1410 nt, Artificial Sequence; identical to SEQ ID NO: 110750
  derived and/or modified CDS sequence (opt2) from neuraminidase__InfluenzaA__AEI54394

SEQ ID NO: 116796 - RNA, 1410 nt, Artificial Sequence; identical to SEQ ID NO: 111920
  derived and/or modified CDS sequence (opt2) from neuraminidase__InfluenzaA__AEI54416

SEQ ID NO: 116797 - RNA, 1410 nt, Artificial Sequence; identical to SEQ ID NO: 116740
  derived and/or modified CDS sequence (opt2) from neuraminidase__InfluenzaA__AEI54427

SEQ ID NO: 116798 - RNA, 1410 nt, Artificial Sequence; identical to SEQ ID NO: 115554
  derived and/or modified CDS sequence (opt2) from neuraminidase__InfluenzaA__AEI54438

SEQ ID NO: 116799 - RNA, 1410 nt, Artificial Sequence; identical to SEQ ID NO: 115554
  derived and/or modified CDS sequence (opt2) from neuraminidase__InfluenzaA__AEI54449

SEQ ID NO: 116800 - RNA, 1410 nt, Artificial Sequence; identical to SEQ ID NO: 115554
  derived and/or modified CDS sequence (opt2) from neuraminidase__InfluenzaA__AEI54460

SEQ ID NO: 116801 - RNA, 1410 nt, Artificial Sequence
  derived and/or modified CDS sequence (opt2) from neuraminidase__InfluenzaA__AEI54471
augaaccccaaccagaagaucaucaccaucggcuccgucucccucaccaucuccaccaucugcuucuucaugcagaucgccguccucaucaccaccgucacccuccacuucaagcaguacaaguucaacuccccccccaacaaccaggucaugcucugcgagcccaccaucaucgagcgcaacaucaccgagaucgucuaccucaccaacaccaccaucgagaaggagaucugccccaagcucgccgaguaccgcaacugguccaagccccagugcgacaucaccggcuucgcccccuucuccaaggacaacuccauccgccucuccgccggcggcgacaucugggucacccgcgagcccuacgucuccugcgaccccgacaagugcuaccaguucgcccucggccagggcaccacccucaacaacguccacuccaacaacaccguccgcgaccgcacccccuaccgcacccuccucaugaacgagcucggcguccccuuccaccucggcaccaagcaggucugcaucgccugguccuccuccuccugccacgacggcaaggccuggcuccacgucugcaucaccggcgacgacaagaacgccaccgccuccuucaucuacaacggccgccucgucgacuccgucgucuccugguccaaggagauccuccgcacccaggaguccgagugcgucugcaucaacggcaccugcaccgucgucaugaccgacggcuccgccuccggcaaggccgacaccaagauccucuucaucgaggagggcaagaucguccacaccuccacccucuccggcuccgcccagcacgucgaggagugcuccugcuacccccgcuaccccggcguccgcugcgucugccgcgacaacuggaagggcuccaaccgccccaucgucgacaucaacaucaaggaccacuccaucgucuccuccuacgucugcuccggccucgucggcgacaccccccgcaagaacgacuccuccuccuccucccacugccucgaccccaacaacgaggagggcggccacggcgucaagggcugggccuucgacgacggcaacgacgucuggaugggccgcaccaucaacgagaccucccgccucggcuacgagaccuucaaggucaucgagggcugguccaaccccaaguccaagcuccagaucaaccgccaggucaucgucgaccgcggcaaccgcuccggcuacuccggcaucuucuccgucgagggcaaguccugcaucaaccgcugcuucuacgucgagcucauccgcggccgcaaggaggagaccgagguccucuggaccuccaacuccaucgucgucuucugcggcaccuccggcaccuacggcaccggcuccuggcccgacggcgccgaccucaaccucaugcccaucuga

SEQ ID NO: 116802 - RNA, 1410 nt, Artificial Sequence; identical to SEQ ID NO: 115446
  derived and/or modified CDS sequence (opt2) from neuraminidase__InfluenzaA__AEI54482

SEQ ID NO: 116803 - RNA, 1410 nt, Artificial Sequence
  derived and/or modified CDS sequence (opt2) from neuraminidase__InfluenzaA__AEI54493
augaaccccaaccagaagaucaucaccaucggcuccgucucccucaccaucuccaccaucugcuucuucaugcagaucgccauccucaucaccaccgucacccuccacuucaagcaguacgaguucaacuccccccccaacaaccaggucaugcucugcgagcccaccaucaucgagcgcaacaucaccgagaucgucuaccucaccaacaccaccaucgagaaggagaucugccccaagcucgccgaguaccgcaacugguccaagccccagugcgacaucaccggcuucgcccccuucuccaaggacaacuccauccgccucuccgccggcggcgacaucugggucacccgcgagcccuacgucuccugcgaccccgacaagugcuaccaguucgcccucggccagggcaccacccucaacaacguccacuccaacaacaccguccgcgaccgcacccccuaccgcacccuccucaugaacgagcucggcguccccuuccaccucggcaccaagcaggucugcaucgccugguccuccuccuccugccacgacggcaaggccuggcuccacgucugcaucaccggcgacgacaagaacgccaccgccuccuucaucuacaacggccgccucgucgacuccgucgucuccugguccaaggagauccuccgcacccaggaguccgagugcgucugcaucaacggcaccugcaccgucgucaugaccgacggcuccgccuccggcaaggccgacaccaagauccucuucaucgaggagggcaagaucguccacaccuccacccucuccggcuccgcccagcacgucgaggagugcuccugcuacccccgcuaccccggcguccgcugcgucugccgcgacaacuggaagggcuccaaccgccccaucgucgacaucaacaucaaggaccacuccaucgucuccuccuacgucugcuccggccucgucggcgacaccccccgcaagaacgacuccuccuccuccucccacugccucgaccccaacaacgaggagggcggccacggcgucaagggcugggccuucgacgacggcaacgacgucuggaugggccgcaccaucaacgagaccucccgccucggcuacgagaccuucaaggucaucgagggcugguccaaccccaaguccaagcuccagaucaaccgccaggucaucgucgaccgcggcaaccgcuccggcuacuccggcaucuucuccgucgagggcaaguccugcaucaaccgcugcuucuacgucgagcucauccgcggccgcaaggaggagaccgagguccucuggaccuccaacuccaucgucgucuucugcggcaccuccggcaccuacggcaccggcuccuggcccgacggcgccgaccucaaccucauguccaucuga

SEQ ID NO: 116804 - RNA, 1410 nt, Artificial Sequence; identical to SEQ ID NO: 115554
  derived and/or modified CDS sequence (opt2) from neuraminidase__InfluenzaA__AEI54504

SEQ ID NO: 116805 - RNA, 1410 nt, Artificial Sequence; identical to SEQ ID NO: 115074
  derived and/or modified CDS sequence (opt2) from neuraminidase__InfluenzaA__AEI59982

SEQ ID NO: 116806 - RNA, 1413 nt, Artificial Sequence; identical to SEQ ID NO: 115972
  derived and/or modified CDS sequence (opt2) from neuraminidase__InfluenzaA__AEI59993

SEQ ID NO: 116807 - RNA, 1413 nt, Artificial Sequence; identical to SEQ ID NO: 115968
  derived and/or modified CDS sequence (opt2) from neuraminidase__InfluenzaA__AEI60004

SEQ ID NO: 116808 - RNA, 1410 nt, Artificial Sequence
  derived and/or modified CDS sequence (opt2) from neuraminidase__InfluenzaA__AEI60015
augaaccccaaccagaagaucaucaccaucggcuccgucucccucaccaucuccaccaucugcuucuucaugcagaucgccauccucaucaccaccgucacccuccacuucaagcaguacgaguucaacuccccccccaacaaccaggucaugcucugcgagcccaccaucaucgagcgcaacaucaccgagaucgucuaccucaccaacaccaccaucgagaaggagaucugccccaagcucgccgaguaccgcaacugguccaagccccagugcgacaucaccggcuucgcccccuucuccaaggacaacuccauccgccucuccgccggcggcgacaucugggucacccgcgagcccuacgucuccugcgaccccgacaagugcuaccaguucgcccucggccagggcaccacccucaacaacguccacuccaacaacaccguccgcgaccgcacccccuaccgcacccuccucaugaacgagcucggcguccccuuccaccucggcaccaagcaggucugcaucgccugguccuccuccuccugccacgacggcaaggccuggcuccacgucugcaucaccggcgacgacaagaacgccaccgccuccuucaucuacaacggccgccucgucgacuccgucgucuccugguccaaggagauccuccgcacccaggaguccgagugcgucugcaucaacggcaccugcaccgucgucaugaccgacggcuccgccuccggcaaggccgacaccaagauccucuucaucgaggagggcaagaucguccacaccuccacccucuccggcuccgcccagcacgucgaggagugcuccugcuacccccgcuaccccggcguccgcugcgucugccgcgacaacuggaagggcuccaaccgccccaucgucgacaucaacaucaaggaccacuccaucgucuccuccuacgucugcuccggccucgucggcgacaccccccgcaagaacgacuccuccuccuccggccacugccucgaccccaacaacgaggagggcggcaacggcgucaagggcugggccuucgacgacggcaacgacgucuggaugggccgcaccaucuccgagaagucccgccucggcuacgagaccuucaaggucaucgagggcugguccaaccacaaguccaagcuccagaucaaccgccaggucaucgucgaccgcggcaaccgcuccggcuacuccggcaucuucuccgucgagggcaaguccugcaucaaccgcugcuucuacgucgagcucauccgcggccgcaaggaggagaccgagguccucuggaccuccaacuccaucgucgucuucugcggcaccuccggcaccuacggcaccggcuccuggcccgacggcgccgaccucaaccucaugcccaucuga

SEQ ID NO: 116809 - RNA, 1410 nt, Artificial Sequence; identical to SEQ ID NO: 114520
  derived and/or modified CDS sequence (opt2) from neuraminidase__InfluenzaA__AEI60026

SEQ ID NO: 116810 - RNA, 1410 nt, Artificial Sequence
  derived and/or modified CDS sequence (opt2) from neuraminidase__InfluenzaA__AEI60037
augaaccccaaccagaagaucaucaccaucggcuccgucucccucaccaucuccaccaucugcuucuucaugcagaucgccauccucaucaccaccgucacccuccacuucaagcaguacgaguucaacuccccccccaacaaccaggucaugcucugcgagcccaccaucaucgagcgcaacaucaccgagaucgucuaccucaccaacaccaccaucgagaaggagaucugccccaagcucgccgaguaccgcaacugguccaagccccagugcgacaucaccggcuucgcccccuucuccaaggacaacuccauccgccucuccgccggcggcgacaucugggucacccgcgagcccuacgucuccugcgaccccgacaagugcuaccaguucgcccucggccagggcaccacccucaacaacguccacuccaacaacaccguccgcgaccgcacccccuaccgcacccuccucaugaacgagcucggcguccccuuccaccucggcaccaagcaggucugcaucgccugguccuccuccuccugccacgacggcaaggccuggcuccacgucugcaucaccggcgacgacaagaacgccaccgccuccuucaucuacaacggccgccucgucgacuccgucgucuccugguccaaggagauccuccgcacccaggaguccgagugcgucugcaucaacggcaccugcaccgucgucaugaccgacggcuccgccuccggcaaggccgacaccaagauccucuucaucgaggagggcaagaucguccacaccuccacccucuccggcuccgcccagcacgucgaggagugcuccugcuacccccgcuaccccggcguccgcugcgucugccgcgacaacuggaagggcuccaaccgccccaucgucgacaucaacaucaaggaccacuccaucgucuccuccuacgucugcuccggccucgucggcgacaccccccgccgcaacgacuccuccuccuccucccacugccucgaccccaacaacgaggagggcggccacggcgucaagggcugggccuucgacgacggcaacgacgucuggaugggccgcaccaucuccgagaagucccgccucggcuacgagaccuucaaggucaucgagggcugguccaaccacaaguccaagcuccagaucaaccgccaggucaucgucgaccgcggcaaccgcuccggcuacuccggcaucuucuccgucgagggcaaguccugcaucaaccgcugcuucuacgucgagcucauccgcggccgcaaggaggagaccgagguccucuggaccuccaacuccaucgucgucuucugcggcaccuccggcaccuacggcaccggcuccuggcccgacggcgccgaccucaaccucaugcccaucuga

SEQ ID NO: 116811 - RNA, 1410 nt, Artificial Sequence
  derived and/or modified CDS sequence (opt2) from neuraminidase__InfluenzaA__AEI60048
augaaccccaaccagaagaucaucaccaucggcuccgucucccucaccaucuccaccaucugcuucuucaugcagaucgccauccucaucaccaccgucacccuccacuucaagcaguacgaguucaacuccccccccaacaaccaggucaugcucugcgcccccaccaucaucgagcgcaacaucaccgagaucgucuaccucaccaacaccaccaucgagaaggagaucugccccaagcucgccgaguaccgcaacugguccaagccccagugcgacaucaccggcuucgcccccuucuccaaggacaacuccauccgccucuccgccggcggcgacaucugggucacccgcgagcccuacgucuccugcgaccccgacaagugcuaccaguucgcccucggccagggcaccacccucaacaacguccacuccaacaacaccguccgcgaccgcacccccuaccgcacccuccucaugaacgagcucggcguccccuuccaccucggcaccaagcaggucugcaucgccugguccuccuccuccugccacgacggcaaggccuggcuccacgucugcaucaccggcgacgacaagaacgccaccgccuccuucaucuacaacggccgccucgucgacuccgucgucuccugguccaaggagauccuccgcacccaggaguccgagugcgucugcaucaacggcaccugcaccgucgucaugaccgacggcuccgccuccggcaaggccgacaccaagauccucuucaucgaggagggcaagaucguccacaccuccacccucuccggcuccgcccagcacgucgaggagugcuccugcuacccccgcuaccccggcguccgcugcgucugccgcgacaacuggaagggcuccaaccgccccaucgucgacaucaacaucaaggaccacuccaucgucuccuccuacgucugcuccggccucgucggcgacaccccccgcaagaacgacuccuccuccuccucccacugccucgaccccaacaacgaggagggcggccacggcgucaagggcugggccuucgacgacggcaacgacgucuggaugggccgcaccaucuccgagaagucccgccucggcuacgagaccuucaaggucaucgagggcugguccaaccccaaguccaagcuccagaucaaccgccaggucaucgucgaccgcggcaaccgcuccggcuacuccggcaucuucuccgucgagggcaaguccugcaucaaccgcugcuucuacgucgagcucauccgcggccgcaaggaggagaccgagguccucuggaccuccaacuccaucgucgucuucugcggcaccuccggcaccuacggcaccggcuccuggcccgacggcgccgacaucaaccucaugcccaucuga

SEQ ID NO: 116812 - RNA, 1410 nt, Artificial Sequence
  derived and/or modified CDS sequence (opt2) from neuraminidase__InfluenzaA__AEI60089
augaaccccaaccagaagaucaucaccaucggcuccgucugcaugaccaucggcauggccaaccucauccuccagaucggcaacaucaucuccaucuggaucucccacuccauccagcucggcaaccagaaccagaucgagaccugcaaccaguccgucaucaccuacgagaacaacaccugggucaaccagaccuacgucaacaucuccaacaccaacuucgccgccggccaguccgucgucuccgucaagcucgccggcaacuccucccucugccccgucuccggcugggccaucuacuccaaggacaacuccauccgcaucggcuccaagggcgacgucuucgucauccgcgagcccuucaucuccugcuccccccucgagugccgcaccuucuuccucacccagggcgcccuccucaacgacaagcacuccaacggcaccaucaaggaccgcucccccuaccgcacccucauguccugccccaucggcgagguccccucccccuacaacucccgcuucgaguccgucgccugguccgccuccgccugccacgacggcaucaacuggcucaccaucggcaucuccggccccgacaacggcgccgucgccguccucaaguacaacggcaucaucaccgacaccaucaaguccuggcgcaacaacauccuccgcacccaggaguccgagugcgccugcgucaacggcuccugcuucaccaucaugaccgacggccccuccgacggccaggccuccuacaagaucuuccgcaucgagaagggcaagaucgucaaguccgucgagaugaacgcccccaacuacuacuacgaggagugcuccugcuaccccgacuccuccgagaucaccugcgucugccgcgacaacuggcacggcuccaaccgccccugggucuccuucaaccagaaccucgaguaccagaucggcuacaucugcuccggcaucuucggcgacaacccccgccccaacgacaagaccggcuccugcggccccgucuccuccaacggcgccaacggcgucaagggcuucuccuucaaguacggcaacggcgucuggaucggccgcaccaaguccaucuccucccgcaagggcuucgagaugaucugggaccccaacggcuggaccggcaccgacaacaacuucuccaucaagcaggacaucgucggcaucaacgagugguccggcuacuccggcuccuucguccagcaccccgagcucaccggccucgacugcauccgccccugcuucugggucgagcucauccgcggccgccccaaggagaacaccaucuggaccuccggcuccuccaucuccuucugcggcgucaacuccgacaccgucggcugguccuggcccgacggcgccgagcuccccuucaccaucgacaaguga

SEQ ID NO: 116813 - RNA, 1410 nt, Artificial Sequence; identical to SEQ ID NO: 116745
  derived and/or modified CDS sequence (opt2) from neuraminidase__InfluenzaA__AEI60099

SEQ ID NO: 116814 - RNA, 1410 nt, Artificial Sequence
  derived and/or modified CDS sequence (opt2) from neuraminidase__InfluenzaA__AEI60111
augaaccccaaccagaagaucaucaccaucggcuccaucucccucaccaucgccaccaucugcuuccucaugcagaucgccauccucgucaccaccgucacccuccacuucaagcaguacaagugcaacuccccccccaacaaccgcgucaugcucugcgagcccaccaucaucgagcgcaacaucaccgagaucgucuaccucaccaacaccaccaucgagaaggagaucugccccaagcucgccgaguaccgcaacugguccaagccccagugcaacaucaagggcuucgcccccuucuccaaggacaacuccauccgccucuccgccggcggcgacaucugggucacccgcgagcccuacgucuccugcgaccccgacaagugcuaccaguucgcccucggccagggcaccacccucaacaacggccacuccaacgacaccguccacgaccgcacccccuaccgcacccuccucaugaacgagcucggcguccccuuccaccucggcacccgccaggucugcaucgccugguccuccuccuccugccacgacggcaaggccuggcuccacgucugcaucaccggcgacgacgagaacgccaccgccuccuucaucuacaacggccgccucgucgacuccaucggcuccugguccaagaagauccuccgcacccaggaguccgagugcgucugcaucaacggcaccugcaccgucgucaugaccgacggcuccgccuccggcaaggccgacaccaagauccucuucaucgaggagggcaagaucguccacaucuccacccucuccggcuccgcccagcacgucgaggagugcuccugcuacccccgcuaccccggcguccgcugcgucugccgcgacaacuggaagggcuccaaccgccccaucgucgacaucaacguccgcgacuacuccaucgucuccuccuacgucugcuccggccucgucggcgacaccccccgcaagaacgacuccuucuccuccucccacugccucgaccccaacaacgaggagggcggccacggcgucaagggcugggccuucgacgacggcaacgacgucuggaugggccgcaccaucuccgagaagcuccgcuccggcuacgagaccuucaaggucaucgagggcugguccaagcccaacuccaagcuccaggucaaccgccaggucaucgucgagcgcggcaaccgcuccggcuacuccggcaucuucuccgucgagggcaaguccugcaucaaccgcugcuucuacgucgagcucauccgcggccgcaaggaggagaccaaggucugguggaccuccaacuccaucgucgucuucugcggcaccuccggcaccuacggcaccggcuccuggcccgacggcgccgacaucaacaucaugcccaucuga

SEQ ID NO: 116815 - RNA, 1410 nt, Artificial Sequence; identical to SEQ ID NO: 112774
  derived and/or modified CDS sequence (opt2) from neuraminidase__InfluenzaA__AEI73669

SEQ ID NO: 116816 - RNA, 1410 nt, Artificial Sequence
  derived and/or modified CDS sequence (opt2) from neuraminidase__InfluenzaA__AEI86727
augaaccccaaccagaagaucaucaccaucggcuccgucugcaucaccaucggcauggccaaccucauccuccagaucggcaacaucaucuccaucuggaucucccacuccauccagcucggcaaccagaaccagaucgagaccugcaaccaguccgucaucaccuacgagaacaacaccugggucaaccagaccuacgucaacaucuccaacaccaacuucgccgccggccaguccgucgucuccgucaagcucgccggcaacuccucccucugccccgucuccggcugggccaucuacuccaaggacaacuccauccgcaucggcuccaagggcgacgucuucgucauccgcgagcccuucaucuccugcuccccccucgagugccgcaccuucuuccucacccagggcgcccuccucaacgacaagcacuccaacggcaccaucaaggaccgcucccccuaccgcacccucauguccugccccaucggcgagguccccucccccuacaacuccaaguucgaguccgucgccugguccgccuccgccugccacgacggcaucuccuggcucaccaucggcaucuccggccccgacaacggcgccgucgccguccucaaguacaacggcaucaucaccgacaccaucaaguccuggcgcaacaacauccuccgcacccaggaguccgagugcgccugcgucaacggcuccugcuucaccgucaugaccgacggccccuccgacggccaggccuccuacaagaucuuccgcaucgagaagggcaagaucgucaaguccgucgagaugaacgcccccaacuaccacuacgaggagugcuccugcuaccccgacuccuccgagaucaccugcgucugccgcgacaacuggcacggcuccaaccgccccugggucuccuucaaccagaaccucgaguaccagaucggcuacaucugcuccggcaucuucggcgacaacccccgccccaacgacaagaccggcuccugcggccccgucuccuccaacggcgccaacggcgucaagggcuucuccuucaaguacggcaacggcgucuggaucggccgcaccaaguccaucuccucccgcaacggcuucgagaugaucugggaccccaacggcuggaccggcaccgacaacaacuucuccaucaagcaggacaucgucggcaucaacgagugguccggcuacuccggcuccuucguccagcaccccgagcucaccggccucgacugcauccgccccugcuucugggucgagcucauccgcggccgccccaaggagaacaccaucuggaccuccggcuccuccaucuccuucugcggcgucaacuccgacaccgucggcugguccuggcccgacggcgccgagcuccccuucaccaucgacaaguga

SEQ ID NO: 116817 - RNA, 1410 nt, Artificial Sequence
  derived and/or modified CDS sequence (opt2) from neuraminidase__InfluenzaA__AEI86737
augaaccccaaccagaagaucaucaccaucggcuccgucugcaugaccaucggcauggccaaccucauccuccagaucggcaacaucaucuccaucuggaucucccacuccauccagcucggcaaccagaaccagaucgagaccugcaaccaguccgucaucaccuacgagaacaagaccugggucaaccagaccuacgucaacaucuccaacaccaacuucgccgccggccaguccgucgucuccgucaagcucgccggcaacuccucccucugccccgucuccggcugggccaucuacuccaaggacaacuccauccgcaucggcuccaagggcgacgucuucgucauccgcgagcccuucaucuccugcuccccccucgagugccgcaccuucuuccucacccagggcgcccuccucaacgacaagcacuccaacggcaccaucaaggaccgcucccccuaccgcacccucauguccugccccaucggcgagguccccucccccuacaacucccgcuucgaguccgucgccugguccgccuccgccugccacgacggcaucaacuggcucaccaucggcaucuccggccccgacaacggcgccgucgccguccucaaguacaacggcaucaucaccgacaccaucaaguccuggcgcaacaacauccuccgcacccaggaguccgagugcgccugcgucaacggcuccugcuucaccgucaugaccgacggccccuccgacggccaggccuccuacaagaucuuccgcaucgagaagggcaaggucgucaaguccgucgagaugaacgcccccaacuaccacuacgaggagugcuccugcuaccccgacuccuccgagaucaccugcgucugccgcgacaacuggcacggcuccaaccgccccugggucuccuucaaccagaaccucgaguaccagaucggcuacaucugcuccggcaucuucggcgacaacccccgccccaacgacaagaccggcuccugcggccccgucuccuccaacggcgccaacggcgucaagggcuucuccuucaaguacggcaacggcgucuggaucggccgcaccaaguccaucuccucccgcaacggcuucgagaugaucugggaccccaacggcuggaccggcaccgacaacaacuucuccaucaagcaggacaucgucggcaucaacgagugguccggcuacuccggcuccuucguccagcaccccgagcucaccggccucgacugcauccgccccugcuucugggucgagcucauccgcggccgccccaaggagaacaccaucuggaccuccggcuccuccaucuccuucugcggcgucaacuccgacaccgucggcugguccuggcccgacggcgccgagcuccccuucaccaucgacaaguga

SEQ ID NO: 116818 - RNA, 1410 nt, Artificial Sequence
  derived and/or modified CDS sequence (opt2) from neuraminidase__InfluenzaA__AEI86757
augaaccccaaccagaagaucaucaccaucggcuccgucugcaucaccaucggcauggccaaccucauccuccagaucggcaacaucaucuccaucuggaucucccacuccauccagcucggcaaccagaaccagaucgagaccugcaaccaguccgucaucaccuacgagaacaacaccugggucaaccagaccuacgucaacaucuccaacaccaacuucgccgccggccaguccgucgucuccgucaagcucgccggcaacuccucccucugccccgucuccggcugggccaucuacuccaaggacaacuccauccgcaucggcuccaagggcgacgucuucgucauccgcgagcccuucaucuccugcuccccccucgagugccgcaccuucuuccucacccagggcgcccuccucaacgacaagcacuccaacggcaccaucaaggaccgcucccccuaccgcacccucauguccugccccaucggcgagguccccucccccuacaacucccgcuucgaguccgucgccugguccgccuccgccugccacgacggcaucuccuggcucaccaucggcaucuccggccccgacaacggcgccgucgccguccucaaguacaacggcaucaucaccgacaccaucaaguccuggcgcaacaacauccuccgcacccaggaguccgagugcgccugcgucaacggcuccugcuucaccgucaugaccgacggccccuccgacggccaggccuccuacaagaucuuccgcaucgagaagggcaagaucgucaaguccgucgagaugaacgcccccaacuaccacuacgaggagugcuccugcuaccccgacuccuccgagaucaccugcgucugccgcgacaacuggcacggcuccaaccgccccugggucuccuucaaccagaaccucgaguaccagaucggcuacaucugcuccggcaucuucggcgacaacccccgccccaacgacaagaccggcuccugcggccccgucuccuccaacggcgccaacggcgucaagggcuucuccuucaaguacggcaacggcgucuggaucggccgcaccaaguccaucaucucccgcaacggcuucgagaugaucugggaccccaacggcuggaccggcaccgacaacaacuucuccaucaagcaggacaucgucggcaucaacgagugguccggcuacuccggcuccuucguccagcaccccgagcucaccggccucgacugcauccgccccugcuucugggucgagcucauccgcggccgccccaaggagaacaccaucuggaccuccggcuccuccaucuccuucugcggcgucaacuccgacaccgucggcugguccuggcccgacggcgccgagcuccccuucaccaucgacaaguga

SEQ ID NO: 116819 - RNA, 1410 nt, Artificial Sequence
  derived and/or modified CDS sequence (opt2) from neuraminidase__InfluenzaA__AEI86767
augaaccccaaccagaagaucaucaccaucggcuccgucugcaucaccaucggcauggccaaccucauccuccagaucggcaacaucaucuccaucuggaucucccacuccauccagcucggcaaccagaaccagaucgagaccugcaaccaguccgucaucaccuacgagaacaacaccugggucaaccagaccuacgucaacaucuccaacaccaacuucgccgccggccaguccgucgucuccgucaagcucgccggcaacuccucccucugccccgucuccggcugggccaucuacuccaaggacaacuccauccgcaucggcuccaagggcgacgucuucgucauccgcgagcccuucaucuccugcuccccccucgagugccgcaccuucuuccucacccagggcgcccuccucaacgacaagcacuccaacggcaccaucaaggaccgcucccccuaccgcacccucauguccugccccaucggcgagguccccucccccuacaacucccgcuucgaguccgucgccugguccgccuccgccugccacgacggcaucuccuggcucaccaucggcaucuccggccccgacaacggcgccgucgccguccucaaguacaacggcaucaucaccgacaccaucaaguccuggcgcaacaacauccuccgcacccaggaguccgagugcgccugcgucaacggcuccugcuucaccgucaugaccgacggccccuccgacggccaggccuccuacaagaucuuccgcaucgagaagggcaagaucgucaaguccgucgagaugaacgcccccaacuaccacuacgaggagugcuccugcuaccccgacuccuccgagaucaccugcgucugccgcgacaacuggcacggcuccaaccgccccugggucuccuucaaccacaaccucgaguaccagaucggcuacaucugcuccggcaucuucggcgacaacccccgccccaacgacaagaccggcuccugcggccccgucuccuccaacggcgccaacggcgucaagggcuucuccuucaaguacggcaacggcgucuggaucggccgcaccaaguccaucuccucccgcaacggcuucgagaugaucugggaccccaacggcuggaccggcaccgacaacaacuucuccaucaagcaggacaucgucggcaucaacgagugguccggcuacuccggcuccuucguccagcaccccgagcucaccggccucgacugcauccgccccugcuucugggucgagcucauccgcggccgccccaaggagaacaccaucuggaccuccggcuccuccaucuccuucugcggcgucaacuccgacaccgucggcugguccuggcccgacggcgccgagcuccccuucaccaucgacaaguga

SEQ ID NO: 116820 - RNA, 1410 nt, Artificial Sequence; identical to SEQ ID NO: 116819
  derived and/or modified CDS sequence (opt2) from neuraminidase__InfluenzaA__AEI86777

SEQ ID NO: 116821 - RNA, 1410 nt, Artificial Sequence
  derived and/or modified CDS sequence (opt2) from neuraminidase__InfluenzaA__AEI86787
augaaccccaaccagaagaucaucaccaucggcuccgucugcaugaccaucggcauggccaaccucaugcuccagaucggcaacaucaucuccaucuggaucucccacuccauccagcucggcaaccagaaccagaucgagaccugcaaccaguccgucaucaccuacgagaacaacaccugggucaaccagaccuacgucaacaucuccaacaccaacuucgccgccggccaguccgucgucuccgucaagcucgccggcaacuccucccucugccccgucuccggcugggccaucuacuccaaggacaacuccauccgcaucggcuccaagggcgacgucuucgucauccgcgagcccuucaucuccugcuccccccucgagugccgcaccuucuuccucacccagggcgcccuccucaacgacaagcacuccaacggcaccaucaaggaccgcucccccuaccgcacccucauguccugccccaucggcgagguccccucccccuacaacucccgcuucgaguccgucgccugguccgccuccgccugccacgacggcaucaacuggcucaccaucggcaucuccggccccgacaacggcgccgucgccguccucaaguacaacggcaucaucaccgacaccaucaaguccuggcgcaacaacauccuccgcacccaggaguccgagugcgccugcgucaacggcuccugcuucaccgucaugaccgacggccccuccgacggccaggccuccuacaagaucuuccgcaucgagaagggcaagaucgucaaguccgucgagaugaacgcccccaacuaccacuacgaggagugcuccugcuaccccgacuccuccgagaucaccugcgucugccgcgacaacuggcacggcuccaaccgccccugggucuccuucaaccagaaccucgaguaccagaucggcuacaucugcuccggcaucuucggcgacaacccccgccccaacgacaagaccggcuccugcggccccgucuccuccaacggcgccaacggcgucaagggcuucuccuucaaguacggcaacggcgucuggaucggccgcaccaaguccaucuccucccgcaacggcuucgagaugaucugggaccccaacggcuggaccggcaccgacaacaacuucuccaucaagcaggacaucgucggcaucaacgagugguccggcuacuccggcuccuucguccagcaccccgagcucaccggccucgacugcauccgccccugcuucugggucgagcucauccgcggccgccccaaggagaacaccaucuggaccuccggcuccuccaucuccuucugcggcgucaacuccgacaccgucggcugguccuggcccgacggcgccgagcuccccuucaccaucgacaaguga

SEQ ID NO: 116822 - RNA, 1410 nt, Artificial Sequence
  derived and/or modified CDS sequence (opt2) from neuraminidase__InfluenzaA__AEI86797
augaaccccaaccagaagaucaucaccaucggcuccgucugcaucaccaucggcauggccaaccucauccuccagaucggcaacaucaucuccaucuggaucucccacuccauccagcucggcaaccagaaccagaucgagaccugcaaccaguccgucaucaccuacgagaacaacaccugggucaaccagaccuacgucaacaucuccaacaccaacuucgccgccggccaguccgucgucuccgucaagcucgccggcaacuccucccucugccccgucuccggcugggccaucuacuccaaggacaacuccauccgcaucggcuccaagggcgacgucuucgucauccgcgagcccuucaucuccugcuccccccucgagugccgcaccuucuuccucacccagggcgcccuccucaacgacaagcacuccaacggcaccaucaaggaccgcucccccuaccgcacccucauguccugccccaucggcgagguccccucccccuacaacucccgcuucgaguccgucgccugguccgccuccgccugccacgacggcaucuccuggcucaccaucggcaucuccggccccgacaacggcgccgucgccguccucaaguacaacggcaucaucaccgacaccaucaaguccuggcgcaacaacauccuccgcacccaggaguccgagugcgccugcgucaacggcuccugcuucaccgucaugaccgacggccccuccgacggccaggccuccuacaagaucuuccgcaucgagaagggcaagaucgucaaguccgucgagaugaacgcccccaacuaccacuacgaggagugcuccugcuaccccgacuccuccgagaucaccugcgucugccgcgacaacuggcacggcuccaaccgccccugggucuccuucaaccagaaccucgaguaccagaucggcuacaucugcuccggcaucuucggcgacaacccccgccccaacgacaagaccggcuccugcggccccgucuccuccaacggcgccaacggcgucaagggcuucuccuucaaguacggcaacggcgucuggaucggccgcaccaaguccaucuccucccgcaacggcuucgagaugaucugggaccccaacggcuggaccggcaccgacaacaacuucuccaucaagcaggacaucgucggcaucaacgagugguccggcuacuccggcuccuucguccagcaccccgagcucaccggccucgacugcauccgccccugcuucugggucgagcucauccgcggccgccccaaggagaacaccaucuggaccuccggcuccuccaucuccuucugcggcgucaacuccgacaccgucggcugguccuggcccgacggcgccgagcuccccuucaccaucgacaaguga

SEQ ID NO: 116823 - RNA, 1410 nt, Artificial Sequence
  derived and/or modified CDS sequence (opt2) from neuraminidase__InfluenzaA__AEI86807
augaaccccaaccagaagaucaucaccaucggcuccgucugcaugaccaucggcauggccaaccucauccuccagaucggcaacaucaucuccaucuggaucucccacuccauccagcucggcaaccagaaccagaucgagaccugcaaccaguccgucaucaccuacgagaacaacaccugggucaaccagaccuacgucaacaucuccaacaccaacuucgccgccggccaguccgucgucuccgucaagcucgccggcaacuccucccucugccccgucuccggcugggccaucuacuccaaggacaacuccauccgcaucggcuccaagggcgacgucuucgucauccgcgagcccuucaucuccugcuccccccucgagugccgcaccuucuuccucacccagggcgcccuccucaacgacaagcacuccaacggcaccaucaaggaccgcucccccuaccgcacccucauguccugccccaucggcgagguccccucccccuacaacucccgcuucgaguccgucgccugguccgccuccgccugccacgacggcaucaacuggcucaccaucggcaucuccggccccgacaacggcgccgucgccguccucaaguacaacggcaucaucaccgacaccaucaaguccuggcgcaacaacauccuccgcacccaggaguccgagugcgccugcgucaacggcuccugcuucaccgucaugaccgacggccccuccgacggccaggccuccuacaagaucuuccgcaucgagaagggcaagaucgucaaguccgucgagaugaacgcccccaacuaccacuacgaggagugcuccugcuaccccgacuccuccaagaucaccugcgucugccgcgacaacuggcacggcuccaaccgccccugggucuccuucaaccagaaccucgaguaccagaucggcuacaucugcuccggcaucuucggcgacaacccccgccccaacgacaagaccggcuccugcggccccgucuccuccaacggcgccaacggcgucaagggcuucuccuucaaguacggcaacggcgucuggaucggccgcaccaaguccaucuccucccgcaacggcuucgagaugaucugggaccccaacggcuggaccggcaccgacaacaacuucuccaucaagcaggacaucgucggcaucaacgagugguccggcuacuccggcuccuucguccagcaccccgagcucaccggccucgacugcauccgccccugcuucugggucgagcucauccgcggccgccccaaggagaacaccaucuggaccuccggcuccuccaucuccuucugcggcgucaacuccgacaccgucggcugguccuggcccgacggcgccgagcuccccuucaucaucgacaaguga

SEQ ID NO: 116824 - RNA, 1410 nt, Artificial Sequence; identical to SEQ ID NO: 116819
  derived and/or modified CDS sequence (opt2) from neuraminidase__InfluenzaA__AEI86817

SEQ ID NO: 116825 - RNA, 1410 nt, Artificial Sequence
  derived and/or modified CDS sequence (opt2) from neuraminidase__InfluenzaA__AEI86827
augaaccccaaccagaagaucaucaccaucggcuccgucugcaucaccaucggcauggccaaccucauccuccagaucggcaacaucaucuccaucuggaucucccacuccauccagcucggcaaccagaaccagaucgagaccugcaaccaguccgucaucaccuacgagaacaacaccugggucaaccagaccuacgucaacaucuccaacaccaacuucgccgccggccaguccgucgucuccgucaagcucgccggcaacuccucccucugccccgucuccggcugggccaucuacuccaaggacaacuccauccgcaucggcuccaagggcgacgucuucgucauccgcgagcccuucaucuccugcuccccccucgagugccgcaccuucuuccucacccagggcgcccuccucaacgacaagcacuccaacggcaccaucaaggaccgcucccccuaccgcacccucauguccugccccaucggcgagguccccucccccuacaacucccgcuucgaguccgucgccugguccgccuccgccugccacgacggcaucuccuggcucaccaucggcaucuccggccccgacaacggcgccgucgccguccucaaguacaacggcaucaucaccgacaccaucaaguccuggcgcaacaacauccuccgcacccaggaguccgagugcgccugcgucaacggcuccugcuucaccgucaugaccgacggccccuccgacggccaggccuccuacaagaucuuccgcaucgagaagggcaagaucgucaaguccgucgagaugaacgcccccaacuaccacuacgaggagugcuccugcuaccccgacuccuccgagaucaccugcgucugccgcgacaacuggcacggcuccaaccgccccugggucuccuucaaccacaaccucgaguaccagaucggcuacaucugcuccggcaucuucggcgacaacccccgccccaacgacaagaccggcuccugcggccccgucuccuccaacggcgccaacggcgucaagggcuucuccuucaaguacggcaacggcgucuggaucggccgcaccaaguccaccuccucccgcaacggcuucgagaugaucugggaccccaacggcuggaccggcaccgacaacaacuucuccaucaagcaggacaucgucggcaucaacgagugguccggcuacuccggcuccuucguccagcaccccgagcucaccggccucaacugcauccgccccugcuucugggucgagcucauccgcggccgccccaaggagaacaccaucuggaccuccggcuccuccaucuccuucugcggcgucaacuccgacaccgucggcugguccuggcccgacggcgccgagcuccccuucaccaucgacaaguga

SEQ ID NO: 116826 - RNA, 1410 nt, Artificial Sequence; identical to SEQ ID NO: 116822
  derived and/or modified CDS sequence (opt2) from neuraminidase__InfluenzaA__AEI86837

SEQ ID NO: 116827 - RNA, 1410 nt, Artificial Sequence; identical to SEQ ID NO: 116293
  derived and/or modified CDS sequence (opt2) from neuraminidase__InfluenzaA__AEI86847

SEQ ID NO: 116828 - RNA, 1410 nt, Artificial Sequence
  derived and/or modified CDS sequence (opt2) from neuraminidase__InfluenzaA__AEI86867
augaaccccaaccagaagaucaucaccaucggcuccgucugcaugaccaucggcauggccaaccucauccuccagaucggcaacaucaucuccaucuggaucucccacuccauccagcucggcaaccagaaccagaucgagaccugcaaccaguccgucaucaccuacgagaacaacaccugggucaaccagaccuacgucaacaucuccaacaccaaccucgccgccggccaguccgucgucuccgucaagcucgccggcaacuccucccucugccccgucuccggcugggccaucuacuccaaggacaacuccauccgcaucggcuccaagggcgacgucuucgucauccgcgagcccuucaucuccugcuccccccucgagugccgcaccuucuuccucacccagggcgcccuccucaacgacaagcacuccaacggcaccaucaaggaccgcucccccuaccgcacccucauguccugccccaucggcgagguccccucccccuacaacuccaaguucgaguccgucgccugguccgccuccgccugccacgacggcaucaacuggcucaccaucggcaucuccggccccgacaacggcgccgucgccguccucaaguacaacggcaucaucaccgacaccaucaaguccuggcgcaacaacauccuccgcacccaggaguccgagugcgccugcgucaacggcuccugcuucaccaucaugaccgacggccccuccgacggccaggccuccuacaagaucuuccgcaucgagaagggcaagaucgucaaguccgucgagaugaacgcccccaacuaccacuacgaggagugcuccugcuaccccgacuccuccgagaucaccugcgucugccgcgacaacuggcacggcuccaaccgccccugggucuccuucaaccagaaccucgaguaccagaucggcuacaucugcuccggcaucuucggcgacaacccccgccccaacgacaagaccggcuccugcggccccgucuccuccaacggcgccaacggcgucaagggcuucuccuucaaguacggcaacggcgucuggaucggccgcaccaaguccaucuccucccgcaagggcuucgagaugaucugggaccccaacggcuggaccggcaccgacaacaacuucuccaucaagcaggacaucgucggcaucaacgagugguccggcuacuccggcuccuucguccagcaccccgagcucaccggccucgacugcauccgccccugcuucugggucgagcucauccgcggccgccccaaggagaacaccaucuggaccuccggcuccuccaucuccuucugcggcgucaacuccgacaccgucggcugguccuggcccgacggcgccgagcuccccuucaccaucgacaaguga

SEQ ID NO: 116829 - RNA, 1410 nt, Artificial Sequence; identical to SEQ ID NO: 116822
  derived and/or modified CDS sequence (opt2) from neuraminidase__InfluenzaA__AEI86887

SEQ ID NO: 116830 - RNA, 1410 nt, Artificial Sequence; identical to SEQ ID NO: 116822
  derived and/or modified CDS sequence (opt2) from neuraminidase__InfluenzaA__AEI86897

SEQ ID NO: 116831 - RNA, 1410 nt, Artificial Sequence
  derived and/or modified CDS sequence (opt2) from neuraminidase__InfluenzaA__AEI86907
augaaccccaaccagaagaucaucaccaucggcuccgucugcaugaccaucggcauggccaaccucauccuccagaucggcaacaucaucuccaucuggaucucccacuccauccagcucggcaaccagaaccagaucgagaccugcaaccaguccgucaucaccuacgagaacaacaccugggucaaccagaccuacgucaacaucuccaacaccaacuucgccgccggccaguccgucgucuccgucaagcucgccggcaacuccucccucugccccgucuccggcugggccaucuacuccaaggacaacuccauccgcaucggcuccaagggcgacgucuucgucauccgcgagcccuucaucuccugcuccccccucgagugccgcaccuucuuccucacccagggcgcccuccucaacgacauccacuccaacggcaccaucaaggaccgcucccccuaccgcacccucauguccugccccaucggcgagguccccucccccuacaacucccgcuucgaguccgucgccugguccgccuccgccugccacgacggcaucaacuggcucaccaucggcaucuccggccccgacaacggcgccgucgccguccucaaguacaacggcaucaucaccgacaccaucaaguccuggcgcaacaacauccuccgcacccaggaguccgagugcgccugcgucaacggcuccugcuucaccaucaugaccgacggccccuccgacggccaggccuccuacaagaucuuccgcaucgagaagggcaagaucgucaaguccgucgagaugaacgcccccaacuaccacuacgaggagugcuccugcuaccccgacuccuccgagaucaccugcgucugccgcgacaacuggcacggcuccaaccgccccugggucuccuucaaccagaaccucgaguaccagaucggcuacaucugcuccggcaucuucggcgacaacccccgccccaacgacaagaccggcuccugcggccccgucuccuccaacggcgccaacggcgucaagggcuucuccuucaaguacggcaacggcgucuggaucggccgcaccaaguccaucuccucccgcaagggcuucgagaugaucugggaccccaacggcuggaccggcaccgacaacaacuucuccaucaagcaggacaucgucggcaucaacgagugguccggcuacuccggcuccuucguccagcaccccgagcucaccggccucgacugcauccgccccugcuucugggucgagcucauccgcggccgccccaaggagaacaccaucuggaccuccggcuccuccaucuccuucugcggcgucaacuccgacaccgucggcugguccuggcccgacggcgccgagcuccccuucaccaucgacaaguga

SEQ ID NO: 116832 - RNA, 1410 nt, Artificial Sequence
  derived and/or modified CDS sequence (opt2) from neuraminidase__InfluenzaA__AEI86917
augaaccccaaccagaagaucaucaccaucggcuccaucugcaugaccaucggcauggccaaccucauccuccagaucggcaacaucaucuccaucuggaucucccacuccauccagcucggcaaccagaaccagaucgagaccugcaaccaguccgucaucaccuacgagaacaacaccugggucaaccagaccuacgucaacaucuccaacaccaacuucgccgccggccaguccgucgucuccgucaagcucgccggcaacuccucccucugccccgucuccggcugggccaucuacuccaaggacaacuccauccgcaucggcuccaagggcgacgucuucgucauccgcgagcccuucaucuccugcuccccccucgagugccgcaccuucuuccucacccagggcgcccuccucaacgacaagcacuccaacggcaccaucaaggaccgcucccccuaccgcacccucauguccugccccaucggcgagguccccucccccuacaacucccgcuucgaguccgucgccugguccgccuccgccugccacgacggcaucaacuggcucaccaucggcaucuccggccccgacaacggcgccgucgccguccucaaguacaacggcaucaucaccgacaccaucaaguccuggcgcaacaacauccuccgcacccaggaguccgagugcgccugcgucaacggcuccugcuucaccaucaugaccgacggccccuccgacggccaggccuccuacaagaucuuccgcaucgagaagggcaagaucgucaaguccgucgagaugaacgcccccaacuaccacuacgaggagugcuccugcuaccccgacuccuccgagaucaccugcgucugccgcgacaacuggcacggcuccaaccgccccugggucuccuucaaccagaaccucgaguaccagaucggcuacaucugcuccggcaucuucggcgacaacccccgccccaacgacaagaccggcuccugcggccccgucuccuccaacggcgccaacggcgucaagggcuucuccuucaaguacggcaacggcgucuggaucggccgcaccaaguccaucuccucccgcaagggcuucgagaugaucugggaccccaacggcuggaccggcaccgacaacaacuucuccaucaagcaggacaucgucggcaucaacgagugguccggcuacuccggcuccuucguccagcaccccgagcucaccggccucgacugcauccgccccugcuucugggucgagcucauccgcggccgccccaaggagaacaccaucuggaccuccggcuccuccaucuccuucugcggcgucaacuccgacaccgucggcugguccuggcccgacggcgccgagcuccccuucaccaucgacaaguga

SEQ ID NO: 116833 - RNA, 1410 nt, Artificial Sequence; identical to SEQ ID NO: 116745
  derived and/or modified CDS sequence (opt2) from neuraminidase__InfluenzaA__AEI86927

SEQ ID NO: 116834 - RNA, 1410 nt, Artificial Sequence; identical to SEQ ID NO: 116819
  derived and/or modified CDS sequence (opt2) from neuraminidase__InfluenzaA__AEI86937

SEQ ID NO: 116835 - RNA, 1410 nt, Artificial Sequence
  derived and/or modified CDS sequence (opt2) from neuraminidase__InfluenzaA__AEI86947
augaaccccaaccagaagaucaucaccaucggcuccgucugcaugaccaucggcauggccaaccucauccuccagaucggcaacaucaucuccaucuggaucucccacuccauccagcucggcaacaagaaccagaucgagaccugcaaccaguccgucaucaccuacgagaacaacaccugggucaaccagaccuacgucaacaucuccaacaccaacuucgccgccggccaguccgucgucuccgucaagcucgccggcaacuccucccucugccccgucuccggcugggccaucuacuccaaggacaacuccauccgcaucggcuccaagggcgacgucuucgucauccgcgagcccuucaucuccugcuccccccucgagugccgcaccuucuuccucacccagggcgcccuccucaacgacaagcacuccaacggcaccaucaaggaccgcucccccuaccgcacccucauguccugccccaucggcgagguccccucccccuacaacucccgcuucgaguccgucgccugguccgccuccgccugccacgacggcaucaacuggcucaccaucggcaucuccggccccgacaacggcgccgucgccguccucaaguacaacggcaucaucaccgacaccaucaaguccuggcgcaacaacauccuccgcacccaggaguccgagugcgccugcgucaacggcuccugcuucaccgucaugaccgacggccccuccgacggccaggccuccuacaagaucuuccgcaucgagaagggcaagaucgucaaguccgucgagaugaacgcccccaacuaccacuacgaggagugcuccugcuaccccgacuccuccgagaucaccugcgucugccgcgacaacuggcacggcuccaaccgccccugggucuccuucaaccagaaccucgaguaccagaucggcuacaucugcuccggcaucuucggcgacaacccccgccccaacgacaagaccggcuccugcggccccgucuccuccaacggcgccaacggcgucaagggcuucuccuucaaguacggcaacggcgucuggaucggccgcaccaaguccaucuccucccgcaacggcuucgagaugaucugggaccccaacggcuggaccggcaccgacaacaacuucuccaucaagcaggacaucgucggcaucaaggagugguccggcuacuccggcuccuucguccagcaccccgagcucaccggccucgacugcauccgccccugcuucugggucgagcucauccgcggccgccccaaggagaacaccaucuggaccuccggcuccuccaucuccuucugcggcgucaacuccgacaccgucggcugguccuggcccgacggcgccgagcuccccuucaccaucgacaaguga

SEQ ID NO: 116836 - RNA, 1410 nt, Artificial Sequence
  derived and/or modified CDS sequence (opt2) from neuraminidase__InfluenzaA__AEI86967
augaaccccaaccagaagaucaucaccaucggcuccgucugcaugaccaucggcauggccaaccucauccuccagaucggcaacaucaucuccaucuggaucucccacuccauccagcucggcaaccagaaccagaucgagaccugcaaccaguccgucaucaccuacgagaacaacaccugggucaaccagaccuacgucaacaucuccaacaccaacuucgccgccggccaguccgucgucuccgucaagcucgccggcaacuccucccucugccccgucuccggcugggccaucuacuccaaggacaacuccauccgcaucggcuccaagggcgacgccuucgucauccgcgagcccuucaucuccugcuccccccucgagugccgcaccuucuuccucacccagggcgcccuccucaacgacaagcacuccaacggcaccaucaaggaccgcucccccuaccgcacccucauguccugccccaucggcgagguccccucccccuacaacucccgcuucgaguccgucgccugguccgccuccgccugccacgacggcaucaacuggcucaccaucggcaucuccggccccgacaacggcgccgucgccguccucaaguacaacggcaucaucaccgacaccaucaaguccuggcgcaacaacauccuccgcacccaggaguccgagugcgccugcgucaacggcuccugcuucaccaucaugaccgacggccccuccgacggccaggccuccuacaagaucuuccgcaucgagaagggcaagaucgucaaguccgucgagaugaacgcccccaacuaccacuacgaggagugcuccugcuaccccgacuccuccgagaucaccugcgucugccgcgacaacuggcacggcuccaaccgccccugggucuccuucaaccagaaccucgaguaccagaucggcuacaucugcuccggcaucuucggcgacaacccccgccccaacgacaagaccggcuccugcggccccgucuccuccaacggcgccaacggcgucaagggcuucuccuucaaguacggcaacggcgucuggaucggccgcaccaaguccaucuccucccgcaagggcuucgagaugaucugggaccccaacggcuggaccggcaccgacaacaacuucuccaucaagcaggacaucgucggcaucaacgagugguccggcuacuccggcuccuucguccagcaccccgagcucaccggccucgacugcauccgccccugcuucugggucgagcucauccgcggccgccccaaggagaacaccaucuggaccuccggcuccuccaucuccuucugcggcgucaacuccgacaccgucggcugguccuggcccgacggcgccgagcuccccuucaccaucgacaaguga

SEQ ID NO: 116837 - RNA, 1410 nt, Artificial Sequence
  derived and/or modified CDS sequence (opt2) from neuraminidase__InfluenzaA__AEI86977
augaaccccaaccagaagaucaucaccaucggcuccgucugcaugaccaucggcauggccaaccucauccuccagaucggcaacaucaucuccaucuggaucucccacuccauccagcucggcaaccagaaccagaucggcaccugcaaccaguccgucaucaccuacgagaacaacaccugggucaaccagaccuacgucaacaucuccaacaccaacuucgccgccggccaguccgucgucuccgucaagcucgccggcaacuccucccucugccccgucuccggcugggccaucuacuccaaggacaacuccauccgcaucggcuccaagggcgacgucuucgucauccgcgagcccuucaucuccugcuccccccucgagugccgcaccuucuuccucacccagggcgcccuccucaacgacaagcacuccaacggcaccaucaaggaccgcucccccuaccgcacccucauguccugccccaucggcgagguccccucccccuacaacucccgcuucgaguccgucgccugguccgccuccgccugccacgacggcaucaacuggcucaccaucggcaucuccggccccgacaacggcgccgucgccguccucaaguacaacggcaucaucaccgacaccaucaaguccuggcgcaacaacauccuccgcacccaggaguccgagugcaccugcgucaacggcuccugcuucaccgucaugaccgacggccccuccgacggccaggccuccuacaagaucuucaagaucgagaagggcaagaucgucaaguccgucgagaugaacgcccccaacuaccacuacgaggagugcuccugcuaccccgacuccuccgagaucaccugcgucugccgcgacaacuggcacggcuccaaccgccccugggucuccuucaaccagaaccucgaguaccagaucggcuacaucugcuccggcaucuucggcgacaacccccgccccaacgacaagaccggcuccugcggccccgucuccuccaacggcgccaacggcgucaagggcuucuccuucaaguacggcaacggcgucuggaucggccgcaccaaguccaucuccucccgcaacggcuucgagaugaucugggaccccaacggcuggaccggcaccgacaacaacuucuccaucaagcaggacaucgucggcaucaacgagugguccggcuacuccggcuccuucguccagcaccccgagcucaccggccucgacugcauccgccccugcuucugggucgagcucauccgcggccgccccaaggagaacaccaucuggaccuccggcuccuccaucuccuucugcggcgucaacuccgacaccgucggcugguccuggcccgacggcgccgagcuccccuucaccaucgacaaguga

SEQ ID NO: 116838 - RNA, 1410 nt, Artificial Sequence
  derived and/or modified CDS sequence (opt2) from neuraminidase__InfluenzaA__AEI86997
augaaccccaaccagaagaucaucaccaucggcuccgucugcaugaccaucggcauggccaaccucauccuccagaucggcaacaucaucuccaucuggaucucccacuccauccagcucggcaaccagaaccagaucgagaccugcaaccaguccgucaucaccuacgagaacaacaccugggucaaccagaccuacgucaacaucuccaacaccaacuucgccgccggccaguccgucgucuccgucaagcucgccggcaacuccucccucugccccgucuccggcugggccaucuacuccaaggacaacuccauccgcaucggcuccaagggcgacgucuucgucauccgcgagcccuucaucuccugcuccccccucgagugccgcaccuucuuccucacccagggcgcccuccucaacgacaagcacuccaacggcaccaucaaggaccgcucccccuaccgcacccucauguccugccccaucggcgagguccccucccccuacaacucccgcuucgaguccgucgccugguccgccuccgccugccacgacggcaucaacuggcucaccaucggcaucuccggccccgacaacggcgccgucgccguccucaaguacaacggcaucaucaccgacaccaucaaguccuggcgcaacaacauccuccgcacccaggaguccgagugcgccugcgucaacggcuccugcuucaccgucaugaccgacggccccuccgacggccaggccuccuacaagaucuuccgcaucgagaagggcaagaucgucaaguccgucgagaugaacgcccccaacuaccacuacgaggagugcuccugcuaccccgacuccuccgagaucaccugcgucugccgcgacaacuggcacggcuccaaccgccccugggucuccuucaaccagaaccucgaguaccagaucggcuacaucugcuccggcaucuucggcgacaacccccgccccaacgacaagaccggcuccugcggccccgucuccuccaacggcgccaacggcgucaagggcuucuccuucaaguacggcaacggcgucuggaucggccgcaccaaguccaucuccucccgcaacggcuucgagaugaucugggaccccaacggcuggaccggcaccgacaacaacuucuccaucaagcaggacaucgucggcaucaaggagugguccggcuacuccggcuccuucguccagcaccccgagcucaccggccucgacugcauccgccccugcuucugggucgagcucauccgcggccgccccaaggagaacaccaucuggaccuccggcuccaucaucuccuucugcggcgucaacuccgacaccgucggcugguccuggcccgacggcgccgagcuccccuucaccaucgacaaguga

SEQ ID NO: 116839 - RNA, 1410 nt, Artificial Sequence
  derived and/or modified CDS sequence (opt2) from neuraminidase__InfluenzaA__AEI87007
augaaccccaaccagaagaucaucaccaucggcuccgucugcaucaccaucggcauggccaaccucauccuccagaucggcaacaucaucuccaucuggaucucccacuccauccagcucggcaaccagaaccagaucgagaccugcaaccaguccgucaucaccuacgagaacaacaccugggucaaccagaccuacgucaacaucuccaacaccaacuucgccgccggccaguccgucgucuccgucaagcucgccggcaacuccucccucugccccgucuccggcugggccaucuacuccaaggacaacuccauccgcaucggcuccaagggcgacgucuucgucauccgcgagcccuucaucuccugcuccucccucgagugccgcaccuucuuccucacccagggcgcccuccucaacgacaagcacuccaacggcaccaucaaggaccgcucccccuaccgcacccucauguccugccccaucggcgagguccccucccccuacaacucccgcuucgaguccgucgccugguccgccuccgccugccacgacggcaucuccuggcucaccaucggcaucuccggccccgacaacggcgccgucgccguccucaaguacaacggcaucaucaccgacaccaucaaguccuggcgcaacaacauccuccgcacccaggaguccgagugcgccugcgucaacggcuccugcuucaccgucaugaccgacggccccuccgacggccaggccuccuacaagaucuuccgcaucgagaagggcaagaucgucaaguccgucgagaugaacgcccccaacuaccacuacgaggagugcuccugcuaccccgacuccuccgagaucaccugcgucugccgcgacaacuggcacggcuccaaccgccccugggucuccuucaaccagaaccucgaguaccagaucggcuacaucugcuccggcaucuucggcgacaacccccgccccaacgacaagaccggcuccugcggccccgucuccuccaacggcgccaacggcgucaagggcuucuccuucaaguacggcaacggcgucuggaucggccgcaccaaguccaucuccucccgcaacggcuucgagaugaucugggaccccaacggcuggaccggcaccgacaacaacuucuccaucaagcaggacaucgucggcaucaacgagugguccggcuacuccggcuccuucguccagcaccccgagcucaccggccucgacugcauccgccccugcuucugggucgagcucauccgcggccgccccaaggagaacaccaucuggaccuccggcuccuccaucuccuucugcggcgucaacuccgacaccgucggcugguccuggcccgacggcgccgagcuccccuucaccaucgacaaguga

SEQ ID NO: 116840 - RNA, 1410 nt, Artificial Sequence
  derived and/or modified CDS sequence (opt2) from neuraminidase__InfluenzaA__AEI87017
augaaccccaaccagaagaucaucaccaucggcuccgucugcaugaccaucggcauggccaaccucauccuccagaucggcaacaucaucuccaucuggaucucccacuccauccagcucggcaaccagaaccagaucgagaccugcaaccaguccgucaucaccuacgagaacaacaccugggucaaccagaccuacgucaacaucuccaacaccaacuucgccgccggccaguccgucgucuccgucaagcucgccggcaacuccucccucugccccgucuccggcugggccaucuacuccaaggacaacuccauccgcaucggcuccaagggcgacgucuucgucauccgcgagcccuucaucuccugcuccccccucgagugccgcaccuucuuccucacccagggcgcccuccucaacgacaagcacuccaacggcaccaucaaggaccgcucccccuaccgcacccucauguccugccccaucggcgagguccccucccccuacaacucccgcuucgaguccgucgccugguccgccuccgccugccacgacggcaucaacuggcucaccaucggcaucuccggccccgacaacggcgccgucgccguccucaaguacaacggcaucaucaccgacaccaucaaguccuggcgcaacaacauccuccgcacccaggaguccgagugcgccugcgucaacggcuccugcuucaccgucaugaccgacggccccuccgacggccaggccuccuacaagaucuuccgcaucgagaagggcaagaucgucaaguccgucgagaugaacgcccccaacuaccacuacgaggagugcuccugcuaccccgacuccuccgagaucaccugcgucugccgcgacaacuggcacggcuccaaccgccccugggucuccuucaaccagaaccucgaguaccagaucggcuacaucugcuccggcaucuucggcgacaacccccgccccaacgacaagaccggcuccugcggccccgucuccuccaacggcgccaacggcgucaagggcuucuccuucaaguacggcaacggcgucuggaucggccgcaccaaguccaucuccucccgcaacggcuucgagaugaucugggaccccaacggcuggaccggcaccgacaacaacuucuccaucaagcaggacaucgucggcaucaacgagugguccggcuacuccggcuccuucguccagcaccccgagcucaccggccucgacugcauccgccccugcuucugggucgagcucauccgcggccgccccaaggagaacaccaucuggaccuccggcuccuccaucuccuucugcggcgucaacggcgacaccggcggcugguccuggcccgacggcgccgagcuccccuucaccaucgacaaguga

SEQ ID NO: 116841 - RNA, 1410 nt, Artificial Sequence; identical to SEQ ID NO: 116745
  derived and/or modified CDS sequence (opt2) from neuraminidase__InfluenzaA__AEI87027

SEQ ID NO: 116842 - RNA, 1410 nt, Artificial Sequence; identical to SEQ ID NO: 116838
  derived and/or modified CDS sequence (opt2) from neuraminidase__InfluenzaA__AEI87037

SEQ ID NO: 116843 - RNA, 1410 nt, Artificial Sequence; identical to SEQ ID NO: 116822
  derived and/or modified CDS sequence (opt2) from neuraminidase__InfluenzaA__AEI87047

SEQ ID NO: 116844 - RNA, 1410 nt, Artificial Sequence
  derived and/or modified CDS sequence (opt2) from neuraminidase__InfluenzaA__AEI87057
augaaccccaaccagaagaucaucaccaucggcuccgucugcaugaccaucggcauggccaaccucauccuccagaucggcaacaucaucuccaucuggaucucccacuccauccagcucggcaaccagaaccagaucgagaccugcaaccaguccgucaucaccuacgagaacaacaccugggucaaccagaccuacgucaacaucuccaacaccaacuucgccgccggccaguccgucgucuccgucaagcucgccggcaacuccucccucugccccgucuccggcugggccaucuacuccaaggacaacuccauccgcaucggcuccaagggcgacgucuucgucauccgcgagcccuucaucuccugcuccccccucgagugccgcaccuucuuccucacccagggcgcccuccucaacgacaagcacuccaacggcaccaucaaggaccgcucccccuaccgcacccucauguccugccccaucggcgagguccccucccccuacaacucccgcuucgaguccgucgccugguccgccuccgccugccacgacggcaucaacuggcucaccaucggcaucuccggccccgacaacggcgccgucgccguccucaaguacaacggcaucaucaccgacaccaucaaguccuggcgcaacaacauccuccgcacccaggaguccgagugcgccugcgucaacggcuccugcuucaccgucaugaccgacggccccuccgacggccaggccuccuacaagaucuuccgcaucgagaagggcaagaucgucaaguccgucgagaugaacgcccccaacuaccacuacgaggagugcuccugcuaccccgacuccuccgagaucaccugcgucugccgcgacaacuggcacggcuccaaccgccccugggucuccuucaaccagaaccucgaguaccagaucggcuacaucugcuccggcaucuucggcgacaacccccgccccaacgacaagaccggcuccugcggccccgucuccuccaacggcgccaacggcgucaagggcuucuccuucaaguacggcaacggcgucuggaucggccgcaccaaguccaucuccucccgcaacggcuucgagaugaucugggaccccaacggcuggaccggcaccgacaacaacuucuccaucaagcaggacaucgucggcaucaaggagugguccggcuacuccggcuccuucguccagcaccccgagcucaccggccucgacugcauccgccccugcuucugggucgagcucauccgcggccgccccaaggagaacaccaucuggaccuccggcuccuccaucuccuucugcggcgucaacuccgacaccgucggcugguccuggcccgacggcgccgagcuccccuucaccaucgacaaguga

SEQ ID NO: 116845 - RNA, 1410 nt, Artificial Sequence; identical to SEQ ID NO: 116293
  derived and/or modified CDS sequence (opt2) from neuraminidase__InfluenzaA__AEI87067

SEQ ID NO: 116846 - RNA, 1410 nt, Artificial Sequence
  derived and/or modified CDS sequence (opt2) from neuraminidase__InfluenzaA__AEI87077
augaaccccaaccagaagaucaucaccaucggcuccaucugcaugaccaucggcauggccaaccucauccuccagaucggcaacaucaucuccaucuggaucucccacuccauccaguucggcaaccagaaccagaucggcaccugcaaccaguccgucaucaccuacgagaacaacaccugggucaaccagaccuacgucaacaucuccaacaccaacuucgccgccggccaguccgucgucuccgucaagcucgccggcaacuccucccucugccccgucuccggcugggccaucuacuccaaggacaacuccauccgcaucggcuccaagggcgacgucuucgucauccgcgagcccuucaucuccugcuccccccucgagugccgcaccuucuuccucacccagggcgcccuccucaacgacaagcacuccaacggcaccaucaaggaccgcucccccuaccgcacccucauguccugccccaucggcgagguccccucccccuacaacucccgcuucgaguccgucgccugguccgccuccgccugccacgacggcaucaacuggcucaccaucggcaucuccggccccgacaacggcgccgucgccguccucaaguacaacggcaucaucaccgacaccaucaaguccuggcgcaacaacauccuccgcacccaggaguccgagugcgccugcgucaacggcuccugcuucaccaucaugaccgacggccccuccgacggccaggccuccuacaagaucuuccgcaucgagaagggcaagaucgucaaguccgucgagaugaacgcccccaacuaccacuacgaggagugcuccugcuaccccgacuccuccgagaucaccugcgucugccgcgacaacuggcacggcuccaaccgccccugggucuccuucaaccagaaccucgaguaccagaucggcuacaucugcuccggcaucuucggcgacaacccccgccccaacgacaagaccggcuccugcggccccgucuccuccaacggcgccaacggcgucaagggcuucuccuucaaguacggcaacggcgucuggaucggccgcaccaaguccaucuccucccgcaagggcuucgagaugaucugggaccccaacggcuggaccggcaccgacaacaacuucuccaucaagcaggacaucgucggcaucaacgagugguccggcuacuccggcuccuucguccagcaccccgagcucaccggccucgacugcauccgccccugcuucugggucgagcucauccgcggccgccccaaggagaacaccaucuggaccuccggcuccuccaucuccuucugcggcgucaacuccgacaccgucggcugguccuggcccgacggcgccgagcuccccuucaccaucgacaaguga

SEQ ID NO: 116847 - RNA, 1410 nt, Artificial Sequence
  derived and/or modified CDS sequence (opt2) from neuraminidase__InfluenzaA__AEI87087
augaaccccaaccagaagaucaucaccaucggcuccgucugcaugaccaucggcauggccaaccucauccuccagaucggcaacaucaucuccaucuggaucucccacuccauccagcucggcaaccagaaccagaucgagaccugcaaccaguccgucaucaccuacgagaacaacaccugggucaaccagaccuacgucaacaucuccaacaccaacuucgccgccggccaguccgucgucuccgucaagcucgccggcaacuccucccucugccccaucuccggcugggccaucuacuccaaggacaacuccauccgcaucggcuccaagggcgacgucuucgucauccgcgagcccuucaucuccugcuccccccucgagugccgcaccuucuuccucacccagggcgcccuccucaacgacaagcacuccaacggcaccaucaaggaccgcucccccuaccgcacccucauguccugccccaucggcgagguccccucccccuacaacucccgcuucgaguccgucgccugguccgccuccgccugccacgacggcaucaacuggcucaccaucggcaucuccggccccgacaacggcgccgucgccguccucaaguacaacggcaucaucaccgacaccaucaaguccuggcgcaacaacauccuccgcacccaggaguccgagugcgccugcgucaacggcuccugcuucaccgucaugaccgacggccccuccgacggccaggccuccuacaagaucuuccgcaucgagaagggcaagaucgucaaguccgucgagaugaacgcccccaacuaccacuacgaggagugcuccugcuaccccgacuccuccgagaucaccugcgucugccgcgacaacuggcacggcuccaaccgccccugggucuccuucaaccagaaccucgaguaccagaucggcuacaucugcuccggcaucuucggcgacaacccccgccccaacgacaagaccggcuccugcggccccgucuccuccaacggcgccaacggcgucaagggcuucuccuucaaguacggcaacggcgucuggaucggccgcaccaaguccaucuccucccgcaacggcuucgagaugaucugggaccccaacggcuggaccggcaccgacaacaacuucuccaucaagcaggacaucgucggcaucaaggagugguccggcuacuccggcuccuucguccagcaccccgagcucaccggccucgacugcauccgccccugcuucugggucgagcucauccgcggccgccccaaggagaacaccaucuggaccuccggcuccaucaucuccuucugcuccgucaacuccgacaccgucggcugguccuggcccgacggcgccgagcuccccuucaccaucgacaaguga

SEQ ID NO: 116848 - RNA, 1410 nt, Artificial Sequence; identical to SEQ ID NO: 116819
  derived and/or modified CDS sequence (opt2) from neuraminidase__InfluenzaA__AEI87097

SEQ ID NO: 116849 - RNA, 1410 nt, Artificial Sequence; identical to SEQ ID NO: 116819
  derived and/or modified CDS sequence (opt2) from neuraminidase__InfluenzaA__AEI87107

SEQ ID NO: 116850 - RNA, 1413 nt, Artificial Sequence
  derived and/or modified CDS sequence (opt2) from neuraminidase__InfluenzaA__AEI91968
augaaccccaaccagaagaucaucaccaucggcuccaucuccaucgccaucggcaucaucucccucaugcuccagaucggcaacaucaucuccaucugggccucccacuccauccagaccggcucccagaacaacaccggcaucugcaaccagcgcaucaucaccuacgagaacuccaccugggucaaccacaccuacgucaacaucaacaacaccaacgucgucgccggcgaggacaagaccuccgucacccucgccggcaacuccucccucugcuccaucuccggcugggccaucuacaccaaggacaacuccauccgcaucggcuccaagggcgacgucuucgucauccgcgagcccuucaucuccugcucccaccucgagugccgcaccuucuuccucacccagggcgcccuccucaacgacaagcacuccaacggcaccgucaaggaccgcucccccuaccgcgcccucauguccugcccccucggcgaggcccccucccccuacaacuccaaguucgaguccgucgccugguccgccuccgccugccacgacggcaugggcuggcucaccaucggcaucuccggccccgacaacggcgccgucgccguccucaaguacaacggcaucaucaccggcaccaucaaguccuggaagaagcagauccuccgcacccaggaguccgagugcgucugcaugaacggcuccugcuucaccaucaugaccgacggccccuccaacaaggccgccuccuacaagaucuucaagaucgagaagggcaaggucaccaaguccaucgagcucaacgcccccaacuucuacuacgaggagugcuccugcuaccccgacaccggcaucgucaugugcgucugccgcgacaacuggcacggcuccaaccgccccugggucuccuucaaccagaaccucgacuaccagaucggcuacaucugcuccggcgucuucggcgacaacccccgccccgaggacggcgagggcuccugcaaccccgucaccgucgacggcgccaacggcgucaagggcuucuccuacaaguacggcaacggcgucuggaucggccgcaccaaguccaaccgccuccgcaagggcuucgagaugaucugggaccccaacggcuggaccaacaccgacuccgacuucuccgucaagcaggacgucgucgccaucaccgacugguccggcuacuccggcuccuucguccagcaccccgagcucaccggccucgacugcaucaagcccugcuucugggucgagcucguccgcggccucccccgcgagaacaccaccaucuggaccuccggcuccuccaucuccuucugcggcgucaacuccgacaccgccaacugguccuggcccgacggcgccgagcuccccuucaccaucgacaaguga

SEQ ID NO: 116851 - RNA, 1410 nt, Artificial Sequence; identical to SEQ ID NO: 112774
  derived and/or modified CDS sequence (opt2) from neuraminidase__InfluenzaA__AEI91983

SEQ ID NO: 116852 - RNA, 1410 nt, Artificial Sequence; identical to SEQ ID NO: 115260
  derived and/or modified CDS sequence (opt2) from neuraminidase__InfluenzaA__AEI91984

SEQ ID NO: 116853 - RNA, 1410 nt, Artificial Sequence
  derived and/or modified CDS sequence (opt2) from neuraminidase__InfluenzaA__AEI92004
augaaccccaaccagaagaucaucaccaucggcuccgucugcaugaccaucggcauggccaaccucauccuccagaucggcaacaucaucuccaucuggaucucccacuccauccagcucggcaaccagaaccagaucgagaccugcaaccaguccgucaucaccuacgagaacaacaccugggucaaccagaccuacgucaacaucuccaacaccaacuucgccgccggccaguccgucgucuccgucaagcucgccggcaacuccucccucugccccgucuccggcugggccaucuacuccaaggacaacuccauccgcaucggcuccaagggcgacgucuucgucauccgcgagcccuucaucuccugcuccccccucgagugccgcaccuucuuccucacccagggcgcccuccucaacgacaagcacuccaacggcaccaucaaggaccgcucccccuaccgcacccucauguccugccccaucggcgagguccccucccccuacaacucccgcuucgaguccgucgccugguccgccuccgccugccacgacggcaucaacuggcucaccaucggcaucuccggccccgacaacggcgccgucgccguccucaaguacaacggcaucaucaccgacaccaucaaguccuggcgcaacaacauccuccgcacccaggaguccgagugcgccugcgucaacggcuccugcuucaccgucaugaccgacggccccuccgacggccaggccuccuacaagaucuuccgcaucgagaagggcaagaucgucaaguccgucgagaugaacgcccccaacuaccacuacgaggagugcuccugcuaccccgacuccuccgagaucaccugcgucugccgcgacaacuggcacggcuccaaccgccccugggucuccuucaaccagaaccucgaguaccagaucggcuacaucugcuccggcaucuucggcgacaacccccgccccaacgacaagaccggcuccugcggccccgucuccuccaacggcgccuacggcgucaagggcuucuccuucaaguacggcaacggcgucuggaucggccgcaccaaguccaucuccucccgcaacggcuucgagaugaucugggaccccaacggcuggaccggcaccgacaacaacuucuccaucaagcaggacaucgucggcaucaacgagugguccggcuacuccggcuccuucguccagcaccccgagcucaccggccucgacugcauccgccccugcuucugggucgagcucauccgcggccgccccaaggagaacaccaucuggaccuccggcuccuccaucuccuucugcggcgucaacuccgacaccgucggcugguccuggcccgacggcgccgagcuccccuucaccaucgacaaguga

SEQ ID NO: 116854 - RNA, 1413 nt, Artificial Sequence
  derived and/or modified CDS sequence (opt2) from neuraminidase__InfluenzaA__AEI92023
augaaccccaaccagaagaucaucaccaucggcuccaucuccaucgccaucggcaucaucucccucaugcuccagaucggcaacaucaucuccaucugggccucccacuccauccagaccggcucccagaacaacaccggcaucugcaaccagaagaucaucaccuacgagaacuccaccugggucaaccacaccuacgucaacaucaacaacaccaacgucgucgccggcgaggacaagaccuccgucacccucgccggcaacuccucccucugcuccaucuccggcugggccaucuacaccaaggacaacuccauccgcaucggcuccaagggcgacgucuucgucauccgcgagcccuucaucuccugcucccaccucgagugccgcaccuucuuccucacccagggcgcccuccucaacgacaagcacuccaacggcaccgucaaggaccgcucccccuaccgcgcccucauguccugcccccucggcgaggcccccucccccuacaacuccaaguucgaguccgucgccugguccgccuccgccugccacgacggcaugggcuggcucaccaucggcaucuccggccccgacaacggcgccgucgccguccucaaguacaacggcaucaucaccggcaccaucaaguccuggaagaagcagauccuccgcacccaggaguccgagugcgucugcaugaacggcuccugcuucaccaucaugaccgacggccccuccaacaaggccgccuccuacaagaucuucaagaucgagaagggcaaggucaccaaguccaucgagcucaacgcccccaacuucuacuacgaggagugcuccugcuaccccgacaccggcaucgucaugugcgucugccgcgacaacuggcacggcuccaaccgccccugggucuccuucaaccagaaccucgacuaccagaucggcuacaucugcuccggcgucuucggcgacaacccccgccccgaggacggcgagggcuccugcaaccccgucaccgucgacggcaccaacggcgucaagggcuucuccuacaaguacggcaacggcgucuggaucggccgcaccaaguccaaccgccuccgcaagggcuucgagaugaucugggaccccaacggcuggaccaacaccgacuccgacuucuccgucaagcaggacgucgucgccaucaccgacugguccggcuacuccggcuccuucguccagcaccccgagcucaccggccucgacugcauccgccccugcuucugggucgagcucguccgcggccucccccgcgagaacaccaccaucuggaccuccggcuccuccaucuccuucugcggcgucaacuccgacaccgccaacugguccuggcccgacggcgccgagcuccccuucaccaucgacaaguga

SEQ ID NO: 116855 - RNA, 1410 nt, Artificial Sequence
  derived and/or modified CDS sequence (opt2) from neuraminidase__InfluenzaA__AEJ10403
augaaccccaaccagaagaucaucaccaucggcuccgucugcaucaccaucggcauggccaaccucauccuccagaucggcaacaucaucuccaucuggaucucccacuccauccagcucggcaaccagaaccagaucgagaccugcaaccaguccgucaucaccuacgagaacaacaccugggucaaccagaccuacgucaacaucuccaacaccaacuucgccgccggccaguccgucgucuccgucaagcucgccggcaacuccucccucugccccgucuccggcugggccaucuacuccaaggacaacuccauccgcaucggcuccaagggcgacgucuucgucauccgcgagcccuucaucuccugcuccccccucgagugccgcaccuucuuccucacccagggcgcccuccucaacgacaagcacuccaacggcaccaucaaggaccgcucccccuaccgcacccucauguccugccccaucggcgagguccccucccccuacaacucccgcuucgaguccgucgccugguccgccuccgccugccacgacggcaucuccuggcucaccaucggcaucuccggccccgacaacggcgccgucgccguccucaaguacaacggcaucaucaccgacaccaucaaguccuggcgcaacaacauccuccgcacccaggaguccgagugcgccugcgucaacggcuccugcuucaccgucaugaccgacggccccuccgacggccaggccuccuacaagaucuuccgcaucgagaagggcaagaucgucaaguccgucgagaugaacgcccccaacuaccacuacgaggagugcuccugcuaccccgacuccuccgagaucaccugcgucugccgcgacaacuggcacggcuccaaccgccccugggucuccuucaaccagaaccucgaguaccagaucggcuacaucugcuccggcaucuucggcgacaacccccgccccaacgacaagaccggcuccugcggccccgucuccgccaacggcgccaacggcgucaagggcuucuccuucaaguacggcaacggcgucuggaucggccgcaccaaguccaucuccucccgcaacggcuucgagaugaucugggaccccaacggcuggaccggcaccgacaacaacuucuccaucaagcaggacaucgucggcaucaacgagugguccggcuacuccggcuccuucguccagcaccccgagcucaccggccucgacugcauccgccccugcuucugggucgagcucauccgcggccgccccaaggagaacaccaucuggaccuccggcuccuccaucuccuucugcggcgucaacuccgacaccgucggcugguccuggcccgacggcgccgagcuccccuucaccaucgacaaguga

SEQ ID NO: 116856 - RNA, 1410 nt, Artificial Sequence; identical to SEQ ID NO: 116822
  derived and/or modified CDS sequence (opt2) from neuraminidase__InfluenzaA__AEJ10413

SEQ ID NO: 116857 - RNA, 1410 nt, Artificial Sequence; identical to SEQ ID NO: 116844
  derived and/or modified CDS sequence (opt2) from neuraminidase__InfluenzaA__AEJ10423

SEQ ID NO: 116858 - RNA, 1410 nt, Artificial Sequence
  derived and/or modified CDS sequence (opt2) from neuraminidase__InfluenzaA__AEJ10433
augaaccccaaccagaagaucaucaccaucggcuccgucugcaugaccaucggcauggccaaccucauccuccagaucggcaacaucaucuccaucuggaucucccacuccauccagcucggcaaccagaaccagaucgagaccugcaaccaguccgucaucaccuacgagaacaacaccugggucaaccagaccuacgucaacaucuccaacaccaacuucgccgccggccaguccgucgucuccgucaagcucgccggcaacuccucccucugccccgucuccggcugggccaucuacuccaaggacaacuccauccgcaucggcuccaagggcgacgucuucgucauccgcgagcccuucaucuccugcuccccccucgagugccgcaccuucuuccucacccagggcgcccuccucaacgacaagcacuccaacggcaccaucaaggaccgcucccccuaccgcacccucauguccugccccaucggcgagguccccucccccuacaacucccgcuucgaguccgucgccugguccgccuccgccugccacgacggcaucaacuggcucaccaucggcaucuccggccccgacaacggcgccgucgccguccucaaguacaacggcaucaucaccgacaccaucaaguccuggcgcaacaacauccuccgcacccaggaguccgagugcgccugcgucaacggcuccugcuucaccgucaugaccgacggccccuccgacggccaggccuccuacaagaucuuccgcaucgagaagggcaagaucgucaaguccgucgagaugaacgcccccaacuaccacuacgaggagugcuccugcuaccccgacuccuccgagaucaccugcgucugccgcgacaacuggcacggcuccaaccgccccugggucuccuucaaccagaaccucgaguaccgcaucggcuacaucugcuccggcaucuucggcgacaacccccgccccaacgacaagaccggcuccugcggccccgucuccuccaacggcgccaacggcgucaagggcuucuccuucaaguacggcaacggcgucuggaucggccgcaccaaguccaucuccucccgcaacggcuucgagaugaucugggaccccaacggcuggaccggcaccgacaacaacuucuccaucaagcaggacaucaucggcaucaacgagugguccggcuacuccggcuccuucguccagcaccccgagcucaccggccucgacugcauccgccccugcuucugggucgagcucauccgcggccgccccaaggagaacaccaucuggaccuccggcuccuccaucuccuucugcggcgucaacuccggcaccgucggcugguccuggcccgacggcgccgagcuccccuucaccaucgacaaguga

SEQ ID NO: 116859 - RNA, 1410 nt, Artificial Sequence; identical to SEQ ID NO: 116293
  derived and/or modified CDS sequence (opt2) from neuraminidase__InfluenzaA__AEJ10443

SEQ ID NO: 116860 - RNA, 1410 nt, Artificial Sequence; identical to SEQ ID NO: 116293
  derived and/or modified CDS sequence (opt2) from neuraminidase__InfluenzaA__AEJ10453

SEQ ID NO: 116861 - RNA, 1410 nt, Artificial Sequence; identical to SEQ ID NO: 116745
  derived and/or modified CDS sequence (opt2) from neuraminidase__InfluenzaA__AEJ10463

SEQ ID NO: 116862 - RNA, 1410 nt, Artificial Sequence
  derived and/or modified CDS sequence (opt2) from neuraminidase__InfluenzaA__AEJ10473
augaaccccaaccagaagaucaucaccaucggcuccgucugcaugaccaucggcauggccaaccucauccuccagaucggcaacaucaucuccaucuggaucucccacuccauccagcucggcaaccagaaccagaucgagaccugcaaccaguccgucaucaccuacgagaacaagaccugggucaaccagaccuacgucaacaucuccaacaccaacuucgccgccggccaguccgucgucuccgucaagcucgccggcaacuccucccucugccccgucuccggcugggccaucuacuccaaggacaacuccauccgcaucggcuccaagggcgacgucuucgucauccgcgagcccuucaucuccugcuccccccucgagugccgcaccuucuuccucacccagggcgcccuccucaacgacaagcacuccaacggcaccaucaaggaccgcucccccuaccgcacccucauguccugccccaucggcgagguccccucccccuacaacucccgcuucgaguccgucgccugguccgccuccgccugccacgacggcaucaacuggcucaccaucggcaucuccggccccgacaacggcgccgucgccguccucaaguacaacggcaucaucaccgacaccaucaaguccuggcgcaacaacauccuccgcacccaggaguccgagugcgccugcgucaacggcuccugcuucaccgucaugaccgacggccccuccgacggccaggccuccuacaagaucuuccgcaucgagaagggcaagaucgucaaguccgucgagaugaacgcccccaacuaccacuacgaggagugcuccugcuaccccgacuccuccgagaucaccugcgucugccgcgacaacuggcacggcuccaaccgccccugggucuccuucaaccagaaccucgaguaccagaucggcuacaucugcuccggcaucuucggcgacaacccccgccccaacgacaagaccggcuccugcggccccgucuccuccaacggcgccaacggcgucaagggcuucuccuucaaguacggcaacggcgucuggaucggccgcaccaaguccaucuccucccgcaacggcuucgagaugaucugggaccccaacggcuggaccggcaccgacaacaaguucuccaucaagcaggacaucgucggcaucaacgagugguccggcuacuccggcuccuucguccagcaccccgagcucaccggccucaacugcauccgccccugcuucugggucgagcucauccgcggccgccccaaggagaacaccaucuggaccuccggcuccuccaucuccuucugcggcgucaacuccgacaccgucggcugguccuggcccgacggcgccgagcuccccuucaccaucgacaaguga

SEQ ID NO: 116863 - RNA, 1410 nt, Artificial Sequence; identical to SEQ ID NO: 116293
  derived and/or modified CDS sequence (opt2) from neuraminidase__InfluenzaA__AEJ10503

SEQ ID NO: 116864 - RNA, 1410 nt, Artificial Sequence; identical to SEQ ID NO: 112774
  derived and/or modified CDS sequence (opt2) from neuraminidase__InfluenzaA__AEJ10523

SEQ ID NO: 116865 - RNA, 1410 nt, Artificial Sequence; identical to SEQ ID NO: 112774
  derived and/or modified CDS sequence (opt2) from neuraminidase__InfluenzaA__AEJ10533

SEQ ID NO: 116866 - RNA, 1410 nt, Artificial Sequence; identical to SEQ ID NO: 112774
  derived and/or modified CDS sequence (opt2) from neuraminidase__InfluenzaA__AEJ10543

SEQ ID NO: 116867 - RNA, 1410 nt, Artificial Sequence; identical to SEQ ID NO: 112774
  derived and/or modified CDS sequence (opt2) from neuraminidase__InfluenzaA__AEJ10553

SEQ ID NO: 116868 - RNA, 1410 nt, Artificial Sequence; identical to SEQ ID NO: 115049
  derived and/or modified CDS sequence (opt2) from neuraminidase__InfluenzaA__AEJ10563

SEQ ID NO: 116869 - RNA, 1410 nt, Artificial Sequence; identical to SEQ ID NO: 115049
  derived and/or modified CDS sequence (opt2) from neuraminidase__InfluenzaA__AEJ10573

SEQ ID NO: 116870 - RNA, 1410 nt, Artificial Sequence; identical to SEQ ID NO: 115049
  derived and/or modified CDS sequence (opt2) from neuraminidase__InfluenzaA__AEJ10583

SEQ ID NO: 116871 - RNA, 1410 nt, Artificial Sequence
  derived and/or modified CDS sequence (opt2) from neuraminidase__InfluenzaA__AEJ36305
augaaccccaaccagaagaucaucaccaucggcuccgucugcaugaccaucggcauggccaaccucauccuccagaucggcaacaucaucuccaucuggaucucccacuccauccagcucggcaaccagaaccagaucgagaccugcaaccaguccgucaucaccuacgagaacaacaccugggucaaccagaccuacgucaacaucuccaacaccaacuucgccgccggccaguccgucgucuccgucaagcucgccggcaacuccucccucugccccgucuccggcugggccaucuacuccaaggacaacuccauccgcaucggcuccaagggcgacgucuucgucauccgcgagcccuucaucuccugcuccccccucgagugccgcaccuucuuccucacccagggcgcccuccucaacgacaagcacuccaacggcaccaucaaggaccgcucccccuaccgcacccucauguccugccccaucggcgagguccccucccccuacaacucccgcuucgaguccgucgccugguccgccuccgccugccacgacggcaucaacuggcucaccaucggcaucuccggccccgacaacggcgccgucgccguccucaaguacaacggcaucaucaccgacaccaucaaguccuggcgcaacaacauccuccgcacccaggaguccgagugcgccugcgucaacggcuccugcuucaccgucaugaccgacggccccuccgacggccaggccuccuacaagaucuuccgcaucgagaagggcaagaucgucaaguccgucgagaugaacgcccccaacuaccacuacgaggagugcuccugcuaccccgacuccuccgagaucaccugcgucugccgcgacaacuggcacggcuccaaccgccccugggucuccuucaaccagaaccucgaguaccagaucggcuacaucugcuccggcaucuucggcgacaacccccgccccaacgacaagaccggcuccugcggccccgucuccuccaacggcgccaacggcgucaagggcuucuccuucaaguacggcaacggcgucuggaucggccgcaccaaguccaccuccucccgcaacggcuucgagaugaucugggaccccaacggcuggaccggcaccgacaacuccuucuccaucaagcaggacaucgucggcaucaacgagugguccggcuacuccggcuccuucguccagcaccccgagcucaccggccucgacugcauccgccccugcuucugggucgagcucauccgcggccgccccaaggagaacaccaucuggaccuccggcuccuccaucuccuucugcggcgucaacuccgacaccgucggcugguccuggcccgacggcgccgagcuccccuucaccaucgacaaguga

SEQ ID NO: 116872 - RNA, 1410 nt, Artificial Sequence; identical to SEQ ID NO: 112774
  derived and/or modified CDS sequence (opt2) from neuraminidase__InfluenzaA__AEJ37856

SEQ ID NO: 116873 - RNA, 1410 nt, Artificial Sequence; identical to SEQ ID NO: 112774
  derived and/or modified CDS sequence (opt2) from neuraminidase__InfluenzaA__AEJ37866

SEQ ID NO: 116874 - RNA, 1410 nt, Artificial Sequence; identical to SEQ ID NO: 112774
  derived and/or modified CDS sequence (opt2) from neuraminidase__InfluenzaA__AEJ37876

SEQ ID NO: 116875 - RNA, 1410 nt, Artificial Sequence; identical to SEQ ID NO: 116822
  derived and/or modified CDS sequence (opt2) from neuraminidase__InfluenzaA__AEJ37886

SEQ ID NO: 116876 - RNA, 1410 nt, Artificial Sequence
  derived and/or modified CDS sequence (opt2) from neuraminidase__InfluenzaA__AEJ37896
augaaccccaaccagaagaucaucaccaucggcuccgucugcaucaccaucggcauggccaaccucauccuccagaucggcaacaucaucuccaucuggaucucccacuccauccagcucggcaaccagaaccagaucgagaccugcaaccaguccgucaucaccuacgagaacaacaccugggucaaccagaccuacgucaacaucuccaacaccaacuucgccgccggccaguccgucgucuccgucaagcucgccggcaacuccucccucugccccgucuccggcugggccaucuacuccaaggacaacuccauccgcaucggcuccaagggcgacgucuucgucauccgcgagcccuucaucuccugcuccccccucgagugccgcaccuucuuccucacccagggcgcccuccucaacgacaagcacuccaacggcaccaucaaggaccgcucccccuaccgcacccucauguccugccccaucggcgagguccccucccccuacaacucccgcuucgaguccgucgccugguccgccuccgccugccacgacggcaucuccuggcucaccaucggcaucuccggccccgacaacggcgccgucgccguccucaaguacaacggcaucaucaccgacaccaucaaguccuggcgcaacaacauccuccgcacccaggaguccgagugcgccugcgucaacggcuccugcuucaccgucaugaccgacggccccuccgacggccaggccuccuacaagaucuuccgcaucgagaagggccgcaucgucaaguccgucgagaugaacgcccccaacuaccacuacgaggagugcuccugcuaccccgacuccuccgagaucaccugcgucugccgcgacaacuggcacggcuccaaccgccccugggucuccuucaaccagaaccucgaguaccagaucggcuacaucugcuccggcaucuucggcgacaacccccgccccaacgacaagaccggcuccugcggccccgucuccuccaacggcgccaacggcgucaagggcuucuccuucaaguacggcaacggcgucuggaucggccgcaccaaguccaucuccucccgcaacggcuucgagaugaucugggaccccaacggcuggaccggcaccgacaacaacuucuccaucaagcaggacaucgucggcaucaacgagugguccggcuacuccggcuccuucguccagcaccccgagcucaccggccucgacugcauccgccccugcuucugggucgagcucauccgcggccgccccaaggagaacaccaucuggaccuccggcuccuccaucuccuucugcggcgucaacuccgacaccgucggcugguccuggcccgacggcgccgagcuccccuucaccaucgacaaguga

SEQ ID NO: 116877 - RNA, 1410 nt, Artificial Sequence; identical to SEQ ID NO: 116822
  derived and/or modified CDS sequence (opt2) from neuraminidase__InfluenzaA__AEJ37906

SEQ ID NO: 116878 - RNA, 1410 nt, Artificial Sequence; identical to SEQ ID NO: 116822
  derived and/or modified CDS sequence (opt2) from neuraminidase__InfluenzaA__AEJ37916

SEQ ID NO: 116879 - RNA, 1410 nt, Artificial Sequence; identical to SEQ ID NO: 116822
  derived and/or modified CDS sequence (opt2) from neuraminidase__InfluenzaA__AEJ37926

SEQ ID NO: 116880 - RNA, 1410 nt, Artificial Sequence; identical to SEQ ID NO: 114676
  derived and/or modified CDS sequence (opt2) from neuraminidase__InfluenzaA__AEJ37936

SEQ ID NO: 116881 - RNA, 1410 nt, Artificial Sequence; identical to SEQ ID NO: 112774
  derived and/or modified CDS sequence (opt2) from neuraminidase__InfluenzaA__AEJ37946

SEQ ID NO: 116882 - RNA, 1410 nt, Artificial Sequence; identical to SEQ ID NO: 116822
  derived and/or modified CDS sequence (opt2) from neuraminidase__InfluenzaA__AEJ37956

SEQ ID NO: 116883 - RNA, 1410 nt, Artificial Sequence; identical to SEQ ID NO: 116822
  derived and/or modified CDS sequence (opt2) from neuraminidase__InfluenzaA__AEJ37966

SEQ ID NO: 116884 - RNA, 1410 nt, Artificial Sequence; identical to SEQ ID NO: 112774
  derived and/or modified CDS sequence (opt2) from neuraminidase__InfluenzaA__AEJ37976

SEQ ID NO: 116885 - RNA, 1410 nt, Artificial Sequence; identical to SEQ ID NO: 116822
  derived and/or modified CDS sequence (opt2) from neuraminidase__InfluenzaA__AEJ37986

SEQ ID NO: 116886 - RNA, 1410 nt, Artificial Sequence; identical to SEQ ID NO: 115446
  derived and/or modified CDS sequence (opt2) from neuraminidase__InfluenzaA__AEK21372

SEQ ID NO: 116887 - RNA, 1413 nt, Artificial Sequence; identical to SEQ ID NO: 116240
  derived and/or modified CDS sequence (opt2) from neuraminidase__InfluenzaA__AEK21383

SEQ ID NO: 116888 - RNA, 1410 nt, Artificial Sequence; identical to SEQ ID NO: 114676
  derived and/or modified CDS sequence (opt2) from neuraminidase__InfluenzaA__AEK21399

SEQ ID NO: 116889 - RNA, 1410 nt, Artificial Sequence; identical to SEQ ID NO: 112774
  derived and/or modified CDS sequence (opt2) from neuraminidase__InfluenzaA__AEK21409

SEQ ID NO: 116890 - RNA, 1410 nt, Artificial Sequence; identical to SEQ ID NO: 116745
  derived and/or modified CDS sequence (opt2) from neuraminidase__InfluenzaA__AEK21419

SEQ ID NO: 116891 - RNA, 1410 nt, Artificial Sequence; identical to SEQ ID NO: 116822
  derived and/or modified CDS sequence (opt2) from neuraminidase__InfluenzaA__AEK21429

SEQ ID NO: 116892 - RNA, 1410 nt, Artificial Sequence
  derived and/or modified CDS sequence (opt2) from neuraminidase__InfluenzaA__AEK21439
augaaccccaaccagaagaucaucaccaucggcuccgucugcaugaccaucggcauggccaaccucauccuccagaucggcaacaucaucuccaucuggaucucccacuccauccagcucggcaaccagaaccagaucgagaccugcaaccaguccgucaucaccuacgagaacaacaccugggucaaccagaccuacgucaacaucuccaacaccaacuucgccgccggccaguccgucgucuccgucaagcucgccggcaacuccucccucugccccgucuccggcugggccaucuacuccaaggacaacuccauccgcaucggcuccaagggcgacgucuucgucauccgcgagcccuucaucuccugcuccccccucgagugccgcaccuucuuccucacccagggcgcccuccucaacgacaagcacuccaacggcaccaucaaggaccgcucccccuaccgcacccucauguccugccccaucggcgagguccccucccccuacaacucccgcuucgaguccgucgccugguccgccuccgccugccacgacggcaucaacuggcucaccaucggcaucuccggccccgacaacggcgccgucgccguccucaaguacaacggcaucaucaccgacaccaucaaguccuggcgcaacaacauccuccgcacccaggaguccgagugcgccugcgucaacggcuccugcuucaccgucaugaccgacggccccuccgacggccaggccuccuacaagaucuuccgcaucgagaagggcaagaucgucaaguccgucgagaugaacgcccccaacuaccacuacgaggagugcuccugcuaccccgacuccuccgagaucaccugcgucugccgcgacaacuggcacggcuccaaccgccccugggucuccuucaaccagaaccucgaguaccagaucggcuacaucugcuccggcaucuucggcgacaacccccgccccaacgacaagaccggcuccugcggccccgucuccuccaacggcgccaacggcgucaagggcuucuccuucaaguacggcaacggcgucuggaucggccgcaccaaguccaucuccucccgcaacggcuucgagaugaucugggaccccaacggcuggaccggcaccgacaacaacuucuccaagaagcaggacaucgucggcaucaacgagugguccggcuacuccggcuccuucguccagcaccccgagcucaccggccucgacugcauccgccccugcuucugggucgagcucauccgcggccgccccaaggagaacaccaucuggaccuccggcuccuccaucuccuucugcggcgucaacuccgacaccgucggcugguccuggcccgacggcgccgagcuccccuucaccaucgacaaguga

SEQ ID NO: 116893 - RNA, 1410 nt, Artificial Sequence; identical to SEQ ID NO: 116822
  derived and/or modified CDS sequence (opt2) from neuraminidase__InfluenzaA__AEK21449

SEQ ID NO: 116894 - RNA, 1410 nt, Artificial Sequence; identical to SEQ ID NO: 114676
  derived and/or modified CDS sequence (opt2) from neuraminidase__InfluenzaA__AEK21459

SEQ ID NO: 116895 - RNA, 1410 nt, Artificial Sequence; identical to SEQ ID NO: 116822
  derived and/or modified CDS sequence (opt2) from neuraminidase__InfluenzaA__AEK21469

SEQ ID NO: 116896 - RNA, 1410 nt, Artificial Sequence; identical to SEQ ID NO: 116822
  derived and/or modified CDS sequence (opt2) from neuraminidase__InfluenzaA__AEK21479

SEQ ID NO: 116897 - RNA, 1410 nt, Artificial Sequence; identical to SEQ ID NO: 112774
  derived and/or modified CDS sequence (opt2) from neuraminidase__InfluenzaA__AEK21489

SEQ ID NO: 116898 - RNA, 1410 nt, Artificial Sequence; identical to SEQ ID NO: 116490
  derived and/or modified CDS sequence (opt2) from neuraminidase__InfluenzaA__AEK28776

SEQ ID NO: 116899 - RNA, 1410 nt, Artificial Sequence
  derived and/or modified CDS sequence (opt2) from neuraminidase__InfluenzaA__AEK28787
augaaccccaaccagaagaucaucaccaucggcuccgucucccucaccaucuccaccaucugcuucuucaugcagaucgccauccucaucaccaccgucacccuccacuucaagcaguacgaguucuacuccccccccaacaaccaggucaugcucugcgagcccaccaucaucgagcgcaacaucaccgagaucgucuaccucaccaacaccaccaucgagaaggagaucugccccaagcucgccgaguaccgcaacugguccaagccccagugcgacaucaccggcuucgcccccuucuccaaggacaacuccauccgccucuccgccggcggcgacaucugggucacccgcgagcccuacgucuccugcgaccccgacaagugcuaccaguucgcccucggccagggcaccacccucaacaacguccacuccaacaacaccguccgcgaccgcacccccuaccgcacccuccucaugaacgagcucggcguccccuuccaccucggcaccaagcaggucugcaucgccugguccuccuccuccugccacgacggcaaggccuggcuccacgucugcaucaccggcgacgacaagaacgccaccgccuccuucaucuacaacggccgccucgucgacuccgucgucuccugguccaaggagauccuccgcacccaggaguccgagugcgucugcaucaacggcaccugcaccgucgucaugaccgacggcuccgccuccggcaaggccgacaccaagauccucuucaucgaggagggcaagaucguccacaccuccacccucuccggcuccgcccagcacgucgaggagugcuccugcuacccccgcuaccccggcguccgcugcgucugccgcgacaacuggaagggcuccaaccgccccaucgucgacaucaacaucaaggaccacuccaucgucuccuccuacgucugcuccggccucgucggcgacaccccccgcaagaacgacuccuccuccuccucccacugccucgaccccaacaacgaggagggcggccacggcgucaagggcugggccuucgacgacggcaacgacgucuggaugggccgcaccaucaacgagaccucccgccucggcuacgagaccuucaaggucaucgagggcugguccaaccccaaguccaagcuccagaucaaccgccaggucaucgucgaccgcggcaaccgcuccggcuacuccggcaucuucuccgucgagggccgcuccugcaucaaccgcugcuucuacgucgagcucauccgcggccgcaaggaggagaccgagguccucuggaccuccaacuccaucgucgucuucugcggcaccuccggcaccuacggcaccggcuccuggcccgacggcgccgaccucaaccucaugcccaucuga

SEQ ID NO: 116900 - RNA, 1410 nt, Artificial Sequence
  derived and/or modified CDS sequence (opt2) from neuraminidase__InfluenzaA__AEK28798
augaaccccaaccagaagaucaucaccaucggcuccgucucccucaccaucuccaccaucugcuucuucaugcagaucgccauccucaucaccaccgucacccuccacuucaagcaguacgaguucaacuccccccccaacaaccaggucaugcucugcgagcccaccaucaucgagcgcaacaucaccgagaucgucuaccucaccaacaccaccaucgagaaggagaucugccccaagcucgccgaguaccgcaacugguccaagccccagugcgacaucaccggcuucgcccccuucuccaaggacaacuccauccgccucuccgccggcggcgacaucugggucacccgcgagcccuacgucuccugcgaccccgacaagugcuaccaguucgcccucggccagggcaccacccucaacaacguccacuccaacaacaccguccgcgaccgcacccccuaccgcacccuccucaugaacgagcucggcguccccuuccaccucggcaccaagcaggucugcaucgccugguccuccuccuccugccacgacggcaaggccuggcuccacgucugcaucaccggcgacgacaagaacgccaccgccuccuucaucuacaacggccgccucgucgacuccgucgucuccugguccaaggagauccuccgcacccaggaguccgagugcgucugcaucaacggcaccugcaccgucgucaugaccgacggcaacgccuccggcaaggccgacaccaagauccucuucaucgaggagggcaagaucguccacaccuccacccucuccggcuccgcccagcacgucgaggagugcuccugcuacccccgcuaccccggcguccgcugcgucugccgcgacaacuggaagggcuccaaccgccccaucgucgacaucaacaucaaggaccacuccaucgucuccuccuacgucugcuccggccucgucggcgacaccccccgcaagaacgacuccuccuccuccucccacugcuccgaccccaacaacgaggagggcggccacggcgucaagggcugggccuucgacgacggcaacgacgucuggaugggccgcaccaucuccgagaagucccgccucggcuacgagaccuucaaggucaucgagggcugguccaaccccaaguccaagcuccagaucaaccgccaggucaucgucgaccgcggcaaccgcuccggcuacuccggcaucuucuccgucgagggcaaguccugcaucaaccgcugcuucuacgucgagcucauccgcggccgcaaggaggagaccgagguccucuggaccuccaacuccaucgucgucuucugcggcaccuccggcaccuacggcaccggcuccuggcccgacggcgccgacaucaaccucaugcccaucuga

SEQ ID NO: 116901 - RNA, 1410 nt, Artificial Sequence
  derived and/or modified CDS sequence (opt2) from neuraminidase__InfluenzaA__AEK28809
augaaccccaaccagaagaucaucaccaucggcuccgucucccucaccaucuccaccaucugcuucuucaugcagaucgccauccucaucaccaccgucaccguccacuucaagcaguacgaguucaacuccccccccaacaaccaggucaugcucugcgagcccaccaucaucgagcgcaacaucaccgagaucgucuaccucaccaacaccaccaucgagaaggagaucugccccaagcucgccgaguaccgcaacugguccaagccccagugcgacaucaccggcuucgcccccuucuccaaggacaacuccauccgccucuccgccggcggcgacaucugggucacccgcgagcccuacgucuccugcgaccccgacaagugcuaccaguucgcccucggccagggcaccacccucaacaacguccacuccaacaacaagguccgcgaccgcacccccuaccgcacccuccucaugaacgagcucggcguccccuuccaccucggcaccaagcaggucugcaucgccugguccuccuccuccugccacgacggcaaggccuggcuccacgucugcaucaccggcgacgacaagaacgccaccgccuccuucaucuacaacggccgccucgucgacuccgucgucuccugguccaaggagauccuccgcacccaggaguccgagugcgucugcaucaacggcaccugcaccgucgucaugaccgacggcuccgccuccggcaaggccgacaccaagauccucuucaucgaggagggcaagaucguccacaccuccacccucuccggcuccgcccagcacgucgaggagugcuccugcuacccccgcuaccccggcguccgcugcgucugccgcgacaacuggaagggcuccaaccgccccaucgucgacaucaacaucaaggaccacuccaucgucuccuccuacgucugcuccggccucgucggcgacaccccccgcaagaacgacuccuccuccuccucccacugccucgaccccaacaacgaggagggcggccacggcgucaagggcugggccuucgacgacggcaacgacgucuggaugggccgcaccaucuccgagaagucccgccucggcuacgagaccuucaaggucaucgagggcugguccaaccccaaguccaagcuccagaucaaccgccaggucaucgucgaccgcggcaaccgcuccggcuacuccggcaucuucuccgucgagggcaaguccugcaucaaccgcugcuucuacgucgagcucauccgcggccgcaaggaggagaccgagguccucuggaccuccaacuccaucgucgucuucugcggcaccuccggcaccuacggcaccggcuccuggcccgacggcgccgacaucaaccucaugcccaucuga

SEQ ID NO: 116902 - RNA, 1410 nt, Artificial Sequence
  derived and/or modified CDS sequence (opt2) from neuraminidase__InfluenzaA__AEK28819
augaaccccaaccagaagaucaucaccaucggcuccgucucccucaccaucuccaccaucugcuucuucaugcagaucgccauccucaucaccaccgucacccuccacuucaagcaguacgaguucaacuacccccccaacaaccaggucaugcucugcgagcccaccaucaucgagcgcaacaucaccgagaucgucuaccucaccaacaccaccaucgagaaggagaucugccccaagcucgccgaguaccgcaacugguccaagccccagugcgacaucaccggcuucgcccccuucuccaaggacaacuccauccgccucuccgccggcggcgacaucugggucacccgcgagcccuacgucuccugcgaccccgacaagugcuaccaguucgcccucggccagggcaccacccucaacaacguccacuccaacaacaccguccgcgagcgcacccccuaccgcacccuccucaugaacgagcucggcguccccuuccaccucggcaccaagcaggucugcaucgccugguccuccuccuccugccacgacggcaaggccuggcuccacgucugcaucaccggcgacgacaagaacgccaccgccuccuucaucuacaacggccgccucgucgacuccgucgucuccugguccaaggagauccuccgcacccaggaguccgagugcgucugcaucaacggcaccugcaccgucgucaugaccgacggcuccgccuccggcaaggccgacaccaagauccucuucaucgaggagggcaagaucguccacaccuccacccucuccggcuccgcccagcacgucgaggagugcuccugcuacccccgcuaccccggcguccgcugcgucugccgcgacaacuggaagggcuccaaccgccccaucgucgacaucaacaucaaggaccacuccaucgucuccuccuacgucugcuccggccucgucggcgacaccccccgcaagaacgacuccuccuccuccucccacugccucgaccccaacaacgaggagggcggccacggcgucaagggcugggccuucgacgacggcaacgacgucuggaugggccgcaccaucuccgagaagucccgccucggcuacgagaccuucaaggucaucgagggcugguccaaccccaaguccaagcuccagaucaaccgccaggucaucgucgaccgcggcaaccgcuccggcuacuccggcaucuucuccgucgagggcaaguccugcaucaaccgcugcuucuacgucgagcucauccgcggccgcaaggaggagaccgagguccucuggaccuccaacuccaucgucgucuucugcggcaccuccggcaccuacggcaccggcuccuggcccgacggcgccgacaucaaccucaugcccaucuga

SEQ ID NO: 116903 - RNA, 1410 nt, Artificial Sequence
  derived and/or modified CDS sequence (opt2) from neuraminidase__InfluenzaA__AEK28830
augaaccccaaccagaagaucaucaccaucggcuccgucucccucaccaucuccaccaucugcuucuucaugcagaucgccauccucaucaccaccgucacccuccacuucaagcaguacgaguucaacuccccccccaacaaccaggucaugcucugcgagcccaccaucaucgagcgcaacaucaccgagaucgucuaccucaccaacaccaccaucgagaaggagaucugccccaaccucgccgaguaccgcaacugguccaagccccagugcgacaucaccggcuucgcccccuucuccaaggacaacuccauccgccucuccgccggcggcgacaucugggucacccgcgagcccuacgucuccugcgaccccgacaagugcuaccaguucgcccucggccagggcaccacccucaacaacguccacuccaacaacaccguccgcggccgcacccccuaccgcacccuccucaugaacgagcucggcguccccuuccaccucggcaccaagcaggucugcaucgccugguccuccuccuccugccacgacggcaaggccuggcuccacgucugcaucaccggcgacgacaagaacgccaccgccuccuucaucuacaacggccgccucgucgacuccgucgucuccugguccaaggagauccuccgcacccaggaguccgagugcgucugcaucaacggcaccugcaccgucgucaugaccgacggcuccgccuccggcaaggccgacaccaagauccucuucaucgaggagggcaagaucguccacaccuccacccucuccggcuccgcccagcacgucgaggagugcuccugcuacccccgcuaccccggcguccgcugcgucugccgcgacaacuggaagggcuccaaccgccccaucgucgacaucaacaucaaggaccacuccaucgucuccuccuacgucugcuccggccucgucggcgacaccccccgcaagaacgacuccuccuccuccucccacugccucgaccccaacaacgaggagggcggccacggcgucaagggcugggccuucgacgacggcaacgacgucuggaugggccgcaccaucuccgagaagucccgccucggcuacgagaccuucaaggucaucgagggcugguccaaccccaaguccaagcuccagaucaaccgccaggucaucgucgaccgcggcaaccgcuccggcuacuccggcaucuucuccgucgagggcaaguccugcaucaaccgcugcuucuacgucgagcucauccgcggccgcaaggaggagaccgagguccucuggaccuccaacuccaucgucgucuucugcggcaccuccggcaccuacggcaccggcuccuggcccgacggcgccgacaucaaccucaugcccaucuga

SEQ ID NO: 116904 - RNA, 1410 nt, Artificial Sequence
  derived and/or modified CDS sequence (opt2) from neuraminidase__InfluenzaA__AEK28841
augaaccccaaccagaagaucaucaccaucggcuccgucucccucaccaucuccaccaucugcuucuucaugcagaucgccauccucaucaccaccgucacccuccacuucaagcaguacgaguucaacuccccccccaacaaccaggucaugcucugcgagcccaccaucaucgagcgcaacaucaccgagaucgucuaccucaccaacaccaccaucgagaaggagaucugccccaagcucgccgaguaccgcaacugguccaagccccagugcgacaucaccggcuucgcccccuucuccaaggacaacuccauccgccucuccgccggcggcgacaucugggucacccgcgagcccuacgucuccugcgaccccgacaagugcuaccaguucgcccucggccagggcaccaccgucaacaacguccacuccaacaacaccguccgcggccgcacccccuaccgcacccuccucaugaacgagcucggcguccccuuccaccucggcaccaagcaggucugcaucgccugguccuccuccuccugccacgacggcaaggccuggcuccacgucugcaucaccggcgacgacaagaacgccaccgccuccuucaucuacaacggccgccucgucgacuccgucgucuccugguccaaggagauccuccgcacccaggaguccgagugcgucugcaucaacggcaccugcaccgucgucaugaccgacggcuccgccuccggcaaggccgacaccaagauccucuucaucgaggagggcaagaucguccacaccuccacccucuccggcuccgcccagcacgucgaggagugcuccugcuacccccgcuaccccggcguccgcugcgucugccgcgacaacuggaagggcuccaaccgccccaucgucgacaucaacaucaaggaccacuccaucgucuccuccuacgucugcuccggccucgucggcgacaccccccgcaagaacgacuccuccuccuccucccacugccucgaccccaacaacgaggagggcggccacggcgucaagggcugggccuucgacgacggcaacgacgucuggaugggccgcaccaucuccgagaagucccgccucggcuacgagaccuucaaggucaucgagggcugguccaaccacaaguccaagcuccagaucaaccgccaggucaucgucgaccgcggcaaccgcuccggcuacuccggcaucuucuccgucgagggcaaguccugcaucaaccgcugcuucuacgucgagcucauccgcggccgcaaggaggagaccgagguccucuggaccuccaacuccaucgucgucuucugcggcaccuccggcaccuacggcaccggcuccuggcccgacggcgccgaccucaaccucaugcccaucuga

SEQ ID NO: 116905 - RNA, 1410 nt, Artificial Sequence
  derived and/or modified CDS sequence (opt2) from neuraminidase__InfluenzaA__AEK28852
augaaccccaaccagaagaucaucaccaucggcuccgucucccucaccaucuccaccaucugcuucuucaugcagaucgccauccucaucaccaccgucacccuccacuucaagcaguacgaguucaacuccccccccaacaaccaggucaugcucugcgagcccaccaucaucgagaagaacaucaccgagaucgucuaccucaccaacaccaccaucgagaaggagaucugccccaagcucgccgaguaccgcaacugguccaagccccagugcgacaucaccggcuucgcccccuucuccaaggacaacuccauccgccucuccgccggcggcgacaucugggucacccgcgagcccuacgucuccugcgaccccgacaagugcuaccaguucgcccucggccagggcaccacccucaacaacguccacuccaacaaccgcguccgcgaccgcacccccuaccgcacccuccucaugaacgagcucggcguccccuuccaccucggcaccaagcaggucugcaucgccugguccuccuccuccugccacgacggcaaggccuggcuccacgucugcaucaccggcgacgacaagaacgccaccgccuccuucaucuacaacggccgccucgucgacuccgucgucuccugguccaaggagauccuccgcacccaggaguccgagugcgucugcaucaacggcaccugcaccgucgucaugaccgacggcuccgccuccggcaaggccgacaccaagauccucuucaucgaggagggcaagaucguccacaccuccacccucuccggcuccgcccagcacgucgaggagugcuccugcuacccccgcuaccccggcguccgcugcgucugccgcgacaacuggaagggcuccaaccgccccaucgucgacaucaacaucaaggaccacuccaucgucuccuccuacgucugcuccggccucgucggcgacaccccccgcaagaacgacuccuccuccuccucccacugccucgaccccaacaacgaggagggcggccacggcgucaagggcugggccuucgacgacggcaacgacgucuggaugggccgcaccaucuccgagaagucccgccucggcuacgagaccuucaaggucaucgagggcugguccaaccccaaguccaagcuccagaucaaccgccaggucaucgucgaccgcggcaaccgcuccggcuacuccggcaucuucuccgucgagggcaaguccugcaucaaccgcugcuucuacgucgagcucauccgcggccgcaaggaggagaccgagguccucuggaccuccaacuccaucgucgucuucugcggcaccuccggcaccuacggcaccggcuccuggcccgacggcgccgacaucaaccucaugcccaucuga

SEQ ID NO: 116906 - RNA, 1410 nt, Artificial Sequence; identical to SEQ ID NO: 114520
  derived and/or modified CDS sequence (opt2) from neuraminidase__InfluenzaA__AEK28863

SEQ ID NO: 116907 - RNA, 1410 nt, Artificial Sequence
  derived and/or modified CDS sequence (opt2) from neuraminidase__InfluenzaA__AEK28874
augaaccccaaccagaagaucaucaccaucggcuccgucucccucaccaucuccaccaucugcuucuucaugcagaucgccauccucaucaccaccgucacccuccacuucaagcaguacgaguucaacuccccccccaacaaccaggucaugcucugcgagcccaccaucaucgagcgcaacaucaccgagaucgucuaccucaccaacaccaccaucgagaaggagaucugccccaagcucgccgaguaccgcaacugguccaagccccagugcgacaucaccggcuucgcccccuucuccaaggacaacuccauccgccucuccgccggcggcgacaucugggucacccgcgagcccuacgucuccugcgaccccgacaagugcuaccaguucgcccucggccagggcaccacccucaacaacguccacuccaacaacaagguccgcgaccgcacccccuaccgcacccuccucaugaacgagcucggcguccccuuccaccucggcaccaagcaggucugcaucgccugguccuccuccuccugccacgacggcaaggccuggcuccacgucugcaucaccggcgacgacaagaacgccaccgccuccuucaucuacaacggccgccucgucgacuccgucgucuccugguccaaggagauccuccgcacccaggaguccgagugcgucugcaucaacggcaccugcaccgucgucaugaccgacggcuccgccuccggcaaggccgacaccaagauccucuucaucgaggagggcaagaucguccacaccuccacccucuccggcuccgcccagcacgucgaggagugcuccugcuacccccgcuaccccggcguccgcugcgucugccgcgacaacuggaagggcuccaaccgccccaucgucgacaucaacaucaaggaccacuccaucgucuccuccuacgucugcuccggccucgucggcgacaccccccgcaagaacgacuccuccuccuccucccacugccucgaccccaacaacgaggagggcggccacggcgucaagggcugggccuucgacgacggcaacgacgucuggaugggccgcaccaucuccgagaagucccgccucggcuacgagaccuucaaggucaucgagggcugguccaaccacaaguccaagcuccagaucaaccgccaggucaucgucgaccgcggcaaccgcuccggcuacuccggcaucuucuccgucgagggcaaguccugcaucaaccgcugcuucuacgucgagcucauccgcggccgcaaggaggagaccgagguccucuggaccuccaacuccaucgucgucuucugcggcaccuccggcaccuacggcaccggcuccuggcccgacggcgccgaccucaaccucaugcccaucuga

SEQ ID NO: 116908 - RNA, 1410 nt, Artificial Sequence
  derived and/or modified CDS sequence (opt2) from neuraminidase__InfluenzaA__AEK28885
augaaccccaaccagaagaucaucaccaucggcuccgucucccucaccaucuccaccaucugcuucuucaugcagaucgccauccucaucaccaccgucacccuccacuucaagcaguacgaguucaaccucccccccaacaaccaggucaugcucugcgagcccaccaucaucgagcgcaacaucaccgagaucgucuaccucaccaacaccaccaucgagaaggagaucugccccaagcucgccgaguaccgcaacugguccaagccccagugcgacaucaccggcuucgcccccuucuccaaggacaacuccauccgccucuccgccggcggcgacaucugggucacccgcgagcccuacgucuccugcgaccccgacaagugcuaccaguucgcccucggccagggcaccacccucaacaacguccacuccaacaacaccguccgcgaccgcacccccuaccgcacccuccucaugaacgagcucggcguccccuuccaccucggcaccaagcaggucugcaucgccugguccuccuccuccugccacgacggcaaggccuggcuccacgucugcaucaccggcgacgacaagaacgccaccgccuccuucaucuacaacggccgccucgucgacuccgucgucuccugguccaaggagauccuccgcacccaggaguccgagugcgucugcaucaacggcaccugcaccgucgucaugaccgacggcuccgccuccggcaaggccgacaccaagauccucuucaucgaggagggcaagaucguccacaccuccacccucuccggcuccgcccagcacgucgaggagugcuccugcuacccccgcuaccccggcguccgcugcgucugccgcgacaacuggaagggcuccaaccgccccaucgucgacaucaacaucaaggaccacuccaucgucuccuccuacgucugcuccggccucgucggcgacaccccccgcaagaacgacuccuccuccuccucccacugccucgaccccaacaacgaggagggcggccacggcgucaagggcugggccuucgacgacggcaacgacgucuggaugggccgcaccaucuccgagaagucccgccucggcuacgagaccuucaaggucaucgagggcugguccaaccccaaguccaagcuccagaucaaccgccaggucaucgucgaccgcggcaaccgcuccggcuacuccggcaucuucuccgucgagggcaaguccugcaucaaccgcugcuucuacgucgagcucauccgcggccgcaaggaggagaccgagguccucuggaccuccaacuccaucgucgucuucugcggcaccuccggcaccuacggcaccggcuccuggcccgacggcgccgacaucaaccucaugcccaucuga

SEQ ID NO: 116909 - RNA, 1410 nt, Artificial Sequence; identical to SEQ ID NO: 114645
  derived and/or modified CDS sequence (opt2) from neuraminidase__InfluenzaA__AEK28896

SEQ ID NO: 116910 - RNA, 1410 nt, Artificial Sequence
  derived and/or modified CDS sequence (opt2) from neuraminidase__InfluenzaA__AEK28907
augaaccccaaccagaagaucaucaccaucggcuccgucucccucaccaucuccaccaucugcuucuucaugcagaucgccauccucaucaccaccgucacccuccacuucaagcaguacgaguucaacuccccccccaacaaccaggucaugcucugcgagcccaccaucaucgagaagaacaucaccgagaucgucuaccucaccaacaccaccaucgagaaggagaucugcccccgccucgccgaguaccgcaacugguccaagccccagugcgacaucaccggcuucgcccccuucuccaaggacaacuccauccgccucuccgccggcggcgacaucugggucacccgcgagcccuacgucuccugcgaccccgacaagugcuaccaguucgcccucggccagggcaccacccucaacaacguccacuccaacaacaccguccgcgaccgcacccccuaccgcacccuccucaugaacgagcucggcguccccuuccaccucggcaccaagcaggucugcaucgccugguccuccuccuccugccacgacggcaaggccuggcuccacgucugcaucaccggcgacgacaagaacgccaccgccuccuucaucuacaacggccgccucgucgacuccgucgucuccugguccaaggagauccuccgcacccaggaguccgagugcgucugcaucaacggcaccugcaccgucgucaugaccgacggcuccgccuccggcaaggccgacaccaagauccucuucaucgaggagggcaagaucguccacaccuccacccucuccggcuccgcccagcacgucgaggagugcuccugcuacccccgcuaccccggcguccgcugcgucugccgcgacaacuggaagggcuccaaccgccccaucgucgacaucaacaucaaggaccacuccaucgucuccuccuacgucugcuccggccucgucggcgacaccccccgcaagaacgacuccuccuccuccucccacugccucgaccccaacaacgaggagggcggccacggcgucaagggcugggccuucgacgacggcaacgacgucuggaugggccgcaccaucuccgagaagucccgccucggcuacgagaccuucaaggucaucgagggcugguccaaccccaaguccaagcuccagaucaaccgccaggucaucgucgaccgcggcaaccgcuccggcuacuccggcaucuucuccgucgagggcaaguccugcaucaaccgcugcuucuacgucgagcucauccgcggccgcaaggaggagaccgagguccucuggaccuccaacuccaucgucgucuucugcggcaccuccggcaccuacggcaccggcuccuggcccgacggcgccgacaucaaccucaugcccaucuga

SEQ ID NO: 116911 - RNA, 1410 nt, Artificial Sequence; identical to SEQ ID NO: 112635
  derived and/or modified CDS sequence (opt2) from neuraminidase__InfluenzaA__AEK28918

SEQ ID NO: 116912 - RNA, 1410 nt, Artificial Sequence; identical to SEQ ID NO: 113941
  derived and/or modified CDS sequence (opt2) from neuraminidase__InfluenzaA__AEK28929

SEQ ID NO: 116913 - RNA, 1410 nt, Artificial Sequence
  derived and/or modified CDS sequence (opt2) from neuraminidase__InfluenzaA__AEK28951
augaaccccaaccagaagaucaucaccaucggcuccgucucccucaccaucuccaccaucugcuucuucaugcagaucgccauccucaucaccaccgucacccuccacuucaagcaguacgaguucaacuccccccccaacaaccaggucaugcucugcgagcccaccaucaucgagcgcaacaucaccgagaucgucuaccucaccaacaccaccaucgagaaggagaucugccccaagcucgccgaguaccgcaacugguccaagccccagugcgacaucaccggcuucgcccccuucuccaaggacaacuccauccgccucuccgccggcggcgacaucugggucacccgcgagcccuacgucuccugcgaccccgacaagugcuaccaguucgcccucggccagggcaccacccucaacaacguccacuccaacaacaccguccgcgaccgcacccccuaccgcacccuccucaugaacgagcucggcguccccuuccaccucggcaccaagcaggucugcaucgccugguccuccuccuccugccacgacggcaaggccuggcuccacgucugcaucaccggcgacgacaagaacgccaccgccuccuucaucuacaacggccgccucgucgacuccgucgucuccugguccaaggagauccuccgcacccaggaguccgagugcgucugcaucaacggcaccugcaccgucgucaugaccgacggcuccgccuccggcaaggccgacaccaagauccucuucaucgaggagggcaagaucguccacaccuccacccucuccggcuccgcccagcacgucgaggagugcuccugcuacccccgcuaccccggcguccgcugcgucugccgcgacaacuggaagggcuccaaccgccccaucgucgacaucaacaucaaggaccacuccaucgucuccuccuacgucugcuccggccucgucggcgacaccccccgcaagaacgacuccuccuccuccucccacugccucgaccccaacaacgaggagggcggccacggcgucaagggcugggccuucgacgacggcaacgacgucuggaugggccgcaccaucuccgagaagucccgcuccggcuacgagaccuucaaggucaucgagggcugguccaaccacaaguccaagcuccagaucaaccgccaggucaucgucgaccgcggcaaccgcuccggcuacuccggcaucuucuccgucgagggcaaguccugcaucaaccgcugcuucuacgucgagcucauccgcggccgcaaggaggagaccgaggcccucuggaccuccaacuccaucgucgucuucugcggcaccuccggcaccuacggcaccggcuccuggcccgacggcgccgaccucaaccucaugcccaucuga

SEQ ID NO: 116914 - RNA, 1410 nt, Artificial Sequence
  derived and/or modified CDS sequence (opt2) from neuraminidase__InfluenzaA__AEK28962
augaaccccaaccagaagaucaucaccaucggcuccgucucccucaccaucuccaccaucugcuucuucaugcagaucgccauccucaucaccaccgucacccuccacuucaagcaguacgaguucaacuccccccccaacaaccaggucaugcucugcgagcccaccaucaucgagcgcaacaucaccgagaucgucuaccccaccaacaccaccaucgagaaggagaucugccccaagcucgccgaguaccgcaacugguccaagccccagugcgacaucaccggcuucgcccccuucuccaaggacaacuccauccgccucuccgccggcggcgacaucugggucacccgcgagcccuacgucuccugcgaccccgacaagugcuaccaguucgcccucggccagggcaccacccucaacaacguccacuccaacaacaccguccgcgaccgcacccccuaccgcacccuccucaugaacgagcucggcguccccuuccaccucggcaccaagcaggucugcaucgccugguccuccuccuccugccacgacggcaaggccuggcuccacgucugcaucaccggcgacgacaagaacgccaccgccuccuucaucuacaacggccgccucgucgacuccgucgucuccugguccaaggagauccuccgcacccaggaguccgagugcgucugcaucaacggcaccugcaccgucgucaugaccgacggcuccgccuccggcaaggccgacaccaagauccucuucaucgaggagggcaagaucguccacaccuccacccucuccggcuccgcccagcacgucgaggagugcuccugcuacccccgcuaccccggcguccgcugcgucugccgcgacaacuggaagggcuccaaccgccccaucgucgacaucaacaucaaggaccacuccaucgucuccuccuacgucugcuccggccucgucggcgacaccccccgcaagaacgacuccuccuccuccucccacugccucgaccccaacaacgaggagggcggccacggcgucaagggcugggccuucgacgacggcaacgacgucuggaugggccgcaccaucuccgagaagucccgccucggcuacgagaccuucaaggucaucgagggcugguccaaccccaaguccaagcuccagaucaaccgccaggucaucgucgaccgcggcaaccgcuccggcuacuccggcaucuucuccgucgagggcaaguccugcaucaaccgcugcuucuacgucgagcucauccgcggccgcaaggaggagaccgagguccucuggaccuccaacuccaucgucgucuucugcggcaccuccggcaccuacggcaccggcuccuggcccgacggcgccgacaucaaccucaugcccaucuga

SEQ ID NO: 116915 - RNA, 1410 nt, Artificial Sequence
  derived and/or modified CDS sequence (opt2) from neuraminidase__InfluenzaA__AEK28973
augaaccccaaccagaagaucaucaccaucggcuccgucucccucaccaucuccaccaucugcuucuucaugcagaucgccauccucaucaccaccgucacccuccacuucaagcaguacgaguucaacuccccccccaacaaccaggucaugcucugcgagcccaccaucaucgagcgcaacaucaccgagaucgucuaccucaccaacaccaccaucgagaaggagaucugccccaagcucgccgaguaccgcaacugguccaagccccagugcgacaucaccggcuucgcccccuucuccaaggacaacuccauccgccucuccgccggcggcgacaucugggucacccgcgagcccuacgucuccugcgaccccgacaagugcuaccaguucgcccucggccagggcaccacccucaacaacguccacuccaacaacaccguccgcgaccgcacccccuaccgcacccuccucaugaacgagcucggcguccccuuccaccucggcaccaagcaggucugcaucgccugguccuccuccuccugccacgacggcaaggccuggcuccacgucugcaucaccggcgacgacaagaacgccaccgccuccuucaucuacaacggccgccucgucgacuccgucgucuccugguccaaggagauccuccgcacccaggaguccgagugcgucugcaucaacggcaccugcaccgucgucaugaccgacggcuccgccuccggcaaggccgacaccaagauccucuucaucgaggagggcaagaucguccacaccuccacccucuccggcuccgcccagcacgucgaggagugcuccugcuacccccgcuaccccggcguccgcugcgucugccgcgacaacuggaagggcuccaaccgccccaucgucgacaucaacaucaaggaccacuccaucgucuccuccuacgucugcuccggccucgucggcgacaccccccgcaagaacgacuccuccuccuccucccacugccucgaccccaacaacgaggagggcggccacggcgucaagggcugggccuucgacgacggcaacgacgucuggaugggccgcaccaucuccgagaagucccgccucggcuacgagaccuucaaggucaucgagggcugguccaaccacaaguccaagcuccagaucaaccgccaggucaucgucgaccgcggcaaccgcuccggcuacuccggcaucuucuccgucgagggcaaguccugcaucaaccgcugcuucuacgucgagcucauccgcggccgcaaggaggagaccgagguccucuggaccuccaacuccaucgucgucuucugcggcaccuccggcaccuacggcaccggcuccuggcccgacggcgccgaccucaacuucaugcccaucuga

SEQ ID NO: 116916 - RNA, 1410 nt, Artificial Sequence
  derived and/or modified CDS sequence (opt2) from neuraminidase__InfluenzaA__AEK28984
augaaccccaaccagaagaucaucaccaucggcuccgucucccucaccaucuccaccaucugcuucuucaugcagaucgccauccucaucaccaccgucacccuccacuucaagcaguacgaguucaacuccccccccaacaaccaggucaugcucugcgagcccaccaucaucgagcgcaacaucaccgagaucgucuaccucaccaacaccaccaucgagaaggagaucugccccaagcucgccgaguaccgcaacugguccaagccccagugcgacaucaccggcuucgcccccuucuccaaggacaacuccguccgccucuccgccggcggcgacaucugggucacccgcgagcccuacgucuccugcgaccccgacaagugcuaccaguucgcccucggccagggcaccacccucaacaacguccacuccaacaacaccguccgcgaccgcacccccuaccgcacccuccucaugaacgagcucggcguccccuuccaccucggcaccaagcaggucugcaucgccugguccuccuccuccugccacgacggcaaggccuggcuccacgucugcaucaccggcgacgacaagaacgccaccgccuccuucaucuacaacggccgccucgucgacuccgucgucuccugguccaaggagauccuccgcacccaggaguccgagugcgucugcaucaacggcaccugcaccgucgucaugaccgacggcuccgccuccggcaaggccgacaccaagauccucuucaucgaggagggcaagaucguccacaccuccacccucuccggcuccgcccagcacgucgaggagugcuccugcuacccccgcuaccccggcguccgcugcgucugccgcgacaacuggaagggcuccaaccgccccaucgucgacaucaacaucaaggaccacuccaucgucuccuccuacgucugcuccggccucgucggcgacaccccccgcaagaacgacuccuccuccuccucccacugccucgaccccaacaacgaggagggcggccacggcgucaagggcugggccuucgacgacggcaacgacgucuggaugggccgcaccaucuccgagaagucccgccucggcuacgagaccuucaaggucaucgagggcugguccaaccccaaguccaagcuccagaucaaccgccaggucaucgucgaccgcggcaaccgcuccggcuacuccggcaucuucuccgucgagggcaaguccugcaucaaccgcugcuucuacgucgagcucauccgcggccgcaaggaggagaccgagguccucuggaccuccaacuccaucgucgucuucugcggcaccuccggcaccuacggcaccggcuccuggcccgacggcgccgacaucaaccucaugcccaucuga

SEQ ID NO: 116917 - RNA, 1410 nt, Artificial Sequence; identical to SEQ ID NO: 116916
  derived and/or modified CDS sequence (opt2) from neuraminidase__InfluenzaA__AEK28995

SEQ ID NO: 116918 - RNA, 1410 nt, Artificial Sequence; identical to SEQ ID NO: 115554
  derived and/or modified CDS sequence (opt2) from neuraminidase__InfluenzaA__AEK29006

SEQ ID NO: 116919 - RNA, 1410 nt, Artificial Sequence
  derived and/or modified CDS sequence (opt2) from neuraminidase__InfluenzaA__AEK29028
augaaccccaaccagaagaucaucaccaucggcuccgucucccucaccaucuccaccaucugcuucuucaugcagaucgccauccucaucaccaccgucacccuccacuucaagcaguacgaguucaacuccccccccaacaaccaggucaugcucugcgagcccaccaucaucgagcgcaacaucaccgagaucgucuaccucaccaacaccaccaucgagaaggagaucugccccaagcucgccgaguaccgcaacugguccaagccccagugcgacaucaccggcuucgcccccuucuccaaggacaacuccauccgccucuccgccggcggcgacaucugggucacccgcgagcccuacgucuccugcgaccccaacaagugcuaccaguucgcccucggccagggcaccacccucaacaacguccacuccaacaacaccguccgcgaccgcacccccuaccgcacccuccucaugaacgagcucggcguccccuuccaccucggcaccaagcaggucugcaucgccugguccuccuccuccugccacgacggcaaggccuggcuccacgucugcaucaccggcgacgacaagaacgccaccgccuccuucaucuacaacggccgccucgucgacuccgucgucuccugguccaaggagauccuccgcacccaggaguccgagugcgucugcaucaacggcaccugcaccgucgucaugaccgacggcuccgccuccggcaaggccgacaccaagauccucuucaucgaggagggcaagaucguccacaccuccacccucuccggcuccgcccagcacgucgaggagugcuccugcuacccccgcuaccccggcguccgcugcgucugccgcgacaacuggaagggcuccaaccgccccaucgucgacaucaacaugaaggaccacuccaucgucuccuccuacgucugcuccggccucgucggcgacaccccccgcaagaacgacuccuccuccuccucccacugcuucgaccccaacgacgaggagggcggccacggcgucaagggcugggccuucgacgacggcaacgacgucuggaugggccgcaccaucuccgagaagucccgccucggcuacgagaccuucaaggucaucgagggcugguccaaccccaaguccaagcuccagaucaaccgccaggucaucgucgaccgcggcaaccgcuccggcuacuccggcaucuucuccgucgagggcaaguccugcaucaaccgcugcuucuacgucgagcucauccgcggccgcaaggaggagaccgagguccucuggaccuccaacuccaucgucgucuucugcggcaccuccggcaccuacggcaccggcuccuggcccgacggcgccgacaucaaccucaugcccaucuga

SEQ ID NO: 116920 - RNA, 1410 nt, Artificial Sequence
  derived and/or modified CDS sequence (opt2) from neuraminidase__InfluenzaA__AEK29050
augaaccccaaccagaagaucaucaccaucggcuccgucucccucaccaucuccaccaucugcuucuucaugcagaucgccauccucaucaccaccgucacccuccacuucaagcaguacgaguucaaccccccccccaacaaccaggucaugcucugcgagcccaccaucaucgagcgcaacaucaccgagaucgucuaccucaccaacaccaccaucgagaaggagaucugccccaagcucgccgaguaccgcaacugguccaagccccagugcgacaucaccggcuucgcccccuucuccaaggacaacuccauccgccucuccgccggcggcgacaucugggucacccgcgagcccuacgucuccugcgaccccgacaagugcuaccaguucgcccucggccagggcaccacccucaacaacguccacuccaacaacaccguccgcgaccgcacccccuaccgcacccuccucaugaacgagcucggcguccccuuccaccucggcaccaagcaggucugcaucgccugguccuccuccuccugccacgacggcaaggccuggcuccacgucugcaucaccggcgacgacaagaacgccaccgccuccuucaucuacaacggccgccucgucgacuccgucgucuccugguccaaggagauccuccgcacccaggaguccgagugcgucugcaucaacggcaccugcaccgucgucaugaccgacggcuccgccuccggcaaggccgacaccaagauccucuucaucgaggagggcaagaucguccacaccuccacccucuccggcuccgcccagcacgucgaggagugcuccugcuacccccgcuaccccggcguccgcugcgucugccgcgacaacuggaagggcuccaaccgccccaucgucgacaucaacaucaaggaccacuccaucgucuccuccuacgucugcuccggccucgucggcgacaccccccgcaagaacgacuccuccuccuccucccacugccucgaccccaacaacgaggagggcggccacggcgucaagggcugggccuucgacgacggcaacgacgucuggaugggccgcaccaucaacgagaccucccgccucggcuacgagaccuucaaggucaucgagggcugguccaaccccaaguccaagcuccagaucaaccgccaggucaucgucgaccgcggcaaccgcuccggcuacuccggcaucuucuccgucgagggcaaguccugcaucaaccgcugcuucuacgucgagcucauccgcggccgcaaggaggagaccgagguccucuggaccuccaacuccaucgucgucuucugcggcaccuccggcaccuacggcaccggcuccuggcccgacggcgccgaccucaaccucaugcccaucuga

SEQ ID NO: 116921 - RNA, 1410 nt, Artificial Sequence
  derived and/or modified CDS sequence (opt2) from neuraminidase__InfluenzaA__AEK29061
augaaccccaaccagaagaucaucaccaucggcuccgucucccucaccaucuccaccaucugcuucuucauccagaucgccauccucaucaccaccgucacccuccacuucaagcaguacgaguucaacuccccccccaacaaccaggucaugcucugcgagcccaccaucaucgagaagaacaucaccgagaucgucuaccucaccaacaccaccaucgagaaggagaucugccccaagcucgccgaguaccgcaacugguccaagccccagugcgacaucaccggcuucgcccccuucuccaaggacaacuccauccgccucuccgccggcggcgacaucugggucacccgcgagcccuacgucuccugcgaccccgacaagugcuaccaguucgcccucggccagggcaccacccucaacaacguccacuccaacaacaucguccgcgaccgcacccccuaccgcacccuccucaugaacgagcucggcguccccuuccaccucggcaccaagcaggucugcaucgccugguccuccuccuccugccacgacggcaaggccuggcuccacgucugcaucaccggcgacgacaagaacgccaccgccuccuucaucuacaacggccgccucgucgacuccgucgucuccugguccaaggagauccuccgcacccaggaguccgagugcgucugcaucaacggcaccugcaccgucgucaugaccgacggcuccgccuccggcaaggccgacaccaagauccucuucaucgaggagggcaagaucguccacaccuccacccucuccggcuccgcccagcacgucgaggagugcuccugcuacccccgcuaccccggcguccgcugcgucugccgcgacaacuggaagggcuccaaccgccccaucgucgacaucaacaucaaggaccacuccaucgucuccuccuacgucugcuccggccucgucggcgacaccccccgcaagaacgacuccuccuccuccucccacugccucgaccccaacaacgaggagggcggccacggcgucaagggcugggccuucgacgacggcaacgacgucuggaugggccgcaccaucaacgagaccucccgccucggcuacgagaccuucaaggucaucgagggcugguccaaccccaaguccaagcuccagaucaaccgccaggucaucgucgaccgcggcaaccgcuccggcuacuccggcaucuucuccgucgagggcaaguccugcaucaaccgcugcuucuacgucgagcucauccgcggccgcaaggaggagaccgagguccucuggaccuccaacuccaucgucgucuucugcggcaccuccggcaccuacggcaccggcuccuggcccgacggcgccgaccucaaccucaugcccaucuga

SEQ ID NO: 116922 - RNA, 1410 nt, Artificial Sequence
  derived and/or modified CDS sequence (opt2) from neuraminidase__InfluenzaA__AEK29083
augaaccccaaccagaagaucaucaccaucggcuccgucucccucaccaucuccaccaucugcuucuucauccagaucgccauccucaucaccaccgucacccuccacuucaagcaguacgaguucaacuccccccccaacaaccaggucaugcucugcgagcccaccaucaucgagaagaacaucaccgagaucgucuaccucaccaacaccaccaucgagaaggagaucugccccaagcucgccgaguaccgcaacugguccaagccccagugcgacaucaccggcuucgcccccuucuccaaggacaacuccauccgccucuccgccggcggcgacaucugggucacccgcgagcccuacgucuccugcgaccccgacaagugcuaccaguucgcccucggccagggcaccacccucaacaacguccacuccaacaacaccguccgcgaccgcacccccuaccgcacccuccucaugaacgagcucggcguccccuuccaccucggcaccaagcaggucugcaucgccugguccuccuccuccugccacgacggcaaggccuggcuccacgucugcaucaccggcgacgacaagaacgccaccgccuccuucaucuacaacggccgccucgucgacuccgucgucuccugguccaaggagauccuccgcacccaggaguccgagugcgucugcaucaacggcaccugcaccgucgucaugaccgacggcuccgccuccggcaaggccgacaccaagauccucuucaucgaggagggcaagaucguccacaccuccacccucuccggcuccgcccagcacgucgaggagugcuccugcuacccccgcuaccccggcguccgcugcgucugccgcgacaacuggaagggcuccaaccgccccaucgucgacaucaacaucaaggaccacuccaucgucuccuccuacgucugcuccggccucgucggcgacaccccccgcaagaacgacuccuccuccuccucccacugccucgaccccaacaacgaggagggcggccacggcgucaagggcugggccuucgacgacggcaacgacgucuggaugggccgcaccaucaacgagaccucccgccucggcuacgagaccuucaaggucaucgagggcugguccaaccccaaguccaagcuccagaucaaccgccaggucaucgucgaccgcggcaaccgcuccggcuacuccggcaucuucuccgucgagggcaaguccugcaucaaccgcugcuucuacgucgagcucauccgcggccgcaaggaggagaccgagguccucuggaccuccaacuccaucgucgucuucugcggcaccuccggcaccuacggcaccggcuccuggcccgacggcgccgaccucaaccucaugcccaucuga

SEQ ID NO: 116923 - RNA, 1410 nt, Artificial Sequence; identical to SEQ ID NO: 115446
  derived and/or modified CDS sequence (opt2) from neuraminidase__InfluenzaA__AEK29094

SEQ ID NO: 116924 - RNA, 1410 nt, Artificial Sequence; identical to SEQ ID NO: 115554
  derived and/or modified CDS sequence (opt2) from neuraminidase__InfluenzaA__AEK29127

SEQ ID NO: 116925 - RNA, 1410 nt, Artificial Sequence; identical to SEQ ID NO: 115554
  derived and/or modified CDS sequence (opt2) from neuraminidase__InfluenzaA__AEK29138

SEQ ID NO: 116926 - RNA, 1410 nt, Artificial Sequence
  derived and/or modified CDS sequence (opt2) from neuraminidase__InfluenzaA__AEK29182
augaaccccaaccagaagaucaucaccaucggcuccgucucccucaccaucuccaccaucugcuucuucaugcagaucgccauccucaucaccaccgucacccuccacuucaagcaguacgaguucaacuccccccccaacaaccaggucaugcucugcgagcccaccaucaucgagcgcaacaucaccgagaucgucuaccucaccaacaccaccaucgagaaggagaucugccccaagcucgccgaguaccgcaacugguccaagccccagugcgacaucaccggcuucgcccccuucuccaaggacaacuccauccgccucuccgccggcggcgacaucugggucacccgcgagcccuacgucuccugcgaccccgacaagugcuaccaguucgcccucggccagggcaccacccucaacaacguccacuccaacaacaccguccgcgaccgcacccccuaccgcacccuccucaugaacgagcucggcguccccuuccaccucggcaccaagcaggucugcaucgccugguccuccuccuccugccacgacggcaaggccuggcuccacgucugcaucaccggcgacgacaagaacgccaccgccuccuucaucuacaacggccgccucgucgacuccgucgucuccugguccaaggagauccuccgcacccaggaguccgagugcgucugcaucaacggcaccugcaccgucgucaugaccgacggcuccgccuccggcaaggccgacaccaagauccucuucaucgaggagggcaagaucguccacaccuccacccucuccggcuccgcccagcacgucgaggagugcuccugcuacccccgcuaccccggcguccgcugcgucugccgcgacaacuggaagggcuccaaccgccccaucgucgacaucaacaucaaggaccacuccaucgucuccuccuacgucugcuccggccucgucggcgacaccccccgcaagaacgacuccuccuccuccucccacugccucgaccccaacaacgaggagggcggccacggcgucaagggcugggccuucgacgacggcaacgacgucuggaugggccgcaccaucaacgagaccucccgccucggcuacgagaccuucaaggucaucgagggcugguccaaccccaaguccaagcuccaggucaaccgccaggucaucgucgaccgcggcaaccgcuccggcuacuccggcaucuucuccgucgagggcaaguccugcaucaaccgcugcuucuacgucgagcucauccgcggccgcaaggaggagaccgagguccucuggaccuccaacuccaucgucgucuucugcggcaccuccggcaccuacggcaccggcuccuggcccgacggcgccgaccucaaccucaugcccaucuga

SEQ ID NO: 116927 - RNA, 1410 nt, Artificial Sequence
  derived and/or modified CDS sequence (opt2) from neuraminidase__InfluenzaA__AEK29204
augaaccccaaccagaagaucaucaccaucggcuccgucucccucaccaucuccaccaucugcuucuucaugcagaucgccauccucaucaccaccgucacccuccacuucaagcaguacgaguucaacuccccccccaacaaccaggucaugcucugcgagcccaccaucaucgagcgcaacaucaccgagaucgucuaccucaccaacaccaccaucgagaaggagaucugccccaagcucgccgaguaccgcaacugguccaagccccagugcgacaucaccggcuucgcccccuucuccaaggacaacuccauccgccucuccgccggcggcgacaucugggucacccgcgagcccuacgucuccugcgaccccgacaagugcuaccaguucgcccucggccagggcaccacccucaacaacguccacuccaacaacaccguccgcgaccgcacccccuaccgcacccuccucaugaacgagcucggcguccccuuccaccucggcaccaagcaggucugcaucgccugguccuccuccuccugccacgacggcaaggccuggcuccacgucugcaucaccggcgacgacaagaacgccaccgccuccuucaucuacaacggccgccucgucgacuccgucgucuccugguccaaggagauccuccgcacccaggaguccgagugcgucugcaucaacggcaccugcaccgucgucaugaccgacggcuccgccuccggcaaggccaacaccaagguccucuucaucgaggagggcaagaucguccacaccuccacccucuccggcuccgcccagcacgucgaggagugcuccugcuacccccgcuaccccggcguccgcugcgucugccgcgacaacuggaagggcuccaaccgccccaucgucgacaucaacaucaaggaccacuccaucgucuccuccuacgucugcuccggccucgucggcgacaccccccgcaagaacgacuccuccuccuccucccacugccucgaccccaacaacgaggagggcggccacggcgucaagggcugggccuucgacgacggcaacgacgucuggaugggccgcaccaucaacgagaccucccgccucggcuacgagaccuucaaggucaucgagggcugguccaaccccaaguccaagcuccagaucaaccgccaggucaucgucgaccgcggcaaccgcuccggcuacuccggcaucuucuccgucgagggcaaguccugcaucaaccgcugcuucuacgucgagcucauccgcggccgcaaggaggagaccgagguccucuggaccuccaacuccaucgucgucuucugcggcaccuccggcaccuacggcaccggcuccuggcccgacggcgccgaccucaaccucaugcccaucuga

SEQ ID NO: 116928 - RNA, 1410 nt, Artificial Sequence
  derived and/or modified CDS sequence (opt2) from neuraminidase__InfluenzaA__AEK29215
augaaccccaaccagaagaucaucaccaucggcuccgucucccucaccaucuccaccaucugcuucuucaugcagaucgccauccucaucaccaccgucacccuccacuucaagcaguacgaguucaacuccccccccaacaaccaggucaugcucugcgagcccaccaucaucgagcgcaacaucaccgagaucgucuaccucaccaacaccaccaucgagaaggagaucugccccaagcucgccgaguaccgcaacugguccaagccccagugcgacaucaccggcuucgcccccuucuccaaggacaacuccauccgccucuccgccggcggcgacaucugggucacccgcgagcccuacgucuccugcgaccccgacaagugcuaccaguucgcccucggccagggcaccacccucaacaacguccacuccaacaacaccguccgcaaccgcacccccuaccgcacccuccucaugaacgagcucggcguccccuuccaccucggcaccaagcaggucugcaucgccugguccuccuccuccugccacgacggcaaggccuggcuccacgucugcaucaccggcgacgacaagaacgccaccgccuccuucaucuacaacggccgccucgucgacuccgucgucuccugguccaaggagauccuccgcacccaggaguccgagugcgucugcaucaacggcaccugcaccgucgucaugaccgacggcuccgccuccggcaaggccgacaccaagauccucuucaucgaggagggcaagaucguccacaccuccacccucuccggcuccgcccagcacgucgaggagugcuccugcuacccccgcuaccccggcguccgcugcgucugccgcgacaacuggaagggcuccaaccgccccaucgucgacaucaacaucaaggaccacuccaucgucuccuccuacgucugcuccggccucgucggcgacaccccccgcaagaacgacuccuccuccuccucccacugccucgaccccaacaacgaggagggcggccacggcgucaagggcugggccuucgacgacggcaacgacgucuggaugggccgcaccaucaacgagaccucccgccucggcuacgagaccuucaaggucaucgagggcugguccaaccccaaguccaagcuccagaucaaccgccaggucaucgucgaccgcggcgaccgcuccggcuacuccggcaucuucuccgucgagggcaaguccugcaucaaccgcugcuucuacgucgagcucauccgcggccgcaaggaggagaccgagguccucuggaccuccaacuccaucgucgucuucugcggcaccuccggcaccuacggcaccggcuccuggcccgacggcgccgaccucaaccucaugcccaucuga

SEQ ID NO: 116929 - RNA, 1410 nt, Artificial Sequence; identical to SEQ ID NO: 116927
  derived and/or modified CDS sequence (opt2) from neuraminidase__InfluenzaA__AEK29237

SEQ ID NO: 116930 - RNA, 1410 nt, Artificial Sequence; identical to SEQ ID NO: 115554
  derived and/or modified CDS sequence (opt2) from neuraminidase__InfluenzaA__AEK29248

SEQ ID NO: 116931 - RNA, 1410 nt, Artificial Sequence; identical to SEQ ID NO: 115554
  derived and/or modified CDS sequence (opt2) from neuraminidase__InfluenzaA__AEK29259

SEQ ID NO: 116932 - RNA, 1410 nt, Artificial Sequence; identical to SEQ ID NO: 115554
  derived and/or modified CDS sequence (opt2) from neuraminidase__InfluenzaA__AEK29270

SEQ ID NO: 116933 - RNA, 1413 nt, Artificial Sequence
  derived and/or modified CDS sequence (opt2) from neuraminidase__InfluenzaA__AEK59839
augaaccccaaccagaagaucaucaccaucggcuccaucuccaucgccaucggcaucaucucccucaugcuccagaucggcaacaucaucuccaucugggccucccacuccauccagaccggcucccagaaccacaccggcaucugcaaccagcgcaucaucaccuacgagaacuccaccugggucaaccacaccuacgucaacaucaacaacaccaacgucgucgccggcaaggacaagaccuccgucacccucgccggcaacuccucccucugcuccaucuccggcugggccaucuacaccaaggacaacuccauccgcaucggcuccaagggcgacgucuucgucauccgcgagcccuucaucuccugcucccaccucgagugccgcaccuucuuccucacccagggcgcccuccucaacgacaagcacuccaacggcaccgucaaggaccgcucccccuaccgcgcccucauguccugcccccucggcgaggcccccucccccuacaacuccaaguucgaguccgucgccugguccgccuccgccugccacgacggccucggcuggcucaccaucggcaucuccggccccgacaacggcgccgucgccguccucaaguacaacggcaucaucaccggcaccaucaaguccuggaagaagcagauccuccgcacccaggaguccgagugcgucugcaugaacggcuccugcuucaccaucaugaccgacggccccuccaacggcgccgccuccuacaagaucuucaagaucgagaagggcaaggucaccaaguccaucgagcucaacgcccccaacuuccacuacgaggagugcuccugcuaccccgacaccggcaucgucaugugcgucugccgcgacaacuggcacggcuccaaccgccccugggucuccuucaaccagaaccucgacuaccagaucggcuacaucugcuccggcgucuucggcgacaacccccgccccaaggacggcgagggcuccugcaaccccgucaccgucgacggcgccgacggcgucaagggcuucuccuacaaguacgacaacggcgucuggaucggccgcaccaaguccaaccgccuccgcaagggcuucgagaugaucugggaccccaacggcuggaccaacaccgacuccgacuucuccgucaagcaggacgucgucgccaucaccgacugguccggcuacuccggcuccuucguccagcaccccgagcucaccggccucgacugcauccgccccugcuucugggucgagcucguccgcggccucccccgcgagaacaccaccaucuggaccuccggcuccuccaucuccuucugcggcgucaacuccgacaccgccaacugguccuggcccgacggcgccgagcuccccuucaccaucgacaaguga

SEQ ID NO: 116934 - RNA, 1410 nt, Artificial Sequence
  derived and/or modified CDS sequence (opt2) from neuraminidase__InfluenzaA__AEK98375
augaaccccaaccagaagaucaucaccaucggcuccgucucccucaccaucuccaccaucugcuucuucaugcagaucgccauccucaucaccaccgucacccuccacuucaagcaguacgaguucaacuccccccccaacaaccaggucaugcucugcgagcccaccaucaucgagcgcaacaucaccgagaucgucuaccucaccaacaccaccaucgagaaggagaucugccccaagcucgccgaguaccgcaacugguccaagccccagugcgacaucaccggcuucgcccccuucuccaaggacaacuccauccgccucuccgccggcggcgacaucugggucacccgcgagcccuacgucuccugcgaccccgacaagugcuaccaguucgcccucggccagggcaccacccucaacaacguccacuccaacgacaccguccgcgaccgcacccccuaccgcacccuccucaugaacgagcucggcguccccuuccaccucggcaccaagcaggucugcaucgccugguccuccuccuccugccacgacggcaaggccuggcuccacgucugcaucaccggcgacgacaagaacgccaccgccuccuucaucuacaacggccgccucgucgacuccaucgucuccugguccaaggagauccuccgcacccaggaguccgagugcgucugcaucaacggcaccugcaccgucgucaugaccgacggcuccgccuccggcgaggccgacaccaagauccucuucaucgaggagggcaagaucguccacaccuccacccucuccggcuccgcccagcacgucgaggagugcuccugcuacccccgcuaccccggcguccgcugcgucugccgcgacaacuggaagggcuccaaccgccccaucgucgacaucaacaucaaggaccacuccaucgucuccuccuacgucugcuccggccucgucggcgacaccccccgcaagaacgacuccuccuccuccucccacugccucgaccccaacaacgaggagggcggccacggcgucaagggcugggccuucgacgacggcaacgacgucuggaugggccgcaccaucuccgagaagucccgccucggcuacgagaccuucaaggucaucgagggcugguccaaccccaaguccaagcuccagaccaaccgccaggucaucgucgaccgcggcaaccgcuccggcuacuccggcaucuucuccgucgagggcaaguccugcaucaaccgcugcuucuacgucgagcucauccgcggccgcaaggaggagaccgagguccucuggaccuccaacuccaucgucgucuucugcggcaccuccggcaccuacggcaccggcuccuggcccgacggcgccgacaucaaccucaugcccaucuga

SEQ ID NO: 116935 - RNA, 1410 nt, Artificial Sequence; identical to SEQ ID NO: 112635
  derived and/or modified CDS sequence (opt2) from neuraminidase__InfluenzaA__AEK98377

SEQ ID NO: 116936 - RNA, 1410 nt, Artificial Sequence; identical to SEQ ID NO: 112077
  derived and/or modified CDS sequence (opt2) from neuraminidase__InfluenzaA__AEK98379

SEQ ID NO: 116937 - RNA, 1410 nt, Artificial Sequence
  derived and/or modified CDS sequence (opt2) from neuraminidase__InfluenzaA__AEK98381
augaaccccaaccagaagaucaucaccaucggcuccgucucccucaccaucuccaccaucugcuucuucaugcagaucgccauccucaucaccaccgucacccuccacuucaagcaguacgaguucaacuccccccccaacaaccaggucaugcucugcgagcccaccaucaucgagcgcaacaucaccgagaucgucuaccucaccaacaccaccaucgagaaggagaucugccccaagcucgccgaguaccgcaacugguccaagccccagugcgacaucaccggcuucgcccccuucuccaaggacaacuccauccgccucuccgccggcggcgacaucugggucacccgcgagcccuacgucuccugcgaccccgacaagugcuaccaguucgcccucggccagggcaccacccucaacaacguccacuccaacgacaccguccgcgaccgcacccccuaccgcacccuccucaugaacgagcucggcguccccuuccaccucggcaccaagcaggucugcaucgccugguccuccuccuccugccacgacggcgaggccuggcuccacgucugcaucaccggcgacgacaagaacgccaccgccuccuucaucuacaacggccgccucgucgacuccaucgucuccugguccaaggagauccuccgcacccaggaguccgagugcgucugcaucaacggcaccugcaccgucgucaugaccgacggcuccgccuccggcgaggccgacaccaagauccucuucaucgaggagggcaagaucguccacaccuccacccucuccggcuccgcccagcacgucgaggagugcuccugcuacccccgcuaccccggcguccgcugcgucugccgcgacaacuggaagggcuccaaccgccccaucgucgacaucaacaucaaggaccacuccaucgucuccuccuacgucugcuccggccucgucggcgacaccccccgcaagaacgacuccuccuccuccucccacugccucgaccccaacaacgaggagggcggccacggcgucaagggcugggccuucgacgacggcaacgacgucuggaugggccgcaccaucuccgagaagucccgccucggcuacgagaccuucaaggucaucgagggcugguccaaccccaaguccaagcuccagaucaaccgccaggucaucgucgaccgcggcaaccgcuccggcuacuccggcaucuucuccgucgagggcaaguccugcaucaaccgcugcuucuacgucgagcucauccgcggccgcaaggaggagaccgagguccucuggaccuccaacuccaucgucgucuucugcggcaccuccggcaccuacggcaccggcuccuggcccgacggcgccgacaucaaccucaugcccaucuga

SEQ ID NO: 116938 - RNA, 1410 nt, Artificial Sequence; identical to SEQ ID NO: 112077
  derived and/or modified CDS sequence (opt2) from neuraminidase__InfluenzaA__AEK98383

SEQ ID NO: 116939 - RNA, 1410 nt, Artificial Sequence; identical to SEQ ID NO: 112635
  derived and/or modified CDS sequence (opt2) from neuraminidase__InfluenzaA__AEK98385

SEQ ID NO: 116940 - RNA, 1410 nt, Artificial Sequence
  derived and/or modified CDS sequence (opt2) from neuraminidase__InfluenzaA__AEK98387
augaaccccaaccagaagaucaucaccaucggcuccgucucccucaccaucuccaccaucugcuucuucaugcagaucgccauccucaucaccaccgucacccuccacuucaagcaguacgaguucaacuccccccccaacaaccaggucaugcucugcgagcccaccaucaucgagcgcaacaucaccgagaucgucuaccucaccaacaccaccaucgagaaggagaucugccccaagcucgccgaguaccgcaacugguccaagccccagugcgacaucaccggcuucgcccccuucuccaaggacaacuccauccgccucuccgccggcggcgacaucugggucacccgcgagcccuacgucuccugcgaccccgacaagugcuaccaguucgcccucggccagggcaccacccucaacaacguccacuccaacaacaccguccgcgaccgcacccccuaccgcacccuccucaugaacgagcucggcguccccuuccaccucggcaccaagcaggucugcaucgccugguccuccuccuccugccacgacggcaaggccuggcuccacgucugcaucaccggcgacgacaagaacgccaccgccuccuucaucuacaacggccgccucaucgacuccgucgucuccugguccaaggagauccuccgcacccaggaguccgagugcgucugcaucaacggcaccugcaccgucgucaugaccgacggcuccgccuccggcaaggccgacaccaagauccucuucaucgaggagggcaagaucguccacaccuccacccucuccggcuccgcccagcacgucgaggagugcuccugcuacccccgcuaccccggcguccgcugcgucugccgcgacaacuggaagggcuccaaccgccccaucgucgacaucaacaucaaggaccacuccaucgucuccuccuacgucugcuccggccucgucggcgacaccccccgcaagaacgacuccuccuccuccucccacugccucgaccccaacaacgaggagggcggccacggcgucaagggcugggccuucgacgacggcaacgacgucuggaugggccgcaccaucaacgagaccucccgccucggcuacgagaccuucaaggucaucgagggcugguccaaccccaaguccaagcuccagaucaaccgccaggucaucgucgaccgcggcaaccgcuccggcuacuccggcaucuucuccgucgagggcaaguccugcaucaaccgcugcuucuacgucgagcucauccgcggccgcaaggaggagaccgagguccucuggaccuccaacuccaucgucgucuucugcggcaccuccggcaccuacggcaccggcuccuggcccgacggcgccgaccucaaccucaugcccaucuga

SEQ ID NO: 116941 - RNA, 1410 nt, Artificial Sequence; identical to SEQ ID NO: 112635
  derived and/or modified CDS sequence (opt2) from neuraminidase__InfluenzaA__AEK98389

SEQ ID NO: 116942 - RNA, 1410 nt, Artificial Sequence
  derived and/or modified CDS sequence (opt2) from neuraminidase__InfluenzaA__AEK98393
augaaccccaaccagaagaucaucaccaucggcuccgucucccucaccaucuccaccaucugcuucuucaugcagaucgccauccucaucaccaccgucacccuccacuucaagcaguacgaguucaacuccccccccaacaaccaggucaugcucugcgagcccaccaucaucgagcgcaacaucaccgagaucgucuaccucaccaacaccaccaucgagaaggagaucugccccaagcucgccgaguaccgcaacugguccaagccccagugcgacaucaccggcuucgcccccuucuccaaggacaacuccauccgccucuccgccggcggcgacaucugggucacccgcgagcccuacgucuccugcgaccccgacaagugcuaccaguucgcccucggccagggcaccacccucaacaacguccacuccaacaacaccguccgcgaccgcacccccuaccgcacccuccucaugaacgagcucggcguccccuuccaccucggcaccaagcaggucugcaucgccugguccuccuccuccugccacgacggcaaggccuggcuccacgucugcaucaccggcgacgacaagaacgccaccgccuccuucaucuacaacggccgccucgucgacuccgucgucuccugguccaaggagauccuccgcacccaggaguccgagugcgucugcaucaacggcaccugcaccgucgucaugaccgacggcuccgccuccggcaaggccgacaccaagauccucuucaucgaggagggcaagaucguccacaccuccacccucuccggcuccgcccagcacgucgaggagugcuccugcuacccccgcuaccccggcguccgcugcgucugccgcgacaacuggaagggcuccaaccgccccaucgucgacaucaacaucaaggaccacuccaucgccuccuccuacgucugcuccggccucgucggcgacaccccccgcaagaacgacuccuccuccuccucccacugccucgaccccaacaacgaggagggcggccacggcgucaagggcugggccuucgacgacggcaacgacgucuggaugggccgcaccaucaacgagaccucccgccucggcuacgagaccuucaaggucaucgagggcugguccaaccccaaguccaagcuccagaucaaccgccaggucaucgucgaccgcggcaaccgcuccggcuacuccggcaucuucuccgucgagggcaaguccugcaucaaccgcugcuucuacgucgagcucauccgcggccgcaaggaggagaccgagguccucuggaccuccaacuccaucgucgucuucugcggcaccuccggcaccuacggcaccggcuccuggcccgacggcgccgaccucaaccucaugcccaucuga

SEQ ID NO: 116943 - RNA, 1410 nt, Artificial Sequence; identical to SEQ ID NO: 115554
  derived and/or modified CDS sequence (opt2) from neuraminidase__InfluenzaA__AEK98395

SEQ ID NO: 116944 - RNA, 1410 nt, Artificial Sequence
  derived and/or modified CDS sequence (opt2) from neuraminidase__InfluenzaA__AEK98397
augaaccccaaccagaagaucaucaccaucggcuccgucucccucaccaucuccaccaucugcuucuucaugcagaucgccauccucaucaccaccgucacccuccacuucaagcaguacgaguucaacuccccccccaacaaccaggucaugcucugcgagcccaccaucaucgagcgcaacaucaccgagaucgucuaccucaccaacaccaccaucgagaaggagaucugccccaagcucgccgaguaccgcaacugguccaagccccagugcgacaucaccggcuucgcccccuucuccaaggacaacuccauccgccucuccgccggcggcgacaucugggucacccgcgagcccuacgucuccugcgaccccaacaagugcuaccaguucgcccucggccagggcaccacccucaacaacguccacuccaacaacaccguccgcgaccgcacccccuaccgcacccuccucaugaacgagcucggcguccccuuccaccucggcaccaagcaggucugcaucgccugguccuccuccuccugccacgacggcaaggccuggcuccacgucugcaucaccggcgacgacaagaacgccaccgccuccuucaucuacaacggccgccucgucgacuccgucgucuccugguccaaggagauccuccgcacccaggaguccgagugcgucugcaucaacggcaccugcaccgucgucaugaccgacggcuccgccuccggcaaggccgacaccaagauccucuucaucgaggagggcaagaucguccacaccuccacccucuccggcuccgcccagcacgucgaggagugcuccugcuacccccgcuaccccggcguccgcugcgucugccgcgacaacuggaagggcuccaaccgccccaucgucgacaucaacaugaaggaccacuccaucgucuccuccuacgucugcuccggccucgucggcgacaccccccgcaagaacgacuccuccuccuccucccacugccucgaccccaacaacgaggagggcggccacggcgucaagggcugggccuucgacgacggcaacgacgucuggaugggccgcaccaucuccgagaagucccgccucggcuacgagaccuucaaggucaucgagggcugguccaaccccaaguccaagcuccagaucaaccgccaggucaucgucgaccgcggcaaccgcuccggcuacuccggcaucuucuccgucgagggcaaguccugcaucaaccgcugcuucuacgucgagcucauccgcggccgcaaggaggagaccgagguccucuggaccuccaacuccaucgucgucuucugcggcaccuccggcaccuacggcaccggcuccuggcccgacggcgccgacaucaacuucaugcccaucuga

SEQ ID NO: 116945 - RNA, 1410 nt, Artificial Sequence; identical to SEQ ID NO: 112635
  derived and/or modified CDS sequence (opt2) from neuraminidase__InfluenzaA__AEK98399

SEQ ID NO: 116946 - RNA, 1410 nt, Artificial Sequence; identical to SEQ ID NO: 112548
  derived and/or modified CDS sequence (opt2) from neuraminidase__InfluenzaA__AEK98403

SEQ ID NO: 116947 - RNA, 1410 nt, Artificial Sequence
  derived and/or modified CDS sequence (opt2) from neuraminidase__InfluenzaA__AEK98405
augaaccccaaccagaagaucaucaccaucggcuccgucucccucaccaucuccaccaucugcuucuucaugcagaucgccauccucaucaccaccgucacccuccacuucaagcaguacgaguucaacuccccccccaacaaccaggucaugcucugcgagcccaccaucaucgagcgcaacaucaccgagaucgucuaccucaccaacaccaccaucgagaaggagaucugccccaagcucgccgaguaccgcaacugguccaagccccagugcgacaucaccggcuucgcccccuucuccaaggacaacuccauccgccucuccgccggcggcgacaucugggucacccgcgagcccuacgucuccugcgaccccgacaagugcuaccaguucgcccucggccagggcaccacccucaacaacguccacuccaacaacaccguccgcgaccgcacccccuaccgcacccuccucaugaacgagcucggcguccccuuccaccucggcaccaagcaggucugcaucgccugguccuccuccuccugccacgacggcaaggccuggcuccacgucugcaucaccggcgacgacaagaacgccaccgccuccuucaucuacaacggccgccucgucgacuccaucgucuccugguccaaggagauccuccgcacccaggaguccgagugcgucugcaucaacggcaccugcaccgucgucaugaccgacggcuccgccuccggcaaggccgacaccaagauccucuucaucgaggagggcaagaucguccacaccuccacccucuccggcuccgcccagcacgucgaggagugcuccugcuacccccgcuaccccggcguccgcugcgucugccgcgacaacuggaagggcuccaaccgccccaucgucgacaucaacaucaaggaccacuccaucgucuccuccuacgucugcuccggccucgucggcgacaccccccgcaagaacgacuccuccuccuccucccacugccucgaccccaacaacgaggagggcggccacggcgucaagggcugggccuucgacgacggcaacgacgucuggaugggccgcaccaucuccgagaagucccgccucggcuacgagaccuucaaggucaucgagggcugguccaaccccaaguccaagcuccagaucaaccgccaggucaucgucgaccgcgacaaccgcuccggcuacuccggcaucuucuccgucgagggcaaguccugcaucaaccgcugcuucuacgucgagcucauccgcggccgcaaggaggagaccgagguccucuggaccuccaacuccaucgucgucuucugcggcaccuccggcaccuacggcaccggcuccuggcccgacggcgccgacaucaaccucaugcccaucuga

SEQ ID NO: 116948 - RNA, 1410 nt, Artificial Sequence
  derived and/or modified CDS sequence (opt2) from neuraminidase__InfluenzaA__AEK98407
augaaccccaaccagaagaucaucaccaucggcuccgucucccucaccaucuccaccaucugcuucuucaugcagaucgccauccucaucaccaccgucacccuccacuucaagcaguacgaguucaacuccccccccaacaaccaggucaugcucugcgagcccaccaucaucgagcgcaacaucaccgagaucgucuaccucaccaacaccaccaucgagaaggagaucugccccaagcucgccgaguaccgcaacugguccaagccccagugcgacaucaccggcuucgcccccuucuccaaggacaacuccauccgccucuccgccggcggcgacaucugggucacccgcgagcccuacgucuccugcgaccccgacaagugcuaccaguucgcccucggccagggcaccacccucaacaacguccacuccaacaacaccguccgcguccgcacccccuaccgcacccuccucaugaacgagcucggcguccccuuccaccucggcaccaagcaggucugcaucgccugguccuccuccuccugccacgacggcaaggccuggcuccacgucugcaucaccggcgacgacaagaacgccaccgccuccuucaucuacaacggccgccucgucgacuccaucgucuccugguccaaggagauccuccgcacccaggaguccgagugcgucugcaucaacggcaccugcaccgucgucaugaccgacggcuccgccuccggcaaggccgacaccaagauccucuucaucgaggagggcaagaucguccacaccuccacccucuccggcuccgcccagcacgucgaggagugcuccugcuacccccgcuaccccggcguccgcugcgucugccgcgacaacuggaagggcuccaaccgccccaucgucgacaucaacaucaaggaccacuccaucgucuccuccuacgucugcuccggccucgucggcgacaccccccgcaagaacgacuccuccuccuccucccacugccucgaccccaacaacgaggagggcggccacggcgucaagggcugggccuucgacgacggcaacgacgucuggaugggccgcaccaucuccgagaagucccgccucggcuacgagaccuucaaggucaucgagggcugguccaaccccaaguccaagcuccagaucaaccgccaggucaucgucgaccgcgacaaccgcuccggcuacuccggcaucuucuccgucgagggcaaguccugcaucaaccgcugcuucuacgucgagcucauccgcggccgcaaggaggagaccgagguccucuggaccuccaacuccaucgucgucuucugcggcaccuccggcaccuacggcaccggcuccuggcccgacggcgccgacaucaaccucaugcccaucuga

SEQ ID NO: 116949 - RNA, 1410 nt, Artificial Sequence; identical to SEQ ID NO: 110363
  derived and/or modified CDS sequence (opt2) from neuraminidase__InfluenzaA__AEL11690

SEQ ID NO: 116950 - RNA, 1410 nt, Artificial Sequence; identical to SEQ ID NO: 115049
  derived and/or modified CDS sequence (opt2) from neuraminidase__InfluenzaA__AEL89300

SEQ ID NO: 116951 - RNA, 1410 nt, Artificial Sequence; identical to SEQ ID NO: 115049
  derived and/or modified CDS sequence (opt2) from neuraminidase__InfluenzaA__AEL89310

SEQ ID NO: 116952 - RNA, 1410 nt, Artificial Sequence; identical to SEQ ID NO: 115049
  derived and/or modified CDS sequence (opt2) from neuraminidase__InfluenzaA__AEL89320

SEQ ID NO: 116953 - RNA, 1410 nt, Artificial Sequence; identical to SEQ ID NO: 115049
  derived and/or modified CDS sequence (opt2) from neuraminidase__InfluenzaA__AEL89330

SEQ ID NO: 116954 - RNA, 1410 nt, Artificial Sequence; identical to SEQ ID NO: 115049
  derived and/or modified CDS sequence (opt2) from neuraminidase__InfluenzaA__AEL89340

SEQ ID NO: 116955 - RNA, 1410 nt, Artificial Sequence; identical to SEQ ID NO: 115049
  derived and/or modified CDS sequence (opt2) from neuraminidase__InfluenzaA__AEL89350

SEQ ID NO: 116956 - RNA, 1410 nt, Artificial Sequence; identical to SEQ ID NO: 115049
  derived and/or modified CDS sequence (opt2) from neuraminidase__InfluenzaA__AEL89360

SEQ ID NO: 116957 - RNA, 1410 nt, Artificial Sequence; identical to SEQ ID NO: 115049
  derived and/or modified CDS sequence (opt2) from neuraminidase__InfluenzaA__AEL89370

SEQ ID NO: 116958 - RNA, 1410 nt, Artificial Sequence; identical to SEQ ID NO: 115049
  derived and/or modified CDS sequence (opt2) from neuraminidase__InfluenzaA__AEL89394

SEQ ID NO: 116959 - RNA, 1410 nt, Artificial Sequence; identical to SEQ ID NO: 115049
  derived and/or modified CDS sequence (opt2) from neuraminidase__InfluenzaA__AEL89404

SEQ ID NO: 116960 - RNA, 1410 nt, Artificial Sequence; identical to SEQ ID NO: 115049
  derived and/or modified CDS sequence (opt2) from neuraminidase__InfluenzaA__AEL89414

SEQ ID NO: 116961 - RNA, 1410 nt, Artificial Sequence; identical to SEQ ID NO: 115049
  derived and/or modified CDS sequence (opt2) from neuraminidase__InfluenzaA__AEL89424

SEQ ID NO: 116962 - RNA, 1410 nt, Artificial Sequence; identical to SEQ ID NO: 115049
  derived and/or modified CDS sequence (opt2) from neuraminidase__InfluenzaA__AEL89434

SEQ ID NO: 116963 - RNA, 1410 nt, Artificial Sequence; identical to SEQ ID NO: 115049
  derived and/or modified CDS sequence (opt2) from neuraminidase__InfluenzaA__AEL89444

SEQ ID NO: 116964 - RNA, 1410 nt, Artificial Sequence; identical to SEQ ID NO: 115049
  derived and/or modified CDS sequence (opt2) from neuraminidase__InfluenzaA__AEL89454

SEQ ID NO: 116965 - RNA, 1410 nt, Artificial Sequence; identical to SEQ ID NO: 115049
  derived and/or modified CDS sequence (opt2) from neuraminidase__InfluenzaA__AEL89464

SEQ ID NO: 116966 - RNA, 1410 nt, Artificial Sequence; identical to SEQ ID NO: 115049
  derived and/or modified CDS sequence (opt2) from neuraminidase__InfluenzaA__AEL89474

SEQ ID NO: 116967 - RNA, 1410 nt, Artificial Sequence
  derived and/or modified CDS sequence (opt2) from neuraminidase__InfluenzaA__AEL89484
augaaccccaaccagaagaucaucaccaucggcuccgucugcaugaccaucggcauggccaaccucaugcuccagaucggcaacaucaucuccaucuggaucucccacuccauccagcucggcaaccagaaccagaucgagaccugcaaccaguccgucaucaccuacgagaacaacaccugggucaaccagaccuacgucaacaucuccaacaccaacuucgccgccggccaguccgucgucuccgucaagcucgccggcaacuccucccucugccccgucuccggcugggccaucuacuccaaggacaacuccauccgcaucggcuccaagggcgacgucuucgucauccgcgagcccuucaucuccugcuccccccucgagugccgcaccuucuuccucacccagggcgcccuccucaacgacaagcacuccaacggcaccaucaaggaccgcucccccuaccgcacccucauguccugccccaucggcgagguccccucccccuacaacucccgcuucgaguccgucgccugguccgccuccgccugccacgacggcaucaacuggcucaccaucggcaucuccggccccgacaacggcgccgucgccguccucaaguacaacggcaucaucaccgacaccaucaaguccuggcgcaacaacauccuccgcacccaggaguccgagugcgccugcgucaacggcuccugcuucaccgucaugaccgacggccccuccgacggccaggccuccuacaagaucuuccgcaucgagaagggcaagaucgucaaguccgucgagaucaacgcccccaacuaccacuacgaggagugcuccugcuaccccgacuccuccgagaucaccugcgucugccgcgacaacuggcacggcuccaaccgccccugggucuccuucaaccagaaccucgaguaccagaucggcuacaucugcuccggcaucuucggcgacaacccccgccccaacgacaagaccggcuccugcggccccgucuccuccaacggcgccaacggcgucaagggcuucuccuucaaguacggcaacggcgucuggaucggccgcaccaaguccaucuccucccgcaacggcuucgagaugaucugggaccccaacggcuggaccggcaccgacaacaacuucuccaucaagcaggacaucgucggcaucaacgagugguccggcuacuccggcuccuucguccagcaccccgagcucaccggccucgacugcauccgccccugcuucugggucgagcucauccgcggccgccccaaggagaacaccaucuggaccuccggcuccuccaucuccuucugcggcgucaacuccgacaccgucggcugguccuggcccgacggcgccgagcuccccuucaccaucgacaaguga

SEQ ID NO: 116968 - RNA, 1410 nt, Artificial Sequence; identical to SEQ ID NO: 116838
  derived and/or modified CDS sequence (opt2) from neuraminidase__InfluenzaA__AEL89494

SEQ ID NO: 116969 - RNA, 1410 nt, Artificial Sequence; identical to SEQ ID NO: 116844
  derived and/or modified CDS sequence (opt2) from neuraminidase__InfluenzaA__AEL89514

SEQ ID NO: 116970 - RNA, 1410 nt, Artificial Sequence; identical to SEQ ID NO: 116822
  derived and/or modified CDS sequence (opt2) from neuraminidase__InfluenzaA__AEL89524

SEQ ID NO: 116971 - RNA, 1410 nt, Artificial Sequence
  derived and/or modified CDS sequence (opt2) from neuraminidase__InfluenzaA__AEL89534
augaaccccaaccagaagaucaucaccaucggcuccgucugcaugaccaucggcauggccaaccucauccuccagaucggcaacaucaucuccaucuggaucucccacuccauccagcucggcaaccagaaccagaucggcaccugcaaccaguccgucaucaccuacgagaacaacaccugggucaaccagaccuacgucaacaucuccaacaccaacuucgccgccggccaguccgucgucuccgucaagcucgccggcaacuccucccucugccccgucuccggcugggccaucuacuccaaggacaacuccauccgcaucggcuccaagggcgacgucuucgucauccgcgagcccuucaucuccugcuccccccucgagugccgcaccuucuuccucacccagggcgcccuccucaacgacaagcacuccaacggcaccaucaaggaccgcucccccuaccgcacccucauguccugccccaucggcgagguccccucccccuacaacucccgcuucgaguccgucgccugguccgccuccgccugccacgacggcaucaacuggcucaccaucggcaucuccggccccgacaacggcgccgucgccguccucaaguacaacggcaucaucaccgacaccaucaaguccuggcgcaacaacauccuccgcacccaggaguccgagugcgccugcgucaacggcuccugcuucaccgucaugaccgacggccccuccgacggccaggccuccuacaagaucuuccgcaucgagaagggcaagaucgucaaguccgucgagaucaacgcccccaacuaccacuacgaggagugcuccugcuaccccgacuccuccgagaucaccugcgucugccgcgacaacuggcacggcuccaaccgccccugggucuccuucaaccagaaccucgaguaccagaucggcuacaucugcuccggcaucuucggcgacaacccccgccccaacgacaagaccggcuccugcggccccgucuccuccaacggcgccaacggcgucaagggcuucuccuucaaguacggcaacggcgucuggaucggccgcaccaaguccaucuccucccgcaacggcuucgagaugaucugggaccccaacggcuggaccggcaccgacaacaacuucuccaagaagcaggacaucgucggcaucaacgagugguccggcuacuccggcuccuucguccagcaccccgagcucaccggccucgacugcauccgccccugcuucugggucgagcucauccgcggccgccccaaggagaacaccaucuggaccuccggcuccuccaucuccuucugcggcgucaacuccgacaccgucggcugguccuggcccgacggcgccgagcuccccuucaccaucgacaaguga

SEQ ID NO: 116972 - RNA, 1410 nt, Artificial Sequence; identical to SEQ ID NO: 116844
  derived and/or modified CDS sequence (opt2) from neuraminidase__InfluenzaA__AEL89544

SEQ ID NO: 116973 - RNA, 1410 nt, Artificial Sequence; identical to SEQ ID NO: 116844
  derived and/or modified CDS sequence (opt2) from neuraminidase__InfluenzaA__AEL89554

SEQ ID NO: 116974 - RNA, 1410 nt, Artificial Sequence
  derived and/or modified CDS sequence (opt2) from neuraminidase__InfluenzaA__AEL89564
augaaccccaaccagaagaucaucaccaucggcuccgucugcaucaccaucggcauggccaaccucauccuccagaucggcaacaucaucuccaucuggaucucccacuccauccagcucggcaaccagaaccagaucgagaccugcaaccaguccgucgucaccuacgagaacaacaccugggucaaccagaccuacgucaacaucuccaacaccaacuucgccgccggccaguccgucgucuccgucaagcucgccggcaacuccucccucugccccgucuccggcugggccaucuacuccaaggacaacuccauccgcaucggcuccaagggcgacgucuucgucauccgcgagcccuucaucuccugcuccccccucgagugccgcaccuucuuccucacccagggcgcccuccucaacgacaagcacuccaacggcaccaucaaggaccgcucccccuaccgcacccucauguccugccccaucggcgagguccccucccccuacaacucccgcuucgaguccgucgccugguccgccuccgccugccacgacggcaucuccuggcucaccaucggcaucuccggccccgacaacggcgccgucgccguccucaaguacaacggcaucaucaccgacaccaucaaguccuggcgcaacaacauccuccgcacccaggaguccgagugcgccugcgucaacggcuccugcuucaccgucaugaccgacggccccuccgacggccaggccuccuacaagaucuuccgcaucgagaagggcaagaucgucaaguccgucgagaugaacgcccccaacuaccacuacgaggagugcuccugcuaccccgacuccuccgagaucaccugcgucugccgcgacaacuggcacggcuccaaccgccccugggucuccuucaaccagaaccucgaguaccagaucggcuacaucugcuccggcaucuucggcgacaacccccgccccaacgacaagaccggcuccugcggccccgucuccuccaacggcgccaacggcgucaagggcuucuccuucaaguacggcaacggcgucuggaucggccgcaccaaguccaucuccucccgcaacggcuucgagaugaucugggaccccaacggcuggaccggcaccgacaacaacuucuccaucaagcaggacaucgucggcaucaacgagugguccggcuacuccggcuccuucguccagcaccccgagcucaccggccucgacugcauccgccccugcuucugggucgagcucauccgcggccgccccaaggagaacaccaucuggaccuccggcuccuccaucuccuucugcggcgucaacuccgacaccgucggcugguccuggcccgacggcgccgagcuccccuucaccaucgacaaguga

SEQ ID NO: 116975 - RNA, 1410 nt, Artificial Sequence; identical to SEQ ID NO: 116844
  derived and/or modified CDS sequence (opt2) from neuraminidase__InfluenzaA__AEL89574

SEQ ID NO: 116976 - RNA, 1410 nt, Artificial Sequence; identical to SEQ ID NO: 116844
  derived and/or modified CDS sequence (opt2) from neuraminidase__InfluenzaA__AEL89584

SEQ ID NO: 116977 - RNA, 1410 nt, Artificial Sequence; identical to SEQ ID NO: 113791
  derived and/or modified CDS sequence (opt2) from neuraminidase__InfluenzaA__AEL89604

SEQ ID NO: 116978 - RNA, 1410 nt, Artificial Sequence; identical to SEQ ID NO: 116293
  derived and/or modified CDS sequence (opt2) from neuraminidase__InfluenzaA__AEL89624

SEQ ID NO: 116979 - RNA, 1410 nt, Artificial Sequence
  derived and/or modified CDS sequence (opt2) from neuraminidase__InfluenzaA__AEL89634
augaaccccaaccagaagaucaucaccaucggcuccgucugcaucaccaucggcauggccaaccucauccuccagaucggcaacaucaucuccaucuggaucucccacuccauccagcucggcaaccagaaccagaucgagaccugcaaccaguccgucaucaccuacgagaacaacaccugggucaaccagaccuacgucaacaucuccaacaccaacuucgccgccggccaguccgucgucuccgucaagcucgccggcaacuccucccucugccccgucuccggcugggccaucuacuccaaggacaacuccauccgcaucggcuccaagggcgacgucuucgucauccgcgagcccuucaucuccugcuccccccucgagugccgcaccuucuuccucacccagggcgcccuccucaacgacaagcacuccaacggcaccaucaaggaccgcucccccuaccgcacccucauguccugccccaucggcgagguccccucccccuacaacucccgcuucgaguccgucgccugguccgccuccgccugccacgacggcaucuccuggcucaccaucggcaucuccggccccgacaacggcgccgucgccguccucaaguacaacggcaucaucaccgacaccaucaaguccuggcgcaacaacauccuccgcacccaggaguccgagugcgccugcgucaacggcuccugcuucaccgucaugaccgacggccccuccgacggccaggccuccuacaagaucuuccgcaucgagaagggcaagaucgucaaguccgucgagaugaacgcccccaacuaccacuacgaggagugcuccugcuaccccgacuccuccgagaucaccugcgucugccgcgacaacuggcacggcuccaaccgccccugggucuccuucaaccagaaccucgaguaccagaucggcuacaucugcuccggcaucuucggcgacaacccccgccccaacgacaagaccggcuccugcggccccgucuccuccaacggcgccaacggcgucaagggcuucuccuacaaguacggcaacggcgucuggaucggccgcaccaaguccaucuccucccgcaacggcuucgagaugaucugggaccccaacggcuggaccggcaccgacaacaacuucuccaucaagcaggacaucgucggcaucaacgagugguccggcuacuccggcuccuucguccagcaccccgagcucaccggccucgacugcauccgccccugcuucugggucgagcucauccgcggccgccccaaggagaacaccaucuggaccuccggcuccuccaucuccuucugcggcgucaacuccgacaccgucggcugguccuggcccgacggcgccgagcuccccuucaccaucgacaaguga

SEQ ID NO: 116980 - RNA, 1410 nt, Artificial Sequence; identical to SEQ ID NO: 115049
  derived and/or modified CDS sequence (opt2) from neuraminidase__InfluenzaA__AEL89644

SEQ ID NO: 116981 - RNA, 1410 nt, Artificial Sequence; identical to SEQ ID NO: 116745
  derived and/or modified CDS sequence (opt2) from neuraminidase__InfluenzaA__AEL89654

SEQ ID NO: 116982 - RNA, 1410 nt, Artificial Sequence; identical to SEQ ID NO: 116293
  derived and/or modified CDS sequence (opt2) from neuraminidase__InfluenzaA__AEL89664

SEQ ID NO: 116983 - RNA, 1410 nt, Artificial Sequence; identical to SEQ ID NO: 116293
  derived and/or modified CDS sequence (opt2) from neuraminidase__InfluenzaA__AEL89674

SEQ ID NO: 116984 - RNA, 1410 nt, Artificial Sequence; identical to SEQ ID NO: 116293
  derived and/or modified CDS sequence (opt2) from neuraminidase__InfluenzaA__AEL89694

SEQ ID NO: 116985 - RNA, 1410 nt, Artificial Sequence
  derived and/or modified CDS sequence (opt2) from neuraminidase__InfluenzaA__AEL89704
augaaccccaaccagaagaucaucaccaucggcuccgucugcaugaccaucggcauggccaaccucauccuccagaucggcaacaucauccucaucuggaucucccacuccauccagcucggcaaccagaaccagaucgagaccugcaaccaguccgucaucaccuacgagaacaacaccugggucaaccagaccuacgucaacaucuccaacaccaacuucgccgccggccaguccgucgucuccgucaagcucgccggcaacuccucccucugccccgucuccggcugggccaucuacuccaaggacaacuccauccgcaucggcuccaagggcgacgucuucgucauccgcgagcccuucaucuccugcuccccccucgagugccgcaccuucuuccucacccagggcgcccuccucaacgacaagcacuccaacggcaccaucaaggaccgcucccccuaccgcacccucauguccugccccaucggcgagguccccucccccuacaacucccgcuucgaguccgucgccugguccgccuccgccugccacgacggcaucaacuggcucaccaucggcaucuccggccccgacaacggcgccgucgccguccucaaguacaacggcaucaucaccgacaccaucaaguccuggcgcaacaacauccuccgcacccaggaguccgagugcgccugcgucaacggcuccugcuucaccgucaugaccgacggccccaacgacggccaggccuccuacaagaucuuccgcaucgagaagggcaagaucgucaaguccgucgagaugaacgcccccaacuaccacuacgaggagugcuccugcuaccccgacuccuccgagaucaccugcgucugccgcgacaacuggcacggcuccaaccgccccugggucuccuucaaccagaaccucgaguaccagaucggcuacaucugcuccggcaucuucggcgacaacccccgccccaacgacaagaccggcuccugcggccccgucuccuccaacggcgccaacggcgucaagggcuucuccuucaaguacggcaacggcgucuggaucggccgcaccaaguccaucuccucccgcaacggcuucgagaugaucugggaccccaacggcuggaccggcaccgacaacaacuucuccgucaagcaggacaucaucggcaucaacgagugguccggcuacuccggcuccuucguccagcaccccgagcucaccggccucgacugcauccgccccugcuucugggucgagcucauccgcggccgccccaaggagaacaccaucuggaccuccggcuccuccaucuccuucugcggcgucaacuccgacaccgucggcugguccuggcccgacggcgccgagcuccccuucaccaucgacaaguga

SEQ ID NO: 116986 - RNA, 1410 nt, Artificial Sequence; identical to SEQ ID NO: 116985
  derived and/or modified CDS sequence (opt2) from neuraminidase__InfluenzaA__AEL89714

SEQ ID NO: 116987 - RNA, 1410 nt, Artificial Sequence; identical to SEQ ID NO: 116293
  derived and/or modified CDS sequence (opt2) from neuraminidase__InfluenzaA__AEL89744

SEQ ID NO: 116988 - RNA, 1410 nt, Artificial Sequence
  derived and/or modified CDS sequence (opt2) from neuraminidase__InfluenzaA__AEL89754
augaaccccaaccagaagaucaucaccaucggcuccgucugcaucaccaucggcauggccaaccucauccuccagaucggcaacaucaucuccaucuggaucucccacuccauccagcucggcaaccagaaccagaucgagaccugcaaccaguccgucaucaccuacgagaacaacaccugggucaaccagaccuacgucaacaucuccaacaccaacuucgccgccggccaguccgucgucuccgucaagcucgccggcaacuccucccucugccccgucuccggcugggccaucuacuccaaggacaacuccauccgcaucggcuccaagggcgacgucuucgucauccgcgagcccuucaucuccugcuccccccucgagugccgcaccuucuuccucacccagggcgcccuccucaacgacaagcacuccaacggcaccaucaaggaccgcucccccuaccgcacccucauguccugccccaucggcgagguccccucccccuacaacucccgcuucgaguccgucgccugguccgccuccgccugccacgacggcaucuccuggcucaccaucggcaucuccggccccgacaacggcgccgucgccguccucaaguacaacggcaucaucaccgacaccaucaaguccuggcgcaacaacauccuccgcacccaggaguccgagugcgccugcgucaacggcuccugcuucaccgucaugaccgacggccccuccgacggccaggccuccuacaagaucuuccgcaucgagaagggcaagaucgucaaguccgucgagaugaacgcccccaacuaccacuacgaggagugcuccugcuaccccgacuccuccgagaucaccugcgucugccgcgacaacuggcacggcuccaaccgccccugggucuccuucaaccagaaccucgaguaccagaucggcuacaucugcuccggcaucuucggcgacaacccccgccccaacgacaagaccggcuccugcggccccgucuccuccaacggcgccaacggcgucaagggcuucuccuucaaguacggcaacggcgucuggaucggccgcaccaaguccaucuccucccgcaacggcuucgagaugaucugggaccccaacggcuggaccggcaccgacaacaacuucuccaucaagcaggacaucgucggcaucaacgagugguccggcuacuccggcuccuucguccagcaccccgagcucaccggccucgacugcauccgccccugcuucugggucgagcucauccgcggccgccccaaggagaacaccaucuggaccuccggcuccuccaucuccuucugcggcgucaacuccgacaccgucggcugguccuggcccgacggcgccgagcuccccuucaucaucgacaaguga

SEQ ID NO: 116989 - RNA, 1410 nt, Artificial Sequence; identical to SEQ ID NO: 115049
  derived and/or modified CDS sequence (opt2) from neuraminidase__InfluenzaA__AEL89774

SEQ ID NO: 116990 - RNA, 1410 nt, Artificial Sequence
  derived and/or modified CDS sequence (opt2) from neuraminidase__InfluenzaA__AEL89784
augaaccccaaccagaagaucaucaccaucggcuccgucugcaugaccaucggcauggccaaccucauccuccagaucggcaacaucaucuccaucuggaucucccacuccauccagcucggcaaccagaaccagaucgagaccugcaaccaguccgucaucaccuacgagaacaacaccugggucaaccagaccuacgucaacaucuccaacaccaacuucgccgccggccaguccgucgucuccgucaagcucgccggcaacuccucccucugccccgucuccggcugggccaucuacuccaaggacaacuccauccgcaucggcuccaagggcgacgucuucgucauccgcgagcccuucaucuccugcuccccccucgagugccgcaccuucuuccucacccagggcgcccuccucaacgacaagcacuccaacggcaccaucaaggaccgcucccccuaccgcacccucauguccugccccaucggcgagguccccucccccuacaacucccgcuucgaguccgucgccugguccgccuccgccugccacgacggcaucaacuggcucaccaucggcaucuccggccccgacaacggcgccgucgccguccucaaguacaacggcaucaucaccgacaccaucaaguccuggcgcaacaacauccuccgcacccaggaguccgagugcgccugcgucaacggcuccugcuucaccgucaugaccgacggccccuccgacggccaggccuccuacaagaucuuccgcaucgagaagggcaagaucgucaaguccgucgagaugaacgcccccaacuaccacuacgaggagugcuccugcuaccccgacuccuccgagaucaccugcgucugccgcgacaacuggcacggcuccaaccgccccugggucuccuucaaccagaaccucgaguaccagaucggcuacaucugcuccggcaucuucggcgacaacccccgccccaacgacaagaccggcuccugcggccccgucuccuccaacggcgccaacggcgucaagggcuucuccuucaaguacggcaacggcgucuggaucggccgcaccaaguccaucucccuccgcaacggcuucgagaugaucugggaccccaacggcuggaccggcaccgacaacaacuucuccgucaagcaggacaucaucggcaucaacgagugguccggcuacuccggcuccuucguccagcaccccgagcucaccggccucgacugcauccgccccugcuucugggucgagcucauccgcggccgccccaaggagaacaccaucuggaccuccggcuccuccaucuccuucugcggcgucaacuccgacaccgucggcugguccuggcccgacggcgccgagcuccccuucaccaucgacaaguga

SEQ ID NO: 116991 - RNA, 1410 nt, Artificial Sequence
  derived and/or modified CDS sequence (opt2) from neuraminidase__InfluenzaA__AEL89794
augaaccccaaccagaagaucaucaccaucggcuccgucugcaugaccaucggcauggccaaccucauccuccagaucggcaacaucaucuccaucuggaucucccacuccauccagcucggcaaccagucccagaucgagaccugcaaccaguccgucaucaccuacgagaacaacaccugggucaaccagaccuacgucaacaucuccaacaccaacuucgccgccggccaguccgucgucuccgucaagcucgccggcaacuccucccucugccccgucuccggcugggccaucuacuccaaggacaacuccauccgcaucggcuccaagggcgacgucuucgucauccgcgagcccuucaucuccugcuccccccucgagugccgcaccuucuuccucacccagggcgcccuccucaacgacaagcacuccaacggcaccaucaaggaccgcucccccuaccgcacccucauguccugccccaucggcgagguccccucccccuacaacucccgcuucgaguccgucgccugguccgccuccgccugccacgacggcaucaacuggcucaccaucggcaucuccggccccgacaacggcgccgucgccguccucaaguacaacggcaucaucaccgacaccaucaaguccuggcgcaacaacauccuccgcacccaggaguccgagugcgccugcgucaacggcuccugcuucaccaucaugaccgacggccccuccgacggccaggccuccuacaagaucuuccgcaucgagaagggcaagaucgucaaguccgucgagaugaacgcccccaacuaccacuacgaggagugcuccugcuaccccgacuccuccgagaucaccugcgucugccgcgacaacuggcacggcuccaaccgccccugggucuccuucaaccagaaccucgaguaccagaucggcuacaucugcuccggcaucuucggcgacaacccccgccccaacgacaagaccggcuccugcggccccgucuccuccaacggcgccaacggcgucaagggcuucuccuucaaguacggcaacggcgucuggaucggccgcaccaaguccaucuccucccgcaagggcuucgagaugaucugggaccccaacggcuggaccggcaccgacaacaacuucuccaucaagcaggacaucgucggcaucaacgagugguccggcuacuccggcuccuucguccagcaccccgagcucaccggccucgacugcauccgccccugcuucugggucgagcucauccgcggccgccccaaggagaacaccaucuggaccuccggcuccuccaucuccuucugcggcgucaacuccgacgccgucggcugguccuggcccgacggcgccgagcuccccuucaccaucgacaaguga

SEQ ID NO: 116992 - RNA, 1410 nt, Artificial Sequence; identical to SEQ ID NO: 116745
  derived and/or modified CDS sequence (opt2) from neuraminidase__InfluenzaA__AEL89804

SEQ ID NO: 116993 - RNA, 1410 nt, Artificial Sequence
  derived and/or modified CDS sequence (opt2) from neuraminidase__InfluenzaA__AEL89815
augaaccccaaccagaagaucaucaccaucggcuccgucugcaugaccaucggcauggccaaccucauccuccagaucggcaacaucaucuccaucuggaucucccacuccauccagcucggcaaccagaaccagaucgagaccugcaaccaguccgucaucaccuacgagaacaacaccugggucaaccagaccuacgucaacaucuccaacaccaacuucgccgccggccaguccgucgucuccgucaagcucgccggcaacuccucccucugccccgucuccggcugggccaucuacuccaaggacaacuccauccgcaucggcuccaagggcgacgucuucgucauccgcgagcccuucaucuccugcuccccccucgagugccgcaccuucuuccucacccagggcgcccuccucaacgacaagcacuccaacggcaccaucaaggaccgcucccccuaccgcacccucauguccugccccaucggcgagguccccucccccuacaacucccgcuucgaguccgucgccugguccgccuccgccugccacgacggcaucaacuggcucaccaucggcaucuccggccccgacaacggcgccgucgccguccucaaguacaacggcaucaucaccgacaccaucaaguccuggcgcaacaacauccuccgcacccaggaguccgagugcgccugcgucaacggcuccugcuucaccgucaugaccgacggccccuccgacggccaggccuccuacaagaucuuccgcaucgagaagggcaagaucgucaaguccgucgagaugaacgcccccaacuaccacuacgaggagugcuccugcuaccccgacuccuccgagaucaccugcgucugccgcgacaacuggcacggcuccaaccgccccugggucuccuucaaccagaaccucgaguaccagaucggcuacaucugcuccggcaucuucggcgacaacccccgccccaacgacaagaccggcuccugcggccccgucuccuccaacggcgccaacggcgucaagggcuucuccuucaaguacggcaacggcgucuggaucggccgcaccaaguccaucuccucccgcaacggcuucgagaugaucugggaccccaacggcuggaccggcaccgacaacaacuucuccgucaagcaggacaucaucggcaucaacgagugguccggcuacuccggcuccuucguccagcaccccgagcucaccggccucgacugcauccgccccugcuucugggucgagcucauccgcggccgccccaaggagaacaccaucuggaccuccggcuccuccaucuccuucugcggcgucaacuccgacaccgucggcugguccuggcccgacggcgccgagcuccccuucaccaucgacaaguga

SEQ ID NO: 116994 - RNA, 1410 nt, Artificial Sequence
  derived and/or modified CDS sequence (opt2) from neuraminidase__InfluenzaA__AEL89825
augaaccccaaccagaagaucaucaccaucggcuccgucugcaugaccaucggcauggccaaccucauccuccagaucggcaacaucaucuccaucuggaucucccacuccauccagcucggcaaccagaaccagaucgagaccugcaaccaguccgucaucaccuacgagaacaacaccugggucaaccagaccuacgucaacaucuccaacaccaacuucgccgccggccaguccgucgucuccgucaagcucgccggcaacuccucccucugccccgucuccggcugggccaucuacuccaaggacaacuccauccgcaucggcuccaagggcgacgucuucgucauccgcgagcccuucaucuccugcuccccccucgagugccgcaccuucuuccucacccagggcgcccuccucaacgacaagcacuccaacggcaccaucaaggaccgcucccccuaccgcacccucauguccugccccaucggcgagguccccucccccuacaacucccgcuucgaguccgucgccugguccgccuccgccugccacgacggcaucaacuggcucaccaucggcaucuccggccccgacaacggcgccgucgccguccucaaguacaacggcaucaucaccgacaccaucaaguccuggcgcaacaacauccuccgcacccaggaguccgagugcgccugcgucaacggcuccugcuucaccgucaugaccgacggccccuccgacggccaggccuccuacaagaucuuccgcaucgagaagggcaagaucgucaaguccgucgagaugaacgcccccaacuaccacuacgaggagugcuccugcuaccccgacuccuccgagaucaccugcgucugccgcgacaacuggcacggcgccaaccgccccugggucuccuucaaccagaaccucgaguaccagaucggcuacaucugcuccggcaucuucggcgacaacccccgccccaacgacaagaccggcuccugcggccccgucuccuccaacggcgccaacggcgucaagggcuucuccuucaaguacggcaacggcgucuggaucggccgcaccaaguccaucuccucccgcaacggcuucgagaugaucugggaccccaacggcuggaccggcaccgacaacaacuucuccaucaagcaggacaucgucggcaucaacgagugguccggcuacuccggcuccuucguccagcaccccgagcucaccggccucgacugcauccgccccugcuucugggucgagcucauccgcggccgccccaaggagaacaccaucuggaccuccggcuccuccaucuccuucugcggcgucaacuccgacaccgucggcugguccuggcccgacggcgccgagcuccccuucaccaucgacaaguga

SEQ ID NO: 116995 - RNA, 1410 nt, Artificial Sequence
  derived and/or modified CDS sequence (opt2) from neuraminidase__InfluenzaA__AEL89835
augaaccccaaccagaagaucaucaccaucggcuccgucugcaugaccaucggcauggccaaccucauccuccagaucggcaacaucaucuccaucuggaucucccacuccauccagcucggcaaccagucccagaucgagaccugcaaccaguccgucaucaccuacgagaacaacaccugggucaaccagaccuacgucaacaucuccaacaccaacuucgccgccggccaguccgucgucuccgucaagcucgccggcaacuccucccucugccccgucuccggcugggccaucuacuccaaggacaacuccauccgcaucggcuccaagggcgacgucuucgucauccgcgagcccuucaucuccugcuccccccucgagugccgcaccuucuuccucacccagggcgcccuccucaacgacaagcacuccaacggcaccaucaaggaccgcucccccuaccgcacccucauguccugccccaucggcgagguccccucccccuacaacucccgcuucgaguccgucgccugguccgccuccgccugccacgacggcaucaacuggcucaccaucggcaucuccggccccgacaacggcgccgucgccguccucaaguacaacggcaucaucaccgacaccaucaaguccuggcgcaacaacauccuccgcacccaggaguccgagugcgucugcgucaacggcuccugcuucaccaucaugaccgacggccccuccgacggccaggccuccuacaagaucuuccgcaucgagaagggcaagaucgucaaguccgucgagaugaacgcccccaacuaccacuacgaggagugcuccugcuaccccgacuccuccgagaucaccugcgucugccgcgacaacuggcacggcuccaaccgccccugggucuccuucaaccagaaccucgaguaccagaucggcuacaucugcuccggcaucuucggcgacaacccccgccccaacgacaagaccggcuccugcggccccgucuccuccaacggcgccaacggcgucaagggcuucuccuucaaguacggcaacggcgucuggaucggccgcaccaaguccaucuccucccgcaagggcuucgagaugaucugggaccccaacggcuggaccggcaccgacaacaacuucuccaucaagcaggacaucgucggcaucaacgagugguccggcuacuccggcuccuucguccagcaccccgagcucaccggccucgacugcauccgccccugcuucugggucgagcucauccgcggccgccccaaggagaacaccaucuggaccuccggcuccuccaucuccuucugcggcgucaacuccgacaccgucggcugguccuggcccgacggcgccgagcuccccuucaccaucgacaaguga

SEQ ID NO: 116996 - RNA, 1410 nt, Artificial Sequence
  derived and/or modified CDS sequence (opt2) from neuraminidase__InfluenzaA__AEL89845
augaaccccaaccagaagaucaucaccaucggcuccgucugcaugaccaucggcauggccaaccucauccuccagaucggcaacaucaucuccaucuggaucucccacuccauccagcucggcaacaagaaccagaucgagaccugcaaccaguccgucaucaccuacgagaacaacaccugggucaaccagaccuacgucaacaucuccaacaccaacuucgccaccggccaguccgucgucuccgucaagcucgccggcaacuccucccucugccccgucuccggcugggccaucuacuccaaggacaacuccauccgcaucggcuccaagggcgacgucuucgucauccgcgagcccuucaucuccugcuccccccucgagugccgcaccuucuuccucacccagggcgcccuccucaacgacaagcacuccaacggcaccaucaaggaccgcucccccuaccgcacccucauguccugccccaucggcgaggcccccucccccuacaacucccgcuucgaguccgucgccugguccgccuccgccugccacgacggcaucaacuggcucaccaucggcaucuccggccccgacaacggcgccgucgccguccucaaguacaacggcaucaucaccgacaccaucaaguccuggcgcaacaacauccuccgcacccaggaguccgagugcgccugcgucaacggcuccugcuucaccgucaugaccgacggccccuccgacggccaggccuccuacaagaucuuccgcaucgagaagggcaagaucgucaaguccgucgagaugaacgcccccaacuaccacuacgaggagugcuccugcuaccccgacuccuccgagaucaccugcgucugccgcgacaacuggcacggcuccaaccgccccugggucuccuucaaccagaaccucgaguaccagaucggcuacaucugcuccggcaucuucggcgacaacccccgccccaacgacaagaagggcuccugcggccccgucuccuccaacggcgccaacggcgucaagggcuucuccuucaaguacggcaacggcgucuggaucggccgcaccaaguccaucuccucccgcaacggcuucgagaugaucugggaccccaacggcuggaccggcaccgacaacaacuucuccaucaagcaggacaucgucggcaucaacgagugguccggcuacuccggcuccuucguccagcaccccgagcucaccggccucgacugcauccgccccugcuucugggucgagcucauccgcggccgccccaaggagaacaccaucuggaccuccggcuccuccaucuccuucugcggcgucaacuccgacaccgucggcugguccuggcccgacggcgccgagcuccccuucaccaucgacaaguga

SEQ ID NO: 116997 - RNA, 1410 nt, Artificial Sequence; identical to SEQ ID NO: 116994
  derived and/or modified CDS sequence (opt2) from neuraminidase__InfluenzaA__AEL89855

SEQ ID NO: 116998 - RNA, 1410 nt, Artificial Sequence; identical to SEQ ID NO: 116293
  derived and/or modified CDS sequence (opt2) from neuraminidase__InfluenzaA__AEL93581

SEQ ID NO: 116999 - RNA, 1410 nt, Artificial Sequence
  derived and/or modified CDS sequence (opt2) from neuraminidase__InfluenzaA__AEL93591
augaaccccaaccagaagaucaucaccaucggcuccgucugcaugaccaucggcauggccaaccucauccuccagaucggcaacaucaucuccaucuggaucucccacuccauccagcucggcaaccagaaccagaucgagaccugcaaccaguccgucaucaccuacgagaacaacaccugggucaaccagaccuacgucaacaucuccaacaccaacuucgccgccggccaguccgucgucuccgucaaccucgccggcaacuccucccucugccccgucuccggcugggccaucuacuccaaggacaacuccauccgcaucggcuccaagggcgacgucuucgucauccgcgagcccuucaucuccugcuccccccucgagugccgcaccuucuuccucacccagggcgcccuccucaacgacaagcacuccaacggcaccaucaaggaccgcucccccuaccgcacccucauguccugccccaucggcgagguccccucccccuacaacucccgcuucgaguccgucgccugguccgccuccgccugccacgacggcaucaacuggcucaccaucggcaucuccggccccgacaacggcgccgucgccguccucaaguacaacggcaucaucaccgacaccaucaaguccuggcgcaacaacauccuccgcacccaggaguccgagugcgccugcgucaacggcuccugcuucaccaucaugaccgacggccccuccgacggccaggccuccuacaagaucuuccgcaucgagaagggcaagaucgucaaguccgucgagaugaacgcccccaacuaccacuacgaggagugcuccugcuaccccgacuccuccgagaucaccugcgucugccgcgacaacuggcacggcuccaaccgccccugggucuccuucaaccagaaccucgaguaccagaucggcuacaucugcuccggcaucuucggcgacaacccccgccccaacgacaagaccggcuccugcggccccgucuccuccaacggcgccaacggcgucaagggcuucuccuucaaguacggcaacggcgucuggaucggccgcaccaaguccaucuccucccgcaagggcuucgagaugaucugggaccccaacggcuggaccggcaccgacaacaacuucuccaucaagcaggacaucgucggcaucaacgagugguccggcuacuccggcuccuucguccagcaccccgagcucaccggccucgacugcauccgccccugcuucugggucgagcucauccgcggccgccccaaggagaacaccaucuggaccuccggcuccuccaucuccuucugcggcgucaacuccgacaccgucggcugguccuggcccgacggcgccgagcuccccuucaccaucgacaaguga

SEQ ID NO: 117000 - RNA, 1410 nt, Artificial Sequence; identical to SEQ ID NO: 116745
  derived and/or modified CDS sequence (opt2) from neuraminidase__InfluenzaA__AEL93601

SEQ ID NO: 117001 - RNA, 1410 nt, Artificial Sequence; identical to SEQ ID NO: 116293
  derived and/or modified CDS sequence (opt2) from neuraminidase__InfluenzaA__AEL93611

SEQ ID NO: 117002 - RNA, 1410 nt, Artificial Sequence; identical to SEQ ID NO: 116293
  derived and/or modified CDS sequence (opt2) from neuraminidase__InfluenzaA__AEL93621

SEQ ID NO: 117003 - RNA, 1410 nt, Artificial Sequence; identical to SEQ ID NO: 116293
  derived and/or modified CDS sequence (opt2) from neuraminidase__InfluenzaA__AEL93631

SEQ ID NO: 117004 - RNA, 1410 nt, Artificial Sequence
  derived and/or modified CDS sequence (opt2) from neuraminidase__InfluenzaA__AEL93641
augaaccccaaccagaagaucaucaccaucggcuccgucugcaucaccaucggcauggccaaccucauccuccagaucggcaacaucaucuccaucuggaucucccacuccauccagcucggcaaccagaaccagaucgagaccugcaaccaguccgucaucaccuacgagaacaacaccugggucaaccagaccuacgucaacaucuccaacaccaacuucgccgccggccaguccgucgucuccgucaagcucgccggcaacuccucccucugccccgucuccggcugggccaucuacuccaaggacaacuccauccgcaucggcuccaagggcgacgucuucgucauccgcgagcccuucaucuccugcuccccccucgagugccgcaccuucuuccucacccagggcgcccuccucaacgacaagcacuccaacggcaccaucaaggaccgcucccccuaccgcacccucauguccugccccaucggcgagguccccucccccuacaacucccgcuucgaguccgucgccugguccgccuccgccugccacgacggcaucuccuggcucaccaucggcaucuccggccccgacaacggcgccgucgccguccucaaguacaacggcaucaucaccgacaccaucaaguccuggcgcaacaacauccuccgcacccaggaguccgagugcgccugcgucaacggcuccugcuucaccgucaugaccgacggccccuccgacggccaggccuccuacaagaucuuccgcaucgagaagggcaagaucgucaaguccgucgagaugaacgcccccaacuaccacuacgaggagugcuccugcuaccccgacuccuccgagaucaccugcgucugccgcgacaacuggcacggcuccaaccgccccugggucuccuucaaccacaaccucgaguaccagaucggcuacaucugcuccggcaucuucggcgacaacccccgccccaacgacaagaccggcuccugcggccccgucuccuccaacggcgccaacggcgucaagggcuucuccuucaaguacggcaacggcgucuggaucggccgcaccaaguccaucuccucccgcaacggcuucgagaugaucugggaccccaacggcuggaccggcaccgacaacaacuucuccaucaagcaggacaucgucggcaucaacgagugguccggcuacuccggcuccuucguccagcaccccgagcucaccggccucgacugcauccgccccugcuucugggucgagcucauccgcggccagcccaaggagaacaccaucuggaccuccggcuccuccaucuccuucugcggcgucaacuccgacaccgucggcugguccuggcccgacggcgccgagcuccccuucaccaucgacaaguga

SEQ ID NO: 117005 - RNA, 1410 nt, Artificial Sequence; identical to SEQ ID NO: 116844
  derived and/or modified CDS sequence (opt2) from neuraminidase__InfluenzaA__AEL94890

SEQ ID NO: 117006 - RNA, 1410 nt, Artificial Sequence
  derived and/or modified CDS sequence (opt2) from neuraminidase__InfluenzaA__AEL95429
augaaccccaaccagaagaucaucaccaucggcuccgucugcaugaccaucggcauggccaaccucauccuccagaucggcaacaucaucuccaucuggaucucccacuccauccagcucggcaaccagucccagaucgagaccugcaaccaguccgucaucaccuacgagaacaacaccugggucaaccagaccuacgucaacaucuccaacaccaacuucgccgccggccaguccgucgucuccgucaagcucgccggcaacuccucccucugccccgucuccggcugggccaucuacuccaaggacaacuccauccgcaucggcuccaagggcgacgucuucgucauccgcgagcccuucaucuccugcuccccccucgagugccgcaccuucuuccucacccagggcgcccuccucaacgacaagcacuccaacggcaccaucaaggaccgcuccccccaccgcacccucauguccugccccaucggcgagguccccucccccuacaacucccgcuucgaguccgucgccugguccgccuccgccugccacgacggcaucaacuggcucaccaucggcaucuccggccccgacaacggcgccgucgccguccucaaguacaacggcaucaucaccgacaccaucaaguccuggcgcaacaacauccuccgcacccaggaguccgagugcgccugcgucaacggcuccugcuucaccaucaugaccgacggccccuccgacggccaggccuccuacaagaucuuccgcaucgagaagggcaagaucgucaaguccgucgagaugaacgcccccaacuaccacuacgaggagugcuccugcuaccccgacuccuccgagaucaccugcgucugccgcgacaacuggcacggcuccaaccgccccugggucuccuucaaccagaaccucgaguaccagaucggcuacaucugcuccggcaucuucggcgacaacccccgccccaacgacaagaccggcuccugcggccccgucuccuccaacggcgccaacggcgucaagggcuucuccuucaaguacggcaacggcgucuggaucggccgcaccaaguccaucuccucccgcaagggcuucgagaugaucugggaccccaacggcuggaccggcaccgacaacaacuucuccaucaagcaggacaucgucggcaucaacgagugguccggcuacuccggcuccuucguccagcaccccgagcucaccggccucgacugcauccgccccugcuucugggucgagcucauccgcggccgccccaaggagaacaccaucuggaccuccggcuccuccaucuccuucugcggcgucaacuccgacaccgucggcugguccuggcccgacggcgccgagcuccccuucaccaucgacaaguga

SEQ ID NO: 117007 - RNA, 1410 nt, Artificial Sequence
  derived and/or modified CDS sequence (opt2) from neuraminidase__InfluenzaA__AEL97634
augaaccccaaccagaagaucaucaccaucggcuccgucugcaugaccaucggcauggccaaccucauccuccagaucggcaacaucaucuccaucugggucucccacuccauccagcucggcaaccagaaccagaucgagaccugcaaccaguccgucaucaccuacgagaacaacaccugggucaaccagaccuacgucaacaucuccaacaccaacuucgccgccggccaguccgucgucuccgucaagcucgccggcaacuccucccucugccccgucuccggcugggccaucuacuccaaggacaacuccauccgcaucggcuccaagggcgacgucuucgucauccgcgagcccuucaucuccugcuccccccucgagugccgcaccuucuuccucacccagggcgcccuccucaacgacaagcacuccaacggcaccaucaaggaccgcucccccuaccgcacccucauguccugccccaucggcgagguccccucccccuacaacucccgcuucgaguccgucgccugguccgccuccgccugccacgacggcaucaacuggcucaccaucggcaucuccggccccgacaacggcgccgucgccguccucaaguacaacggcaucaucaccgacaccaucaaguccuggcgcaacaacauccuccgcacccaggaguccgagugcgccugcgucaacggcuccugcuucaccgucaugaccgacggccccuccgacggccaggccuccuacaagaucuuccgcaucgagaagggcaagaucgucaaguccgucgagaugaacgcccccaacuaccacuacgaggagugcuccugcuaccccgacuccuccgagaucaccugcgucugccgcgacaacuggcacggcuccaaccgccccugggucuccuucaaccagaaccucgaguaccagaucggcuacaucugcuccggcaucuucggcgacaacccccgccccaacgacaagaccggcuccugcggccccgucuccuccaacggcgccaacggcgucaagggcuucuccuucaaguacggcaacggcgucuggaucggccgcaccaaguccaucuccucccgcaacggcuucgagaugaucugggaccccaacggcuggaccggcaccgacaacaacuucuccaucaagcaggacaucgucggcgucaacgagugguccggcuacuccggcuccuucguccagcaccccgagcucaccggccucgacugcauccgccccugcuucugggucgagcucauccgcggccgccccaaggagaacaccaucuggaccuccggcuccuccaucuccuucugcggcgucaacuccgacaccgucggcugguccuggcccgacggcgccgagcuccccuucaccaucgacaaguga

SEQ ID NO: 117008 - RNA, 1410 nt, Artificial Sequence; identical to SEQ ID NO: 112774
  derived and/or modified CDS sequence (opt2) from neuraminidase__InfluenzaA__AEL99667

SEQ ID NO: 117009 - RNA, 1410 nt, Artificial Sequence; identical to SEQ ID NO: 112774
  derived and/or modified CDS sequence (opt2) from neuraminidase__InfluenzaA__AEL99677

SEQ ID NO: 117010 - RNA, 1410 nt, Artificial Sequence; identical to SEQ ID NO: 111812
  derived and/or modified CDS sequence (opt2) from neuraminidase__InfluenzaA__AEM53471

SEQ ID NO: 117011 - RNA, 1413 nt, Artificial Sequence; identical to SEQ ID NO: 112489
  derived and/or modified CDS sequence (opt2) from neuraminidase__InfluenzaA__AEM60040

SEQ ID NO: 117012 - RNA, 1413 nt, Artificial Sequence; identical to SEQ ID NO: 112079
  derived and/or modified CDS sequence (opt2) from neuraminidase__InfluenzaA__AEM60061

SEQ ID NO: 117013 - RNA, 1410 nt, Artificial Sequence
  derived and/or modified CDS sequence (opt2) from neuraminidase__InfluenzaA__AEM60072
augaaccccaaccagaagaucaucaccaucggcuccgucucccucaccaucgccaccaucugcuuccucaugcagaucgccauccucgucaccaccgucacccuccacuucaagcaguacgagugcuccuccccccccaacaaccaggucaugcccugcgagcccaccaucaucgagcgcaacaucaccgagaucgucuaccucaccaacaccaccaucgagaaggagaucugccccaagcucgucgaguaccgcaacugguccaagccccagugcaagaucaccggcuucgcccccuucuccaaggacaacuccauccgccucuccgccggcggcgacaucugggucacccgcgagcccuacgucuccugcgaccccggcaagugcuaccaguucgcccucggccagggcaccacccucaacaaccgccacuccaacgacaccguccacgaccgcacccccuaccgcacccuccucaugaacgagcucggcguccccuuccaccucggcaccaagcaggucugcaucgccugguccuccuccuccugccacgacggcaaggccuggcuccacgucugcgucaccggccacgacgagaacgccaccgccuccuucaucuacgacggccgccucgucgacuccaucggcuccugguccaagaacauccuccgcacccaggaguccgagugcgucugcaucaacggcaccugcaccgucgucaugaccgacggcuccgccuccgagcgcgccgacaccaagauccucuucaucgaggagggcaagaucguccacaucuccccccucuccggcuccgcccagcacgucgaggagugcuccugcuacccccgcuaccccggcguccgcugcgucugccgcgacaacuggaagggcuccaaccgccccaucgucgacaucaacgucaaggacuacuccaucgucuccuccuacgucugcuccggccucgucggcgacaccccccgcaagaacgaccgcuccuccuccuccuacugccgcaaccccaacaacgagaagggcucccacggcgucaagggcugggccuucgacgacggcaacgacgucuggaugggccgcaccaucggcgaggagcuccgcuccggcuacgagaccuucaaggucaucggcggcugguccacccccaacuccaagcuccagaucaaccgccaggucaucgucgacuccggcaaccgcuccggcuacuccggcaucuucuccgucgagggcaaguccugcaucaaccgcugcuucuacgucgagcucauccgcggccgcgagcaggagacccgcgucugguggaccuccaacuccaucgucgucuucugcggcaccuccggcaccuacggcaccggcuccuggcccgacggcgccgacaucaaccucaugcccaucuga

SEQ ID NO: 117014 - RNA, 1410 nt, Artificial Sequence; identical to SEQ ID NO: 112774
  derived and/or modified CDS sequence (opt2) from neuraminidase__InfluenzaA__AEM62774

SEQ ID NO: 117015 - RNA, 1410 nt, Artificial Sequence; identical to SEQ ID NO: 112774
  derived and/or modified CDS sequence (opt2) from neuraminidase__InfluenzaA__AEM62783

SEQ ID NO: 117016 - RNA, 1410 nt, Artificial Sequence
  derived and/or modified CDS sequence (opt2) from neuraminidase__InfluenzaA__AEM62792
augaaccccaaccagaagaucaucaccaucggcuccgucugcaugaccaucggcauggccaaccucauccuccagaucggcaacaucaucuccaucuggaucucccacuccauccagcucggcucccagaaccagaucgagaccugcaaccaguccgucaucaccuacgagaacaacaccugggucaaccagaccuacgucaacaucuccaacaccaacuucgccgccggccaguccgucaucuccguccgccucgccggcaacuccucccucugccccgucuccggcugggccaucuacuccaaggacaacuccauccgcaucggcuccaagggcgacgucuucgucauccgcgagcccuucaucuccugcuccccccucgagugccgcaccuucuuccucacccagggcgcccuccucaacgacaagcacuccaacggcaccaucaaggaccgcucccccuaccgcacccucauguccugccccaucggcgagguccccucccccuacaacucccgcuucgaguccgucgccugguccgccuccgccugccacgacggcaucaacuggcucaccaucggcaucuccggccccgacaacggcgccgucgccguccucaaguacaacggcaucaucaccgacaccaucaaguccuggcgcaacaacauccuccgcacccaggaguccgagugcgccugcgucaacggcuccugcuucaccgucaugaccgacggccccuccgacggccaggccuccuacaagaucuuccgcaucgagaagggcaagaucgucaaguccgucgagaugaacgcccccaacuaccacuacgaggagugcuccugcuaccccgacuccuccgagaucaccugcgucugccgcgacaacuggcacggcuccaaccgccccugggucuccuucaaccagaaccucgaguaccagaucggcuacaucugcuccggcaucuucggcgacaacccccgccccaacgacaagaccggcuccugcggccccgucuccuccaacggcgccaacggcgucaagggcuucuccuucaaguacggcaacggcgucuggaucggccgcaccaaguccaucuccucccgcaacggcuucgagaugaucugggaccccaacggcuggaccggcaccgacaacaacuucuccaucaagcaggacaucaucggcaucaacgagugguccggcuacuccggcuccuucguccagcaccccgagcucaccggccucgacugcauccgccccugcuucugggucgagcucauccgcggccgccccaaggagaacaccaucuggaccuccggcuccuccaucuccuucugcggcgucaacuccgacaccgucggcugguccuggcccgacggcgccgagcuccccuucaccaucgacaaguga

SEQ ID NO: 117017 - RNA, 1410 nt, Artificial Sequence; identical to SEQ ID NO: 112774
  derived and/or modified CDS sequence (opt2) from neuraminidase__InfluenzaA__AEM62801

SEQ ID NO: 117018 - RNA, 1410 nt, Artificial Sequence
  derived and/or modified CDS sequence (opt2) from neuraminidase__InfluenzaA__AEM62810
augaaccccaaccagaagaucaucaccaucggcuccgucugcaugaccaucggcaugggcaaccucauccuccagaucggcaacaucaucuccaucuggaucucccacuccauccagcucggcaaccagaaccagaucgagaccugcaaccaguccgucaucaccuacgagaacaacaccugggucaaccagaccuacgucaacaucuccaacaccaacuucgccgccggccaguccgucgucuccgucaagcucgccggcaacuccucccucugccccgucuccggcugggccaucuacuccaaggacaacuccauccgcaucggcuccaagggcgacgucuucgucauccgcgagcccuucaucuccugcuccccccucgagugccgcaccuucuuccucacccagggcgcccuccucaacgacaagcacuccaacggcaccaucaaggaccgcucccccuaccgcacccucauguccugccccaucggcgagguccccucccccuacaacucccgcuucgaguccgucgccugguccgccuccgccugccacgacggcaucaacuggcucaccaucggcaucuccggccccgacaacggcgccgucgccguccucaaguacaacggcaucaucaccgacaccaucaaguccuggcgcaacaacauccuccgcacccaggaguccgagugcgccugcgucaacggcuccugcuucaccgucaugaccgacggccccuccgacggccaggccuccuacaagaucuuccgcaucgagaagggcaagaucgucaaguccgucgagaugaacgcccccaacuaccacuacgaggagugcuccugcuaccccgacuccuccgagaucaccugcgucugccgcgacaacuggcacggcuccaaccgccccugggucuccuucaaccagaaccucgaguaccagaucggcuacaucugcuccggcaucuucggcgacaacccccgccccaacgacaagaccggcuccugcggccccgucuccuccaacggcgccaacggcgucaagggcuucuccuucaaguacggcaacggcgucuggaucggccgcaccaaguccaucuccucccgcaacggcuucgagaugaucugggaccccaacggcuggaccggcaccgacaacaacuucuccaucaagcaggacaucgucggcaucaacgagugguccggcuacuccggcuccuucguccagcaccccgagcucaccggccucgacugcauccgccccugcuucugggucgagcucauccgcggccgccccaaggagaacaccaucuggaccuccggcuccuccaucuccuucugcggcgucaacuccgacaccgucggcugguccuggcccgacggcgccgagcuccccuucaccaucgacaaguga

SEQ ID NO: 117019 - RNA, 1410 nt, Artificial Sequence
  derived and/or modified CDS sequence (opt2) from neuraminidase__InfluenzaA__AEM62819
augaaccccaaccagaagaucaucaccaucggcuccgucugcaugaccaucggcauggccaaccucauccuccagaucggcaacaucaucuccaucuggaucucccacuccauccagcucggcaaccagaaccagaucgagaccugcaaccaguccgucaucaccuacgagaacgacaccugggucaaccagaccuacgucaacaucuccaacaccaacuucgccgccggccaguccgucgucuccgucaagcucgccggcaacuccucccucugccccgucuccggcugggccaucuacuccaaggacaacuccauccgcaucggcuccaagggcgacgucuucgucauccgcgagcccuucaucuccugcuccccccucgagugccgcaccuucuuccucacccagggcgcccuccucaacgacaagcacuccaacggcaccaucaaggaccgcucccccuaccgcacccucauguccugccccaucggcgagguccccucccccuacaacucccgcuucgaguccgucgccugguccgccuccgccugccacgacggcaucaacuggcucaccaucggcaucuccggccccgacaacggcgccgucgccguccucaaguacaacggcaucaucaccgacaccaucaaguccuggcgcaacaacauccuccgcacccaggaguccgagugcgccugcgucaacggcuccugcuucaccgucaugaccgacggccccuccgacggccaggccuccuacaagaucuuccgcaucgagaagggcaagaucgucaaguccgucgagaugaacgcccccaacuaccacuacgaggagugcuccugcuaccccgacuccuccgagaucaccugcgucugccgcgacaacuggcacggcuccaaccgccccugggucuccuucaaccagaaccucgaguaccagaucggcuacaucugcuccggcaucuucggcgacaacccccgccccaacgacaagaccggcuccugcggccccgucuccuccaacggcgccaacggcgucaagggcuucuccuucaaguacggcaacggcgucuggaucggccgcaccaaguccaucuccucccgcaacggcuucgagaugaucugggaccccaacggcuggaccggcaccgacaacaacuucuccaucaagcaggacaucgucggcaucaacgagugguccggcuacuccggcuccuucguccagcaccccgagcucaccggccucgacugcauccgccccugcuucugggucgagcucauccgcggccgccccaaggagaacaccaucuggaccuccggcuccuccaucuccuucugcggcgucaacuccgacaccgucggcugguccuggcccgacggcgccgagcuccccuucaccaucgacaaguga

SEQ ID NO: 117020 - RNA, 1410 nt, Artificial Sequence; identical to SEQ ID NO: 112774
  derived and/or modified CDS sequence (opt2) from neuraminidase__InfluenzaA__AEM62828

SEQ ID NO: 117021 - RNA, 1410 nt, Artificial Sequence; identical to SEQ ID NO: 113357
  derived and/or modified CDS sequence (opt2) from neuraminidase__InfluenzaA__AEM62837

SEQ ID NO: 117022 - RNA, 1410 nt, Artificial Sequence; identical to SEQ ID NO: 112774
  derived and/or modified CDS sequence (opt2) from neuraminidase__InfluenzaA__AEM62846

SEQ ID NO: 117023 - RNA, 1410 nt, Artificial Sequence
  derived and/or modified CDS sequence (opt2) from neuraminidase__InfluenzaA__AEM62855
augaaccccaaccagaagaucaucaccaucggcuccgucugcaucaccaucggcauggccaaccucauccuccagaucggcaacaucaucuccaucuggaucucccacuccauccagcucggcaaccagaaccagaucgagaccugcaaccaguccgucaucaccuacgagaacaacaccugggucaaccagaccuacgucaacaucuccaacaccaacuucgccgccggccaguccgucgucuccgucaagcucgccggcaacuccucccucugccccgucuccggcugggccaucuacuccaaggacaacuccguccgcaucggcuccaagggcgacgucuucgucauccgcgagcccuucaucuccugcuccccccucgagugccgcaccuucuuccucacccagggcgcccuccucaacgacaagcacuccaacggcaccaucaaggaccgcucccccuaccgcacccucauguccugccccaucggcgagguccccucccccuacaacucccgcuucgaguccgucgccugguccgccuccgccugccacgacggcaucaacuggcucaccaucggcaucuccggccccgacaacggcgccgucgccguccucaaguacaacggcaucaucaccgacaccaucaaguccuggcgcaacaacauccuccgcacccaggaguccgagugcgccugcgucaacggcuccugcuucaccgucaugaccgacggccccuccaacggccaggccuccuacaagaucuuccgcaucgagaagggcaagaucgucaaguccgucgagaugaacgcccccaacuaccacuacgaggagugcuccugcuaccccgacuccggcgagaucaccugcgucugccgcgacaacuggcacggcuccaaccgccccugggucuccuucaaccagaaccucgaguaccagaucggcuacaucugcuccggcaucuucggcgacaacccccgccccaacgacaagaccggcuccugcggccccgucuccuccaacggcgccaacggcgucaagggcuucuccuucaaguacggcaacggcgucuggaucggccgcaccaaguccaucuccucccgcaacggcuucgagaugaucugggaccccaacggcuggaccggcaccgacaacaacuucuccaucaagcaggacaucgucggcaucaacgagugguccggcuacuccggcuccuucguccagcaccccgagcucaccggccucgacugcauccgccccugcuucugggucgagcucauccgcggccgccccaaggagaacaccaucuggaccuccggcuccuccaucuccuucugcggcgucaacuccgacaccgucggcugguccuggcccgacggcgccgagcuccccuucaccaucgacaaguga

SEQ ID NO: 117024 - RNA, 1410 nt, Artificial Sequence
  derived and/or modified CDS sequence (opt2) from neuraminidase__InfluenzaA__AEM62864
augaaccccaaccagaagaucaucaccaucggcuccgucugcaugaccaucggcauggccaaccucauccuccagaucggcaacaucaucuccaucuggaucucccacuccauccagcucggcaaccagaaccagaucgagaccugcaaccaguccgucaucaccuacgagaacaacaccugggucaaccagaccuacgucaacaucuccaacaccaacuucgccgccggccaguccgucgucuccgucaagcucgccggcaacuccucccucugccccgucuccggcugggccaucuacuccaaggacaacuccauccgcaucggcuccaagggcgacgucuucgucauccgcgagcccuucaucuccugcuccccccucgagugccgcaccuucuuccucacccagggcgcccuccucaacgacaagcacuccaacggcaccaucaaggaccgcucccccuaccgcacccucauguccugccccaucggcgagguccccucccccuacaacucccgcuucgaguccgucgccugguccgccuccgccugccacgacggcaucaacuggcucaccaucggcaucuucggccccgacaacggcgccgucgccguccucaaguacaacggcaucaucaccgacaccaucaaguccuggcgcaacaacauccuccgcacccaggaguccgagugcgccugcgucaacggcuccugcuucaccgucaugaccgacggccccuccgacggccaggccuccuacaagaucuuccgcaucgagaagggcaagaucgucaaguccgucgagaugaacgcccccaacuaccacuacgaggagugcuccugcuaccccgacuccuccgagaucaccugcgucugccgcgacaacuggcacggcuccaaccgccccugggucuccuucaaccagaaccucgaguaccagaucggcuacaucugcuccggcaucuucggcgacaacccccgccccaacgacaagaccggcuccugcggccccgucuccuccaacggcgccaacggcgucaagggcuucuccuucaaguacggcaacggcgucuggaucggccgcaccaaguccaucuccucccgcaacggcuucgagaugaucugggaccccaacggcuggaccggcaccgacaacaacuucuccaucaagcaggacaucgucggcaucaacgagugguccggcuacuccggcuccuucguccagcaccccgagcucaccggccucgacugcauccgccccugcuucugggucgagcucauccgcggccgccccaaggagaacaccaucuggaccuccggcuccuccaucuccuucugcggcgucaacuccgacaccgucggcugguccuggcccgacggcgccgagcuccccuucaccaucgacaaguga

SEQ ID NO: 117025 - RNA, 1410 nt, Artificial Sequence
  derived and/or modified CDS sequence (opt2) from neuraminidase__InfluenzaA__AEM62872
augaaccccaaccagaagaucaucaccaucggcuccgucugcaugaccaucggcauggccaaccucauccuccagaucggcaacaucaucuccaucuggaucucccacuccauccagcucggcaaccagaaccagaucgagaccugcaaccaguccgucaucaccuacgagaacaacaccugggucaaccagaccuacgucaacaucuccaacaccaacuucgccgccggccaguccgucgucuccgucaagcucgccggcaacuccucccucugccccgucuccggcugggccaucuacuccaaggacaacuccauccgcaucggcuccaagggcgacgucuucgucauccgcgagcccuucaucuccugcuccccccucgagugccgcaccuucuuccucacccagggcgcccuccucaacgacaagcacuccaacggcaccaucaaggaccgcucccccuaccgcacccucauguccugccccaucggcgagguccccucccccuacaacucccgcuucgaguccgucgccugguccgccuccgccugccacgacggcaucaacuggcucaccaucggcaucuccggccccgacaacggcgccgucgccguccucaaguacaacggcaucaucaccgacaccaucaaguccuggcgcaacaacauccuccgcacccaggaguccgagugcgccugcgucaacggcuccugcuucaccgucaugaccgacggccccuccgacggccaggccuccuacaagaucuuccgcaucgagaagggcaagaucgucaaguccgucgagaugaacgcccccaacuaccacuacgaggagugcuccugcuaccccgacuccuccgagaucaccugcgucugccgcgacaacuggcacggcuccaaccgccccugggucuccuucaaccagaaccucgaguaccagaucggcuacaucugcuccggcaucuucggcgacaacccccgccccaacgacaagaccggcuccugcggccccgucuccuucaacggcgccaacggcgucaagggcuucuccuucaaguacggcaacggcgucuggaucggccgcaccaaguccaucuccucccgcaacggcuucgagaugaucugggaccccaacggcuggaccggcaccgacaacaacuucuccaucaagcaggacaucgucggcaucaacgagugguccggcuacuccggcuccuucguccagcaccccgagcucaccggccucgacugcauccgccccugcuucugggucgagcucauccgcggccgccccaaggagaacaccaucuggaccuccggcuccuccaucuccuucugcggcgucaacuccgacaccgucggcugguccuggcccgacggcgccgagcuccccuucaccaucgacaaguga

SEQ ID NO: 117026 - RNA, 1410 nt, Artificial Sequence; identical to SEQ ID NO: 112774
  derived and/or modified CDS sequence (opt2) from neuraminidase__InfluenzaA__AEM92310

SEQ ID NO: 117027 - RNA, 1410 nt, Artificial Sequence; identical to SEQ ID NO: 114236
  derived and/or modified CDS sequence (opt2) from neuraminidase__InfluenzaA__AEM92320

SEQ ID NO: 117028 - RNA, 1410 nt, Artificial Sequence
  derived and/or modified CDS sequence (opt2) from neuraminidase__InfluenzaA__AEM92340
augaaccccaaccagaagaucaucaccaucggcuccgucugcaugaccaucggcauggccaaccucauccuccagaucggcaacaucaucuccaucuggaucucccacuccauccagcucggcaaccagaaccagaucgagaccugcaaccaguccgucaucaccuacgagaacaacaccugggucaaccagaccuacgucaacaucuccaacaccaacuucgccgccggccaguccgucgucuccgucaagcucgccggcaacuccucccucugccccgucuccggcugggccaucuacuccaaggacaacuccauccgcaucggcuccaagggcgacgucuucgucauccgcgagcccuucaucuccugcuccccccucgagugccgcaccuucuuccucacccagggcgcccuccucaacgacaagcacuccaacggcaccaucaaggaccgcucccccuaccgcacccucauguccugccccaucggcgagguccccucccccuacaacucccgcuucgaguccgucgccugguccgccuccgccugccacgacggcaucaacuggcucaccaucggcaucuccggccccgacaacggcgccgucgccguccucaaguacaacggcaucaucaccgacaccaucaaguccuggcgcaacaacauccuccgcacccaggaguccgagugcgccugcgucaacggcuccugcuucaccaucaugaccgacggccccuccgacggccaggccuccuacaagaucuuccgcaucgagaagggcaagaucgucaaguccgucgagaugaacgcccccaacuaccacuacgaggagugcuccugcuaccccgacuccuccgagaucaccugcgucugccgcgacaacuggcacggcuccaaccgccccugggucuccuucaaccagaaccucgaguaccagaucggcuacaucugcuccggcaucuucggcgacaacccccgccccaacgacaagaccggcuccugcggccccgucuccuccaacggcgccaacggcgucaagggcuucuccuucaaguacggcaacggcgucuggaucggccgcaccaaguccaucuccucccgcaagggcuucgagaugaucugggaccccaacggcuggacccgcaccgacaacaacuucuccaucaagcaggacaucgucggcaucaacgagugguccggcuacuccggcuccuucguccagcaccccgagcucaccggccucgacugcauccgccccugcuucugggucgagcucauccgcggccgccccaaggagaacaccaucuggaccuccggcuccuccaucuccuucugcggcgucaacuccgacaccgucggcugguccuggcccgacggcgccgagcuccccuucaccaucgacaaguga

SEQ ID NO: 117029 - RNA, 1410 nt, Artificial Sequence; identical to SEQ ID NO: 114236
  derived and/or modified CDS sequence (opt2) from neuraminidase__InfluenzaA__AEM92350

SEQ ID NO: 117030 - RNA, 1410 nt, Artificial Sequence
  derived and/or modified CDS sequence (opt2) from neuraminidase__InfluenzaA__AEM92360
augaaccccaaccagaagaucaucaccaucggcuccgucugcaugaccaucggcauggccaaccucauccuccagaucggcaacaucaucuccaucuggaucucccacuccauccagcucggcaaccagaaccagaucgagaccugcaaccaguccgucaucaccuacgagaacaacaccugggucaaccagaccuacgucaacaucuccaacaccaacuucgccgccgagcaguccgucgucuccgucaagcucgccggcaacuccucccucugccccgucuccggcugggccaucuacuccaaggacaacuccauccgcaucggcuccaagggcgacgucuucgucauccgcgagcccuucaucuccugcuccccccucgagugccgcaccuucuuccucacccagggcgcccuccucaacgacaagcacuccaacggcaccaucaaggaccgcucccccuaccgcacccucauguccugccccaucggcgagguccccucccccuacaacucccgcuucgaguccgucgccugguccgccuccgccugccacgacggcaucaacuggcucaccaucggcaucuccggccccgacaacggcgccgucgccguccucaaguacaacggcaucaucaccgacaccaucaaguccuggcgcaacaacauccuccgcacccaggaguccgagugcgccugcgucaacggcuccugcuucaccaucaugaccgacggccccuccgacggccaggccuccuacaagaucuuccgcaucgagaagggcaagaucgucaaguccgucgagaugaacgcccccaacuaccacuacgaggagugcuccugcuaccccgacuccuccgagaucaccugcgucugccgcgacaacuggcacggcuccaaccgccccugggucuccuucaaccagaaccucgaguaccagaucggcuacaucugcuccggcaucuucggcgacaacccccgccccaacgacaagaccggcuccugcggccccgucuccuccaacggcgccaacggcgucaagggcuucuccuucaaguacggcaacggcgucuggaucggccgcaccaaguccaucuccucccgcaagggcuucgagaugaucugggaccccaacggcuggaccggcaccgacaacaacuucuccaucaagcaggacaucgucggcaucaacgagugguccggcuacuccggcuccuucguccagcaccccgagcucaccggccucgacugcauccgccccugcuucugggucgagcucauccgcggccgccccaaggagaacaccaucuggaccuccggcuccuccaucuccuucugcggcgucaacuccgacaccgucggcugguccuggcccgacggcgccgagcuccccuucaccaucgacaaguga

SEQ ID NO: 117031 - RNA, 1410 nt, Artificial Sequence; identical to SEQ ID NO: 117028
  derived and/or modified CDS sequence (opt2) from neuraminidase__InfluenzaA__AEM92370

SEQ ID NO: 117032 - RNA, 1410 nt, Artificial Sequence; identical to SEQ ID NO: 117028
  derived and/or modified CDS sequence (opt2) from neuraminidase__InfluenzaA__AEM92380

SEQ ID NO: 117033 - RNA, 1410 nt, Artificial Sequence
  derived and/or modified CDS sequence (opt2) from neuraminidase__InfluenzaA__AEM92399
augaaccccaaccagaagaucaucaccaucggcuccgucugcaugaccaucggcauggccaaccucauccuccagaucggcaacaucaucuccaucuggaucucccacuccauccagcucggcaaccagaaccagaucgagaccugcaaccaguccgucaucaccuacgagaacaacaccugggucaaccagaccuacgucaacaucuccaacaccaacuucgccgccggccaguccgucgucuccgucaagcucgccggcaacuccucccucugccccgucuccggcugggccaucuacuccaaggacaacuccauccgcaucggcuccaagggcgacgucuucgucauccgcgagcccuucaucuccugcuccccccucgagugccgcaccuucuuccucacccagggcgcccuccucaacgacaagcacuccaacggcaccaucaaggaccgcucccccuaccgcacccucauguccugccccaucggcgagguccccucccccuacaacucccgcuucgaguccgucgccugguccgccuccgccugccacgacggcaccaacuggcucaccaucggcaucuccggccccgacaacggcgccgucgccguccucaaguacaacggcaucaucaccgacaccaucaaguccuggcgcaacaacauccuccgcacccaggaguccgagugcgccugcgucaacggcuccugcuucaccgucaugaccgacggccccuccgacggccaggccuccuacaagaucuuccgcaucgagaagggcaagaucgucaaguccgucgagaugaacgcccccaacuaccacuacgaggagugcuccugcuaccccgacuccuccgagaucaccugcgucugccgcgacaacuggcacggcuccaaccgccccugggucuccuucaaccagaaccucgaguaccagaucggcuacaucugcuccggcaucuucggcgacaacccccgccccaacgacaagaccggcuccugcggccccguccucuccaacggcgccaacggcgucaagggcuucuccuucaaguacggcaacggcgucuggaucggccgcaccaaguccaucuccucccgcaacggcuucgagaugaucugggaccccaacggcuggaccggcaccgacaacaacuucuccaucaagcaggacaucgucggcaucaacgagugguccggcuacuccggcuccuucguccagcaccccgagcucaccggccucgacugcauccgccccugcuucugggucgagcucauccgcggccgccccaaggagaacaccaucuggaccuccggcuccuccaucuccuucugcggcgucaacuccgacaccgucggcugguccuggcccgacggcgccgagcuccccuucaccaucgacaaguga

SEQ ID NO: 117034 - RNA, 1410 nt, Artificial Sequence; identical to SEQ ID NO: 117033
  derived and/or modified CDS sequence (opt2) from neuraminidase__InfluenzaA__AEM92409

SEQ ID NO: 117035 - RNA, 1410 nt, Artificial Sequence; identical to SEQ ID NO: 113198
  derived and/or modified CDS sequence (opt2) from neuraminidase__InfluenzaA__AEM92419

SEQ ID NO: 117036 - RNA, 1410 nt, Artificial Sequence
  derived and/or modified CDS sequence (opt2) from neuraminidase__InfluenzaA__AEM92430
augaaccccaaccagaagaucaugaccaucggcuccgucugcaugaccaucggcauggccaaccucauccuccagaucggcaacaucaucuccaucuggaucucccacuccauccagcucggcaaccagaaccagaucgagaccugcaaccaguccgucaucaccuacgagaacaacaccugggucaaccagaccuacgucaacaucuccaacaccaacuucgccgccggccaguccgucgucuccgucaagcucgccggcaacuccucccucugccccgucuccggcugggccaucuacuccaaggacaacuccauccgcaucggcuccaagggcgacgucuucgucauccgcgagcccuucaucuccugcuccccccucgagugccgcaccuucuuccucacccagggcgcccuccucaacgacaagcacuccaacggcaccaucaaggaccgcucccccuaccgcacccucauguccugccccaucggcgagguccccucccccuacaacucccgcuucgaguccgucgccugguccgccuccgccugccacgacggcaucaacuggcucaccaucggcaucuccggccccgacaacggcgccgucgccguccucaaguacaacggcaucaucaccgacaccaucaaguccuggcgcaacaacauccuccgcacccaggaguccgagugcgccugcgucaacggcuccugcuucaccgucaugaccgacggccccuccgacggccaggccuccuacaagaucuuccgcaucgagaagggcaagaucgucaaguccgucgagaugaacgcccccaacuaccacuacgaggagugcuccugcuaccccgacuccuccgagaucaccugcgucugccgcgacaacuggcacggcuccaaccgccccugggucuccuucaaccagaaccucgaguaccagaucggcuacaucugcuccggcaucuucggcgacaacccccgccccaacgacaagaccggcuccugcggccccgucuccuccaacggcgccaacggcgucaagggcuucuccuucaaguacggcaacggcgucuggaucggccgcaccaaguccaucuccucccgcaacggcuucgagaugaucugggaccccaacggcuggaccggcaccgacaacaacuucuccaucaagcaggacaucgucggcaucaacgagugguccggcuacuccggcuccuucguccagcaccccgagcucaccggccucgacugcauccgccccugcuucugggucgagcucauccgcggccgccccaaggagaacaccaucuggaccuccggcuccuccaucuccuucugcggcgucaacuccgacaccgucggcugguccuggcccgacggcgccgagcuccccuucaccaucgacaaguga

SEQ ID NO: 117037 - RNA, 1410 nt, Artificial Sequence
  derived and/or modified CDS sequence (opt2) from neuraminidase__InfluenzaA__AEM92440
augaaccccaaccagaagaucaucaccaucggcuccgucugcaucaccaucggcauggccaaccucauccuccagaucggcaacaucaucuccaucuggaucucccacuccauccagcucggcaaccagucccagaucgagaccugcaaccaguccgucaucaccuacgagaacaacaccugggucaaccagaccuacgucaacaucuccaacaccaacuucgccgccggccaguccgucgucuccgucaagcucgccggcaacuccucccucugccccgucuccggcugggccaucuacuccaaggacaacuccauccgcaucggcuccaagggcgacgucuucgucauccgcgagcccuucaucuccugcuccccccucgagugccgcaccuucuuccucacccagggcgcccuccucaacgacaagcacuccaacggcaccaucaaggaccgcucccccuaccgcacccucauguccugccccaucggcgagguccccucccccuacaacucccgcuucgaguccgucgccugguccgccuccgccugccacgacggcaucaacuggcucaccaucggcaucuccggccccgacaacggcgccgucgccguccucaaguacaacggcaucaucaccgacaccaucaaguccuggcgcaacaacauccuccgcacccaggaguccgagugcgccugcgucaacggcuccugcuucaccaucaugaccgacggccccuccgacggccaggccuccuacaagaucuuccgcaucgagaagggcaagaucgucaaguccgucgagaugaucgcccccaacuaccacuacgaggagugcuccugcuaccccgacuccuccgagaucaccugcgucugccgcgacaacuggcacggcuccaaccgccccugggucuccuucaaccagaaccucgaguaccagaucggcuacaucugcuccggcaucuucggcgacaacccccgccccaacgacaagaccggcuccugcggccccgucuccuccaacggcgccaacggcgucaagggcuucuccuucaaguacggcaacggcgucuggaucggccgcaccaaguccaucuccucccgcaagggcuucgagaugaucugggaccccaacggcuggaccggcaccgacaacaacuucuccaucaagcaggacaucgucggcaucaacgagugguccggcuacuccggcuccuucguccagcaccccgagcucaccggccucgacugcauccgccccugcuucugggucgagcucauccgcggccgccccaaggagaacaccaucuggaccuccggcuccuccaucuccuucugcggcgucaacuccgacaccgucggcugguccuggcccgacggcgccgagcuccccuucaccaucgacaaguga

SEQ ID NO: 117038 - RNA, 1410 nt, Artificial Sequence; identical to SEQ ID NO: 116994
  derived and/or modified CDS sequence (opt2) from neuraminidase__InfluenzaA__AEM92450

SEQ ID NO: 117039 - RNA, 1410 nt, Artificial Sequence; identical to SEQ ID NO: 116994
  derived and/or modified CDS sequence (opt2) from neuraminidase__InfluenzaA__AEM92460

SEQ ID NO: 117040 - RNA, 1410 nt, Artificial Sequence; identical to SEQ ID NO: 116745
  derived and/or modified CDS sequence (opt2) from neuraminidase__InfluenzaA__AEM92470

SEQ ID NO: 117041 - RNA, 1410 nt, Artificial Sequence; identical to SEQ ID NO: 116745
  derived and/or modified CDS sequence (opt2) from neuraminidase__InfluenzaA__AEM92480

SEQ ID NO: 117042 - RNA, 1410 nt, Artificial Sequence
  derived and/or modified CDS sequence (opt2) from neuraminidase__InfluenzaA__AEM92490
augaaccccaaccagaagaucaucaccaucggcuccgucugcaugaucaucggcauggccaaccucaugcuccagaucggcaacaucaucuccaucuggaucucccacuccauccagcucggcaaccagaaccagaucgagaccugcaaccaguccgucaucaccuacgagaacaacaccugggucaaccagaccuacgucaacaucuccaacaccaacuucgccgccggccaguccgucgucuccgucaagcucgccggcaacuccucccucugccccgucuccggcugggccaucuacuccaaggacaacuccauccgcaucggcuccaagggcgacgucuucgucauccgcgagcccuucaucuccugcuccccccucgagugccgcaccuucuuccucacccagggcgcccuccucaacgacaagcacuccaacggcaccaucaaggaccgcucccccuaccgcacccucauguccugccccaucggcgagguccccucccccuacaacucccgcuucgaguccgucgccugguccgccuccgccugccacgacggcaucaacuggcucaccaucggcaucuccggccccgacaacggcgccgucgccguccucaaguacaacggcaucaucaccgacaccaucaaguccuggcgcaacaacauccuccgcacccaggaguccgagugcgccugcgucaacggcuccugcuucaccaucaugaccgacggccccuccgacggccaggccuccuacaagaucuuccgcaucgagaagggcaagaucgucaaguccgucgagaugaacgcccccaacuaccacuacgaggagugcuccugcuaccccgacuccuccgagaucaccugcgucugccgcgacaacuggcacggcuccaaccgccccugggucuccuucaaccagaaccucgaguaccagaucggcuacaucugcuccggcaucuucggcgacaacccccgccccaacgacaagaccggcuccugcggccccgucuccuccaacggcgccaacggcgucaagggcuucuccuucaaguacggcaacggcgucuggaucggccgcaccaaguccaucuccucccgcaacggcuucgagaugaucugggaccccaacggcuggaccggcaccgacaacaacuucuccaucaagcaggacaucgucggcaucaacgagugguccggcuacuccggcuccuucguccagcaccccgagcucaccggccucgacugcauccgccccugcuucugggucgagcucauccgcggccgccccaaggagaacaccaucuggaccuccggcuccuccaucuccuucugcggcgucaacuccgacaccgucggcugguccuggcccgacggcgccgagcuccccuucaccaucgacaaguga

SEQ ID NO: 117043 - RNA, 1410 nt, Artificial Sequence
  derived and/or modified CDS sequence (opt2) from neuraminidase__InfluenzaA__AEM92500
augaaccccaaccagaagaucaucaccaucggcuccgucugcaugaucaucggcauggccaaccucaugcuccagaucggcaacaucaucuccaucuggaucucccacuccauccagcucggcaaccagaaccagaucgagaccugcaaccaguccgucaucaccuacgagaacaacaccugggucaaccagaccuacgucaacaucuccaacaccaacuucgccgccggccaguccgucgucuccgucaagcucgccggcaacuccucccucugccccgucuccggcugggccaucuacuccaaggacaacuccauccgcaucggcuccaagggcgacgucuucgucauccgcgagcccuucaucuccugcuccccccucgagugccgcaccuucuuccucacccagggcgcccuccucaacgacaagcacuccaacggcaccaucaaggaccgcucccccuaccgcacccucauguccugccccaucggcgagguccccucccccuacaacucccgcuucgaguccgucgccugguccgccuccgccugccacgacggcaucaacuggcucaccaucggcaucuccggccccgacaacggcgccgucgccguccucaaguacaacggcaucaucaccgacaccaucaaguccuggcgcaacaacauccuccgcacccaggaguccgagugcgccugcgucaacggcuccugcuucaccaucaugaccgacggccccuccgacggccaggccuccuacaagaucuuccgcaucgagaagggcaagaucgucaaguccgucgagaugaacgcccccaacuaccacuacgaggagugcuccugcuaccccgacuccuccgagaucaccugcgucugccgcgacaacuggcacggcuccaaccgccccugggucuccuucaaccagaaccucgaguaccagaugggcuacaucugcuccggcaucuucggcgacaacccccgccccaacgacaagaccggcuccugcggccccgucuccuccaacggcgccaacggcgucaagggcuucuccuucaaguacggcaacggcgucuggaucggccgcaccaaguccaucuccucccgcaacggcuucgagaugaucugggaccccaacggcuggaccggcaccgacaacaaguucuccaucaagcaggacaucgucggcaucaacgagugguccggcuacuccggcuccuucguccagcaccccgagcucaccggccucgacugcauccgccccugcuucugggucgagcucauccgcggccgccccaaggagaacaccaucuggaccuccggcuccuccaucuccuucugcggcgucaacuccgacaccgucggcugguccuggcccgacggcgccgagcuccccuucaccaucgacaaguga

SEQ ID NO: 117044 - RNA, 1410 nt, Artificial Sequence
  derived and/or modified CDS sequence (opt2) from neuraminidase__InfluenzaA__AEM92520
augaaccccaaccagaagaucaucaccaucggcuccgucugcaugaccaucggcauggccaaccucaugcuccagaucggcaacaucaucuccaucuggaucucccacuccauccagcucggcaaccagaaccagaucgagaccugcaaccaguccgucaucaccuacgagaacaacaccugggucaaccagaccuacgucaacaucuccaacaccaacuucgccgccggccaguccgucgucuccgucaagcucgccggcaacuccucccucugccccgucuccggcugggccaucuacuccaaggacaacuccauccgcaucggcuccaagggcgacgucuucgucauccgcgagcccuucaucuccugcuccccccucgagugccgcaccuucuuccucacccagggcgcccuccucaacgacaagcacuccaacggcaccaucaaggaccgcucccccuaccgcacccucauguccugccccaucggcgagguccccucccccuacaacucccgcuucgaguccgucgccugguccgccuccgccugccacgacggcaucaacuggcucaccaucggcaucuccggccccgacaacggcgccgucgccguccucaaguacaacggcaucaucaccgacaccaucaaguccuggcgcaacaacauccuccgcacccaggaguccgagugcgccugcgucaacggcuccugcuucaccgucaugaccgacggccccuccgacggccaggccuccuacaagaucuuccgcaucgagaagggcaagaucgucaaguccgucgagaugaacgcccccaacuaccacuacgaggagugcuccugcuaccccgacuccuccgagaucaccugcgucugccgcgacaacuggcacggcuccaaccgccccugggucuccuucaaccagaaccucgaguaccagaucggcuacaucugcuccggcaucuucggcgacaacccccgccccaacgacaagaccggcuccugcggccccgucuccuccaacggcgccaacggcgucaagggcuucuccuucaaguacggcaacggcgucuggaucggccgcaccaaguccaucuccucccgcaacggcuucgagaugaucugggaccccaacggcuggaccggcaccgacaacaacuucuccaucaagcaggacaucaucggcaucaacgagugguccggcuacuccggcuccuucguccagcaccccgagcucaccggccucgacugcauccgccccugcuucugggucgagcucauccgcggccgccccaaggagaacaccaucuggaccuccggcuccuccaucuccuucugcggcgucaacuccgacaccgucggcugguccuggcccgacggcgccgagcuccccuucaccaucgacaaguga

SEQ ID NO: 117045 - RNA, 1410 nt, Artificial Sequence; identical to SEQ ID NO: 116745
  derived and/or modified CDS sequence (opt2) from neuraminidase__InfluenzaA__AEM92550

SEQ ID NO: 117046 - RNA, 1410 nt, Artificial Sequence
  derived and/or modified CDS sequence (opt2) from neuraminidase__InfluenzaA__AEM92570
augaaccccaaccagaagaucaucaccaucggcuccgucugcaugaccaucggcauggccaaccucauccuccagaucggcaacaucaucuccaucuggaucucccacuccauccagcucggcaaccagaaccagaucgagaccugcaaccaguccgucaucaccuacgagaacaacaccugggucaaccagaccuacgucaacaucuccaacaccaacuucgccgccggccaguccgucgucuccgucaagcucgccggcaacuccucccucugccccgucuccggcugggccaucuacuccaaggacaacuccauccgcaucggcuccaagggcaacgucuucgucauccgcgagcccuucaucuccugcuccccccucgagugccgcaccuucuuccucacccagggcgcccuccucaacgacaagcacuccaacggcaccaucaaggaccgcucccccuaccgcacccucauguccugccccaucggcgagguccccucccccuacaacucccgcuucgaguccgucgccugguccgccuccgccugccacgacggcaucaacuggcucaccaucggcaucuccggccccgacaacggcgccgucgccguccucaaguacaacggcaucaucaccgacaccaucaaguccuggcgcaacaacauccuccgcacccaggaguccgagugcgccugcgucaacggcuccugcuucaccaucaugaccgacggccccuccgacggccaggccuccuacaagaucuuccgcaucgagaagggcaagaucgucaaguccgucgagaugaacgcccccaacuaccacuacgaggagugcuccugcuaccccgacuccuccgagaucaccugcgucugccgcgacaacuggcacggcuccaaccgccccugggucuccuucaaccagaaccucgaguaccagaucggcuacaucugcuccggcaucuucggcgacaacccccgccccaacgacaagaccggcuccugcggccccgucuccuccaacggcgccaacggcgucaagggcuucuccuucaaguacggcaacggcgucuggaucggccgcaccaaguccaucuccucccgcaagggcuucgagaugaucugggaccccaacggcuggaccggcaccgacaacaacuucuccaucaagcaggacaucgucggcaucaacgagugguccggcuacuccggcuccuucguccagcaccccgagcucaccggccucgacugcauccgccccugcuucugggucgagcucauccgcggccgccccaaggagaacaccaucuggaccuccggcuccuccaucuccuucugcggcgucaacuccgacaccgucggcugguccuggcccgacggcgccgagcuccccuucaccaucgacaaguga

SEQ ID NO: 117047 - RNA, 1410 nt, Artificial Sequence
  derived and/or modified CDS sequence (opt2) from neuraminidase__InfluenzaA__AEM92580
augaaccccaaccagaagaucaucaccaucggcuccgucugcaugaccaucggcauggccaaccucauccuccagaucggcaacaucaucuccaucuggaucucccacuccauccagcucggcaaccagaaccagaucgagaccugcaaccaguccgucaucaccuacgagaacaacaccugggucaaccagaccuacgucaacaucuccaacaccaacuucgccgccggccaguccgucgucuccgucaagcucgccggcaacuccucccucugccccgucuccggcugggccaucuacuccaaggacaacuccauccgcaucggcuccaagggcgacgucuucgucauccgcgagcccuucaucuccugcuccccccucgagugccgcaccuucuuccucacccagggcgcccuccucaacgacaagcacuccaacggcaccaucaaggaccgcucccccuaccgcacccucauguccugccccaucggcgagguccccucccccuacaacucccgcuucgaguccgucgccugguccgccuccgccugccacgacggcaucaacuggcucaccaucggcaucuccggccccgacaacggcgccgucgccguccucaaguacaacggcaucaucaccgacaccaucaaguccuggcgcaacaacauccuccgcacccaggaguccgagugcgccugcgucaacggcuccugcuucaccaucaugaccgacggccccuccaacggccaggccuccuacaagaucuuccgcaucgagaagggcaagaucgucaaguccgucgagaugaacgcccccaacuaccacuacgaggagugcuccugcuaccccgacuccuccgagaucaccugcgucugccgcgacaacuggcacggcuccaaccgccccugggucuccuucaaccagaaccucgaguaccagaucggcuacaucugcuccggcaucuucggcgacaacccccgccccaacgacaagaccggcuccugcggccccgucuccuccaacggcgccaacggcgucaagggcuucuccuucaaguacggcaacggcgucuggaucggccgcaccaaguccaucuccucccgcaagggcuucgagaugaucugggaccccaacggcuggaccggcaccgacaacaacuucuccaucaagcaggacaucgucggcaucaacgagugguccggcuacuccggcuccuucguccagcaccccgagcucaccggccucgacugcauccgccccugcuucugggucgagcucauccgcggccgccccaaggagaacaccaucuggaccuccggcuccuccaucuccuucugcggcgucaacuccgacaccgucggcugguccuggcccgacggcgccgagcuccccuucaccaucgacaaguga

SEQ ID NO: 117048 - RNA, 1410 nt, Artificial Sequence; identical to SEQ ID NO: 116745
  derived and/or modified CDS sequence (opt2) from neuraminidase__InfluenzaA__AEM92590

SEQ ID NO: 117049 - RNA, 1410 nt, Artificial Sequence; identical to SEQ ID NO: 116745
  derived and/or modified CDS sequence (opt2) from neuraminidase__InfluenzaA__AEM92600

SEQ ID NO: 117050 - RNA, 1410 nt, Artificial Sequence
  derived and/or modified CDS sequence (opt2) from neuraminidase__InfluenzaA__AEM92610
augaaccccaaccagaagaucaucaccaucggcuccgucugcaugaccaucggcauggccaaccucaugcuccagaucggcaacaucaucuccaucuggaucucccacuccauccagcucggcaaccagaaccagaucgagaccugcaaccaguccgucaucaccuacgagaacaacaccugggucaaccagaccuacgucaacaucuccaacaccaacuucgccgccggccaguccgucgucuccgucaagcucgccggcaacuccucccucugccccgucuccggcugggccaucuacuccaaggacaacuccauccgcaucggcuccaagggcgacgucuucgucauccgcgagcccuucaucuccugcuccccccucgagugccgcaccuucuuccucacccagggcgcccuccucaacgacaagcacuccaacggcaccaucaaggaccgcucccccuaccgcacccucauguccugccccaucggcgagguccccucccccuacaacucccgcuucgaguccgucgccugguccgccuccgccugccacgacggcaucaacuggcucaccaucggcaucuccggccccgacaacggcgccgucgccguccucaaguacaacggcaucaucaccgacaccaucaaguccuggcgcaacaacauccuccgcacccaggaguccgagugcgccugcgucaacggcuccugcuucaccgucaugaccgacggccccuccgacggccaggccuccuacaagaucuuccgcaucgagaagggcaagaucgucaaguccgucgagaugaacgcccccaacuaccacuacgaggagugcuccugcuaccccgacuccuccgagaucaccugcgucugccgcgacaacuggcacggcuccaaccgccccugggucuccuucaaccagaaccucgaguaccagaucggcuacaucugcuccggcaucuucggcgacaacccccgccccaacgacaagaccggcuccugcggccccgucuccuccaacggcgccaacggcgucaagggcuucuccuucaaguacggcaacggcgucuggaucggccgcaccaaguccaucuccucccgcaacggcuucgagaugaucugggaccccaacggcuggaccggcaccgacaacaacuucuccaucaagcaggacaucgucggcaucaacgagugguccggcuacuccggcuccuucguccagcaccccgagcucaccggccucgacugcauccgccccugcuucugggucgagcucauccgcggccgccccaaggagaacaccaucuggaccuccggcuccuccaucuccuucugcggcgucaacuccgacaccgucuccugguccuggcccgacggcgccgagcuccccuucaccaucgacaaguga

SEQ ID NO: 117051 - RNA, 1410 nt, Artificial Sequence
  derived and/or modified CDS sequence (opt2) from neuraminidase__InfluenzaA__AEM92620
augaaccccaaccagaagaucaucaccaucggcuccgucugcaugaucaucggcauggccaaccucaugcuccagaucggcaacaucaucuccaucuggaucucccacuccauccagcucggcaaccagaaccagaucgagaccugcaaccaguccgucaucaccuacgagaacaacaccugggucaaccagaccuacgucaacaucuccaacaccaacuucgccgccggccaguccgucgucuccgucaagcucgccggcaacuccucccucugccccgucuccggcugggccaucuacuccaaggacaacuccauccgcaucggcuccaagggcgacgucuucgucauccgcgagcccuucaucuccugcuccccccucgagugccgcaccuucuuccucacccagggcgcccuccucgacgacaagcacuccaacggcaccaucaaggaccgcucccccuaccgcacccucauguccugccccaucggcgagguccccucccccuacaacucccgcuucgaguccgucgccugguccgccuccgccugccacgacggcaucaacuggcucaccaucggcaucuccggccccgacaacggcgccgucgccguccucaaguacaacggcaucaucaccgacaccaucaaguccuggcgcaacaacauccuccgcacccaggaguccgagugcgccugcgucaacggcuccugcuucaccaucaugaccgacggccccuccgacggccaggccuccuacaagaucuuccgcaucgagaagggcaagaucgucaaguccgucgagaugaacgcccccaacuaccacuacgaggagugcuccugcuaccccgacuccuccgagaucaccugcgucugccgcgacaacuggcacggcuccaaccgccccugggucuccuucaaccagaaccucgaguaccagaugggcuacaucugcuccggcaucuucggcgacaacccccgccccaacgacaagaccggcuccugcggccccgucuccuccaacggcgccaacggcgucaagggcuucuccuucaaguacggcaacggcgucuggaucggccgcaccaaguccaucuccucccgcaacggcuucgagaugaucugggaccccaacggcuggaccggcaccgacaacaaguucuccaucaagcaggacaucgucggcaucaacgagugguccggcuacuccggcuccuucguccagcaccccgagcucaccggccucgacugcauccgccccugcuucugggucgagcucauccgcggccgccccaaggagaacaccaucuggaccuccggcuccuccaucuccuucugcggcgucaacuccgacaccgucggcugguccuggcccgacggcgccgagcuccccuucaccaucgacaaguga

SEQ ID NO: 117052 - RNA, 1410 nt, Artificial Sequence
  derived and/or modified CDS sequence (opt2) from neuraminidase__InfluenzaA__AEM92650
augaaccccaaccagaagaucaucaccaucggcuccgucugcaugaccaucggcauggccaaccucauccuccagaucggcaacaucaucuccaucuggaucucccacuccauccagcucggcaaccagaaccagaucgagaccugcaaccaguccgucaucaccuacgagaacaacaccugggucaaccagaccuacgucaacaucuccaacaccaacuucgccgccggccaguccgucgucuccgucaagcucgccggcaacuccucccucugccccgucuccggcugggccaucuacuccaaggacaacuccguccgcaucggcuccaagggcgacgucuucgucauccgcgagcccuucaucuccugcuccccccucgagugccgcaccuucuuccucacccagggcgcccuccucaacgacaagcacuccaacggcaccaucaaggaccgcucccccuaccgcacccucauguccugccccaucggcgagguccccucccccuacaacucccgcuucgaguccgucgccugguccgccuccgccugccacgacggcaucaacuggcucaccaucggcaucuccggccccgacaacggcgccgucgccguccucaaguacaacggcaucaucaccgacaccaucaaguccuggcgcaacaacauccuccgcacccaggaguccgagugcgccugcgucaacggcuccugcuucaccgucaugaccgacggccccuccgacggccaggccuccuacaagaucuuccgcaucgagaagggcaagaucgucaaguccgucgagaugaacgcccccaacuaccacuacgaggagugcuccugcuaccccgacuccuccgagaucaccugcgucugccgcgacaacuggcacggcuccaaccgccccugggucuccuucaaccagaaccucgaguaccagaucggcuacaucugcuccggcaucuucggcgacaacccccgccccaacgacaagaccggcuccugcggccccgucuccuccaacggcgccaacggcgucaagggcuucuccuucaaguacggcaacggcgucuggaucggccgcaccaaguccaucuccucccgcaacggcuucgagaugaucugggaccccaacggcuggaccggcaccgacaccaaguucuccaucaagcaggacaucgucggcaucaacgagugguccggcuacuccggcuccuucguccagcaccccgagcucaccggccucgacugcauccgccccugcuucugggucgagcucauccgcggccgccccaaggagaacaccaucuggaccuccggcuccuccaucuccuucugcggcgucaacuccgacaccgucggcugguccuggcccgacggcgccgagcuccccuucaccaucgacaaguga

SEQ ID NO: 117053 - RNA, 1410 nt, Artificial Sequence; identical to SEQ ID NO: 115446
  derived and/or modified CDS sequence (opt2) from neuraminidase__InfluenzaA__AEM98410

SEQ ID NO: 117054 - RNA, 1410 nt, Artificial Sequence; identical to SEQ ID NO: 115446
  derived and/or modified CDS sequence (opt2) from neuraminidase__InfluenzaA__AEM98421

SEQ ID NO: 117055 - RNA, 1410 nt, Artificial Sequence; identical to SEQ ID NO: 115446
  derived and/or modified CDS sequence (opt2) from neuraminidase__InfluenzaA__AEM98432

SEQ ID NO: 117056 - RNA, 1410 nt, Artificial Sequence; identical to SEQ ID NO: 116822
  derived and/or modified CDS sequence (opt2) from neuraminidase__InfluenzaA__AEN55401

SEQ ID NO: 117057 - RNA, 1410 nt, Artificial Sequence; identical to SEQ ID NO: 115049
  derived and/or modified CDS sequence (opt2) from neuraminidase__InfluenzaA__AEN55411

SEQ ID NO: 117058 - RNA, 1410 nt, Artificial Sequence
  derived and/or modified CDS sequence (opt2) from neuraminidase__InfluenzaA__AEN55421
augaaccccaaccagaagaucaucaccaucggcuccgucugcaugaccaucggcauggccaaccucauccuccagaucggcaacaucaucuccaucuggaucucccacuccauccagcucggcaaccagucccagaucgagaccugcaaccaguccgucaucaccuacgagaacaacaccugggucaaccagaccuacgucaacaucuccaacaccaacuucgccgcccgccaguccgucgucuccgucaagcucgccggcaacuccucccucugccccgucuccggcugggccaucuacuccaaggacaacuccauccgcaucggcuccaagggcgacgucuucgucauccgcgagcccuucaucuccugcuccccccucgagugccgcaccuucuuccucacccagggcgcccuccucaacgacaagcacuccaacggcaccaucaaggaccgcucccccuaccgcacccucauguccugccccaucggcgagguccccucccccuacaacucccgcuucgaguccgucgccugguccgccuccgccugccacgacggcaucaacuggcucaccaucggcaucuccggccccgacaacggcgccgucgccguccucaaguacaacggcaucaucaccgacaccaucaaguccuggcgcaacaacauccuccgcacccaggaguccgagugcgucugcgucaacggcuccugcuucaccaucaugaccgacggccccuccgacggccaggccuccuacaagaucuuccgcaucgagaagggcaagaucgucaaguccgucgagaugaacgcccccaacuaccacuacgaggagugcuccugcuaccccgacuccuccgagaucaccugcgucugccgcgacaacuggcacggcuccaaccgccccugggucuccuucaaccagaaccucgaguaccagaucggcuacaucugcuccggcaucuucggcgacaacccccgccccaacgacaagaccggcuccugcggccccgucuccuccaacggcgccaacggcgucaagggcuucuccuucaaguacggcaacggcgucuggaucggccgcaccaaguccaucuccucccgcaagggcuucgagaugaucugggaccccaacggcuggaccggcaccgacaacaacuucuccaucaagcaggacaucgucggcaucaacgagugguccggcuacuccggcuccuucguccagcaccccgagcucaccggccucgacugcauccgccccugcuucugggucgagcucauccgcggccgccccaaggagaacaccaucuggaccuccggcuccuccaucuccuucugcggcgucaacuccgacaccgucggcugguccuggcccgacggcgccgagcuccccuucaccaucgacaaguga

SEQ ID NO: 117059 - RNA, 1410 nt, Artificial Sequence
  derived and/or modified CDS sequence (opt2) from neuraminidase__InfluenzaA__AEN55466
augaaccccaaccagaagaucaucaccaucggcuccgucugcaucaccaucggcauggccaaccucauccuccagaucggcaacaccaucuccaucuggaucucccacuccauccagcucggcaaccagaaccagaucgagaccugcaaccaguccgucaucaccuacgagaacaacaccugggucaaccagaccuacgucaacaucuccaacaccaacuucgccgccggccaguccgucgucuccgucaagcucgccggcaacuccucccucugccccgucuccggcugggccaucuacuccaaggacaacuccauccgcaucggcuccaagggcgacgucuucgucauccgcgagcccuucaucuccugcuccccccucgagugccgcaccuucuuccucacccagggcgcccuccucaacgacaagcacuccaacggcaccaucaaggaccgcucccccuaccgcacccucauguccugccccaucggcgagguccccucccccuacaacucccgcuucgaguccgucgccugguccgccuccgccugccacgacggcaucuccuggcucaccaucggcaucuccggccccgacaacggcgccgucgccguccucaaguacaacggcaucaucaccgacaccaucaaguccuggcgcaacaacauccuccgcacccaggaguccgagugcgccugcgucaacggcuccugcuucaccgucaugaccgacggccccuccgacggccaggccuccuacaagaucuuccgcaucgagaagggcaagaucgucaaguccgucgagaugaacgcccccaacuaccacuacgaggagugcuccugcuaccccgacuccuccgagaucaccugcgucugccgcgacaacuggcacggcuccaaccgccccugggucuccuucaaccagaaccucgaguaccagaucggcuacaucugcuccggcaucuucggcgacaacccccgccccaacgacaagaccggcuccugcggccccgucuccuccaacggcgccaacggcgucaagggcuucuccuucaaguacggcaacggcgucuggaucggccgcaccaaguccaucuccucccgcaacggcuucgagaugaucugggaccccaacggcuggaccggcaccgacaacaacuucuccaucaagcaggacaucgucggcaucaacgagugguccggcuacuccggcuccuucguccagcaccccgagcucaccggccucgacugcauccgccccugcuucugggucgagcucauccgcggccgccccaaggagaacaccaucuggaccuccggcuccuccaucuccuucugcggcgucaacuccgacaccgucggcugguccuggcccgacggcgccgagcuccccuucaccaucgacaaguga

SEQ ID NO: 117060 - RNA, 1410 nt, Artificial Sequence
  derived and/or modified CDS sequence (opt2) from neuraminidase__InfluenzaA__AEN55476
augaaccccaaccagaagaucaucaccaucggcuccgucugcaugaccaucggcauggccaaccucauccuccagaucggcaacaucaucuccaucuggaucucccacuccauccagcucggcaaccagucccagaucgagaccugcaaccaguccgucaucaccuacgagaacaacaccugggucaaccagaccuacgucaacaucuccaacaccaacuucgccgccggccaguccgucgucuccgucaagcucgccggcaacuccucccucugccccgucuccggcugggccaucuacuccaaggacaacuccauccgcaucggcuccaagggcgacgucuucgucauccgcgagcccuucaucuccugcuccccccucgagugccgcaccuucuuccucacccagggcgcccuccucaacgacaagcacuccaacggcaccaucaaggaccgcucccccuaccgcacccucauguccugccccaucggcgagguccccucccccuacaacucccgcuucgaguccgucgccugguccgccuccgccugccacgacggcaucaacuggcucaccaucggcaucuccggccccgacaacggcgccgucgccguccucaaguacaacggcaucaucaccgacaccaucaaguccuggcgcaacaacauccuccgcacccaggaguccgagugcgccugcgucaacggcuccugcuucaccaucaugaccgacggccccuccgacggccaggccuccuacaagaucuuccgcaucgagaagggcaagaucgucaaguccgucgagaugaacgcccccaacuaccacuacgaggagugcuccugcuaccccgacuccuccgagaucaccugcgucugccgcgacaacuggcacggcuccaaccgccccugggucuccuucaaccagaaccucgaguaccagaucggcuacaucugcuccggcaucuucggcgacaacccccgccccaacgacaagaccggcuccugcggccccgucuccuccaacggcgccaacggcgucaagggcuucuccuucaaguacggcaacggcgucuggaucggccgcaccaaguccaucuccucccgcaagggcuucgagaugaucugggaccccaacggcuggaccggcaccgacaacaacuucuccaucaagcaggacaucgucggcaucaacgagugguccggcuacuccggcuccuucguccagcaccccgagcucaccggccucgacugcauccgccccugcuucugggucgagcucauccgcggccgccccaaggagaacaccaucuggaccuccggcuccuccaucuccuucugcggcgucaacuccgacaccgucuccugguccuggcccgacggcgccgagcuccccuucaccaucgacaaguga

SEQ ID NO: 117061 - RNA, 1410 nt, Artificial Sequence; identical to SEQ ID NO: 116293
  derived and/or modified CDS sequence (opt2) from neuraminidase__InfluenzaA__AEN55486

SEQ ID NO: 117062 - RNA, 1410 nt, Artificial Sequence; identical to SEQ ID NO: 116293
  derived and/or modified CDS sequence (opt2) from neuraminidase__InfluenzaA__AEN55506

SEQ ID NO: 117063 - RNA, 1410 nt, Artificial Sequence
  derived and/or modified CDS sequence (opt2) from neuraminidase__InfluenzaA__AEN55516
augaaccccaaccagaagaucaucaccaucggcuccgucugcaugaccaucggcauggccaaccucauccuccagaucggcaacaucaucuccaucuggaucucccacuccauccagcucggcaaccagucccagaucgagaccugcaaccaguccgucaucaccuacgagaacaacaccugggucaaccagaccuacgucaacaucuccaacaccaacuucgccgccggccaguccgucgucuccgucaagcucgccggcaacuccucccucugccccgucuccggcugggccaucuacuccaaggacaacuccauccgcaucggcucccgcggcgacgucuucgucauccgcgagcccuucaucuccugcuccccccucgagugccgcaccuucuuccucacccagggcgcccuccucaacgacaagcacuccaacggcaccaucaaggaccgcucccccuaccgcacccucauguccugccccaucggcgagguccccucccccuacaacucccgcuucgaguccgucgccugguccgccuccgccugccacgacggcaucaacuggcucaccaucggcaucuccggccccgacaacggcgccgucgccguccucaaguacaacggcaucaucaccgacaccaucaaguccuggcgcaacaacauccuccgcacccaggaguccgagugcgccugcgucaacggcuccugcuucaccaucaugaccgacggccccuccgacggccaggccuccuacaagaucuuccgcaucgagaagggcaagaucgucaaguccgucgagaugaacgcccccaacuaccacuacgaggagugcuccugcuaccccgacuccuccgagaucaccugcgucugccgcgacaacuggcacggcuccaaccgccccugggucuccuucaaccagaaccucgaguaccagaucggcuacaucugcuccggcaucuucggcgacaacccccgccccaacgacaagaccggcuccugcggccccgucuccuccaacggcgccaacggcgucaagggcuucuccuucaaguacggcaacggcgucuggaucggccgcaccaaguccaucuccucccgcaagggcuucgagaugaucugggaccccaacggcuggaccggcaccgacaacaacuucuccaucaagcaggacaucgucggcaucaacgagugguccggcuacuccggcuccuucguccagcaccccgagcucaccggccucgacugcauccgccccugcuucugggucgagcucauccgcggccgccccaaggagaacaccaucuggaccuccggcuccuccaucuccuucugcggcgucaacuccgacaccgucggcugguccuggcccgacggcgccgagcuccccuucaccaucgacaaguga

SEQ ID NO: 117064 - RNA, 1410 nt, Artificial Sequence; identical to SEQ ID NO: 116293
  derived and/or modified CDS sequence (opt2) from neuraminidase__InfluenzaA__AEN55526

SEQ ID NO: 117065 - RNA, 1410 nt, Artificial Sequence; identical to SEQ ID NO: 116822
  derived and/or modified CDS sequence (opt2) from neuraminidase__InfluenzaA__AEN69429

SEQ ID NO: 117066 - RNA, 1410 nt, Artificial Sequence; identical to SEQ ID NO: 116819
  derived and/or modified CDS sequence (opt2) from neuraminidase__InfluenzaA__AEN69438

SEQ ID NO: 117067 - RNA, 1410 nt, Artificial Sequence; identical to SEQ ID NO: 115049
  derived and/or modified CDS sequence (opt2) from neuraminidase__InfluenzaA__AEN69484

SEQ ID NO: 117068 - RNA, 1410 nt, Artificial Sequence; identical to SEQ ID NO: 112721
  derived and/or modified CDS sequence (opt2) from neuraminidase__InfluenzaA__AEO01627

SEQ ID NO: 117069 - RNA, 1410 nt, Artificial Sequence; identical to SEQ ID NO: 112721
  derived and/or modified CDS sequence (opt2) from neuraminidase__InfluenzaA__AEO01638

SEQ ID NO: 117070 - RNA, 1410 nt, Artificial Sequence
  derived and/or modified CDS sequence (opt2) from neuraminidase__InfluenzaA__AEO01644
augaaccccaaccagaagaucaucaccaucggcuccgucucccucaccaucuccaccaucugcuucuucaugcagaucgccauccucaucaccaccgucacccuccacuucaagcaguacgaguucaacuccccccccaacaaccaggucaugcucugcgagcccaccaucaucgagcgcaacaucaccgagaucgucuaccucaccaacaccaccaucgagaaggagaucugccccaagcucgccgaguaccgcaacugguccaagccccagugcgacaucaccggcuucgcccccuucuccaaggacaacuccauccgccucuccgccggcggcgacaucugggucacccgcgagcccuacgucuccugcgaccccgacaagugcuaccaguucgcccucggccagggcaccacccucaacaacguccacuccaacgacaccguccgcgaccgcacccccuaccgcacccuccucaugaacgagcucggcguccccuuccaccucggcaccaagcaggucugcaucgccugguccuccuccuccugccacgacggcaaggccuggcuccacgucugcaucaccggcgacgacaagaacgccaccgccuccuucaucuacaacggccgccucgucgacuccaucgucuccugguccaaggagauccuccgcacccaggaguccgagugcgucugcaucaacggcaccugcaccgucgucaugaccgacggcuccgccuccggcaaggccgacaccaagauccucuucaucgaggagggcaagaucguccacaccuccacccucuccggcuccgcccagcacgucgaggagugcuccugcuacccccgcuaccccggcguccgcugcgucugccgcgacaacuggaagggcuccaaccgccccaucgucgacaucaacaucaaggaccacuccaucgucuccuccuacgucugcuccggccucgucggcgacaccccccgcaagaccgacuccuccuccuccggccacugccucgaccccaacaacgaggagggcggccacggcgucaagggcugggccuucgacgacggcaacgacgucuggaugggccgcaccaucuccgagaagucccgccucggcuacgagaccuucaaggucaucgagggcugguccaaccccaaguccaagcuccagaucaaccgccaggucaucgucgaccgcggcaaccgcuccggcuacuccggcaucuucuccgucgagggcaaguccugcaucaaccgcugcuucuacgucgagcucauccgcggccgcaaggaggagaccgagguccucuggaccuccaacuccaucgucgucuucugcggcaccuccggcaccuacggcaccggcuccuggcccgacggcgccgacaucaaccucaugcccaucuga

SEQ ID NO: 117071 - RNA, 1410 nt, Artificial Sequence
  derived and/or modified CDS sequence (opt2) from neuraminidase__InfluenzaA__AEO01654
augaaccccaaccagaagaucaucaccaucggcuccgucucccucaccaucuccaccaucugcuucuucaugcagaucgccauccucaucaccaccgucacccuccacuucaagcaguacgaguucaacuccccccccaacaaccaggucaugcucugcgagcccaccaucaucgagcgcaacaucaccgagaucgucuaccucaccaacaccaccaucgagaaggagaucugccccaagcucgccgaguaccgcaacugguccaagccccagugcgacaucaccggcuucgcccccuucuccaaggacaacuccauccgccucuccgccggcggcgacaucugggucacccgcgagcccuacgucuccugcgaccccgacaagugcuaccaguucgcccucggccagggcaccacccucaacaacguccacuccaacgacaccguccgcgaccgcacccccuaccgcacccuccucaugaacgagcucggcguccccuuccaccucggcaccaagcaggucugcaucgccugguccuccuccuccugccacgacggcaaggccuggcuccacgucugcaucaccggcgacgacaagaacgccaccgccuccuucaucuacaacggccgccucgucgacuccaucgucuccugguccaaggacauccuccgcacccaggaguccgagugcgucugcaucaacggcaccugcaccgucgucaugaccgacggcuccgccuccggcaaggccgacaccaagauccucuucaucgaggagggcaagaucguccacaccuccacccucuccggcuccgcccagcacgucgaggagugcuccugcuacccccgcuaccccggcguccgcugcgucugccgcgacaacuggaagggcuccaaccgccccaucgucgacaucaacaucaaggaccacuccaucgucuccuccuacgucugcuccggccucgucggcgacaccccccgcaagaacgacuccuccuccuccggccacugccucgaccccaacaacgaggagggcggccacggcgucaagggcugggccuucgacgacggcaacgacgucuggaugggccgcaccaucuccgagaagucccgccucggcuacgagaccuucaaggucaucgagggcugguccaaccccaaguccaagcuccagaucaaccgccaggucaucgucgaccgcggcaaccgcuccggcuacuccggcaucuucuccgucgagggcaaguccugcaucaaccgcugcuucuacgucgagcucauccgcggccgcaaggaggagaccaagguccucuggaccuccaacuccaucgucgucuucugcggcaccuccggcaccuacggcaccggcuccuggcccgacggcgccgagaucaaccucaugcccaucuga

SEQ ID NO: 117072 - RNA, 1413 nt, Artificial Sequence; identical to SEQ ID NO: 112668
  derived and/or modified CDS sequence (opt2) from neuraminidase__InfluenzaA__AEO01665

SEQ ID NO: 117073 - RNA, 1413 nt, Artificial Sequence
  derived and/or modified CDS sequence (opt2) from neuraminidase__InfluenzaA__AEO01676
augaaccccaaccagaagaucaucaccaucggcuccaucuccaucgccaucggcaucaucucccucaugcuccagaucggcaacaucaucuccaucugggccucccacuccauccagaccggcucccagaacaacaccggcaucugcaaccagcgcaucaucaccuacgagaacuccaccugggucaaccacaccuacgucaacaucaacaacaccaacgucgucgccggcgaggacaagaccuccgucacccucgccggcaacuccucccucugcuccaucuccggcugggccaucuacaccaaggacaacuccauccgcaucggcuccaagggcgacgucuucgucauccgcgagcccuucaucuccugcucccaccucgagugccgcaccuucuuccucacccagggcgcccuccucaacgacaagcacuccaacggcaccgucaaggaccgcucccccuaccgcgcccucauguccugcccccucggcgaggcccccucccccuacaacuccaaguucgaguccgucgccugguccgccuccgccugccacgacggcaugggcuggcucaccaucggcaucuccggccccgacaacggcgccgucgccguccucaaguacaacggcaucaucaccggcaccaucaaguccuggaagaagcagauccuccgcacccaggaguccgagugcgucugcaugaacggcuccugcuucaccaucaugaccgacggccccuccaacaaggccgccuccuacaagaucuucaagaucgagaagggcaaggucaccaaguccaucgagcucaacgcccccaacuuccacuacgaggagugcuccugcuaccccgacaccggcaucgucaugugcgucugccgcgacaacuggcacggcuccaaccgccccugggucuccuucaaccagaaccucgacuaccagaucggcuacaucugcuccggcgucuucggcgacaacccccgccccgaggacggcgagggcuccugcaaccccgucaccgucgacggcgccaacggcgucaagggcuucuccuacaaguacgacaacggcgucuggaucggccgcaccaaguccaaccgccuccgcaagggcuucgagaugaucugggaccccaacggcuggaccaacaccgacuccgacuucuccgucaagcaggacgucgucgccaucaccgacugguccggcuacuccggcuccuucguccagcaccccgagcucaccggccucgacugcauccgccccugcuucugggucgagcucguccgcggccucccccgcgagaacaccaccaucuggaccuccggcuccuccaucuucuuccgcggcgacaacuccgacaccgccaacugguccuggcccgacggcgccgagaugaccuucaccaucgacaaguga

SEQ ID NO: 117074 - RNA, 1410 nt, Artificial Sequence; identical to SEQ ID NO: 112721
  derived and/or modified CDS sequence (opt2) from neuraminidase__InfluenzaA__AEO01693

SEQ ID NO: 117075 - RNA, 1413 nt, Artificial Sequence; identical to SEQ ID NO: 112668
  derived and/or modified CDS sequence (opt2) from neuraminidase__InfluenzaA__AEO01711

SEQ ID NO: 117076 - RNA, 1410 nt, Artificial Sequence; identical to SEQ ID NO: 116844
  derived and/or modified CDS sequence (opt2) from neuraminidase__InfluenzaA__AEO37533

SEQ ID NO: 117077 - RNA, 1410 nt, Artificial Sequence
  derived and/or modified CDS sequence (opt2) from neuraminidase__InfluenzaA__AEO37543
augaaccccaaccagaagaucaucaccaucggcuccgucugcaugaccaucggcauggccaaccucauccuccagaucggcaacaucaucuccaucuggaucucccacuccauccagcucggcaaccagaaccagaucgagcccugcaaccaguccgucaucaccuacgagaacaacaccugggucaaccagaccuacgucaacaucuccaacaccaacuucgccgccggccaguccgucgucuccgucaagcucgccggcaacuccucccucugccccgucuccggcugggccaucuacuccaaggacaacuccauccgcaucggcuccaagggcgacgucuucgucauccgcgagcccuucaucuccugcuccccccucgagugccgcaccuucuuccucacccagggcgcccuccucaacgacaagcacuccaacggcaccaucaaggaccgcucccccuaccgcacccucauguccugccccaucggcgagguccccucccccuacaacucccgcuucgaguccgucgccugguccgccuccgccugccacgacggcaucaacuggcucaccaucggcaucuccggccccgacaacggcgccgucgccguccucaaguacaacggcaucaucaccgacaccaucaaguccuggcgcaacaacauccuccgcacccaggaguccgagugcgccugcgucaacggcuccugcuucaccgucaugaccgacggccccuccgacggccaggccuccuacaagaucuuccgcaucgagaagggcaagaucgucaaguccgucgagaugaacgcccccaacuaccacuacgaggagugcuccugcuaccccgacuccuccgagaucaccugcgucugccgcgacaacuggcacggcuccaaccgccccugggucuccuucaaccagaaccucgaguaccagaucggcuacaucugcuccggcaucuucggcgacaacccccgccccaacgacaagaccggcuccugcggccccgucuccuccaacggcgccaacggcgucaagggcuucuccuucaaguacggcaacggcgucuggaucggccgcaccaaguccaucuccucccgcaacggcuucgagaugaucugggaccccaacggcuggaccggcaccgacaacaacuucuccgucaagcaggacaucaucggcaucaacgagugguccggcuacuccggcuccuucguccagcaccccgagcucaccggccucgacugcauccgccccugcuucugggucgagcucauccgcggccgccccaaggagaacaccaucuggaccuccggcuccuccaucuccuucugcggcgucaacuccgacaccgucggcugguccuggcccgacggcgccgagcuccccuucaccaucgacaaguga

SEQ ID NO: 117078 - RNA, 1410 nt, Artificial Sequence; identical to SEQ ID NO: 116293
  derived and/or modified CDS sequence (opt2) from neuraminidase__InfluenzaA__AEO72179

SEQ ID NO: 117079 - RNA, 1350 nt, Artificial Sequence
  derived and/or modified CDS sequence (opt2) from neuraminidase__InfluenzaA__AEO88957
augaaccccaaccagaagaucaucaccaucggcuccaucugcauggucaucggcaucgucucccucaugcuccagaucggcaacaugaucuccaucugggucucccacuccacccagaccggcaaccagcaccaggccgagcccauccgcaacaccaacuuccucaccgagaacgccgucgccuccgucacccucgccggcaacuccucccucugccccauccgcggcugggccguccacuccaaggacaacuccauccgcaucggcuccaagggcgacgucuucgucauccgcgagcccuucaucuccugcucccaccucgagugccgcaccuucuuccucacccagggcgcccuccucaacgacaagcacuccaacggcaccgucaaggaccgcuccccccaccgcacccucauguccugccccgucggcgaggcccccucccccuacaacucccgcuucgaguccgucgccugguccgccuccgccugccacgacggcaccuccuggcucaccaucggcaucuccggccccgacaacggcgccgucgccguccucaaguacaacggcaucaucaccgacaccaucaaguccuggcgcaacaacauccuccgcacccaggaguccgagugcgccugcgucaacggcuccugcuucaccgucaugaccgacggccccuccaacggccaggccuccuacaagaucuucaagauggagaagggcaaggucgucaaguccgucgagcucaacgcccccaacuaccacuacgaggagugcuccugcuaccccgacgccggcgagaucaucugcgucugccgcgacaacuggcacggcuccaaccgccccugggucuccuucaaccagaaccucgaguaccagaucggcuacaucugcuccggcgucuucggcgacaacccccgccccaacgacggcaccggcuccugcggccccgucucccccaacggcgccuacggcaucaagggcuucuccuucaaguacggcaacggcgucuggaucggccgcaccaaguccaccaacucccgcuccggcuucgagaugaucugggaccccaacggcuggaccggcaccgacuccaacuucuccgucaagcaggacaucgucgccaucaccgacugguccggcuacuccggcuccuucguccagcaccccgagcucaccggccucgacugcauccgccccugcuucugggucgagcucauccgcggccgccccaaggaguccaccaucuggaccuccggcuccuccaucuccuucugcggcgucaacuccgacaccgucuccugguccuggcccgacggcgccgagcuccccuucaccaucgacaaguga

SEQ ID NO: 117080 - RNA, 1350 nt, Artificial Sequence
  derived and/or modified CDS sequence (opt2) from neuraminidase__InfluenzaA__AEO88965
augaaccccaaccagaagaucaucaccaucggcuccaucugcauggucaucgagaucgucucccucaugcuccagaucggcaacaugaucuccaucugggucucccacuccauccagaccaagaaccagcgccaggccgagcccaucuccaacaccaaguuccucaccgagaaggccgucgccuccgucacccucgccggcaacuccucccucugccccaucuccggcugggccguccacuccaaggacaacuccauccgcaucggcuccaagggcgacgucuucgucauccgcgagcccuucaucuccugcucccaccucgagugccgcaccuucuuccucacccagggcgcccuccucaacgacaagcacuccaacggcaccgucaaggaccgcuccccccaccgcacccucauguccugccccgucggcgaggcccccucccccuacaacucccgcuucgaguccgucgccugguccgccuccgccugccacgacggcaccuccuggcucaccaucggcaucuccggccccgacaacggcgccgucgccguccucaaguacaacggcaucaucaccgacaccaucaaguccuggcgcaacaacauccuccgcacccaggaguccgagugcgccugcgucaacggcuccugcuucaccgucaugaccgacggccccuccaacggccaggccuccuacaagaucuucaagauggagaagggcaaggucgucaaguccgucgagcucgacgcccccaacuaccacuacgaggagugcuccugcuaccccgacgccggcgagaucaccugcgucugccgcgacaacuggcacggcuccaaccgccccugggucuccuucaaccagaaccucgaguaccagaucggcuacaucugcuccggcgucuucggcgacaacccccgccccaacgacggcaccggcuccugcggccccgucucccccaacggcgccuacggcgucaagggcuucuccuucaaguacggcaacggcgucuggaucggccgcaccaaguccaccaacucccgcuccggcuucgagaugaucugggaccccaacggcuggaccggcaccgacuccuccuucuccgucaagcaggacaucgucgccaucaccgacugguccggcuacuccggcuccuucguccagcaccccgagcucaccggccucaacugcauccgccccugcuucugggucgagcucguccgcggccgccccaaggaguccaccaucuggaccuccggcuccuccaucuccuucugcggcgucaacuccgacaccgucggcugguccuggcccgacggcgccgagcuccccuucaccaucgacaaguga

SEQ ID NO: 117081 - RNA, 1350 nt, Artificial Sequence
  derived and/or modified CDS sequence (opt2) from neuraminidase__InfluenzaA__AEO88973
augaaccccaaccagaagaucaucaccaucggcuccaucugcauggucaucggcaucgucucccucaugcuccagaucggcaacaugaucucccucugggucucccacuccauccagaccggcaaccagcaccaggucgagcccaucuccaacaccaacuuccucaccgagaaggccgucgccuccgucacccucgccggcaacuccucccucugccccauccgcggcugggccguccacuccaaggacaacuccauccgcaucggcuccaagggcgacgucuucgucauccgcgagcccuucaucuccugcucccaccucgagugccgcaccuucuuccucacccagggcgcccuccucaacgacaagcacuccaacggcaccgucaaggaccgcuccccccaccgcacccucauguccugccccgucggcgaggcccccucccccuacaacucccgcuucgaguccgucgccugguccgccuccgccugccacgacggcaccuccuggcucaccaucggcaucuccggccccgacaacggcgccgucgccguccucaaguacaacggcaugaucaccgacaccaucaaguccuggcgcaacaacauccuccgcacccaggaguccgagugcgccugcgucaacggcuccugcuucaccgucaugaccgacggccccuccaacggccaggccuccuacaagaucuucaagauggagaagggccgcgucgucaaguccgucgagcucgacgcccccaacuaccacuacgaggagugcuccugcuaccccgacgccggcgagaucaccugcgucugccgcgacaacuggcacggcuccaaccgccccugggucuccuucaaccagaaccucgaguaccagaucggcuacaucugcuccggcgucuucggcgacaacccccgccccaacgacggcaccggcuccugcggccccgucucccccaacggcgccuacggcgucaagggcuucuccuucaaguacggcaacggcgucuggaucggccgcaccaagucccccaacucccgcuccggcuucgagaugaucugggaccccaacggcuggaucgagaccgacuccuccuucuccgucaagcaggacaucgucgccaucaccgacugguccggcuacuccggcuccuucguccagcaccccgagcucaccggccucgacugcauccgccccugcuucugggucgagcucauccgcggccgccccaaggaguccaccaucuggaccuccggcuccuccaucuccuucugcggcgucaacuccgacaccgucuccugguccuggcccgacggcgccgagcuccccuucaccaucgacaaguga

SEQ ID NO: 117082 - RNA, 1350 nt, Artificial Sequence
  derived and/or modified CDS sequence (opt2) from neuraminidase__InfluenzaA__AEO88982
augaaccccaaccagaagaucaucaccaucggcuccaucugcauggucaucggcaucgucucccucaugcuccagaucggcaacaugaucuccaucugggucucccacuccauccagaccggcaaccagcaccaggccgagcccauccgcaacaccaacuuccucaccgagaacgccgucgccuccgucacccucgccggcaacuccucccucugccccguccgcggcugggccguccacuccaaggacaacuccauccgcaucggcuccaagggcgacgucuucgucauccgcgagcccuucaucuccugcucccaccucgagugccgcaccuucuuccucacccagggcgcccuccucaacgacaagcacuccaacggcaccgucaaggaccgcuccccccaccgcacccucauguccugccccgucggcgaggcccccucccccuacaacucccgcuucgaguccgucgccugguccgccuccgccugccacgacggcaccuccuggcucaccaucggcaucuccggccccgacaacggcgccgucgccguccucaaguacaacggcaucaucaccgacaccaucaaguccuggcgcaacaacauccuccgcacccaggaguccgagugcgccugcgucaacggcuccugcuucaccgucaugaccgacggccccuccaacggccaggccuccuacaagaucuucaagauggagaagggcaaggucgucaaguccgucgagcucaacgcccccaacuaccacuacgaggagugcuccugcuaccccgacgccggcgagaucaccugcgucugccgcgacaacuggcacggcuccaaccgccccugggucuccuucaaccagaaccucgaguaccagaucggcuacaucugcuccggcaucuucggcgacaacccccgcccccacgacggcaccggcuccugcggccccgucucccccaacggcgccuacggcaucaagggcuucuccuucaaguacggcaacggcgucuggaucggccgcaccaaguccaccaacucccgcuccggcuucgagaugaucugggaccccaacggcuggaccggcaccgacuccaacuucuccgucaagcaggacaucgucgccaucaccgacugguccggcuacuccggcuccuucguccagcaccccgagcucaccggccucgacugcauccgccccugcuucugggucgagcucauccgcggccgccccaaggaguccaccaucuggaccuccggcuccuccaucuccuucugcggcgucaacuccgacaccgucuccugguccuggcccgacgacgccgagcuccccuucaccaucgacaaguga

SEQ ID NO: 117083 - RNA, 1350 nt, Artificial Sequence
  derived and/or modified CDS sequence (opt2) from neuraminidase__InfluenzaA__AEO88990
augaaccccaaccagaagaucaucaccaucggcuccaucugcauggucaucggcaucgucucccucaugcuccagaucggcaacaugaucuccaucugggucucccacuccauccagaccggcaaccagcaccaggccgagcccauccgcaacaccaacuuccucaccgagaacgccgucgccuccgucacccucgccggcaacuccucccucugccccguccgcggcugggccguccacuccaaggacaacuccauccgcaucggcuccaagggcgacgucuucgucauccgcgagcccuucaucuccugcucccaccucgagugccgcaccuucuuccucacccagggcgcccuccucaacgacaagcacuccaacggcaccgucaaggaccgcuccccccaccgcacccucauguccugccccgucggcgaggcccccucccccuacaacucccgcuucgaguccgucgccugguccgccuccgccugccacgacggcaccuccuggcucaccaucggcaucuccggccccgacaacggcgccgucgccguccucaaguacaacggcaucaucaccgacaccaucaaguccuggcgcaacaacauccuccgcacccaggaguccgagugcgccugcgucaacggcuccugcuucaccgucaugaccgacggccccuccaacggccaggccuccuacaagaucuucaagauggagaagggcaaggucgucaaguccgucgagcucaacgcccccaacuaccacuacgaggagugcuccugcuaccccgacgccggcgagaucaccugcgucugccgcgacaacuggcacggcuccaaccgccccugggucuccuucaaccagaaccucgaguaccagaucggcuacaucugcuccggcgucuucggcgacaacccccgccccaacgacggcaccggcuccugcggccccgucucccccaacggcgccuacggcaucaagggcuucuccuucaaguacggcaacggcgucuggaucggccgcaccaaguccaccaacucccgcuccggcuucgagaugaucugggaccccaacggcuggaccggcaccgacuccaacuucuccgucaagcaggacaucgucgccaucaccgacugguccggcuacuccggcuccuucguccagcaccccgagcucaccggccucgacugcauccgccccugcuucugggucgagcucauccgcggccgccccaaggaguccaccaucuggaccuccggcuccuccaucuccuucugcggcgucaacuccgacaccgucuccugguccuggcccgacgacgccgagcuccccuucaccaucgacaaguga

SEQ ID NO: 117084 - RNA, 1350 nt, Artificial Sequence
  derived and/or modified CDS sequence (opt2) from neuraminidase__InfluenzaA__AEO88998
augaaccccaaccagaagaucaucaccaucggcuccaucugcauggucaucggcaucgucucccucaugcuccagaucggcaacaugaucuccaucugggucucccacuccauccagaccggcaaccagcaccaggccgagcccauccgcaacaccaacuuccucaccgagaacgccgucgccuccgucacccucgccggcaacuccucccucugccccauccgcggcugggccguccacuccaaggacaacuccauccgcaucggcuccaagggcgacgucuucgucauccgcgagcccuucaucuccugcucccaccucgagugccgcaccuucuuccucacccagggcgcccuccucaacgacaagcacuccaacggcaccgucaaggaccgcuccccccaccgcacccucauguccugccccgucggcgaggcccccucccccuacaacucccgcuucgaguccgucgccugguccgccuccgccugccacgacggcaccuccuggcucaccaucggcaucuccggccccgacaacggcgccgucgccguccucaaguacaacggcaucaucaccgacaccaucaaguccuggcgcaacaacauccuccgcacccaggaguccgagugcgccugcgucaacggcuccugcuucaccgucaugaccgacggccccuccaacgagcaggccuccuacaagaucuucaagauggagaagggcaaggucgucaaguccgucgagcucaacgcccccaacuaccacuacgaggagugcuccugcuaccccgacgccggcgagaucaucugcgucugccgcgacaacuggcacggcuccaaccgccccugggucuccuucaaccagaaccucgaguaccagaucggcuacaucugcuccggcgucuucggcgacaacccccgccccaacgacggcaccggcuccugcggccccgucucccccaacggcgccuacggcaucaagggcuucuccuucaaguacggcaacggcgucuggaucggccgcaccaaguccaccaacucccgcuccggcuucgagaugaucugggaccccaacggcuggaccggcaccgacuccaacuucuccgucaagcaggacaucgucgccaucaccgacugguccggcuacuccggcuccuucguccagcaccccgagcucaccggccucgacugcauccgccccugcuucugggucgagcucauccgcggccgccccaaggaguccaccaucuggaccuccggcuccuccaucuccuucugcggcgucaacuccgacaccgucuccugguccuggcccgacggcgccgagcuccccuucaccaucgacaaguga

SEQ ID NO: 117085 - RNA, 1350 nt, Artificial Sequence
  derived and/or modified CDS sequence (opt2) from neuraminidase__InfluenzaA__AEO89006
augaaccccaaccagaagaucaucaccaucggcuccaucugcauggucaucggcaucgucucccucaugcuccagaucggcaacaugaucuccaucugggucucccacuccauccagaccggcaaccagcaccaggccgagcccauccgcaacaccaacuuccucaccgagaacgccgucgccuccgucacccucgccggcaacuccucccucugccccguccgcggcugggccguccacuccaaggacaacuccauccgcaucggcuccaagggcgacgucuucgucauccgcgagcccuucaucuccugcucccaccucgagugccgcaccuucuuccucacccagggcgcccuccucaacgacaagcacuccaacggcaccgucaaggaccgcuccccccaccgcacccucauguccugccccgucggcgaggcccccucccccuacaacucccgcuucgaguccgucgccugguccgccuccgccugccacgacggcaccuccuggcucaccaucggcaucuccggccccgacaacggcgccgucgccguccucaaguacaacggcaucaucaccgacaccaucaaguccuggcgcaacaacauccuccgcacccaggaguccgagugcgccugcgucaacggcuccugcuucaccgucaugaccgacggccccuccaacggccaggccuccuacaagaucuucaagauggagaagggcaaggucgucaaguccgucgagcucaacgcccccaacuaccacuacgaggagugcuccugcuaccccgacgccggcgagaucaccugcgucugccgcgacaacuggcacggcuccaaccgccccugggucuccuucaaccagaaccucgaguaccagaucggcuacaucugcuccggcgucuucggcgacaacccccgccccaacgacggcaccggcuccugcggccccgucucccccaacggcgccuacggcaucaagggcuucuccuucaaguacggcaacggcgucuggaucggccgcaccaaguccaccaacucccgcuccggcuucgagaugaucugggaccccaacggcuggaccggcaccgacuccgacuucuccgucaagcaggacaucaucgccaucaccgacugguccggcuacuccggcuccuucguccagcaccccgagcucaccggccucgacugcauccgccccugcuucugggucgagcucauccgcggccgccccaaggaguccaccaucuggaccuccggcuccuccaucuccuucugcggcgucaacuccgacaccgucuccugguccuggcccgacggcgccgagcuccccuucaccaucgacaaguga

SEQ ID NO: 117086 - RNA, 1350 nt, Artificial Sequence
  derived and/or modified CDS sequence (opt2) from neuraminidase__InfluenzaA__AEO89023
augaaccccaaccagaagaucaucaccaucggcuccaucugcauggucaucggcaucgucucccucaugcuccagaucggcaacauggucucccucugggucucccacuccauccagaccggcaaccagcaccaggucgagcccaucuccaacaccaacuuccucaccgagaaggccgucgccuccgucacccucgccggcaacuccucccucugccccauccgcggcugggccguccacuccaaggacaacuccauccgcaucggcuccaagggcgacgucuucgucauccgcgagcccuucaucuccugcucccaccucgagugccgcaccuucuuccucacccagggcgcccuccucaacgacaagcacuccaacggcaccgucaaggaccgcuccccccaccgcacccucauguccugccccgucggcgaggcccccucccccuacaacucccgcuucgaguccgucgccugguccgccuccgccugccacgacggcaccuccuggcucaccaucggcaucuccggccccgacaacggcgccgucgccguccucaaguacaacggcaugaucaccgacaccaucaaguccuggcgcaacaacauccuccgcacccaggaguccgagugcgccugcgucaacggcuccugcuucaccgucaugaccgacggccccuccaacggccaggccuccuacaagaucuucaagauggagaagggcaaggucgucaaguccgucgagcucgacgcccccaacuaccacuacgaggagugcuccugcuaccccgacgccggcgagaucaccugcgucugccgcgacaacuggcacggcuccaaccgccccugggucuccuucaaccagaaccucgaguaccagaucggcuacaucugcuccggcgucuucggcgacaacccccgccccaacgacggcaccggcuccugcggccccgucucccccaacggcgccuacggcgucaagggcuucuccuucaaguacggcaacggcgucuggaucggccgcaccaagucccccuccucccgcuccggcuucgagaugaucugggaccccaacggcuggaccgagaccgacuccuccuucuccgucaagcaggacaucgucgccaucaccgacugguccggcuacuccggcuccuucguccagcaccccgagcucaccggccucgacugcauccgccccugcuucugggucgagcucauccgcggccgccccaaggaguccaccaucuggaccuccggcuccuccaucuccuucugcggcgucaacuccgacaccgucuccugguccuggcccgacggcgccgagcuccccuucaccaucgacaaguga

SEQ ID NO: 117087 - RNA, 1350 nt, Artificial Sequence
  derived and/or modified CDS sequence (opt2) from neuraminidase__InfluenzaA__AEO89032
augaaccccaaccagaagaucaucaccaucggcuccaucugcauggucaucggcaucgucucccucaugcuccagaucggcaacaugaucuccaucugggucucccacuccauccagaccggcaaccagcaccaggccgagcccauccgcaacaccaacuuccucaccgagaacgccgucgccuccgucacccucgccggcaacuccucccucugccccguccgcggcugggccguccacuccaaggacaacuccauccgcaucggcuccaagggcgacgucuucgucauccgcgagcccuucaucuccugcucccaccucgagugccgcaccuucuuccucacccagggcgcccuccucaacgacaagcacuccaacggcaccgucaaggaccgcuccccccaccgcacccucauguccugccccgucggcgaggcccccucccccuacaacucccgcuucgaguccgucgccugguccgccuccgccugccacgacggcaccuccuggcucaccaucggcaucuccggccccgacaacggcgccgucgccguccucaaguacaacggcaucaucaccgacaccaucaaguccuggcgcaacaacauccuccgcacccaggaguccgagugcgccugcgucaacggcuccugcuucaccgucaugaccgacggccccuccaacggccaggccuccuacaagaucuucaagauggagaagggcaaggucgucaaguccgucgagcucaacgcccccaacuaccacuacgaggagugcuccugcuaccccgacgccggcgagaucaccugcgucugccgcgacaacuggcacggcuccaaccgccccugggucuccuucaaccagaaccucgaguaccagaucggcuacaucugcuccggcgucuucggcgacaacccccgccccaacgacggcaccggcuccugcggccccgucucccccaacggcgccuacggcaucaagggcuucuccuucaaguacggcaacggcgucuggaucggccgcaccaaguccaccaacucccgcuccggcuucgagaugaucugggaccccaacggcuggaccggcaccgacuccaacuucuccgucaagcaggacaucgucgccaucaccgacugguccggcuacuccggcuccuucguccagcaccccgagcucaccggccucgacugcauccgccccugcuucugggucgagcucauccgcggccgccccaaggaguccaccaucuggaccuccggcuccuccaucuccuucugcggcgucaacuccgacaccgucuccugguccuggcccgacggcgccgagcuccccuucaccaucgacaaguga

SEQ ID NO: 117088 - RNA, 1350 nt, Artificial Sequence
  derived and/or modified CDS sequence (opt2) from neuraminidase__InfluenzaA__AEO89041
augaaccccaaccagaagaucaucaccaucggcuccaucugcauggucaucggccucgucucccucaugcuccagaucggcaacaugaucuccaucugggucucccacuccauccagaccggcaaccagcaccaggccgagcccauccgcaacaccaacuuccucaccgagaacgccgucgccuccgucacccucgccggcaacuccucccucugccccguccgcggcugggccguccacuccaaggacaacuccauccgcaucggcuccaagggcgacgucuucgucauccgcgagcccuucaucuccugcucccaccucgagugccgcaccuucuuccucacccagggcgcccuccucaacgacaagcacuccaacggcaccgucaaggaccgcuccccccaccgcacccucauguccugccccgucggcgaggcccccucccccuacaacucccgcuucgaguccgucgccugguccgccuccgccugccacgacggcaccuccuggcucaccaucggcaucuccggccccgacaacggcgccgucgccguccucaaguacaacggcaucaucaccgacaccaucaaguccuggcgcaacaacauccuccgcacccaggaguccgagugcgccugcgucaacggcuccugcuucaccgucaugaccgacggccccuccaacggccaggccuccuacaagaucuucaagauggagaagggcaaggucgucaaguccgucgagcucaacgcccccaacuaccacuacgaggagugcuccugcuaccccgacgccggcgagaucaccugcgucugccgcgacaacuggcacggcuccaaccgccccugggucuccuucaaccagaaccucgaguaccagaucggcuacaucugcuccggcgucuucggcgacaacccccgccccaacgacggcaccggcuccugcggccccgucucccccaacggcgccuacggcaucaagggcuucuccuucaaguacggcaacggcgucuggaucggccgcaccaaguccaccaacucccgcuccggcuucgagaugaucugggaccccaacggcuggaccggcaccgacuccaacuucuccgucaagcaggacaucgucgccaucaccgacugguccggcuacuccggcuccuucguccagcaccccgagcucaccggccucgacugcauccgccccugcuucuggaucgagcucauccgcggccgccccaaggaguccaccaucuggaccuccggcuccuccaucuccuucugcggcgucaacuccgacaccgucuccugguccuggcccgacggcgccgagcuccccuucaccaucgacaaguga

SEQ ID NO: 117089 - RNA, 1350 nt, Artificial Sequence
  derived and/or modified CDS sequence (opt2) from neuraminidase__InfluenzaA__AEO89050
augaaccccaaccagaagaucaucaccaucggcuccaucugcauggucaucggcaucgucucccucaugcuccagaucggcaacaugaucuccaucugggucucccacuccauccagaccggcaaccagcaccaggccgagcccauccgcaacaccaacuuccucaccgagaacgccgucgccuccgucacccucgccggcaacuccucccucugccccauccgcggcugggccguccacuccaaggacaacuccauccgcaucggcuccaagggcgacgucuucgucauccgcgagcccuucaucuccugcucccaccucgagugccgcaccuucuuccucacccagggcgcccuccucaacgacaagcacuccaacggcaccgucaaggaccgcuccccccaccgcacccucauguccugccccaugggcgaggcccccucccccuacaacucccgcuucgaguccgucgccugguccgccuccgccugccacgacggcaccuccuggcucaccaucggcaucuccggccccgacaacggcgccgucgccguccucaaguacaacggcaucaucaccgacaccaucaaguccuggcgcaacaacauccuccgcacccaggaguccgagugcgccugcgucaacggcuccugcuucaccgucaugaccgacggccccuccaacggccaggccuccuacaagaucuucaagauggagaagggcaaggucgucaaguccgucgagcucaacgcccccaacuaccacuacgaggagugcuccugcuaccccgacgccggcgagaucaucugcgucugccgcgacaacuggcacggcuccaaccgccccugggucuccuucaaccagaaccucgaguaccagaucggcuacaucugcuccggcgucuucggcgacaacccccgccccaacgacggcaccggcuccugcggccccgucucccccaacggcgccuacggcaucaagggcuucuccuucaaguacggcaacggcgucuggaucggccgcaccaaguccaccaacucccgcuccggcuucgagaugaucugggaccccaacggcuggaccggcaccgacuccgacuucuccgucaagcaggacaucgucgccaucaccgacugguccggcuacuccggcuccuucguccagcaccccgagcucaccggccucgacugcauccgccccugcuucugggucgagcucauccgcggccgccccaaggaguccaccaucuggaccuccggcuccuccaucuccuucugcggcgucaacuccgacaccgucuccugguccuggcccgacggcgccgagcuccccuucaccaucgacaaguga

SEQ ID NO: 117090 - RNA, 1350 nt, Artificial Sequence
  derived and/or modified CDS sequence (opt2) from neuraminidase__InfluenzaA__AEO89058
augaaccccaaccagaagaucaucaccaucggcuccaucugcauggucaucggcaucgucucccucaugcuccagaucggcaacaugaucuccaucugggucucccacuccauccagaccggcaaccagcgccaggccgagcccaucuccaacaccaaguuccucaccgagaaggccgucgccuccgucacccucgccggcaacuccucccucugccccaucuccggcugggccgucuacuccaaggacaacuccauccgcaucggcucccgcggcgacgucuucgucauccgcgagcccuucaucuccugcucccaccucgagugccgcaccuucuuccucacccagggcgcccuccucaacgacaagcacuccaacggcaccgucaaggaccgcuccccccaccgcacccucauguccugccccgucggcgaggcccccucccccuacaacucccgcuucgaguccgucgccugguccgccuccgccugccacgacggcaccuccuggcucaccaucggcaucuccggccccgacaacggcgccgucgccguccucaaguacaacggcaucaucaccgacaccaucaaguccuggcgcaacaacauccuccgcacccaggaguccgagugcgccugcgucaacggcuccugcuucaccgucaugaccgacggccccuccaacggccaggccuccuacaagaucuucaagauggagaagggcaaggucgucaaguccgucgagcucgacgcccccaacuaccacuacgaggagugcuccugcuaccccgacgccggcgagaucaccugcgucugccgcgacaacuggcacggcuccaaccgccccugggucuccuucaaccagaaccucgacuaccagaucggcuacaucugcuccggcgucuucggcgacaacccccgccccaacgacggcaccggcuccugcggccccgucucccccaacggcgccuacggcgucaagggcuucuccuucaaguacggcaacggcgucuggaucggccgcaccaaguccaccaacucccgcuccggcuucgagaugaucugggaccccaacggcuggaccggcaccgacuccuccuucuccgucaagcaggacaucgucgccaucaccgacugguccggcuacuccggcuccuucguccagcaccccgagcucaccggccucgacugcauccgccccugcuucugggucgagcucauccgcggccgccccaaggaguccaccaucuggaccuccggcuccuccaucuccuucugcggcgucaacuccgacaccgucuccugguccuggcccgacggcgccgagcuccccuucaccaucgacaaguga

SEQ ID NO: 117091 - RNA, 1350 nt, Artificial Sequence
  derived and/or modified CDS sequence (opt2) from neuraminidase__InfluenzaA__AEO89075
augaaccccaaccagaagaucaucaccaucggcuccaucugcauggucaucggcaucgucucccucaugcuccagaucggcaacaugaucuccaucugggucucccacuccauccagcgcggcaaccucaaccaggucgagcccaucuccaacaccaacuuccucaccgagaaggccgucgccuccgucacccucgccggcaacuccucccucugccccauccgcggcugggccauccacuccaaggacaacuccauccgcaucggcuccaagggcgacgucuucgucauccgcgagcccuucaucuccugcucccaccucgagugccgcaccuucuuccucacccagggcgcccuccucaacgacaagcacuccaacggcaccgucaaggaccgcuccccccaccgcacccucauguccugccccgucggcgagguccccucccccuacaacucccgcuucgaguccgucgccugguccgccuccgccugccacgacggcaccuccuggcucaccaucggcaucuccggccccgacaacggcgccgucgccgucgucaaguacaacggcaucaucaccgacaccaucaaguccuggcgcaacaacauccuccgcacccaggaguccgagugcgccugcgucaacggcuccugcuucaccgucaugaccgacggccccuccaacggccaggccuccuacaagaucuucaagauggagaagggcaaggucaucaaguccgucgagcucgacgcccccaacuaccacuacgaggagugcuccugcuaccccgacgccggcgagaucaccugcgucugccgcgacaacuggcacggcuccaaccgccccugggucuccuucaaccagaaccucgaguaccagaucggcuacaucugcuccggcgucuucggcgacaacccccgccccaacgacggcaccggcuccugcggccccgucucccccaacggcgccuacggcgucaagggcuucuccuucaaguacggcaacggcgucuggaucggccgcaccaagucccccaacucccgcuccggcuucgagaugaucugggaccccaacggcugguccgagaccgacuccuccuucuccgucaagcaggacaucgucgccaucaccgacugguccggcuacuccggcuccuucguccagcaccccgagcucaccggccucgacugcauccgccccugcuucugggucgagcucauccgcggccgccccaaggaguccaccaucuggaccuccggcuccuccaucuccuucugcggcgucaacuccgacaccgucuccugguccuggcccgacggcgccgagcuccccuucaccaucgacaaguga

SEQ ID NO: 117092 - RNA, 1350 nt, Artificial Sequence
  derived and/or modified CDS sequence (opt2) from neuraminidase__InfluenzaA__AEO89084
augaaccccaaccagaagaucaucaccaucggcuccaucugcauggucaucggcaucgucucccucaugcuccagaucggcaacaugaucuccaucuggaucuccuacuccauccagaccggcaaccagcaccaggccgagcccacccgcaacgccaccuuccucaccgagaacgccgucgccuccgucacccucgccggcaacuccucccucugccccguccgcggcugggccguccacuccaaggacaacuccauccgcaucggcuccaagggcgacgucuucgucauccgcgagcccuucaucuccugcucccaccucgagugccgcaccuucuuccucacccagggcgcccuccucaacgacaagcacuccaacggcaccgucaaggaccgcuccccccaccgcacccucauguccugccccgucggcgaggcccccucccccuacaacucccgcuucgaguccgucgccugguccgccuccgccugccacgacggcaccuccuggcucaccaucggcaucuccggccccgacaacggcgccgucgccguccucaaguacaacggcaucaucaccgacaccaucaaguccuggcgcaacaacauccuccgcacccaggaguccgagugcgccugcgucaacggcuccugcuucaccgucaugaccgacggccccuccgacggccaggccuccuacaagaucuucaagauggagaagggcaaggucgucaaguccgucgagcucaucgcccccaacuaccacuacgaggagugcuccugcuaccccgacgccggcgagaucaccugcgucugccgcgacaacuggcacggcuccaaccgccccugggucuccuucaaccagaaccucgaguaccagaucggcuacaucugcuccggcgucuucggcgacaacccccgccccaacgacggcaccggcuccugcggccccgucucccccaacggcgccuacggcaucaagggcuucuccuucaaguacggcaacggcgucuggaucggccgcaccaaguccaccaacucccgcuccggcuucgagaugaucugggaccccaacggcuggaccgagaccgacuccaacuucuccgucaagcaggacaucgucgccaucaccgacugguccggcuacuccggcuccuucguccagcaccccgagcucaccggccucgacugcauccgccccugcuucugggucgagcucauccgcggccgccccaaggaguccaccaucuggaccuccggcuccuccaucuccuucugcggcgucaacuccgacaccgucuccugguccuggcccgacggcgccgagcuccccuucaccaucgacaaguga

SEQ ID NO: 117093 - RNA, 1350 nt, Artificial Sequence
  derived and/or modified CDS sequence (opt2) from neuraminidase__InfluenzaA__AEO89093
augaaccccaaccagaagaucaucaccaucggcuccaucugcauggucaucggcaucgucucccucaugcuccagaucggcaacaugaucucccucugggucucccacuccauccagaccggcaaccagcaccaggucgagcccaucuccaacaccaacuuccucgucgagaaggccgucgccuccgucacccucgccggcaacuccucccucugccccauccgcggcugggccguccacuccaaggacaacuccauccgcaucggcuccaagggcgacgucuucgucauccgcgagcccuucaucuccugcucccaccucgagugccgcaccuucuuccucacccagggcgcccuccucaacgacaagcacuccaacggcaccgucaaggaccgcuccccccaccgcacccucauguccugccccgucggcgaggcccccucccccuacaacucccgcuucgaguccgucgccugguccgccuccgccugccacgacggcaccuccuggcucaccaucggcaucuccggccccgacaacggcgccgucgccguccucaaguacaacggcaugaucaccgacaccaucaaguccuggcgcaacaacauccuccgcacccaggaguccgagugcgccugcgucaacggcuccugcuucaccgucaugaccgacggccccuccaacggccaggccuccuacaagaucuucaagauggagaagggccgcgucgucaaguccgucgagcucgacgcccccaacuaccacuacgaggagugcuccugcuaccccgacgccggcgagaucaccugcgucugccgcgacaacuggcacggcuccaaccgccccugggucuccuucaaccagaaccucgaguaccagaucggcuacaucugcuccggcgucuucggcgacaacccccgccccaacgacggcaccggcuccugcggccccgucuccuccaacggcgccuacggcgucaagggcuucuccuucaaguacggcaacggcgucuggaucggccgcaccaagucccccaacucccgcuccggcuucgagaugaucugggaccccaacggcuggaccgagaccgacuccuccuucuccgucaagcaggacaucgucgccaucaccgacugguccggcuacuccggcuccuucguccagcaccccgagcucaccggccucgacugcauccgccccugcuucugggucgagcucauccgcggccgccccaaggaguccaccaucuggaccuccggcuccuccaucuccuucugcggcgucaacuccgacaccgucuccugguccuggcccgacggcgccgagcuccccuucaccaucgacaaguga

SEQ ID NO: 117094 - RNA, 1350 nt, Artificial Sequence
  derived and/or modified CDS sequence (opt2) from neuraminidase__InfluenzaA__AEO89102
augaaccccaaccagaagaucaucaccaucggcuccaucugcauggucaucggcaucgucucccucaugcuccagaucggcaacaugaucuccaucuggaucucccacuccauccagaccggcaaccagaaccaggucgagcccaucuccaacaccaacuuccucaccgagaaggccgucgccuccgucauccucgccggcaacuccucccucugccccauccgcggcugggccauccacuccaaggacaacuccauccgcaucggcuccaagggcgacgucuucgucauccgcgagcccuucaucuccugcucccaccucgagugccgcaccuucuuccucacccagggcgcccuccucaacgacaagcacuccaacggcaccgucaaggaccgcuccccccaccgcacccucauguccugccccgucggcgaggcccccucccccuacaacucccgcuucgaguccgucgccugguccgccuccgccugccacgacggcaccuccuggcucaccaucggcaucuccggccccgacuccggcgccgucgccguccucaaguacaacggcaucaucaccgacaccaucaaguccuggcgcaacaacauccuccgcacccaggaguccgagugcgccugcgucaacggcuccugcuucaccgucaugaccgacggccccuccaacggccaggccuccuacaagaucuucaagauggagaagggcaaggucaucaaguccgucgagcucgacgcccccaacuaccacuacgaggagugcuccugcuaccccgacgccggcgagaucaccugcgucugccgcgacaacuggcacggcuccaaccgccccugggucuccuucaaccagaaccucgaguaccagaucggcuacaucugcuccggcgucuucggcgacaacccccgccccaacgacggcaccggcuccugcggccccgucucccacaacggcgccuacggcgucaagggcuucuccuucaaguacggcaacggcgucuggaucggccgcaccaagucccccaacucccgcuccggcuucgagaugaucugggaccccaacggcugguccgagaccgacuccuccuucuccgucaagcaggacaucgucgccaucaccgacugguccggcuacuccggcuccuucguccagcaccccgagcucaccggccucgacugcauccgccccugcuucugggucgagcucauccgcggccgccccaaggaguccaccgucuggaccuccggcuccuccaucuccuucugcggcgucaacuccgacaccgucuccugguccuggcccgacggcgccgagcuccccuucaccaucgacaaguga

SEQ ID NO: 117095 - RNA, 1350 nt, Artificial Sequence
  derived and/or modified CDS sequence (opt2) from neuraminidase__InfluenzaA__AEO89111
augaaccccaaccagaagaucaucaccaucggcuccaucugcauggucaucggcaucgucucccucaugcuccagaucggcaacaucaucuccaucugggucucccacuccauccagaccggcaaccagcaccaggacgagcccauccgcaacgccaacguccucaccgagaacgccgucgccuccgucacccucgccggcaacuccucccucugccccguccgcggcugggccguccacuccaaggacaacuccauccgcaucggcuccaagggcgacgucuucgucauccgcgagcccuucaucuccugcucccaccucgagugccgcaccuucuuccucacccagggcgcccuccucaacgacaagcacuccaacggcaccgucaaggaccgcuccccccaccgcacccucauguccugccccgucggcgaggcccccucccccuacaacucccgcuucgaguccgucgccugguccgccuccgccugccacgacggcaccuccuggcucaccaucggcaucuccggccccgacaacggcgccgucgccguccucaaguacaacggcaucaucaccgacaccaucaaguccuggcgcaacaacauccuccgcacccaggaguccgagugcgccugcgucaacggcuccugcuucaccgucaugaccgacggccccuccaacggccaggccuccuacaagaucuucaagauggagaagggcaaggucgucaaguccgucgagcucaacgcccccaacuaccacuacgaggagugcuccugcuaccccgacgccggcgagaucaccugcgucugccgcgacaacuggcacggcuccaaccgccccugggucuccuucaaccagaaccucgaguaccagaucggcuacaucugcuccggcgucuucggcgacaacccccgccccaacgacggcaccggcuccugcgaccccgucucccccaacggcgccuacggcaucaagggcuucuccuucaaguacggcaacggcgucuggaucggccgcaccaaguccaccaacucccgcuccggcuucgagaugaucugggaccccaacggcuggaccgagaccgacuccaacuucuccgucaagcaggacaucgucgccaucaccgacugguccggcuacuccggcuccuucguccagcaccccgagcucaccggccucgacugcauccgccccugcuucugggucgagcucauccgcggccgccccaaggaguccaccaucuggaccuccggcuccuccaucuccuucugcggcgucaacuccgacaccgucuccugguccuggcccgacggcgccgagcuccccuucaccaucgacaaguga

SEQ ID NO: 117096 - RNA, 1350 nt, Artificial Sequence
  derived and/or modified CDS sequence (opt2) from neuraminidase__InfluenzaA__AEO89120
augaaccccaaccagaagaucaucaccaucggcuccaucugcauggucaucggcaucgucucccucaugcuccagaucggcaacaugaucuccaucugggucucccacuccauccagaccggcaaccagcaccaggccgagcccauccgcaacgccuccuuccucaccgagaacgccgucgccuccgucacccucgccggcaacuccucccucugccccguccgcggcugggccguccacuccaaggacaacuccauccgcaucggcuccaagggcgacgucuucgucauccgcgagcccuucaucuccugcucccaccucgagugccgcaccuucuuccucacccagggcgcccuccucaacgacaagcacuccaacggcaccgucaaggaccgcuccccccaccgcacccucauguccugccccgucggcgaggcccccucccccuacaacucccgcuucgaguccgucgccugguccgccuccgccugccacgacggcaucuccuggcucaccaucggcaucuccggccccgacaacggcgccgucgccguccucaaguacaacggcaucaucaccgacaccaucaaguccuggcgcaacaacauccuccgcacccaggaguccgagugcgccugcgucaacggcuccugcuucaccgucaugaccgacggccccuccaacggccaggccuccuacaagaucuucaagauggagaagggcaaggucgucaaguccgucgagcucaacgcccccaacuaccacuacgaggagugcuccugcuaccccgacgccggcgagaucaccugcgucugccgcgacaacuggcacggcuccaaccgccccugggucuccuucaaccagaaccucgaguaccagaucggcuacaucugcuccggcgucuucggcgacaacccccgccccaacgacggcaccggcuccugcggccccgucucccccaacggcgccuacggcaucaagggcuucuccuucaaguacggcaacggcgucuggaucggccgcaccaaguccaccaacucccgcuccggcuucgagaugaucugggaccccaacggcugggccgagaccgacuccaacuucuccgucaagcaggacaucgucgccaucaccgacugguccggcuacuccggcuccuucguccagcaccccgagcucaccggccucgacugcauccgccccugcuucugggucgagcucauccgcggccgccccaaggagggcaccaucuggaccuccggcuccuccaucuccuucugcggcgucaacuccgacaccgucuccugguccuggcccgacggcgccgagcuccccuucaccaucgacaaguga

SEQ ID NO: 117097 - RNA, 1350 nt, Artificial Sequence
  derived and/or modified CDS sequence (opt2) from neuraminidase__InfluenzaA__AEO89129
augaaccccaaccagaagaucaucaccaucggcuccaucugcauggucaucggcaucgucucccucaugcuccagaucggcaacaucaucuccaucugggucucccacuccacccagaccggcaaccagcaccaggacgagcccauccgcaacgccaacuuccucaccgagaacgccgucgccuccgucacccucgccggcaacuccucccucugccccguccgcggcugggccguccacuccaaggacaacuccauccgcgucggcuccaagggcgacgucuucgucauccgcgagcccuucaucuccugcucccaccucgagugccgcaccuucuuccucacccagggcgcccuccucaacgacaagcacuccaacggcaccgucaaggaccgcuccccccaccgcacccucauguccugccccgucggcgaggcccccucccccuacaacucccgcuucgaguccgucgccugguccgccuccgccugccacgacggcaccuccuggcucaccaucggcaucuccggccccgacaacggcgccgucgccguccucaaguacaacggcaucaucaccgacaccaucaaguccuggcgcaacaacauccuccgcacccaggaguccgagugcgccugcgucaacggcuccugcuucaccgucaugaccgacggccccuccaacggccaggccuccuacaagaucuucaagauggagaagggcaaggucgucaaguccgucgagcucaacgcccccaacuaccacuacgaggagugcuccugcuaccccgacgccggcgagaucaccugcgucugccgcgacaacuggcacggcuccaaccgccccugggucuccuucaaccagaaccucgaguaccagaucggcuacaucugcuccggcgucuucggcgacaacccccgccccaacgacggcaccggcuccugcgaccccgucucccccaacggcgccuacggcaucaagggcuucuccuucaaguacggcaacggcgucuggaucggccgcaccaaguccaccaacucccgcuccggcuucgagaugaucugggaccccaacggcuggaccgagaccgacuccaacuucuccgucaagcaggacaucgucgccaucaccgacugguccggcuacuccggcuccuucguccagcaccccgagcucaccggccucgacugcauccgccccugcuucugggucgagcucauccgcggccgccccaaggaguccaccaucuggaccuccggcuccuccaucuccuucugcggcgucaacuccgacaccgucuccugguccuggcccgacggcgccgagcuccccuucaccaucgacaaguga

SEQ ID NO: 117098 - RNA, 1350 nt, Artificial Sequence
  derived and/or modified CDS sequence (opt2) from neuraminidase__InfluenzaA__AEO89138
augaaccccaaccagaagaucaucaccaucggcuccaucugcauggucaccggcaucgucucccucaugcuccagaucggcaacaucaucuccaugugggucucccacuccauccagacccgcaaccagcaccaggccgagcccauccgcaacaccaacuuccucaccgagaacgccgucgccuccgucacccucaccggcaacuccucccucugccccauccgcggcugggccguccacuccaaggacaacuccauccgcaucggcuccaagggcgacgucuucgucauccgcgagcccuucaucuccugcucccaccucgagugccgcaccuucuuccucacccagggcgcccuccucaacgacaagcacuccaacggcaccgucaaggaccgcuccccccaccgcacccucauguccugccccgucggcgaggcccccucccccuacaacucccgcuucgaguccgucgccugguccgccuccgccugccacgacggcaccuccuggcucaccaucggcaucuccggccccgacaacggcgccgucgccguccucaaguacaacggcaucaucaccgacaccaucaaguccuggcgcaacaacauccuccgcacccaggaguccgagugcgccugcgucaacggcuccugcuucaccgucaugaccgacggccccuccaacggccaggccuccuacaagaucuucaagauggagaagggcaaggucgucaaguccgucgagcucaacgcccccaacuaccacuacgaggagugcuccugcuaccccgacgccggcgagaucaucugcgucugccgcgacaacuggcacggcuccaaccgccccugggucuccuucaaccagaaccucgaguaccagaucggcuacaucugcuccggcgucuucggcgacaacccccgccccaacgacggcaccggcuccugcggccccgucucccccaacggcgccuacggcaucaagggcuucuccuucaaguacggcaacggcgucuggaucggccgcaccaaguccaccaacucccgcuccggcuucgagaugaucugggaccccaacggcuggaccggcaccgacaacgacuucuccgucaagcaggacaucgucgccaucaccgacugguccggcuacuccggcuccuucguccagcaccccgagcucaccggccucgacugcauccgccccugcuucugggucgagcucauccgcggccgccccaaggaguccaccgucuggaccuccggcuccuccaucuccuucugcggcgucaacuccgacaccgucuccugguccuggcccgacggcgccgagcuccccuucaccaucgacaaguga

SEQ ID NO: 117099 - RNA, 1350 nt, Artificial Sequence
  derived and/or modified CDS sequence (opt2) from neuraminidase__InfluenzaA__AEO89156
augaaccccaaccagaagaucaucaccaucggcuccaucugcauggucaccggcaucgucucccucaugcuccagaucggcaacaucaccuccaugugggucucccacuccauccagacccgcaaccagcaccaggccgagcccauccgcaacaccaacuuccucaccgagaacgccgucgccuccgucacccucgccggcaacuccucccucugccccauccgcggcugggccguccacuccaaggacaacuccauccgcaucggcuccaagggcgacgucuucgucauccgcgagcccuucaucuccugcucccaccucgagugccgcaccuucuuccucacccagggcgcccuccucaacgacaagcacuccaacggcaccgucaaggaccgcuccccccaccgcacccucauguccugccccgucggcgaggcccccucccccuacaacucccgcuucgaguccgucgccugguccgccuccgccugccacgacggcaccuccuggcucaccaucggcaucuccggccccgacaacggcgccgucgccguccucaaguacaacggcaucaucaccgacaccaucaaguccuggcgcaacaacauccuccgcacccaggaguccgagugcgccugcgucaacggcuccugcuucaccgucaugaccgacggccccuccaacggccaggccuccuacaagaucuucaagauggagaagggcaaggucgucaaguccgucgagcucaacgcccccaacuaccacuacgaggagugcuccugcuaccccgacgccggcgagaucaucugcgucugccgcgacaacuggcacggcuccaaccgccccugggucuccuucaaccagaaccucgaguaccagaucggcuacaucugcuccggcgucuucggcgacaacccccgccccaacgacggcaccggcuccugcggccccgucucccccaacggcgccuacggcaucaagggcuucuccuucaaguacggcaacggcgucuggaucggccgcaccaaguccaccaacucccgcuccggcuucgagaugaucugggaccccaacggcuggaccggcaccgacuccgacuucuccgucaagcaggacaucgucgccaucaccgacugguccggcuacuccggcuccuucguccagcaccccgagcucaccggccucgacugcauccgccccugcuucugggucgagcucauccgcggccgccccaaggaguccaccaucuggaccuccggcuccuccaucuccuucugcggcgucaacuccgacaccgucuccugguccuggcccgacggcgccgagcuccccuucaccaucgacaaguga

SEQ ID NO: 117100 - RNA, 1350 nt, Artificial Sequence
  derived and/or modified CDS sequence (opt2) from neuraminidase__InfluenzaA__AEO89174
augaaccccaaccagaagaucaucaccaucggcuccaucugcauggucaccggcaucgucucccucaugcuccagaucggcaacaucaucuccaugugggucucccacuccauccagacccgcaaccagcaccaggccgagcccauccgcaacaccaacuuccucaccgagaacgccgucgccuccgucacccucgccggcaacuccucccucugccccauccgcggcugggccguccacuccaaggacaacuccauccgcaucggcuccaagggcgacgucuucgucauccgcgagcccuucaucuccugcucccaccucgagugccgcaccuucuuccucacccagggcgcccuccucaacgacaagcacuccaacggcaccgucaaggaccgcuccccccaccgcacccucauguccugccccgucggcgaggcccccucccccuacaacucccgcuucgaguccgucgccugguccgccuccgccugccacgacggcaccuccuggcucaccaucggcaucuccggccccgacaacggcgccgucgccguccucaaguacaacggcaucaucaccgacaccaucaaguccuggcgcaacaacauccuccgcacccaggaguccgagugcgccugcgucaacggcuccugcuucaccgucaugaccgacggccccuccaacggccaggccuccuacaagaucuucaagauggagaagggcaaggucgucaaguccgucgagcucaacgcccccaacuaccacuacgaggagugcuccugcuaccccgacgccggcgagaucaucugcgucugccgcgacaacuggcacggcuccaaccgccccugggucuccuucaaccagaaccucgaguaccagaucggcuacaucugcuccggcgucuucggcgacaacccccgccccaacgacggcaccggcuccugcggccccgucucccccaacggcgccuacggcaucaagggcuucuccuucaaguacggcaacggcgucuggaucggccgcaccaaguccaccaacucccgcuccggcuucgagaugaucugggaccccaacggcuggaccggcaccgacuccgacuucuccgucaagcaggacaucgucgccaucaccgacugguccggcuacuccggcuccuucguccagcaccccgagcucaccggccucgacugcauccgccccugcuucugggucgagcucauccgcggccgccccaaggaguccaccaucuggaccuccggcuccuccaucuccuucugcggcgucaacuccgacaccgucuccugguccuggcccgacggcgccgagcuccccuucaccaucgacaaguga

SEQ ID NO: 117101 - RNA, 1350 nt, Artificial Sequence
  derived and/or modified CDS sequence (opt2) from neuraminidase__InfluenzaA__AEO89183
augaaccccaaccagaagaucgucaccaucggcuccaucugcauggucaucggcaucgucucccucaugcuccagaucggcaacaugaucuccaucugggucucccacuccauccagaccggcaaccagcaccagaccgagcccauccgcaacaccaacuuccucaccgagaacaccgucgccuccgucacccucgccggcaacuccucccucugccccauccgcggcugggccguccacuccaaggacaacuccauccgcaucggcuccaagggcgacgucuucgucauccgcgagcccuucaucuccugcucccaccucgagugccgcaccuucuuccucacccagggcgcccuccucaacgacaagcacuccaacggcaccgucaaggaccgcuccccccaccgcacccucauguccugccccaucggcgaggcccccucccccuacaacucccgcuucgaguccgucgccugguccgccuccgccugccacgacggcaccuccuggcucaccaucggcaucuccggccccgacaacggcgccgucgccguccucaaguacaacggcaucaucaccgacaccaucaaguccuggcgcaacaacauccuccgcacccaggaguccgagugcgccugcgucaacggcuccugcuucaccgucaugaccgacggccccuccaacggccaggccuccuacaagaucuucaagauggagaagggcaaggucgucaaguccgucgagcucaacgcccccaacuaccacuacgaggagugcuccugcuaccccgacgccggcgagaucaucugcgucugccgcgacaacuggcacggcuccaaccgccccugggucuccuucaaccagaaccucgaguaccagaucggcuacaucugcuccggcgucuucggcgacaacccccgccccaacgacggcaagggcuccugcggccccgucucccccaacggcgccuacggcgucaagggcuucuccuucaaguacggcaacggcgucuggaucggccgcaccaaguccacccacucccgcuccggcuucgagaugaucugggaccccaacggcuggaccggcaccgacuccgaguucuccaugaagcaggacaucgucgccaucaccgacugguccggcuacuccggcuccuucguccagcaccccgagcucaccggccucgacugcauccgccccugcuucugggucgagcucauccgcggccgccccaaggaguccaccaucuggaccuccggcuccuccaucuccuucugcggcgucaacuccgacaccgucuccugguccuggcccgacggcgccgagcuccccuucaccaucgacaaguga

SEQ ID NO: 117102 - RNA, 1350 nt, Artificial Sequence
  derived and/or modified CDS sequence (opt2) from neuraminidase__InfluenzaA__AEO89205
augaaccccacccagaagaucaucaccaucggcuccaucugcauggucaucggcaucgucucccucaugcuccagaucggcaacaugaucuccaucugggucucccacuccauccagaccggcaaccagcaccaggccgagcccauccgcaacgccuccuuccucaccgagaacgccgucgccuccgucacccucgccggcaacuccucccucugccccguccgcggcugggccguccacuccaaggacaacuccauccgcaucggcuccaagggcgacgucuucgucauccgcgagcccuucaucuccugcucccaccucgagugccgcaccuucuuccucacccagggcgcccuccucaacgacaagcacuccaacggcaccgucaaggaccgcuccccccaccgcacccucauguccugccccgucggcgaggcccccucccccuacaacucccgcuucgaguccgucgccugguccgccuccgccugccacgacggcaucuccuggcucaccaucggcaucuccggccccgacaacggcgccgucgccguccucaaguacaacggcaucaucaccgacaccaucaaguccuggcgcaacaacauccuccgcacccaggaguccgagugcgccugcgucaacggcuccugcuucaccgucaugaccgacggccccuccaacggccaggccuccuacaagaucuucaagauggagaagggcaaggucgucaaguccgucgagcucaacgcccccaacuaccacuacgaggagugcuccugcuaccccgacgccggcgagaucaccugcgucugccgcgacaacuggcacggcuccaaccgccccugggucuccuucaaccagaaccucgaguaccagaucggcuacaucugcuccggcgucuucggcgacaacccccgccccaacgacggcaccggcuccugcggccccgucucccccaacggcgccuacggcaucaagggcuucuccuucaaguacggcaacggcgucuggaucggccgcaccaaguccaccaacucccgcuccggcuucgagaugaucugggaccccaacggcugggccgagaccgacuccaacuucuccgucaagcaggacaucgucgccaucaccgacugguccggcuacuccggcuccuucguccagcaccccgagcucaccggccucgacugcauccgccccugcuucugggucgagcucauccgcggccgccccaaggagggcaccaucuggaccuccggcuccuccaucuccuucugcggcgucaacuccgacaccgucuccugguccuggcccgacggcgccgagcuccccuucaccaucgacaaguga

SEQ ID NO: 117103 - RNA, 1350 nt, Artificial Sequence
  derived and/or modified CDS sequence (opt2) from neuraminidase__InfluenzaA__AEO89215
augaaccccaaccagaagaucaucaccaucggcuccaucugcauggccaucggcaucgucucccucaugcuccagaucggcaacaugaucuccaucugggucucccacuccauccagaccggcaaccagcaccaggccgagcccauccgcaacgccuccuuccucaccgagaacgccgucgccuccgucacccucgccggcaacuccucccucugccccguccgcggcugggccguccacuccaaggacaacuccauccgcaucggcuccaagggcgacgucuucgucauccgcgagcccuucaucuccugcucccaccucgagugccgcaccuucuuccucacccagggcgcccuccucaacgacaagcacuccaacggcaccgucaaggaccgcuccccccaccgcacccucauguccugccccgucggcgaggcccccucccccuacaacucccgcuucgaguccgucgccugguccgccuccgccugccacgacggcaucuccuggcucaccaucggcaucuccggccccgacaacggcgccgucgccguccucaaguacaacggcaucaucaccgacaccaucaaguccuggcgcaacaacauccuccgcacccaggaguccgagugcgccugcgucaacggcuccugcuucaccgucaugaccgacggccccuccaacggccaggccuccuacaagaucuucaagauggagaagggcaaggucgucaaguccgucgagcucaacgcccccaacuaccacuacgaggagugcuccugcuaccccgacgccggcgagaucaccugcgucugccgcgacaacuggcacggcuccaaccgccccugggucuccuucaaccagaaccucgaguaccagaucggcuacaucugcuccggcgucuucggcgacaacccccgccccaacgacggcaccggcuccugcggccccgucucccccaacggcgccuacggcaucaagggcuucuccuucaaguacggcaacggcgucuggaucggccgcaccaaguccaccaacucccgcuccggcuucgagaugaucugggaccccaacggcugggccgagaccgacuccaacuucuccgucaagcaggacaucgucgccaucaccgacugguccggcuacuccggcuccuucguccagcaccccgagcucaccggccucgacugcauccgccccugcuucugggucgagcucauccgcggccgccccaaggagggcaccaucuggaccuccggcuccuccaucuccuucugcggcgucaacuccgacaccgucuccugguccuggcccgacggcgccgagcuccccuucaccaucgacaaguga

SEQ ID NO: 117104 - RNA, 1350 nt, Artificial Sequence
  derived and/or modified CDS sequence (opt2) from neuraminidase__InfluenzaA__AEO89226
augaaccccacccagaagaucaucaccaucggcuccaucugcauggccaucggcaucgucucccucaugcuccagaucggcaacaugaucuccaucugggucucccacuccauccagaccggcaaccagcaccaggccgagcccauccgcaacgccuccuuccucaccgagaacgccgucgccuccgucacccucgccggcaacuccucccucugccccguccgcggcugggccguccacuccaaggacaacuccauccgcaucggcuccaagggcgacgucuucgucauccgcgagcccuucaucuccugcucccaccucgagugccgcaccuucuuccucacccagggcgcccuccucaacgacaagcacuccaacggcaccgucaaggaccgcuccccccaccgcacccucauguccugccccgucggcgaggcccccucccccuacaacucccgcuucgaguccgucgccugguccgccuccgccugccacgacggcaucuccuggcucaccaucggcaucuccggccccgacaacggcgccgucgccguccucaaguacaacggcaucaucaccgacaccaucaaguccuggcgcaacaacauccuccgcacccaggaguccgagugcgccugcgucaacggcuccugcuucaccgucaugaccgacggccccuccaacggccaggccuccuacaagaucuucaagauggagaagggcaaggucgucaaguccgucgagcucaacgcccccaacuaccacuacgaggagugcuccugcuaccccgacgccggcgagaucaccugcgucugccgcgacaacuggcacggcuccaaccgccccugggucuccuucaaccagaaccucgaguaccagaucggcuacaucugcuccggcgucuucggcgacaacccccgccccaacgacggcaccggcuccugcggccccgucucccccaacggcgccuacggcaucaagggcuucuccuucaaguacggcaacggcgucuggaucggccgcaccaaguccaccaacucccgcuccggcuucgagaugaucugggaccccaacggcugggccgagaccgacuccaacuucuccgucaagcaggacaucgucgccaucaccgacugguccggcuacuccggcuccuucguccagcaccccgagcucaccggccucgacugcauccgccccugcuucugggucgagcucauccgcggccgccccaaggagggcaccaucuggaccuccggcuccuccaucuccuucugcggcgucaacuccgacaccgucuccugguccuggcccgacggcgccgagcuccccuucaccaucgacaaguga

SEQ ID NO: 117105 - RNA, 1350 nt, Artificial Sequence
  derived and/or modified CDS sequence (opt2) from neuraminidase__InfluenzaA__AEO89237
augaaccccaaccagaagaucaucaccaucggcuccaucugcauggucaucggcaucgucucccucaugcuccagaucggcaacaucaucuccaugugggucucccacuccauccagacccgcaaccagcaccaggccgagcccauccgcaacaccaacuuccucaccgagaacgccgucgccuccgucacccucgccggcaacuccucccucugccccauccgcggcugggccguccacuccaaggacaacuccauccgcaucggcuccaagggcgacgucuucgucauccgcgagcccuucaucuccugcucccaccucgagugccgcaccuucuuccucacccagggcgcccuccucaacgacaagcacuccaacggcaccgucaaggaccgcuccccccaccgcacccucauguccugccccgucggcgaggcccccucccccuacaacucccgcuucgaguccgucgccugguccgccuccgccugccacgacggcaccuccuggcucaccaucggcaucuccggccccgacaacggcgccgucgccguccucaaguacaacggcaucaucaccgacaccaucaaguccuggcgcaacaacauccuccgcacccaggaguccgagugcgccugcgucaacggcuccugcuucaccgucaugaccgacggccccuccaacggccaggccuccuacaagaucuucaagauggagaagggcaaggucgucaaguccgucgagcucaacgcccccaacuaccacuacgaggagugcuccugcuaccccgacgccggcgagaucaucugcgucugccgcgacaacuggcacggcuccaaccgccccugggucuccuucaaccagaaccucgaguaccagaucggcuacaucugcuccggcgucuucggcgacaacccccgccccaacgacggcaccggcuccugcggccccgucucccccaacggcgccuacggcaucaagggcuucuccuucaaguacggcaacggcgucuggaucggccgcaccaaguccaccaacucccgcuccggcuucgagaugaucugggaccccaacggcuggaccggcaccgacuccgacuucuccgucaagcaggacaucgucgccaucaccgacugguccggcuacuccggcuccuucguccagcaccccgagcucaccggccucgacugcauccgccccugcuucugggucgagcucauccgcggccgccccaaggaguccaccaucuggaccuccggcuccuccaucuccuucugcggcgucaacuccgacaccgucuccugguccuggcccgacggcgccgagcuccccuucaccaucgacaaguga

SEQ ID NO: 117106 - RNA, 1350 nt, Artificial Sequence
  derived and/or modified CDS sequence (opt2) from neuraminidase__InfluenzaA__AEO89248
augaaccccaaccagaagaucaucaccaucggcuccaucugcauggucaucggcaucgucucccucaugcuccagaucggcaacaucaucuccaucugggucucccacuccuuccagacccgcguccagcaccaggccgagcccauccgcaacaccaacuuccucaccgagaacgccgucgccuccgucacccucgccggcaacuccucccucugccccauccgcggcugggccguccacuccaaggacaacuccauccgcaucggcuccaagggcgacgucuucgucauccgcgagcccuucaucuccugcucccaccucgagugccgcaccuucuuccucacccagggcgcccuccucaacgacaagcacuccaacggcaccgucaaggaccgcuccccccaccgcacccucauguccugccccgucggcgaggcccccucccccuacaacucccgcuucgaguccgucgccugguccgccuccgccugccacgacggcaccuccuggcucaccaucggcaucuccggccccgacaacggcgccgucgccguccucaaguacaacggcaucaucaccgacaccaucaaguccuggcgcaacaacauccuccgcacccaggaguccgagugcgccugcgucaacggcuccugcuucaccgucaugaccgacggccccuccaacggccaggccuccuacaagaucuucaagaugaagaagggcaaggucgucaaguccgucgagcucaacgcccccaacuaccacuacgaggagugcuccugcuaccccgacgccggcgagaucaucugcgucugccgcgacaacuggcacggcuccaaccgccccugggucuccuucaaccagaaccucgaguaccagaucggcuacaucugcuccggcgucuucggcgacaacccccgccccaacgacggcaccggcuccugcggccccgucucccccaacggcgccuacggcaucaagggcuucuccuucaaguacggcaacggcgucuggaucggccgcaccaaguccaccaacucccgcuccggcuucgagaugaucugggaccccaacggcuggaccggcaccgacuccgacuucuccaugaagcaggacaucgucgccaucaccgacugguccggcuacuccggcuccuucguccagcaccccgagcucaccggccucgacugcauccgccccugcuucugggucgagcucauccgcggccgccccaaggaguccaccaucuggaccuccggcuccuccaucuccuucugcggcgucaacuccgacaccgucuccugguccuggcccgacggcgccgagcuccccuucaccaucgacaaguga

SEQ ID NO: 117107 - RNA, 1350 nt, Artificial Sequence
  derived and/or modified CDS sequence (opt2) from neuraminidase__InfluenzaA__AEO89270
augaaccccaaccagaagaucaucaccaucggcuccaucugcauggucaccggcaucgucucccucaugcuccagaucggcaacaucaccuccaugugggucucccacuccauccagacccgcaaccagcaccaggccgagcccauccgcaacaccaacuuccucaccgagaacgccgucgccuccgucacccucgccggcaacuccucccucugccccauccgcggcugggccguccacuccaaggacaacuccauccgcaucggcuccaagggcgacgucuucgucauccgcgagcccuucaucuccugcucccaccucgagugccgcaccuucuuccucacccagggcgcccuccucaacgacaagcacuccaacggcaccgucaaggaccgcuccccccaccgcacccucauguccugccccgucggcgaggcccccucccccuacaacucccgcuucgaguccgucgccugguccgccuccgccugccacgacggcaccuccuggcucaccaucggcaucuccggccccgacaacggcgccgucgccguccucaaguacaacggcaucaucaccgacaccaucaaguccuggcgcaacaacauccuccgcacccaggaguccgagugcgccugcgucaacggcuccugcuucaccgucaugaccgacggccccuccaacggccaggccuccuacaagaucuucaagauggagaagggcaaggucgucaaguccgucgagcucaacgcccccaacuaccacuacgaggagugcuccugcuaccccgacgccggcgagaucaucugcgucugccgcgacaacuggcacggcuccaaccgccccugggucuccuucaaccagaaccucgaguaccagaucggcuacaucugcuccggcgucuucggcgacaacccccgccccaacgacggcaccggcuccugcggccccgucucccccaacggcgccuacggcaucaagggcuucuccuucaaguacggcaacggcgucuggaucggccgcaccaaguccaccaacucccgcuccggcuucgagaugaucugggaccccaacggcuggaccggcaccgacuccgacuucuccgucaagcaggacaucgucgccaucaccgacugguccggcuacuccggcuccuucguccagcaccccgagcucaccggccucgacugcauccgccccugcuucugggucgagcucauccgcggccgccccaaggaguccaccaucuggaccuccggcuccuccaucuccuucugcggcgucaacuccgacaccgucggcugguccuggcccgacggcgccgagcuccccuucaccaucgacaaguga

SEQ ID NO: 117108 - RNA, 1350 nt, Artificial Sequence
  derived and/or modified CDS sequence (opt2) from neuraminidase__InfluenzaA__AEO89281
augaaccccaaccagaagaucaucaccaucggcuccaucugcauggucgucggcaucgucucccucaugcuccagaucggcaacaucgucuccaucugggucucccacuccauccagaccggccaccagcagcaggccgagcccaucaagaacaccaacuuccucaccaagaacgccgucgccuccgucacccucgccggcaacuccucccucugccccauccgcggcugggccguccacuccaaggacaacuccauccgcaucggcuccaagggcgacgucuucgucauccgcgagcccuucaucuccugcucccaccucgagugccgcaccuucuuccucacccagggcgcccuccucaacgacaagcacuccaacggcaccgucaaggaccgcuccccccaccgcacccucauguccugccccgucggcgaggcccccucccccuacaacucccgcuucgaguccgucgccugguccgccuccgccugccacgacggcaccuccuggcucaccaucggcaucuccggccccgacaacggcgccgucgccguccucaaguacaacggcaucaucaccgacaccaucaaguccuggcgcaacaacacccuccgcacccaggaguccgagugcgccugcgucaacggcuccugcuucaccgucaugaccgacggccccuccaacggccaggccuccuacaagaucuucaagauggagaagggcaaggucgucaaguccgccgagcucaacgcccccaacuaccacuacgaggagugcuccugcuaccccgacgccggcgagaucaucugcgucugccgcgacaacuggcacggcuccaaccgccccugggucuccuucaaccagaaccucgaguaccagaucggcuacaucugcuccggcgucuucggcgacaacccccgccccaacgacggcaccggcuccugcggccccgucucccccaacggcgccuacggcaucaagggcuucuccuucaaguacggcaacggcgucuggaucggccgcaccaaguccaccaacucccgcuccggcuucgagaugaucugggaccccaacggcuggaccggcaccgacuccaacuucuccaugaagcaggacaucgucgccaucaccgagugguccggcuacuccggcuccuucguccagcaccccgagcucaccggccucgacugcauccgccccugcuucugggucgagcucauccgcggccgccccaaggaguccaccaucuggaccuccggcuccuccaucuccuucugcggcgucaacuccgacaccgucuccugguccuggcccgacggcgccgagcuccccuucaccaucgacaaguga

SEQ ID NO: 117109 - RNA, 1350 nt, Artificial Sequence
  derived and/or modified CDS sequence (opt2) from neuraminidase__InfluenzaA__AEO89291
augaaccccaaccagaagaucaucaccaucggcuccaucugcauggucgucggcaucgucucccucaugcuccagaucggcaacaucgucuccaucugggucucccacuccauccagaccggccaccagcagcaggccgagcccaucaagaacaccaacuuccucaccgagaacgccgucgccuccgucacccucgccggcaacuccucccucugccccauccgcggcugggccguccacuccaaggacaacuccauccgcaucggcuccaagggcgacgucuucgucauccgcgagcccuucaucuccugcucccaccucgagugccgcaccuucuuccucacccagggcgcccuccucaacgacaagcacuccaacggcaccgucaaggaccgcuccccccaccgcacccucauguccugccccgucggcgaggcccccucccccuacaacucccgcuucgaguccgucgccugguccgccuccgccugccacgacggcaccuccuggcucaccaucggcaucuccggccccgacaacggcgccgucgccguccucaaguacaacggcaucaucaccgacaccaucaaguccuggcgcaacaacauccuccgcacccaggaguccgagugcgccugcgucaacggcuccugcuucaccgucaugaccgacggccccuccaacggccaggccuccuacaagaucuucaagauggagaagggcaaggucgucaaguccgccgagcucaacgcccccaacuaccacuacgaggagugcuccugcuaccccgacgccggcgagaucaucugcgucugccgcgacaacuggcacggcuccaaccgccccugggucuccuucaaccagaaccucgaguaccagaucggcuacaucugcuccggcgucuucggcgacaacccccgccccaacgacggcaccggcuccugcggccccgucucccccaacggcgccuacggcaucaagggcuucuccuucaaguacggcaacggcgucuggaucggccgcaccaaguccaccaacucccgcuccggcuucgagaugaucugggaccccaacggcuggaccggcaccgacuccaacuucuccaugaagcaggacaucgucgccaucaccgagugguccggcuacuccggcuccuucguccagcaccccgagcucaccggccucgacugcauccgccccugcuucugggucgagcucauccgcggccgccccaaggaguccaccaucuggaccuccggcuccuccaucuccuucugcggcgucaacuccgacaccgucuccugguccuggcccgacggcgccgagcuccccuucaccaucgacaaguga

SEQ ID NO: 117110 - RNA, 1350 nt, Artificial Sequence
  derived and/or modified CDS sequence (opt2) from neuraminidase__InfluenzaA__AEO89302
augaaccccaaccagaagaucaucaccaucggcuccaucugcauggucaucggcaucgucucccucaugcuccagaucggcaacaucaucuccaucugggucucccacuccauccagaccggcaaccagcaccaggacgagcccauccgcaacgccaacuuccucaccgagaacgccgucgccuccgucacccucgccggcaacuccucccucugccccguccgcggcugggccguccacuccaaggacaacuccauccgcaucggcuccaagggcgacgucuucgucauccgcgagcccuucaucuccugcucccaccucgagugccgcaccuucuuccucacccagggcgcccuccucaacgacaagcacuccaacggcaccgucaaggaccgcuccccccaccgcacccucauguccugccccgucggcgaggcccccucccccuacaacucccgcuucgaguccgucgccugguccgccuccgccugccacgacggcaccuccuggcucaccaucggcaucuccggccccgacaacggcgccgucgccguccucaaguacaacggcaucaucaccgacaccaucaaguccuggcgcaacaacauccuccgcacccaggaguccgagugcgccugcgucaacggcuccugcuucaccgucaugaccgacggccccuccaacggccaggccuccuacaagaucuucaagauggagaagggcaaggucguccgcuccgucgagcucaacgcccccaacuaccacuacgaggagugcuccugcuaccccgacgccggcgagaucaccugcgucugccgcgacaacuggcacggcuccaaccgccccugggucuccuucaaccagaaccucgaguaccagaucggcuacaucugcuccggcgucuucggcgacaacccccgccccaacgacggcaccggcuccugcgaccccgucucccccaacggcgccuacggcaucaagggcuucuccuucaaguacggcaacggcgucuggaucggccgcaccaaguccaccaacucccgcuccggcuucgagaugaucugggaccccaacggcuggaccgagaccgacuccgacuucuccgucaagcaggacaucgucgccaucaccgacugguccggcuacuccggcuccuucguccagcaccccgagcucaccggccucgacugcauccgccccugcuucugggucgagcucauccgcggccgccccaaggaguccaccaucuggaccuccggcuccuccaucuccuucugcggcgucuccuccgacaccgucuccugguccuggcccgacggcgccgagcuccccuucaccaucgacaaguga

SEQ ID NO: 117111 - RNA, 1410 nt, Artificial Sequence; identical to SEQ ID NO: 112093
  derived and/or modified CDS sequence (opt2) from neuraminidase__InfluenzaA__AEO99218

SEQ ID NO: 117112 - RNA, 1410 nt, Artificial Sequence
  derived and/or modified CDS sequence (opt2) from neuraminidase__InfluenzaA__AEQ49739
augaaccccaaccagaagaucaucaccaucggcuccgucugcaugaccaucggcauggccaaccucauccuccagaucggcaacaucaucuccaucuggaucucccacuccauccagcucggcaaccagucccagaucgagaccugcaaccaguccgucaucaccuacgagaacaacaccugggucaaccagaccuacgucaacaucuccaacaccaacuucgccgccggccaguccgucgucuccgucaagcucgccggcaacuccucccucugccccgucuccggcugggccaucuacuccaaggacaacuccauccgcaucggcuccaagggcgacgucuucgucauccgcgagcccuucaucuccugcuccccccucgagugccgcaccuucuuccucacccagggcgcccuccucaacgacaagcacuccaacggcaccaucaaggaccgcucccccuaccgcacccucauguccugccccaucggcgagguccccucccccuacaacucccgcuucgaguccgucgccugguccgccuccgccugccacgacggcaucaacuggcucaccaucggcaucuccggccccgacaacggcgccgucgccguccucaaguacaacggcaucaucaccgacaccaucaaguccuggcgcaacaacauccuccgcacccaggaguccgagugcgccugcgucaacggcuccugcuucaccaucaugaccgacggccccuccgacggccaggccuccuacaagaucuuccgcaucgagaagggcaagaucgucaaguccgucgagaugaacgcccccaacuaccacuacgaggagugcuccugcuaccccgacuccuccgaggucaccugcgucugccgcgacaacuggcacggcuccaaccgccccugggucuccuucaaccagaaccucgaguaccagaucggcuacaucugcuccggcaucuucggcgacaacccccgccccaacgacaagaccggcuccugcggccccgucuccuccaacggcgccaacggcgucaagggcuucuccuucaaguacggcaacggcgucuggaucggccgcaccaaguccaucuccucccgcaagggcuucgagaugaucugggaccccaacggcuggaccggcaccgacaacaacuucuccaucaagcaggacaucgucggcaucaacgagugguccggcuacuccggcuccuucguccagcaccccgagcucaccggcauggacugcauccgccccugcuucugggucgagcucauccgcggccgccccaaggagaacaccaucuggaccuccggcuccuccaucuccuucugcggcgucaacuccgacaccgucggcugguccuggcccgacggcgccgagcuccccuucaccaucgacaaguga

SEQ ID NO: 117113 - RNA, 1410 nt, Artificial Sequence; identical to SEQ ID NO: 116293
  derived and/or modified CDS sequence (opt2) from neuraminidase__InfluenzaA__AEQ49740

SEQ ID NO: 117114 - RNA, 1410 nt, Artificial Sequence
  derived and/or modified CDS sequence (opt2) from neuraminidase__InfluenzaA__AEQ49741
augaaccccaaccagaagaucaucaccaucggcuccgucugcaugaccaucggcauggccaaccucauccuccagaucggcaacaucaucuccaucuggaucucccacuccauccagcucggcaaccagucccagaucgagaccugcaaccaguccgucaucaccuacgagaacaacaccugggucaaccagaccuacgucaacaucuccaacaccaacuucgccgccggccaguccgucgucuccgucaagcucgccggcaacuccucccucugccccgucuccggcugggccaucuacuccaaggacaacuccauccgcaucggcuccaagggcgacgucuucgucauccgcgagcccuucaucuccugcuccccccucgagugccgcaccuucuuccucacccagggcgcccuccucaacgacaagcacuccaacggcaccaucaaggaccgcucccccuaccgcacccucauguccugccccaucggcgagguccccucccccuacaacucccgcuucgaguccgucgccugguccgccuccgccugccacgacggcaucaacuggcucaccaucggcaucuccggccccgacaacggcgccgucgccguccucaaguacaacggcaucaucaccgacaccaucaaguccuggcgcaacaacauccuccgcacccaggaguccgagugcgccugcgucaacggcuccugcuucaccaucaugaccgacggccccuccgacggccaggccuccuacaagaucuuccgcaucgagaagggcaagaucgucaaguccgucgagaugaacgcccccaacuaccacuacgaggagugcuccugcuaccccgacuccuccgagaucaccugcgucugccgcgacaacuggcacggcuccaaccgccccugggucuccuucaaccagaaccucgaguaccagaucggcuacaucugcuccggcaucuucggcgacaacccccgccccaacgacaagaccggcuccugcggccccgucuccuccaacggcgccaacggcgucaagggcuucuccuucaaguacggcaacggcgucuggaucggccgcaccaaguccaucuccucccgcaagggcuucgagaugaucugggaccccaacggcuggaccggcaccgacaacaacuucuccaucaagcaggacaucgucggcaucaacgagugguccggcuacuccggcuccuucguccagcaccccgagcucaccggcauggacugcauccgccccugcuucugggucgagcucauccgcggccgccccaaggagaacaccaucuggaccuccggcuccuccaucuccuucugcggcgucaacuccgacaccgucggcugguccuggcccgacggcgccgagcuccccuucaccaucgacaaguga

SEQ ID NO: 117115 - RNA, 1410 nt, Artificial Sequence
  derived and/or modified CDS sequence (opt2) from neuraminidase__InfluenzaA__AEQ49742
augaaccccaaccagaagaucaucaccaucggcuccgucugcaugaccaucggcauggccaaccucauccuccagaucggcaacaucaucuccaucuggaucucccacuccauccagcucggcaaccagucccagaucgagaccugcaaccaguccgucaucaccuacgagaacaacaccugggucaaccagaccuacgucaacaucuccaacaccaacuucgccgccggccaguccgucgucuccgucaagcucgccggcaacuccucccucugccccgucuccggcugggccauccacuccaaggacaacuccauccgcaucggcuccaagggcgacgucuucgucauccgcgagcccuucaucuccugcuccccccucgagugccgcaccuucuuccucacccagggcgcccuccucaacgacaagcacuccaacggcaccaucaaggaccgcucccccuaccgcacccucauguccugccccaucggcgagguccccucccccuacaacucccgcuucgaguccgucgccugguccgccuccgccugccacgacggcaucaacuggcucaccaucggcaucuccggccccgacaacggcgccgucgccguccucaaguacaacggcaucaucaccgacaccaucaaguccuggcgcaacaacauccuccgcacccaggaguccgagugcgccugcgucaacggcuccugcuucaccaucaugaccgacggccccuccgacggccaggccuccuacaagaucuuccgcaucgagaagggcaagaucgucaaguccgucgagaugaacgcccccaacuaccacuacgaggagugcuccugcuaccccgacuccuccgagaucaccugcgucugccgcgacaacuggcacggcuccaaccgccccugggucuccuucaaccagaaccucgaguaccagaucggcuacaucugcuccggcaucuucggcgacaacccccgccccaacgacaagaccggcuccugcggccccgucuccuccaacggcgccaacggcgucaagggcuucuccuucaaguacggcaacggcgucuggaucggccgcaccaaguccaucuccucccgcaagggcuucgagaugaucugggaccccaacggcuggaccggcaccgacaacaacuucuccaucaagcaggacaucgucggcaucaacgagugguccggcuacuccggcuccuucguccagcaccccgagcucaccggcauggacugcauccgccccugcuucugggucgagcucauccgcggccgccccaaggagaacaccaucuggaccuccggcuccuccaucuccuucugcggcgucaacuccgacaccgucggcugguccuggcccgacggcgccgagcuccccuucaccaucgacaaguga

SEQ ID NO: 117116 - RNA, 1410 nt, Artificial Sequence
  derived and/or modified CDS sequence (opt2) from neuraminidase__InfluenzaA__AEQ49743
augaaccccaaccagaagaucaucaccaucggcuccgucugcaugaccaucggcauggccaaccucauccuccagaucggcaacaucaucuccaucuggaucucccacuccauccagcucggcaaccagucccagaucgagaccugcaaccaguccgucaucaccuacgagaacaacaccugggucaaccagaccuacgucaacaucuccaacaccaacuucgccgccggccaguccgucgucuccgucaagcucgccggcaacuccucccucugccccgucuccggcugggccaucuacuccaaggacaacuccauccgcaucggcuccaagggcgacgucuucgucauccgcgagcccuucaucuccugcuccccccucgagugccgcaccuucuuccucacccagggcgcccuccucaacgacaagcacuccaacggcaccaucaaggaccgcucccccuaccgcacccucauguccugccccaucggcgagguccccucccccuacaacucccgcuucgaguccgucgccugguccgccuccgccugccacgacggcaucaacuggcucaccaucggcaucuccggccccgacaacggcgccgucgccguccucaaguacaacggcaucaucaccgacaccaucaaguccuggcgcaacaacauccuccgcacccaggaguccgagugcgccugcgucaacggcuccugcuucaccaucaugaccgacggccccuccgacggccaggccuccuacaagaucuuccgcaucgagaagggcaagaucgucaaguccgucgagaugaacgcccccaacuaccacuacgaggagugcuccugcuaccccgacuccuccgagaucaccugcgucugccgcgacaacuggcacggcuccaaccgccccugggucuccuucaaccagaaccucgaguaccagaucggcuacaucugcuccggcaucuucggcgacaacccccgccccaacgacaagaccggcuccugcggccccgucuccuccaacggcgccaacggcgucaagggcuucuccuucaaguacggcaacggcgucuggaucggccgcaccaaguccaucuccucccgcaagggcuucgagaugaucugggaccccaacggcuggaccggcaccgacaacaacuucuccaucaagcaggacaucgucggcaccaacgagugguccggcuacuccggcuccuucguccagcaccccgagcucaccggccucgacugcauccgccccugcuucugggucgagcucauccgcggccgccccaaggagaacaccaucuggaccuccggcuccuccaucuccuucugcggcgucaacuccgacaccgucggcugguccuggcccgacggcgccgagcuccccuucaccaucgacaacuga

SEQ ID NO: 117117 - RNA, 1410 nt, Artificial Sequence
  derived and/or modified CDS sequence (opt2) from neuraminidase__InfluenzaA__AEQ49744
augaaccccaaccagaagaucaucaccaucggcuccgucugcaugaccaucggcauggccaaccucauccuccagaucggcaacaucaucuccaucuggaucucccacuccauccagcucggcaaccagucccagaucgagaccugcaaccaguccgucaucaccuacgagaacaacaccugggucaaccagaccuacgucaacaucuccaacaccaacuucgccgccggccaguccgucgucuccgucaagcucgccggcaacuccucccucugccccgucuccggcugggccaucuacuccaaggacaacuccauccgcaucggcuccaagggcgacgucuucgucauccgcgagcccuucaucuccugcuccccccucgagugccgcaccuucuuccucacccagggcgcccucgucaacgacaagcacuccaacggcaccaucaaggaccgcucccccuaccgcacccucauguccugccccaucggcgagguccccucccccuacaacucccgcuucgaguccgucgccugguccgccuccgccugccacgacggcaucaacuggcucaccaucggcaucuccggccccgacaacggcgccgucgccguccucaaguacaacggcaucaucaccgacaccaucaaguccuggcgcaacaacaucuuccgcacccaggaguccgagugcgccugcgucaacggcuccugcuucaccaucaugaccgacggccccuccgacggccaggccuccuacaagaucuuccgcaucgagaagggcaagaucgucaaguccgucgagaugaacgcccccaacuaccacuacgaggagugcuccugcuaccccgacuccuccgagaucaccugcgucugccgcgacaacuggcacggcuccaaccgccccugggucuccuucaaccaggaccucgaguaccagaucggcuacaucugcuccggcaucuucggcgacaacccccgccccaacgacaagaccggcuccugcggccccgucuccuccaacggcgccaacggcgucaagggcuucuccuucaaguacggcaacggcgucuggaucggccgcaccaaguccaucuccucccgcaagggcuucgagaugaucugggaccccaacggcuggaccggcaccgacaacaacuucuccaucaagcagaacaucgucggcaucaacgagugguccggcuacuccggcuccuucguccagcaccccgagcucaccggccucgacugcauccgccccugcuucugggucgagcucauccgcggccgccccaaggagaacaccaucuggaccuccggcuccuccaucuccuucugcggcgucaacuccgacaccgucggcugguccuggcccgacggcgccgagcuccccuucaccaucgacaaguga

SEQ ID NO: 117118 - RNA, 1410 nt, Artificial Sequence; identical to SEQ ID NO: 117114
  derived and/or modified CDS sequence (opt2) from neuraminidase__InfluenzaA__AEQ49745

SEQ ID NO: 117119 - RNA, 1410 nt, Artificial Sequence; identical to SEQ ID NO: 117114
  derived and/or modified CDS sequence (opt2) from neuraminidase__InfluenzaA__AEQ49746

SEQ ID NO: 117120 - RNA, 1410 nt, Artificial Sequence; identical to SEQ ID NO: 117114
  derived and/or modified CDS sequence (opt2) from neuraminidase__InfluenzaA__AEQ49747

SEQ ID NO: 117121 - RNA, 1410 nt, Artificial Sequence; identical to SEQ ID NO: 116293
  derived and/or modified CDS sequence (opt2) from neuraminidase__InfluenzaA__AEQ49748

SEQ ID NO: 117122 - RNA, 1410 nt, Artificial Sequence; identical to SEQ ID NO: 117114
  derived and/or modified CDS sequence (opt2) from neuraminidase__InfluenzaA__AEQ49749

SEQ ID NO: 117123 - RNA, 1410 nt, Artificial Sequence
  derived and/or modified CDS sequence (opt2) from neuraminidase__InfluenzaA__AEQ49750
augaaccccaaccagaagaucaucaccaucggcuccgucugcaugaccaucggcauggccaaccucauccuccagaucggcaacaucaucuccaucuggaucucccacuccauccagcucggcaaccagucccagaucgagaccugcaaccaguccgucaucaccuacgagaacaacaccugggucaaccagaccuacgucaacaucuccaacaccaacuucgccgccggccaguccgucgucuccgucaagcucgccggcaacuccucccucugccccgucuccggcugggccaucuacuccaaggacaacuccauccgcaucggcuccaagggcgacgucuucgucauccgcgagcccuucaucuccugcuccccccucgagugccgcaccuucuuccucacccagggcgcccuccucaacgacaaccacuccaacggcaccaucaaggaccgcucccccuaccgcacccucauguccugccccaucggcgagguccccucccccuacaacucccgcuucgaguccgucgccugguccgccuccgccugccacgacggcaucaacuggcucaccaucggcaucuccggccccgacaacggcgccgucgccguccucaaguacaacggcaucaucaccgacaccaucaaguccuggcgcaacaacauccuccgcacccaggaguccgagugcgccugcgucaacggcuccugcuucaccaucaugaccgacggccccuccgacggccaggccuccuacaagaucuuccgcaucgagaagggcaagaucgucaaguccgucgagaugaacgcccccaacuaccacuacgaggagugcuccugcuaccccgacuccuccgagaucaccugcgucugccgcgacaacuggcacggcuccaaccgccccugggucuccuucaaccagaaccucgaguaccagaucggcuacaucugcuccggcaucuucggcgacaacccccgccccaacgacaagaccggcuccugcggccccgucuccuccaacggcgccaacggcgucaagggcuucuccuucaaguacggcaacggcgucuggaucggccgcaccaagaacaucuccucccgcaagggcuucgagaugaucugggaccccaacggcuggaccggcaccgacaacaacuucuccaucaagcaggacaucgucggcaucaacgagugguccggcuacuccggcuccuucguccagcaccccgagcucaccggccucgacugcauccgccccugcuucugggucgagcucauccgcggccgccccaaggagaacaccaucuggaccuccggcuccuccaucuccuucugcggcgucaacuccgacaccgucggcugguccuggcccgacggcgccgagcuccccuucaccaucgacaaguga

SEQ ID NO: 117124 - RNA, 1410 nt, Artificial Sequence
  derived and/or modified CDS sequence (opt2) from neuraminidase__InfluenzaA__AEQ49751
augaaccccaaccagaagaucaucaccaucggcuccgucugcaugaccaucggcauggccaaccucauccuccagaucggcaacaucaucuccaucuggaucucccacuccuuccagcucggcaaccagucccagaucgagaccugcaaccaguccgucaucaccuacgagaacaacaccugggucaaccagaccuacgucaacaucuccaacaccaacuucgccgccggccaguccgucgucuccgucaagcucgccggcaacuccucccucugccccgucuccggcugggccaucuacuccaaggacaacuccauccgcaucggcuccaagggcgacgucuucgucauccgcgagcccuucaucuccugcuccccccucgagugccgcaccuucuuccucacccagggcgcccuccucaacgacaaccacuccaacggcaccaucaaggaccgcucccccuaccgcacccucauguccugccccaucggcgagguccccucccccuacaacucccgcuucgaguccgucgccugguccgccuccgccugccacgacggcaucaacuggcucaccaucggcaucuccggccccgacaacggcgccgucgccguccucaaguacaacggcaucaucaccgacaccaucaaguccuggcgcaacaacauccuccgcacccaggaguccgagugcgccugcgucaacggcuccugcuucaccaucaugaccgacggccccuccgacggccaggccuccuacaagaucuuccgcaucgagaagggcaagaucgucaaguccgucgagaugaacgcccccaacuaccacuacgaggagugcuccugcuaccccgacuccuccgagaucaccugcgucugccgcgacaacuggcacggcuccaaccgccccugggucuccuucaaccagaaccucgaguaccagaucggcuacaucugcuccggcaucuucggcgacaacccccgccccaacgacaagaccggcuccugcggccccgucuccuccaacggcgccaacggcgucaagggcuucuccuucaaguacggcaacggcgucuggaucggccgcaccaaguccaucuccucccgcaagggcuucgagaugaucugggaccccaacggcuggaccggcaccgacaacaacuucuccaucaagcaggacaucgucggcaucaacgagugguccggcuacuccggcuccuucguccagcaccccgagcucaccggcauggacugcauccgccccugcuucugggucgagcucauccgcggccgccccaaggagaacaccaucuggaccuccggcuccuccaucuccuucugcggcgucaacuccgacaccgucggcugguccuggcccgacggcgccgagcuccccuucaccaucgacaaguga

SEQ ID NO: 117125 - RNA, 1410 nt, Artificial Sequence
  derived and/or modified CDS sequence (opt2) from neuraminidase__InfluenzaA__AEQ49752
augaaccccaaccagaagaucaucaccaucggcuccgucugcaugaccaucggcauggccaaccucauccuccagaucggcaacaucaucuccaucuggaucucccacuccauccagcucggcaaccagucccagaucggcaccugcaaccaguccgucaucaccuacgagaacaacaccugggucaaccagaccuacgucaacaucuccaacaccaacuucgccgccggccaguccgucgucuccgucaagcucgccggcaacuccucccucugccccgucuccggcugggccaucuacuccaaggacaacuccauccgcaucggcuccaagggcgacgucuucgucauccgcgagcccuucaucuccugcuccccccucgagugccgcaccuucuuccucacccagggcgcccuccucaacgacaagcacuccaacggcaccaucaaggaccgcucccccuaccgcacccucauguccugccccaucggcgagguccccucccccuacaacucccgcuucgaguccgucgccugguccgccuccgccugccacgacggcaucaacuggcucaccaucggcaucuccggccccgacaacggcgccgucgccguccucaaguacaacggcaucaucaccgacaccaucaaguccuggcgcaacaacauccuccgcacccaggaguccgagugcgccugcgucaacggcuccugcuucaccaucaugaccgacggccccuccgacggccaggccuccuacaagaucuuccgcaucgagaagggcaagaucgucaaguccgucgagaugaacgcccccaacuacuacuacgaggagugcuccugcuaccccgacuccuccgagaucaccugcgucugccgcgacaacuggcacggcuccaaccgccccugggucuccuucaaccagaaccucgaguaccagaucggcuacaucugcuccggcaucuucggcgacaacccccgccccaacgacaagaccggcuccugcggccccgucuccuccaacggcgccaacggcgucaagggcuucuccuucaaguacggcaacggcgucuggaucggccgcaccaaguccaucuccucccgcaagggcuucgagaugaucugggaccccaacggcuggaccggcaccgacaacaacuucuccaucaagcaggacaucgucggcaucaacgagugguccggcuacuccggcuccuucguccagcaccccgagcucaccggcauggacugcauccgccccugcuucugggucgagcucauccgcggccgccccaaggagaacaccaucuggaccuccggcuccuccaucuccuucugcggcgucaacuccgacaccgucggcugguccuggcccgacggcgccgagcuccccuucaccaucgacaaguga

SEQ ID NO: 117126 - RNA, 1410 nt, Artificial Sequence
  derived and/or modified CDS sequence (opt2) from neuraminidase__InfluenzaA__AEQ49753
augaaccccaaccagaagaucaucaccaucggcuccgucugcaugaccaucggcauggccaaccucauccuccagaucggcaacaucaucuccaucuggaucucccacuccauccagcucggcaaccagucccagaucgagaccugcaaccaguccgucaucaccuacgagaacaacaccugggucaaccagaccuacgucaacaucuccaacaccaacuucgccgccggccaguccgucgucuccgucaagcucgccggcaacuccucccucugccccgucuccggcugggccaucuacuccaaggacaacuccauccgcaucggcuccaagggcgacgucuucgucauccgcgagcccuucaucuccugcuccccccucgagugccgcaccuucuuccucacccagggcgcccuccucaacgacaagcacuccaacggcaccaucaaggaccgcucccccuaccgcacccucauguccugccccaucggcgagguccccucccccuacaacucccgcuucgaguccgucgccugguccgccuccgccugccacgacggcaucaacuggcucaccaucggcaucuccggccccgacaacggcgccgucgccguccucaaguacaacggcaucaucaccgacaccaucaaguccuggcgcaacaacauccuccgcacccaggaguccgagugcgccugcgucaacggcuccugcuucaccaucaugaccgacggccccuccgacggccaggccuccuacaagaucuuccgcaucgagaagggcaagaucgucaaguccgucgagaugaacgcccccaacuaccacuacgaggagugcuccugcuaccccgacuccuccgagaucaccugcgucugccgcgacaacuggcacggcuccaaccgccccugggucuccuucaaccagaaccucgaguaccagaucggcuacaucugcuccggcaucuucggcgacaacccccgccccaacgacaagaccggcuccugcggccccgucuccuccaacggcgccaacggcgucaagggcuucuccuucaaguacggcaacggcgucuggaucggccgcaccaaguccaucuccucccgcaagggcuucgagaugaucugggaccccaacggcuggaccggcaccgacaacaacuucuccaucaagcaggacaucgucggcaucaacgagugguccggcuacuccggcuccuucguccagcaccccgagcucaccggcauggacugcauccgccccugcuucugggucgagcucauccgcggccgccccaaggagaacaccaucuggaccuccggcuccuccaucuccuucugcggcgucaacuccgacaccgucgacugguccuggcccgacggcgccgagcuccccuucaccaucgacaaguga

SEQ ID NO: 117127 - RNA, 1410 nt, Artificial Sequence
  derived and/or modified CDS sequence (opt2) from neuraminidase__InfluenzaA__AEQ49754
augaaccccaaccagaagaucaucaccaucggcuccgucugcaugaccaucggcauggccaaccucauccuccagaucggcaacaucaucuccaucuggaucucccacuccauccagcucggcaaccagucccagaucgagaccugcaaccaguccgucaucaccuacgagaacaacaccugggucaaccagaccuacgucaacaucuccaacaccaacuucgccgccggccaguccgucgucuccgucaagcucgccggcaacuccucccucugccccgucuccggcugggccaucuacuccaaggacaacuccauccgcaucggcuccaagggcgacgucuucgucauccgcgagcccuucaucuccugcuccccccucgagugccgcaccuucuuccucacccagggcgcccuccucaacgacaagcacuccaacggcaccaucaaggaccgcucccccuaccgcacccucauguccugccccaucggcgagguccccucccccuacaacucccgcuucgaguccgucgccugguccgccuccgccugccacgacggcaucaacuggcucaccaucggcaucuccggccccgacaacggcgccgucgccguccucaaguacaacggcaucaucaccgacaccaucaaguccuggcgcaacaacauccuccgcacccaggaguccgagugcgccugcgucaacggcuccugcuucaccaucaugaccgacggccccuccgacggccaggccuccuacaagaucuuccgcaucgagaagggcaagaucgucaaguccgucgagaugaacgcccccaacuaccacuacgaggagugcuccugcuaccccgacuccuccgagaucaccugcgucugccgcgacaacuggcacggcuccaaccgccccugggucuccuucaaccagaaccucgaguaccagaucggcuacaucugcuccggcaucuucggcgacaacccccgccccaacgacaagaccggcuccugcggccccgucuccuccaacggcgccaacggcgucaagggcuucuccuucaaguacggcaacggcgucuggaucggccgcaccaaguccaucuccucccgcaagggcuucgagaugaucugggaccccaacggcuggaccggcaccgacaacaacuucuccaucaagcaggacaucgucggcaucaacgagugguccggcuacuccggcuccuucguccagcaccccgagcucaccggccucgacugcauccgccccugcuucugggucgagcucauccgcggccgccccaaggagaacaccaucuggaccuccggcuccuccaucuccuucugcggcgucaacuccaacaccgucggcugguccuggcccgacggcgccgagcuccccuucaccaucgacaaguga

SEQ ID NO: 117128 - RNA, 1410 nt, Artificial Sequence; identical to SEQ ID NO: 117114
  derived and/or modified CDS sequence (opt2) from neuraminidase__InfluenzaA__AEQ49755

SEQ ID NO: 117129 - RNA, 1410 nt, Artificial Sequence
  derived and/or modified CDS sequence (opt2) from neuraminidase__InfluenzaA__AEQ49756
augaaccccaaccagaagaucaucaccaucggcuccgucugcaugaccaucggcauggccaaccucauccuccagaucggcaacaucaucuccaucuggaucucccacuccauccagcucggcaaccagucccaggucgagaccugcaaccaguccgucaucaccuacgagaacaacaccugggucaaccagaccuacgucaacaucuccaacaccaacuucgccgccggccaguccgucgucuccgucaagcucgccggcaacuccucccucugccccgucuccggcugggccaucuacuccaaggacaacuccauccgcaucggcuccaagggcgacgucuucgucauccgcgagcccuucaucuccugcuccccccucgagugccgcaccuucuuccucacccagggcgcccuccucaacgacaagcacuccaacggcaccaucaaggaccgcucccccuaccgcacccucauguccugccccaucggcgagguccccucccccuacaacucccgcuucgaguccgucgccugguccgccuccgccugccacgacggcaucaacuggcucaccaucggcaucuccggccccgacaacggcgccgucgccguccucaaguacaacggcaucaucaccgacaccaucaaguccuggcgcaacaacauccuccgcacccaggaguccgagugcgccugcgucaacggcuccugcuucaccaucaugaccgacggccccuccgacggccaggccuccuacaagaucuuccgcaucgagaagggcaagaucgucaaguccgucgagaugaacgcccccaacuaccacuacgaggagugcuccugcuaccccgacuccuccgagaucaccugcgucugccgcgacaacuggcacggcuccaaccgccccugggucuccuucaaccagaaccucgaguaccagaucggcuacaucugcuccggcaucuucggcgacaacccccgccccaacgacaagaccggcuccugcggccccgucuccuccaacggcgccaacggcgucaagggcuucuccuucaaguacggcaacggcgucuggaucggccgcaccaaguccaucuccucccgcaagggcuucgagaugaucugggaccccaacggcuggaccggcaccgacaacaacuucuccaucaagcaggacaucgucggcaucaacgagugguccggcuacuccggcuccuucguccagcaccccgagcucaccggccucgacugcauccgccccugcuucugggucgagcucauccgcggccgccccaaggagaacaccaucuggaccuccggcuccuccaucuccuucugcggcgucaacuccgacaccgucggcugguccuggcccgacggcgccgagcuccccuucaccaucgacaaguga

SEQ ID NO: 117130 - RNA, 1410 nt, Artificial Sequence; identical to SEQ ID NO: 117114
  derived and/or modified CDS sequence (opt2) from neuraminidase__InfluenzaA__AEQ49757

SEQ ID NO: 117131 - RNA, 1410 nt, Artificial Sequence
  derived and/or modified CDS sequence (opt2) from neuraminidase__InfluenzaA__AEQ49758
augaaccccaaccagaagaucaucaccaucggcuccgucugcaugaccaucggcauggccaaccucauccuccagaucggcaacaucaucuccaucuggaucucccacuccauccagcucggcaaccacucccagaucgagaccugcaaccaguccgucaucaccuacgagaacaacaccugggucaaccagaccuacgucaacaucuccaacaccaacuucgccgccggccaguccgucgucuccgucaagcucgccggcaacuccucccucugccccgucuccggcugggccaucuacuccaaggacaacuccauccgcaucggcuccaagggcgacgucuucgucauccgcgagcccuucaucuccugcuccccccucgagugccgcaccuucuuccucacccagggcgcccuccucaacgacaagcacuccaacggcaccaucaaggaccgcucccccuaccgcacccucauguccugccccaucggcgagguccccucccccuacaacucccgcuucgaguccgucgccugguccgccuccgccugccacgacggcaucaacuggcucaccaucggcaucuccggccccgacaacggcgccgucgccguccucaaguacaacggcaucaucaccgacaccaucaaguccuggcgcaacaacauccuccgcacccaggaguccgagugcgccugcgucaacggcuccugcuucaccaucaugaccgacggccccuccgacggccaggccuccuacaagaucuuccgcaucgagaagggcaagaucgucaaguccgucgagaugaacgcccccaacuacuacuacgaggagugcuccugcuaccccgacuccuccgagaucaccugcgucugccgcgacaacuggcacggcuccaaccgccccugggucuccuucaaccagaaccucgaguaccagaucggcuacaucugcuccggcaucuucggcgacaacccccgccccaacgacaagaccggcuccugcggccccgucuccuccaacggcgccaacggcgucaagggcuucuccuucaaguacggcaacggcgucuggaucggccgcaccaaguccaucuccucccgcaagggcuucgagaugaucugggaccccaacggcugggccggcaccgacaacaacuucuccaucaagcaggacaucgucggcaucaacgagugguccggcuacuccggcuccuucguccagcaccccgagcucaccggccucgacugcauccgccccugcuucugggucgagcucauccgcggccgccccaaggagaacaccaucuggaccuccggcuccuccaucuccuucugcggcgucaacuccgacaccgucggcugguccuggcccgacggcgccgagcuccccuucaccaucgacaaguga

SEQ ID NO: 117132 - RNA, 1410 nt, Artificial Sequence; identical to SEQ ID NO: 117114
  derived and/or modified CDS sequence (opt2) from neuraminidase__InfluenzaA__AEQ49759

SEQ ID NO: 117133 - RNA, 1410 nt, Artificial Sequence; identical to SEQ ID NO: 117114
  derived and/or modified CDS sequence (opt2) from neuraminidase__InfluenzaA__AEQ49760

SEQ ID NO: 117134 - RNA, 1410 nt, Artificial Sequence
  derived and/or modified CDS sequence (opt2) from neuraminidase__InfluenzaA__AEQ49761
augaaccccaaccagaagaucaucaccaucggcuccgucugcaugaccaucggcauggccaaccucauccuccagaucggcaacaucaucuccaucuggaucucccacuccauccagcucggcaaccagucccagaucgagaccugcaaccaguccgucaucaccuacgagaacaacaccuggcucaaccagaccuacgucaacaucuccaacaccaacuucgccgccggccaguccgucgucuccgucaagcucgccggcaacuccucccucugccccgucuccggcugggccaucuacuccaaggacaacuccauccgcaucggcuccaagggcgacgucuucgucauccgcgagcccuucaucuccugcucccccuccgagugccgcaccuucuuccucacccagggcgcccuccucaacgacaagcacuccaacggcaccaucaaggaccgcucccccuaccgcacccucauguccugccccaucggcgagguccccucccccuacaacucccgcuucgaguccgucgccugguccgccuccgccugccacgacggcaucaacuggcucaccaucggcaucuccggccccgacaacggcgccgucgccguccucaaguacaacggcaucaucaccgacaccaucaaguccuggcgcaacaacauccuccgcacccaggaguccgagugcgccugcgucaacggcuccugcuucaccaucaugaccgacggccccuccgacggccaggccuccuacaagaucuuccgcaucgagaagggcaagaucgucaaguccgucgagaugaacgcccccaacuaccacuacgaggagugcuccugcuaccccgacuccuccgagaucaccugcgucugccgcgacaacuggcacggcuccaaccgccccugggucuccuucaaccagaaccucgaguaccagaucggcuacaucugcuccggcaucuucggcgacaacccccgccccaacgacaagaccggcuccugcggccccgucuccuccaacggcgccaacggcgucaagggcuucuccuucaaguacggcaacggcgucuggaucggccgcaccaaguccaucuccucccgcaagggcuucgagaugaucugggaccccaacggcuggaccggcaccgacaacaacuucuccaucaagcaggacaucgucggcaucaacgagugguccggcuacuccggcuccuucguccagcaccccgagcucaccggccucgacugcauccgccccugcuucugggucgagcucauccgcggccgcuccaaggagaacaccaucuggaccuccggcuccuccaucuccuucugcggcgucaacuccgacaccgucggcugguccuggcccgacggcgccgagcuccccuucaccaucgacaaguga

SEQ ID NO: 117135 - RNA, 1410 nt, Artificial Sequence
  derived and/or modified CDS sequence (opt2) from neuraminidase__InfluenzaA__AEQ49762
augaaccccaaccagaagaucaucaccaucggcuccgucugcaugaccaucggcauggccaaccucauccuccagaucggcaacaucaucuccaucuggaucucccacuccauccagcucggcaaccagucccagaucgagaccugcaaccaguccgucaucaccuacgagaacaacaccuggaucaaccagaccuacgucaacaucuccaacaccaacuucgccgccggccaguccgucgucuccgucaagcucgccggcaacuccucccucugccccgucuccggcugggccaucuacuccaaggacaacuccauccgcaucggcuccaagggcgacgucuucgucauccgcgagcccuucaucuccugcuccccccucgagugccgcaccuucuuccucacccagggcgcccuccucaacgacaagcacuccaacggcaccaucaaggaccgcucccccuaccgcacccucauguccugccccaucggcgagguccccucccccuacaacucccgcuucgaguccgucgccugguccgccuccgccugccacgacggcaucaacuggcucaccaucggcaucuccggccccgacaacggcgccgucgccguccucaaguacaacggcaucaucaccgacaccaucaaguccuggcgcaacaacauccuccgcacccaggaguccgagugcgccugcgucaacggcuccugcuucaucaucaugaccgacggccccuccgacggccaggccuccuacaagaucuuccgcaucgagaagggcaagaucgucaaguccgucgagaugaacgcccccaacuaccacuacgaggagugcuccugcuaccccgacuccuccgagaucaccugcgucugccgcgacaacuggcacggcuccaaccgccccugggucuccuucaaccagaaccucgaguaccagaucggcuacaucugcuccggcaucuucggcgacaacccccgccccaacgacaagaccggcuccugcggccccgucuccuccaacggcgccaacggcgucaagggcuucuccuucaaguacggcaacggcgucuggaucggccgcaccaaguccaucuccucccgcaagggcuucgagaugaucugggaccccaacggcuggaccggcaccgacaacaacuucuccaucaagcaggacaucgucggcaucaacgagugguccggcuacuccggcuccuucguccagcaccccgagcucaccggccucgacugcauccgccccugcuucugggucgagcucauccgcggccgccccaaggagaacaccaucuggaccuccggcuccuccaucuccuucugcggcgucaacuccgacaccgucggcugguccuggcccgacggcgccgagcuccccuucaccaucgacaaguga

SEQ ID NO: 117136 - RNA, 1410 nt, Artificial Sequence; identical to SEQ ID NO: 117114
  derived and/or modified CDS sequence (opt2) from neuraminidase__InfluenzaA__AEQ49763

SEQ ID NO: 117137 - RNA, 1410 nt, Artificial Sequence; identical to SEQ ID NO: 117114
  derived and/or modified CDS sequence (opt2) from neuraminidase__InfluenzaA__AEQ49764

SEQ ID NO: 117138 - RNA, 1410 nt, Artificial Sequence; identical to SEQ ID NO: 117114
  derived and/or modified CDS sequence (opt2) from neuraminidase__InfluenzaA__AEQ49765

SEQ ID NO: 117139 - RNA, 1410 nt, Artificial Sequence
  derived and/or modified CDS sequence (opt2) from neuraminidase__InfluenzaA__AEQ49766
augaaccccaaccagaagaucaucaccaucggcuccgucugcaugaccaucggcauggccaaccucauccuccagaucggcaacaucaucuccaucuggaucucccacuccauccagcucggcaaccagucccagaucgagaccugcaaccaguccgucaucaccuacgagaacaacaccugggucaaccagaccuacgucaacaucuccaacaccaacuucgccgccggccaguccgucgucuccgucaagcucaccggcaacuccucccucugccccgucuccggcugggccaucuacuccaaggacaacuccauccgcaucggcuccaagggcgacgucuucgucauccgcgagcccuucaucuccugcuccccccucgagugccgcaccuucuuccucacccagggcgcccuccucaacgacaagcacuccaacggcaccaucaaggaccgcucccccuaccgcacccucauguccugccccaucggcgagguccccucccccuacaacucccgcuucgaguccgucgccugguccgccuccgccugccacgacggcaucaacuggcucaccaucggcaucuccggccccgacaacggcgccgucgccguccucaaguacaacggcaucaucaccgacaccaucaaguccuggcgcaacaacauccuccgcacccaggaguccgagugcgccugcgucaacggcuccugcuucaccaucaugaccgacggccccuccgacggccaggccuccuacaagaucuuccgcaucgagaagggcaagaucgucaaguccgucgagaugaacgcccccaacuaccacuacgaggagugcuccugcuaccccgacuccuccgagaucaccugcgucugccgcgacaacuggcacggcuccaaccgccccugggucuccuucaaccagaaccucgaguaccagaucggcuacaucugcuccggcaucuucggcgacaacccccgccccaacgacaagaccggcuccugcggccccgucuccuccaacggcgccaacggcgucaagggcuucuccuucaaguacggcaacggcgucuggaucggccgcaccaaguccaucuccucccgcaagggcuucgagaugaucugggaccccaacggcuggaccggcaccgacaacaacuucuccaucaagcaggacaucgucggcaucaacgagugguccggcuacuccggcuccuucguccagcaccccgagcucaccggccucgacugcauccgccccugcuucugggucgagcucauccgcggccgccccaaggagaacaccaucuggaccuccggcuccuccaucuccuucugcggcgucaacuccgacaccgucggcugguccuggcccgacggcgccgagcuccccuucaccaucgacaaguga

SEQ ID NO: 117140 - RNA, 1410 nt, Artificial Sequence
  derived and/or modified CDS sequence (opt2) from neuraminidase__InfluenzaA__AEQ49767
augaaccccaaccagaagaucaucaccaucggcuccgucugcaugaccaucggcauggccaaccucauccuccagaucggcaacaucaucuccaucuggaucucccacuccauccagcucggcaaccagucccagaucgagaccugcaaccaguccgucaucaccuacgagaacaacaccugggucaaccagaccuacgucaacaucuccaacaccaacuucgccgccggccaguccgucgucuccgucaagcucgccggcaacuccucccucugccccgucuccggcugggccaucuacuccaaggacaacuccauccgcaucggcuccaagggcgacgucuucgucauccgcgagcccuucaucuccugcuccccccucgagugccgcaccuucuuccucacccagggcgcccuccucaacgacaagcacuccaacggcaccaucaaggaccgcucccccuaccgcacccucauguccugccccaucggcgagguccccucccccuacaacucccgcuucgaguccgucgccugguccgccuccgccugccacgacggcaucaacuggcucaccaucggcaucuccggccccgacaacggcgccgucgccguccucaaguacaacggcaucaucaccgacaccaucaaguccuggcgcaacaacauccuccgcacccaggaguccgagugcgccugcgucaacggcuccugcuucaccaucaugaccgacggccccuccgacggccaggccuccuacaagaucuucaagaucgagaagggcaagaucgucaaguccgucgagaugaacgcccccaacuaccacuacgaggagugcuccugcuaccccgacuccuccgagaucaccugcgucugccgcgacaacuggcacggcuccaaccgccccugggucuccuucaaccagaaccucgaguaccagaucggcuacaucugcuccggcaucuucggcgacaacccccgccccaacgacaagaccggcuccugcggccccgucuccuccaacggcgccaacggcgucaagggcuucuccuacaaguacggcaacggcgucuggaucggccgcaccaaguccaucuccucccgcaagggcuucgagaugaucugggaccccaacggcuggaccggcaccgacaacaacuucuccaucaagcaggacaucgucggcaucaacgagugguccggcuacuccggcuccuucguccagcaccccgagcucaccggcaugggcugcauccgccccugcuucugggucgagcucauccgcggccgccccaaggagaacaccaucuggaccuccggcuccuccaucuccuucugcggcgucaacuccgacaccgucggcugguccuggcccgacggcgccgagcuccccuucaccaucgacaaguga

SEQ ID NO: 117141 - RNA, 1410 nt, Artificial Sequence; identical to SEQ ID NO: 116293
  derived and/or modified CDS sequence (opt2) from neuraminidase__InfluenzaA__AEQ49768

SEQ ID NO: 117142 - RNA, 1410 nt, Artificial Sequence; identical to SEQ ID NO: 117114
  derived and/or modified CDS sequence (opt2) from neuraminidase__InfluenzaA__AEQ49769

SEQ ID NO: 117143 - RNA, 1410 nt, Artificial Sequence
  derived and/or modified CDS sequence (opt2) from neuraminidase__InfluenzaA__AEQ49770
augaaccccaaccagaagaucaucaccaucggcuccgucugcaugaccaucggcauggccaaccucauccuccagaucggcaacaucaucuccgucuggaucucccacuccauccagcucggcaaccagaaccagaccgagaccugcaaccaguccgucaucaccuacgagaacaacaccugggucaaccagaccuacgucaacaucuccaacaccaacuucgccgccggccaguccgucgucuccgucaagcucgccggcaacuccucccucugccccgucuccggcugggccaucuacuccaaggacaacuccauccgcaucggcuccaagggcgacgucuucgucauccgcgagcccuucaucuccugcuccccccucgagugccgcaccuucuuccucacccagggcgcccuccucaacgacaagcacuccaacggcaccaucaaggaccgcucccccuaccgcacccucauguccugccccaucggcgagguccccucccccuacaacucccgcuucgaguccgucgccugguccgccuccgccugccacgacggcaucaacuggcucaccaucggcaucuccggccccgacaacggcgccgucgccguccucaaguacaacggcaucaucaccgacaccaucaaguccuggcgcaacaacauccuccgcacccaggaguccgagugcgccugcgucaacggcuccugcuucaccgucaugaccgacggccccuccgacggccaggccuccuacaagaucuuccgcaucgagaagggcaagaucgucaaguccgucgagaugaacgcccccaacuaccacuacgaggagugcuccugcuaccccgacuccuccgagaucaccugcgucugccgcgacaacuggcacggcuccaaccgccccugggucuccuucaaccagaaccucgaguaccgcaucggcuacaucugcuccggcaucuucggcgacaacccccgccccaacgacaagaccggcuccugcggccccgucuccuccaacggcgccaacggcgucaagggcuucuccuucaaguacggcaacggcgucuggaucggccgcaccaaguccaucuccucccgcaacggcuucgagaugaucugggaccccaacggcuggaccggcaccgacaacaacuucuccaucaagcaggacaucaucggcaucaacgagugguccggcuacuccggcuccuucguccagcaccccgagcucaccggccucgacugcauccgccccugcuucugggucgagcucauccgcggccgccccaaggagaacaccaucuggaccuccggcuccuccaucuccuucugcggcgucaacuccgacaccgucggcugguccuggcccgacggcgccgagcuccccuucaccgucgacaaguga

SEQ ID NO: 117144 - RNA, 1410 nt, Artificial Sequence; identical to SEQ ID NO: 117127
  derived and/or modified CDS sequence (opt2) from neuraminidase__InfluenzaA__AEQ49771

SEQ ID NO: 117145 - RNA, 1410 nt, Artificial Sequence; identical to SEQ ID NO: 116293
  derived and/or modified CDS sequence (opt2) from neuraminidase__InfluenzaA__AEQ49772

SEQ ID NO: 117146 - RNA, 1410 nt, Artificial Sequence
  derived and/or modified CDS sequence (opt2) from neuraminidase__InfluenzaA__AEQ49773
augaaccccaaccagaagaucaucaccaucggcuccaucugcaugaccaucggcauggccaaccucauccuccagaucggcaacaucaucuccaucuggaucucccacuccauccagcucggcaaccagucccagaucgagaccugcaaccaguccgucaucaccuacgagaacaacaccugggucaaccagaccuacgucaacaucuccaacaccaacuucgccgccggccaguccgucgucuccgucaagcucgccggcaacuccucccucugccccgucuccggcugggccaucuacuccaaggacaacuccauccgcaucggcuccaagggcgacgucuucgucauccgcgagcccuucaucuccugcuccccccucgagugccgcaccuucuuccucacccagggcgcccuccucaacgacaagcacuccaacggcaccaucaaggaccgcucccccuaccgcacccucauguccugccccaucggcgagguccccucccccuacaacucccgcuucgaguccgucgccugguccgccuccgccugccacgacggcaucaacuggcucaccaucggcaucuccggccccgacaacggcgccgucgccguccucaaguacaacggcaucaucaccgacaccaucaaguccuggcgcaacaacauccuccgcacccaggaguccgagugcgccugcgucaacggcuccugcuucaccaucaugaccgacggccccuccgacggccaggccuccuacaagaucuuccgcaucgagaagggcaagaucgucaaguccgucgagaugaacgcccccaacuaccacuacgaggagugcuccugcuaccccgacuccuccgagaucaccugcgucugccgcgacaacuggcacggcuccaaccgccccugggucuccuucaaccagaaccucgaguaccagaucggcuacaucugcuccggcaucuucggcgacaacccccgccccaacgacaagaccggcuccugcggccccgucuccuccaacggcgccaacggcgucaagggcuucuccuucaaguacggcaacggcgucuggaucggccgcaccaaguccaucuccucccgcaagggcuucgagaugaucugggaccccaacggcuggaccggcaccgacaacaacuucuccaucaagcaggacaucgucggcaucaacgagugguccggcuacuccggcuccuucguccagcaccccgagcucaccggccucgacugcauccgccccugcuucugggucgagcucauccgcggccgccccaaggagaacaccaucuggaccuccggcuccuccaucuccuucugcggcgucaacuccaacaccgucggcugguccuggcccgacggcgccgagcuccccuucaccaucgacaaguga

SEQ ID NO: 117147 - RNA, 1410 nt, Artificial Sequence
  derived and/or modified CDS sequence (opt2) from neuraminidase__InfluenzaA__AEQ49774
augaaccccaaccagaagaucaucaccaucggcuccgucugcaugaccaucggcauggccaaccucauccuccagaucggcaacaucaucuccaucuggaucucccacuccauccagcucggcaaccagucccagaucgagaccugcaaccaguccgucaucaccuacgaguacaacaccugggucaaccagaccuacaucaacaucuccaacaccaacuucgccgccggccaguccgucgucuccgucaagcucgucggcaacuccucccucugccccgucuccggcugggccaucuacuccaaggacaacuccauccgcaucggcuccaagggcgacgucuucgucauccgcgagcccuucaucuccugcuccccccucgagugccgcaccuucuuccucacccagggcgcccuccucaacgacaagcacuccaacggcaccaucaaggaccgcucccccuaccgcacccucauguccugccccaucggcgagguccccucccccuacaacucccgcuucgaguccgucgccugguccgccuccgccugccacgacggcaucaacuggcucaccaucggcaucuccggccccgacaacggcgccgucgccguccucaaguacaacggcaucaucaccgacaccaucaaguccuggcgcaacaacauccuccgcacccaggaguccgagugcgccugcgucaacggcuccugcuucaccaucaugaccgacggccccuccgacggccaggccuccuacaagaucuuccgcaucgagaagggcaagaucgucaaguccgucgagaugaacgcccccaacuaccacuacgaggagugcuccugcuaccccgacuccuccgagaucaccugcgucugccgcgacaacuggcacggcuccaaccgccccugggucuccuucaaccagaaccucgaguaccagaucggcuacaucugcuccggcaucuucggcgacaacccccgccccaacgacaagaccggcuccugcggccccgucuccuccaacggcgccaacggcgucaagggcuucuccuucaaguacggcaacggcgucuggaucggccgcaccaaguccaucuccucccgcaagggcuacgagaugaucugggaccccaacggcuggaccggcaccgacaacaacuucuccaucaagcaggacaucgucggcaucaacgagugguccggcuacuccggcuccuucguccagcaccccgagcucaccggcauggacugcauccgccccugcuucugggucgagcucauccgcggccgccccaaggagaacaccaucuggaccuccggcuccuccaucuccuucugcggcgucaacuccgacaccgucggcugguccuggcccgacggcgccgagcuccccuucaccaucgacaaguga

SEQ ID NO: 117148 - RNA, 1410 nt, Artificial Sequence; identical to SEQ ID NO: 116293
  derived and/or modified CDS sequence (opt2) from neuraminidase__InfluenzaA__AEQ49775

SEQ ID NO: 117149 - RNA, 1410 nt, Artificial Sequence
  derived and/or modified CDS sequence (opt2) from neuraminidase__InfluenzaA__AEQ49776
augaaccccaaccagaagaucaucaccaucggcuccgucugcaugaccaucggcauggccaaccucauccuccagaucggcaacaucaucuccaucuggaucucccacuccauccagcucggcaaccagucccagaucgagaccugcaaccaguccgucaucaccuacgagaacaacaccugggucaaccagaccuacgucaacaucuccaacaccaacuucgccgccggccaguccgucgucuccgucaagcucgccggcaacuccucccucugccccgucuccggcugggccaucuacuccaaggacaacuccauccgcaucggcuccaagggcgacgucuucgucauccgcgagcccuucaucuccugcucccccuccgagugccgcaccuucuuccucacccagggcgcccuccucaacgacaagcacuccaacggcaccaucaaggaccgcucccccuaccgcacccucauguccugccccaucggcgagguccccucccccuacaacucccgcuucgaguccgucgccugguccgccuccgccugccacgacggcaucaacuggcucaccaucggcaucuccggccccgacaacggcgccgucgccguccucaaguacaacggcaucaucaccgacaccaucaaguccuggcgcaacaacauccuccgcacccaggaguccgagugcgccugcgucaacggcuccugcuucaccaucaugaccgacggccccuccgacggccaggccuccuacaagaucuuccgcaucgagaagggcaagaucgucaaguccgucgagaugaacgcccccaacuaccacuacgaggagugcuccugcuaccccgacuccuccgagaucaccugcgucugccgcgacaacuggcacggcuccaaccgccccugggucuccuucaaccagaaccucgaguaccagaucggcuacaucugcuccggcaucuucggcgacaacccccgccccaacgacaagaccggcuccugcggccccgucuccuccaacggcgccaacggcgucaagggcuucuccuucaaguacggcaacggcgucuggaucggccgcaccaaguccaucuccucccgcaagggcuucgagaugaucugggaccccaacggcuggaccggcaccgacaacaacuucuccaucaagcaggacaucgucggcaucaacgagugguccggcuacuccggcuccuucguccagcaccccgagcucaccggccucgacugcauccgccccugcuucugggucgagcucauccgcggccgccccaccgagaacaccaucuggaccuccggcuccuccaucuccuucugcggcgucaacuccgacaccgucggcugguccuggcccgacggcgccgagcuccccuucaccaucgacaaguga

SEQ ID NO: 117150 - RNA, 1410 nt, Artificial Sequence; identical to SEQ ID NO: 117114
  derived and/or modified CDS sequence (opt2) from neuraminidase__InfluenzaA__AEQ49777

SEQ ID NO: 117151 - RNA, 1410 nt, Artificial Sequence
  derived and/or modified CDS sequence (opt2) from neuraminidase__InfluenzaA__AEQ49778
augaaccccaaccagaagaucaucaccaucggcuccgucugcaugaccaucggcauggccaaccucauccuccagaucggcaacaucaucuccaucuggaucucccacuccauccagcucggcaaccagucccagaucgagaccugcaaccaguccgucaucaccuacgagaacaacaccuggaucaaccagaccuacgucaacaucuccaacaccaacuucgccgccguccaguccgucgucuccgucaagcucgccggcaacuccacccucugccccgucuccggcugggccaucuacuccaaggacaacuccauccgcaucggcuccaagggcgacgucuucgucauccgcgagcccuucaucuccugcuccccccucgagugccgcaccuucuuccucacccagggcgcccuccucaacgacaagcacuccaacggcaccaucaaggaccgcucccccuaccgcacccucauguccugccccaucggcgagguccccucccccuacaacucccgcuucgaguccgucgccugguccgccuccgccugccacgacggcaucaacuggcucaccaucggcaucuccggccccgacaacggcgccgucgccguccucaaguacaacggcaucaucaccgacaccaucaaguccuggcgcaacaacauccuccgcacccaggaguccgagugcgccugcgucaacggcuccugcuucaccaucaugaccgacggccccuccgacggccaggccuccuacaagaucuuccgcaucgagaagggcaagaucgucaaguccgucgagaugaacgcccccaacuaccacuacgaggagugcuccugcuaccccgacuccuccgagaucaccugcgucugccgcgacaacuggcacggcuccaaccgccccugggucuccuucaaccagaaccucgaguaccagaucggcuacaucugcuccggcaucuucggcgacaacccccgccccaacgacaagaccggcuccugcggccccgucuccuccaacggcgccaacggcgucaagggcuucuccuucaaguacggcaacggcgucuggaucggccgcaccaaguccaucuccucccgcaagggcuucgagaugaucugggaccccaacggcuggaccggcaccgacaacaacuucuccaucaagcaggacaucgucggcaucaacgagugguccggcuacuccggcuccuucguccagcaccccgagcucaccggccucgacugcauccgccccugcuucugggucgagcucauccgcggccgccccaaggagaacaccaucuggaccuccggcuccuccaucuccuucugcggcgucaacuccgacaccgucggcugguccuggcccgacggcgccgagcuccccuucaccaucgacaaguga

SEQ ID NO: 117152 - RNA, 1410 nt, Artificial Sequence
  derived and/or modified CDS sequence (opt2) from neuraminidase__InfluenzaA__AEQ49779
augaaccccaaccagaagaucaucaccaucggcuccgucugcaugaccaucggcauggccaaccucauccuccagaucggcaacaucaucuccaucuggaucucccacuccauccagcucggcaaccagaaccagaccgagaccugcaaccaguccgucaucaccuacgagaacaacaccugggucaaccagaccuacgucaacaucuccaacaccaacuucgccgccggccaguccgucgucuccgucaagcucgccggcaacuccucccucugccccgucuccggcugggccaucuacuccaaggacaacuccauccgcaucggcuccaagggcgacgucuucgucauccgcgagcccuucaucuccugcuccccccucgagugccgcaccuucuuccucacccagggcgcccuccucaacgacaagcacuccaacggcaccaucaaggaccgcucccccuaccgcacccucauguccugccccaucggcgagguccccucccccuacaacucccgcuucgaguccgucgccugguccgccuccgccugccacgacggcaucaacuggcucaccaucggcaucuccggccccgacaacggcgccgucgccguccucaaguacaacggcaucaucaccgacaccaucaaguccuggcgcaacaacauccuccgcacccaggaguccgagugcgccugcgucaacggcuccugcuucaccgucaugaccgacggccccuccgacggccaggccuccuacaagaucuuccgcaucgagaagggcaagaucgucaaguccgucgagaugaacgcccccaacuaccacuacgaggagugcuccugcuaccccgacuccuccgagaucaccugcgucugccgcgacaacuggcacggcuccaaccgccccugggucuccuucaaccagaaccucgaguaccgcaucggcuacaucugcuccggcaucuucggcgacaacccccgccccaacgacaagaccggcuccugcggccccgucuccuccaacggcgccaacggcgucaagggcuucuccuucaaguacggcaacggcgucuggaucggccgcaccaaguccaucuccucccgcaacggcuucgagaugaucugggaccccaacggcuggaccggcaccgacaacaacuucuccaucaagcaggacaucaucggcaucaacgagugguccggcuacuccggcuccuucguccagcaccccgagcucaccggccucgacugcauccgccccugcuucugggucgagcucauccgcggccgccccaaggagaacaccaucuggaccuccggcuccuccaucuccuucugcggcgucaacuccgacaccgucggcugguccuggcccgacggcgccgagcuccccuucaccgucgacaaguga

SEQ ID NO: 117153 - RNA, 1410 nt, Artificial Sequence; identical to SEQ ID NO: 116293
  derived and/or modified CDS sequence (opt2) from neuraminidase__InfluenzaA__AEQ49780

SEQ ID NO: 117154 - RNA, 1410 nt, Artificial Sequence; identical to SEQ ID NO: 116293
  derived and/or modified CDS sequence (opt2) from neuraminidase__InfluenzaA__AEQ49781

SEQ ID NO: 117155 - RNA, 1410 nt, Artificial Sequence; identical to SEQ ID NO: 117114
  derived and/or modified CDS sequence (opt2) from neuraminidase__InfluenzaA__AEQ49782

SEQ ID NO: 117156 - RNA, 1410 nt, Artificial Sequence
  derived and/or modified CDS sequence (opt2) from neuraminidase__InfluenzaA__AEQ49783
augaaccccaaccagaagaucaucaccaucggcuccgccugcaugaccaucggcauggccaaccucauccuccagaucggcaacaucaucuccaucuggaucucccacuccauccagcucggcaaccagucccagaucgagaccugcaaccaguccgucaucaccuacgagaacaacaccugggucaaccagaccuacgucaacaucuccaacaccaacuucgccgccggccaguccgucgucuccgucaagcucgccggcaacuccucccucugccccgucuccggcugggccaucuacuccaaggacaacuccauccgcaucggcuccaagggcgacgucuucgucauccgcgagcccuucaucuccugcuccccccucgagugccgcaccuucuuccucacccagggcgcccuccucaacgacaagcacuccaacggcaccaucaaggaccgcucccccuaccgcacccucauguccugccccaucggcgagguccccucccccuacaacucccgcuucgaguccgucgccugguccgccuccgccugccacgacggcaucaacuggcucaccaucggcaucuccggccccgacaacggcgccgucgccguccucaaguacaacggcaucaucaccgacaccaucaaguccuggcgcaacaacauccuccgcacccaggaguccgagugcgccugcgucaacggcuccugcuucaccaucaugaccgacggccccuccgacggccaggccuccuacaagaucuuccgcaucgagaagggcaagaucgucaaguccgucgagaugaacgcccccaacuaccacuacgaggagugcuccugcuaccccgacuccuccgagaucaccugcgucugccgcgacaacuggcacggcuccaaccgccccugggucuccuucaaccagaaccucgaguaccagaucggcuacaucugcuccggcaucuucggcgacaacccccgccccaacgacaagaccggcuccugcggccccgucuccuccaacggcgccaacggcgucaagggcuucuccuucaaguacggcaacggcgucuggaucggccgcaccaaguccaucuccucccgcaagggcuucgagaugaucugggaccccaacggcuggaccggcaccgacaacaacuucuccaucaagcaggacaucgucggcaucaacgagugguccggcuacuccggcuccuucguccagcaccccgagcucaccggccucgacugcauccgccccugcuucugggucgagcucauccgcggccgccccaaggagaacaccaucuggaccuccggcuccuccaucuccuucugcggcgucaacuccgacaccgucggcugguccuggcccgacggcgccgagcuccccuucaccaucgacaaguga

SEQ ID NO: 117157 - RNA, 1410 nt, Artificial Sequence
  derived and/or modified CDS sequence (opt2) from neuraminidase__InfluenzaA__AEQ49785
augaaccccaaccagaagaucaucaccaucggcuccgucucccucaccaucuccaccaucugcuucuucaugcagaucgccauccucaucaccaccgucacccuccacuucaagcaguacgaguucaacuccccccccaacaaccaggucaugcucugcgagcccaccaucaucgagcgcaacaucaccgagaucgucuaccucaccaacaccaccaucgagaaggagaucugccccaagcucgccgaguaccgcaacugguccaagccccagugcgacaucaccggcuucgcccccuucuccaaggacaacuccauccgccucuccgccggcggcgacaucugggucacccgcgagcccuacgucuccugcgaccccaacaagugcuaccaguucgcccucggccagggcaccacccucaacaacguccacuccaacaacaccguccgcgaccgcacccccuaccgcacccuccucaugaacgagcucggcguccccuuccaccucggcaccaagcaggucugcaucgccugguccuccuccuccugccacgacggcaaggccuggcuccacgucugcaucaccggcgacgacaagaacgccaccgccuccuucaucuacaacggccgccucgucgacuccgucgucuccugguccaaggagauccuccgcacccaggaguccgagugcgucugcaucaacggcaccugcaccgucgucaugaccgacggcuccgccuccggcaaggccgacaccaagauccucuucaucgaggagggcaagaucguccacaccuccacccucuccggcuccgcccagcacgucgaggagugcuccugcuacccccgcuaccccggcguccgcugcgucugccgcgacaacuggaagggcuccaaccgccccaucgucgacaucaacaugaaggaccacuccaucgucuccuccuacgucugcuccggccucgucggcgacaccccccgcaagaacgacuccuccuccuccucccacugcuucgaccccaacgacgaggagggcggccacggcgucaagggcugggccuucgacgacggcaacgacgucuggaugggccgcaccaucuccgagaagucccgccucggcuacgagaccuucaaggucaucgagggcugguccaaccccaaguccaagcuccagaucaaccgccaggucaucgucgaccgcggcgaccgcuccggcuacuccggcaucuucuccgucgagggcaaguccugcaucaaccgcugcuucuacgucgagcucauccgcggcuccaaggaggagaccgagguccucuggaccuccaacuccaucgucgucuucugcggcaccuccggcaccuacggcaccggcuccuggcccgacggcgccgacaucaaccucaugcccaucuga

SEQ ID NO: 117158 - RNA, 1410 nt, Artificial Sequence; identical to SEQ ID NO: 117157
  derived and/or modified CDS sequence (opt2) from neuraminidase__InfluenzaA__AEQ49786

SEQ ID NO: 117159 - RNA, 1410 nt, Artificial Sequence; identical to SEQ ID NO: 117157
  derived and/or modified CDS sequence (opt2) from neuraminidase__InfluenzaA__AEQ49788

SEQ ID NO: 117160 - RNA, 1410 nt, Artificial Sequence; identical to SEQ ID NO: 117157
  derived and/or modified CDS sequence (opt2) from neuraminidase__InfluenzaA__AEQ49789

SEQ ID NO: 117161 - RNA, 1410 nt, Artificial Sequence
  derived and/or modified CDS sequence (opt2) from neuraminidase__InfluenzaA__AEQ49790
augaaccccaaccagaagaucaucaccaucggcuccgucucccucaccaucuccaccaucugcuucuucaugcagaucgccauccucaucaccaccgucacccuccacuucaagcaguacgaguucuacuccccccccaacaaccaggucaugcucugcgagcccaccaucaucgagcgcaacaucaccgagaucgucuaccucaccaacaccaccaucgagaaggagaucugccccaagcucgccgaguaccgcaacugguccaagccccagugcgacaucaccggcuucgcccccuucuccaaggacaacuccauccgccucuccgccggcggcgacaucugggucacccgcgagcccuacgucuccugcgaccccgacaagugcuaccaguucgcccucggccagggcaccacccucaacaacguccacuccaacaacaccguccgcggccgcacccccuaccgcacccuccucaugaacgagcucggcguccccuuccaccucggcaccaagcaggucugcaucgccugguccuccuccuccugccacgacggcaaggccuggcuccacgucugcaucaccggcgacgacaagaacgccaccgccuccuucaucuacaacggccgccucgucgacuccgucgucuccugguccaaggagauccuccgcacccaggaguccgagugcgucugcaucaacggcaccugcaccgucgucaugaccgacggcuccgccuccggcaaggccgacaccaagauccucuucaucgaggagggcaagaucguccacaccuccacccucuccggcuccgcccagcacgucgaggagugcuccugcuacccccgcuaccccggcguccgcugcgucugccgcgacaacuggaagggcuccaaccgccccaucgucgacaucaacaucaaggaccacuccaucgucuccuccuacgucugcuccggccucgucggcgacaccccccgcaagaacgacuccuccuccuccucccacugccucgaccccaacaacgaggagggcggccacggcgucaagggcugggccuucgacgacggcaacgacgucuggaugggccgcaccaucaacgagaccucccgccucggcuacgagaccuucaaggucaucgagggcugguccaaccccaaguccaagcuccagaucaaccgccaggucaucgucgaccgcggcaaccgcuccggcuacuccggcaucuucuccgucgagggcaaguccugcaucaaccgcugcuucuacgucgagcucauccgcggccgcaaggaggagaccgagguccucuggaccuccaacuccaucgucgucuucugcggcaccuccggcaccuacggcaccggcuccuggcccgacggcgccgaccucaaccucaugcccaucuga

SEQ ID NO: 117162 - RNA, 1410 nt, Artificial Sequence
  derived and/or modified CDS sequence (opt2) from neuraminidase__InfluenzaA__AEQ49791
augaaccccaaccagaagaucaucaccaucggcuccgucucccucaccaucuccaccaucugcuucuucaugcagaucgccauccucaucaccaccgucacccuccacuucaagcaguacgaguucuaccccccccccaacaaccaggucaugcucugcgagcccaccaucaucgagcgcaacaucaccgagaucgucuaccucaccaacaccaccaucgagaaggagaucugccccaagcucgccgaguaccgcaacugguccaagccccagugcgacaucaccggcuucgcccccuucuccaaggacaacuccauccgccucuccgccggcggcgacaucugggucacccgcgagcccuacgucuccugcgaccccgacaagugcuaccaguucgcccucggccagggcaccacccucaacaacguccacuccaacaacaccguccgcaaccgcacccccuaccgcacccuccucaugaacgagcucggcguccccuuccaccucggcaccaagcaggucugcaucgccugguccuccuccuccugccacgacggcaaggccuggcuccacgucugcaucaccggcgacgacaagaacgccaccgccuccuucaucuacaacggccgccucgucgacuccgucgucuccugguccaaggagauccuccgcacccaggaguccgagugcgucugcaucaacggcaccugcaccgucgucaugaccgacggcuccgccuccggcaaggccgacaccaagauccucuucaucgaggagggcaagaucguccacaccuccacccucuccggcuccgcccagcacgucgaggagugcuccugcuacccccgcuaccccggcguccgcugcgucugccgcgacaacuggaagggcuccaaccgccccaucgucgacaucaacaucaaggaccacuccaucgucuccuccuacgucugcuccggccucgucggcgacaccccccgcaagaacgacuccuccuccuccucccacugccucgaccccaacaacgaggagggcggccacggcgucaagggcugggccuucgacgacggcaacgacgucuggaugggccgcaccaucaacgagaccucccgccucggcuacgagaccuucaaggucaucgagggcugguccaaccccaaguccaagcuccagaucaaccgccaggucaucgucgaccgcggcaaccgcuccggcuacuccggcaucuucuccgucgagggcaaguccugcaucaaccgcugcuucuacgucgagcucauccgcggccgcaaggaggagaccgagguccucuggaccuccaacuccaucgucgucuucugcggcaccuccggcaccuacggcaccggcuccuggcccgacggcgccgaccucaaccucaugcccaucuga

SEQ ID NO: 117163 - RNA, 1410 nt, Artificial Sequence; identical to SEQ ID NO: 117157
  derived and/or modified CDS sequence (opt2) from neuraminidase__InfluenzaA__AEQ49792

SEQ ID NO: 117164 - RNA, 1410 nt, Artificial Sequence; identical to SEQ ID NO: 117157
  derived and/or modified CDS sequence (opt2) from neuraminidase__InfluenzaA__AEQ49793

SEQ ID NO: 117165 - RNA, 1410 nt, Artificial Sequence; identical to SEQ ID NO: 117157
  derived and/or modified CDS sequence (opt2) from neuraminidase__InfluenzaA__AEQ49794

SEQ ID NO: 117166 - RNA, 1410 nt, Artificial Sequence; identical to SEQ ID NO: 117157
  derived and/or modified CDS sequence (opt2) from neuraminidase__InfluenzaA__AEQ49795

SEQ ID NO: 117167 - RNA, 1410 nt, Artificial Sequence
  derived and/or modified CDS sequence (opt2) from neuraminidase__InfluenzaA__AEQ49796
augaaccccaaccagaagaucaucaccaucggcuccgucucccucaccaucuccaccaucugcuucuucaugcagaucgccauccucaucaccaccgucacccuccacuucaagcaguacgaguucaacuccccccccaacaaccaggucaugcucugcgagcccaccaucaucgagcgcaacaucaccgagaucgucuaccucaccaacaccaccaucgagaaggagaucugccccaagcucgccgaguaccgcaacugguccaagccccagugcgacaucaccggcuucgcccccuucuccaaggacaacuccauccgccucuccgccggcggcgacaucugggucacccgcgagcccuacgucuccugcgaccccgacaagugcuaccaguucgcccucggccagggcaccacccucaacaacguccacuccaacaacaccguccgcggccgcacccccuaccgcacccuccucaugaacgagcucggcguccccuuccaccucggcaccaagcaggucugcaucgccugguccuccuccuccugccacgacggcaaggccuggcuccacgucugcaucaccggcgacgacaagaacgccaccgccuccuucaucuacaacggccgccucgucgacuccgucgucuccugguccaaggagauccuccgcacccaggaguccgagugcgucugcaucaacggcaccugcaccgucgucaugaccgacggcuccgccuccggcaaggccgacaccaagauccucuucaucgaggagggcaagaucguccacaccuccacccucuccggcuccgcccagcacgucgaggagugcuccugcuacccccgcuaccccggcguccgcugcgucugccgcgacaacuggaagggcuccaaccgccccaucgucgacaucaacaucaaggaccacuccaucgucuccuccuacgucugcuccggccucgucggcgacaccccccgcaagaacgacuccuccuccuccucccacugccucgaccccaacaacgaggagggcggccacggcgucaagggcugggccuucgacgacggcaacgacgucuggaugggccgcaccaucaacgagaccucccgccucggcuacgagaccuucaaggucaucgagggcugguccaaccccaaguccaagcuccagaucaaccgccaggucaucgucgacaagggcaaccgcuccggcuacuccggcaucuucuccgucgagggcaaguccugcaucaaccgcugcuucuacgucgagcucauccgcggccgcaaggaggagaccgagguccucuggaccuccaacuccaucgucgucuucugcggcaccuccggcaccuacggcaccggcuccuggcccgacggcgccgaccucaaccucaugcccaucuga

SEQ ID NO: 117168 - RNA, 1410 nt, Artificial Sequence; identical to SEQ ID NO: 117157
  derived and/or modified CDS sequence (opt2) from neuraminidase__InfluenzaA__AEQ49797

SEQ ID NO: 117169 - RNA, 1410 nt, Artificial Sequence; identical to SEQ ID NO: 117157
  derived and/or modified CDS sequence (opt2) from neuraminidase__InfluenzaA__AEQ49798

SEQ ID NO: 117170 - RNA, 1410 nt, Artificial Sequence; identical to SEQ ID NO: 117157
  derived and/or modified CDS sequence (opt2) from neuraminidase__InfluenzaA__AEQ49799

SEQ ID NO: 117171 - RNA, 1410 nt, Artificial Sequence; identical to SEQ ID NO: 117157
  derived and/or modified CDS sequence (opt2) from neuraminidase__InfluenzaA__AEQ49800

SEQ ID NO: 117172 - RNA, 1410 nt, Artificial Sequence; identical to SEQ ID NO: 117157
  derived and/or modified CDS sequence (opt2) from neuraminidase__InfluenzaA__AEQ49801

SEQ ID NO: 117173 - RNA, 1410 nt, Artificial Sequence; identical to SEQ ID NO: 117157
  derived and/or modified CDS sequence (opt2) from neuraminidase__InfluenzaA__AEQ49802

SEQ ID NO: 117174 - RNA, 1410 nt, Artificial Sequence
  derived and/or modified CDS sequence (opt2) from neuraminidase__InfluenzaA__AEQ49803
augaaccccaaccagaagaucaucaccaucggcuccgucucccucaccaucuccaccaucugcuucuucaugcagaucgccauccucaucaccaccgucacccuccacuucaagcaguacgaguucaacuccccccccaacaaccaggucaugcucugcgagcccaccaucaucgagcgcaacaucaccgagaucgucuaccucaccaacaccaccaucgagaaggagaucugccccaagcucgccgaguaccgcaacugguccaagccccagugcgacaucaccggcuucgcccccuucuccaaggacaacuccauccgccucuccgccggcggcgacaucugggucacccgcgagcccuacgucuccugcgaccccaacaagugcuaccaguucgcccucggccagggcaccacccucaacaacguccacuccaacaacaccguccgcgaccgcacccccuaccgcacccuccucaugaacgagcucggcguccccuuccaccucggcaccaagcaggucugcaucgccugguccuccuccuccugccacgacggcaaggccuggcuccacgucugcaucaccggcgacgacaagaacgccaccgccuccuucaucuacaacggccgccucgucgacuccgucgucuccugguccaaggagauccuccgcacccaggaguccgagugcgucugcaucaacggcaccugcaccgucgucaugaccgacggcuccgccuccggcaaggccgacaccaagauccucuucaucgaggagggcaagaucguccacaccuccacccucuccggcuccgcccagcacgucgaggagugcuccugcuacccccgcuaccccggcguccgcugcgucugccgcgacaacuggaagggcuccaaccgccccaucgucgacaucaacaucaaggaccacuccaucgucuccuccuacgucugcuccggccucgucggcgacaccccccgcaagaacgacuccaccuccuccucccacugccucgaccccaacaacgaggagggcggccacggcgucaagggcugggccuucgacgacggcaacgacgucuggaugggccgcaccaucuccgagaccucccgccucggcuacgagaccuucaaggucaucgagggcugguccaaccccaaguccaagcuccagaucaaccgccaggucaucgucgacaagggcaaccgcuccggcuacuccggcaucuucuccgucgagggcaaguccugcaucaaccgcugcuucuacgucgagcucauccgcggccgcaaggaggagaccgagguccucuggaccuccaacuccaucgucgucuucugcggcaccuccggcaccuacggcaccggcuccuggcccgacggcgccgaccucaaccucaugaccaucuga

SEQ ID NO: 117175 - RNA, 1410 nt, Artificial Sequence
  derived and/or modified CDS sequence (opt2) from neuraminidase__InfluenzaA__AEQ49804
augaaccccaaccagaagaucaucaccaucggcuccgucucccucaccaucuccaccaucugcuucuucaugcagaucgccauccucaucaccaccgucacccuccacuucaagcaguacgaguucaacuccccccccaacaaccaggucaugcucugcgagcccaccaucaucgagcgcaacaucaccgagaucgucuaccucaccaacaccaccaucgagaaggagaucugccccaagcccgccgaguaccgcaacugguccaagccccagugcgacaucaccggcuucgcccccuucuccaaggacaacuccauccgccucuccgccggcggcgacaucugggucacccgcgagcccuacgucuccugcgaccccgacaagugcuaccaguucgcccucggccagggcaccacccucaacaacguccacuccaacaacaccguccgcgaccgcacccccuaccgcacccuccucaugaacgagcucggcguccccuuccaccucggcaccaagcaggucugcaucgccugguccuccuccuccugccacgacggcaaggccuggcuccacgucugcaucaccggcgacgacaagaacgccaccgccuccuucaucuacaacggccgccucgucgacuccgucgucuccugguccaaggacauccuccgcacccaggaguccgagugcgucugcaucaacggcaccugcaccgucgucaugaccgacggcuccgccuccggcaaggccgacaccaagauccucuucaucgaggagggcaagaucguccacaccuccacccucuccggcuccgcccagcacgucgaggagugcuccugcuacccccgcuaccccggcguccgcugcgucugccgcgacaacuggaagggcuccaaccgccccaucgucgacaucaacaucaaggaccacuccaucgucuccuccuacgucugcuccggccucgucggcgacaccccccgcaagaacgacuccuccuccuccucccacugccucgaccccaacaacgaggagggcggccacggcgucaagggcugggccuucgacgacggcaacgacgucuggaugggccgcaccaucaacgagaccucccgccucggcuacgagaccuucaaggucaucgagggcugguccaaccccaaguccaagcuccagaucaaccgccaggucaucgucgaccgcggcaaccgcuccggcuacuccggcaucuucuccgucgagggcaaguccugcaucaaccgcugcuucuacgucgagcucauccgcggccgcaaggaggagaccgagguccucuggaccuccaacuccaucgucgucuucugcggcaccuccggcaccuacggcaccggcuccuggcccgacggcgccgaccucaaccucaugcccaucuga

SEQ ID NO: 117176 - RNA, 1410 nt, Artificial Sequence
  derived and/or modified CDS sequence (opt2) from neuraminidase__InfluenzaA__AEQ49805
augaaccccaaccagaagaucaucaccaucggcuccgucucccucaccaucuccaccaucugcuucuucaugcagaucgccauccucaucaccaccgucacccuccacuucaagcaguacgaguucaacuccccccccaacaaccaggucaugcucugcgagcccaccaucaucgagcgcaacaucaccgagaucgucuaccucaccaacaccaccaucgagaaggagaucugccccaagcccgccgaguaccgcaacugguccaagccccagugcgacaucaccggcuucgcccccuucuccaaggacaacuccauccgccucuccgccggcggcgacaucugggucacccgcgagcccuacgucuccugcgaccccgacaagugcuaccaguucgcccucggccagggcaccacccucaacaacguccacuccaacaacaccguccgcaaccgcacccccuaccgcacccuccucaugaacgagcucggcguccccuuccaccucggcaccaagcaggucugcaucgccugguccuccuccuccugccacgacggcaaggccuggcuccacgucugcaucaccggcgacgacaagaacgccaccgccuccuucaucuacaacggccgccucgucgacuccgucgucuccugguccaaggacauccuccgcacccaggaguccgagugcgucugcaucaacggcaccugcaccgucgucaugaccgacggcuccgccuccggcaaggccgacaccaagauccucuucaucgaggagggcaagaucguccacaccuccacccucuccggcuccgcccagcacgucgaggagugcuccugcuacccccgcuaccccggcguccgcugcgucugccgcgacaacuggaagggcuccaaccgccccaucgucgacaucaacaucaaggaccacuccaucgucuccuccuacgucugcuccggccucgucggcgacaccccccgcaagaacgacuccuccuccuccucccacugccucgaccccaacaacgaggagggcggccacggcgucaagggcugggccuucgacgacggcaacgacgucuggaugggccgcaccaucaacgagaccucccgccucggcuacgagaccuucaaggucaucgagggcugguccaaccccaaguccaagcuccagaucaaccgccaggucaucgucgaccgcggcaaccgcuccggcuacuccggcaucuucuccgucgagggcaaguccugcaucaaccgcugcuucuacgucgagcucauccgcggccgcaaggaggagaccgagguccucuggaccuccaacuccaucgucgucuucugcggcaccuccggcaccuacggcaccggcuccuggcccgacggcgccgaccucaaccucaugcccaucuga

SEQ ID NO: 117177 - RNA, 1410 nt, Artificial Sequence
  derived and/or modified CDS sequence (opt2) from neuraminidase__InfluenzaA__AEQ49806
augaaccccaaccagaagaucaucaccaucggcuccgucucccucaccaucuccaccaucugcuucuucaugcagaucgccauccucaucaccaccgucacccuccacuucaagcaguacgaguucaacuccccccccaacaaccaggucaugcucugcgagcccaccaucaucgagcgcaacaucaccgagaucgucuaccucaccaacaccaccaucgagaaggagaucugccccaagcucgccgaguaccgcaacugguccaagccccagugcgacaucaccggcuucgcccccuucuccaaggacaacuccauccgccucuccgccggcggcgacaucugggucacccgcgagcccuacgucuccugcgaccccgacaagugcuaccaguucgcccucggccagggcaccacccucaacaacguccacuccaacaacaccguccgcgaccgcacccccuaccgcacccuccucaugaacgagcucggcguccccuuccaccucggcaccaagcaggucugcaucgccugguccuccuccuccugccacgacggcaaggccuggcuccacgucugcaucaccggcgacgacaagaacgccaccgccuccuucaucuacaacggccgccucgucgacuccgucgucuccugguccaaggagauccuccgcacccaggaguccgagugcgucugcaucaacggcaccugcaccgucgucaugaccgacggcuccgccuccggcaaggccgacaccaagauccucuucaucgaggagggcaagaucguccacaccuccacccucuccggcuccgcccagcacgucgaggagugcuccugcuacccccgcuaccccggcguccgcugcgucugccgcgacaacuggaagggcuccaaccgccccaucgucgacaucaacaucaaggaccacuccaucgucuccuccuacgucugcuccggccucgucggcgacaccccccgcaagaacgacuccuucuccuccucccacugccucgaccccaacaacgaggagggcggccacggcgucaagggcugggccuucgacgacggcaacgacgucuggaugggccgcaccaucaacgagaccucccgccucggcuacgagaccuucaaggucaucgagggcugguccaaccccaaguccaagcuccagaucaaccgccaggucaucgucgaccgcggcaaccgcuccggcuacuccggcaucuucuccgucgagggcaaguccugcaucaaccgcugcuucuacgucgagcucauccgcggccgcaaggaggagaccgagguccucuggaccuccaacuccaucgucgucuucugcggcaccuccggcaccuacggcaccggcuccuggcccgacggcgccgaccucaaccucaugcccaucuga

SEQ ID NO: 117178 - RNA, 1410 nt, Artificial Sequence; identical to SEQ ID NO: 115554
  derived and/or modified CDS sequence (opt2) from neuraminidase__InfluenzaA__AEQ49807

SEQ ID NO: 117179 - RNA, 1410 nt, Artificial Sequence
  derived and/or modified CDS sequence (opt2) from neuraminidase__InfluenzaA__AEQ49809
augaaccccaaccagaagaucaucaccaucggcuccgucucccucaccaucuccaccaucugcuucuucaugcagaucgccauccucaucaccaccgucacccuccacuucaagcaguacgaguucaacuccccccccaacaaccaggucaugcucugcgagcccaccaucaucgagcgcaacaucaccgagaucgucuaccucaccaacaccaccaucgagaaggagaucugccccaagcucgccgaguaccgcaacugguccaagccccagugcgacaucaccggcuucgcccccuucuccaaggacaacuccauccgccucuccgccggcggcgacaucugggucacccgcgagcccuacgucuccugcgaccccgacaagugcuaccaguucgcccucggccagggcaccacccucaacaacguccacuccaacaacaccguccgcgaccgcacccccuaccgcacccuccucaugaacgagcucggcguccccuuccaccucggcaccaagcaggucugcaucgccugguccuccuccuccugccacgacggcaaggccuggcuccacgucugcaucaccggcgacgacaagaacgccaccgccuccuucaucuacaacggcaagcucgucgacuccgucgucuccugguccaaggagauccuccgcacccaggaguccgagugcgucugcaucaacggcaccugcaccgucgucaugaccgacggcuccgccuccggcaaggccgacaccaagauccucuucaucgaggagggcaagaucguccacaccuccacccucuccggcuccgcccagcacgucgaggagugcuccugcuacccccgcuaccccggcguccgcugcgucugccgcgacaacuggaagggcuccaaccgccccaucgucgacaucaacaucaaggaccacuccaucgucuccuccuacgucugcuccggccucgucggcgacaccccccgcaagaacgacuccuccuccuccucccacugccucgaccccaacaacgaggagggcggccacggcgucaagggcugggccuucgacgacggcaacgacgucuggaugggccgcaccaucaacgagaccucccgccucggcuacgagaccuucaaggucaucgagggcugguccaaccccaaguccaagcuccagaucaaccgccaggucaucgucgaccgcggcaaccgcuccggcuacuccggcaucuucuccgucgagggcaaguccugcaucaaccgcugcuucuacgucgagcucauccgcggccgcaaggaggagaccgagguccucuggaccuccaacuccaucgucgucuucugcggcaccuccggcaccuacggcaccggcuccuggcccgacggcgccgaccucaaccucaugcccaucuga

SEQ ID NO: 117180 - RNA, 1410 nt, Artificial Sequence; identical to SEQ ID NO: 117179
  derived and/or modified CDS sequence (opt2) from neuraminidase__InfluenzaA__AEQ49811

SEQ ID NO: 117181 - RNA, 1410 nt, Artificial Sequence; identical to SEQ ID NO: 115554
  derived and/or modified CDS sequence (opt2) from neuraminidase__InfluenzaA__AEQ49812

SEQ ID NO: 117182 - RNA, 1410 nt, Artificial Sequence; identical to SEQ ID NO: 115554
  derived and/or modified CDS sequence (opt2) from neuraminidase__InfluenzaA__AEQ49813

SEQ ID NO: 117183 - RNA, 1410 nt, Artificial Sequence; identical to SEQ ID NO: 115554
  derived and/or modified CDS sequence (opt2) from neuraminidase__InfluenzaA__AEQ49815

SEQ ID NO: 117184 - RNA, 1410 nt, Artificial Sequence
  derived and/or modified CDS sequence (opt2) from neuraminidase__InfluenzaA__AEQ49816
augaaccccaaccagaagaucaucaccaucggcuccgucucccucaccaucuccaccaucugcuucuucaugcagaucgccauccucaucaccaccgucacccuccacuucaagcaguacgaguucaacuccccccccaacaaccaggucaugcucugcgagcccaccaucaucgagcgcaacaucaccgagaucgucuaccucaccaacaccaccaucgagaaggagaucugccccaagcucgccgaguaccgcaacugguccaagccccagugcgacaucaccggcuucgcccccuucuccaaggacaacuccauccgccucuccgccggcggcgacaucugggucacccgcgagcccuacgucuccugcgaccccaacaagugcuaccaguucgcccucggccagggcaccacccucaacaacguccacuccaacaacaccguccgcgaccgcacccccuaccgcacccuccucaugaacgagcucggcguccccuuccaccucggcaccaagcaggucugcaucgccugguccuccuccuccugccacgacggcaaggccuggcuccacgucugcaucaccggcgacgacaagaacgccaccgccuccuucaucuacaacggccgccucgucgacuccgucgucuccugguccaaggagauccuccgcacccaggaguccgagugcgucugcaucaacggcaccugcaccgucgucaugaccgacggcuccgccuccggcaaggccgacaccaagauccucuucgucgaggagggcaagaucguccacaccuccacccucuccggcuccgcccagcacgucgaggagugcuccugcuacccccgcuaccccggcguccgcugcgucugccgcgacaacuggaagggcuccaaccgccccaucgucgacaucaacaugaaggaccacuccaucgucuccuccuacgucugcuccggccucgucggcgacaccccccgcaagaacgacuccuccuccuccucccacugcuucgaccccaacgacgaggagggcggccacggcgucaagggcugggccuucgacgacggcaacgacgucuggaugggccgcaccaucuccgagaagucccgccucggcuacgagaccuucaaggucaucgagggcugguccaaccccaaguccaagcuccagaucaaccgccaggucaucgucgaccgcggcaaccgcuccggcuacuccggcaucuucuccgucgagggcaaguccugcaucaaccgcugcuucuacgucgagcucauccgcggccgcaaggaggagaccgagguccucuggaccuccaacuccaucgucgucuucugcggcaccuccggcaccuacggcaccggcuccuggcccgacggcgccgacaucaaccucaugcccaucuga

SEQ ID NO: 117185 - RNA, 1410 nt, Artificial Sequence; identical to SEQ ID NO: 116919
  derived and/or modified CDS sequence (opt2) from neuraminidase__InfluenzaA__AEQ49820

SEQ ID NO: 117186 - RNA, 1410 nt, Artificial Sequence; identical to SEQ ID NO: 116919
  derived and/or modified CDS sequence (opt2) from neuraminidase__InfluenzaA__AEQ49821

SEQ ID NO: 117187 - RNA, 1410 nt, Artificial Sequence; identical to SEQ ID NO: 117157
  derived and/or modified CDS sequence (opt2) from neuraminidase__InfluenzaA__AEQ49822

SEQ ID NO: 117188 - RNA, 1410 nt, Artificial Sequence; identical to SEQ ID NO: 117157
  derived and/or modified CDS sequence (opt2) from neuraminidase__InfluenzaA__AEQ49823

SEQ ID NO: 117189 - RNA, 1410 nt, Artificial Sequence; identical to SEQ ID NO: 117157
  derived and/or modified CDS sequence (opt2) from neuraminidase__InfluenzaA__AEQ49824

SEQ ID NO: 117190 - RNA, 1410 nt, Artificial Sequence; identical to SEQ ID NO: 117157
  derived and/or modified CDS sequence (opt2) from neuraminidase__InfluenzaA__AEQ49825

SEQ ID NO: 117191 - RNA, 1410 nt, Artificial Sequence; identical to SEQ ID NO: 117157
  derived and/or modified CDS sequence (opt2) from neuraminidase__InfluenzaA__AEQ49826

SEQ ID NO: 117192 - RNA, 1410 nt, Artificial Sequence; identical to SEQ ID NO: 117157
  derived and/or modified CDS sequence (opt2) from neuraminidase__InfluenzaA__AEQ49827

SEQ ID NO: 117193 - RNA, 1410 nt, Artificial Sequence; identical to SEQ ID NO: 117157
  derived and/or modified CDS sequence (opt2) from neuraminidase__InfluenzaA__AEQ49828

SEQ ID NO: 117194 - RNA, 1410 nt, Artificial Sequence
  derived and/or modified CDS sequence (opt2) from neuraminidase__InfluenzaA__AEQ49829
augaaccccaaccagaagaucaucaccaucggcuccgucucccucaccaucuccaccaucugcuucuucaugcagaucgccauccucaucaccaccgucacccuccacuucaagcaguacgaguucaacuccccccccaacaaccaggucaugcucugcgagcccaccaucaucgagcgcaacaucaccgagaucgucuaccucaccaacaccaccaucgagaaggagaucugccccaagcucgccgaguaccgcaacugguccaagccccagugcgacaucaccggcuucgcccccuucuccaaggacaacuccauccgccucuccgccggcggcgacaucugggucacccgcgagcccuacgucuccugcgaccccaacaagugcuaccaguucgcccucggccagggcaccacccucaacaacguccacuccaacaacaccguccgcgaccgcacccccuaccgcacccuccucaugaacgagcucggcguccccuuccaccucggcaccaagcaggucugcaucgccugguccuccuccuccugccacgacggcaaggccuggcuccacgucugcaucaccggcgacgacaagaacgccaccgccuccuucaucuacaacggccgccucgucgacuccgucgucuccugguccaaggagauccuccgcacccaggaguccgagugcgucugcaucaacggcaccugcaccgucgucaugaccgacggcuccgcccucggcaaggccgacaccaagauccucuucaucgaggagggcaagaucguccacaccuccacccucuccggcuccgcccagcacgucgaggagugcuccugcuacccccgcuaccccggcguccgcugcgucugccgcgacaacuggaagggcuccaaccgccccaucgucgacaucaacaugaaggaccacuccaucgucuccuccuacgucugcuccggccucgucggcgacaccccccgcaagaacgacuccuccuccuccucccacugcuucgaccccaacgacgaggagggcggccacggcgucaagggcugggccuucgacgacggcaacgacgucuggaugggccgcaccaucuccgagaagucccgccucggcuacgagaccuucaaggucaucgagggcugguccaaccccaaguccaagcuccagaucaaccgccaggucaucgucgaccgcggcgaccgcuccggcuacuccggcaucuucuccgucgagggcaaguccugcaucaaccgcugcuucuacgucgagcucauccgcggcuccaaggaggagaccgagguccucuggaccuccaacuccaucgucgucuucugcggcaccuccggcaccuacggcaccggcuccuggcccgacggcgccgacaucaaccucaugcccaucuga

SEQ ID NO: 117195 - RNA, 1410 nt, Artificial Sequence; identical to SEQ ID NO: 117157
  derived and/or modified CDS sequence (opt2) from neuraminidase__InfluenzaA__AEQ49830

SEQ ID NO: 117196 - RNA, 1410 nt, Artificial Sequence; identical to SEQ ID NO: 117157
  derived and/or modified CDS sequence (opt2) from neuraminidase__InfluenzaA__AEQ49831

SEQ ID NO: 117197 - RNA, 1410 nt, Artificial Sequence
  derived and/or modified CDS sequence (opt2) from neuraminidase__InfluenzaA__AEQ49832
augaaccccaaccagaagaucaucaccaucggcuccgucucccucaccaucuccaccaucugcuucuucaugcagaucgccauccucaucaccaccgucacccuccacuucaagcaguacgaguucaacuccccccccaacaaccaggucaugcucugcgagcccaccaucaucgagcgcaacaucaccgagaucgucuaccucaccaacaccaccaucgagaaggagaucugccccaagcucgccgaguaccgcaacugguccaagccccagugcgacaucaccggcuucgcccccuucuccaaggacaacuccauccgccucuccgccggcggcgacaucugggucacccgcgagcccuacgucuccugcgaccccaacaagugcuaccaguucgcccucggccagggcaccacccucaacaacguccacuccaacaacaccguccgcgaccgcacccccuaccgcacccuccucaugaacgagcucggcguccccuuccaccucggcaccaagcaggucugcaucgccugguccuccuccuccugccacgacggcaaggccuggcuccacgucugcaucaccggcgacgacaagaacgccaccgccuccuucaucuacaacggccgccucgucgacuccgucgucuccugguccaaggagauccuccgcacccaggaguccgagugcgucugcaucaacggcaccugcaccgucgucaugaccgacggcuccgccuccggcaaggccgacaccaagauccucuucaucgaggagggcaagaucguccacaccuccacccucuccggcuccgcccagcacgucgaggagugcuccugcuacccccgcuaccccggcguccgcugcgucugccgcgacaacuggaagggcuccaaccgccccaucgucgacaucaacaugaaggaccacuccaucgucuccuccuacgucugcuccggccucgucggcgacaccccccgcaagaacgacuccuccuccuccucccacugcuucgaccccaacgacgaggagggcggccacggcgucaagggcugggccuucgacgacggcaacgacgucuggaugggccgcaccaucuccgagaagucccgccucggcuacgagaccuucaaggucgucgagggcugguccaaccccaaguccaagcuccagaucaaccgccaggucaucgucgaccgcggcgaccgcuccggcuacuccggcaucuucuccgucgagggcaaguccugcaucaaccgcugcuucuacgucgagcucauccgcggcuccaaggaggagaccgagguccucuggaccuccaacuccaucgucgucuucugcggcaccuccggcaccuacggcaccggcuccuggcccgacggcgccgacaucaaccucaugcccaucuga

SEQ ID NO: 117198 - RNA, 1410 nt, Artificial Sequence
  derived and/or modified CDS sequence (opt2) from neuraminidase__InfluenzaA__AEQ49833
augaaccccaaccagaagaucaucaccaucggcuccgucucccucaccaucuccaccaucugcuucuucaugcagaucgccauccucaucaccaccgucacccuccacuucaagcaguacgaguucaacuccccccccaacaaccaggucaugcucugcgagcccaccaucaucgagcgcaacaucaccgagaucgucuaccucaccaacaccaccaucgagaaggagaucugccccaagcucgccgaguaccgcaacugguccaagccccagugcgacaucaccggcuucgcccccuucuccaaggacaacuccauccgccucuccgccggcggcgacaucugggucacccgcgagcccuacgucuccugcgaccccgacaagugcuaccaguucgcccucggccagggcaccacccucaacaacguccacuccaacaacaccguccgcgaccgcacccccuaccgcacccuccucaugaacgagcucggcguccccuuccaccucggcaccaagcaggucugcaucgccugguccuccuccuccugccacgacggcaaggccuggcuccacgucugcaucaccggcgacgacaagaacgccaccgccuccuucaucuacaacggcaagcucgucgacuccgucgucuccugguccaaggagauccuccgcacccaggaguccgagugcgucugcaucaacggcaccugcaccgucgucaugaccgacggcuccgccuccggcaaggccgacaccaagauccucuucaucgaggagggcaagaucguccacaccuccacccucuccggcuccgcccagcacgucgaggagugcuccugcuacccccgcuaccccggcguccgcugcgucugccgcgacaacuggaagggcuccaaccgccccaucgucgacaucaacaucaaggaccacuccaucgucuccuccuacgucugcuccggccucgucggcgacaccccccgcaagaacgacuccuccuccuccucccacugccucgaccccaacaacgaggagggcggccacggcgucaagggcugggccuucgacgacggcaacgacgucuggaugggccgcaccaucaacgagaccucccgccucggcuacgagaccuucaaggucaucgagggcugguccaaccccaaguccaagcuccagaucucccgccaggucaucgucgaccgcggcaaccgcuccggcuacuccggcaucuucuccgucgagggcaaguccugcaucaaccgcugcuucuacgucgagcucauccgcggccgcaaggaggagaccgagguccucuggaccuccaacuccaucgucgucuucugcggcaccuccggcaccuacggcaccggcuccuggcccgacggcgccgaccucaaccucaugcccaucuga

SEQ ID NO: 117199 - RNA, 1410 nt, Artificial Sequence
  derived and/or modified CDS sequence (opt2) from neuraminidase__InfluenzaA__AEQ49835
augaaccccaaccagaagaucaucaccaucggcuccgucucccucaccaucuccaccaucugcuucuucaugcagaucgccauccucaucaccaccgucacccuccacuucaagcaguacgaguucaacuccccccccaacaaccaggucaugcucugcgagcccaccaucaucgagcgcaacaucaccgagaucgucuaccucaccaacaccaccaucgagaaggagaucugccccaagcucgccgaguaccgcaacugguccaagccccagugcgacaucaccggcuucgcccccuucuccaaggacaacuccauccgccucuccgccggcggcgacaucugggucacccgcgagcccuacgucuccugcgaccccaacaagugcuaccaguucgcccucggccagggcaccacccucaacaacguccacuccaacaacaccguccgcgaccgcacccccuaccgcacccuccucaugaacgagcucggcguccccuuccaccucggcaccaagcaggucugcauggccugguccuccuccuccugccacgacggcaaggccuggcuccacgucugcaucaccggcgacgacaagaacgccaccgccuccuucaucuacaacggccgccucgucgacuccgucgucuccugguccaaggagauccuccgcacccaggaguccgagugcgucugcaucaacggcaccugcaccgucgucaugaccgacggcuccgccuccggcaaggccgacaccaagauccucuucaucgaggagggcaagaucguccacaccuccacccucuccggcuccgcccagcacgucgaggagugcuccugcuacccccgcuaccccggcguccgcugcgucugccgcgacaacuggaagggcuccaaccgccccaucgucgacaucaacaugaaggaccacuccaucgucuccuccuacgucugcuccggccucgucggcgacaccccccgcaagaacgacuccuccuccuccucccacugcuucgaccccaacgacgaggagggcggccacggcgucaagggcugggccuucgacgacggcaacgacgucuggaugggccgcaccaucuccgagaagucccgccucggcuacgagaccuucaaggucaucgagggcugguccaaccccaaguccaagcuccagaucaaccgccaggucaucgucgaccgcggcaaccgcuccggcuacuccggcaucuucuccgucgagggcaaguccugcaucaaccgcugcuucuacgucgagcucauccgcggccgcaaggaggagaccgagguccucuggaccuccaacuccaucgucgucuucugcggcaccuccggcaccuacggcaccggcuccuggcccgacggcgccgacaucaaccucaugcccaucuga

SEQ ID NO: 117200 - RNA, 1410 nt, Artificial Sequence; identical to SEQ ID NO: 117199
  derived and/or modified CDS sequence (opt2) from neuraminidase__InfluenzaA__AEQ49836

SEQ ID NO: 117201 - RNA, 1410 nt, Artificial Sequence; identical to SEQ ID NO: 117199
  derived and/or modified CDS sequence (opt2) from neuraminidase__InfluenzaA__AEQ49838

SEQ ID NO: 117202 - RNA, 1410 nt, Artificial Sequence; identical to SEQ ID NO: 117199
  derived and/or modified CDS sequence (opt2) from neuraminidase__InfluenzaA__AEQ49839

SEQ ID NO: 117203 - RNA, 1410 nt, Artificial Sequence
  derived and/or modified CDS sequence (opt2) from neuraminidase__InfluenzaA__AEQ49840
augaaccccaaccagaagaucaucaccaucggcuccgucucccucaccaucuccaccaucugcuucuucaugcagaucgccauccucaucaccaccgucacccuccacuucaagcaguacgaguucaacuccccccccaacaaccaggucaugcucugcgagcccaccaucaucgagcgcaacaucaccgagaucgucuaccucaccaacaccaccaucgagaaggagaucugccccaagcucgccgaguaccgcaacugguccaagccccagugcgacaucaccggcuucgcccccuucuccaaggacaacuccauccgccucuccgccggcggcgacaucugggucacccgcgagcccuacgucuccugcgaccccaacaagugcuaccaguucgcccucggccagggcaccacccucaacaacguccacuccaacaacaccguccgcgaccgcacccccuaccgcacccuccucaugaacgagcucggcguccccuuccaccucggcaccaagcaggucugcauggccugguccuccuccuccugccacgacggcaaggccuggcuccacgucugcaucaccggcgacgacaagaacgccaccgccuccuucaucuacaacggccgccucgucgacuccgucgucuccugguccaaggagauccuccgcacccaggaguccgagugcgucugcaucaacggcaccugcaccgucgucaugaccgacggcuccgccuccggcaaggccgacaccaagauccucuucaucgaggagggcaagaucguccacaccuccacccucuccggcuccgcccagcacgucgaggagugcuccugcuacccccgcuaccccggcguccgcugcgucugccgcgacaacuggaagggcuccaaccgccccaucgucgacaucaacaugaaggaccacuccaucgucuccuccuacgucugcuccggccucgucggcgacaccccccgcaagaacgacuccuccuccuccucccacugcuucgaccccaacgacgaggagggcggccacggcgucaagggcugggccuucgacgacggcaacgacgucuggaugggccgcaccaucuccgagaagucccgccucggcuacgagaccuucaaggucaucgagggcugguccaaccacaaguccaagcuccagaucaaccgccaggucaucgucgaccgcggcaaccgcuccggcuacuccggcaucuucuccgucgagggcaaguccugcaucaaccgcugcuucuacgucgagcucauccgcggccgcaaggaggagaccgagguccucuggaccuccaacuccaucgucgucuucugcggcaccuccggcaccuacggcaccggcuccuggcccgacggcgccgacaucaaccucaugcccaucuga

SEQ ID NO: 117204 - RNA, 1410 nt, Artificial Sequence; identical to SEQ ID NO: 117199
  derived and/or modified CDS sequence (opt2) from neuraminidase__InfluenzaA__AEQ49841

SEQ ID NO: 117205 - RNA, 1410 nt, Artificial Sequence; identical to SEQ ID NO: 117199
  derived and/or modified CDS sequence (opt2) from neuraminidase__InfluenzaA__AEQ49842

SEQ ID NO: 117206 - RNA, 1410 nt, Artificial Sequence; identical to SEQ ID NO: 117199
  derived and/or modified CDS sequence (opt2) from neuraminidase__InfluenzaA__AEQ49843

SEQ ID NO: 117207 - RNA, 1410 nt, Artificial Sequence; identical to SEQ ID NO: 117157
  derived and/or modified CDS sequence (opt2) from neuraminidase__InfluenzaA__AEQ49844

SEQ ID NO: 117208 - RNA, 1410 nt, Artificial Sequence
  derived and/or modified CDS sequence (opt2) from neuraminidase__InfluenzaA__AEQ49845
augaaccccaaccagaagaucaucaccaucggcuccgucucccucaccaucuccaccaucugcuucuucaugcagaucgccauccucaucaccaccgucacccuccacuucaagcaguacgaguucaacuccccccccaacaaccaggucaugcucugcgagcccaccaucaucgagcgcaacaucaccgagaucgucuaccucaccaacaccaccaucgagcgcgagaucugccccaagcucgccgaguaccgcaacugguccaagccccagugcgacaucaccggcuucgcccccuucuccaaggacaacuccauccgccucuccgccggcggcgacaucugggucacccgcgagcccuacgucuccugcgaccccaacaagugcuaccaguucgcccucggccagggcaccacccucaacaacguccacuccaacaacaccguccgcgaccgcacccccuaccgcacccuccucaugaacgagcucggcguccccuuccaccucggcaccaagcaggucugcauggccugguccuccuccuccugccacgacggcaaggccuggcuccacgucugcaucaccggcgacgacaagaacgccaccgccuccuucaucuacaacggccgccucgucgacuccgucgucuccugguccaaggagauccuccgcacccaggaguccgagugcgucugcaucaacggcaccugcaccgucgucaugaccgacggcuccgccuccggcaaggccgacaccaagauccucuucaucgaggagggcaagaucguccacaccuccacccucuccggcuccgcccagcacgucgaggagugcuccugcuacccccgcuaccccggcguccgcugcgucugccgcgacaacuggaagggcuccaaccgccccaucgucgacaucaacaugaaggaccacuccaucgucuccuccuacgucugcuccggccucgucggcgacaccccccgcaagaacgacuccuccuccuccucccacugcuucgaccccaacgacgaggagggcggccacggcgucaagggcugggccuucgacgacggcaacgacgucuggaugggccgcaccaucuccgagaagucccgccucggcuacgagaccuucaaggucaucgagggcugguccaaccccaaguccaagcuccagaucaaccgccaggucaucgucgaccgcggcaaccgcuccggcuacuccggcaucuucuccgucgagggcaaguccugcaucaaccgcugcuucuacgucgagcucauccgcggccgcaaggaggagaccgagguccucuggaccuccaacuccaucgucgucuucugcggcaccuccggcaccuacggcaccggcuccuggcccgacggcgccgacaucaaccucaugcccaucuga

SEQ ID NO: 117209 - RNA, 1410 nt, Artificial Sequence
  derived and/or modified CDS sequence (opt2) from neuraminidase__InfluenzaA__AEQ49846
augaaccccaaccagaagaucaucaccaucggcuccgucucccucaccaucuccaccaucugcuucuucaugcagaucgccauccucaucaccaccgucacccuccacuucaagcaguacgaguucaacuccccccccaacaaccaggucaugcucugcgagcccaccaucaucgagcgcaacaucaccgagaucgucuaccucaccaacaccaccaucgagaaggagaucugccccaagcucgccgaguaccgcaacugguccaagccccagugcgacaucaccggcuucgcccccuucuccaaggacaacuccauccgccucuccgccggcggcgacaucugggucacccgcgagcccuacgucuccugcgaccccaacaagugcuaccaguucgcccucggccagggcaccacccucaacaacguccacuccaacaacaccguccgcgaccgcacccccuaccgcacccuccucaugaacgagcucggcguccccuuccaccucggcaccaagcaggucugcauggccugguccuccuccuccugccacgacggcaaggccuggcuccacgucugcaucaccggcgacgacaagaacgccaccgccuccuucaucuacaacggccgccucgucgacuccgucgucuccugguccaaggagauccuccgcacccaggaguccgagugcgucugcaucaacggcaccugcaccgucgucaugaccgacggcuccgccuccggcaaggccgacaccaagauccucuucaucgaggagggcaagaucguccacaccuccacccucuccggcuccgcccagcacgucgaggagugcuccugcuacccccgcuaccccggcguccgcugcgucugccgcgacaacuggaagggcuccaaccgccccaucgucgacaucaaccucaaggaccacuccaucgucuccuccuacgucugcuccggccucgucggcgacaccccccgcaagaacgacuccuccuccuccucccacugcuucgaccccaacgacgaggagggcggccacggcgucaagggcugggccuucgacgacggcaacgacgucuggaugggccgcaccaucuccgagaagucccgccucggcuacgagaccuucaaggucaucgagggcugguccaaccccaaguccaagcuccagaucaaccgccaggucaucgucgaccgcggcaaccgcuccggcuacuccggcaucuucuccgucgagggcaaguccugcaucaaccgcugcuucuacgucgagcucauccgcggccgcaaggaggagaccgagguccucuggaccuccaacuccaucgucgucuucugcggcaccuccggcaccuacggcaccggcuccuggcccgacggcgccgacaucaaccucaugcccaucuga

SEQ ID NO: 117210 - RNA, 1410 nt, Artificial Sequence
  derived and/or modified CDS sequence (opt2) from neuraminidase__InfluenzaA__AEQ49850
augaaccccaaccagaagaucaucaccaucggcuccgucucccucaccaucuccaccaucugcuucuucaugcagaucgccauccucaucaccaccgucacccuccacuucaagcaguacgaguucaacuccccccccaacaaccaggucaugcucugcgagcccaccaucaucgagcgcaacaucaccgagaucgucuaccucaccaacaccaccaucgagaaggagaucugccccaagcucgccgaguaccgcaacugguccaagccccagugcgacaucaccggcuucgcccccuucuccaaggacaacuccauccgccucuccgccggcggcgacaucugggucacccgcgagcccuacgucuccugcgaccccaacaagugcuaccaguucgcccucggccagggcaccacccucaacaacguccacuccaacaacaccguccgcgaccgcacccccuaccgcacccuccucaugaacgagcucggcguccccuuccaccucggcaccaagcaggucugcaucgccugguccuccuccuccugccacgacggcaaggccuggcuccacgucugcaucaccggcgacgacaagaacgccaccgccuccuucaucuacaacggccgccucgucgacuccgucgucuccugguccaaggagauccuccgcacccaggaguccgagugcgucugcaucaacggcaccugcaccgucgucaugaccgacggcuccgccuccggcaaggccgacaccaagauccucuucaucgaggagggcaagaucguccacaccuccacccucuccggcuccgcccagcacgucgaggagugcuccugcuacccccgcuaccccggcguccgcugcgucugccgcgacaacuggaagggcuccaaccgccccaucgucgacaucaacaugaaggaccacuccaucgucuccuccuacgucugcuccggccucgucggcgacaccccccgcaagaacgacuccuccuccuccucccacugcuucgaccccaacgacgaggagggcggccacggcgucaagggcugggccuucgacgacggcaacgacgucuggaugggccgcaccaucuccgagaagucccgccucggcuacgagaccuucaaggucaucgagggcugguccaaccccaaguccaagcuccagaucaaccgccaggucaucgucgaccgcggcgaccgcuccggcuacuccggcaucuucuccgucgagggcaaguccugcaucaaccgcugcuucuacgucgagcucauccgcggcuccaaggaggagaccgagguccucuggaccuccaacuccaucgucgucuucugcggcaccuccggcaccuacggcaccggcuccuggcccgacggcgccgacaucaagaucaugcccaucuga

SEQ ID NO: 117211 - RNA, 1410 nt, Artificial Sequence
  derived and/or modified CDS sequence (opt2) from neuraminidase__InfluenzaA__AEQ49851
augaaccccaaccagaagaucaucaccaucggcuccgucucccucaccaucuccaccaucugcuucuucaugcagaucgccauccucaucaccaccgucacccuccacuucaagcaguacgaguucaacuccccccccaacaaccaggucaugcucugcgagcccaccaucauggagcgcaacaucaccgagaucgucuaccucaccaacaccaccaucgagaaggagaucugccccaagcucgccgaguaccgcaacugguccaagccccagugcgacaucaccggcuucgcccccuucuccaaggacaacuccauccgccucuccgccggcggcgacaucugggucacccgcgagcccuacgucuccugcgaccccgacaagugcuaccaguucgcccucggccagggcaccacccucaacaacguccacuccaacaacaccguccgcgaccgcacccccuaccgcacccuccucaugaacgagcucggcguccccuuccaccucggcaccaagcaggucugcaucgccugguccuccuccuccugccacgacggcaaggccuggcuccacgucugcaucaccggcgacgacaagaacgccaccgccuccuucaucuacaacggcaagcucgucgacuccgucgucuccugguccaaggagauccuccgcacccaggaguccgagugcgucugcaucaacggcaccugcaccgucgucaugaccgacggcuccgccuccggcaaggccgacaccaagauccucuucaucgaggagggcaagaucguccacaccuccacccucuccggcuccgcccagcacgucgaggagugcuccugcuacccccgcuaccccggcguccgcugcgucugccgcgacaacuggaagggcuccaaccgccccaucgucgacaucaacaucaaggaccacuccaucgucuccuccuacgucugcuccggccucgucggcgacaccccccgcaagaacgacuccuccuccuccucccacugccucgaccccaacaacgaggagggcggccacggcgucaagggcugggccuucgacgacggcaacgacgucuggaugggccgcaccaucaacgagaccucccgccucggcuacgagaccuucaaggucaucgagggcugguccaaccccaaguccaagcuccagaucaaccgccaggucaucgucgaccgcggcaaccgcuccggcuacuccggcaucuucuccgucgagggcaaguccugcaucaaccgcugcuucuacgucgagcucauccgcggccgcaaggaggagaccgagguccucuggaccuccaacuccaucgucgucuucugcggcaccuccggcaccuacggcaccggcuccuggcccgacggcgccgaccucaaccucaugcccaucuga

SEQ ID NO: 117212 - RNA, 1410 nt, Artificial Sequence; identical to SEQ ID NO: 117179
  derived and/or modified CDS sequence (opt2) from neuraminidase__InfluenzaA__AEQ49852

SEQ ID NO: 117213 - RNA, 1410 nt, Artificial Sequence; identical to SEQ ID NO: 117157
  derived and/or modified CDS sequence (opt2) from neuraminidase__InfluenzaA__AEQ49969

SEQ ID NO: 117214 - RNA, 1410 nt, Artificial Sequence; identical to SEQ ID NO: 117179
  derived and/or modified CDS sequence (opt2) from neuraminidase__InfluenzaA__AEQ49970

SEQ ID NO: 117215 - RNA, 1410 nt, Artificial Sequence
  derived and/or modified CDS sequence (opt2) from neuraminidase__InfluenzaA__AEQ54954
augaaccccaaccagaagaucaucaccaucggcuccgucucccucaccaucuccaccaucugcuucuucaugcagaucgccauccucaucaccaccgucacccuccacuucaagcaguacgaguucaacuccccccccaacaaccaggucaugcucugcgagcccaccaucaucgagcgcaacaucaccgagaucgucuaccucaccaacaccaccaucgagaaggagaucugccccaagcucgccgaguaccgcaacugguccaagccccagugcgacaucaccggcuucgcccccuucuccaaggacaacuccauccgccucuccgccggcggcgacaucugggucacccgcgagcccuacgucuccugcgaccccgacaagugcuaccaguucgcccucggccagggcaccacccucaacaacguccacuccaacaacaccguccgcgaccgcacccccuaccgcacccuccucaugaacgagcucggcguccccuuccaccucggcaccaagcaggucugcaucgccugguccuccuccuccugccacgacggcaaggccuggcuccacgucugcaucaccggcgacgacaagaacgccaccgccuccuucaucuacaacggcaagcucgucgacuccgucgucuccugguccaaggagauccuccgcacccaggaguccgagugcgucugcaucaacggcaccugcaccgucgucaugaccgacggcuccgccuccggcaaggccgacaccaagauccucuucaucgaggagggcaagaucguccacaccuccacccucuccggcuccgcccagcacgucgaggagugcuccugcuacccccgcuaccccggcguccgcugcgucugccgcgacaacuggaagggcuccaaccgccccaucgucgacaucaacaucaaggaccacuccaucgucuccuccuacgucugcuccggccucgucggcgacaccccccgcaagaacgacuccuccuccuccucccacugccucgaccccaacaacgaggagggcggccacggcgucaagggcugggccuucgacgacggcaacgacgucuggaugggccgcaccaucuccgagaccucccgccucggcuacgagaccuucaaggucaucgagggcugguccaaccccaaguccaagcuccagaucaaccgccaggucaucgucgaccgcggcaaccgcuccggcuacuccggcaucuucuccgucgagggcaaguccugcaucaaccgcugcuucuacgucgagcucauccgcggccgcaaggaggagaccgagguccucuggaccuccaacuccaucgucgucuucugcggcaccuccggcaccuacggcaccggcuccuggcccgacggcgccgaccucaaccucaugcccaucuga

SEQ ID NO: 117216 - RNA, 1410 nt, Artificial Sequence; identical to SEQ ID NO: 112635
  derived and/or modified CDS sequence (opt2) from neuraminidase__InfluenzaA__AER08645

SEQ ID NO: 117217 - RNA, 1410 nt, Artificial Sequence
  derived and/or modified CDS sequence (opt2) from neuraminidase__InfluenzaA__AER08649
augaaccccaaccagaagaucaucaccaucggcuccgucucccucaccaucuccaccaucugcuucuucaugcagaucgccauccucaucaccaccgucacccuccacuucaagcaguacgaguucaacuccccccccaacaaccaggucaugcucugcgagcccaccaucaucgagcgcaacaucaccgagaucgucuaccucaccaacaccaccaucgagaaggagaucugccccaagcucgccgaguaccgcaacugguccaagccccagugcgacaucaccggcuucgcccccuucuccaaggacaacuccauccgccucuccgccggcggcgacaucugggucacccgcgagcccuacgucuccugcgaccccgacaagugcuaccaguucgcccucggccagggcaccacccucaacaacguccacuccaacaacaccguccgcgaccgcacccccuaccgcacccuccucaugaacgagcucggcguccccuuccaccucggcaccaagcaggucugcaucgccugguccuccuccuccugccacgacggcaaggccuggcuccacgucugcaucaccggcgacgacaagaacgccaccgccuccuucaucuacaacggccgccucgucgacuccgucgucuccugguccaaggagauccuccgcacccaggaguccgagugcgucugcaucaacggcaccugcaccgucgucaugaccgacggcuccgccuccggcaaggccgacaccaagauccucuucaucgaggagggcaagcucguccacaccuccacccucuccggcuccgcccagcacgucgaggagugcuccugcuacccccgcuaccccggcguccgcugcgucugccgcgacaacuggaagggcuccaaccgccccaucgucgacaucaacaucaaggaccacuccaucgucuccuccuacgucugcuccggccucgucggcgacaccccccgcaagaacgacuccuccuccuccucccacugccucgaccccaacaacgaggagggcggccacggcgucaagggcugggccuucgacgacggcaacgacgucuggaugggccgcaccaucuccgagaagucccgccucggcuacgagaccuucaaggucaucgagggcugguccaaccccaaguccaagcuccagaucaaccgccaggucaucgucgaccgcggcaaccgcuccggcuacuccggcaucuucuccgucgagggcaaguccugcaucaaccgcugcuucuacgucgagcucauccgcggccgcaaggaggagaccgagguccucuggaccuccaacuccaucgucgucuucugcggcaccuccggcaccuacggcaccggcuccuggcccgacggcgccgacaucaaccucaugcccaucuga

SEQ ID NO: 117218 - RNA, 1410 nt, Artificial Sequence
  derived and/or modified CDS sequence (opt2) from neuraminidase__InfluenzaA__AER08657
augaaccccaaccagaagaucaucaccaucggcuccgucucccucaccaucuccaccgucugcuucuucaugcagaucgccauccucaucaccaccgucacccuccacuucaagcaguacgaguucaacuccccccccaacaaccaggucaugcucugcgagcccaccaucaucgagcgcaacaucaccgagaucgucuaccucaccaacaccaccaucgagaaggagaugugccccaagcucgccgaguaccgcaacugguccaagccccagugcgacaucaccggcuucgcccccuucuccaaggacaacuccauccgccucuccgccggcggcgacaucugggucacccgcgagcccuacgucuccugcgaccccgacaagugcuaccaguucgcccucggccagggcaccacccucaacaacguccacuccaacaacaccguccgcgaccgcacccccuaccgcacccuccucaugaacgagcucggcguccccuuccaccucggcaccaagcaggucugcaucgccugguccuccuccuccugccacgacggcaaggccuggcuccacgucugcaucaccggcgacgacaagaacgccaccgccuccuucaucuacaacggccgccucgucgacuccgucgucuccugguccaaggagauccuccgcacccaggaguccgagugcgucugcaucaacggcaccugcaccgucgucaugaccgacggcuccgccuccggcaaggccgacaccaagauccucuucaucgaggagggcaagaucguccacaccuccacccucuccggcuccgcccagcacgucgaggagugcuccugcuacccccgcuaccccggcguccgcugcgucugccgcgacaacuggaagggcuccaaccgccccaucgucgacaucaacaucaaggaccacuccaucgucuccuccuacgucugcuccggccucgucggcgacaccccccgcaagaacgacuccuccuccuccucccacugccucgaccccaacaacgaggagggcggccacggcgucaagggcugggccuucgacgacggcaacgacgucuggaugggccgcaccaucuccgagaagucccgccucggcuacgagaccuucaaggucaucgagggcugguccaaccccaaguccaagcuccagaucaaccgccaggucaucgucgaccgcggcaaccgcuccggcuacuccggcaucuucuccgucgagggcaaguccugcaucaaccgcugcuucuacgucgagcucauccgcggccgcaaggaggagaccgagguccucuggaccuccaacuccaucgucgucuucugcggcaccuccggcaccuacggcaccggcuccuggcccgacggcgccgacaucaaccucaugcccaucuga

SEQ ID NO: 117219 - RNA, 1410 nt, Artificial Sequence; identical to SEQ ID NO: 112635
  derived and/or modified CDS sequence (opt2) from neuraminidase__InfluenzaA__AER08659

SEQ ID NO: 117220 - RNA, 1410 nt, Artificial Sequence
  derived and/or modified CDS sequence (opt2) from neuraminidase__InfluenzaA__AER08661
augaaccccaaccagaagaucaucaccaucggcuccgucucccucaccaucuccaccaucugcuucuucaugcagaucgccauccucaucaccaccgucacccuccacuucaagcaguacgaguucaacuccccccccaacaaccaggucaugcucugcgagcccaccaucaucgagcgcaacaucaccgagaucgucuaccucaccaacaccaccaucgagaaggagaucugccccaagcucgccgaguaccgcaacugguccaagccccagugcgacaucaccggcuucgcccccuucuccaaggacaacuccauccgccucuccgccggcggcgacaucugggucacccgcgagcccuacgucuccugcgaccccgacaagugcuaccaguucgcccucggccagggcaccacccucaacaacguccacuccaacaacaccguccgcgaccgcacccccuaccgcacccuccucaugaacgagcucggcguccccuuccaccucggcaccaagcaggucugcaucgccugguccuccuccuccugccacgacggcaaggccuggcuccacgucugcaucaccggcgacgacaagaacgccaccgccuccuucaucuacaacggccgccucgucgacuccgucgucuccugguccaaggagauccuccgcacccaggaguccgagugcgucugcaucaacggcaccugcaccgucgucaugaccgacggcuccgccuccggcaaggccgacaccaagauccucuucaucgaggagggcaagaucguccacaccuccacccucuccggcuccgcccagcacgucgaggagugcuccugcuacccccgcuaccccggcguccgcugcgucugccgcgacaacuggaagggcuccaaccgccccaucgucgacaucaacaucaaggaccacuccaucgucuccuccuacgucugcuccggccucgucggcgacaccccccgcaagaacgacuccuccuccuccucccacugccucgaccccaacaacgaggagggcgaccacggcgucaagggcugggccuucgacgacggcaacgacgucuggaugggccgcaccaucaacgagaccucccgccucggcuacgagaccuucaaggucaucgagggcugguccaaccccaaguccaagcuccagaucaaccgccaggucaucgucgaccgcggcaaccgcuccggcuacuccggcaucuucuccgucgagggcaaguccugcaucaaccgcugcuucuacgucgagcucauccgcggccgcaaggaggagaccgagguccucuggaccuccaacuccaucgucgucuucugcggcaccuccggcaccuacggcaccggcuccuggcccgacggcgccgaccucaaccucaugcccaucuga

SEQ ID NO: 117221 - RNA, 1410 nt, Artificial Sequence; identical to SEQ ID NO: 115554
  derived and/or modified CDS sequence (opt2) from neuraminidase__InfluenzaA__AER08663

SEQ ID NO: 117222 - RNA, 1410 nt, Artificial Sequence; identical to SEQ ID NO: 115554
  derived and/or modified CDS sequence (opt2) from neuraminidase__InfluenzaA__AER08665

SEQ ID NO: 117223 - RNA, 1410 nt, Artificial Sequence
  derived and/or modified CDS sequence (opt2) from neuraminidase__InfluenzaA__AER08669
augaaccccaaccagaagaucaucaccaucggcuccgucucccucaccaucuccaccaucugcuucuucaugcagaucgccauccucaucaccaccgucacccuccacuucaagcaguacgaguucaacuccccccccaacaaccaggucaugcucugcgagcccaccaucaucgagcgcaacaucaccgagaucgucuaccucaccaacaccaccaucgagaaggagaucugccccacccucgccgaguaccgcaacugguccaagccccagugcgacaucaccggcuucgcccccuucuccaaggacaacuccauccgccucuccgccggcggcgacaucugggucacccgcgagcccuacgucuccugcgaccccgacaagugcuaccaguucgcccucggccagggcaccacccucaacaacguccacuccaacaacaccguccgcgaccgcacccccuaccgcacccuccucaugaacgagcucggcguccccuuccaccucggcaccaagcaggucugcaucgccugguccuccuccuccugccacgacggcaaggccuggcuccacgucugcaucaccggcgacgacaagaacgccaccgccuccuucaucuacaacggccgccucgucgacuccgucgucuccugguccaaggagauccuccgcacccaggaguccgagugcgucugcaucaacggcaccugcaccgucgucaugaccgacggcuccgccuccggcaaggccgacaccaagauccucuucaucgaggagggcaagaucguccacaccuccacccucuccggcuccgcccagcacgucgaggagugcuccugcuacccccgcuaccccggcguccgcugcgucugccgcgacaacuggaagggcuccaaccgccccaucgucgacaucaacaucaaggaccacuccaucgucuccuccuacgucugcuccggccucgucggcgacaccccccgcaagaacgacuccuccuccuccucccacugccucgaccccaacaacgaggagggcggccacggcgucaagggcugggccuucgacgacggcaacgacgucuggaugggccgcaccaucuccgagaccucccgccucggcuacgagaccuucaaggucaucgagggcugguccaaccccaaguccaagcuccagaucaaccgccaggucaucgucgaccgcggcaaccgcuccggcuacuccggcaucuucuccgucgagggcaaguccugcaucaaccgcugcuucuacgucgagcucauccgcggccgcaaggaggagaccgagguccucuggaccuccaacuccaucgucgucuucugcggcaccuccggcaccuacggcaccggcuccuggcccgacggcgccgaccucaaccucaugcccaucuga

SEQ ID NO: 117224 - RNA, 1410 nt, Artificial Sequence
  derived and/or modified CDS sequence (opt2) from neuraminidase__InfluenzaA__AER08671
augaaccccaaccagaagaucaucaccaucggcuccgucucccucaccaucuccaccaucugcuucuucaugcagaucgccauccucaucaccaccgucacccuccacuucaagcaguacggcuucaacuccccccccaacaaccaggucaugcucugcgagcccaccaucaucgagcgcaacaucaccgagaucgucuaccucaccaacaccaccaucgagaaggagaucugccccacccucgccgaguaccgcaacugguccaagccccagugcgacaucaccggcuucgcccccuucuccaaggacaacuccauccgccucuccgccggcggcgacaucugggucacccgcgagcccuacgucuccugcgaccccgacaagugcuaccaguucgcccucggccagggcaccacccucaacaacguccacuccaacaacaccguccgcgaccgcacccccuaccgcacccuccucaugaacgagcucggcguccccuuccaccucggcaccaagcaggucugcaucgccugguccuccuccuccugccacgacggcaaggccuggcuccacgucugcaucaccggcgacgacaagaacgccaccgccuccuucaucuacaacggccgccucgucgacuccgucgucuccugguccaaggagauccuccgcacccaggaguccgagugcgucugcaucaacggcaccugcaccgucgucaugaccgacggcuccgccuccggcaaggccgacaccaagauccucuucaucgaggagggcaagaucguccacaccuccacccucuccggcuccgcccagcacgucgaggagugcuccugcuacccccgcuaccccggcguccgcugcgucugccgcgacaacuggaagggcuccaaccgccccaucgucgacaucaacaucaaggaccacuccaucgucuccuccuacgucugcuccggccucgucggcgacaccccccgcaagaacgacuccuccuccuccucccacugccucgaccccaacaacgaggagggcggccacggcgucaagggcugggccuucgacgacggcaacgacgucuggaugggccgcaccaucaacgagaccucccgccucggcuacgagaccuucaaggucaucgagggcugguccaaccccaaguccaagcuccagaucaaccgccaggucaucgucgaccgcggcaaccgcuccggcuacuccggcaucuucuccgucgagggcaaguccugcaucaaccgcugcuucuacgucgagcucauccgcggccgcaaggaggagaccgagguccucuggaccuccaacuccaucgucgucuucugcggcaccuccggcaccuacggcaccggcuccuggcccgacggcgccgaccucaaccucaugcccaucuga

SEQ ID NO: 117225 - RNA, 1410 nt, Artificial Sequence; identical to SEQ ID NO: 115554
  derived and/or modified CDS sequence (opt2) from neuraminidase__InfluenzaA__AER08673

SEQ ID NO: 117226 - RNA, 1410 nt, Artificial Sequence; identical to SEQ ID NO: 115554
  derived and/or modified CDS sequence (opt2) from neuraminidase__InfluenzaA__AER08675

SEQ ID NO: 117227 - RNA, 1410 nt, Artificial Sequence; identical to SEQ ID NO: 115554
  derived and/or modified CDS sequence (opt2) from neuraminidase__InfluenzaA__AER08677

SEQ ID NO: 117228 - RNA, 1410 nt, Artificial Sequence; identical to SEQ ID NO: 115554
  derived and/or modified CDS sequence (opt2) from neuraminidase__InfluenzaA__AER08679

SEQ ID NO: 117229 - RNA, 1410 nt, Artificial Sequence
  derived and/or modified CDS sequence (opt2) from neuraminidase__InfluenzaA__AER08681
augaaccccaaccagaagaucaucaccaucggcuccgucucccucaccaucuccaccaucugcuucuucaugcagaucgccauccucaucaccaccgucacccuccacuucaagcaguacgaguucaacuccccccccaacaaccaggucaugcucugcgagcccaccaucaucgagcgcaacaucaccgagaucgucuaccucaccaacaccaccaucgagaaggagaucugccccaagcucgccgaguaccgcaacugguccaagccccagugcgacaucaccggcuucgcccccuucuccaaggacaacuccauccgccucuccgccggcggcgacaucugggucacccgcgagcccuacgucuccugcgaccccgacaagugcuaccaguucgcccucggccagggcaccacccucaacaacguccacuccaacaacaccguccgcgaccgcacccccuaccgcacccuccucaugaacgagcucggcguccccuuccaccucggcaccaagcaggucugcaucgccugguccuccuccuccugccacgacggcaaggccuggcuccacgucugcaucaccggcgacgacaagaacgccaccgccuccuucaucuacaacggccgccucgucgacuccgucgucuccugguccaaggagauccuccgcacccaggaguccgagugcgucugcaucaacggcaccugcaccgucgucaugaccgacggcuccgccuccggcaaggccgacaccaagauccucuucaucgaggagggcaagaucguccacaccuccacccucuccggcuccgcccagcacgucgaggagugcuccugcuacccccgcuaccccggcguccgcugcgucugccgcgacaacuggaagggcuccaaccgccccaucgucgacaucaacaucaaggaccacuccaucgucuccuccuacgucugcuccggccucgucggcgacaccccccgcaagaacgacuccuccuccuccucccacugccucgaccccaacgacgaggagggcggccacggcgucaagggcugggccuucgacgacggcaacgacgucuggaugggccgcaccaucaacgagaccucccgccucggcuacgagaccuucaaggucaucgagggcugguccaaccccaaguccaagcuccagaucaaccgccaggucaucgucgacaagggcaaccgcuccggcuacuccggcaucuucuccgucgagggcaaguccugcaucaaccgcugcuucuacgucgagcucauccgcggccgcaaggaggagaccgagguccucuggaccuccaacuccaucgucgucuucugcggcaccuccggcaccuacggcaccggcuccuggcccgacggcgccgaccucaaccucaugcccaucuga

SEQ ID NO: 117230 - RNA, 1410 nt, Artificial Sequence; identical to SEQ ID NO: 115554
  derived and/or modified CDS sequence (opt2) from neuraminidase__InfluenzaA__AER08683

SEQ ID NO: 117231 - RNA, 1410 nt, Artificial Sequence; identical to SEQ ID NO: 117179
  derived and/or modified CDS sequence (opt2) from neuraminidase__InfluenzaA__AER08685

SEQ ID NO: 117232 - RNA, 1410 nt, Artificial Sequence; identical to SEQ ID NO: 117179
  derived and/or modified CDS sequence (opt2) from neuraminidase__InfluenzaA__AER08687

SEQ ID NO: 117233 - RNA, 1410 nt, Artificial Sequence
  derived and/or modified CDS sequence (opt2) from neuraminidase__InfluenzaA__AER08689
augaaccccaaccagaagaucaucaccaucggcuccgucucccucaccaucuccaccaucugcuucuucaugcagaucgccauccucaucaccaccgucacccuccacuucaagcaguacgaguucaacuccccccccaacaaccaggucacccucugcgagcccaccaucaucgagcgcaacaucaccgagaucgucuaccucaccaacaccaccaucgagaaggagaucugccccaagcucgccgaguaccgcaacugguccaagccccagugcgacaucaccggcuucgcccccuucuccaaggacaacuccauccgccucuccgccggcggcgacaucugggucacccgcgagcccuacgucuccugcgaccccgacaagugcuaccaguucgcccucggccagggcaccacccucaacaacguccacuccaacaacaccguccgcgaccgcacccccuaccgcacccuccucaugaacgagcucggcguccccuuccaccucggcaccaagcaggucugcaucgccugguccuccuccuccugccacgacggcaaggccuggcuccacgucugcaucaccggcgacgacaagaacgccaccgccuccuucaucuacaacggccgccucgucgacuccgucgucuccugguccaaggagauccuccgcacccaggaguccgagugcgucugcaucaacggcaccugcaccgucgucaugaccgacggcuccgccuccggcaaggccgacaccaagauccucuucaucgaggagggcaagaucguccacaccuccacccucuccggcuccgcccagcacgucgaggagugcuccugcuacccccgcuaccccggcguccgcugcgucugccgcgacaacuggaagggcuccaaccgccccaucgucgacaucaacaucaaggaccacuccaucgucuccuccuacgucugcuccggccucgucggcgacaccccccgcaaggacgacuccuccuccuccucccacugccucgaccccaacaacgaggagggcggccacggcgucaagggcugggccuucgacgacggcaacgacgucuggaugggccgcaccaucaacgagaccucccgccucggcuacgagaccuucaaggucaucgagggcugguccaaccccaaguccaagcuccagaucaaccgccaggucaucgucgaccgcggcaaccgcuccggcuacuccggcaucuucuccgucgagggcaaguccugcaucaaccgcugcuucuacgucgagcucauccgcggccgcaaggaggagaccgagguccucuggaccuccaacuccaucgucgucuucugcggcaccuccggcaccuacggcaccggcuccuggcccgacggcgccgaccucaaccucaugcccaucuga

SEQ ID NO: 117234 - RNA, 1410 nt, Artificial Sequence; identical to SEQ ID NO: 117179
  derived and/or modified CDS sequence (opt2) from neuraminidase__InfluenzaA__AER08691

SEQ ID NO: 117235 - RNA, 1410 nt, Artificial Sequence
  derived and/or modified CDS sequence (opt2) from neuraminidase__InfluenzaA__AER08693
augaaccccaaccagaagaucaucaccaucggcuccgucucccucaccaucuccaccaucugcuucuucaugcagaucgccauccucaucaccaccgucacccuccacuucaagcaguacgaguucaacuccccccccaagaaccaggucaugcucugcgagcccaccaucaucgagcgcaacaucaccgagaucgucuaccucaccaacaccaccaucgagaaggagaucugccccaagcucgccgaguaccgcaacugguccaagccccagugcgacaucaccggcuucgcccccuucuccaaggacaacuccauccgccucuccgccggcggcgacaucugggucacccgcgagcccuacgucuccugcgaccccgacaagugcuaccaguucgcccucggccagggcaccacccucaacaacguccacuccaacaacaccguccgcgaccgcacccccuaccgcacccuccucaugaacgagcucggcguccccuuccaccucggcaccaagcaggucugcaucgccugguccuccuccuccugccacgacggcaaggccuggcuccacgucugcaucaccggcgacgacaagaacgccaccgccuccuucaucuacaacggcaagcucgucgacuccgucgucuccugguccaaggagauccuccgcacccaggaguccgagugcgucugcaucaacggcaccugcaccgucgucaugaccgacggcuccgccuccggcaaggccgacaccaagauccucuucaucgaggagggcaagaucguccacaccuccacccucuccggcuccgcccagcacgucgaggagugcuccugcuacccccgcuaccccggcguccgcugcgucugccgcgacaacuggaagggcuccaaccgccccaucgucgacaucaacaucaaggaccacuccaucgucuccuccuacgucugcuccggccucgucggcgacaccccccgcaagaacgacuccuccuccuccucccacugccucgaccccaacaacgaggagggcggccacggcgucaagggcugggccuucgacgacggcaacgacgucuggaugggccgcaccaucaacgagaccucccgccucggcuacgagaccuucaaggucaucgagggcugguccaaccccaaguccaagcuccagaucaaccgccaggucaucgucgaccgcggcaaccgcuccggcuacuccggcaucuucuccgucgagggcaaguccugcaucaaccgcugcuucuacgucgagcucauccgcggccgcaaggaggagaccgagguccucuggaccuccaacuccaucgucgucuucugcggcaccuccggcaccuacggcaccggcuccuggcccgacggcgccgaccucaaccucaugcccaucuga

SEQ ID NO: 117236 - RNA, 1410 nt, Artificial Sequence
  derived and/or modified CDS sequence (opt2) from neuraminidase__InfluenzaA__AER08697
augaaccccaaccagaagaucaucaccaucggcuccgucucccucaccaucuccaccaucugcuucuucaugcagaucgccauccucaucaccaccgucacccuccacuucaagcaguacgaguucaacuccccccccaacaaccaggucaugcucugcgagcccaccaucaucgagcgcaacaucaccgagaucgucuaccucaccaacaccaccaucgagaaggagaccugccccacccucgccgaguaccgcaacugguccaagccccagugcgacaucaccggcuucgcccccuucuccaaggacaacuccauccgccucuccgccggcggcgacaucugggucacccgcgagcccuacgucuccugcgaccccgacaagugcuaccaguucgcccucggccagggcaccacccucaacaacguccacuccaacaacaccguccgcgaccgcacccccuaccgcacccuccucaugaacgagcucggcguccccuuccaccucggcaccaagcaggucugcaucgccugguccuccuccuccugccacgacggcaaggccuggcuccacgucugcaucaccggcgacgacaagaacgccaccgccuccuucaucuacaacggccgccucgucgacuccgucgucuccugguccaaggagauccuccgcacccaggaguccgagugcgucugcaucaacggcaccugcaccgucgucaugaccgacggcuccgccuccggcaaggccgacaccaagauccucuucaucgaggagggcaagaucguccacaccuccacccucuccggcuccgcccagcacgucgaggagugcuccugcuacccccgcuaccccggcguccgcugcgucugccgcgacaacuggaagggcuccaaccgccccaucgucgacaucaacaucaaggaccacuccaucgucuccuccuacgucugcuccggccucgucggcgacaccccccgcaagaacgacuccuccuccuccucccacugccucgaccccaacaacgaggagggcggccacggcgucaagggcugggccuucgacgacggcaacgacgucuggaugggccgcaccaucaacgucaccucccgccucggcuacgagaccuucaaggucaucgagggcugguccaaccccaaguccaagcuccagaucaaccgccaggucaucgucgaccgcggcaaccgcuccggcuacuccggcaucuucuccgucgagggcaaguccugcaucaaccgcugcuucuacgucgagcucauccgcggccgcaaggaggagaccgagguccucuggaccuccaacuccaucgucgucuucugcggcaccuccggcaccuacggcaccggcuccuggcccgacggcgccgaccucaaccucaugcccaucuga

SEQ ID NO: 117237 - RNA, 1410 nt, Artificial Sequence; identical to SEQ ID NO: 117033
  derived and/or modified CDS sequence (opt2) from neuraminidase__InfluenzaA__AER92714

SEQ ID NO: 117238 - RNA, 1410 nt, Artificial Sequence; identical to SEQ ID NO: 112774
  derived and/or modified CDS sequence (opt2) from neuraminidase__InfluenzaA__AER92721

SEQ ID NO: 117239 - RNA, 1410 nt, Artificial Sequence; identical to SEQ ID NO: 112774
  derived and/or modified CDS sequence (opt2) from neuraminidase__InfluenzaA__AER92724

SEQ ID NO: 117240 - RNA, 1413 nt, Artificial Sequence
  derived and/or modified CDS sequence (opt2) from neuraminidase__InfluenzaA__AET84165
augaaccccaaccagaagaucaucaccaucggcuccaucuccaucgccaucggcaucaucucccucaugcuccagaucggcaacaucaucuccaucugggccucccacuccauccagaccggcucccagaacaacaccggcaucugcaaccagcgcaucaucaccuacgagaacuccaccugggucaaccacaccuacgucaacaucaacaacaccaacgucgucgccggcgaggacaagaccuccgucacccucgccggcaacuccucccucugcuccaucuccggcugggccaucuacaccaaggacaacuccauccgcaucggcuccaagggcgacgucuucgucauccgcgagcccuucaucuccugcucccaccucgagugccgcaccuucuuccucacccagggcgcccuccucaacgacaagcacuccaacggcaccgucaaggaccgcucccccuaccgcgcccucauguccugcccccucggcgaggcccccucccccuacaacuccaaguucgaguccgucgccugguccgccuccgccugccacgacggcaugggcuggcucaccaucggcaucuccggccccgacaacggcgccgucgccguccucaaguacaacggcaucaucaccggcaccaucaaguccuggaagaagcagauccuccgcacccaggaguccgagugcgucugcaugaacggcuccugcuucaccaucaugaccgacggccccuccaacaaggccgccuccuacaagaucuucaagaucgagaagggcaaggucaccaaguccaucgagcucuccgcccccaacuucuacuacgaggagugcuccugcuaccccgacaccggcaucgucaugugcgucugccgcgacaacuggcacggcuccaaccgccccugggucuccuucaaccagaaccucgacuaccagaucggcuacaucugcuccggcgucuucggcgacaacccccgccccgaggacggcgagggcuccugcaaccccgucaccaucgacggcgccaacggcgucaagggcuucuccuacaaguacggcaacggcgucuggaucggccgcaccaaguccaaccgccuccgcaagggcuucgagaugaucugggaccccaacggcuggaccaacaccgacuccgacuucuccgucaagcaggacgucgucgccaucaccgacugguccggcuacuccggcuccuucguccagcaccccgagcucaccggccucgacugcauccgccccugcuucugggucgagcucguccgcggccucccccgcgagaacaccaccaucuggaccuccggcuccuccaucuccuucugcggcgucaacuccgacaccgccaacugguccuggcccgacggcgccgagcuccccuucaccaucgacaaguga

SEQ ID NO: 117241 - RNA, 1413 nt, Artificial Sequence; identical to SEQ ID NO: 114966
  derived and/or modified CDS sequence (opt2) from neuraminidase__InfluenzaA__AET84176

SEQ ID NO: 117242 - RNA, 1413 nt, Artificial Sequence
  derived and/or modified CDS sequence (opt2) from neuraminidase__InfluenzaA__AET84187
augaaccccaaccagaagaucaucaccaucggcuccaucuccaucgccaucggcaucaucucccucaugcuccagaucggcaacaucaucuccaucugggccucccacuccauccagaccggcucccagaacaacaccggcaucugcaaccagcgcaucaucaccuacgagaacuccaccugggucaaccacaccuacgucaacaucaacaacaccaacgucgucgccggcgaggacaagaccuccgucacccucgccggcaacuccucccucugcuccaucuccggcugggccaucuacaccaaggacaacuccauccgcaucggcuccaagggcgacgucuucgucauccgcgagcccuucaucuccugcucccaccucgagugccgcaccuucuuccucacccagggcgcccuccucaacgacaagcacuccaacggcaccgucaaggaccgcucccccuaccgcgcccucauguccugcccccucggcgaggcccccucccccuacaacuccaaguucgaguccgucgccugguccgccuccgccugccacgacggcauggacuggcucaccaucggcaucuccggccccgacaacggcgccgucgccguccucaaguacaacggcaucaucaccggcaccaucaaguccuggaagaagcagauccuccgcacccaggaguccgagugcgucugcaugaacggcuccugcuucaccaucaugaccgacggccccuccaacaaggccgccuccuacaagaucuucaagaucgagaagggcaaggucaccaaguccaucgagcucaacgcccccaacuucuacuacgaggagugcuccugcuaccccgacaccggcaucgucaugugcgucugccgcgacaacuggcacggcuccaaccgccccugggucuccuucaaccagaaccucgacuaccagaucggcuacaucugcuccggcgucuucggcgacaacccccgccccaaggacggcgagggcuccugcaaccccgucaccaucgacggcgccaacggcgucaagggcuucuccuacaaguacggcaacggcgucuggaucggccgcaccaaguccaaccgccuccgcaagggcuucgagaugaucugggaccccaacggcuggaccaacaccgacuccgacuucuccgucaagcaggacgucgucgccaucaccgacugguccggcuacuccggcuccuucguccagcaccccgagcucaccggccucgacugcauccgccccugcuucugggucgagcucguccgcggccucccccgcgagaacaccaccaucuggaccuccggcuccuccaucuccuucugcggcgucaacuccgacaccgccaacugguccuggcccgacggcgccgagcuccccuucaccaucgacaaguga

SEQ ID NO: 117243 - RNA, 1413 nt, Artificial Sequence
  derived and/or modified CDS sequence (opt2) from neuraminidase__InfluenzaA__AET84198
augaaccccaaccagaagaucaucaccaucggcuccaucuccaucgccaucggcaucaucucccucaugcuccagaucggcaacaucaucuccaucugggccucccacuccauccagaccggcucccagaacaacaccggcaucugcaaccagcgcaucaucaccuacgagaacuccaccugggucaaccacaccuacgucaacaucaacaacaccaacgucgucgccggcgaggacaagaccuccaugacccucgccggcaacuccucccucugcuccaucuccggcugggccaucuacaccaaggacaacuccauccgcaucggcuccaagggcgacgucuucgucauccgcgagcccuucaucuccugcucccaccucgagugccgcaccuucuuccucacccagggcgcccuccucaacgacaagcacuccaacggcaccgucaaggaccgcucccccuaccgcgcccucauguccugcccccucggcgaggcccccucccccuacaacuccaaguucgaguccgucgccugguccgccuccgccugccacgacggcaugggcuggcucaccaucggcaucuccggccccgacaacggcgccgucgccguccucaaguacaacggcaucaucaccggcaccaucaaguccuggaagaagcagauccuccgcacccaggaguccgagugcgucugcaugaacggcuccugcuucaccaucaugaccgacggccccuccaacaaggccgccuccuacaagaucuucaagaucgagaagggcaaggucaccaaguccaucgagcucaacgcccccaacuucuacuacgaggagugcuccugcuaccccgacaccggcaucgucaugugcgucugccgcgacaacuggcacggcuccaaccgccccugggucuccuucaaccagaaccucgacuaccagaucggcuacaucugcuccggcgucuucggcgacaacccccgccccaaggacggcgagggcuccugcaaccccgucaccgucgacggcgccaacggcgucaagggcuucuccuacaaguacggcaacggcgucuggaucggccgcaccaaguccaaccgccuccgcaagggcuucgagaugaucugggaccccaacggcuggaccaacaccgacuccgacuucuccgucaagcaggacgucgucgccaucaccgacugguccggcuacuccggcuccuucguccagcaccccgagcucaccggccucgacugcauccgccccugcuucugggucgagcucguccgcggccucccccgcgagaacaccaccaucuggaccuccggcuccuccaucuccuucugcggcgucaacuccgacaccgccaacugguccuggcccgacggcgccgagcuccccuucaccaucgacaaguga

SEQ ID NO: 117244 - RNA, 1413 nt, Artificial Sequence
  derived and/or modified CDS sequence (opt2) from neuraminidase__InfluenzaA__AET84209
augaaccccaaccagaagaucaucaccaucggcuccaucuccaucgccaucggcaucaucucccucaugcuccagaucggcaacaucaucuccaucugggccucccacuccauccagaccggcucccagaacaacaccggcaucugcaaccagcgcaucaucaccuacgagaacuccaccugggucaaccacaccuacgucaacaucaacaacaccaaggucgucgccggcgaggacaagaccuccgucacccucgccggcaacuccucccucugcuccaucuccggcugggccaucaacaccaaggacaacuccauccgcaucggcuccaagggcgacgucuucgucauccgcgagcccuucaucuccugcucccaccucgagugccgcaccuucuuccucacccagggcgcccuccucaacgacaagcacuccaacggcaccgucaaggaccgcucccccuaccgcgcccucauguccugcccccucggcgaggcccccucccccuacaacuccaaguucgaguccgucgccugguccgccuccgccugccacgacggcaugggcuggcucaccaucggcaucuccggccccgacaacggcgccgucgccguccucaaguacaacggcaucaucaccggcaccaucaaguccuggaagaagcagauccuccgcacccaggaguccgagugcgucugcaugaacggcuccugcuucaccaucaugaccgacggccccuccaacaaggccgccuccuacaagaucuucaagaucgagaagggcaaggucaccaaguccaucgagcucaacgcccccaacuucuacuacgaggagugcuccugcuaccccgacaccggcaucgucaugugcgucugccgcgacaacuggcacggcuccaaccgccccugggucuccuucaaccagaaccucgacuaccagaucggcuacaucugcuccggcgucuucggcgacaacccccgccccaaggacggcgagggcuccugcaaccccgucaccgucgacggcgccaacggcgucaagggcuucuccuacaaguacggcaacggcgucuggaucggccgcaccaaguccaaccgccuccgcaagggcuucgagaugaucugggaccccaacggcuggaccaacaccgacuccgacuucuccgucaagcaggacgucgucgccaucaccgacugguccggcuacuccggcuccuucguccagcaccccgagcucaccggccucgacugcauccgccccugcuucugggucgagcucguccgcggccucccccgcgagaacaccaccaucuggaccuccggcuccuccaucuccuucugcggcgucaacuccgacaccgccaacugguccuggcccgacggcgccgagcuccccuucaccaucgacaaguga

SEQ ID NO: 117245 - RNA, 1413 nt, Artificial Sequence
  derived and/or modified CDS sequence (opt2) from neuraminidase__InfluenzaA__AET84231
augaaccccaaccagaagaucaucaccaucggcuccaucuccaucgccaucggcaucaucucccucaugcuccagaucggcuccaucaucuccaucugggccucccacuccauccacaccggcucccagaacaacaccggcaucugcaaccagcgcaucaucaccuacgagaacuccaccugggucaaccacaccuacgucaacaucaacaacaccaacgucgucgccggcgaggacaagaccuccgucacccucgccggcaacuccucccucugcuccaucuccggcugggccaucuacaccaaggacaacuccauccgcaucggcuccaagggcgacgucuucgucauccgcgagcccuucaucuccugcucccaccucgagugccgcaccuucuuccucacccagggcgcccuccucaacgacaagcacuccaacggcaccgucaaggaccgcucccccuaccgcgcccucauguccugcccccucggcgaggcccccucccccuacaacuccaaguucgaguccgucgccugguccgccuccgccugccacgacggcaugggcuggcucaccaucggcaucuccggccccgacaacggcgccgucgccguccucaaguacaacggcaucaucaccggcaccaucaaguccuggaagaagcagauccuccgcacccaggaguccgagugcgucugcaugaacggcuccugcuucaccaucaugaccgacggccccuccaacaaggccuccuccuacaagaucuucaagaucgagaagggcaaggucaccaaguccaucgagcucaacgcccccaacuucuacuacgaggagugcuccugcuaccccgacaccggcaucgucaugugcgucugccgcgacaacuggcacggcuccaaccgccccugggucuccuucaaccagaaccucgacuaccagaucggcuacaucugcuccggcgucuucggcgacaacccccgccccgaggacggcgagggcuccugcaaccccgucaccgucgacggcgccaacggcgucaagggcuucuccuacaaguacggcaacggcgucuggaucggccgcaccaaguccaaccgccuccgcaagggcuucgagaugaucugggaccccaacggcuggaccaacaccgacuccgacuucuccgucaagcaggacgucgucgccaucaccgacugguccggcuacuccggcuccuucguccagcaccccgagcucaccggccucgacugcauccgccccugcuucugggucgagcucguccgcggccucccccgcgagaacaccaccaucuggaccuccggcuccuccaucuccuucugcggcgucaacuccgacaccgccaacugguccuggcccgacggcgccgagcuccccuucaccaucgacaaguga

SEQ ID NO: 117246 - RNA, 1413 nt, Artificial Sequence; identical to SEQ ID NO: 113497
  derived and/or modified CDS sequence (opt2) from neuraminidase__InfluenzaA__AET84242

SEQ ID NO: 117247 - RNA, 1413 nt, Artificial Sequence
  derived and/or modified CDS sequence (opt2) from neuraminidase__InfluenzaA__AET84253
augaaccccaaccagaagaucaucaccaucggcuccaucuccaucgccaucggcaucaucucccucaugcuccagaucggcuccaucaucuccaucugggccucccacuccauccagaccggcucccagaacaacaccggcaucugcaaccagcgcaucaucaccuacgagaacuccaccugggucaaccacaccuacgucaacaucaacaacaccaacgucgucgccggcgaggacaagaccuccgucacccucgccggcaacuccucccucugcuccaucuccggcugggccaucuacaccaaggacaacuccauccgcaucggcuccaagggcgacgucuucgucauccgcgagcccuucaucuccugcucccaccucgagugccgcaccuucuuccucacccagggcgcccuccucaacgacaagcacuccaacggcaccgucaaggaccgcucccccuaccgcgcccucauguccugcccccucggcgaggcccccucccccuacaacuccaaguucgaguccgucgccugguccgccuccgccugccacgacggcaugggcuggcucaccaucggcaucuccggccccgacaacggcgccgucgccguccucaaguacaacggcaucaucaccgagaccaucaaguccuggaagaagcagauccuccgcacccaggaguccgagugcgucugcaugaacggcuccugcuucaccaucaugaccgacggccccuccaacaaggccgccuccuacaagaucuucaagaucgagaagggcaaggucaccaaguccaucgagcucaacgcccccaacuucuacuacgaggagugcuccugcuaccccgacaccggcaucgucaugugcgucugccgcgacaacuggcacggcuccaaccgccccugggucuccuucaaccagaaccucgacuaccagaucggcuacaucugcuccggcgucuucggcgacaacccccgccccgaggacggcgagggcuccugcaaccccgucaccgucgacggcgccaacggcgucaagggcuucuccuacaaguacggcaacggcgucuggaucggccgcaccaaguccaaccgccuccgcaagggcuucgagaugaucugggaccccaacggcuggaccaacaccgacuccgacuucuccgucaagcaggacgucgucgccaucaccgacugguccggcuacuccggcuccuucguccagcaccccgagcucaccggccucgacugcauccgccccugcuucugggucgagcucguccgcggccucccccgcgagaacaccaccaucuggaccuccggcuccuccaucuccuucugcggcgucaacuccgacaccgccaacugguccuggcccgacggcgccgagcuccccuucaccaucgacaaguga

SEQ ID NO: 117248 - RNA, 1413 nt, Artificial Sequence
  derived and/or modified CDS sequence (opt2) from neuraminidase__InfluenzaA__AET84264
augaaccccaaccagaagaucaucaccaucggcuccaucuccaucgccaucggcaucaucucccucauguuccagaucggcuccaucaucuccaucugggccucccacuccauccagaccggcucccagaacaacaccggcaucugcaaccagcgcaucaucaccuacgagaacuccaccugggucaaccacaccuacgucaacaucaacaacaccaacgucgucgccggcgaggacaagaccuccgucacccucgccggcaacuccucccucugcuccaucuccggcugggccaucuacaccaaggacaacuccauccgcaucggcuccaagggcgacgucuucgucauccgcgagcccuucaucuccugcucccaccucgagugccgcaccuucuuccucacccagggcgcccuccucaacgacaagcacuccaacggcaccgucaaggaccgcucccccuaccgcgcccucauguccugcccccucggcgaggcccccucccccuacaacuccaaguucgaguccgucgccugguccgccuccgccugccacgacggcaugggcuggcucaccaucggcaucuccggccccgacaacggcgccgucgccguccucaaguacaacggcaucaucaccgagaccaucaaguccuggaagaagcagauccuccgcacccaggaguccgagugcgucugcaugaacggcuccugcuucaccaucaugaccgacggccccuccaacaaggccgccuccuacaagaucuucaagaucgagaagggcaaggucaccaaguccaucgagcucaacgcccccaacuucuacuacgaggagugcuccugcuaccccgacaccggcaucgucaugugcgucugccgcgacaacuggcacggcuccaaccgccccugggucuccuucaaccagaaccucgacuaccagaucggcuacaucugcuccggcgucuucggcgacaacccccgccccgaggacggcgagggcuccugcaaccccgucaccgucgacggcgccaacggcgucaagggcuucuccuacaaguacggcaacggcgucuggaucggccgcaccaaguccaaccgccuccgcaagggcuucgagaugaucugggaccccaacggcuggaccaacaccgacuccgacuucuccgucaagcaggacgucgucgccaucaccgacugguccggcuacuccggcuccuucguccagcaccccgagcucaccggccucgacugcauccgccccugcuucugggucgagcucguccgcggccucccccgcgagaacaccaccaucuggaccuccggcuccuccaucuccuucugcggcgucaacuccgacaccgccaacugguccuggcccgacggcgccgagcuccccuucaccaucgacaaguga

SEQ ID NO: 117249 - RNA, 1413 nt, Artificial Sequence
  derived and/or modified CDS sequence (opt2) from neuraminidase__InfluenzaA__AET84275
augaaccccaaccagaagaucaucaccaucggcuccaucuccaucgccaucggcaucaucucccucaugcuccagaucggcaacaucaucuccaucugggccucccacuccauccagaccggcucccagaacaacaccggcaucugcaaccagcgcaucaucaccuacgagaacuccaccugggucaaccacaccuacgucaacaucaacaacaccaacgucgucgccggcgaggacaagaccuccgucacccucgccggcaacuccucccucugcuccaucuccggcugggccaucuacaccaaggacaacuccauccgcaucggcuccaagggcgacgucuucgucauccgcgagcccuucaucuccugcucccaccucgagugccgcaccuucuuccucacccagggcgcccuccucaacgacaagcacuccaacggcaccgucaaggaccgcucccccuaccgcgcccucauguccugcccccucggcgaggcccccucccccuacaacuccaaguucgaguccgucgccugguccgccuccgccugccacgacggcaugggcuggcucaccaucggcaucuccggccccgacaacggcgccgucgccguccucaaguacaacggcaucaucaccggcaccaucaaguccuggaagaagcagauccuccgcacccaggaguccgagugcgucugcaugaacggcuccugcuucaccaucaugaccgacggccccuccaacaaggccgccuccuacaagaucuucaagaucgagaagggcaaggucaccaaguccaucgagcucaacgcccccaacuucuacuacgaggagugcuccugcuaccccgacaccggcaucgucaugugcgucugccgcgacaacuggcacggcuccaaccgccccugggucuccuucaaccagaaccucgacuaccagaucggcuacaucugcuccggcgucuucggcgacaacccccgccccaaggacggcgagggcuccugcaaccccgucaccgucgacggcgccaacggcgucaagggcuucuccuacaaguacggcaacggcgucuggaucggccgcaccaaguccaaccgccuccgcaagggcuucgagaugaucugggaccccaacggcuggaccaacaccgacuccgacuucuccgucaagcaggacgucgucgccaucaccgacugguccggcuacuccggcuccuucguccagcaccccgagcucaccggccucgacugcauccgccccugcuucugggucgagcucguccgcggccucccccgcgagaacaccaccaucuggaccuccggcuccuccaucuccuucugcggcgucaacuccgacaccgccaacugguccuggcccgacggcgccgagcuccccuucaccaucgacaaguga

SEQ ID NO: 117250 - RNA, 1413 nt, Artificial Sequence; identical to SEQ ID NO: 113497
  derived and/or modified CDS sequence (opt2) from neuraminidase__InfluenzaA__AET84286

SEQ ID NO: 117251 - RNA, 1413 nt, Artificial Sequence
  derived and/or modified CDS sequence (opt2) from neuraminidase__InfluenzaA__AET84297
augaaccccaaccagaagaucaucaccaucggcuccaucuccaucgccaucggcaucaucucccucaugcuccagaucggcaacaucaucuccaucugggccucccacuccauccagaccggcucccagaacaacaccggcaucugcaaccagcgcaucaucaccuacgagaacuccaccugggucaaccacaccuacgucaacaucaacaacaccaacgucgucgccggcgaggacaagaccuccgucacccucgccggcaacuccucccucugcuccaucuccggcugggccaucuacaccaaggacaacuccauccgcaucggcuccaagggcgacgucuucgucauccgcgagcccuucaucuccugcucccaccucgagugccgcaccuucuuccucacccagggcgcccuccucaacgacaagcacuccaacggcaccgucaaggaccgcucccccuaccgcgcccucauguccugcccccucggcgaggcccccucccccuacaacuccaaguucgaguccgucgccugguccgccuccgccugccacgacggcaugggcuggcucaccaucggcaucuccggccccgacaacggcgccgucgccguccucaaguacaacggcaucaucaccggcaccaucaaguccuggaagaagcagauccuccgcacccaggaguccgagugcgucugcaugaacggcuccugcuucaccaucaugaccgacggccccuccaacaaggccgccuccuacaagaucuucaagaucgagaagggcaaggucaccaaguccaucgagcucaacgcccccaacuucuacuacgaggagugcuccugcuaccccgacaccggcaucgucaugugcgucugccgcgacaacuggcacggcuccaaccgccccugggucuccuucaaccagaaccucgacuaccagaucggcuacaucugcuccggcgucuucggcgacaacccccgccccgaggacggcgagggcuccugcaaccccgucaccgucgacggcgccaacggcgucaagggcuucuccuacaaguacgacaacggcgucuggaucggccgcaccaaguccaaccgccuccgcaagggcuucgagaugaucugggaccccaacggcuggaccaacaccgacuccgacuucuccgucaagcaggacgucgucgccaucaccgacugguccggcuacuccggcuccuucguccagcaccccgagcucaccggccucgacugcauccgccccugcuucugggucgagcucguccgcggccucccccgcgagaacaccaccaucuggaccuccggcuccuccaucuccuucugcggcgucaacuccgacaccaccaacugguccuggcccgacggcgccgagcuccccuucaccaucgacaaguga

SEQ ID NO: 117252 - RNA, 1413 nt, Artificial Sequence
  derived and/or modified CDS sequence (opt2) from neuraminidase__InfluenzaA__AET84308
augaaccccaaccagaagaucaucaccaucggcuccaucuccaucgccaucggcaucaucucccucaugcuccagaucggcaacaucaucuccaucugggccucccacuccauccagaccggcucccagaacaacaccggcaucugcaaccagcgcaucaucaccuacgagaacuccaccugggucaaccacaccuacgucaacaucaacaacaccaacgucgucgccggcgaggacaagaccuccgucacccucgccggcaacuccucccucugcuccaucuccggcugggccaucuacaccaaggacaacuccauccgcaucggcuccaagggcgacgucuucgucauccgcgagcccuucaucuccugcucccaccucgagugccgcaccuucuuccucacccagggcgcccuccucaacgacaagcacuccaacggcaccgucaaggaccgcucccccuaccgcgcccucauguccugcccccucggcgaggcccccucccccuacaacuccaaguucgaguccgucgccugguccgccuccgccugccacgacggcaugggcuggcucaccaucggcaucuccggccccgacaacggcgccgucgccguccucaaguacaacggcaucaucaccgagaccaucaaguccuggaagaagcagauccuccgcacccaggaguccgagugcgucugcaugaacggcuccugcuucaccaucaugaccgacggccccuccaacaaggccgccuccuacaagaucuucaagaucgagaagggcaaggucaccaaguccaucgagcucaacgcccccaacuuccacuacgaggagugcuccugcuaccccgacaccggcaucgucaugugcgucugccgcgacaacuggcacggcuccaaccgccccugggucuccuucaaccagaaccucgacuaccagaucggcuacaucugcuccggcgucuucggcgacaacccccgccccgaggacggcgagggcuccugcaaccccgucaccgucgacggcgccaacggcgucaagggcuucuccuacaaguacgacaacggcgucuggaucggccgcaccaaguccaaccgccuccgcaagggcuucgagaugaucugggaccccaacggcuggaccaacaccgacuccgacuucuccgucaagcaggacgucgucgccaucaccgacugguccggcuacuccggcuccuucguccagcaccccgagcucaccggccucgacugcauccgccccugcuucugggucgagcucguccgcggccucccccgcgagaacaccaccaucuggaccuccggcuccuccaucuccuucugcggcgucaacuccgacaccaccaacugguccuggcccgacggcgccgagcuccccuucaccaucgacaaguga

SEQ ID NO: 117253 - RNA, 1413 nt, Artificial Sequence
  derived and/or modified CDS sequence (opt2) from neuraminidase__InfluenzaA__AET84319
augaaccccaaccagaagaucaucaccaucggcuccaucuccaucgccaucggcaucaucucccucaugcuccagaucggcaacaucaucuccaucugggccucccacuccauccagaccggcucccagaacaacaccggcaucugcaaccagcgcaucaucaccuacgagaacuccaccugggucaaccacaccuacgucaacaucaacaacaccaacgucgucgccggcgaggacaagaccuccaugacccucgccggcaacuccucccucugcuccaucuccggcugggccaucuacaccaaggacaacuccauccgcaucggcuccaagggcgacgucuucgucauccgcgagcccuucaucuccugcucccaccucgagugccgcaccuucuuccucacccagggcgcccuccucaacgacaagcacuccaaccgcaccgucaaggaccgcucccccuaccgcgcccucauguccugcccccucggcgaggcccccucccccuacaacuccaaguucgaguccgucgccugguccgccuccgccugccacgacggcaugggcuggcucaccaucggcaucuccggccccgacaacggcgccgucgccguccucaaguacaacggcaucaucaccgagaccaucaaguccuggaagaagcagauccuccgcacccaggaguccgagugcgucugcaugaacggcuccugcuucaccaucaugaccgacggccccuccaacaaggccgccuccuacaagaucuucaagaucgagaagggcaaggucaccaaguccaucgagcucaacgcccccaacuucuacuacgaggagugcuccugcuaccccgacaccggcaucgucaugugcgucugccgcgacaacuggcacggcuccaaccgccccugggucuccuucaaccagaaccucgacuaccagaucggcuacaucugcuccggcgucuucggcgacaacccccgccccgaggacggcgagggcuccugcaaccccgucaccgucgacggcgccaacggcgucaagggcuucuccuacaaguacggcaacggcgucuggaucggccgcaccaaguccaaccgccuccgcaagggcuucgagaugaucugggaccccaacggcuggaccaacaccgacuccgacuucuccgucaagcaggacgucgucgccaucaccgacugguccggcuacuccggcuccuucguccagcaccccgagcucaccggccucgacugcauccgccccugcuucugggucgagcucguccgcggccucccccgcgagaacaccaccaucuggaccuccggcuccuccaucuccuucugcggcgucaacuccgacaccgccaacugguccuggcccgacggcgccgagcuccccuucaccaucgacaaguga

SEQ ID NO: 117254 - RNA, 1413 nt, Artificial Sequence
  derived and/or modified CDS sequence (opt2) from neuraminidase__InfluenzaA__AET84330
augaaccccaaccagcgcaucaucaccaucggcuccaucuccaucgccaucggcaucaucucccucaugcuccagaucggcaacaucaucuccaucugggccucccacuccauccagaucggcucccagaacaacaccggcaucugcaaccagcgcaucaucaccuacgagaacuccaccugggucaaccacaccuacgucaacaucaacaacaccaacgucgucgccggcgaggacaagaccuccgucacccucgccggcaacuccucccucugcuccaucuccggcugggccaucuacaccaaggacaacuccauccgcaucggcuccaagggcgacgucuucgucauccgcgagcccuucaucuccugcucccaccucgagugccgcaccuucuuccucacccagggcgcccuccucaacgacaagcacuccaacggcaccgccaaggaccgcucccccuaccgcgcccucauguccugcccccucggcgaggcccccucccccuacaacuccaaguucgaguccgucgccugguccgccuccgccugccacgacggcaugggcuggcucaccaucggcaucuccggccccgacaacggcgccgucgccguccucaaguacaacggcaucaucaccggcaccaucaaguccuggaagaagcagauccuccgcacccaggaguccgagugcgucugcaugaacggcuccugcuucaccaucaugaccgacggccccuccaacaaggccgccuccuacaagaucuucaagaucgagaagggcaaggucaccaaguccaucgagcucaacgcccccaacuucuacuacgaggagugcuccugcuaccccgacaccggcaucgucaugugcgucugccgcgacaacuggcacggcuccaaccgccccugggucuccuucaaccagaaccucgacuaccagaucggcuacaucugcuccggcgucuucggcgacaacccccgccccaaggacggcgagggcuccugcaaccccgucaccgucgacggcgccaacggcgucaagggcuucuccuacaaguacggcaacggcgucuggaucggccgcaccaaguccaaccgccuccgcaagggcuucgagaugaucugggaccccaacggcuggaccaacaccgacuccgacuucuccgucaagcaggacgucgucgccaucaccgacugguccggcuacuccggcuccuucguccagcaccccgagcucaccggccucgacugcauccgccccugcuucugggucgagcucguccgcggccucccccgcgagaacaccaccaucuggaccuccggcuccuccaucuccuucugcggcgucaacuccgacaccgccaacugguccuggcccgacggcgccgagcuccccuucaccaucgacaaguga

SEQ ID NO: 117255 - RNA, 1413 nt, Artificial Sequence
  derived and/or modified CDS sequence (opt2) from neuraminidase__InfluenzaA__AET84341
augaaccccaaccagcgcaucaucaccaucggcuccaucuccaucgccaucggcaucaucucccucaugcuccagaucggcaacaucaucuccaucugggccucccacuccauccagaucggcucccagaacaacaccggcaucugcaaccagcgcaucaucaccuacgagaacuccaccugggucaaccacaccuacgucaacaucaacaacaccaacgucgucgccggcgaggacaagaccuccgucacccucgccggcaacuccucccucugcuccaucuccggcugggccaucuacaccaaggacaacuccauccgcaucggcuccaagggcgacgucuucgucauccgcgagcccuucaucuccugcucccaccucgagugccgcaccuucuuccucacccagggcgcccuccucaacgacaagcacuccaacggcaccgccaaggaccgcucccccuaccgcgcccucauguccugcccccucggcgaggcccccucccccuacaacuccaaguucgaguccgucgccugguccgccuccgccugccacgacggcaugggcuggcucaccaucggcaucuccggccccgacaacggcgccgucgccguccucaaguacaacggcaucaucaccggcaccaucaaguccuggaagaagcagauccuccgcacccaggaguccgagugcgucugcaugaacggcuccugcuucaccaucaugaccgacggccccuccaacaaggccgccuccuacaagaucuucaagaucgagaagggcaaggucaccaaguccaucgagcucaacgcccccaacuucuacuacgaggagugcuccugcuaccccgacaccggcaucgucaugugcgucugccgcgacaacuggcacggcuccaaccgccccugggucuccuucaaccagaaccucgacuaccagaucggcuacaucugcuccggcgucuucggcgacaacccccgccccaaggacggcgagggcuccugcaaccccgucaccgucgacggcgccaacggcgucaagggcuucuccuacaaguacggcaacggcgucuggaucggccgcaccaaguccaaccgccuccgcaagggcuucgagaugaucugggaccccaacggcuggaccaacaccgacuccgacuucuccgucaagcaggacgucgucgccaucaccgacugguccggcuacuccggcuccuucguccagcaccccgagcucaccggccucgacugcauccgccccugcuucugggucgagcucguccgcggccuccccaaggagaacaccaccaucuggaccuccggcuccuccaucuccuucugcggcgucaacuccgacaccgccaacugguccuggcccgacggcgccgagcuccccuucaccaucgacaaguga

SEQ ID NO: 117256 - RNA, 1413 nt, Artificial Sequence
  derived and/or modified CDS sequence (opt2) from neuraminidase__InfluenzaA__AET84363
augaaccccaaccagcgcaucaucaccaucggcuccaucuccaucgccaucggcaucaucucccucaugcuccagaucggcaacaucaucuccaucugggccucccacuccauccagaccggcucccagaacaacaccggcaucugcaaccagcgcaucaucaccuacgagaacuccaccugggucaaccacaccuacgucaacaucaacaacaccaacgucgucgccggcgaggacaagaccuccaugacccucgccggcaacuccucccucugcuccaucuccggcugggccaucuacaccaaggacaacuccauccgcaucggcuccaagggcgacgucuucgucauccgcgagcccuucaucuccugcucccaccucgagugccgcaccuucuuccucacccagggcgcccuccucaacgacaagcacuccaacggcaccgccaaggaccgcucccccuaccgcgcccucauguccugcccccucggcgaggcccccucccccuacaacuccaaguucgaguccgucgccugguccgccuccgccugccacgacggcaugggcuggcucaccaucggcaucuccggccccgacaacggcgccgucgccguccucaaguacaacggcaucaucaccggcaccaucaaguccuggaagaagcagauccuccgcacccaggaguccgagugcgucugcaugaacggcuccugcuucaccaucaugaccgacggccccuccaacaaggccgccuccuacaagaucuucaagaucgagaagggcaaggucaccaaguccaucgagcucaacgcccccaacuucuacuacgaggagugcuccugcuaccccgacaccggcaucgucaugugcgucugccgcgacaacuggcacggcuccaaccgccccugggucuccuucaaccagaaccucgacuaccagaucggcuacaucugcuccggcgucuucggcgacaacccccgccccaaggacggcgagggcuccugcaaccccgucaccgucgacggcgccaacggcgucaagggcuucuccuacaaguacggcaacggcgucuggaucggccgcaccaaguccaaccgccuccgcaagggcuucgagaugaucugggaccccaacggcuggaccaacaccgacuccgacuucuccgucaagcaggacgucgucgccaucaccgacugguccggcuacuccggcuccuucguccagcaccccgagcucaccggccucgacugcauccgccccugcuucugggucgagcucguccgcggccucccccgcgagaacaccaccaucuggaccuccggcuccuccaucuccuucugcggcgucaacuccgacaccgccaacugguccuggcccgacggcgccgagcuccccuucaccaucgacaaguga

SEQ ID NO: 117257 - RNA, 1413 nt, Artificial Sequence
  derived and/or modified CDS sequence (opt2) from neuraminidase__InfluenzaA__AET84374
augaaccccaaccagcgcaucaucaccaucggcuccaucuccaucgccaucggcaucaucucccucaugcuccagaucggcaacaucaucuccaucugggccucccacuccauccagaucggcucccagaacaacaccggcaucugcaaccagcgcaucaucaccuacgagaacuccaccugggucaaccacaccuacgucaacaucaacaacaccaacgucgucgccggcgaggacaagaccuccgucacccucgccggcaacuccucccucugcuccaucuccggcugggccaucuacaccaaggacaacuccauccgcaucggcuccaagggcgacgucuucgucauccgcgagcccuucaucuccugcucccaccucgagugccgcaccuucuuccucacccagggcgcccuccucaacgacaagcacuccaacggcaccgccaaggaccgcucccccuaccgcgcccucauguccugcccccucggcgaggcccccucccccuacaacuccaaguucgaguccgucgccugguccgccuccgccugccacgacggcaugggcuggcucaccaucggcaucuccggccccgacaacggcgccgucgccguccucaaguacaacggcaucaucaccgagaccaucaaguccuggaagaagcagauccuccgcacccaggaguccgagugcgucugcaugaacggcuccugcuucaccaucaugaccgacggccccuccaacaaggccgccuccuacaagaucuucaagaucgagaagggcaaggucaccaaguccaucgagcucaacgcccccaacuucuacuacgaggagugcuccugcuaccccgacaccggcaucgucaugugcgucugccgcgacaacuggcacggcuccaaccgccccugggucuccuucaaccagaaccucgacuaccagaucggcuacaucugcuccggcgucuucggcgacaacccccgccccaaggacggcgagggcuccugcaaccccgucaccgucgacggcgccaacggcgucaagggcuucuccuacaaguacggcaacggcgucuggaucggccgcaccaaguccaaccgccuccgcaagggcuucgagaugaucugggaccccaacggcuggaccaacaccgacuccgacuucuccgucaagcaggacgucgucgccaucaccgacugguccggcuacuccggcuccuucguccagcaccccgagcucaccggccucgacugcauccgccccugcuucugggucgagcucguccgcggccucccccgcgagaacaccaccaucuggaccuccggcuccuccaucuccuucugcggcgucaacuccgacaccgccaacugguccuggcccgacggcgccgagcuccccuucaccaucgacaaguga

SEQ ID NO: 117258 - RNA, 1413 nt, Artificial Sequence
  derived and/or modified CDS sequence (opt2) from neuraminidase__InfluenzaA__AET84396
augaaccccaaccagcgcaucaucaccaucggcuccaucuccaucgccaucggcaucaucucccucaugcuccagaucggcaacaucaucuccaucugggccucccacuccauccagaccggcucccagaacaacaccggcaucugcaaccagcgcaucaucaccuacgagaacuccaccugggucaaccacaccuacgucaacaucaacaacaccaacgucgucgccggcgaggacaagaccuccaugacccucgccggcaacuccucccucugcuccaucuccggcugggccaucuacaccaaggacaacuccauccgcaucggcuccaagggcgacgucuucgucauccgcgagcccuucaucuccugcucccaccucgagugccgcaccuucuuccucacccagggcgcccuccucaacgacaagcacuccaacggcaccgccaaggaccgcucccccuaccgcgcccucauguccugcccccucggcgaggcccccucccccuacaacuccaaguucgaguccgucgccugguccgccuccgccugccacgacggcaugggcuggcucaccaucggcaucuccggccccgacaacggcgccgucgccguccucaaguacaacggcaucaucaccgagaccaucaaguccuggaagaagcagauccuccgcacccaggaguccgagugcgucugcaugaacggcuccugcuucaccaucaugaccgacggccccuccaacaaggccgccuccuacaagaucuucaagaucgagaagggcaaggucaccaaguccaucgagcucaacgcccccaacuucuacuacgaggagugcuccugcuaccccgacaccggcaucgucaugugcgucugccgcgacaacuggcacggcuccaaccgccccugggucuccuucaaccagaaccucgacuaccagaucggcuacaucugcuccggcgucuucggcgacaacccccgccccaaggacggcgagggcuccugcaaccccgucaccgucgacggcgccaacggcgucaagggcuucuccuacaaguacggcaacggcgucuggaucggccgcaccaaguccaaccgccuccgcaagggcuucgagaugaucugggaccccaacggcuggaccaacaccgacuccgacuucuccgucaagcaggacgucgucgccaucaccgacugguccggcuacuccggcuccuucguccagcaccccgagcucaccggccucgacugcauccgccccugcuucugggucgagcucguccgcggccucccccgcgagaacaccaccaucuggaccuccggcuccuccaucuccuucugcggcgucaacuccgacaccgccaacugguccuggcccgacggcgccgagcuccccuucaccaucgacaaguga

SEQ ID NO: 117259 - RNA, 1413 nt, Artificial Sequence
  derived and/or modified CDS sequence (opt2) from neuraminidase__InfluenzaA__AET84407
augaaccccaaccagcgcaucaucaccaucggcuccaucuccaucgccaucggcaucaucucccucaugcuccagaucggcaacaucaucuccaucugggccucccacuccauccagaucggcucccagaacaacaccggcaucugcaaccagcgcaucaucaccuacgagaacuccaccugggucaaccacaccuacgucaacaucaacaacaccaacgucgucgccggcgaggacaagaccuccgucacccucgccggcaacuccucccucugcuccaucuccggcugggccaucuacaccaaggacaacuccauccgcaucggcuccaagggcgacgucuucgucauccgcgagcccuucaucuccugcucccaccucgagugccgcaccuucuuccucacccagggcgcccuccucaacgacaagcacuccaacggcaccgccaaggaccgcucccccuaccgcgcccucauguccugcccccucggcgaggcccccucccccuacaacuccaaguucgaguccgucgccugguccgccuccgccugccacgacggcaugggcuggcucaccaucggcaucuccggccccgacaacggcgccgucgccguccucaaguacaacggcaucaucaccggcaccaucaaguccuggaagaagcagauccuccgcacccaggaguccgagugcgucugcaugaacggcuccugcuucaccaucaugaccgacggccccuccaacaaggccgccuccuacaagaucuucaagaucgagaagggcaaggucaccaaguccaucgagcucaacgcccccaacuucuacuacgaggagugcuccugcuaccccgacaccggcaucgucaugugcgucugccgcgacaacuggcacggcuccaaccgccccugggucuccuucaaccagaaccucgacuaccagaucggcuacaucugcuccggcgucuucggcgacaacccccgccccgaggacggcgagggcuccugcaaccccgucaccgucgacggcgccaacggcgucaagggcuucuccuacaaguacggcaacggcgucuggaucggccgcaccaaguccaaccgccuccgcaagggcuucgagaugaucugggaccccaacggcuggaccaacaccgacuccgacuucuccgucaagcaggacgucgucgccaucaccgacugguccggcuacuccggcuccuucguccagcaccccgagcucaccggccucgacugcauccgccccugcuucugggucgagcucguccgcggccucccccgcgagaacaccaccaucuggaccuccggcuccuccaucuccuucugcggcgucaacuccgacaccgccaacugguccuggcccgacggcgccgagcuccccuucaccaucgacaaguga

SEQ ID NO: 117260 - RNA, 1413 nt, Artificial Sequence
  derived and/or modified CDS sequence (opt2) from neuraminidase__InfluenzaA__AET84418
augaaccccaaccagcgcaucaucgccaucggcuccaucuccaucgccaucggcaucaucucccucaugcuccagaucggcaacaucaucuccaucugggccucccacuccauccagaucggcucccagaacaacaccggcaucugcaaccagcgcaucaucaccuacgagaacuccaccugggucaaccacaccuacgucaacaucaacaacaccaacgucgucgccggcgaggacaagaccuccgucacccucgccggcaacuccucccucugcuccaucuccggcugggccaucuacaccaaggacaacuccauccgcaucggcuccaagggcgacgucuucgucauccgcgagcccuucaucuccugcucccaccucgagugccgcaccuucuuccucacccagggcgcccuccucaacgacaagcacuccaacggcaccgccaaggaccgcucccccuaccgcgcccucauguccugcccccucggcgaggcccccucccccuacaacuccaaguucgaguccgucgccugguccgccuccgccugccacgacggcaugggcuggcucaccaucggcaucuccggccccgacaacggcgccgucgccguccucaaguacaacggcaucaucaccgagaccaucaaguccuggaagaagcagauccuccgcacccaggaguccgagugcgucugcaugaacggcuccugcuucaccaucaugaccgacggccccuccaacaaggccgccuccuacaagaucuucaagaucgagaagggcaaggucaccaaguccaucgagcucaacgcccccaacuucuacuacgaggagugcuccugcuaccccgacaccggcaucgucaugugcgucugccgcgacaacuggcacggcuccaaccgccccugggucuccuucaaccagaaccucgacuaccagaucggcuacaucugcuccggcgucuucggcgacaacccccgccccgaggacggcgagggcuccugcaaccccgucaccgucgacggcgccaacggcgucaagggcuucuccuacaaguacggcaacggcgucuggaucggccgcaccaaguccaaccgccuccgcaagggcuucgagaugaucugggaccccaacggcuggaccaacaccgacuccgacuucuccgucaagcaggacgucgucgccaucaccgacugguccggcuacuccggcuccuucguccagcaccccgagcucaccggccucgacugcauccgccccugcuucugggucgagcucguccgcggccucccccgcgagaacaccaccaucuggaccuccggcuccuccaucuccuucugcggcgucaacuccgacaccgccaacugguccuggcccgacggcgccgagcuccccuucaccaucgacaaguga

SEQ ID NO: 117261 - RNA, 1413 nt, Artificial Sequence
  derived and/or modified CDS sequence (opt2) from neuraminidase__InfluenzaA__AET84429
augaaccccaaccagaagaucaucaccaucggcuccaucuccaucgccaucggcaucaucucccucaugcuccagaucggcaacaucaucuccaucugggccucccacuccauccagaccggcucccagaacaacaccggcaucugcaaccagcgcaucaucaccuacgagaacuccaccugggucaaccacaccuacgucuccaucaacaacaccaacgucgucgccggcaaggacaagaccuccgucacccucgccggcaacuccucccucugcuccaucuccggcugggccaucuacaccaaggacaacuccauccgcaucggcuccaagggcgacgucuucgucauccgcgagcccuucaucuccugcucccaccucgagugccgcaccuucuuccucacccagggcgcccuccucaacgacaagcacuccaacggcaccgucaaggaccgcucccccuaccgcgcccucauguccugcccccucggcgaggcccccucccccuacaacuccaaguucgaguccgucgccugguccgccuccgccugccacgacggcaugggcuggcucaccaucggcaucuccggccccgacaacggcgccgucgccguccucaaguacaacggcaucaucaccggcaccaucaaguccuggaagaagcagauccuccgcacccaggaguccgagugcgucugcaugaacggcuccugcuucaccaucaugaccgacggccccuccaacaaggccgccuccuacaagaucuucaagaucgagaagggcaaggucaccaaguccaucgagcucaacgcccccaacuucuacuacgaggagugcuccugcuaccccgacaccggcaucgucaugugcgucugccgcgacaacuggcacggcuccaaccgccccugggucuccuucaaccaggaccucgacuaccagaucggcuacaucugcuccggcgucuucggcgacaacccccgccccaaggacggcgagggcuccugcaaccccgucaccgucgacggcgccaacggcgucaagggcuucuccuacaaguacggcaacggcgucuggaucggccgcaccaaguccaaccgccuccgcaagggcuucgagaugaucugggaccccaacggcuggaccaacaccgacuccgacuucuccgucaagcaggacgucgucgccaucaccgacugguccggcuacuccggcuccuucguccagcaccccgagcucaccggccucgacugcauccgccccugcuucugggucgagcucguccgcggccucccccgcgagaacaccaccaucuggaccuccggcuccuccaucuccuucugcggcgucaacuccgacaccgccaacugguccuggcccgacggcgccgagcuccccuucaccaucgacaaguga

SEQ ID NO: 117262 - RNA, 1413 nt, Artificial Sequence
  derived and/or modified CDS sequence (opt2) from neuraminidase__InfluenzaA__AET84440
augaaccccaaccagaagaucaucaccaucggcuccaucuccaucgccaucggcaucaucucccucaugcuccagaucggcaacaucaucuccaucugggccucccacuccauccagaccggcucccagaacaacaccggcaucugcaaccagcgcaucaucaccuacgagaacuccaccugggucaaccacaccuacgucaacaucaacaacaccaacgucgucgccggcgaggacaagaccuccgucacccucgccggcaacuccucccucugcuccaucuccggcugggccaucuacaccaaggacaacuccauccgcaucggcuccaagggcgacgucuucgucauccgcgagcccuucaucuccugcucccaccucgagugccgcaccuucuuccucacccagggcgcccuccucaacgacaagcacuccaacggcaccgucaaggaccgcucccccuaccgcgcccucauguccugcccccucggcgaggcccccucccccuacaacuccaaguucgaguccgucgccugguccgccuccgccugccacgacggcaugggcuggcucaccaucggcaucuccggccccgacaacggcgccgucgccguccucaaguacaacggcaucaucaccgagaccaucaaguccuggaagaagcagauccuccgcacccaggaguccgagugcgucugcaugaacggcuccugcuucaccaucaugaccgacggccccuccaacaaggccgccuccuacaagaucuucaagaucgagaagggcaaggucaccaaguccaucgagcucaacgcccccaacuucuacuacgaggagugcuccugcuaccccgacaccggcaucgucaugugcgucugccgcgacaacuggcacggcuccaaccgccccugggucuccuucaaccagaaccucgacuaccagaucggcuacaucugcuccggcgucuucggcgacaacccccgccccaaggacggcgagggcuccugcaaccccgucaccgucgacggcgccaacggcgucaagggcuucuccuacaaguacggcaacggcgucuggaucggccgcaccaaguccaaccgccuccgcaagggcuucgagaugaucugggaccccaacggcuggaccaacaccgacuccgacuucuccgucaagcaggacgucgucgccaucaccgacugguccggcuacuccggcuccuucguccagcaccccgagcucaccggccucgacugcauccgccccugcuucugggucgagcucguccgcggccucccccgcgagaacaccaccaucuggaccuccggcuccuccaucuccuucugcggcgucaacuccgacaccgccaacugguccuggcccgacggcgccgagcuccccuucaccaucgacaaguga

SEQ ID NO: 117263 - RNA, 1413 nt, Artificial Sequence
  derived and/or modified CDS sequence (opt2) from neuraminidase__InfluenzaA__AET84451
augaaccccaaccagaagaucaucaccaucggcuccaucuccaucgccaucggcaucaucucccucauccuccagaucggcaacaucaucuccaucugggccucccacuccauccagaccggcucccagaaccacaccggcaucugcaaccagcgcaucaucaccuacgagaacuccaccugggucaacaacaccuacgucaacaucaacaacaccaacgucgucgccgagaaggacaagaccuccgucacccucgccggcaacuccucccucugcuccaucuccggcugggccaucuacaccaaggacaacuccauccgcaucggcuccaagggcgacgucuucgucauccgcgagcccuucaucuccugcucccaccucgagugccgcaccuucuuccucaccaagggcgcccuccucaacgacaagcacuccaacggcaccgucaccgaccgcucccccuaccgcgcccucauguccugcccccucggcgaggcccccucccccuacaacucccgcuucgaguccgucgccugguccgccuccgccugccacgacggcaugggcuggcucaccaucggcaucuccggccccgacaacggcgccgucgccguccucaaguacaacggcaucaucaccgagaccaucaaguccuggaagaagcgcauccuccgcacccaggaguccgagugcgucugcaugaacggcuccugcuucaccaucaugaccgacggccccuccaacggcgccgccuccuacaagaucuucaagaucgagaagggcaaggucaccaagaccaucgagcucaacgcccccaacuuccacuacgaggagugcuccugcuaccccgacaccggcaccgucaugugcgucugccgcgacaacuggcacggcuccaaccgccccugggucuccuucaaccagaaccucgacuaccagaucggcuacaucugcuccggcgucuucggcgacaacccccgccccaaggacggcgagggcuccugcaaccccgucaccgucgacggcgccgacggcgucaagggcuucuccuacaaguacggcaacggcgucuggaucggccgcaccaaguccaaccgccuccgcaagggcuucgagaugaucugggaccccaacggcuggaccaacaccgacuccgacuucuccgucaagcaggacgucgucgccaucaccgacugguccggcuacuccggcuccuucguccagcaccccgagcucaccggccucgacugcauccgccccugcuucugggucgagcucguccgcggccucccccgcgagaacaccaccaucuggaccuccggcuccuccaucuccuucugcggcgucaacuccggcaccgccaacugguccuggcccgacggcgccgagcuccccuucaccaucgacaaguga

SEQ ID NO: 117264 - RNA, 1410 nt, Artificial Sequence; identical to SEQ ID NO: 112774
  derived and/or modified CDS sequence (opt2) from neuraminidase__InfluenzaA__AEV53421

SEQ ID NO: 117265 - RNA, 1410 nt, Artificial Sequence; identical to SEQ ID NO: 112774
  derived and/or modified CDS sequence (opt2) from neuraminidase__InfluenzaA__AEV53423

SEQ ID NO: 117266 - RNA, 1410 nt, Artificial Sequence; identical to SEQ ID NO: 114236
  derived and/or modified CDS sequence (opt2) from neuraminidase__InfluenzaA__AEV53425

SEQ ID NO: 117267 - RNA, 1410 nt, Artificial Sequence; identical to SEQ ID NO: 112774
  derived and/or modified CDS sequence (opt2) from neuraminidase__InfluenzaA__AEV53427

SEQ ID NO: 117268 - RNA, 1410 nt, Artificial Sequence; identical to SEQ ID NO: 114236
  derived and/or modified CDS sequence (opt2) from neuraminidase__InfluenzaA__AEV53429

SEQ ID NO: 117269 - RNA, 1410 nt, Artificial Sequence
  derived and/or modified CDS sequence (opt2) from neuraminidase__InfluenzaA__AEV53431
augaaccccaaccagaagaucaucaccaucggcuccgucugcaugaccaucggcauggccaaccucauccuccagaucggcaacaucaucuccaucuggaucucccacuccauccagcucggcaaccagaaccagaucgagaccugcaaccaguccgucaucaccuacgagaacaacaccugggucaaccagaccuacgucaacaucuccaacaccaacuucgccgccggccaguccgucguccccgucaagcucgccggcaacuccucccucugccccgucuccggcugggccaucuacuccaaggacaacuccauccgcaucggcuccaagggcgacgucuucgucauccgcgagcccuucaucuccugcuccccccucgagugccgcaccuucuuccucacccagggcgcccuccucaacgacaagcacuccaacggcaccaucaaggaccgcucccccuaccgcacccucauguccugccccaucggcgagguccccucccccuacaacucccgcuucgaguccgucgccugguccgccuccgccugccacgacggcaucaacuggcucaccaucggcaucuccggccccgacaacggcgccgucgccguccucaaguacaacggcaucaucaccgacaccaucaaguccuggcgcaacaacauccuccgcacccaggaguccgagugcgccugcgucaacggcuccugcuucaccgucaugaccgacggccccuccgacggccaggccuccuacaagaucuuccgcaucgagaagggcaagaucgucaaguccgucgagaugaacgcccccaacuaccacuacgaggagugcuccugcuaccccgacuccuccgagaucaccugcgucugccgcgacaacuggcacggcuccaaccgccccugggucuccuucaaccagaaccucgaguaccagaucggcuacaucugcuccggcaucuucggcgacaacccccgccccaacgacaagaccggcuccugcggccccgucuccuccaacggcgccaacggcgucaagggcuucuccuucaaguacggcaacggcgucuggaucggccgcaccaaguccaucuccucccgcaacggcuucgagaugaucugggaccccaacggcuggaccggcaccgacaacaacuucuccaucaagcaggacaucgucggcaucaacgagugguccggcuacuccggcuccuucguccagcaccccgagcucaccggccucgacugcauccgccccugcuucugggucgagcucauccgcggccgccccaaggagaacaccaucuggaccuccggcuccuccaucuccuucugcggcgucaacuccggcaccgucggcugguccuggcccgacggcgccgagcuccccuucaccaucgacaaguga

SEQ ID NO: 117270 - RNA, 1410 nt, Artificial Sequence; identical to SEQ ID NO: 112774
  derived and/or modified CDS sequence (opt2) from neuraminidase__InfluenzaA__AEV53435

SEQ ID NO: 117271 - RNA, 1410 nt, Artificial Sequence
  derived and/or modified CDS sequence (opt2) from neuraminidase__InfluenzaA__AEV53437
augaaccccaaccagaagaucaucaccaucggcuccgucugcaugaccaucggcauggccaaccucauccuccagaucggcaacaucaucuccaucuggaucucccacuccauccagcucggcaaccagaaccagaucgagaccugcaaccaguccgucaucaccuacgagaacaacaccugggucaaccagaccuacgucaacaucuccaacaccaacuucgccgccggccaguccgucgucuccgucaagcucgccggcaacuccucccucugccccgucuccggcugggccaucuacuccaaggacaacuccauccgcaucggcuccaagggcgacgucuucgucauccgcgagcccuucaucuccugcuccccccucgagugccgcaccuucuuccucacccagggcgcccuccucaacgacaagcacuccaacggcaccaucaaggaccgcucccccuaccgcacccucauguccugccccaucggcgagguccccucccccuacaacucccgcuucgaguccgucgccugguccgccuccgccugccacgacggcaucaacuggcucaccaucggcaucuccggccccgacaacggcgccgucgccguccucaaguacaacggcaucaucaccgacaccaucaaguccuggcgcaacaacacccuccgcacccaggaguccgagugcgccugcgucaacggcuccugcuucaccgucaugaccgacggccccuccgacggccaggccuccuacaagaucuuccgcaucgagaagggcaagaucgucaaguccgucgagaugaacgcccccaacuaccacuacgaggagugcuccugcuaccccgacuccuccgagaucaccugcgucugccgcgacaacuggcacggcuccaaccgccccugggucuccuucaaccagaaccucgaguaccagaucggcuacaucugcuccggcaucuucggcgacaacccccgccccaacgacaagaccggcuccugcggccccgucuccuccaacggcgccaacggcgucaagggcuucuccuucaaguacggcaacggcgucuggaucggccgcaccaaguccaucuccucccgcaacggcuucgagaugaucugggaccccaacggcuggaccggcaccgacaacaacuucuccaucaagcaggacaucgucggcaucaacgagugguccggcuacuccggcuccuucguccagcaccccgagcucaccggccucgacugcauccgccccugcuucugggucgagcucauccgcggccgccccaaggagaacaccaucuggaccuccggcuccuccaucuccuucugcggcgucaacuccgacaccgucggcugguccuggcccgacggcgccgagcuccccuucaccaucgacaaguga

SEQ ID NO: 117272 - RNA, 1410 nt, Artificial Sequence; identical to SEQ ID NO: 112774
  derived and/or modified CDS sequence (opt2) from neuraminidase__InfluenzaA__AEV53439

SEQ ID NO: 117273 - RNA, 1410 nt, Artificial Sequence; identical to SEQ ID NO: 112774
  derived and/or modified CDS sequence (opt2) from neuraminidase__InfluenzaA__AEV53441

SEQ ID NO: 117274 - RNA, 1410 nt, Artificial Sequence; identical to SEQ ID NO: 112774
  derived and/or modified CDS sequence (opt2) from neuraminidase__InfluenzaA__AEV53443

SEQ ID NO: 117275 - RNA, 1410 nt, Artificial Sequence
  derived and/or modified CDS sequence (opt2) from neuraminidase__InfluenzaA__AEV53445
augaaccccaaccagaagaucaucaccaucggcuccgucugcaugaccaucggcauggccaaccucauccuccagaucggcaacaucaucuccaucuggaucucccacuccauccagcucggcaaccagaaccagaucgagaccugcaaccaguccgucaucaccuacgagaacaacaccugggucaaccagaccuacgucaacaucuccaacaccaacuucgccgccggccaguccgucgucuccgucaagcucgccggcaacuccucccucugccccgucuccggcugggccaucuacuccaaggacaacuccauccgcaucggcuccaagggcgacgucuucgucauccgcgagcccuucaucuccugcuccccccucgagugccgcaccuucuuccucacccagggcgcccuccucaacgacaagcacuccaacggcaccaucaaggaccgcucccccuaccgcacccucauguccugccccaucggcgagguccccucccccuacaacucccgcuucgaguccgucgccugguccgccuccgccugccacgacggcaucaacuggcucaccaucggcaucuccggccccgacaacggcgccgucgccguccucaaguacaacggcaucaucaccgacaccaucaaguccuggcgcaacaacauccuccgcacccaggaguccgagugcgccugcgucaacggcuccugcuucaccgucaugaccgacggccccuccgacggccaggccuccuacaagaucuuccgcaucgagaagggcaagaucgucaaguccgucgagaugaacgcccccaacuaccacuacgaggagugcuccugcuaccccgacuccuccgagaucaccugcgucugccgcgacaacuggcacggcuccaaccgccccugggucuccuucaaccagaaccucgaguaccagaucggcuacaucugcuccggcaucuucggcgacaacccccgccccaacgacaagaccggcuccugcggccccgucuccuccaacggcgccaacggcgucaagggcuucuccuucaaguacggcaacggcgucuggaucggccgcaccaaguccaucuccucccgcaacggcuucgagaugaucugggaccccaacggcuggaccggcaccgaccacaacuucuccaucaagcaggacaucgucggcaucaacgagugguccggcuacuccggcuccuucguccagcaccccgagcucaccggccucgacugcauccgccccugcuucugggucgagcucauccgcggccgccccaaggagaacaccaucuggaccuccggcuccuccaucuccuucugcggcgucaacuccgacaccgucggcugguccuggcccgacggcgccgagcuccccuucaccaucgacaaguga

SEQ ID NO: 117276 - RNA, 1410 nt, Artificial Sequence; identical to SEQ ID NO: 112774
  derived and/or modified CDS sequence (opt2) from neuraminidase__InfluenzaA__AEV53447

SEQ ID NO: 117277 - RNA, 1410 nt, Artificial Sequence; identical to SEQ ID NO: 114676
  derived and/or modified CDS sequence (opt2) from neuraminidase__InfluenzaA__AEV53449

SEQ ID NO: 117278 - RNA, 1410 nt, Artificial Sequence
  derived and/or modified CDS sequence (opt2) from neuraminidase__InfluenzaA__AEV53451
augaaccccaaccagaagaucaucaccaucggcuccgucugcaugaccaucggcauggccaaccucauccuccagaucggcaacaucaucuccaucuggaucucccacuccauccagcucggcaaccagaaccagaucgagaccugcaaccaguccgucaucaccuacgagaacaacaccugggucaaccagaccuacgucaacaucuccaacaccaacuucgccgccggccaguccgucgucuccgucaagcucgccggcaacuccucccucugccccgucuccggcugggccaucuacuccaaggacaacuccauccgcaucggcuccaagggcgacgucuucgucauccgcgagcccuucaucuccugcuccccccucgagugccgcaccuucuuccucacccagggcgcccuccucaacgacaagcacuccaacggcaccaucaaggaccgcucccccuaccgcacccucauguccugccccaucggcgagguccccucccccuacaacucccgcuucgaguccgucgccugguccgccuccgccugccacgacggcaucaacuggcucaccaucggcaucuccggccccgacaacggcgccgucgccguccucaaguacaacggcaucaucaccgacaccaucaaguccuggcgcaacaacauccuccgcacccaggaguccgagugcgccugcgucaacggcuccugcuucaccgucaugaccgacggccccuccgacggccaggccuccuacaagaucuucaagaucgagaagggcaagaucgucaaguccgucgagaugaacgcccccgacuaccacuacgaggagugcuccugcuaccccgacuccuccgagaucaccugcgucugccgcgacaacuggcacggcuccaaccgccccugggucuccuucaaccagaaccucgaguaccagaucggcuacaucugcuccggcaucuucggcgacaacccccgccccaacgacaagaccggcuccugcggccccgucuccuccaacggcgccaacggcgucaagggcuucuccuucaaguacggcaacggcgucuggaucggccgcaccaaguccaucuccucccgcaacggcuucgagaugaucugggaccccaacggcuggaccggcaccgacaacaacuucuccaucaagcaggacaucgucggcaucaacgagugguccggcuacuccggcuccuucguccagcaccccgagcucaccggccucgacugcauccgccccugcuucugggucgagcucauccgcggccgccccaaggagaacaccaucuggaccuccggcuccuccaucuccuucugcggcgucaacuccgacaccgucggcugguccuggcccgacggcgccgagcuccccuucaccaucgacaaguga

SEQ ID NO: 117279 - RNA, 1410 nt, Artificial Sequence; identical to SEQ ID NO: 112774
  derived and/or modified CDS sequence (opt2) from neuraminidase__InfluenzaA__AEV53453

SEQ ID NO: 117280 - RNA, 1410 nt, Artificial Sequence
  derived and/or modified CDS sequence (opt2) from neuraminidase__InfluenzaA__AEV53455
augaaccccaaccagaagaucaucaccaucggcuccgucugcaugaccaucggcauggccaaccucauccuccagaucggcaacaucaucuccaucuggaucucccacuccauccagcucggcaaccagaaccagaucgagaccugcaaccaguccgucaucaccuacgagaacaacaccugggucaaccagaccuacgucaacaucuccaacaccaacuucgccgccggccaguccgucgucuccgucaagcucgccggcaacuccucccucugccccgucuccggcugggccaucuacuccaaggacaacuccauccgcaucggcuccaagggcgacgucuucgucauccgcgagcccuucaucuccugcuccccccucgagugccgcaccuucuuccucacccagggcgcccuccucaacgacaagcacuccaacggcaccaucaaggaccgcucccccuaccgcacccucauguccugccccaucggcgagguccccucccccuacaacucccgcuucgaguccgucgccugguccgccuccgccugccacgacggcaucaacuggcucaccaucggcaucuccggccccgacaacggcgccgucgccguccucaaguacaacggcaucaucaccgacaccaucaaguccuggcgcaacaacauccuccgcacccaggaguccgagugcgccugcgucaacggcuccugcuucaccgucaugaccgacggccccuccgacggccaggccuccuacaagaucuuccgcaucgagaagggcaagaucgucaaguccgucgagaugaacgcccccaacuaccacuacgaggagugcuccugcuaccccgacuccuccgagaucaccugcgucugccgcgacaacuggcacggcuccaaccgccccugggucuccuucaaccagaaccucgaguaccagaucggcuacaucugcuccggcaucuucggcgacaacccccgccccaacgacaagaccggcuccugcggccccgucuccuccaacggcgccaacggcgucaagggcuucuccuucaaguacggcaacggcgucuggaucggccgcaccaaguccaucuccucccgcaacggcuucgagaugaucugggaccccaacggcuggaccgagaccgacaacaacuucuccaucaagcaggacaucgucggcaucaacgagugguccggcuacuccggcuccuucguccagcaccccgagcucaccggccucaacugcauccgccccugcuucugggucgagcucauccgcggccgccccaaggagaacaccaucuggaccuccggcuccuccaucuccuucugcggcgucaacuccgacaccgucggcugguccuggcccgacggcgccgagcuccccuucaccaucgacaaguga

SEQ ID NO: 117281 - RNA, 1410 nt, Artificial Sequence
  derived and/or modified CDS sequence (opt2) from neuraminidase__InfluenzaA__AEV53457
augaaccccaaccagaagaucaucaccaucggcuccgucugcaugaccaucggcauggccaaccucauccuccagaucggcaacaucaucuccaucuggaucucccacuccauccagcucggcaaccagaaccagaucgagaccugcaaccaguccgucaucaccuacgagaacaacaccugggucaaccagaccuacgucaacaucuccaacaccaacuucgccgccggccaguccgucgucuccgucaagcucgccggcaacuccucccucugccccgucuccggcugggccaucuacuccaaggacaacuccauccgcaucggcuccaagggcgacgucuucgucauccgcgagcccuucaucuccugcuccccccucgagugccgcaccuucuuccucacccagggcgcccuccucaacgacaagcacuccaacggcaccaucaaggaccgcucccccuaccgcacccucauguccugccccaucggcgagguccccucccccuacaacucccgcuucgaguccgucgccugguccgccuccgccugccacgacggcaucaacuggcucaccaucggcaucuccggccccgacaacggcgccgucgccguccucaaguacaacggcaucaucaccgacaccaucaaguccuggcgcaacaacauccuccgcacccaggaguccgagugcgccugcgucaacggcuccugcuucaccgucaugaccgacggccccuccgacggccaggccuccuacaagaucuuccgcgucgagaagggcaagaucgucaaguccgucgagaugaacgcccccaacuaccacuacgaggagugcuccugcuaccccgacuccuccgagaucaccugcgucugccgcgacaacuggcacggcuccaaccgccccugggucuccuucaaccagaaccucgaguaccagaucggcuacaucugcuccggcaucuucggcgacaacccccgccccaacgacaagaccggcuccugcggccccgucuccuccaacggcgccaacggcgucaagggcuucuccuucaaguacggcaacggcgucuggaucggccgcaccaaguccaucuccucccgcaacggcuucgagaugaucugggaccccaacggcuggaccggcaccgacaacaacuucuccaucaagcaggacaucgucggcaucaacgagugguccggcuacuccggcuccuucguccagcaccccgagcucaccggccucgacugcauccgccccugcuucugggucgagcucauccgcggccgccccaaggagaacaccaucuggaccuccggcuccuccaucuccuucugcggcgucaacuccgacaccgucggcugguccuggcccgacggcgccgagcuccccuucaccaucgacaaguga

SEQ ID NO: 117282 - RNA, 1410 nt, Artificial Sequence
  derived and/or modified CDS sequence (opt2) from neuraminidase__InfluenzaA__AEV53459
augaaccccaaccagaagaucaucaccaucggcuccgucugcaugaccaucggcauggccaaccucauccuccagaucggcaacaucaucuccaucuggaucucccacuccauccagcucggcaaccagaaccagaucgagaccugcaaccaguccgucaucaccuacgagaacaacaccugggucaaccagaccuacgucaacaucuccaacaccaacuucgccgccggccaguccgucgucuccgucaagcucgccggcaacuccucccucugccccgucuccggcugggccaucuacuccaaggacaacuccauccgcaucggcuccaagggcgacgucuucgucauccgcgagcccuucaucuccugcuccccccucgagugccgcaccuucuuccucacccagggcgcccuccucaacgacaagcacuccaacggcaccaucaaggaccgcucccccuaccgcacccucauguccugccccaucggcgagguccccucccccuacaacucccgcuucgaguccgucgccugguccgccuccgccugccacgacggcaucaacuggcucaccaucggcaucuccggccccgacaacggcgccgucgccguccucaaguacaacggcaucaucaccgacaccaucaaguccuggcgcaacaacauccuccgcacccaggaguccgagugcgccugcgucaacggcuccugcuucaccgucaucaccgacggccccuccgacggccaggccuccuacaagaucuuccgcaucgagaagggcaagaucgucaaguccgucgagaugaacgcccccaacuaccacuacgaggagugcuccugcuaccccgacuccuccgagaucaccugcgucugccgcgacaacuggcacggcuccaaccgccccugggucuccuucaaccagaaccucgaguaccagaucggcuacaucugcuccggcaucuucggcgacaacccccgccccaacgacaagaccggcuccugcggccccgucuccuccaacggcgccaacggcgucaagggcuucuccuucaaguacggcaacggcgucuggaucggccgcaccaaguccaucuccucccgcaacggcuucgagaugaucugggaccccaacggcuggaccgagaccgacaacaacuucuccaucaagcaggacaucgucggcaucaacgagugguccggcuacuccggcuccuucguccagcaccccgagcucaccggccucaacugcauccgccccugcuucugggucgagcucauccgcggccgccccaaggagaacaccaucuggaccuccggcuccuccaucuccuucugcggcgucaacuccgacaccgucggcugguccuggcccgacggcgccgagcuccccuucaccaucgacaaguga

SEQ ID NO: 117283 - RNA, 1410 nt, Artificial Sequence; identical to SEQ ID NO: 112774
  derived and/or modified CDS sequence (opt2) from neuraminidase__InfluenzaA__AEV53461

SEQ ID NO: 117284 - RNA, 1410 nt, Artificial Sequence
  derived and/or modified CDS sequence (opt2) from neuraminidase__InfluenzaA__AEV53463
augaaccccaaccagaagaucaucaccaucggcuccgucugcaugaccaucggcauggccaaccucauccuccagaucggcaacaucaucuccaucuggaucucccacuccauccagcucgagaaccagaaccagaucgagaccugcaaccaguccgucaucaccuacgagaacaacaccugggucaaccagaccuacgucaacaucuccaacaccaacuucgccgccggccaguccgucgucuccgucaagcucgccggcaacuccucccucugccccgucuccggcugggccaucuacuccaaggacaacuccauccgcaucggcuccaagggcgacgucuucgucauccgcgagcccuucaucuccugcuccccccucgagugccgcaccuucuuccucacccagggcgcccuccucaacgacaagcacuccaacggcaccaucaaggaccgcucccccuaccgcacccucauguccugccccaucggcgagguccccucccccuacaacucccgcuucgaguccgucgccugguccgccuccgccugccacgacggcaucaacuggcucaccaucggcaucuccggccccgacaacggcgccgucgccguccucaaguacaacggcaucaucaccgacaccaucaaguccuggcgcaacaacauccuccgcacccaggaguccgagugcgccugcaucaacggcuccugcuucaccgucaugaccgacggccccuccgacggccaggccuccuacaagaucuuccgcaucgagaagggcaagaucgucaaguccgucgagaugaacgcccccaacuaccacuacgaggagugcuccugcuaccccgacuccuccgagaucaccugcgucugccgcgacaacuggcacggcuccaaccgccccugggucuccuucaaccagaaccucgaguaccagaucggcuacaucugcuccggcaucuucggcgacaacccccgccccaacgacaagaccggcuccugcggccccgucuccuccaacggcgccaacggcgucaagggcuucuccuucaaguacggcaacggcgucuggaucggccgcaccaaguccaucuccucccgcaacggcuucgagaugaucugggaccccaacggcuggaccggcaccgacaacaacuucuccaucaagcaggacaucgucggcaucaacgagugguccggcuacuccggcuccuucguccagcaccccgagcucaccggccucgacugcauccgccccugcuucugggucgagcucauccgcggccgccccaaggagaacaccaucuggaccuccggcuccuccaucuccuucugcggcgucaacuccgacaccgucggcugguccuggcccgacggcgccgagcuccccuucaccaucgacaaguga

SEQ ID NO: 117285 - RNA, 1410 nt, Artificial Sequence
  derived and/or modified CDS sequence (opt2) from neuraminidase__InfluenzaA__AEV53465
augaaccccaaccagaagaucaucaccaucggcuccgucugcaugaccaucggcauggccaaccucauccuccagaucggcaacaucaucuccaucuggaucucccacuccauccagcucggcaaccagaaccagaucgagaccugcaaccaguccgucaucaccuacgagaacaacaccugggucaaccagaccuacgucaacaucuccaacaccaacuucgccgccggccaguccgucgucuccgucaagcucgccggcaacuccucccucugccccgucuccggcugggccaucuacuccaaggacaacuccauccgcaucggcuccaagggcgacgucuucgucauccgcgagcccuucaucuccugcuccccccucgagugccgcaccuucuuccucacccagggcgcccuccucaacgacaagcacuccaacggcaccaucaaggaccgcucccccuaccgcacccucauguccugccccaucggcgagguccccucccccuacaacucccgcuucgaguccgucgccugguccgccuccgccugccacgacggcaucaacuggcucaccaucggcaucuccggccccgacaacggcgccgucgccguccucaaguacaacggcaucaucaccgacaccaucaaguccuggcgcaacaacauccuccgcacccaggaguccgagugcgccugcgucaacggcuccugcuucaccgucaugaccgacggccccuccgaccgccaggccuccuacaagaucuuccgcaucgagaagggcaagaucgucaaguccgucgagaugaacgcccccaacuaccacuacgaggagugcuccugcuaccccgacuccuccgagaucaccugcgucugccgcgacaacuggcacggcuccaaccgccccugggucuccuucaaccagaaccucgaguaccagaucggcuacaucugcuccggcaucuucggcgacaacccccgccccaacgacaagaccggcuccugcggccccgucuccuccaacggcgccaacggcgucaagggcuucuccuacaaguacggcaacggcgucuggaucggccgcaccaaguccaucuccucccgcaacggcuucgagaugaucugggaccccaacggcuggaccggcaccgacaacaacuucuccaucaagcaggacaucgucggcaucaacgagugguccggcuacuccggcuccuucguccagcaccccgagcucaccggccucgacugcauccgccccugcuucugggucgagcucauccgcggccgccccaaggagaacaccaucuggaccuccggcuccuccaucuccuucugcggcgucaacuccgacaccgucggcugguccuggcccgacggcgccgagcuccccuucaccaucgacaaguga

SEQ ID NO: 117286 - RNA, 1410 nt, Artificial Sequence; identical to SEQ ID NO: 114575
  derived and/or modified CDS sequence (opt2) from neuraminidase__InfluenzaA__AEV53467

SEQ ID NO: 117287 - RNA, 1410 nt, Artificial Sequence; identical to SEQ ID NO: 114575
  derived and/or modified CDS sequence (opt2) from neuraminidase__InfluenzaA__AEV53469

SEQ ID NO: 117288 - RNA, 1410 nt, Artificial Sequence; identical to SEQ ID NO: 112774
  derived and/or modified CDS sequence (opt2) from neuraminidase__InfluenzaA__AEV53471

SEQ ID NO: 117289 - RNA, 1410 nt, Artificial Sequence; identical to SEQ ID NO: 112774
  derived and/or modified CDS sequence (opt2) from neuraminidase__InfluenzaA__AEV53473

SEQ ID NO: 117290 - RNA, 1410 nt, Artificial Sequence; identical to SEQ ID NO: 112774
  derived and/or modified CDS sequence (opt2) from neuraminidase__InfluenzaA__AEV53475

SEQ ID NO: 117291 - RNA, 1410 nt, Artificial Sequence; identical to SEQ ID NO: 112774
  derived and/or modified CDS sequence (opt2) from neuraminidase__InfluenzaA__AEV53477

SEQ ID NO: 117292 - RNA, 1410 nt, Artificial Sequence; identical to SEQ ID NO: 112774
  derived and/or modified CDS sequence (opt2) from neuraminidase__InfluenzaA__AEV53479

SEQ ID NO: 117293 - RNA, 1410 nt, Artificial Sequence; identical to SEQ ID NO: 112774
  derived and/or modified CDS sequence (opt2) from neuraminidase__InfluenzaA__AEV53481

SEQ ID NO: 117294 - RNA, 1410 nt, Artificial Sequence; identical to SEQ ID NO: 112774
  derived and/or modified CDS sequence (opt2) from neuraminidase__InfluenzaA__AEV53483

SEQ ID NO: 117295 - RNA, 1410 nt, Artificial Sequence
  derived and/or modified CDS sequence (opt2) from neuraminidase__InfluenzaA__AEV53485
augaaccccaaccagaagaucaucaccaucggcuccgucugcaugaccaucggcauggccaaccucauccuccagaucggcaacaucaucuccaucugggucucccacuccauccagcucggcaaccagaaccagaucgagaccugcaaccaguccgucaucaccuacgagaacaacaccugggucaaccagaccuacgucaacaucuccaacaccaacuucgccgccggccaguccgucgucuccgucaagcucgccggcaacuccucccucugccccgucuccggcugggccaucuacuccaaggacaacuccauccgcaucggcuccaagggcgacgucuucgucauccgcgagcccuucaucuccugcuccccccucgagugccgcaccuucuuccucacccagggcgcccuccucaacgacaagcacuccaacggcaccaucaaggaccgcucccccuaccgcacccucauguccugccccaucggcgagguccccucccccuacaacucccgcuucgaguccgucgccugguccgccuccgccugccacgacggcaucaacuggcucaccaucggcaucuccggccccgacaacggcgccgucgccguccucaaguacaacggcaucaucaccgacaccaucaaguccuggcgcaacaacauccuccgcacccaggaguccgagugcgccugcgucaacggcuccugcuucaccgucaugaccgacggccccuccgacggccaggccuccuacaagaucuuccgcaucgagaagggcaagaucgucaaguccgucgagaugaacgcccccaacuaccacuacgaggagugcuccugcuaccccgacuccuccgagaucaccugcgucugccgcgacaacuggcacggcuccaaccgccccugggucuccuucaaccagaaccucgaguaccagaucggcuacaucugcuccggcaucuucggcgacaacccccgccccaacgacaagaccggcuccugcggccccgucuccuccaacggcgccaacggcgucaagggcuucuccuucaaguacggcaacggcgucuggaucggccgcaccaaguccaucuccucccgcaacggcuucgagaugaucugggaccccaacggcuggaccggcaccgacaacaacuucuccaucaagcaggacaucgucggcaucaacgagugguccggcuacuccggcuccuucguccagcaccccgagcucaccggccucgacugcauccgccccugcuucugggucgagcucauccgcggccgccccaaggagaacaccaucuggaccuccggcuccuccaucuccuucugcggcgucaacuccgacaccgucggcugguccuggcccgacggcgccgagcuccccuucaccaucgacaaguga

SEQ ID NO: 117296 - RNA, 1410 nt, Artificial Sequence; identical to SEQ ID NO: 114575
  derived and/or modified CDS sequence (opt2) from neuraminidase__InfluenzaA__AEV53487

SEQ ID NO: 117297 - RNA, 1410 nt, Artificial Sequence; identical to SEQ ID NO: 113792
  derived and/or modified CDS sequence (opt2) from neuraminidase__InfluenzaA__AEV53489

SEQ ID NO: 117298 - RNA, 1410 nt, Artificial Sequence
  derived and/or modified CDS sequence (opt2) from neuraminidase__InfluenzaA__AEV53491
augaaccccaaccagaagaucaucaccaucggccucgucugcaugaccaucggcauggccaaccucauccuccagaucggcaacaucaucuccaucuggaucucccacuccauccagcucggcaaccagaaccagaucgagaccugcaaccaguccgucaucaccuacgagaacaacaccugggucaaccagaccuacgucaacaucuccaacaccaacuucgccgccggccaguccgucgucuccgucaagcucgccggcaacuccucccucugccccgucuccggcugggccaucuacuccaaggacaacuccauccgcaucggcuccaagggcgacgucuucgucauccgcgagcccuucaucuccugcuccccccucgagugccgcaccuucuuccucacccagggcgcccuccucaacgacaagcacuccaacggcaccaucaaggaccgcucccccuaccgcacccucauguccugccccaucggcgagguccccucccccuacaacucccgcuucgaguccgucgccugguccgccuccgccugccacgacggcaucaacuggcucaccaucggcaucuccggccccgacaacggcgccgucgccguccucaaguacaacggcaucaucaccgacaccaucaaguccuggcgcaacaacauccuccgcacccaggaguccgagugcgccugcgucaacggcuccugcuucaccgucaugaccgacggccccuccgacggccaggccuccuacaagaucuuccgcaucgagaagggcaagaucgucaaguccgucgagaugaacgcccccaacuaccacuacgaggagugcuccugcuaccccgacuccuccgagaucaccugcgucugccgcgacaacuggcacggcuccaaccgccccugggucuccuucaaccagaaccucgaguaccagaucggcuacaucugcuccggcaucuucggcgacaacccccgccccaacgacaagaccggcuccugcggccccgucuccuccaacggcgccaacggcgucaagggcuucuccuucaaguacggcaacggcgucuggaucggccgcaccaaguccaucuccucccgcaacggcuucgagaugaucugggaccccaacggcuggaccggcaccgacaacaacuucuccaucaagcaggacaucgucggcaucaacgagugguccggcuacuccggcuccuucguccagcaccccgagcucaccggccucgacugcauccgccccugcuucugggucgagcucauccgcggccgccccaaggagaacaccaucuggaccuccggcuccuccaucuccuucugcggcgucaacuccgacaccgucggcugguccuggcccgacggcgccgagcuccccuucaccaucgacaaguga

SEQ ID NO: 117299 - RNA, 1410 nt, Artificial Sequence; identical to SEQ ID NO: 112774
  derived and/or modified CDS sequence (opt2) from neuraminidase__InfluenzaA__AEV53493

SEQ ID NO: 117300 - RNA, 1410 nt, Artificial Sequence; identical to SEQ ID NO: 114236
  derived and/or modified CDS sequence (opt2) from neuraminidase__InfluenzaA__AEV53495

SEQ ID NO: 117301 - RNA, 1410 nt, Artificial Sequence
  derived and/or modified CDS sequence (opt2) from neuraminidase__InfluenzaA__AEV53497
augaaccccaaccagaagaucaucaccaucggcuccgucugcaugaccaucggcauggccaaccucauccuccagaucggcaacaucaucuccaucuggaucucccacuccauccagcucgagaaccagaaccagaucgagaccugcaaccaguccgucaucaccuacgagaacaacaccugggucaaccagaccuacgucaacaucuccaacaccaacuucgccgccggccaguccgucgucuccgucaaccucgccggcaacuccucccucugccccgucuccggcugggccaucuacuccaaggacaacuccauccgcaucggcuccaagggcgacgucuucgucauccgcgagcccuucaucuccugcuccccccucgagugccgcaccuucuuccucacccagggcgcccuccucaacgacaagcacuccaacggcaccaucaaggaccgcucccccuaccgcacccucauguccugccccaucggcgagguccccucccccuacaacucccgcuucgaguccgucgccugguccgccuccgccugccacgacggcaucaacuggcucaccaucggcaucuccggccccgacaacggcgccgucgccguccucaaguacaacggcaucaucaccgacaccaucaaguccuggcgcaacaacauccuccgcacccaggaguccgagugcgccugcgucaacggcuccugcuucaccgucaugaccgacggccccuccgacggccaggccuccuacaagaucuuccgcaucgagaagggcaagaucgucaaguccgucgagaugaacgcccccaacuaccacuacgaggagugcuccugcuaccccgacuccuccgagaucaccugcgucugccgcgacaacuggcacggcuccaaccgccccugggucuccuucaaccagaaccucgaguaccagaucggcuacaucugcuccggcaucuucggcgacaacccccgccccaacgacaagaccggcuccugcggccccgucuccuccaacggcgccaacggcgucaagggcuucuccuucaaguacggcaacggcgucuggaucggccgcaccaaguccaucuccucccgcaacggcuucgagaugaucugggaccccaacggcuggaccggcaccgacaacaacuucuccaucaagcaggacaucgucggcaucaacgagugguccggcuacuccggcuccuucguccagcaccccgagcucaccggccucgacugcauccgccccugcuucugggucgagcucauccgcggccgccccaaggagaacaccaucuggaccuccggcuccuccaucuccuucugcggcgucaacuccgacaccgucggcugguccuggcccgacggcgccgagcuccccuucaccaucgacaaguga

SEQ ID NO: 117302 - RNA, 1410 nt, Artificial Sequence; identical to SEQ ID NO: 113792
  derived and/or modified CDS sequence (opt2) from neuraminidase__InfluenzaA__AEV53499

SEQ ID NO: 117303 - RNA, 1410 nt, Artificial Sequence; identical to SEQ ID NO: 112774
  derived and/or modified CDS sequence (opt2) from neuraminidase__InfluenzaA__AEV53501

SEQ ID NO: 117304 - RNA, 1410 nt, Artificial Sequence; identical to SEQ ID NO: 112774
  derived and/or modified CDS sequence (opt2) from neuraminidase__InfluenzaA__AEV53503

SEQ ID NO: 117305 - RNA, 1410 nt, Artificial Sequence; identical to SEQ ID NO: 112774
  derived and/or modified CDS sequence (opt2) from neuraminidase__InfluenzaA__AEV53505

SEQ ID NO: 117306 - RNA, 1410 nt, Artificial Sequence; identical to SEQ ID NO: 112774
  derived and/or modified CDS sequence (opt2) from neuraminidase__InfluenzaA__AEV53507

SEQ ID NO: 117307 - RNA, 1410 nt, Artificial Sequence; identical to SEQ ID NO: 112774
  derived and/or modified CDS sequence (opt2) from neuraminidase__InfluenzaA__AEV53509

SEQ ID NO: 117308 - RNA, 1410 nt, Artificial Sequence; identical to SEQ ID NO: 114236
  derived and/or modified CDS sequence (opt2) from neuraminidase__InfluenzaA__AEV53511

SEQ ID NO: 117309 - RNA, 1410 nt, Artificial Sequence; identical to SEQ ID NO: 114236
  derived and/or modified CDS sequence (opt2) from neuraminidase__InfluenzaA__AEV53513

SEQ ID NO: 117310 - RNA, 1410 nt, Artificial Sequence; identical to SEQ ID NO: 114236
  derived and/or modified CDS sequence (opt2) from neuraminidase__InfluenzaA__AEV53515

SEQ ID NO: 117311 - RNA, 1410 nt, Artificial Sequence
  derived and/or modified CDS sequence (opt2) from neuraminidase__InfluenzaA__AEV53517
augaaccccaaccagcgcaucaucaccaucggcuccgucugcaugaccaucggcauggccaaccucauccuccagaucggcaacaucaucuccaucugggucucccacuccauccagcucggcaaccagaaccagaucgagaccugcaaccaguccgucaucaccuacgagaacaacaccugggucaaccagaccuacgucaacaucuccaacaccaacuucgccgccggccaguccgucgucuccgucaagcucgccggcaacuccucccucugccccgucuccggcugggccaucuacuccaaggacaacuccauccgcaucggcuccaagggcgacgucuucgucauccgcgagcccuucaucuccugcuccccccucgagugccgcaccuucuuccucacccagggcgcccuccucaacgacaagcacuccaacggcaccaucaaggaccgcucccccuaccgcacccucauguccugccccaucggcgagguccccucccccuacaacucccgcuucgaguccgucgccugguccgccuccgccugccacgacggcaucaacuggcucaccaucggcaucuccggccccgacaacggcgccgucgccguccucaaguacaacggcaucaucaccgacaccaucaaguccuggcgcaacaacauccuccgcacccaggaguccgagugcgccugcgucaacggcuccugcuucaccgucaugaccgacggccccuccgacggccaggccuccuacaagaucuuccgcaucgagaagggcaagaucgucaaguccgucgagaugaacgcccccaacuaccacuacgaggagugcuccugcuaccccgacuccuccgagaucaccugcgucugccgcgacaacuggcacggcuccaaccgccccugggucuccuucaaccagaaccucgaguaccagaucggcuacaucugcuccggcaucuucggcgacaacccccgccccaacgacaagaccggcuccugcggccccgucuccuccaacggcgccaacggcgucaagggcuucuccuucaaguacggcaacggcgucuggaucggccgcaccaaguccaucuccucccgcaacggcuucgagaugaucugggaccccaacggcuggaccggcaccgacaacaacuucuccaucaagcaggacaucgucggcaucaacgagugguccggcuacuccggcuccuucguccagcaccccgagcucaccggccucgacugcauccgccccugcuucugggucgagcucauccgcggccgccccaaggagaacaccaucuggaccuccggcuccuccaucuccuucugcggcgucaacuccgacaccgucggcugguccuggcccgacggcgccgagcuccccuucaccaucgacaaguga

SEQ ID NO: 117312 - RNA, 1410 nt, Artificial Sequence; identical to SEQ ID NO: 112774
  derived and/or modified CDS sequence (opt2) from neuraminidase__InfluenzaA__AEV53519

SEQ ID NO: 117313 - RNA, 1410 nt, Artificial Sequence; identical to SEQ ID NO: 114236
  derived and/or modified CDS sequence (opt2) from neuraminidase__InfluenzaA__AEV53521

SEQ ID NO: 117314 - RNA, 1410 nt, Artificial Sequence; identical to SEQ ID NO: 114062
  derived and/or modified CDS sequence (opt2) from neuraminidase__InfluenzaA__AEV53523

SEQ ID NO: 117315 - RNA, 1410 nt, Artificial Sequence; identical to SEQ ID NO: 113128
  derived and/or modified CDS sequence (opt2) from neuraminidase__InfluenzaA__AEV53525

SEQ ID NO: 117316 - RNA, 1410 nt, Artificial Sequence; identical to SEQ ID NO: 112774
  derived and/or modified CDS sequence (opt2) from neuraminidase__InfluenzaA__AEV53527

SEQ ID NO: 117317 - RNA, 1410 nt, Artificial Sequence
  derived and/or modified CDS sequence (opt2) from neuraminidase__InfluenzaA__AEV53529
augaaccccaaccagaagaucaucaccaucggcuccgucugcaugaccaucggcauggccaaccucauccuccagaucggcaacaucaucuccaucuggaucucccacuccauccagcucgagaaccagaaccagaucgagaccugcaaccaguccgucaucaccuacgagaacaacaccugggucaaccagaccuacgucaacaucuccaacaccaacuucgccgccggccaguccgucgucuccgucaagcucgccggcaacuccucccucugccccgucuccggcugggccaucuacuccaaggacaacuccauccgcaucggcuccaagggcgacgucuucgucauccgcgagcccuucaucuccugcuccccccucgagugccgcaccuucuuccucacccagggcgcccuccucaacgacaagcacuccaacggcaccaucaaggaccgcucccccuaccgcacccucauguccugccccaucggcgagguccccucccccuacaacucccgcuucgaguccgucgccugguccgccuccgccugccacgacggcaucaacuggcucaccaucggcaucuccggccccgacaacggcgccgucgccguccucaaguacaacggcaucaucaccgacaccaucaaguccuggcgcaacaacauccuccgcacccaggaguccgagugcgccugcgucaacggcuccugcuucaccgucaugaccgacggccccuccgacggccaggccuccuacaagaucuuccgcaucgagaagggcaagaucgucaaguccgucgagaugaacgcccccaacuaccacuacgaggagugcuccugcuaccccgacuccuccgagaucaccugcgucugccgcgacaacuggcacggcuccaaccgccccugggucuccuucaaccagaaccucgaguaccagaucggcuacaucugcuccggcaucuucggcgacaacccccgccccaacgacaagaccggcuccugcggccccgucuccuccaacggcgccaacggcgucaagggcuucuccuucaaguacggcaacggcgucuggaucggccgcaccaaguccaucuccucccgcaacggcuucgagaugaucugggaccccaacggcuggaccggcaccgacaacaacuucuccaucaagcaggacaucgucggcaucaaggagugguccggcuacuccggcuccuucguccagcaccccgagcucaccggccucgacugcauccgccccugcuucugggucgagcucauccgcggccgccccaaggagaacaccaucuggaccuccggcuccuccaucuccuucugcggcgucaacuccgacaccgucggcugguccuggcccgacggcgccgagcuccccuucaccaucgacaaguga

SEQ ID NO: 117318 - RNA, 1410 nt, Artificial Sequence; identical to SEQ ID NO: 114236
  derived and/or modified CDS sequence (opt2) from neuraminidase__InfluenzaA__AEV53531

SEQ ID NO: 117319 - RNA, 1410 nt, Artificial Sequence
  derived and/or modified CDS sequence (opt2) from neuraminidase__InfluenzaA__AEV53533
augaaccccaaccagaagaucaucaccaucggcuccgucugcaugaccaucggcauggccaaccucauccuccagaucggcaacaucaucuccaucuggaucucccacuccauccagcucggcaaccagaaccagaucgagaccugcaaccaguccgucaucaccuacgagaacaacaccugggucaaccagaccuacgucaacaucuccaacaccaacuucgccgccggccaguccgucgucuccgucaagcucgccggcaacuccucccucugccccgucuccggcugggccaucuacuccaaggacaacuccauccgcaucggcuccaagggcgacgucuucgucauccgcgagcccuucaucuccugcuccccccucgagugccgcaccuucuuccucacccagggcgcccuccucaacgacaagcacuccaacggcaccaucaaggaccgcucccccuaccgcacccucauguccugccccaucggcgagguccccucccccuacaacucccgcuucgaguccgucgccugguccgccuccgccugccacgacggcaucaacuggcucaccaucggcaucuccggccccgacaacggcgccgucgccguccucaaguacaacggcaucaucaccgacaccaucaaguccuggcgcaacaacauccuccgcacccaggaguccgagugcgccugcgucaacggcuccugcuucaccgucaugaccgacggccccuccgacggccaggccuccuacaagaucuuccgcaucgagaagggcaagaucgucaaguccgucgagaugaacgcccccaacuacuacuacgaggagugcuccugcuaccccgacuccuccgagaucaccugcgucugccgcgacaacuggcacggcuccaaccgccccugggucuccuucaaccagaaccucgaguaccagaucggcuacaucugcuccggcaucuucggcgacaacccccgccccaacgacaagaccggcuccugcggccccgucuccuccaacggcgccaacggcgucaagggcuucuccuucaaguacggcaacggcgucuggaucggccgcaccaaguccaucuccucccgcaacggcuucgagaugaucugggaccccaacggcuggaccggcaccgacaacaacuucuccaucaagcaggacaucgucggcaucaacgagugguccggcuacuccggcuccuucguccagcaccccgagcucaccggccucaacugcauccgccccugcuucugggucgagcucauccgcggccgccccaaggagaacaccaucuggaccuccggcuccuccaucuccuucugcggcgucaacuccgacaccgucggcugguccuggcccgacggcgccgagcuccccuucaccaucgacaaguga

SEQ ID NO: 117320 - RNA, 1410 nt, Artificial Sequence; identical to SEQ ID NO: 112774
  derived and/or modified CDS sequence (opt2) from neuraminidase__InfluenzaA__AEV53535

SEQ ID NO: 117321 - RNA, 1410 nt, Artificial Sequence; identical to SEQ ID NO: 117295
  derived and/or modified CDS sequence (opt2) from neuraminidase__InfluenzaA__AEV53537

SEQ ID NO: 117322 - RNA, 1410 nt, Artificial Sequence; identical to SEQ ID NO: 112774
  derived and/or modified CDS sequence (opt2) from neuraminidase__InfluenzaA__AEV53539

SEQ ID NO: 117323 - RNA, 1410 nt, Artificial Sequence; identical to SEQ ID NO: 116213
  derived and/or modified CDS sequence (opt2) from neuraminidase__InfluenzaA__AEV53541

SEQ ID NO: 117324 - RNA, 1410 nt, Artificial Sequence; identical to SEQ ID NO: 116213
  derived and/or modified CDS sequence (opt2) from neuraminidase__InfluenzaA__AEV53543

SEQ ID NO: 117325 - RNA, 1410 nt, Artificial Sequence; identical to SEQ ID NO: 114422
  derived and/or modified CDS sequence (opt2) from neuraminidase__InfluenzaA__AEV53545

SEQ ID NO: 117326 - RNA, 1410 nt, Artificial Sequence; identical to SEQ ID NO: 116213
  derived and/or modified CDS sequence (opt2) from neuraminidase__InfluenzaA__AEV53547

SEQ ID NO: 117327 - RNA, 1410 nt, Artificial Sequence; identical to SEQ ID NO: 116213
  derived and/or modified CDS sequence (opt2) from neuraminidase__InfluenzaA__AEV53549

SEQ ID NO: 117328 - RNA, 1410 nt, Artificial Sequence; identical to SEQ ID NO: 116213
  derived and/or modified CDS sequence (opt2) from neuraminidase__InfluenzaA__AEV53551

SEQ ID NO: 117329 - RNA, 1410 nt, Artificial Sequence; identical to SEQ ID NO: 116213
  derived and/or modified CDS sequence (opt2) from neuraminidase__InfluenzaA__AEV53553

SEQ ID NO: 117330 - RNA, 1410 nt, Artificial Sequence; identical to SEQ ID NO: 117295
  derived and/or modified CDS sequence (opt2) from neuraminidase__InfluenzaA__AEV53555

SEQ ID NO: 117331 - RNA, 1410 nt, Artificial Sequence; identical to SEQ ID NO: 113792
  derived and/or modified CDS sequence (opt2) from neuraminidase__InfluenzaA__AEV53557

SEQ ID NO: 117332 - RNA, 1410 nt, Artificial Sequence; identical to SEQ ID NO: 112774
  derived and/or modified CDS sequence (opt2) from neuraminidase__InfluenzaA__AEV53559

SEQ ID NO: 117333 - RNA, 1410 nt, Artificial Sequence; identical to SEQ ID NO: 112774
  derived and/or modified CDS sequence (opt2) from neuraminidase__InfluenzaA__AEV53561

SEQ ID NO: 117334 - RNA, 1410 nt, Artificial Sequence; identical to SEQ ID NO: 114366
  derived and/or modified CDS sequence (opt2) from neuraminidase__InfluenzaA__AEV53563

SEQ ID NO: 117335 - RNA, 1410 nt, Artificial Sequence
  derived and/or modified CDS sequence (opt2) from neuraminidase__InfluenzaA__AEV53565
augaaccccaaccagaagaucaucaccaucggcuccgucugcaugaccaucggcauggccaaccucauccuccagaucggcaacaucaucuccaucuggaucucccacuccauccagcucggcaaccagaaccagaucgagaccugcaaccaguccgucaucaccuacgagaacaacaccugggucaaccagaccuacgucaacaucuccaacaccaacuucgccgccggccaguccgucgucuccgucaagcucgccggcaacuccucccucugccccgucaacggcugggccaucuacuccaaggacaacuccauccgcaucggcuccaagggcgacgucuucgucauccgcgagcccuucaucuccugcuccccccucgagugccgcaccuucuuccucacccagggcgcccuccucaacgacaagcacuccaacggcaccaucaaggaccgcucccccuaccgcacccucauguccugccccaucggcgagguccccucccccuacaacucccgcuucgaguccgucgccugguccgccuccgccugccacgacggcaucaacuggcucaccaucggcaucuccggccccgacaacggcgccgucgccguccucaaguacaacggcaucaucaccgacaccaucaaguccuggcgcaacaacauccuccgcacccaggaguccgagugcgccugcgucaacggcuccugcuucaccgucaugaccgacggccccuccgacggccaggccuccuacaagaucuuccgcaucgagaagggcaagaucgucaaguccgucgagaugaacgcccccaacuaccacuacgaggagugcuccugcuaccccgacuccuccgagaucaccugcgucugccgcgacaacuggcacggcuccaaccgccccugggucuccuucaaccagaaccucgaguaccagaucggcuacaucugcuccggcaucuucggcgacaacccccgccccaacgacaagaccggcuccugcggccccgucuccuccaacggcgccaacggcgucaagggcuucuccuucaaguacggcaacggcgucuggaucggccgcaccaaguccaucuccucccgcaacggcuucgagaugaucugggaccccaacggcuggaccggcaccgacaacaacuucuccaucaagcaggacaucgucggcaucaacgagugguccggcuacuccggcuccuucguccagcaccccgagcucaccggccucgacugcauccgccccugcuucugggucgagcucauccgcggccgccccaaggagaacaccaucuggaccuccggcuccuccaucuccuucugcggcgucaacuccgacaccgucggcugguccuggcccgacggcgccgagcucccccucaccaucgacaaguga

SEQ ID NO: 117336 - RNA, 1410 nt, Artificial Sequence
  derived and/or modified CDS sequence (opt2) from neuraminidase__InfluenzaA__AEV53567
augaaccccaaccagaagaucaucaccaucggcuccgucugcaugaccaucggcauggccaaccucauccuccagaucggcaacaucaucuccaucuggaucucccacuccauccagcucggcaaccagaaccagaucgagaccugcaaccaguccgucaucaccuacgagaacaacaccugggucaaccagaccuacgucaacaucuccaacaccaacuucgccgccggccaguccgucgucuccgucaagcucgccggcaacuccucccucugccccgucuccggcugggccaucuacuccaaggacaacuccauccgcaucggcuccaagggcgacgucuucgucauccgcgagcccuucaucuccugcuccccccucgagugccgcaccuucuuccucacccagggcgcccuccucaacgacaagcacuccaacggcaccaucaaggaccgcucccccuaccgcacccucauguccugccccaucggcgagguccccucccccuacaacucccgcuucgaguccgucgccugguccgccuccgccugccacgacggcaucaacuggcucaccaucggcaucuccggccccgacaacggcgccgucgccguccucaaguacaacggcaucaucaccgacaccaucaaguccuggcgcaacaacauccuccgcacccaggaguccgagugcgccugcgucaacggcuccugcuucaccgucaugaccgacggccccuccgacggccaggccuccuacaagaucuuccgcaucgagaagggcaagaucgucaaguccgucgagaugaacgcccccaacuaccacuacgaggagugcuccugcuaccccgacuccuccgagaucaccugcgucugccgcgacaacuggcacggcuccaaccgccccugggucuccuucaaccagaaccucgaguaccagaucggcuacaucugcuccggcaucuucggcgacaacccccgccccaacgacaagaccggcuccugcggccccgucuccuccaacggcgccaacggcgucaagggcuucuccuucaaguacggcaacggcgccuggaucggccgcaccaaguccaucuccucccgcaacggcuucgagaugaucugggaccccaacggcuggaccgagaccgacaacaacuucuccaucaagcaggacaucgucggcaucaacgagugguccggcuacuccggcuccuucguccagcaccccgagcucaccggccucaacugcauccgccccugcuucugggucgagcucauccgcggccgccccaaggagaacaccaucuggaccuccggcuccuccaucuccuucugcggcgucaacuccgacaccgucggcugguccuggcccgacggcgccgagcuccccuucaccaucgacaaguga

SEQ ID NO: 117337 - RNA, 1410 nt, Artificial Sequence; identical to SEQ ID NO: 112774
  derived and/or modified CDS sequence (opt2) from neuraminidase__InfluenzaA__AEV53569

SEQ ID NO: 117338 - RNA, 1410 nt, Artificial Sequence; identical to SEQ ID NO: 116213
  derived and/or modified CDS sequence (opt2) from neuraminidase__InfluenzaA__AEV53571

SEQ ID NO: 117339 - RNA, 1410 nt, Artificial Sequence; identical to SEQ ID NO: 116213
  derived and/or modified CDS sequence (opt2) from neuraminidase__InfluenzaA__AEV53573

SEQ ID NO: 117340 - RNA, 1410 nt, Artificial Sequence; identical to SEQ ID NO: 114575
  derived and/or modified CDS sequence (opt2) from neuraminidase__InfluenzaA__AEV53575

SEQ ID NO: 117341 - RNA, 1410 nt, Artificial Sequence
  derived and/or modified CDS sequence (opt2) from neuraminidase__InfluenzaA__AEV53577
augaaccccaaccagaagaucaucaccaucggcuccgucugcaugaccaucggcauggccaaccucauccuccagaucggcaacaucaucuccaucuggaucucccacuccauccagcucggcaaccagaaccagaucgagaccugcaaccaguccgucaucaccuacgagaacaacaccugggucaaccagaccuacgucaacaucuccaacaccaacuucgccgccggccaguccgucgucuccgucaagcucgccggcaacuccucccucugccccgucuccggcugggccaucuacuccaaggacaacuccauccgcaucggcuccaagggcgacgucuucgucauccgcgagcccuucaucuccugcuccccccucgagugccgcaccuucuuccucacccagggcgcccuccucaacgacaagcacuccaacggcaccaucaaggaccgcucccccuaccgcacccucauguccugccccaucggcgagguccccucccccuacaacucccgcuucgaguccgucgccugguccgccuccgccugccacgacggcaucaacuggcucaccaucggcaucuccggccccgacaacggcgccgucgccguccucaaguacaacggcaucaucaccgacaccaucaaguccuggcgcaacaacauccuccgcacccaggaguccgagugcgccugcgucaacggcuccugcuucaccgucaugaccgacggccccuccgacggccaggccuccuacaagaucuuccgcaucgagaagggcaagaucgucaaguccgucgagaugaacgcccccaacuaccacuacgaggagugcuccugcuaccccgacuccuccgagaucaccugcgucugccgcgacaacuggcacggcuccaaccgccccugggucuccuucaaccagaaccucgaguaccagaucggcuacaucugcuccggcaucuucggcgacaacccccgccccaacgacaagaccggcuccugcggccccgucuccuccaacggcgccaacggcgucaagggcuucuccuucaaguacggcaacggcgucuggaucggccgcaccaaguccaucuccucccgcaacggcuucgagaugaucugggaccccaacggcuggaccggcaccgacaacaacuucuccaucaagcaggacaucgucggcaucaacgagugguccggcuacuccggcuccuucguccagcagcccgagcucaccggccucgacugcauccgccccugcuucugggucgagcucauccgcggccgccccaaggagaacaccaucuggaccuccggcuccuccaucuccuucugcggcgucaacuccgacaccgucggcugguccuggcccgacggcgccgagcuccccuucaccaucgacaaguga

SEQ ID NO: 117342 - RNA, 1410 nt, Artificial Sequence; identical to SEQ ID NO: 117280
  derived and/or modified CDS sequence (opt2) from neuraminidase__InfluenzaA__AEV53579

SEQ ID NO: 117343 - RNA, 1410 nt, Artificial Sequence; identical to SEQ ID NO: 114575
  derived and/or modified CDS sequence (opt2) from neuraminidase__InfluenzaA__AEV53581

SEQ ID NO: 117344 - RNA, 1410 nt, Artificial Sequence; identical to SEQ ID NO: 114236
  derived and/or modified CDS sequence (opt2) from neuraminidase__InfluenzaA__AEV53583

SEQ ID NO: 117345 - RNA, 1410 nt, Artificial Sequence; identical to SEQ ID NO: 114236
  derived and/or modified CDS sequence (opt2) from neuraminidase__InfluenzaA__AEV53585

SEQ ID NO: 117346 - RNA, 1410 nt, Artificial Sequence
  derived and/or modified CDS sequence (opt2) from neuraminidase__InfluenzaA__AEV76877
augaaccccaaccagaagaucaucaccaucggcuccgucugcaugaccaucggcauggccaaccucauccuccagaucggcaacaucaucuccaucuggaucucccacuccauccagcucggcaaccagucccagaucgagaccugcaaccaguccgucaucaccuacgagaacaacaccugggucaaccagaccuacgucaacaucuccaccaccaacuucgccgccggccaguccgucgucuccgucaagcucgccggcaacuccucccucugccccgucuccggcugggccaucuacuccaaggacaacuccauccgcaucggcuccaagggcgacgucuucgucauccgcgagcccuucaucuccugcuccccccucgagugccgcaccuucuuccucacccagggcgcccuccucaacgacaagcacuccaacggcaccaucaaggaccgcucccccuaccgcacccucauguccugccccaucggcgagguccccucccccuacaacucccgcuucgaguccgucgccugguccgccuccgccugccacgacggcaucaacuggcucaccaucggcaucuccggccccgacaacggcgccgucgccguccucaaguacaacggcaucaucaccgacaccaucaaguccuggcgcaacaacauccuccgcacccaggaguccgagugcgccugcgucaacggcuccugcuucaccaucaugaccgacggccccuccgacggccaggccuccuacaagaucuuccgcaucgagaagggcaagaucgucaaguccgucgagaugaacgcccccaacuaccacuacgaggagugcuccugcuaccccgacuccuccgagaucaccugcgucugccgcgacaacuggcacggcuccaaccgccccugggucuccuucaaccagaaccucgaguaccagaucggcuacaucugcuccggcaucuucggcgacaacccccgccccaacgacaagaccggcuccugcggccccgucuccuccaacggcgccaacggcgucaagggcuucuccuucaaguacggcaacggcgucuggaucggccgcaccaaguccaucuccucccgcaagggcuucgagaugaucugggaccccaacggcuggaccggcaccgacaacaacuucuccaucaagcaggacaucgucggcaucaacgagugguccggcuacuccggcuccuucguccagcaccccgagcucaccggccucgacugcauccgccccugcuucugggucgagcucauccgcggccgccccaaggagaacaccaucuggaccuccggcuccuccaucuccuucugcggcgucaacuccgacaccgucggcugguccuggcccgacggcgccgagcuccccuucaccaucgacaaguga

SEQ ID NO: 117347 - RNA, 1410 nt, Artificial Sequence; identical to SEQ ID NO: 112774
  derived and/or modified CDS sequence (opt2) from neuraminidase__InfluenzaA__AEW10576

SEQ ID NO: 117348 - RNA, 1410 nt, Artificial Sequence; identical to SEQ ID NO: 112774
  derived and/or modified CDS sequence (opt2) from neuraminidase__InfluenzaA__AEW10586

SEQ ID NO: 117349 - RNA, 1410 nt, Artificial Sequence; identical to SEQ ID NO: 112774
  derived and/or modified CDS sequence (opt2) from neuraminidase__InfluenzaA__AEW10596

SEQ ID NO: 117350 - RNA, 1410 nt, Artificial Sequence; identical to SEQ ID NO: 112774
  derived and/or modified CDS sequence (opt2) from neuraminidase__InfluenzaA__AEW10606

SEQ ID NO: 117351 - RNA, 1410 nt, Artificial Sequence; identical to SEQ ID NO: 113661
  derived and/or modified CDS sequence (opt2) from neuraminidase__InfluenzaA__AEW10616

SEQ ID NO: 117352 - RNA, 1410 nt, Artificial Sequence
  derived and/or modified CDS sequence (opt2) from neuraminidase__InfluenzaA__AEW10626
augaaccccaaccagaagaucaucaccaucggcuccgucugcaugaccaucggcauggccaaccucauccuccagaucggcaacaucaucuccaucuggaucucccacuccauccagcucggcaaccagaaccagaucgagaccugcaaccaguccgucaucaccuacgagaacaacaccugggucaaccagaccuacgucaacaucuccaacaccaacuucgccgccggccaguccgucgucuccgucaagcucgccggcaacuccucccucugccccgucuccggcugggccaucuacuccaaggacaacuccauccgcaucggcuccaagggcgacgucuucgucauccgcgagcccuucaucuccugcuccccccucgagugccgcaccuucuuccucacccagggcgcccuccucaacgacaagcacuccaacggcaccaucaaggaccgcucccccuaccgcacccucauguccugccccaucggcgagguccccucccccuacaacucccgcuucgaguccgucgccugguccgccuccgccugccacgacggcaucaacuggcucaccaucggcaucuccggccccgacaacggcgccauggccguccucaaguacaacggcaucaucaccgacaccaucaaguccuggcgcaacaacauccuccgcacccaggaguccgagugcgccugcgucaacggcuccugcuucaccgucaugaccgacggccccuccgacggccaggccuccuacaagaucuuccgcaucgagaagggcaagaucgucaaguccgucgagaugaacgcccccaacuaccacuacgaggagugcuccugcuaccccgacuccuccgagaucaccugcgucugccgcgacaacuggcacggcuccaaccgccccugggucuccuucaaccagaaccucgaguaccagaucggcuacaucugcuccggcaucuucggcgacaacccccgccccaacgacaagaccggcuccugcggccccgucuccuccaacggcgccaacggcgucaagggcuucuccuucaaguacggcaacggcgucuggaucggccgcaccaaguccaucuccucccgcaacggcuucgagaugaucugggaccccaacggcuggaccggcaccgacaacaacuucuccaucaagcaggacaucgucggcaucaacgagugguccggcuacuccggcuccuucguccagcaccccgagcucaccggccucgacugcauccgccccugcuucugggucgagcucauccgcggccgccccaaggagaacaccaucuggaccuccggcuccuccaucuccuucugcggcgucaacuccgacaccgucggcugguccuggcccgacggcgccgagcuccccuucaccaucgacaaguga

SEQ ID NO: 117353 - RNA, 1410 nt, Artificial Sequence; identical to SEQ ID NO: 112774
  derived and/or modified CDS sequence (opt2) from neuraminidase__InfluenzaA__AEW10636

SEQ ID NO: 117354 - RNA, 1410 nt, Artificial Sequence; identical to SEQ ID NO: 112764
  derived and/or modified CDS sequence (opt2) from neuraminidase__InfluenzaA__AEW10646

SEQ ID NO: 117355 - RNA, 1410 nt, Artificial Sequence; identical to SEQ ID NO: 112774
  derived and/or modified CDS sequence (opt2) from neuraminidase__InfluenzaA__AEW10656

SEQ ID NO: 117356 - RNA, 1410 nt, Artificial Sequence; identical to SEQ ID NO: 112774
  derived and/or modified CDS sequence (opt2) from neuraminidase__InfluenzaA__AEW10666

SEQ ID NO: 117357 - RNA, 1410 nt, Artificial Sequence; identical to SEQ ID NO: 112774
  derived and/or modified CDS sequence (opt2) from neuraminidase__InfluenzaA__AEW10676

SEQ ID NO: 117358 - RNA, 1410 nt, Artificial Sequence; identical to SEQ ID NO: 112774
  derived and/or modified CDS sequence (opt2) from neuraminidase__InfluenzaA__AEW10686

SEQ ID NO: 117359 - RNA, 1410 nt, Artificial Sequence; identical to SEQ ID NO: 112774
  derived and/or modified CDS sequence (opt2) from neuraminidase__InfluenzaA__AEW10696

SEQ ID NO: 117360 - RNA, 1410 nt, Artificial Sequence; identical to SEQ ID NO: 112774
  derived and/or modified CDS sequence (opt2) from neuraminidase__InfluenzaA__AEW10706

SEQ ID NO: 117361 - RNA, 1410 nt, Artificial Sequence; identical to SEQ ID NO: 112764
  derived and/or modified CDS sequence (opt2) from neuraminidase__InfluenzaA__AEW10716

SEQ ID NO: 117362 - RNA, 1410 nt, Artificial Sequence; identical to SEQ ID NO: 112774
  derived and/or modified CDS sequence (opt2) from neuraminidase__InfluenzaA__AEW10726

SEQ ID NO: 117363 - RNA, 1410 nt, Artificial Sequence; identical to SEQ ID NO: 112774
  derived and/or modified CDS sequence (opt2) from neuraminidase__InfluenzaA__AEW10736

SEQ ID NO: 117364 - RNA, 1410 nt, Artificial Sequence; identical to SEQ ID NO: 112764
  derived and/or modified CDS sequence (opt2) from neuraminidase__InfluenzaA__AEW10746

SEQ ID NO: 117365 - RNA, 1410 nt, Artificial Sequence; identical to SEQ ID NO: 112764
  derived and/or modified CDS sequence (opt2) from neuraminidase__InfluenzaA__AEW10756

SEQ ID NO: 117366 - RNA, 1410 nt, Artificial Sequence; identical to SEQ ID NO: 112764
  derived and/or modified CDS sequence (opt2) from neuraminidase__InfluenzaA__AEW10766

SEQ ID NO: 117367 - RNA, 1410 nt, Artificial Sequence; identical to SEQ ID NO: 112764
  derived and/or modified CDS sequence (opt2) from neuraminidase__InfluenzaA__AEW10776

SEQ ID NO: 117368 - RNA, 1410 nt, Artificial Sequence; identical to SEQ ID NO: 112764
  derived and/or modified CDS sequence (opt2) from neuraminidase__InfluenzaA__AEW10786

SEQ ID NO: 117369 - RNA, 1410 nt, Artificial Sequence; identical to SEQ ID NO: 112764
  derived and/or modified CDS sequence (opt2) from neuraminidase__InfluenzaA__AEW10796

SEQ ID NO: 117370 - RNA, 1410 nt, Artificial Sequence; identical to SEQ ID NO: 112764
  derived and/or modified CDS sequence (opt2) from neuraminidase__InfluenzaA__AEW10806

SEQ ID NO: 117371 - RNA, 1410 nt, Artificial Sequence; identical to SEQ ID NO: 112764
  derived and/or modified CDS sequence (opt2) from neuraminidase__InfluenzaA__AEW10816

SEQ ID NO: 117372 - RNA, 1410 nt, Artificial Sequence; identical to SEQ ID NO: 112774
  derived and/or modified CDS sequence (opt2) from neuraminidase__InfluenzaA__AEW10826

SEQ ID NO: 117373 - RNA, 1410 nt, Artificial Sequence; identical to SEQ ID NO: 112764
  derived and/or modified CDS sequence (opt2) from neuraminidase__InfluenzaA__AEW10836

SEQ ID NO: 117374 - RNA, 1410 nt, Artificial Sequence; identical to SEQ ID NO: 112764
  derived and/or modified CDS sequence (opt2) from neuraminidase__InfluenzaA__AEW10846

SEQ ID NO: 117375 - RNA, 1410 nt, Artificial Sequence; identical to SEQ ID NO: 112764
  derived and/or modified CDS sequence (opt2) from neuraminidase__InfluenzaA__AEW10856

SEQ ID NO: 117376 - RNA, 1410 nt, Artificial Sequence; identical to SEQ ID NO: 112764
  derived and/or modified CDS sequence (opt2) from neuraminidase__InfluenzaA__AEW10866

SEQ ID NO: 117377 - RNA, 1410 nt, Artificial Sequence; identical to SEQ ID NO: 112764
  derived and/or modified CDS sequence (opt2) from neuraminidase__InfluenzaA__AEW10876

SEQ ID NO: 117378 - RNA, 1410 nt, Artificial Sequence; identical to SEQ ID NO: 112764
  derived and/or modified CDS sequence (opt2) from neuraminidase__InfluenzaA__AEW10886

SEQ ID NO: 117379 - RNA, 1410 nt, Artificial Sequence; identical to SEQ ID NO: 112764
  derived and/or modified CDS sequence (opt2) from neuraminidase__InfluenzaA__AEW10896

SEQ ID NO: 117380 - RNA, 1410 nt, Artificial Sequence; identical to SEQ ID NO: 112764
  derived and/or modified CDS sequence (opt2) from neuraminidase__InfluenzaA__AEW10906

SEQ ID NO: 117381 - RNA, 1410 nt, Artificial Sequence; identical to SEQ ID NO: 112764
  derived and/or modified CDS sequence (opt2) from neuraminidase__InfluenzaA__AEW10916

SEQ ID NO: 117382 - RNA, 1410 nt, Artificial Sequence
  derived and/or modified CDS sequence (opt2) from neuraminidase__InfluenzaA__AEW10926
augaaccccaaccagaagaucaucaccaucggcuccgucugcaugaccaucggcauggccaaccucauccuccagaucggcaacaucaucuccaucuggaucucccacuccauccagcucggcaaccagaaccagaucgagaccugcaaccaguccgucaucaccuacgagaacaacaccugggucaaccagaccuacgucaacaucuccaacaccaacuucgccgccggccaguccgucgucuccgucaagcucgccggcaacuccucccucugccccgucuccggcugggccaucuacuccaaggacaacuccauccgcaucggcuccaagggcgacgucuucaucauccgcgagcccuucaucuccugcuccccccucgagugccgcaccuucuuccucacccagggcgcccuccucaacgacaagcacuccaacggcaccaucaaggaccgcucccccuaccgcacccucauguccugccccaucggcgagguccccucccccuacaacucccgcuucgaguccgucgccugguccgccuccgccugccacgacggcaucaacuggcucaccaucggcaucuccggccccgacaacggcgccgucgccguccucaaguacaacggcaucaucaccgacaccaucaaguccuggcgcaacaacauccuccgcacccaggaguccgagugcgccugcgucaacggcuccugcuucaccgucaugaccgacggccccuccgacggccaggccuccuacaagaucuuccgcaucgagaagggcaagaucgucaaguccgucgagaugaacgcccccaacuaccacuacgaggagugcuccugcuaccccgacuccuccgagaucaccugcgucugccgcgacaacuggcacggcuccaaccgccccugggucuccuucaaccagaaccucgaguaccagaucggcuacaucugcuccggcaucuucggcgacaacccccgccccaacgacaagaccggcuccugcggccccgucuccuccaacggcgccaacggcgucaagggcuucuccuucaaguacggcaacggcgucuggaucggccgcaccaaguccaucuccucccgcaacggcuucgagaugaucugggaccccaacggcuggaccggcaccgacaacaacuucuccaucaagcaggacaucgucggcaucaacgagugguccggcuacuccggcuccuucguccagcaccccgagcucaccggccucgacugcauccgccccugcuucugggucgagcucauccgcggccgccccaaggagaacaccaucuggaccuccggcuccuccaucuccuucugcggcgucaacuccgacaccgucggcugguccuggcccgacggcgccgagcuccccuucaccaucgacaaguga

SEQ ID NO: 117383 - RNA, 1410 nt, Artificial Sequence; identical to SEQ ID NO: 112764
  derived and/or modified CDS sequence (opt2) from neuraminidase__InfluenzaA__AEW10936

SEQ ID NO: 117384 - RNA, 1410 nt, Artificial Sequence; identical to SEQ ID NO: 112764
  derived and/or modified CDS sequence (opt2) from neuraminidase__InfluenzaA__AEW10946

SEQ ID NO: 117385 - RNA, 1410 nt, Artificial Sequence; identical to SEQ ID NO: 112774
  derived and/or modified CDS sequence (opt2) from neuraminidase__InfluenzaA__AEW10956

SEQ ID NO: 117386 - RNA, 1410 nt, Artificial Sequence; identical to SEQ ID NO: 112774
  derived and/or modified CDS sequence (opt2) from neuraminidase__InfluenzaA__AEW10966

SEQ ID NO: 117387 - RNA, 1410 nt, Artificial Sequence; identical to SEQ ID NO: 112764
  derived and/or modified CDS sequence (opt2) from neuraminidase__InfluenzaA__AEW10976

SEQ ID NO: 117388 - RNA, 1410 nt, Artificial Sequence; identical to SEQ ID NO: 112774
  derived and/or modified CDS sequence (opt2) from neuraminidase__InfluenzaA__AEW10986

SEQ ID NO: 117389 - RNA, 1410 nt, Artificial Sequence; identical to SEQ ID NO: 112774
  derived and/or modified CDS sequence (opt2) from neuraminidase__InfluenzaA__AEW10996

SEQ ID NO: 117390 - RNA, 1410 nt, Artificial Sequence; identical to SEQ ID NO: 112774
  derived and/or modified CDS sequence (opt2) from neuraminidase__InfluenzaA__AEW11006

SEQ ID NO: 117391 - RNA, 1410 nt, Artificial Sequence; identical to SEQ ID NO: 112774
  derived and/or modified CDS sequence (opt2) from neuraminidase__InfluenzaA__AEW11016

SEQ ID NO: 117392 - RNA, 1410 nt, Artificial Sequence; identical to SEQ ID NO: 112774
  derived and/or modified CDS sequence (opt2) from neuraminidase__InfluenzaA__AEW11026

SEQ ID NO: 117393 - RNA, 1410 nt, Artificial Sequence; identical to SEQ ID NO: 112774
  derived and/or modified CDS sequence (opt2) from neuraminidase__InfluenzaA__AEW11036

SEQ ID NO: 117394 - RNA, 1410 nt, Artificial Sequence; identical to SEQ ID NO: 112764
  derived and/or modified CDS sequence (opt2) from neuraminidase__InfluenzaA__AEW11046

SEQ ID NO: 117395 - RNA, 1410 nt, Artificial Sequence; identical to SEQ ID NO: 112774
  derived and/or modified CDS sequence (opt2) from neuraminidase__InfluenzaA__AEW11056

SEQ ID NO: 117396 - RNA, 1410 nt, Artificial Sequence; identical to SEQ ID NO: 113578
  derived and/or modified CDS sequence (opt2) from neuraminidase__InfluenzaA__AEW11066

SEQ ID NO: 117397 - RNA, 1410 nt, Artificial Sequence; identical to SEQ ID NO: 113578
  derived and/or modified CDS sequence (opt2) from neuraminidase__InfluenzaA__AEW11076

SEQ ID NO: 117398 - RNA, 1410 nt, Artificial Sequence; identical to SEQ ID NO: 113578
  derived and/or modified CDS sequence (opt2) from neuraminidase__InfluenzaA__AEW11086

SEQ ID NO: 117399 - RNA, 1410 nt, Artificial Sequence; identical to SEQ ID NO: 113578
  derived and/or modified CDS sequence (opt2) from neuraminidase__InfluenzaA__AEW11096

SEQ ID NO: 117400 - RNA, 1410 nt, Artificial Sequence; identical to SEQ ID NO: 113578
  derived and/or modified CDS sequence (opt2) from neuraminidase__InfluenzaA__AEW11106

SEQ ID NO: 117401 - RNA, 1410 nt, Artificial Sequence; identical to SEQ ID NO: 112774
  derived and/or modified CDS sequence (opt2) from neuraminidase__InfluenzaA__AEW11116

SEQ ID NO: 117402 - RNA, 1410 nt, Artificial Sequence; identical to SEQ ID NO: 113578
  derived and/or modified CDS sequence (opt2) from neuraminidase__InfluenzaA__AEW11126

SEQ ID NO: 117403 - RNA, 1410 nt, Artificial Sequence; identical to SEQ ID NO: 113482
  derived and/or modified CDS sequence (opt2) from neuraminidase__InfluenzaA__AEW11136

SEQ ID NO: 117404 - RNA, 1410 nt, Artificial Sequence; identical to SEQ ID NO: 112774
  derived and/or modified CDS sequence (opt2) from neuraminidase__InfluenzaA__AEW11146

SEQ ID NO: 117405 - RNA, 1410 nt, Artificial Sequence; identical to SEQ ID NO: 112774
  derived and/or modified CDS sequence (opt2) from neuraminidase__InfluenzaA__AEW11156

SEQ ID NO: 117406 - RNA, 1410 nt, Artificial Sequence; identical to SEQ ID NO: 113578
  derived and/or modified CDS sequence (opt2) from neuraminidase__InfluenzaA__AEW11166

SEQ ID NO: 117407 - RNA, 1410 nt, Artificial Sequence; identical to SEQ ID NO: 113578
  derived and/or modified CDS sequence (opt2) from neuraminidase__InfluenzaA__AEW11176

SEQ ID NO: 117408 - RNA, 1410 nt, Artificial Sequence; identical to SEQ ID NO: 112774
  derived and/or modified CDS sequence (opt2) from neuraminidase__InfluenzaA__AEW11186

SEQ ID NO: 117409 - RNA, 1410 nt, Artificial Sequence; identical to SEQ ID NO: 113578
  derived and/or modified CDS sequence (opt2) from neuraminidase__InfluenzaA__AEW11196

SEQ ID NO: 117410 - RNA, 1410 nt, Artificial Sequence; identical to SEQ ID NO: 112774
  derived and/or modified CDS sequence (opt2) from neuraminidase__InfluenzaA__AEW11206

SEQ ID NO: 117411 - RNA, 1410 nt, Artificial Sequence; identical to SEQ ID NO: 112774
  derived and/or modified CDS sequence (opt2) from neuraminidase__InfluenzaA__AEW11216

SEQ ID NO: 117412 - RNA, 1410 nt, Artificial Sequence; identical to SEQ ID NO: 113482
  derived and/or modified CDS sequence (opt2) from neuraminidase__InfluenzaA__AEW11226

SEQ ID NO: 117413 - RNA, 1410 nt, Artificial Sequence; identical to SEQ ID NO: 112774
  derived and/or modified CDS sequence (opt2) from neuraminidase__InfluenzaA__AEW11236

SEQ ID NO: 117414 - RNA, 1410 nt, Artificial Sequence; identical to SEQ ID NO: 112774
  derived and/or modified CDS sequence (opt2) from neuraminidase__InfluenzaA__AEW11246

SEQ ID NO: 117415 - RNA, 1410 nt, Artificial Sequence; identical to SEQ ID NO: 113578
  derived and/or modified CDS sequence (opt2) from neuraminidase__InfluenzaA__AEW11255

SEQ ID NO: 117416 - RNA, 1410 nt, Artificial Sequence; identical to SEQ ID NO: 113578
  derived and/or modified CDS sequence (opt2) from neuraminidase__InfluenzaA__AEW11265

SEQ ID NO: 117417 - RNA, 1410 nt, Artificial Sequence; identical to SEQ ID NO: 112774
  derived and/or modified CDS sequence (opt2) from neuraminidase__InfluenzaA__AEW11275

SEQ ID NO: 117418 - RNA, 1410 nt, Artificial Sequence
  derived and/or modified CDS sequence (opt2) from neuraminidase__InfluenzaA__AEW11285
augaaccccaaccagaagaucaucaccaucggcuccgucugcaugaccaucggcauggccaaccucauccuccagaucggcaacaucaucuccaucuggaucucccacuccauccagcucggcaaccagaaccagaucgagaccugcaaccaguccgucaucaccuacgagaacaacaccugggucaaccagaccuacgucaacaucuccaacaccaacuucgccgccggccaguccgucgucuccgucaagcucgccggcaacuccucccucugccccgucuccggcugggccaucuacuccaaggacaacuccguccgcaucggcuccaagggcgacgucuucgucauccgcgagcccuucaucuccugcuccccccucgagugccgcaccuucuuccucacccagggcgcccuccucaacgacaagcacuccaacggcaccaucaaggaccgcucccccuaccgcacccucauguccugccccaucggcgagguccccucccccuacaacucccgcuucgaguccgucgccugguccgccuccgccugccacgacggcaucaacuggcucaccaucggcaucuccggccccgacaacggcgccgucgccguccucaaguacaacggcaucaucaccgacaccaucaaguccuggcgcaacaacauccuccgcacccaggaguccgagugcgccugcgucaacggcuccugcuucaccgucaugaccgacggccccuccaacggccaggccuccuacaagaucuuccgcaucgagaagggcaagaucgucaaguccgucgagaugaacgcccccaacuaccacuacgaggagugcuccugcuaccccgacuccuccgagaucaccugcgucugccgcgacaacuggcacggcuccaaccgccccugggucuccuucaaccagaaccucgaguaccagaucggcuacaucugcuccggcaucuucggcgacaacccccgccccaacgacaagaccggcuccugcggccccgucuccuccaacggcgccaacggcgucaagggcuucuccuucaaguacggcaacggcgucuggaucggccgcaccaaguccaucuccucccgcaacggcuucgagaugaucugggaccccaacggcuggaccggcaccgacaacaacuucuccaucaagcaggacaucgucggcaucaacgagugguccggcuacuccggcuccuucguccagaaccccgagcucaccggccucgacugcauccgccccugcuucugggucgagcucauccgcggccgccccaaggagaacaccaucuggaccuccggcuccuccaucuccuucugcggcgucaacuccgacaccgucggcugguccuggcccgacggcgccgagcuccccuucaccaucgacaaguga

SEQ ID NO: 117419 - RNA, 1410 nt, Artificial Sequence; identical to SEQ ID NO: 113578
  derived and/or modified CDS sequence (opt2) from neuraminidase__InfluenzaA__AEW11295

SEQ ID NO: 117420 - RNA, 1410 nt, Artificial Sequence; identical to SEQ ID NO: 112774
  derived and/or modified CDS sequence (opt2) from neuraminidase__InfluenzaA__AEW11305

SEQ ID NO: 117421 - RNA, 1410 nt, Artificial Sequence; identical to SEQ ID NO: 113578
  derived and/or modified CDS sequence (opt2) from neuraminidase__InfluenzaA__AEW11315

SEQ ID NO: 117422 - RNA, 1410 nt, Artificial Sequence; identical to SEQ ID NO: 112774
  derived and/or modified CDS sequence (opt2) from neuraminidase__InfluenzaA__AEW11325

SEQ ID NO: 117423 - RNA, 1410 nt, Artificial Sequence; identical to SEQ ID NO: 112774
  derived and/or modified CDS sequence (opt2) from neuraminidase__InfluenzaA__AEW25299

SEQ ID NO: 117424 - RNA, 1410 nt, Artificial Sequence; identical to SEQ ID NO: 112774
  derived and/or modified CDS sequence (opt2) from neuraminidase__InfluenzaA__AEW25308

SEQ ID NO: 117425 - RNA, 1410 nt, Artificial Sequence; identical to SEQ ID NO: 113847
  derived and/or modified CDS sequence (opt2) from neuraminidase__InfluenzaA__AEW25317

SEQ ID NO: 117426 - RNA, 1410 nt, Artificial Sequence; identical to SEQ ID NO: 112774
  derived and/or modified CDS sequence (opt2) from neuraminidase__InfluenzaA__AEW25324

SEQ ID NO: 117427 - RNA, 1410 nt, Artificial Sequence
  derived and/or modified CDS sequence (opt2) from neuraminidase__InfluenzaA__AEW25327
augaaccccaaccagaagaucaucaccaucggcuccgucugcaugaccaucggcauggccaaccucauccuccagaucggcaacaucaucuccaucuggaucucccacuccauccagcucggcaaccagaaccagaucgagaccugcaaccaguccgucaucaccuacgagaacaacaccugggucaaccagaccuacgucaacaucuccaacaccaacuucgccgccggccaguccgucgucuccgucaagcucgccggcaacuccucccucugccccgucuccggcugggccaucuacuccaaggacaacuccauccgcaucggcuccaagggcgacgucuucgucauccgcgagcccuucaucuccugcuccccccucgagugccgcaccuucuuccucacccagggcgcccuccucaacgacaagcacuccaacggcaccaucaaggaccgcucccccuaccgcacccucauguccugccccaucggcgagguccccccccccuacaacucccgcuucgaguccgucgccugguccgccuccgccugccacgacggcaucaacuggcucaccaucggcaucuccggccccgacaacggcgccgucgccguccucaaguacaacggcaucaucaccgacaccaucaaguccuggcgcaacaacauccuccgcacccaggaguccgagugcgccugcgucaacggcuccugcuucaccgucaugaccgacggccccuccgacggccaggccuccuacaagaucuuccgcaucgagaagggcaagaucgucaaguccgucgagaugaacgcccccaacuaccacugcgaggagugcuccugcuaccccgacuccuccgagaucaccugcgucugccgcgacaacuggcacggcuccaaccgccccugggucuccuucaaccagaaccucgaguaccagaucggcuacaucugcuccggcaucuucggcgacaacccccgccccaacgacaagaccggcuccugcggccccgucuccuccaacggcgccaacggcgucaagggcuucuccuucaaguacggcaacggcgucuggaucggccgcaccaaguccaucuccucccgcaacggcuucgagaugaucugggaccccaacggcuggaccggcaccgacaacaacuucuccaucaagcaggacaucgucggcaucaacgagugguccggcuacuccggcuccuucguccagcaccccgagcucaccggccucgacugcauccgccccugcuucugggucgagcucauccgcggccgccccaaggagaacaccaucuggaccuccggcuccuccaucuccuucugcggcgucaacuccgacaccgucggcugguccuggcccgacggcgccgagcuccccuucaccaucgacaaguga

SEQ ID NO: 117428 - RNA, 1410 nt, Artificial Sequence
  derived and/or modified CDS sequence (opt2) from neuraminidase__InfluenzaA__AEW25333
augaaccccaaccagaagaucaucaccaucggcuccgucugcaugaccaucggcauggccaaccucauccuccagaucggcaacaucaucuccaucuggaucucccacuccauccagcucggcaaccagaaccagaucgagaccugcaaccaguccgucaucaccuacgagaacaacaccugggucaaccacaccuacgucaacaucuccaacaccaacuucgccgccggccaguccgucgucuccgucaagcucgccggcaacuccucccucugccccgucuccggcugggccaucuacuccaaggacaacuccauccgcaucggcuccaagggcgacgucuucgucauccgcgagcccuucaucuccugcuccccccucgagugccgcaccuucuuccucacccagggcgcccuccucaacgacaagcacuccaacggcaccaucaaggaccgcucccccuaccgcacccucauguccugccccaucggcgagguccccucccccuacaacucccgcuucgaguccgucgccugguccgccuccgccugccacgacggcaucaacuggcucaccaucggcaucuccggccccgacaacggcgccgucgccguccucaaguacaacggcaucaucaccgacaccaucaaguccuggcgcaacaacauccuccgcacccaggaguccgagugcgccugcgucaacggcuccugcuucaccgucaugaccgacggccccuccgacggccaggccuccuacaagaucuuccgcaucgagaagggcaagaucgucaaguccgucgagaugaacgcccccaacuaccacuacgaggagugcuccugcuaccccgacuccuccgagaucaccugcgucugccgcgacaacuggcacggcuccaaccgccccugggucuccuucaaccagaaccucgaguaccagaucggcuacaucugcuccggcaucuucggcgacaacccccgccccaacgacaagaccggcuccugcggccccgucuccuccaacggcgccaacggcgucaagggcuucuccuucaaguacggcaacggcgucugggucggccgcaccaaguccaucuccucccgcaacggcuucgagaugaucugggaccccaacggcuggaccggcaccgacaacaacuucuccaucaagcaggacaucgucggcaucaacgagugguccggcuacuccggcuccuucguccagcaccccgagcucaccggccucgacugcauccgccacugcuucugggucgagcucauccgcggccgccccaaggagaacaccaucuggaccuccggcuccuccaucuccuucugcggcgucaacuccgacaccgucggcugguccuggcccgacggcgccgagcuccccuucaccaucgacaaguga

SEQ ID NO: 117429 - RNA, 1410 nt, Artificial Sequence
  derived and/or modified CDS sequence (opt2) from neuraminidase__InfluenzaA__AEW25338
augaaccccaaccagaagaucaucaccaucggcuccgucugcauggccaucggcauggccaaccucauccuccagaucggcaacaucaucuccaucuggaucucccacuccauccagcucggcaaccagaaccagaucgagaccugcaaccaguccgucaucaccuacgagaacaacaccugggucaaccagaccuacgucaacaucuccaacaccaacuucgccgccggccaguccgucgucuccgucaagcucgccggcaacuccucccucugccccgucuccggcugggccaucuacuccaaggacaacuccauccgcaucggcuccaagggcgacgucuucgucauccgcgagcccuucaucuccugcuccccccucgagugccgcaccuucuuccucacccagggcgcccuccucaacgacaagcacuccaacggcaccaucaaggaccgcucccccuaccgcacccucauguccugccccaucggcgagguccccucccccuacaacucccgcuucgaguccgucgccugguccgccuccgccugccacgacggcaucaacuggcucaccaucggcaucuccggccccgacaacggcgccgucgccguccucaaguacaacggcaucaucaccgacaccaucaaguccuggcgcaacaacauccuccgcacccaggaguccgagugcgccugcgucaacggcuccugcuucaccgucaugaccgacggccccuccgacggccaggccuccuacaagaucuuccgcaucgagaagggcaagaucgucaaguccgucgagaugaacgcccccaacuaccacuacgaggagugcuccugcuaccccgacuccuccgagaucaccugcgucugccgcgacaacuggcacggcuccaaccgccccugggucuccuucaaccagaaccucgaguaccagaucggcuacauccgcuccggcaucuucggcgacaacccccgccccaacgacaagaccggcuccugcggccccgucuccuccaacggcgccaacggcgucaagggcuucuccuucaaguacggcaacggcgucuggaucggccgcaccaaguccaucuccucccgcaacggcuucgagaugaucugggaccccaacggcuggaccggcaccgacaacaacuucuccaucaagcaggacaucgucggcaucaacgagugguccggcuacuccggcuccuucguccagcaccccgagcucaccggccucgacugcauccgccccugcuucugggucgagcucauccgcggccgccccaaggagaacaccaucuggaccuccggcuccuccaucuccuucugcggcgucaacuccgacaccgucggcugguccuggcccgacggcgccgagcuccccuucaccaucgacaaguga

SEQ ID NO: 117430 - RNA, 1410 nt, Artificial Sequence
  derived and/or modified CDS sequence (opt2) from neuraminidase__InfluenzaA__AEW25343
augaaccccaaccagaagaucaucaccaucggcuccgucugcaugaccaucggcauggccaaccucauccuccagaucggcaacaucaucuccaucuggaucucccacuccauccagcucggcaaccagaaccagaucgagaccugcaaccaguccgucaucaccuacgagaacaacaccugggucaaccagaccuacgucaacaucuccaacaccaacuucgccgccggccaguccgucgucuccgucaagcucgccggcaacuccucccucugccccgucuccggcugggccaucuacuccaaggacaacuccauccgcaucggcuccaagggcgacgucuucgucauccgcgagcccuucaucuccugcuccccccucgagugccgcaccuucuuccucacccagggcgcccuccucaacgacaagcacuccaacggcaccaucaaggaccgcucccccuaccgcacccucauguccugccccaucggcgagguccccucccccuacaacucccgcuccgaguccgucgccugguccgccuccgccugccacgacggcaucaacuggcucaccaucggcaucuccggccccgacaacggcgccgucgccguccucaaguacaacggcaucaucaccgacaccaucaaguccuggcgcaacaacauccuccgcacccaggaguccgucugcgccugcgucaacggcuccugcuucaccgucaugaccgacggccccuccgacggccaggccuccuacaagaucuuccgcaucgagaagggcaagaucgucaaguccgucgagaugaacgcccccaacuaccacuacgaggagugcuccugcuaccccgacuccuccgagaucaccugcgucugccgcgacaacuggcacggcuccaaccgccccugggucuccuucaaccagaaccucgaguaccagaucggcuacaucugcuccggcaucuucggcgacuccccccgccccaacgacaagaccggcuccugcggccccgucuccuccaacggcgccaacggcgucaagggcuucuccuucaaguacggcaacggcgucuggaucggccgcaccaaguccaucuccucccgcaacggcuucgagaugaucugggaccccaacggcuggaccggcaccgacaacaacuucuccaucaagcaggacaucgucggcaucaacgagugguccggcuacuccggcuccuucguccagcaccccgagcucaccggccucgacugcauccgccccugcuucugggucgagcucauccgcggccgccccaaggagaacaccaucuggaccuccggcuccuccaucuccuucugcggcgucaacuccgacaccgucggcugguccuggcccgacggcgccgagcuccccuucaccaucgacaaguga

SEQ ID NO: 117431 - RNA, 1410 nt, Artificial Sequence
  derived and/or modified CDS sequence (opt2) from neuraminidase__InfluenzaA__AEW25351
augaaccccaaccagaagaucaucaccaucggcuccgucugcaugaccaucggcauggccaaccucauccuccagaucggcaacaucaucuccaucuggaucucccacuccauccagcucggcaaccagaaccagaucgagaccugcaaccaguccgucaucaccuacgagaacaacaccugggucaaccacaccuacgucaacaucuccaacaccaacuucgccgccggccaguccgucgucuccgucaagcucgccggcaacuccucccucugccccgucuccggcugggccaucuacuccaaggacaacuccauccgcaucggcuccaagggcgacgucuucgucauccgcgagcccuucaucuccugcuccccccucgagugccgcaccuucuuccucacccagggcgcccuccucaacgacaagcacuccaacggcaccaucaacgaccgcucccccuaccgcacccucauguccugccccaucggcgagguccccucccccuacaacucccgcuucgaguccgucgccugguccgccuccgccugccacgacggcaucaacuggcucaccaucggcaucuccggccccgacaacggcgccgucgccguccucaaguacaacggcaucaucaccgacaccaucaaguccuggcgcaacaacauccuccgcacccaggaguccgagugcgccugcgucaacggcuccugcuucaccgucaugaccgacggccccuccgacggccaggccuccuacaagaucuuccgcaucgagaagggcaagaucgucaaguccgucgagaugaacgcccccaacuaccacuacgaggagugcuccugcuaccccgacuccuccgagaucaccugcgucugccgcgacaacuggcacggcuccaaccgccccugggucuccuucaaccagaaccucgaguaccagaucggcuacaucugcuccggcaccuucggcgacaacccccgccccaacgacaagaccggcuccugcggccccgucuccuccaacggcgccaacggcgucaagggcuucuccuucaaguacggcaacggcgucuggaucggccgcaccaaguccaucuccucccgcaacggcuucgagaugaucugggaccccaacggcuggaccggcaccgacaacaacuucuccaucaagcaggacaucgucggcaucaacgagugguccggcuacuccggcuccuucguccagcaccccgagcucaccggccucgacugcauccgccccugcuucugggucgagcucauccgcggccgccccaaggagaacaccaucuggaccuccggcuccuccaucuccuucugcggcgucaacuccgacaccgucggcugguccuggcccgacggcgccgagcuccccuucaccaucgacaaguga

SEQ ID NO: 117432 - RNA, 1410 nt, Artificial Sequence
  derived and/or modified CDS sequence (opt2) from neuraminidase__InfluenzaA__AEW25358
augaaccccaaccagaagaucaucaccaucggcuccgucugcaugaccaucggcauggccaaccucauccuccagaucggcaacaucaucuccaucugggucucccacuccauccagcucggcaaccagaaccagaucgagaccugcaaccaguccgucaucaccuacgagaacaacaccugggucaaccagaccuacgucaacaucuccaacaccaacuucgccgccggccaguccgucgucuccgucaagcucgccggcaacuccucccucugccccgucuccggcugggccaucuacuccaaggacaacuccauccgcaucggcuccaagggcgacgucuucgucauccgcgagcccuucaccuccugcuccccccucgagugccgcaccuucuuccucacccagggcgcccuccucaacgacaagcacuccaacggcaccaucaaggaccgcucccccuaccgcacccucauguccugccccaucggcgagguccccucccccuacaacucccgcuucgaguccgucgccugguccgccuccgccugccacgacggcaucaacuggcucaccaucggcaucuccggccccgacaacggcgccgucgccguccucaaguacaacggcaucaucaccgacaccaucaaguccuggcgcaacaacauccuccgcacccaggaguccgagugcgccugcgucaacggcuccugcuucaccgucaugaccgacggccccuccgacggccaggccuccuacaagaucuuccgcaucgagaagggcaagaucgucaaguccgucgagaugaacgcccccaacuaccacuacgaggagugcuccugcuaccccgacuccuccgagaucaccugcgucugccgcgacaacuggcacggcuccaaccgccccugggucuccuucaaccagaaccucgaguaccagaucggcuacaucugcuccggcaucuucggcgacaacccccgccccaacgacaagaccggcuccugcggccccgucuccuccaacggcgccaacggcgucaagggcuucuccuucaaguacggcaacggcgucuggaucggccgcaccaaguccaucuccucccgcaacggcuucgagaugaucugggaccccaacggcuggaccggcaccgacaacaacuucuccaucaagcaggacaucgucggcaucaacgagugguccggcuacuccggcuccuucguccagcaccccgagcucaccggccucgacugcauccgccccugcuucugggucgagcucauccgcggccgccccaaggagaacaccaucuggaccuccggcuccuccaucuccuucugcggcgucaacuccgacaccgucggcugguccuggcccgacggcgccgagcuccccuucaccaucgucaaguga

SEQ ID NO: 117433 - RNA, 1410 nt, Artificial Sequence; identical to SEQ ID NO: 112774
  derived and/or modified CDS sequence (opt2) from neuraminidase__InfluenzaA__AEW25361

SEQ ID NO: 117434 - RNA, 1410 nt, Artificial Sequence
  derived and/or modified CDS sequence (opt2) from neuraminidase__InfluenzaA__AEW25379
augaaccccaaccagaagaucaucaccaucggcuccgucugcaugaccaucggcauggccaaccucauccuccagaucggcaacaucaucuccaucuggaccucccacuccauccagcucggcaaccagaaccagaucgagaccugcaaccaguccgucaucaccuacgagaacaacaccugggucaaccagaccuacgucaacaucuccaacaccaacuucgccgccggccaguccgucgucuccgucaagcucgccggcaacuccucccucugccccgucuccggcugggccaucuacuccaaggacaacuccauccgcaucggcuccaagggcgacgucuucgucauccgcgagcccuucaucuccugcuccccccucgagugccgcaccuucuuccucacccagggcgcccuccucaacgacaagcacuccaacggcaccaucaaggaccgcucccccuaccgcacccucauguccugccccaucggcgagguccccucccccuacaacucccgcuucgaguccgucgccugguccgccuccgccugccacgacggcaucaacuggcucaccaucggcaucuccggccccgacaacggcgccgucgccguccucaaguacaacggcaucaucaccgacaccaucaaguccuggcgcaacaacauccuccgcacccaggaguccgagugcgccugcgucaacggcuccugcuucaccgucaugaccgacggccccuccgacggccaggccuccuacaagaucuuccgcaucgagaagggcaagaucgucaaguccgucgagaugaacgcccccaacuaccacuacgaggagugcuccugcuaccccgacuccuccgaggucaccugcgucugccgcgacaacuggcacggcuccaaccgccccugggucuccuucaaccagaaccucgaguaccagaucggcuacaucugcuccggcaucuucggcgacaacccccgccccaacgacaagaccggcuccugcggccccgucuccuccgacggcgccaacggcgucaagggcuucuccuucaaguacggcaacggcgucuggaucggccgcaccaaguccaucuccucccgcaacggcuucgagaugaucugggaccccaacggcuggaccggcaccgacaacaacuucuccaucaagcaggacaucgucggcaucaacgagugguccggcuacuccggcuccuucguccagcaccccgagcucaccggccucgacugcauccgccccugcuucugggucgagcucauccgcggccgccccaaggagaacaccaucuggaccuccggcuccuccaucuccuucugcggcgucaacuccgacaccgucggcugguccuggcccgacggcgccgagcuccccuucaccaucgacaaguga

SEQ ID NO: 117435 - RNA, 1410 nt, Artificial Sequence
  derived and/or modified CDS sequence (opt2) from neuraminidase__InfluenzaA__AEW25387
augaaccccaaccagaagaucaucaccaucggcuccgucugcaugaccaucggcauggccaaccucauccuccagaucggcaacaucaucuccaucuggaucucccacuccauccagcucggcaaccagaaccagaucgagaccugcaaccaguccgucaucaccuacgagaacaacaccugggucaaccagaccuacgucaacaucuccaacaccaacuucgccgccggccaguccgucgucuccgucaagcucgccggcaacuccucccucugccccgucuccggcugggccaucuacuccaaggacaacuccauccgcaucggcuccaagggcgacgucuucgucauccgcgagcccuucaucuccugcuccccccucgagugccgcaccuucuuccucacccagggcgcccuccucaacgacaagcacuccaacggcaccaucaaggaccgcucccccuaccgcacccucauguccugccccaucggcgagguccccucccccuacaacucccgcuucgaguccgucgccugguccgccuccgccugccacgacggcaucaacuggcucaccaucggcaucuccggccccgacaacggcgccgucgccguccucaaguacaacggcaucaucaccgacaccaucaaguccuggcgcaacaacauccuccgcacccaggaguccgagugcgccugcgucgacggcuccugcuucaccgucaugaccgacggccccuccgacggccaggccuccuacaagaucuuccgcaucgagaagggcaagaucgucaaguccgucgagaugaacgcccccaacuaccacuacgaggagugcuccugcuaccccgacuccuccgagaucaccugcgucugccgcgacaacuggcacggcuccaaccgccccugggucuccuucaaccagaaccucgaguaccagaucggcuacaucugcuccggcaucuucgaggacaacccccgccccaacgacaagaccggcuccugcggccccgucuccuccaacggcgccaacggcgucaagggcuucuccuucaaguacggcaacggcgucuggaucggccgcaccaaguccaucuccucccgcaacggcuucgagaugaucugggaccccaacggcuggaccggcaccgacaacaacuucuccaucaagcaggacaucgucggcaucaacgagugguccggcuacuccggcuccuucguccagcaccccgagcucaccggccucgacugcauccgccccugcuucugggucgagcucauccgcggccgccccaaggagaacaccaucuggaccuccggcuccuccaucuccuucugcggcgucaacuccgacaccgucggcugguccuggcccgacggcgccgagcuccccuucaccaucgacaaguga

SEQ ID NO: 117436 - RNA, 1410 nt, Artificial Sequence
  derived and/or modified CDS sequence (opt2) from neuraminidase__InfluenzaA__AEW25392
augaaccccaaccagaagaucaucaccaucggcuccgucugcaugaccaucggcauggccaaccucauccuccagaucggcaacaucaucuccaucuggaucucccacuccauccagcucggcaaccagaaccagaucgagaccugcaaccaguccgucaucaccuacgagaacaacaccugggucaaccagaccuacgucaacaucuccaacaccaacuucgccgccggccaguccgucgucuccgucaagcucgccggcaacuccucccucugccccgucuccggcugggccaucuacuccaaggacaacuccauccgcaucggcuccaagggcgacgucuucgucauccgcgagcccuucaucuccugcuccccccucgagugccgcaccuucuuccucacccagggcgcccuccucaacgacaagcacuccaacggcaccaucaaggaccgcucccccuaccgcacccucauguccugccccaucggcgagguccccucccccuacaacucccgcuucgaguccgucgccugguccgccuccgccugccacgacggcaucaacuggcucaccaucggcaucuccggccccgacaacggcgccgucgccguccucaaguacaacggcaucaucaccgacaccaucaaguccuggcgcaacaacauccuccgcacccaggaguccgagugcgccugcgucaacggcuccugcuucaccgucaugaccgacggccccuccgacggccaggccuccuacaagaucuuccgcaucgagaagggcaagaucgucaaguccgucgagaugaacgcccccaacuaccacuacgaggagugcuccugcuaccccgacuccuccgagaucaccugcgucugccgcgacaacuggcacggcuccaaccgccccugggucuccuucaaccagaaccucgaguaccagaucggcuacaucugcuccggcaucuucggcgacaacccccgccccaacgacaagaccggcuccugcggccccgucuccuccaacggcgccaacggcgucaagggcuucuccuucaaguacggcaacggcgucuggaucggccgcaccaaguccaucuccucccgcaacggcuucgagaugaucugggaccccaacggcuggaccggcaccgacaacaacuucuccaucaagcacgacaucgucggcaucaacgagugguccggcuacuccggcuccuucguccagcaccccgagcucaccggccucgacugcauccgccccugcuucugggucgagcucauccgcggccgccccaaggagaacaccaucuggaccuccggcuccuccaucuccuucugcggcgucaacuccgacaccgucggcugguccuggcccgacggcgccgagcuccccuucaccaucgacaaguga

SEQ ID NO: 117437 - RNA, 1410 nt, Artificial Sequence
  derived and/or modified CDS sequence (opt2) from neuraminidase__InfluenzaA__AEW25397
augaaccccaaccagaagaucaucaccaucggcuccgucugcaugaccaucggcauggccaaccucauccuccagaucggcaacaucaucuccaucuggaucucccacuccauccagcucggcaaccagaaccagaucgagaccugcaaccaguccgucaucaccuacgagaacaacaccugggucaaccagaccuacgucaacaucuccaacaccaacuucgccgccggccaguccgucgucuccgucaagcucgccggcaacuccucccucugccccgucuccggcugggccaucuacuccaaggacaacuccauccgcaucggcuccaagggcgacgucuucgucauccgcgagcccuucaucuccugcuccccccucgagugccgcaccuucuuccucacccagggcgcccuccucaacgacaagcacuccaacggcaccaucaaggaccgcucccccuaccgcacccucauguccugccccaucggcgagguccccucccccuacaacucccgcuucgagcccgucgccugguccgccuccgccugccacgacggcaucaacuggcucaccaucggcaucuccggccccgacaacggcgccgucgccguccucaaguacaacggcaucaucaccgacaccaucaaguccuggcgcaacaacauccuccgcacccaggaguccgagugcgccugcgucaacggcuccugcuucaccgucaugaccgacggccccuccgacggccaggccuccuacaagaucuuccgcaucgagaagggcaagaucgucaaguccgucgagaugaacgcccccaacuaccacuacgaggagugcuccugcuaccccgacuccuccgagaucaccugcgucugccgcgacaacuggcacggcuccaaccgccccugggucuccuucaaccagaaccucgaguaccagaucggcuacaucugcuccggcaucuucggcgacuccccccgccccaacgacaagaccggcuccugcggccccgucuccuccaacggcgccaacggcgucaagggcuucuccuucaaguacggcaacggcgucuggaucggccgcaccaaguccaucuccucccgcaacggcuucgagaugaucugggaccccaacggcuggaccggcaccgacaacaacuucuccaucaagcaggacaucgucggcaucaacgagugguccggcuacuccggcuccuucguccagcaccccgagcucaccggccucgacugcauccgccccugcuucugggucgagcucauccgcggccgccccaaggagaacaccaucuggaccuccggcuccuccaucuccuucugcggcgucaacuccgacaacgucggcugguccuggcccgacggcgccgagcuccccuucaccaucgacaaguga

SEQ ID NO: 117438 - RNA, 1410 nt, Artificial Sequence; identical to SEQ ID NO: 112774
  derived and/or modified CDS sequence (opt2) from neuraminidase__InfluenzaA__AEW25402

SEQ ID NO: 117439 - RNA, 1410 nt, Artificial Sequence; identical to SEQ ID NO: 112774
  derived and/or modified CDS sequence (opt2) from neuraminidase__InfluenzaA__AEW25407

SEQ ID NO: 117440 - RNA, 1410 nt, Artificial Sequence
  derived and/or modified CDS sequence (opt2) from neuraminidase__InfluenzaA__AEW25418
augaaccccaaccagaagaucaucaccaucggcuccgucugcaugaccaucggcauggccaaccucauccuccagaucggcaacaucaucuccaucuggaucucccacuccauccagcucggcaaccagaaccagaucgagaccugcaaccaguccgucaucaccuacgagaacaacaccugggucaaccacaccuacgucaacaucuccaacaccaacuucgccgccggccaguccgucgucuccgucaagcucgccggcaacuccucccucugccccgucuccggcugggccaucuacuccaaggacaacuccauccgcaucggcuccaagggcgacgucuucgucauccgcgagcccuucaucuccugcuccccccucgagugccgcaccuucuuccucacccagggcgcccuccucaacgacaagcacuccaacggcaccaucaaggaccgcucccccuaccgcacccucauguccugccccaucggcgagguccccucccccuacaacucccgcuucgaguccgucgccugguccgccuccgccugccacgacggcaucaacuggcucaccaucggcaucuccggccccgacaacggcgccgucgccguccucaaguacaacggcaucaucaccgacaccaucaaguccuggcgcaacaacauccuccgcacccaggaguccgagugcgccugcgucaacggcuccugcuucaccgucaugaccgacggccccuccgacggccaggccuccuacaagaucuuccgcaucggcaagggcaagaucgucaaguccgucgagaugaacgcccccaacuaccacuacgaggagugcuccugcuaccccgacuccuccgagaucaccugcgucugccgcgacaacuggcacggcuccaaccgccccugggucuccuucaaccagaaccucgaguaccagaucggcuacaucugcuccggcaucuucggcgacaacccccgccccaacgacaagaccggcuccugcggccccgucuccuccaacggcgagaacggcgucaagggcuucuccuucaaguacggcaacggcgucuggaucggccgcaccaaguccaucuccucccgcaacggcuucgagaugaucugggaccccaacggcuggaccggcaccgacaacaacuucuccaucaagcaggacaucgucggcaucaacgagugguccggcuacuccggcuccuucguccagcaccccgagcucaccggccucgacugcauccgccccugcuucugggucgagcucauccgcggccgccccaaggagaacaccaucuggaccuccggcuccuccaucuccuucugcggcgucaacuccgacaccgucggcugguucuggcccgacggcgccgagcuccccuucaccaucgacaaguga

SEQ ID NO: 117441 - RNA, 1410 nt, Artificial Sequence
  derived and/or modified CDS sequence (opt2) from neuraminidase__InfluenzaA__AEW25423
augaaccccaaccagaagaucaucaccaucggcuccgucugcaugaccaucggcauggccaaccucauccuccagaucggcaacaucaucuccaucuggaucuccaacuccauccagcucggcaaccagaaccagaucgagaccugcaaccaguccgucaucaccuacgagaacaacaccugggucaaccagaccuacgucaacaucuccaacaccaacuucgccgccggccaguccgucgucuccgucaagcucgccggcaacuccucccucugccccgucuccggcugggccaucuacuccaaggacaacuccauccgcaucggcuccaagggcgacgucuucgucauccgcgagcccuucaucuccugcuccccccucgagugccgcaccuucuuccucacccagggcgcccuccucaacgacaagcacuccaacggcaccaucaaggaccgcucccccuaccgcacccucauguccugccccaucggcgagguccccucccccuacaacucccgcuucgaguccgucgccugguccgccuccgccugccacgacggcaucaacuggcucaccaucggcaucuccggccccgacaacggcgccgucgccguccucaaguacaacggcaucaucaccgacaccaucaaguccuggcgcaacaacauccuccgcacccaggaguccgagugcgccugcgucaacggcuccugcuucaccgucaugaccgacggccccuccgacggccaggccuccuacaagaucuuccgcaucgagaagggcaagaucgucaaguccgucgagaugaacgcccccaacuaccacuacgaggagugcuccugcuaccccgacuccuccgagaucaccugcgucugccgcgacaacuggcacggcuccaaccgccccugggucuccuucaaccagaaccucgaguaccagaucggcuacaucugcuccggcaucuucggcgacaacccccgccccaacgacaagaccggcuccugcggccccgucuccuccaacggcgccaacggcgucaagggcuucuccuucaaguacggcaacggcgucuggaucggccgcaccaaguccaucuccucccgcaacggcuucgagaugaucugggaccccaacggcuggaccggcaccgacaacaacuucuccaucaagcaggacaucgucggcaucaacgagugguccggcuacuccggcuccuucguccagcaccccgagcucaccggccucgacugcauccgccccugcuucugggucgagcucauccgcggccgccccaaggagaacaccaucuggaccuccggcuccuccaucuccuucugcggcgucaacuccgacaccgucggcugguccuggcccgacggcgccgagcuccccuucaccaucgacaaguga

SEQ ID NO: 117442 - RNA, 1410 nt, Artificial Sequence; identical to SEQ ID NO: 112774
  derived and/or modified CDS sequence (opt2) from neuraminidase__InfluenzaA__AEW25426

SEQ ID NO: 117443 - RNA, 1410 nt, Artificial Sequence
  derived and/or modified CDS sequence (opt2) from neuraminidase__InfluenzaA__AEW25432
augaaccccaaccagaagaucaucaccaucggcuccgucugcaugaccaucggcauggccaaccucauccuccagaucggcaacaucaucuccaucuggaccucccacuccauccagcucggcaaccagaaccagaucgagaccugcaaccaguccgucaucaccuacgagaacaacaccugggucaaccagaccuacgucaacaucuccaacaccaacuucgccgccggccaguccgucgucuccgucaagcucgccggcaacuccucccucugccccgucuccggcugggccaucuacuccaaggacaacuccauccgcaucggcuccaagggcgacgucuucgucauccgcgagcccuucaucuccugcuccccccucgagugccgcaccuucuuccucacccagggcgcccuccucaacgacaagcacuccaacggcaccaucaaggaccgcucccccuaccgcacccucauguccugccccaucggcgagguccccucccccuacaacucccgcuucgaguccgucgccugguccgccuccgccugccacgacggcaucaacuggcucaccaucggcaucuccggccccgacaacggcgccgucgccguccucaaguacaacggcaucaucaccgacaccaucaaguccuggcgcaacaacauccuccgcacccaggaguccgagugcgccugcgucaacggcuccugcuucaccgucaugaccgacggccccuccgacggccaggccuccuacaagaucuuccgcaucgagaagggcaagaucgucaaguccgucgagaugaacgcccccaacuaccacuacgaggagugcuccugcuaccccgacuccuccgagaucaccugcgucugccgcgacaacuggcacggcuccaaccgccccugggucuccuucaaccagaaccucgaguaccagaucggcuacaucugcuccggcaucuucggcgacaacccccgccccaacgacaagaccggcuccugcggccccgucuccuccaacggcgccaacggcgucaagggcuucuccuucaaguacggcaacggcgucuggaucggccgcaccaaguccaucuccucccgcaacggcuucgagaugaucugggaccccaacggcuggaccggcaccgacaacaacuccuccaucaagcaggacaucgucggcaucaacgagugguccggcuacuccggcuccuucguccagcaccccgagcucaccggccucgacugcauccgccccugcuucugggucgagcucauccgcggccgccccaaggagaacaccaucuggaccuccggcuccuccaucuccuucugcggcaucaacuccgacgccgucggcugguccuggcccgacggcgccgagcuccccuucaccaucgacaaguga

SEQ ID NO: 117444 - RNA, 1410 nt, Artificial Sequence
  derived and/or modified CDS sequence (opt2) from neuraminidase__InfluenzaA__AEW25436
augaaccccaaccagaagaucaucaccaucggcuccgucugcaugaccaucggcauggccaaccucauccuccagaucggcaacaucaucuccaucuggaucucccacuccauccagcucggcaaccagaaccagaucgagaccugcaaccaguccaucaucaccuacgagaacaacaccugggucaaccagaccuacgucaacaucuccaacaccaacuucgccgccggccaguccgucgucuccgucaagcucgccggcaacuccucccucugccccgucuccggcugggccaucuacuccaaggacaacuccauccgcaucggcuccaagggcgacgucuucgucauccgcgagcccuucaucuccugcuccccccucgagugccgcaccuucuuccucacccagggcgcccuccucaacgacaagcacuccaacggcaccaucaaggaccgcucccccuaccgcacccucauguccugccccaucggcgagguccccucccccuacaacucccgcuucgaguccgucgccugguccgccuccgccugccacgacggcaucaacuggcucaccaucggcaucuccggccccgacaacggcgccgucgccguccucaaguacaacggcaucaucaccgacaccaucaaguccuggcgcaacaacauccuccgcacccaggaguccgagugcgccugcgucaacggcuccugcuucaccgucaugaccgacggccccuccgacggccaggccuccuacaagaucuuccgcaucgagaagggcaagaucgucaaguccgucgagaugaacgcccccaacuaccacuacgaggagugcuccugcuaccccgacuccuccgagaucaccugcgucugccgcgacaacuggcacggcuccaaccgccccugggucuccuucaaccagaaccucgaguaccgcaucggcuacaucugcuccggcaucuucggcgacaacccccgccccaacgacaagaccggcuccugcggccccgucuccuccaacggcgccaacggcgucaagggcuucuccuucaaguacggcaacggcgucuggaucggccgcaccaaguccaucuccucccgcaacggcuucgagaugaucugggaccccaacggcuggaccggcaccgacaacaacuucuccaucaagcaggacaucgucggcaccaacgagugguccggcuacuccggcuccuucguccagcaccccgagcucaccggccucgacugcauccgccccugcuucugggucgagcucauccgcggccgccccaaggagaacaccaucuggaccuccggcuccuccaucuccuucugcggcgucaacuccgacaccaugggcugguccuggcccgacggcgccgagcuccccuucaccaucgacaaguga

SEQ ID NO: 117445 - RNA, 1410 nt, Artificial Sequence; identical to SEQ ID NO: 112774
  derived and/or modified CDS sequence (opt2) from neuraminidase__InfluenzaA__AEW25440

SEQ ID NO: 117446 - RNA, 1410 nt, Artificial Sequence
  derived and/or modified CDS sequence (opt2) from neuraminidase__InfluenzaA__AEW25448
augaaccccaaccagaagaucaucaccaucggcuccgucugcaugaccaucggcauggccaaccucauccuccagaucggcaacaucaucuccaucuggaucucccacuccauccagcucggcaaccagaaccagaucgagaccugcaaccaguccgucaucaccuacgagaacaacaccugggucaaccagaccuacgucaacaucuccaacaccaacuucgccgccggccaguccgucgucuccgucaagcucgccggcaacuccucccucugccccgucuccggcugggccaucuacuccaaggacaacuccauccgcaucggcuccaagggcgacgucuucgucauccgcgagcccuucaucuccugcuccccccucgagugccgcaccuucuuccucacccagggcgcccuccucaacgacaagcacuccaacggcaccaucaaggaccgcucccccuaccgcacccucauguccugccccaucggcgagguccccucccccuacaacucccgcuucgaguccgucgccugguccgccuccgccugccacgacggcaucaacuggcucaccaucggcaucuccggccccgacaacggcgccgucgccguccucaaguacaacggcaucaucaccgacaccaucaaguccuggcgcaacaacauccuccgcacccaggaguccgagugcgccugcgucaacggcuccugcuucaccgucaugaccgacggccccuccgacggccaggccuccuacaagaucuuccgcaucgagaagggcaagaucgucaaguccgucgagaugaacgcccccaacuaccacuacgaggagugcuccugcuaccccgacuccuccgagaucaccugcgucugccgcgacaacuggcacggcuccaaccgccccugggucuccuucaaccagaaccucgaguaccagaucggcuacaucugcuccggcaucuucggcgacaacccccgccccaacgacaagaccggcuccugcggccccgucuccuccaacggcgccaacggcgucaagggcuucuccuucaaguacggcaacggcgucuggaucggccgcaccaaguccaucuccucccgcaacggcuucgagaugaucugggaccccaacggcuggaccggcaccgacaacaacuucuccaucaagcaggacaucgucggcaucaacgagugguccggcuacuccggcuccuucguccagcaccccgagcucaccggccucgacugcauccgccccugcuucugggucgagcucauccgcggccgccccaaggagaacaccaucuggaccuccggcuccuccaucuccuucugcggcgucaacuccgacaccgucggcugguccuggcccgacggcgccgagcuccccuucaccaccgacaaguga

SEQ ID NO: 117447 - RNA, 1410 nt, Artificial Sequence; identical to SEQ ID NO: 112774
  derived and/or modified CDS sequence (opt2) from neuraminidase__InfluenzaA__AEW25456

SEQ ID NO: 117448 - RNA, 1410 nt, Artificial Sequence
  derived and/or modified CDS sequence (opt2) from neuraminidase__InfluenzaA__AEW25464
augaaccccaaccagaagaucaucaccaucggcuccgucugcaugaccaucggcauggccaaccucauccuccagaucggcaacaucaucuccaucuggaucucccacuccauccagcucggcaaccagaaccagaucgagaccugcaaccaguccgucaucaccuacgagaacaacaccugggucaaccagaccuacgucaacaucuccaacaccaacuucgccgccggccaguccgucgucuccgucaagcucgccggcaacuccucccucugccccgucuccggcugggccaucuacuccaaggacaacuccauccgcaucggcuccaagggcgacgucuucgucauccgcgagcccuucaucuccugcuccccccucgagugccgcaccuucuuccucacccagggcgcccuccucaacgacaagcacuccaacggcaccaucaaggaccgcucccccuaccgcacccucauguccugccccaucggcgagguccccucccccuacaacucccgcuucgaguccgucgccugguccgccuccgccugccacgacggcaucaacuggcucaccaucggcaucuccggccccgacaacggcgccgucgccguccucaaguacaacggcaucaucaccgacaccaucaaguccuggcgcaacaacauccuccgcacccaggaguccgagugcgccugcgucaacggcuccugcuucaccgucaugaccgacggccccuccgacggccaggccuccuacaagaucuuccgcaucgagaagggcaagaucgucaaguccgucgagcucaacgcccccaacuaccacuacgaggagugcuccugcuaccccgacuccuccgagaucaccugcgucugccgcgacaacuggcacggcuccaaccgccccugggucuccuucaaccagaaccucgaguaccagaucggcuacaucugcuccggcaucuucggcgacaacccccgccccaacgacaagaccggcuccugcggccccgucuccuccaacggcgccaacggcgucaagggcuucuccuucaaguacggcaacggcgucuggaucggccgcaccaaguccaucuccucccgcaacggcuucgagaugaucugggaccccaacggcuggaccggcaccgacaacaacuucuccaucaagcaggacaucgucggcaucaacgagugguccggcuacuccggcuccuucguccagcaccccgagcucaccggccucgacugcauccgccccugcuucugggucgagcucauccgcggccgccccaaggagaacaccaucuggaccuccggcuccuccaucuccuucugcggcgucaacuccgacaccgucggcugguccuggcccgacggcgccgagcuccccuucaccaucgacaaguga

SEQ ID NO: 117449 - RNA, 1410 nt, Artificial Sequence
  derived and/or modified CDS sequence (opt2) from neuraminidase__InfluenzaA__AEW25474
augaaccccaaccagaagaucaucaccaucggcuccgucugcaugaccaucggcauggccaaccucauccuccagaucggcaacaucaucuccaucuggaucucccacuccauccagcucggcaaccagaaccagaucgagaccugcaaccaguccgucaucaccuacgagaacaacaccugggucaaccagaccuacgucaacaucuccaacaccaacuucgccgccggccaguccgucgucuccgucaagcucgccggcaacuccucccucugccccgucuccggcugggccaucuacuccaaggacaacuccauccgcaucggcuccaagggcgacgucuucgucauccgcgagcccuucaucuccugcuccccccucgagugccgcaccuucuuccucacccagggcgcccuccucaacgacaagcacuccaacggcaccaucaaggaccgcucccccuaccgcacccucauguccugccccaucggcgagguccccucccccuacaacucccgcuucgaguccgucgccugguccgccuccgccugccacgacggcaucaacuggcucaccaucggcaucuccggccccgacaacggcgccgucgccguccucaaguacaacggcaucaucaccgacaccaucaaguccuggcgcaacaacauccuccgcacccaggaguccgagugcgccugcgucaacggcuccugcuucaccgucaugaccgacggccccuccgacggccaggccuccuacaagaucuuccgcaucgagaagggcaagaucgucaaguccgucgagaugaacgcccccaacuaccacuacgaggagugcuccugcuaccccgacuccuccgagaucaccugcgucugccgcgacaacuggcacggcuccaaccgccccugggucuccuucaaccagaaccucgaguaccagaucggcuacaucugcuccggcaucuucggcgacaacccccgccccaacgacaagaccggcuccugcggccccgucuccuccaacggcgccaacggcgucaagggcuucuccuucaaguacggcaacggcgucuggaucggccgcaccaaguccaucuccucccgcaacggcuucgagaugaucugggaccccaacggcuggaccggcaccgacaacaacuucuccaucaagcaggacaucgucggcaucaacgagugguccggcuacuccggcuccuucguccagcaccccgagcucaccggccucgacugcauccgccccugcuucugggucgagcucauccgcggccgccccaaggagaacaccaucuggaccuccggcuccuccaucuccuucugcggcgucaacuccgacaccgucggcugguccuggcccgacggcgccgagcuccccuccaccaucgacaaguga

SEQ ID NO: 117450 - RNA, 1410 nt, Artificial Sequence
  derived and/or modified CDS sequence (opt2) from neuraminidase__InfluenzaA__AEW25484
augaaccccaaccagaagaucaucaccaucggcuccgucugcaugaccaucggcauggccaaccucauccuccagaucggcaacaucaucuccaucuggaucucccacuccauccagcucggcaaccagaaccagaucgagaccugcaaccaguccgucaucaccuacgagaacaacaccuggaucaaccagaccuacgucaacaucuccaacaccaacuucgccgccggccaguccgucgucuccgucaagcucgccggcaacuccucccucugccccgucuccggcugggccaucuacuccaaggacaacuccauccgcaucggcuccaagggcgacgucuucgucauccgcgagcccuucaucuccugcucccaccucgagugccgcaccuucuuccucacccagggcgcccuccucaacgacaagcacuccaacggcaccaucaaggaccgcucccccuaccgcacccucauguccugccccaucggcgagguccccucccccuacaacucccgcuucgaguccgucgccugguccgccuccgccugccacgacggcaucaacuggcucaccaucggcaucuccggccccgaccacggcgccgucgccguccucaaguacaacggcaucaucaccgacaccaucaaguccuggcgcaacaacauccuccgcacccaggaguccgagugcgccugcgucaacggcuccugcuucaccgucaugaccgacggccccuccgacggccaggccuccuacaagaucuuccgcaucgagaagggcaagaucgucaaguccgucgagaugaacgcccccaacuaccacuacgaggagugcuccugcuaccccgacuccuccgagaucaccugcgucugccgcgacaacuggcacggcuccaaccgccccugggucuccuucaaccagaaccucgaguaccagaucggcuacaucugcuccggcaucuucggcgacaacccccgccccaacgacaagaccggcuccugcggccccgucuccuccaacggcgccaacggcgucaagggcuucuccuucaaguacggcaacggcgucuggaucggccgcaccaaguccaucuccucccgcaacggcuucgagaugaucugggaccccaacggcuggaccggcaccgacaacaacuucuccaucaagcaggacaucgucggcaucaacgagugguccggcuacuccggcuccuucguccagcaccccgagcucaccggccucgacugcauccgccccugcuucugggucgagcucauccgcggccgccccaaggagaacaccaucuggaccuccggcuccuccaucuccuucugcggcgucaacuccgacaccgucggcugguccuggcccgacggcgccgagcuccccuucaccaucgacaaguga

SEQ ID NO: 117451 - RNA, 1410 nt, Artificial Sequence
  derived and/or modified CDS sequence (opt2) from neuraminidase__InfluenzaA__AEW25494
augaaccccaaccagaagaucaucaccaucggcuccgucugcaugaccaucggcauggccaaccucauccuccagaucggcaacaucaucuccaucuggaucucccacuccauccagcucggcaaccagaaccagaucgagaccugcaaccaguccgucaucaccuacgagaacaacaccugggucaaccagaccuacgucaacaucuccaacaccaacuucgccgccggccaguccgucgucuccgucaagcucgccggcaacuccucccucugccccgucuccggcugggccaucuacuccaaggacaacuccauccgcaucggcuccaagggcgacgucuucgucauccgcgagcccuucaucuccugcuccccccucgagugccgcaccuucuuccucacccagggcgcccuccucaacgacaagcacuccaacggcaccaucaaggaccgcucccccuaccgcacccucauguccugccccaucggcgagguccccucccccuacaacucccgcuucgaguccgucgccugguccgccuccgccugccacgacggcaucaacuggcucaccaucggcaucuccggccccgacaacggcgccgucgccguccucaaguacaacggcaucaucaccgacuccaucaaguccuggcgcaacaacauccuccgcacccaggaguccgagugcgccugcgucaacggcuccugcuucaccgucaugaccgacggccccuccgacggccaggccuccuacaagaucuuccgcaucgagaagggcaagaucgucaaguccgucgagaugaacgcccccaacuaccacuacgaggagugcuccugcuaccccgacuccuccgagaucaccugcgucugccgcgacaacuggcacggcuccaaccgccccugggucuccuucaaccagaaccucgaguaccagaucggcuacaucugcuccggcaccuucggcgacaacccccgccccaacgacaagaccggcuccugcggccccgucuccuccaacggcgccaacggcgucaagggcuucuccuucaaguacggcaacggcgucuggaucggccgcaccaaguccaucuccucccgcaacggcuucgagaugaucugggaccccaacggcuggaccggcaccgacaacaacuucuccaucaagcaggacaucgucggcaucaacgagugguccggcuacuccggcuccuucguccagcaccccgagcucaccggccucgacugcauccgccccugcuucugggucgagcucauccgcggccgccccaaggagaacaccaucuggaccuccggcuccuccaucuccuucugcggcgucaacuccgacaccgucggcugguccuggcccgacggcgccgagcuccccuucaccaucgacaaguga

SEQ ID NO: 117452 - RNA, 1410 nt, Artificial Sequence
  derived and/or modified CDS sequence (opt2) from neuraminidase__InfluenzaA__AEW25503
augaaccccaaccagaagaucaucaccaucggcuccgucugcaugaccaucggcauggccaaccucauccuccagaucggcaacaucaucuccaucuggaucucccacuccauccagcucggcaaccagaaccagaucgagaccugcaaccaguccgucaucaccuacgagaacaacaccugggucaaccagaccuacgucaacaucuccaacaccaacuucgccgccggccaguccgucgucuccgucaagcucgccggcaacuccucccucugccccgucuccggcugggccaucuacuccaaggacaacuccauccgcaucggcuccaagggcgacgucuucgucauccgcgagcccuucaucuccugcuccccccucgagugccgcaccuucuuccucacccagggcgcccuccucaacgacaagcacuccaacggcaccaucaaggaccgcucccccuaccgcacccucauguccugccccaucggcgagguccccucccccuacaacucccgcuucgaguccgucgccugguccgccuccgccugccacgacggcaucaacuggcucaccaucggcaucuccggccccgacaacggcgccgucgccguccucaaguacaacggcaucaucaccgacaccaucaaguccuggcgcaacaacauccuccgcacccaggaguccgagugcgccugcgucaacggcuccugcuucaccgucaugaccgacggccccuccgacggccaggccuccuacaagaucuuccgcaucgagaagggcaagaucgucaaguccgucgagaugaacgcccccaacuaccacuacgaggagugcuccugcuaccccgacuccuccgagaucaccugcgucugccgcgacaacuggcacggcuccaaccgccccugggucuccuucaaccagaaccucgaguaccagaucggcuacaucugcuccggcaucuucggcgacaacccccgccccaacgacaagaccggcuccugcggccccgucuccuccaacggcgccaacggcgucaagggcuucuccuucaaguacggcaacggcgccuggaucggccgcaccaaguccaucuccucccgcaacggcuucgagaugaucugggaccccaacggcuggaccggcaccgacaacaacuucuccaucaagcaggacaucgucggcaucaacgagugguccggcuacuccggcuccuucguccagcaccccgagcucaccggccucgacugcauccgccccugcuucugggucgagcucauccgcggccgccccaaggagaacaccaucuggaccuccggcuccuccaucuccuucugcggcgucaacuccgacaccgucggcugguccuggcccgacggcgccgagcuccccuucaccaucgacaaguga

SEQ ID NO: 117453 - RNA, 1410 nt, Artificial Sequence
  derived and/or modified CDS sequence (opt2) from neuraminidase__InfluenzaA__AEW25511
augaaccccaaccagaagaucaucaccaucggcuccgucugcaugaccaucggcauggccaaccucauccuccagaucggcaacaucaucuccaucuggaucucccacuccauccagcucggcaaccagaaccagaucgagaccugcaaccaguccgucaucaccuacgagaacaacaccugggucaaccacaccuacgucaacaucuccaacaccaacuucgccgccggccaguccgucgucuccgucaagcucgccggcaacuccucccucugccccgucuccggcugggccaucuacuccaaggacaacuccauccgcaucggcuccaagggcgucgucuucgucauccgcgagcccuucaucuccugcuccccccucgagugccgcaccuucuuccucacccagggcgcccuccucaacgacaagcacuccaacggcaccaucaaggaccgcucccccuaccgcacccucauguccugccccaucggcgagguccccucccccuacaacucccgcuucgaguccgucgccugguccgccuccgccugccacgacggcaucaacuggcucaccaucggcaucuccggccccgacaacggcgccgucgccguccucaaguacaacggcaucaucaccgacaccaucaaguccuggcgcaacaacauccuccgcacccaggaguccgagugcgccugcgucaacggcuccugcuucaccgucaugaccgacggccccuccgacggccaggccuccuacaagaucuuccgcaucgagaagggcaagaucgucaaguccgucgagaugaacgcccccaacuaccacuacgaggagugcuccugcuaccccgacuccuccgagaucaccugcgucugccgcgacaacuggcacggcuccaaccgccccugggucuccuucaaccagaaccucgaguaccagaucggcuacaucugcuccggcaucuucggcgacaacccccgccccaacgacaagaccggcuccugcggccccgucuccuccaacggcgccaacggcgucaagggcuucuccuucaaguacggcaacggcgucuggaucggccgcaccaaguccaucuccucccgcaacggcuucgagaugaucugggaccccaacggcuggaccggcaccgacaacaacuucuccaucaagcaggacaucgucggcaucaacgagugguccggcuacuccggcuccuucguccagcaccccgagcucaccggccucgacugcauccgccccugcuucugggucgagcucauccgcggccgccccaaggagaacaccaucuggaccuccggcuccuccaucuccuucugcggcgucaacuccgacaccgucggcugguccuggcccgacggcgccgagcuccccuucaccaucgacaaguga

SEQ ID NO: 117454 - RNA, 1410 nt, Artificial Sequence
  derived and/or modified CDS sequence (opt2) from neuraminidase__InfluenzaA__AEW25530
augaaccccaaccagaagaucaucaccaucggcuccgucugcaugaccaucggcauggccaaccucauccuccagaucggcaacaucaucuccaucuggaucucccacuccauccagcucggcaaccagaaccagaucgagaccugcaaccaguccgucaucaccuacgagaacaacaccugggucaaccacaccuacgucaacaucuccaacaccaacuucgccgccggccaguccgucgucuccgucaagcucgccggcaacuccucccucugccccgucuccggcugggccaucuacuccaaggacaacuccauccgcaucggcuccaagggcgacgucuucgucauccgcgagcccuucaucuccugcuccccccucgagugccgcaccuucuuccucacccagggcgcccuccucaacgacaagcacuccaacggcaccaucaaggaccgcucccccuaccgcacccucauguccugccccaucggcgagguccccucccccuacaacucccgcuucgaguccgucgccugguccgccuccgccugccacgacggcaucaacuggcucaccaucggcaucuccggccccgacaacggcgccgucgccguccucaaguacaacggcaucaucaccgacaccaucaaguccuggcgcuacaacauccuccgcacccaggaguccgagugcgccugcgucaacggcuccugcuucaccgucaugaccgacggccccuccgacggccaggccuccuacaagaucuuccgcaucgagaagggcaagaucgucaaguccgucgagaugaacgcccccaacuaccacuacgaggagugcuccugcuaccccgacuccuccgagaucaccugcgucugccgcgacaacuggcacggcuccaaccgccccugggucuccuucaaccagaaccucgaguaccagaucggcuacaucugcuccggcaucuucggcgacaacccccgccccaacgacaagaccggcuccugcggccccgucuccuccaacggcgagaacggcgucaagggcuucuccuucaaguacggcaacggcgucuggaucggccgcaccaaguccaucuccucccgcaacggcuucgagaugaucugggaccccaacggcuggaccggcaccgacaacaacuucuccaucaagcaggacaucgucggcaucaacgagugguccggcuacuccggcuccuucguccagcaccccgagcucaccggccucgacugcauccgccccugcuucugggucgagcucauccgcggccgccccaaggagaacaccaucuggaccuccggcuccuccaucuccuucugcggcgucaacuccgacaccgucggcugguccuggcccgacggcgccgagcuccccuucaccaucgacaaguga

SEQ ID NO: 117455 - RNA, 1410 nt, Artificial Sequence
  derived and/or modified CDS sequence (opt2) from neuraminidase__InfluenzaA__AEW25537
augaaccccaaccagaagaucaucaccaucggcuccgucugcaugaccaucggcauggccaaccucauccuccagaucggcaacaucaucuccaucuggaucucccacuccauccagcucggcaaccagaaccagaucgagaccugcaaccaguccgucaucaccuacgagaacaacaccugggucaaccagaccuacgucaacaucuccaacaccaacuucgccgccggccaguccgucgucuccgucaagcucgccggcaacuccucccucugccccgucuccggcugggccaucuacuccaaggacaacuccauccgcaucggcuccaagggcgacgucuucgucauccgcgagcccuucaucuccugcuccccccucgagugccgcaccuucuuccucacccagggcgcccuccucaacgacaagcacuccaacggcaccaucaaggaccgcucccccuaccgcacccucauguccugccccaucggcgagguccccucccccuacaacucccgcuucgaguccgucgccugguccgccuccgccugccacgacggcaucaacuggcucaccaucggcaucuccggccccgacaacggcgccgucgccguccucaaguacaacggcaucaucaccgacaccaucaaguccuggcgcaacaacauccuccgcacccaggaguccgagugcgccugcgucaacggcuccugcuucaccgucaugaccgacggccccuccgacggccaggccuccuacaagaucuuccgcaucgagaagggcaagaucgucaaguccgucgagaugaacgcccccaaccaccacuacgaggagugcuccugcuaccccgacuccuccgagaucaccugcgucugccgcgacaacuggcacggcuccaaccgccccugggucuccuucaaccagaaccucgaguaccagaucggcuacaucugcuccggcaucuucggcgacaacccccgccccaacgacaagaccggcuccugcggccccgucuccuccaacggcgccaacggcgucaagggcuucuccuucaaguacggcaacggcgucuggaucggccgcaccaaguccaucuccucccgcaacggcuucgagaugaucugggaccccaacggcuggaccggcaccgacaacaacuucuccaucaagcaggacaucgucggcaucaacgagugguccggcuacuccggcuccuucguccagcaccccgagcucaccggccucgacugcauccgccccugcuucugggucgagcucauccgcggccgccccaaggagaacaccaucuggaccuccggcuccuccaucuccuucugcggcgucaacuccgacaccgucggcugguccuggcccgacggcgccgagcuccccuucaccaucgacaaguga

SEQ ID NO: 117456 - RNA, 1410 nt, Artificial Sequence; identical to SEQ ID NO: 112774
  derived and/or modified CDS sequence (opt2) from neuraminidase__InfluenzaA__AEW25547

SEQ ID NO: 117457 - RNA, 1410 nt, Artificial Sequence; identical to SEQ ID NO: 112774
  derived and/or modified CDS sequence (opt2) from neuraminidase__InfluenzaA__AEW25556

SEQ ID NO: 117458 - RNA, 1410 nt, Artificial Sequence; identical to SEQ ID NO: 112774
  derived and/or modified CDS sequence (opt2) from neuraminidase__InfluenzaA__AEW25566

SEQ ID NO: 117459 - RNA, 1410 nt, Artificial Sequence
  derived and/or modified CDS sequence (opt2) from neuraminidase__InfluenzaA__AEW25584
augaaccccaaccagaagaucaucaccaucggcuccgucugcaugaccaucggcauggccaaccucauccuccagaucggcaacaucaucuccaucuggaucucccacuccauccagcucggcaaccagaaccagaucgagaccugcaaccaguccgucaucaccuacgagaacaacaccugggucaaccagaccuacgucaacaucuccaacaccaacuucgccgccggccaguccgucgucuccgucaagcucgccggcaacuccucccucugccccgucuccggcugggccaucuacuccaaggacaacuccauccgcaucggcuccaagggcgacgucuucgucauccgcgagcccuucaucuccugcuccccccucgagugccgcaccuucuuccucacccagggcgcccuccucaacgacaagcacuccaacggcaccaucaaggaccgcucccccuaccgcacccucauguccugccccaucggcgagguccccucccccuacaacucccgcuucgaguccgucgccugguccgccuccgccugccacgacggcaucaacuggcucaccaucggcaucuccggccccgacaacggcgccgucgccguccucaaguacaacggcaucaucaccgacaccaucaaguccuggcgcaacaacauccuccgcacccaggaguccgagugcgccugcgucaacggcuccugcuucaccgucaugaccgacggccccuccgacggccaggccuccuacaagaucuuccgcaucgagaagggcaagaucgucaaguccgucgagaugaacgcccccaacuaccacuacgaggagugcuccugcuaccccgacuccuccgagaucaccugcgucugccgcgacaacuggcacggcuccaaccgccccugggucuccuucaaccagaaccucgaguaccagaucggcuacaucugcuccggcaucuucggcgacaacccccgccccaacgacaagaccggcuccugcggccccgucuccuccaacggcgccaacggcgucaagggcuucuccuucaaguacggcaacggcgucuggaucggccgcaccaaguccaucuccucccgcaacggcuucgagaugaucugggaccccaacggcuggaccggcaccgacaacaacuucuccaucaagcagggcaucgucggcaucaacgagugguccggcuacggcggcuccuucguccagcaccccgagcucaccggccucgacugcauccgccccugcuucugggucgagcucauccgcggccgccccaaggagaacaccaucuggaccuccggcuccuccaucuccuucugcggcgucaacuccgacaccgucggcugguccuggcccgacggcgccgagcuccccuucaccaucgacaaguga

SEQ ID NO: 117460 - RNA, 1410 nt, Artificial Sequence; identical to SEQ ID NO: 112774
  derived and/or modified CDS sequence (opt2) from neuraminidase__InfluenzaA__AEW25592

SEQ ID NO: 117461 - RNA, 1410 nt, Artificial Sequence
  derived and/or modified CDS sequence (opt2) from neuraminidase__InfluenzaA__AEW25602
augaaccccaaccagaagaucaucaccaucggcuccgucugcaugaccaucggcauggccaaccucauccuccagaucggcaacaucaucuccaucuggaucucccacuccauccagcucggcaaccagaaccagaucgagaccugcaaccaguccgucaucaccuacgagaacaacaccugggucaaccagaccuacgucaacaucuccaacaccaacuucgccgccggccaguccgucgucuccgucaagcucgccggcaacuccucccucugccccgucuccggcugggccaucuacuccaaggacaacuccauccgcaucggcuccaagggcgacgucuucgucauccgcgagcccuucaucuccugcuccccccucgagugccgcaccuucuuccucacccagggcgcccuccucaacgacaagcacuccaacggcaccaucaaggaccgcucccccuaccgcacccucauguccugccccaucggcgagguccccucccccuacaacucccgcuucgaguccgucgccugguccgccuccgccugccacgacggcaucaacuggcucaccaucggcaucuccggccccgacaacggcgccgucgccguccucaaguacaacggcaucaucaccgacaccaucaaguccuggcgcaacaacauccuccgcacccaggaguccgagugcgccugcgucaacggcuccugcuucaccgucaugaccgacggccccuccgacggccaggccuccuacaagaucuuccgcaucgagaagggcaagaucgucaaguccgucgagaugaacgcccccaacuaccacuacgaggagugcuccugcuaccccgacuccuccgagaucaccugcgucugccgcgacaacuggcacggcuccaaccgccccugggucuccuucaaccagaaccucgaguaccagaucggcuacaucugcuccggcaucuucggcgacaacccccgccccaacgacaagaccggcuccugcggccccgucuccuccaacggcgccaacggcgucaagggcuucuccuucaaguacggcaacggcgucuggaucggccgcaccaaguccaucuccucccgcaacggcuucgagaugaucugggaccccaacggcuggaccggcaccgacaagaacuucuccaucaagcaggacaucgucggcaucaacgagugguccggcuacuccggcuccuucguccagcaccccgagcucaccggccucgacugcauccgccccugcuucugggucgagcucauccgcggccgccccaaggagaacaccaucuggaccuccggcuccuccaucuccuucugcggcgucaacuccgacaccgucggcugguccuggcccgacggcgccgagcuccccuucaccaucgacaaguga

SEQ ID NO: 117462 - RNA, 1410 nt, Artificial Sequence
  derived and/or modified CDS sequence (opt2) from neuraminidase__InfluenzaA__AEW25612
augaaccccaaccagaagaucaucaccaucggcuccgucugcaugaccaucggcauggccaaccucauccuccagaucggcaacaucaucuccaucuggaucucccacuccauccagcucggcaaccagaaccagaucgagaccugcaaccaguccgucaucaccuacgagaacaacaccugggucaaccagaccuacgucaacaucuccaacaccaacuucgccgccggccaguccgucgucuccgucaagcucgccggcaacuccucccucugccccgucuccggcugggccaucuacuccaaggacaacuccauccgcaucggcuccaagggcgacgucuucgucauccgcgagcccuucaucuccugcuccccccucgagugccgcaccuucuuccucacccagggcgcccuccucaacgacaagcacuccaacggcaccaucaaggaccgcucccccuaccgcacccucauguccugccccaucggcgagguccccucccccuacaacucccgcuucgaguccgucgccugguccgccuccgccugccacgacggcaucaacuggcucaccaucggcaucuccggccccgacaacggcgccgucgccguccucaaguacaacggcaucaucaccgacaccaucaaguccuggcgcaacaacauccuccgcacccaggaguccgagugcgccugcgucaacggcuccugcuucaccgucaugaccgacggccccuccgaccgccaggccuccuacaagaucuuccgcaucgagaagggcaagaucgucaaguccgucgagaugaacgcccccaacuaccacuacgaggagugcuccugcuaccccgacuccuccgagaucaccugcgucugccgcgacaacuggcacggcuccaaccgccccugggucuccuucaaccagaaccucgaguaccagaucggcuacaucugcuccggcaucuucggcgacaacccccgccccaacgacaagaccggcuccugcggccccgucuccuccaacggcgccaacggcgucaagggcuucuccuucaaguacggcaacggcgucuggaucggccgcaccaaguccaucuccucccgcaacggcuucgagaugaucugggaccccaacggcuggaccggcaccgacaacaacuucuccaucaagcaggacaucgucggcaucaacgagugguccggcuacuccggcuccuucguccagcaccccgagcucaccggccucgacugcauccgccccugcuucugggucgagcucauccgcggccgccccaaggagaacaccaucuggaccuccggcuccuccaucuccuucugcggcgucaacuccgacaccgucggcugguccuggcccgacggcgccgagcuccccuucaccaucgacaaguga

SEQ ID NO: 117463 - RNA, 1410 nt, Artificial Sequence
  derived and/or modified CDS sequence (opt2) from neuraminidase__InfluenzaA__AEW25622
augaaccccaaccagaagaucaucaccaucggcuccgucugcaugaccaucggcauggccaaccucauccuccagaucggcaacaucaucuccaucuggaucucccacuccauccagcucggcaaccagaaccagaucgagaccugcaaccaguccgucaucaccuacgagaacaacaccugggucaaccagaccuacgucaacaucuccaacaccaacuucgccgccggccaguccgucgucuccgucaagcucgccggcaacuccucccucugccccgucuccggcugggccaucuacuccaaggacaacuccauccgcaucggcuccaagggcgacgucuucgucauccgcgagcccuucaucuccugcuccccccucgagugccgcaccuucuuccucacccagggcgcccuccucaacgacaagcacuccaacggcaccaucaaggaccgcucccccuaccgcacccucauguccugccccaucggcgagguccccucccccuacaacucccgcuucgaguccgucgccugguccgccuccgccugccacgacggcaucaacuggcucaccaucggcaucuccggccccgacaacggcgccgucgccguccucaaguacaacggcaucaucaccgacaccaucaaguccuggcgcaacaacauccuccgcacccaggaguccgagugcgccugcgucaacggcuccugcuucaccgucaugaccgacggccccuccgacggccaggccuccuacaagaucuuccgcaucgagaagggcaagaucgucaaguccgucgagaugaacgcccccaacuaccacuacgaggagugcuccugcuaccccgacuccuccgagaucaccugcgucugccgcgacaacuggcacggcuccaaccgccccugggucuccuucaaccagaaccucgaguaccagaucggcuacaucugcuccggcaucuucggcgacaacccccgccccaacgacaagaccggcuccugcggccccgucuccuccaacggcgccaacggcgucaagggcuucuccuucaaguacggcaacggcgucuggaucggccgcaccaaguccaucuccucccgcaacggcuucgagaugaucugggaccccaacggcuggaccggcaccgacaacaacuucuccaucaagcaggacaucgucggcaucaacgagugguccggcuacuccggcuccuucguccagcaccccgagcucaccggccucgacugcauccgccccugcuucugggucgagcucauccgcggccgccccaaggagaacuccaucuggaccuccggcuccuccaucuccuucugcggcgucaacuccgacaccgucggcugguccuggcccgacggcgccgagcuccccuucaccaucgacaaguga

SEQ ID NO: 117464 - RNA, 1410 nt, Artificial Sequence
  derived and/or modified CDS sequence (opt2) from neuraminidase__InfluenzaA__AEW25631
augaaccccaaccagaagaucaucaccaucggcuccgucugcaugaccaucggcauggccaaccucauccuccagaucggcaacaucaucuccaucuggaucucccacuccauccagcucggcaaccagaaccagaucgagaccugcaaccaguccgucaucaccuacgagaacaacaccugggucaaccagaccuacgucaacaucuccaacaccaacuucgccgccggccaguccgucgucuccgucaagcucgccggcaacuccucccucugccccgucuccggcugggccaucuacuccaaggacaacuccauccgcaucggcuccaagggcgacgucuucgucauccgcgagcccuucaucuccugcuccccccucgagugccgcaccuucuuccucacccagggcgcccuccucaacgacaagcacuccaacggcaccaucaaggaccgcucccccuaccgcacccucauguccugccccaucggcgagguccccucccccuacaacucccgcuucgaguccgucgccugguccgccuccgccugccacgacggcaucaacuggcucaccaucggcaucuccggccccgacaacggcgccgucgccguccucaaguacaacggcaucaucaccgacaccaucaaguccuggcgcaacaacauccuccgcacccaggaguccgagugcgccugcgucaacggcuccugcuucaccgucaugaccgacggccccuccgacggccaggccuccuacaagaucuuccgcaucgagaagggcaagaucgucaaguccgucgagaugaacgcccccaacuaccacuacgaggagugcuccugcuaccccgacuccuccgagaucaccugcgucugccgcgacaacuggcacggcuccaaccgccccugggucuccuucaaccagaaccucgaguaccagaucggcuacaucugcuccggcaucuucggcgacaacccccgccccaacgacaagaccggcuccugcggccccgucuccuccaacggcgccuccggcgucaagggcuucuccuucaaguacggcaacggcgucuggaucggccgcaccaaguccaucuccucccgcaacggcuucgagaugaucugggaccccaacggcuggaccggcaccgacaacaacuucuccaucaagcaggacaucgucggcaucaacgagugguccggcuacuccggcuccuucguccagcaccccgagcucaccggccucgacugcauccgccccugcuucugggucgagcucauccgcggccgccccaaggagaacaccaucuggaccuccggcuccuccaucuccuucugcggcgucaacuccgacaccgucggcugguccuggcccgacggcgccgagcuccccuucaccaucgacaaguga

SEQ ID NO: 117465 - RNA, 1410 nt, Artificial Sequence; identical to SEQ ID NO: 112774
  derived and/or modified CDS sequence (opt2) from neuraminidase__InfluenzaA__AEW25639

SEQ ID NO: 117466 - RNA, 1410 nt, Artificial Sequence
  derived and/or modified CDS sequence (opt2) from neuraminidase__InfluenzaA__AEW25648
augaaccccaaccagaagaucaucaccaucggcuccgucugcaugaccaucggcauggccaaccucauccuccagaucggcaacaucaucuccaucuggaucucccacuccauccagcucggcaaccagaaccagaucgagaccugcaaccaguccgucaucaccuacgagaacaacaccugggucaaccacaccuacgucaacaucuccaacaccaacuucgccgccggccaguccgucgucuccgucaagcucgccggcaacuccucccucugccccgucuccggcugggccaucuacuccaaggacaacuccauccgcaucggcuccaagggcgacgucuucgucauccgcgagcccuucaucuccugcuccccccucgagugccgcaccuucuuccucacccagggcgcccuccucaacgacaagcacuccaacggcaccaucaaggaccgcucccccuaccgcacccucauguccugccccaucggcgagguccccucccccuacaacucccgcuucgaguccgucgccugguccgccuccgccugccacgacggcaucaacuggcucaccaucggcaucuccggccccgacaacggcgccgucgccguccucaaguacaacggcaucaucaccgacaccaucaaguccuggcgcaacaacauccuccgcacccaggaguccgagugcgccugcgucaacggcuccugcuucaccgucaugaccgacggccccuccgacggccaggccuccuacaagaucuuccgcaucgagaagggcaagaucgucaaguccgucgagaugaacgcccccaacuaccacuacgaggagugcuccugcuaccccgacuccuccgagaucaccugcgucugccgcgacaacuggcacggcuccaaccgccccugggucuccuucaaccagaaccucgaguaccagaucggcuacaucugcuccggcaucuucggcgacaacccccgccccaacgacaagaccggcuccugcggccccgucuccuccaacggcgccaacggcgucaagggcuucuccuucaaguacggcaacggcgucuggaucggccgcaccaaguccaucuccucccgcaacggcuucgagaugaucugggaccccaacggcuggaccggcaccgacaacaacuucuccaucaagcaggacaucgucggcaucaacgagugguccggcuacuccggcuccuucguccagcaccccgagcucaccggccucgacugcauccgccccugcuucugggucgagcucauccgcggccgccccaaggagaacaccaucuggaccuccggcuccuccaucuccuucugcggcgucaacuccgacaccgucggcugguccuggcccgacggcgccgagcuccccuucaccaucgacaaguga

SEQ ID NO: 117467 - RNA, 1410 nt, Artificial Sequence
  derived and/or modified CDS sequence (opt2) from neuraminidase__InfluenzaA__AEW25656
augaaccccaaccagaagaucaucaccaucggcuccgucugcaugaccaucggcauggccaaccucauccuccagaucggcaacaucaucuccaucuggaucucccacuccauccagcucggcaaccagaaccagaucgagaccugcaaccaguccgucaucaccuacgagaacaacaccugggucaaccagaccuacgucaacaucuccaacaccaacuucgccgccggccaguccgucgucuccgucaagcucgccggcaacuccucccucugccccgucuccggcugggccaucuacuccaaggacaacuccauccgcaucggcuccaagggcgacgucuucgucauccgcgagcccuucaucuccugcuccccccucgagugccgcaccuucuuccucacccagggcgcccuccucaacgacaagcacuccaacggcaccaucaaggaccgcucccccuaccgcacccucauguccugccccaucggcgagguccccucccccuacaacucccgcuucgaguccgucgccugguccgccuccgccugccacgacggcaucaacuggcucaccaucggcaucuccggccccgacaacggcgccgucgccguccucaaguacaacggcaucaucaccgacaccaucaaguccuggcgcaacaacauccuccgcacccaggaguccgagugcgccugcgucaacggcuccugcuucaccgucaugaccgacggccccuccgacggccaggccuccuacaagaucuuccgcaucgagaagggcaagaucgucaaguccgucgagaugaacgcccccaacuaccacuacgaggagugcuccugcuaccccgacuccuccgagaucaccugcgucugccgcgacaacuggcacggcuccaaccgccccugggucuccuucaaccagaaccucgaguaccagaucggcuacaucugcuccggcaucuucggcgacaacccccgccccaacgacaagaccggcuccugcggccccgucuccuccaacggcgccaacggcgucaagggcuucuccuucaaguacggcaacggcgucuggaucggccgcaccaaguccaucuccucccgcaacggcuucgagaugaucugggaccccaacggcuggaccggcaccgacaacaacuuccccaucaagcaggacaucgucggcaucaacgagugguccggcuacuccggcuccuucguccagcaccccgagcucaccggccucgacugcauccgccccugcuucugggucgagcucauccgcggccgccccaaggagaacaccaucuggaccuccggcuccuccaucuccuucugcggcgucaacuccgacaccgucggcugguccuggcccgacggcgccgagcuccccuucaccaucgacaaguga

SEQ ID NO: 117468 - RNA, 1410 nt, Artificial Sequence
  derived and/or modified CDS sequence (opt2) from neuraminidase__InfluenzaA__AEW25664
augaaccccaaccagaagaucaucaccaucggcuccgucugcaugaccaucggcauggccaaccucauccuccagaucggcaacaucaucuccaucuggaucucccacuccauccagcucggcaaccagaaccagaucgagaccugcaaccaguccgucaucaccuacgagaacaacaccugggucaaccagaccuacgucaacaucuccaacaccaacuucaccgccggccaguccgucgucuccgucaagcucgccggcaacuccucccucugccccgucuccggcugggccaucuacuccaaggacaacuccauccgcaucggcuccaagggcgacgucuucgucauccgcgagcccuucaucuccugcuccccccucgagugccgcaccuucuuccucacccagggcgcccuccucaacgacaagcacuccaacggcaccaucaaggaccgcucccccuaccgcacccucauguccugccccaucggcgagguccccucccccuacaacucccgcuucgaguccgucgccugguccgccuccgccugccacgacggcaucaacuggcucaccaucggcaucuccggccccgacaacggcgccgucgccguccucaaguacaacggcaucaucaccgacaccaucaaguccuggcgcaacaacauccuccgcacccaggaguccgagugcgccugcgucaacggcuccugcuucaccgucaugaccgacggccccuccgacggccaggccuccuacaagaucuuccgcaucgagaagggcaagaucgucaaguccgucgagaugaacgcccccaacuaccacuacgaggagugcuccugcuaccccgacuccuccgagaucaccugcgucugccgcgacaacuggcacggcuccaaccgccccugggucuccuucaaccagaaccucgaguaccagaucggcuacaucugcuccggcaucuucggcgacaacccccgccccaacgacaagaccggcuccugcggccccgucuccuccaacggcgccaacggcgucaagggcuucuccuucaaguacggcaacggcgucuggaucggccgcaccaaguccaucuccucccgcaacggcuucgagaugaucugggaccccaacggcuggaccggcaccgacaacaacuucuccaucaagcaggacaucgucggcaucaacgagugguccggcuacuccggcuccuucguccagcaccccgagcucaccggccucgacugcauccgccccugcuucugggucgagcucauccgcggccgccccaaggagaacaccaucuggaccuccggcuccuccaucuccuucugcggcgucaacuccgacaccggcggcugguccuggcccgacggcgccgagcuccccuucaccaucgacaaguga

SEQ ID NO: 117469 - RNA, 1410 nt, Artificial Sequence; identical to SEQ ID NO: 117463
  derived and/or modified CDS sequence (opt2) from neuraminidase__InfluenzaA__AEW25671

SEQ ID NO: 117470 - RNA, 1410 nt, Artificial Sequence; identical to SEQ ID NO: 113951
  derived and/or modified CDS sequence (opt2) from neuraminidase__InfluenzaA__AEW25680

SEQ ID NO: 117471 - RNA, 1410 nt, Artificial Sequence
  derived and/or modified CDS sequence (opt2) from neuraminidase__InfluenzaA__AEW25689
augaaccccaaccagaagaucaucaccaucggcuccgucugcaugaccaucggcauggccaaccucauccuccagaucggcaacaucaucuccaucuggaucucccacuccauccagcucggcaaccagaaccagaucgagaccugcaaccaguccgucaucaccuacgagaacaacaccugggucaaccagaccuacgucaacaucuccaacaccaacuucgccgccggccaguccgucgucuccgucaagcucgccggcaacuccucccucugccccgucuccggcugggccaucuacuccaaggacaacuccauccgcgucggcuccaagggcgacgucuucgucauccgcgagcccuucaucuccugcuccccccucgagugccgcaccuucuuccucacccagggcgcccuccucaacgacaagcacuccaacggcaccaucaaggaccgcucccccuaccgcacccucauguccugccccaucggcgagguccccucccccuacaacucccgcuucgaguccgucgccugguccgccuccgccugccacgacggcaucaacuggcucaccaucggcaucuccggccccgacaacggcgccgucgccguccucaaguacaacggcaucaucaccgacaccaucaaguccuggcgcaacaacauccuccgcacccaggaguccgagugcgccugcgucaacggcuccugcuucaccgucaugaccgacggccccuccgacggccaggccuccuacaagaucuuccgcaucgagaagggcaagaucgucaaguccgucgagaugaacgcccccaacuaccacuacgaggagugcuccugcuaccccgacuccuccgagaucaccugcgucugccgcgacaacuggcacggcuccaaccgccccugggucuccuucaaccagaaccucgaguaccagaucggcuacaucugcuccggcaucuucggcgacaacccccgccccaacgacaagaccggcuccugcggccccgucuccuccaacggcgccaacggcgucaagggcuucuccuucaaguacggcaacggcgucuggaucggccgcaccaaguccaucuccucccgcaacggcuucgagaugaucugggaccccaacggcuggaccggcaccgacaacaacuucuccaucaagcaggacaucgucggcaucaacgagugguccggcuacuccggcuccuucguccagcaccccgagcucaccggccucgacugcauccgccccugcuucugggucgagcucauccgcggccgccccaaggagaacaccaucuggaccuccggcuccuccaucuccuucugcggcgucaacuccgacaccgucggcugguccuggcccgacggcgccgagcuccccuucaccaucgacaaguga

SEQ ID NO: 117472 - RNA, 1410 nt, Artificial Sequence; identical to SEQ ID NO: 117466
  derived and/or modified CDS sequence (opt2) from neuraminidase__InfluenzaA__AEW25698

SEQ ID NO: 117473 - RNA, 1410 nt, Artificial Sequence; identical to SEQ ID NO: 112774
  derived and/or modified CDS sequence (opt2) from neuraminidase__InfluenzaA__AEW25708

SEQ ID NO: 117474 - RNA, 1410 nt, Artificial Sequence; identical to SEQ ID NO: 112774
  derived and/or modified CDS sequence (opt2) from neuraminidase__InfluenzaA__AEX09177

SEQ ID NO: 117475 - RNA, 1413 nt, Artificial Sequence
  derived and/or modified CDS sequence (opt2) from neuraminidase__InfluenzaA__AEX33324
augaaccccaaccagaagaucaucaccaucggcuccaucuccaucgccaucggcaucaucucccucaugcuccagaucggcaacaucaucuccaucugggccucccacuccauccagaccggcucccagaaccacaccggcaucugcaaccagcgcaucaucaccuacgagaacuccaccugggucaaccacaccuacgucaccaucaacaacaccaacgucgucgccggcaaggacaagaccuccgucacccucgccggcaacuccucccucugcuccaucuccggcugggccaucuacaccaaggacaacuccauccgcaucggcuccaagggcgacgucuucgucauccgcgagcccuucaucuccugcucccaccucgagugccgcaccuucuuccucacccagggcgcccuccucaacgacaagcacuccaacggcaccgucaaggaccgcucccccuaccgcgcccucauguccugcccccucggcgaggcccccucccccuacaacuccaaguucgaguccgucgccugguccgccuccgccugccacgacggcaugggcuggcucaccaucggcaucuccggccccgacaacggcgccgucgccguccucaaguacaacggcaucaucaccgagaccaucaaguccuggaagaagcgcauccuccgcacccaggaguccgagugcgucugcgucaacggcuccugcuucaccaucaugaccgacggccccuccaacggcgccgccuccuacaagaucuucaagaucgagaagggcaaggucaccaaguccaucgagcucaacgcccccaacuuccacuacgaggagugcuccugcuaccccgacaccggcaccgucaugugcgucugccgcgacaacuggcacggcuccaaccgccccugggucuccuucaaccagaaccucgacuaccagaucggcuacaucugcuccggcgucuucggcgacaacccccgccccaaggacggcgagggcuccugcaaccccgucaccgucgacggcgccgacggcgucaagggcuucuccuacaaguacggcaacggcgucuggaucggccgcaccaaguccaaccgccuccgcaagggcuucgagaugaucugggaccccaacggcuggaccgacaccgacuccgacuucuccgucaagcaggacgucgucgccaucaccgacugguccggcuacuccggcuccuucguccagcaccccgagcucaccggccucgacugcauccgccccugcuucugggucgagcucguccgcggccucccccgcgagaacaccaccaucuggaccuccggcuccuccaucuccuucugcggcgucaacuccgacaccgccaacugguccuggcccgacggcgccgagcuccccuucaccaucgacaaguga

SEQ ID NO: 117476 - RNA, 1413 nt, Artificial Sequence
  derived and/or modified CDS sequence (opt2) from neuraminidase__InfluenzaA__AEX33368
augaaccccaaccagaagaucaucaccaucggcuccaucuccaucgccaucggcaucaucucccucaugcuccagaucggcaacaucaucuccaucugggccucccacuccauccagaccggcucccagaaccacaccggcaucugcaaccagcgcaucaucaccuacgagaacuccaccugggucaaccacaccuacgucaacaucaacaacaccaacgucgucgccggcaaggacaagaccuccgucacccucgccggcaacuccucccucugcgccaucuccggcugggccaucuacaccaaggacaacuccauccgcaucggcuccaagggcgacgucuucgucauccgcgagcccuucaucuccugcucccaccucgagugccgcaccuucuuccucacccagggcgcccuccucaacgacaagcacuccaacggcaccgucaaggaccgcucccccuaccgcgcccucauguccugcccccucggcgaggcccccucccccuacaacuccaaguucgaguccgucgccugguccgccuccgccugccacgacggcaugggcuggcucaccaucggcaucuccggccccgacaacggcgccgucgccguccucaaguacaacggcaucaucaccgagaccaucaaguccuggaagaagcgcauccuccgcacccaggaguccgagugcgucugcgucaacggcuccugcuucaccaucaugaccgacggccccuccaacggcgccgccuccuacaagaucuucaagaucgagaagggcaaggucaccaaguccaucgagcucaacgcccccaacuuccacuacgaggagugcuccugcuaccccgacaccggcaccgucaugugcgucugccgcgacaacuggcacggcuccaaccgccccugggucuccuucaaccagaaccucgacuaccagaucggcuacaucugcuccggcgucuucggcgacaacccccgccccaaggacggcgagggcuccugcaaccccgucaccgucgacggcgccgacggcgucaagggcuucuccuacaaguacggcaacggcgucuggaucggccgcaccaaguccaaccgccuccgcaagggcuucgagaugaucugggaccccaacggcuggaccgacaccgacuccgacuucuccgucaagcaggacgucgucgccaucaccgacugguccggcuacuccggcuccuucguccagcaccccgagcucaccggccucgacugcauccgccccugcuucugggucgagcucguccgcggccucccccgcgagaacaccaccaucuggaccuccggcuccuccaucuccuucugcggcgucaacuccgacaccgccaacugguccuggcccgacggcgccgagcuccccuucaccaucgacaaguga

SEQ ID NO: 117477 - RNA, 1413 nt, Artificial Sequence
  derived and/or modified CDS sequence (opt2) from neuraminidase__InfluenzaA__AEX33379
augaaccccaaccagaagaucaucaccaucggcuccaucuccaucgccaucggcaucaucucccucaugcuccagaucggcaacaucaucuccaucugggccucccacuccauccagaccggcauccagaaccacaccggcaucugcaaccagcgcaucaucaccuacgagaacuccaccugggucaaccacaccuacgucaccaucaacaacaccaacgucgucgccggcaaggacaagaccuccgucacccucgccggcaacuccucccucugcuccaucuccggcugggccaucuacaccaaggacaacuccauccgcaucggcuccaagggcgacgucuucgucauccgcgagcccuucaucuccugcucccaccucgagugccgcaccuucuuccucacccagggcgcccuccucaacgacaagcacuccaacggcaccgucaaggaccgcucccccuaccgcgcccucauguccugcccccucggcgaggcccccucccccuacaacuccaaguucgaguccgucgccugguccgccuccgccugccacgacggcaugggcuggcucaccaucggcaucuccggccccgacaacggcgccgucgccguccucaaguacaacggcaucaucaccgagaccaucaaguccuggaagaagcgcauccuccgcacccaggaguccgagugcgucugcgucaacggcuccugcuucaccaucaugaccgacggccccuccaacggcgccgccuccuacaagaucuucaagaucgagaagggcaaggucaccaaguccaucgagcucaacgcccccaacuuccacuacgaggagugcuccugcuaccccgacaccggcaccgucaugugcgucugccgcgacaacuggcacggcuccaaccgccccugggucuccuucaaccagaaccucgacuaccagaucggcuacaucugcuccggcgucuucggcgacaacccccgcccccgcgacggcgagggcuccugcaaccccgucaccgucgacggcgccgacggcgucaagggcuucuccuacaaguacggcaacggcgucuggaucggccgcaccaaguccaaccgccuccgcaagggcuucgagaugaucugggaccccaacggcuggaccgacaccgacuccgacuucuccgucaagcaggacgucgucgccaucaccgacugguccggcuacuccggcuccuucguccagcaccccgagcucaccggccucgacugcauccgccccugcuucugggucgagcucguccgcggccucccccgcgagaacaccaccaucuggaccuccggcuccuccaucuccuucugcggcgucaacuccgacaccgccaacugguccuggcccgacggcgccgagcuccccuucaccaucgacaaguga

SEQ ID NO: 117478 - RNA, 1413 nt, Artificial Sequence; identical to SEQ ID NO: 117477
  derived and/or modified CDS sequence (opt2) from neuraminidase__InfluenzaA__AEX33390

SEQ ID NO: 117479 - RNA, 1413 nt, Artificial Sequence; identical to SEQ ID NO: 117477
  derived and/or modified CDS sequence (opt2) from neuraminidase__InfluenzaA__AEX33401

SEQ ID NO: 117480 - RNA, 1413 nt, Artificial Sequence; identical to SEQ ID NO: 117477
  derived and/or modified CDS sequence (opt2) from neuraminidase__InfluenzaA__AEX33412

SEQ ID NO: 117481 - RNA, 1413 nt, Artificial Sequence; identical to SEQ ID NO: 117477
  derived and/or modified CDS sequence (opt2) from neuraminidase__InfluenzaA__AEX33423

SEQ ID NO: 117482 - RNA, 1413 nt, Artificial Sequence; identical to SEQ ID NO: 117477
  derived and/or modified CDS sequence (opt2) from neuraminidase__InfluenzaA__AEX33434

SEQ ID NO: 117483 - RNA, 1413 nt, Artificial Sequence; identical to SEQ ID NO: 117477
  derived and/or modified CDS sequence (opt2) from neuraminidase__InfluenzaA__AEX33445

SEQ ID NO: 117484 - RNA, 1410 nt, Artificial Sequence
  derived and/or modified CDS sequence (opt2) from neuraminidase__InfluenzaA__AEX33544
augaaccccaaccagaagaucaucaccaucggcuccuucucccucaccaucgccgccaucugcuuccucaugcagaucgccauccucgucaccaccgucacccuccacuucaagcagcacgagugcaacuccccccccaacaaccaggucaugcucugcgagcccaccaucaucgagcgcaacaucaccgagaucgucuaccucaccaacaccaccaucgagaaggagaucugccccaagcucgccgaguaccgcaacugguccaagccccagugcaacaucaccggcuucgcccccuucuccaaggacaacuccauccgccucuccgccggcggcgacaucugggucacccgcgagcccuacgucuccugcgaccccgacaagugcuaccaguucgcccucggccagggcaccacccucaacaacggccacuccaacgacaccguccacgaccgcacccccuaccgcacccuccucaugaacgagcucggcguccccuuccaccucggcacccgccaggucugcaucgccugguccuccuccuccugccacgacggcaaggccuggcuccacgucugcgucaccggcgacgacaagaacgccaccgccuccuucaucuacaacggccgccucgucgacuccaucggcuccugguccaagaagauccuccgcacccaggaguccgagugcgucugcaucaacggcaccugcaccgucgucaugaccgacggcuccgccuccggcaaggccgacaccaagauccucuucaucgaggagggcaagaucguccacaucuccacccucuccggcuccgcccagcacgucgaggagugcuccugcuacccccgcuaccccggcguccgcugcgucugccgcgacaacuggaagggcuccaaccgccccaucgucgacaucaacgucaaggacuacuccaucgucuccuccuacgucugcuccggccucgucggcgacaccccccgcaagaacgacuccuucuccuccucccacugccucgaccccaacaacgaggagggcggccacggcgucaagggcugggccuucgacgacggcaacgacgucuggaugggccgcaccaucuccgagaagcuccgcuccggcuacgagaccuucaaggucaucgagggcugguccaagcccaacuccaagcuccagaucaaccgccaggucaucgucgagcgcggcaaccgcuccggcuacuccggcaucuucuccgucgagggcaaguccugcaucaaccgcugcuucuacgucgagcucauccgcggccgcaaggagaagaccgaggucugguggaccuccaacuccaucgucgucuucugcggcaccuccggcaccuacggcaccggcuccuggcccgacggcgccgacaucaaccucaugcccaucuga

SEQ ID NO: 117485 - RNA, 1410 nt, Artificial Sequence; identical to SEQ ID NO: 110750
  derived and/or modified CDS sequence (opt2) from neuraminidase__InfluenzaA__AEX33555

SEQ ID NO: 117486 - RNA, 1410 nt, Artificial Sequence
  derived and/or modified CDS sequence (opt2) from neuraminidase__InfluenzaA__AEX33610
augaaccccaaccagaagaucaucaccaucggcuccgucucccucaccaucuccaccaucugcuucuucaugcagaucgccauccucaucaccaccgucacccuccacuucaagcaguacgaguucaaccccccccccaacaaccaggucaugcucugcgagcccaccaucaucgagcgcaacaucaccgagaucgucuaccucaccaacaccaccaucgagaaggagaucugccccaagcucgccgaguaccgcaacugguccaagccccagugcgacaucaccggcuucgcccccuucuccaaggacaacuccauccgccucuccgccggcggcgacaucugggucacccgcgagcccuacgucuccugcgaccccgacaagugcuaccaguucgcccucggccagggcaccacccucaacaacguccacuccaacgacaccguccacgaccgcacccccuaccgcacccuccucaugaacgagcucggcguccccuuccaccucggcaccaagcaggucugcaucgccugguccuccuccuccugccacgacggcaaggccuggcuccacgucugcgucaccggcgacgacaagaacgccaccgccuccuucaucuacaacggccgccucgucgacuccaucgucuccugguccaagaagauccuccgcacccaggaguccgagugcgucugcaucaacggcaccugcaccgucgucaugaccgacggcuccgccuccggcaaggccgacaccaagauccucuucaucgaggagggcaagaucguccacaccuccacccucuccggcuccgcccagcacgucgaggagugcuccugcuacccccgcuaccccggcguccgcugcgucugccgcgacaacuggaagggcuccaaccgccccaucgucgacaucaacaucaaggacuacaacaucgucuccuccuacgucugcuccggccucgucggcgacaccccccgcaagaacgacuccuccuccuccucccacugccucgaccccaacaacgaggagggcggccacggcgucaagggcugggccuucgacgacggcaacgacgucuggaugggccgcaccaucuccgagaagcuccgcuccggcuacgagaccuucaaggucaucggcggcugguccaaccccaacuccaagcuccagaucaaccgccaggucaucgucgaccgcggcaaccgcuccggcuacuccggcaucuucuccgucgagggcaaguccugcaucaaccgcugcuucuacgucgagcucauccgcggccgcaaggaggagaccgagguccucuggaccuccaacuccaucgucgucuucugcggcaccuccggcaccuacggcaccggcuccuggcccgacggcgccgacaucaaccucaugcccaucuga

SEQ ID NO: 117487 - RNA, 1410 nt, Artificial Sequence
  derived and/or modified CDS sequence (opt2) from neuraminidase__InfluenzaA__AEX33828
augaaccccaaccagaagaucaucaccaucggcuccgucucccucaccaucuccaccaucugcuucuucaugcagaucgccauccucaucaccaccgucacccuccacuucaagcaguacgaguucaaccccccccccaacaaccaggucaugcucugcgagcccaccaucaucgagcgcaacaucaccgagaucgucuaccucaccaacaccaccaucgagaaggagaucugccccaagcucgccgaguaccgcaacugguccaagccccagugcgacaucaccggcuucgcccccuucuccaaggacaacuccauccgccucuccgccggcggcgacaucugggucacccgcgagcccuacgucuccugcgaccccgacaagugcuaccaguucgcccucggccagggcaccacccucaacaacguccacuccaacgacaccguccacgaccgcacccccuaccgcacccuccucaugaacgagcucggcguccccuuccaccucggcaccaagcaggucugcaucgccugguccuccuccuccugccacgacggcaaggccuggcuccacgucugcgucaccggcgacgacaagaacgccaccgccuccuucaucuacaacggccgccucgucgacuccaucgucuccugguccaaggagauccuccgcacccaggaguccgagugcgucugcaucaacggcaccugcaccgucgucaugaccgacggcuccgccuccggcaaggccgacaccaagauccucuucaucgaggagggcaagaucguccacaccuccacccucuccggcuccgcccagcacgucgaggagugcuccugcuacccccgcuaccccggcguccgcugcgucugccgcgacaacuggaagggcuccaaccgccccaucgucgacaucaacaucaaggacuacuccaucgucuccuccuacgucugcuccggccucgucggcgacaccccccgcaagaacgacuccuccuccuccucccacugccucgaccccaacaacgaggagggcggccacggcgucaagggcugggccuucgacgacggcaacgacgucuggaugggccgcaccaucuccgagaagcuccgcuccggcuacgagaccuucaaggucaucgagggcugguccaaccccaacuccaagcuccagaucaaccgccaggucaucgucgaccgcggcaaccgcuccggcuacuccggcaucuucuccgucgagggcaaguccugcaucaaccgcugcuucuacgucgagcucauccgcggccgcaaggaggagaccgagguccucuggaccuccaacuccaucgucgucuucugcggcaccuccggcaccuacggcaccggcuccuggcccgacggcgccgacaucaaccucaugcccaucuga

SEQ ID NO: 117488 - RNA, 1410 nt, Artificial Sequence; identical to SEQ ID NO: 110748
  derived and/or modified CDS sequence (opt2) from neuraminidase__InfluenzaA__AEX33839

SEQ ID NO: 117489 - RNA, 1413 nt, Artificial Sequence
  derived and/or modified CDS sequence (opt2) from neuraminidase__InfluenzaA__AEX33861
augaaccccaaccagaagaucaucaccaucggcuccaucuccaucgccaucggcaccaucucccucaugcuccaggucggcaacaucaucuccaucugggccucccacuccauccagaccggcucccagaaccacaccggcaucugcaaccagcgcaucaucaccuacgagaacuccaccugggucaaccacaccuacgucaacaucaacaacaccaacgucgucgccggcaaggacaagaccuccgucgcccucgccggcaacuccucccucugcuccaucuccggcugggccaucuacaccaaggacaacuccauccgcaucggcuccaagggcgacgucuucgucauccgcgagcccuucaucuccugcucccaccucgagugccgcaccuucuuccucacccagggcgcccuccucaacgacaagcacuccaacggcaccgucaaggaccgcucccccuaccgcgcccucauguccugcccccucggcgaggcccccucccccuacaacuccaaguucgaguccgucgccugguccgccuccgccugccacgacggcaugggcuggcucaccaucggcaucuccggccccgacaacggcgccgucgccguccucaaguacaacggcaucaucaccgagaccaucaaguccuggaagaagcgcauccuccgcacccaggaguccgagugcgucugcgucaacggcuccugcuucaccaucaugaccgacggccccuccaacggcgccgccuccuacaagaucuucaagaucgagaagggccaggucaccaaguccgucgagcucaacgcccccaacuuccacuacgaggagugcuccugcuaccccgacaccggcaccgucaugugcgucugccgcgacaacuggcacggcuccaaccgccccugggucuccuucaaccagaaccucgacuaccagaucggcuacaucugcuccggcgucuucggcgacaacccccgccccaaggacggcaagggcuccugcaaccccgucaccgucgacggcgccgacggcgucaagggcuucuccuacaaguacggcaacggcgucuggaucggccgcaccaaguccaaccgccuccgcaagggcuucgagaugaucugggaccccaacggcuggaccgacaccgacuccgacuucuccgucaagcaggacgucgucgccaucaccgacugguccggcuacuccggcuccuucguccagcaccccgagcucaccggccucgacugcauccgccccugcuucugggucgagcucguccgcggccucccccgcgagaacaccaccaucuggaccuccggcuccuccaucuccuucugcggcgucgacuccgacaccgccaacugguccuggcccgacggcgccgagcuccccuucaccaucgacaaguga

SEQ ID NO: 117490 - RNA, 1410 nt, Artificial Sequence
  derived and/or modified CDS sequence (opt2) from neuraminidase__InfluenzaA__AEX33872
augaaccccaaccagaagaucaucaccaucggcuccgucucccucaccaucuccaccaucugcuucuucaugcagaucgccauccucaucaccaccgucacccuccacuucaagcaguacgaguucaacuccccccccaacaaccaggucaugcagugcgagcccaccaucaucgagcgcaacaucaccgagaucgucuaccucaccaacaccaccaucgagaaggagaucugccccaagcucgccgaguaccgcaacugguccaagccccagugcgacaucaccggcuucgcccccuucuccaaggacaacuccauccgccucuccgccggcggcgacaucugggucacccgcgagcccuacgucuccugcgaccccgacaagugcuaccaguucgcccucggccagggcaccacccucaacaacguccacuccaacgacaccguccacgaccgcacccccuaccgcacccuccucaugaacgagcucggcguccccuuccaccucggcaccaagcaggucugcaucgccugguccuccuccuccugccacgacggcaaggccuggcuccacgucugcgucaccggcgacgacaagaacgccaccgccuccuucaucuacaacggccgccucgucgacuccaucgucuccugguccaaggagauccuccgcacccaggaguccgagugcgucugcaucaacggcaccugcaccgucgucaugaccgacggcuccgccuccggcaaggccgacaccaagauccucuucaucgaggagggcaagaucguccacaccuccacccucuccggcuccgcccagcacgucgaggagugcuccugcuacccccgcuaccccggcguccgcugcgucugccgcgacaacuggaagggcuccaaccgccccaucgucgacaucaacaucaaggacuacuccaucgucuccuccuacgucugcuccggccucgucggcgacaccccccgcaagaacgacuccuccuccuccucccacugccucaaccccaacaacgaggagggcggccacggcgucaagggcugggccuucgacgacggcaacgacgucuggaugggccgcaccaucuccgagaagcuccgccucggcuacgagaccuucaaggucaucgagggcugguccaaccccaacuccaagcuccagaucaaccgccaggucaucgucgaccgcggcaaccgcuccggcuacuccggcaucuucuccgucgagggcaaguccugcaucaaccgcugcuucuacgucgagcucauccgcggccgcaaggaggagaccgagguccucuggaccuccaacuccaucgucgucuucugcggcaccuccggcaccuacggcaccggcuccuggcccgacggcgccgacaucaaccucaugcccaucuga

SEQ ID NO: 117491 - RNA, 1410 nt, Artificial Sequence; identical to SEQ ID NO: 110748
  derived and/or modified CDS sequence (opt2) from neuraminidase__InfluenzaA__AEX33883

SEQ ID NO: 117492 - RNA, 1410 nt, Artificial Sequence
  derived and/or modified CDS sequence (opt2) from neuraminidase__InfluenzaA__AEX33894
augaaccccaaccagaagaucaucaccaucggcuccgucucccucaccaucuccaccaucugcuucuucaugcagaucgccauccucaucaccaccgucacccuccacuucaagcaguacgaguucaacuccccccccaacaaccaggucaugcucugcgagcccaccaucaucgagcgcaacaucaccgagaucgucuaccucaccaacaccaccaucgagaaggagaucugccccaagcucgccgaguaccgcaacugguccaagccccagugcaacaucaccggcuucgcccccuucuccaaggacaacuccauccgccucuccgccggcggcgacaucugggucacccgcgagcccuacgucuccugcgaccccgacaagugcuaccaguucgcccucggccagggcaccacccucaacaacguccacuccaacgacaccguccacgaccgcacccccuaccgcacccuccucaugaacgagcucggcguccccuuccaccucggcaccaagcaggucugcaucgccugguccuccuccuccugccacgacggcaaggccuggcuccacgucugcgucaccggcgacgacaagaacgccaccgccuccuucaucuacaacggccgccucgucgacuccaucgucuccugguccaaggagauccuccgcacccaggaguccgagugcgucugcaucgacggcaccugcaccgucgucaugaccgacggcuccgccuccggcaaggccgacaccaagauccucuucaucgaggagggcaagaucguccacaccuccacccucuccggcuccgcccagcacgucgaggagugcuccugcuacccccgcuaccccggcguccgcugcgucugccgcgacaacuggaagggcuccaaccgccccaucgucgacaucaacaucaaggacuacuccaucgucuccuccuacgucugcuccggccucgucggcgacaccccccgcaagaacgacuccuccuccuccucccacugccucgaccccaacaacgaggagggcggccacggcgucaagggcugggccuucgacgacggcaacgacgucuggaugggccgcaccaucuccgagaagcuccgcuccggcuacgagaccuucaaggucaucgagggcugguccaaccccaacuccaagcuccagaucaaccgccaggucaucgucgaccgcggcaaccgcuccggcuacuccggcaucuucuccgucgagggcaaguccugcaucaaccgcugcuucuacgucgagcucauccgcggccgcaaggaggagaccgagguccucuggaccuccaacuccaucgucgucuucugcggcaccuccggcaccuacggcaccggcuccuggcccgacggcgccgacaucaaccucaugcccaucuga

SEQ ID NO: 117493 - RNA, 1413 nt, Artificial Sequence
  derived and/or modified CDS sequence (opt2) from neuraminidase__InfluenzaA__AEX33916
augaaccccaaccagaagaucaucaccaucggcuccaucuccaucgccaucggcaucaucucccucauccuccagaucggcaacaucaucuccaucugggccucccacuccauccagaccggcucccagaaccacaccggcaucugcaaccagcgcaucaucaccuacgagaacuccaccugggucaacaacaccuacgucaacaucaacaacaccaacgucgucgccgagaaggacaagaccuccgucacccucgccggcaacuccucccucugcuccaucuccggcugggccaucuacaccaaggacaacuccauccgcaucggcuccaagggcgacgucuucgucauccgcgagcccuucaucuccugcucccaccucgagugccgcaccuucuuccucacccagggcgcccuccucaacgacaagcacuccaacggcaccgucaaggaccgcucccccuaccgcgcccucauguccugcccccucggcgaggcccccucccccuacaacucccgcuucgaguccgucgccugguccgccuccgccugccacgacggcaugggcuggcucaccaucggcaucuccggccccgacaacggcgccgucgccguccucaaguacaacggcaucaucaccgagaccaucaaguccuggaagaagcgcauccuccgcacccaggaguccgagugcgucugcaugaacggcuccugcuucaccaucaugaccgacggccccuccaacggcgccgccuccuacaagaucuucaagaucgagaagggcaaggucaccaagaccaucgagcucaacgcccccaacuuccacuacgaggagugcuccugcuaccccgacaccggcaccgucaugugcgucugccgcgacaacuggcacggcuccaaccgccccugggucuccuucaaccagaaccucgacuaccagaccggcuacaucugcuccggcgucuucggcgacaacccccgccccaaggacggcgagggcuccugcaaccccaugaccgucgacggcgccgacggcgucaagggcuucuccuacaaguacggcaacggcgucuggaucggccgcaccaaguccaaccgccuccgcaagggcuucgagaugaucugggaccccaacggcuggaccaacaccgacuccgacuucuccgucaagcaggacgucgucgccaucaccgacugguccggcuacuccggcuccuucguccagcaccccgagcucaccggccucgacugcauccgccccugcuucugggucgagcucguccgcggccucccccgcgagaacaccaccaucuggaccuccggcuccuccaucuccuucugcggcgucaacuccggcaccgccaacugguccuggcccgacggcgccgagcuccccuucaccaucgacaaguga

SEQ ID NO: 117494 - RNA, 1413 nt, Artificial Sequence; identical to SEQ ID NO: 111905
  derived and/or modified CDS sequence (opt2) from neuraminidase__InfluenzaA__AEX33927

SEQ ID NO: 117495 - RNA, 1413 nt, Artificial Sequence
  derived and/or modified CDS sequence (opt2) from neuraminidase__InfluenzaA__AEX33938
augaaccccaaccagaagaucaucaccaucggcuccaucuccaucgccaucggcaucaucucccucauccuccagaucggcaacaucaucuccaucugggccucccacuccauccagaccggcucccagaaccacaccggcaucugcaaccagcgcaucaucaccuacgagaacuccaccugggucaacaacaccuacgucaacaucaacaacaccaacgucgucgucgagaaggacaagaccuccgucacccucgccggcaacuccucccucugcuccaucuccggcugggccaucuacaccaaggacaacuccauccgcaucggcuccaagggcgacgucuucgucauccgcgagcccuucaucuccugcucccaccucgagugccgcaccuucuuccucacccagggcgcccuccucaacgacaagcacuccaacggcaccgucaaggaccgcucccccuaccgcgcccucauguccugcccccucggcgaggcccccucccccuacaacucccgcuucgaguccgucgccugguccgccuccgccugccacgacggcaugggcuggcucaccaucggcaucuccggccccgacaacggcgccgucgccguccucaaguacaacggcaucaucaccgagaccaucaaguccuggaagaagcgcauccuccgcacccaggaguccgagugcgucugcaugaacggcuccugcuucaccaucaugaccgacggccccuccaacggcgccgccuccuacaagaucuucaagaucgagaagggcaaggucaccaagaccaucgagcucaacgcccccaacuuccacuacgaggagugcuccugcuaccccgacaccggcaccgucaugugcgucugccgcgacaacuggcacggcuccaaccgccccugggucuccuucaaccagaaccucgacuaccagaucggcuacaucugcuccggcgucuucggcgacaacccccgccccaaggacggcgagggcuccugcaaccccgucaccgucgacggcgccgacggcgucaagggcuucuccuacaaguacggcaacggcgucuggaucggccgcaccaaguccaaccgccuccgcaagggcuucgagaugaucugggaccccaacggcuggaccaacaccgacuccgacuucuccgucaagcaggacgucgucgccaucaccgacugguccggcuacuccggcuccuucguccagcaccccgagcucaccggccucgacugcauccgccccugcuucugggucgagcucguccgcggccucccccgcgagaacaccaccaucuggaccuccggcuccuccaucuccuucugcggcgucaacuccggcaccaccaacugguccuggcccgacggcgccgagcuccccuucaccaucgacaaguga

SEQ ID NO: 117496 - RNA, 1413 nt, Artificial Sequence
  derived and/or modified CDS sequence (opt2) from neuraminidase__InfluenzaA__AEX33949
augaaccccaaccagaagaucaucaccaucggcuccaucuccaucgccaucggcaucaucucccucauccuccagaucggcaacaucaucuccaucugggccucccacuccauccagaccggcucccagaaccacaccggcaucugcaaccagcgcaucaucaccuacgagaacuccaccugggucaacaacaccuacgucaacaucaacaacaccaacgucgucgucgagaaggacaagaccuccgucacccucgccggcaacuccucccucugcuccaucuccggcugggccaucuacaccaaggacaacuccauccgcaucggcuccaagggcgacgucuucgucauccgcgagcccuucaucuccugcucccaccucgagugccgcaccuucuuccucacccagggcgcccuccucaacgacaagcacuccaacggcaccgucaaggaccgcucccccuaccgcgcccucauguccugcccccucggcgaggcccccucccccuacaacucccgcuucgaguccgucgccugguccgccuccgccugccacgacggcaugggcuggcucaccaucggcaucuccggccccgacaacggcgccgucgccguccucaaguacaacggcaucaucaccgagaccgucaaguccuggaagaagcgcauccuccgcacccaggaguccgagugcgucugcaugaacggcuccugcuucaccaucaugaccgacggccccuccaacggcgccgccuccuacaagaucuucaagaucgagaagggcaaggucaccaagaccaucgagcucaacgcccccaacuuccacuacgaggagugcuccugcuaccccgacaccggcaccgucaugugcgucugccgcgacaacuggcacggcuccaaccgccccugggucuccuucaaccagaaccucgacuaccagaucggcuacaucugcuccggcgucuucggcgacaacccccgccccaaggacggcgagggcuccugcaaccccgucaccgucgacggcgccgacggcgucaagggcuucuccuacaaguacggcaacggcgucuggaucggccgcaccaaguccaaccgccuccgcaagggcuucgagaugaucugggaccccaacggcuggaccaacaccgacuccgacuucuccgucaagcaggacgucgucgccaucaccgacugguccggcuacuccggcuccuucguccagcaccccgagcucaccggccucgacugcauccgccccugcuucugggucgagcucguccgcggccucccccgcgagaacaccaccaucuggaccuccggcuccuccaucuccuucugcggcgucaacuccggcaccgccaacugguccuggcccgacggcgccgagcuccccuucaccaucgacaaguga

SEQ ID NO: 117497 - RNA, 1410 nt, Artificial Sequence
  derived and/or modified CDS sequence (opt2) from neuraminidase__InfluenzaA__AEX33971
augaaccccaaccagaagaucaucaccaucggcuccgucucccucaccaucuccaccaucugcuucuucaugcagaucgccauccucaucaccaccgucacccuccacuucaagcaguacgaguucuccuccccccccaacaaccaggucaugcucugcgagcccgccaucaucgagcgcaacaucaccgagaccgucuaccucaccaacaccaccaccgagaaggagaucugccccaagcucgccgaguaccgcaacugguccaagccccagugcgacaucaccggcuucgcccccuucuccaaggacaacuccauccgccucuccgccggcggcgacaucugggucacccgcgagcccuacgucuccugcgaccccgacaagugcuaccaguucgcccucggccagggcaccacccucaacaacguccacuccaacgacaccguccacgaccgcacccccuaccgcacccuccucaugaacgagcucggcguccccuuccaccucggcaccaagcaggucugcaucgccugguccuccuccuccugccacgacggcaaggccuggcuccacgucugcgucaccggcgacgacaagaacgccaccgccuccuucaucuacaacggccgccucgucgacuccaucgucuccugguccaaggagauccuccgcacccaggaguccgagugcgucugcaucaacggcaccugcaccgucgucaugaccgacggcuccgccuccggcaaggccgacaccaagauccucuucaucgaggagggcaagaucguccacaccuccacccucuccggcuccgcccagcacgucgaggagugcuccugcuacccccgcuaccccggcguccgcugcgucugccgcgacaacuggaagggcuccaaccgccccaucgucgacaucaacaucaaggacuacuccaucgucucccgcuacgucugcuccggcaucgucggcgacaccccccgcaagaacgacuccuccuccuccucccacugccucgaccccaacaacgaggagggcggccacggcgucaagggcugggccuucgacgacggcaacgacgucuggaugggccgcaccaucuccgagaagucccgcuccggcuacgagaccuucaaggucaucgagggcugguccaaccccaacuccaagcuccagaucaaccgccaggucaucgucgaccgcggcaaccgcuccggcuacuccggcaucuucuccgucgagggcaaguccugcaucaaccgcugcuucuacgucgagcucauccgcggccgcaaggaggagaccgagguccucuggaccuccaacuccaucgucgucuucugcggcaccuccggcaccuacggcaccggcuccuggcccgacggcgccgacaucaaccucaugcccaucuga

SEQ ID NO: 117498 - RNA, 1410 nt, Artificial Sequence
  derived and/or modified CDS sequence (opt2) from neuraminidase__InfluenzaA__AEX33993
augaaccccaaccagaagaucaucaccaucggcuccgucucccucaccaucuccaccaucugcuucuucaugcagaucgccauccucaucaccaccgucacccuccacuucaagcaguacgaguucaacuccccccccaacaaccaggucaugcucugcgagcccaccaucaucgagcgcaacaucaccgagaucgucuaccucaccaacaccaccaucgagaaggagaucugccccaagcucgccgaguaccgcaacugguccaagccccagugcgacaucaccggcuucgcccccuucuccaaggacaacuccauccgccucuccgccggcggcgacaucugggucacccgcgagcccuacgucuccugcgaccccgacaagugcuaccaguucgcccucggccagggcaccacccucaacaacguccacuccaacgacaccguccgcgaccgcacccccuaccgcacccuccucaugaacgagcucggcguccccuuccaccucggcaccaagcaggucugcaucgccugguccuccuccuccugccacgacggcaaggccuggcuccacgucugcaucaccggcgacgacaagaacgccaccgccuccuucaucuacaacggccgccucgucgacuccaucgucuccugguccaaggagauccuccgcacccaggaguccgagugcgucugcaucaacggcaccugcaccgucgucaugaccgacggcuccgccuccggcgaggccgacaccaagauccucuucaucgaggagggcaagaucguccacaccuccacccucuccggcuccgcccagcacgucgaggagugcuccugcuacccccgcuaccccggcguccgcugcgucugccgcgacaacuggaagggcuccaaccgccccaucgucgacaucaacaucaaggaccacuccaucgucuccuccuacgucugcuccggccucgucggcgacaccccccgcaagaacgacuccuccuccuccucccacugccucgaccccaacaacgaggagggcggccacggcgucaagggcugggccuucgacgacggcaacgacgucuggaugggccgcaccaucuccgagaagucccgccucggcuacgagaccuucaaggucaucgagggcugguccaaccccaaguccaagcuccagaucaaccgccaggucaucgucgaccgcggcaaccgcuccggcuacuccggcaucuucuccgucgagggcaaguccugcaucaaccgcugcuucuacgucgagcucauccgcggccgcaaggaggagaccgagguccucuggaccuccaacuccaucgucgucuucugcggcaccuccggcaccuacggcaccggcuccuggcccgacggcgccgacaucaaccucaugcccgucuga

SEQ ID NO: 117499 - RNA, 1410 nt, Artificial Sequence; identical to SEQ ID NO: 112548
  derived and/or modified CDS sequence (opt2) from neuraminidase__InfluenzaA__AEX34026

SEQ ID NO: 117500 - RNA, 1410 nt, Artificial Sequence
  derived and/or modified CDS sequence (opt2) from neuraminidase__InfluenzaA__AEX34036
augaaccccaaccagaagaucaucaccaucggcuccgucucccucaccaucuccaccaucugcuucuucaugcagaucgccauccucaucaccaccgucacccuccacuucaagcaguacgaguucuccuccccccccaacaaccaggucaugcucugcgagcccaccaucaucgagcgcaacaucaccgagaucgucuaccucaccaacaccaccaucgagaaggagaucugccccaagcucgccgaguaccgcaacugguccaagccccagugcgacaucaccggcuucgcccccuucuccaaggacaacuccauccgccucuccgccggcggcgacaucugggucacccgcgagcccuacgucuccugcgaccccgacaagugcuaccaguucgcccucggccagggcaccacccucaacaacguccacuccaacgacaccguccacggccgcacccccuaccgcacccuccucaugaacgagcucggcguccccuuccaccucggcaccaagcaggucugcaucgccugguccuccuccuccugccacgacggcaaggccuggcuccacgucugcgucaccggcgacgacaagaacgccaccgccuccuucaucuacaacggccgccucgucgacuccaucgucuccugguccaaggagauccuccgcacccaggaguccgagugcgucugcaucaacggcaccugcgccgucgucaugaccgacggcuccgccuccggcaaggccgacaccaagauccucuucaucgaggagggcaagaucguccacaccuccacccucuccggcuccgcccagcacgucgaggagugcuccugcuacccccgcuaccccggcguccgcugcgucugccgcgacaacuggaagggcuccaaccgccccaucgucgacaucaacaucaaggacuacuccaucgucucccgcuacgucugcuccggccucgucggcgacaccccccgcaagaacgacuccuccuccuccucccacugccucgaccccaacaacgaggagggcggccacggcgucaagggcugggccuucgacgacggcgacgacgucuggaugggccgcaccaucuccgagaagucccgcuccggcuacgagaccuucaaggucaucgagggcugguccaaccccaacuccaagcuccagaucaaccgccaggucaucgucgaccgcggcaaccgcuccggcuacuccggcaucuucuccgucgagggcaaguccugcaucaaccgcugcuucuacgucgagcucauccgcggccgcaaggaggagaccgagguccucuggaccuccaacuccaucgucgucuucugcggcaccuccggcaccuacggcaccggcuccuggcccgacggcgccgacaucaaccucaugcccaucuga

SEQ ID NO: 117501 - RNA, 1410 nt, Artificial Sequence
  derived and/or modified CDS sequence (opt2) from neuraminidase__InfluenzaA__AEX34058
augaaccccaaccagaagaucaucaccaucggcuccgucucccucaccaucuccaccaucugcuucuucaugcagaucgccauccucaucaccaccgucacccuccacuucaagcaguacgaguucuccuccccccccaacaaccaggucaugcucugcgagcccgccaucaucgagcgcaacaucaccgagaucgucuaccucaccaacaccaccaucgagaaggagaucugccccaagcucaccgaguaccgcaacugguccaagccccagugcgacaucaccggcuucgcccccuucuccaaggacaacuccauccgccucuccgccggcggcgacaucugggucacccgcgagcccuacgucuccugcgaccccgacaagugcuaccaguucgcccucggccagggcaccacccucaacaacguccacuccaacgacaccguccacgaccgcacccccuaccgcacccuccucaugaacgagcucggcguccccuuccaccucggcaccaagcaggucugcaucgccugguccuccuccuccugccacgacggcaaggccuggcuccacgucugcgucaccggcgacgacaagaacgccaccgccuccuucaucuacaacggccgccucgucgacuccaucgucuccugguccaaggagauccuccgcacccaggaguccgagugcgucugcaucaacggcaccugcaccgucgucaugaccgacggcuccgccuccggcaaggccgacaccaagauccucuucaucgaggagggcaagaucguccacaccuccacccucuccggcuccgcccagcacgucgaggagugcuccugcuacccccgcuaccccggcguccgcugcgucugccgcgacaacuggaagggcuccaaccgccccaucgucgacaucaacaucaaggacuacuccaucgucucccgcuacgucugcuccggccucgucggcgacaccccccgcaagaacgacuccuccuccuccucccacugccucgaccccaacaacgaggagggcggccacggcgucaagggcugggccuucgacgacggcaacgacgucuggaugggccgcaccaucuccgagaagucccgcuccggcuacgagaccuucaaggucaucgagggcugguccaaccccaacuccaagcuccagaucaaccgccaggucaucgucgaccgcggcaaccgcuccggcuacuccggcaucuucuccgucgagggcaaguccugcaucaaccgcugcuucuacgucgagcucauccgcggccgcaaggaggagaccgagguccucuggaccuccaacuccaucgucgucuucugcggcaccuccggcaccuacggcaccggcuccuggcccgacggcgccgacaucaaccucaugcccaucuga

SEQ ID NO: 117502 - RNA, 1410 nt, Artificial Sequence
  derived and/or modified CDS sequence (opt2) from neuraminidase__InfluenzaA__AEX34103
augaaccccaaccagaagaucaucaccaucggcuccgucucccucaccaucuccaccaucugcuucuucaugcagaucgccauccucaucaccaccgucacccuccacuucaagcaguacgaguucuccuccccccccaacaaccaggucaugcucugcgagcccaccaucaucgagcgcaacaucaccgagaucgucuaccucaccaacaccaccaucgagaaggaggucugccccaagcucgccgaguaccgcaacugguccaagccccagugcgacaucaccggcuucgcccccuucuccaaggacaacuccauccgccucuccgccggcggcgacaucugggucacccgcgagcccuacgucuccugcgaccccgacaagugcuaccaguucgcccucggccagggcaccacccucaacaacguccacuccaacgacaccguccacgaccgcacccccuaccgcacccuccucaugaacgagcucggcguccccuuccaccucggcaccaagcaggucugcaucgccugguccuccuccuccugccacgacggcaaggccuggcuccacgucugcgucaccggcgacgacaagaacgccaccgccuccuucaucuacaacggccgccucgucgacuccaucgucuccugguccaaggagauccuccgcacccaggaguccgagugcgucugcaucaacggcaccugcaccgucgucaugaccgacggcuccgccuccggcaaggccgacaccaagauccucuucaucgaggagggcaagaucguccacaccuccacccucuccggcaacgcccagcacgucgaggagugcuccugcuacccccgcuaccccggcguccgcugcgucugccgcgacaacuggaagggcuccaaccgccccaucgucgacaucaacaucaaggacuacuccaucgucucccgcuacgucugcuccggccucgucggcgacaccccccgcaagaacgacuccuccuccuccucccacugccucgaccccaacaacgaggagggcggccacggcgucaagggcugggccuucgacgacggcaacgacgucuggaugggccgcaccaucuccgagaagucccgcuccggcuacgagaccuucaaggucaucgagggcugguccaaccccaacuccaagcuccagaucaaccgccaggucaucgucgaccgcggcaaccgcuccggcuacuccggcaucuucuccgucgagggcaaguccugcaucaaccgcugcuucuacgucgagcucauccgcggccgcaaggaggagaccaagguccucuggaccuccaacuccaucgucgucuucugcggcaccuccggcaccuacggcaccggcuccuggcccgacggcgccgacaucaaccucaugcccaucuga

SEQ ID NO: 117503 - RNA, 1410 nt, Artificial Sequence
  derived and/or modified CDS sequence (opt2) from neuraminidase__InfluenzaA__AEX34114
augaaccccaaccagaagaucaucaccaucggcuccgucucccucaccaucuccaccaucugcuucuucaugcagaucgccauccucaucaccaccgucacccuccacuucaagcaguacgaguucuccuccccccccaacaaccaggucaugcucugcgagcccgccaucaucgagcgcaacaucaccgagaucgucuaccccaccaacaccaccaucgagaaggagaucugccccaagcucgccgaguaccgcaacugguccaagccccagugcgacaucaccggcuucgcccccuucuccaaggacaacuccauccgccucuccgccggcggcgacaucugggucacccgcgagcccuacgucuccugcgaccccgacaagugcuaccaguucgcccucggccagggcaccacccucaacaacguccacuccaacgacaccguccacgaccgcacccccuaccgcacccuccucaugaacgagcucggcguccccuuccaccucggcaccaagcaggucugcaucgccugguccuccuccuccugccacgacggcaaggccuggcuccacgucugcgucaccggcgacgacaagaacgccaccgccuccuucaucuacaacggccgccucgucgacuccaucgucuccugguccaaggagauccuccgcacccaggaguccgagugcgucugcaucaacggcaccugcaccgucgucaugaccgacggcuccgccuccggcaaggccgacaccaagauccucuucaucgaggagggcaagaucguccacaccuccacccucuccggcuccgcccagcacgucgaggagugcuccugcuacccccgcuaccccggcguccgcugcgucugccgcgacaacuggaagggcuccaaccgccccaucgucgacaucaacaucaaggacuacuccaucgucucccgcuacgucugcuccggccucgucggcgacaccccccgcaagaacgacuccuccuccuccucccacugccucgaccccaacaacgaggagggcggccacggcgucaagggcugggccuucgacgacggcaacgacgucuggaugggccgcaccaucuccgagaagucccgcuccggcuacgagaccuucaaggucaucgagggcugguccaaccccaacuccaagcuccagaucaaccgccaggucaucgucgaccgcggcaaccgcuccggcuacuccggcaucuucuccgucgagggcaaguccugcaucaaccgcugcuucuacgucgagcucauccgcggccgcaaggaggagaccgagguccucuggaccuccaacuccaucgucgucuucugcggcaccuccggcaccuacggcaccggcuccuggcccgacggcgccgacaucaaccucaugcccaucuga

SEQ ID NO: 117504 - RNA, 1410 nt, Artificial Sequence
  derived and/or modified CDS sequence (opt2) from neuraminidase__InfluenzaA__AEX34137
augaaccccaaccagaagaucaucaccaucggcuccgucucccucaccaucuccaccaucugcuucuucaugcagaucgccauccucaucaccaccgucacccuccacuucaagcaguacgaguucaacuccccccccaacaaccaggucaugcucugcgagcccaccaucaucgagcgcaacaucaccgagaucgucuaccucaccaacaccaccaucgagaaggagaucugccccaagcucgccgaguaccgcaacugguccaagccccagugcgacaucaccggcuucgcccccuucuccaaggacaacuccauccgccucuccgccggcggcgacaucugggucacccgcgagcccuacgucuccugcgaccccgacaagugcuaccaguucgcccucggccagggcaccacccucaacaacguccacuccaacgacaccguccgcggccgcacccccuaccgcacccuccucaugaacgagcucggcguccccuuccaccucggcaccaagcaggucugcaucgccugguccuccuccuccugccacgacggcaaggccuggcuccacgucugcaucaccggcgacgacaagaacgccaccgccuccuucaucuacaacggccgccucgucgacuccaucgucuccugguccaaggagauccuccgcacccaggaguccgagugcgucugcaucaacggcaccugcaccgucgucaugaccgacggcuccgccuccggcaaggccgacaccaagauccucuucaucgaggagggcaagaucguccacaccuccacccucuccggcuccgcccagcacgucgaggagugcuccugcuacccccgcuaccccggcguccgcugcgucugccgcgacaacuggaagggcuccaaccgccccaucgucgacaucaacaucaaggaccacuccaucgucuccuccuacgucugcuccggccucgucggcgacaccccccgcaagaacgacuccuccuccuccucccacugccucgaccccaacaacgaggagggcggccacggcgucaagggcugggccuucgacgacggcaacgacgucuggaugggccgcaccaucuccgagaagucccgccucggcuacgagaccuucaaggucaucgagggcugguccaaccccaaguccaagcuccagaucaaccgccaggucaucgucgaccgcggcaaccgcuccggcuacuccggcaucuucuccgucgagggcaaguccugcaucaaccgcugcuucuacgucgagcucauccgcggccgcaaggaggagaccgagguccucuggaccuccaacuccaucgucgucuucugcggcaccuccggcaccuacggcaccggcuccuggcccgacggcgccgacaucaaccucaugcccaucuga

SEQ ID NO: 117505 - RNA, 1410 nt, Artificial Sequence
  derived and/or modified CDS sequence (opt2) from neuraminidase__InfluenzaA__AEX34191
augaaccccaaccagaagaucaucaccaucggcuccgucucccucuccaucuccaccaucugcuucuucaugcagaucgccauccucaucaccaccgucacccuccacuucaagcaguacgaguucaacuccucccccaacaaccaggucaugcucugcgagcccaccaucaucgagcgcaacaucaccgagaucgucuaccucaccaacaccaccaucgagaaggagaucugccccaagcucgccgaguaccgcaacugguccaagccccagugcgacaucaccggcuucgcccccuucuccaaggacaacuccauccgccucuccgccggcggcgacaucugggucacccgcgagcccuacgucuccugcgaccccgacaagugcuaccaguucgcccucggccagggcaccacccucaacaacguccacuccaacaacaccguccgcgaccgcacccccuaccgcacccuccucaugaacgagcucggcguccccuuccaccucggcaccaagcaggucugcaucgccugguccuccuccuccugccacgacggcaaggccuggcuccacgucugcaucaccggcgacgacaagaacgccaccgccuccuucaucuacaacggccgccucgucgacuccaucgucuccugguccaaggagauccuccgcacccaggaguccgagugcgucugcaucaacggcaccugcaccgucgucaugaccgacggcuccgccuccggcaaggccgacaccaagauccucuucaucgaggagggcaagaucguccacaccuccacccucuccggcuccgcccagcacgucgaggagugcuccugcuacccccgcuaccccggcguccgcugcgucugccgcgacaacuggaagggcuccaaccgccccaucgucgacaucaacaucaaggaccacuccaucgucuccuccuacgucugcuccggccucgucggcgacaccccccgcaagaacgacuccuccuccuccucccacugccucgaccccaacaacgaggagggcggccacggcgucaagggcugggccuucgacgacggcaacgacgucuggaugggccgcaccaucuccgagaagucccgccucggcuacgagaccuucaaggucaucgagggcugguccaaccccaaguccaagcuccagaucaaccgccaggucaucgucgaccgcggcaaccgcuccggcuacuccggcaucuucuccgucgagggcaaguccugcaucaaccgcugcuucuacgucgagcucauccgcggccgcaaggaggagaccgagguccucuggaccuccaacuccaucgucgucuucugcggcaccuccggcaccuacggcaccggcuccuggcccgacggcgccgacaucaaccucaugcccaucuga

SEQ ID NO: 117506 - RNA, 1410 nt, Artificial Sequence
  derived and/or modified CDS sequence (opt2) from neuraminidase__InfluenzaA__AEX34224
augaaccccaaccagaagaucaucaccaucggcuccgucucccucaccaucuccaccaucugcuucuucaugcagaucgccauccucaucaccaccgucacccuccacuucaagcaguacgaguucuccuccccccccaacaaccaggucaugcucugcgagcccaccaucaucgagcgcaacaucaccgagaucgucuaccucaccaacaccaccaucgagaaggagaucugccccaagcucgccgaguaccgcaacugguccaagccccagugcgacaucaccggcuucgcccccuucuccaaggacaacuccauccgccucuccgccggcggcgacaucugggucacccgcgagcccuacgucuccugcgaccccgacaagugcuaccaguucgcccucggccagggcaccacccucaacaacguccacuccaacgacaccguccacggccgcacccccuaccgcacccuccucaugaacgagcucggcguccccuuccaccucggcaccaagcaggucugcaucgccugguccuccuccuccugccacgacggcaaggccuggcuccacgucugcgucaccggcgacgacaagaacgccaccgccuccuucaucuacaacggccgccucgucgacuccaucgucuccugguccaaggagauccuccgcacccaggaguccgagugcgucugcaucaacggcaccugcaccgucgucaugaccgacggcuccgccuccggcaaggccgacaccaagauccucuucaucgaggagggcaagaucguccacaccuccacccucuccggcuccgcccagcacgucgaggagugcuccugcuacccccgcuaccccggcguccgcugcgucugccgcgacaacuggaagggcuccaaccgccccaucgucgacaucaacaucaaggacuacuccaucgucucccgcuacgucugcuccggccucgucggcgacaccccccgcaagaacgacuccuccuccuccucccacugccucgaccccaacaacgaggagggcggccacggcgucaagggcugggccuucgacgacggcaacgacgucuggaugggccgcaccaucuccgagaagcuccgcuccggcuacgagaccuucaaggucaucgagggcugguccaaccccaacuccaagcuccagaucaaccgccaggucaucgucgaccgcggcaaccgcuccggcuacuccggcaucuucuccgucgagggcaaguccugcaucaaccgcugcuucuacgucgagcucauccgcggccgcaaggaggagaccgagguccucuggaccuccaacuccaucgucgucuucugcggcaccuccggcaccuacggcaccggcuccuggcccgacggcgccgacaucaaccucaugcccaucuga

SEQ ID NO: 117507 - RNA, 1410 nt, Artificial Sequence
  derived and/or modified CDS sequence (opt2) from neuraminidase__InfluenzaA__AEX34235
augaaccccaaccagaagaucaucaccaucggcuccgucucccucaccaucuccaccaucugcuucuucaugcagaucgccauccucaucaccaccgucacccuccacuucaagcaguacgaguucuccuccccccccaacaaccaggucaugcucugcgagcccgccaucaucgagcgcaacaucaccgagaucgucuaccucaccaacaccaccaucgagaaggagaucugccccaagcucgccgaguaccgcaacugguccaagccccagugcgacaucaccggcuucgcccccuucuccaaggacaacuccauccgccucuccgccggcggcgacaucugggucacccgcgagcccuacgucuccugcgaccccgacaagugcuaccaguucgcccucggccagggcaccacccucaacaacguccacuccaacgacaccguccacgaccgcacccccuaccgcacccuccucaugaacgagcucggcguccccuuccaccucggcaccaagcaggucugcaucgccugguccuccuccuccugccacgacggcaaggccuggcuccacgucugcgucaccggcgacgacaagaacgccaccgccuccuucaucuacaacggccgccucgucgacuccaucgucuccugguccaaggagauccuccgcacccaggaguccgagugcgucugcaucaacggcaccugcaccgucgucaugaccgacggcuccgccuccggcaaggccgacaccaagauccucuucaucgaggagggcaagaucguccacaccuccacccucuccggcuccgcccagcacgucgaggagugcuccugcuacccccgcuaccccggcguccgcugcgucugccgcgacaacuggaagggcuccaaccgccccaucgucgacaucaacaucaaggacuacuccaucgucucccgcuacgucugcuccggccucgucggcgacaccccccgcaaguccgacuccuccuccuccucccacugccucgaccccaacaacgaggagggcggccacggcgucaagggcugggccuucgacgacggcaacgacgucuggaugggccgcaccaucuccgagaagucccgcuccggcuacgagaccuucaaggucaucgagggcugguccaaccccaacuccaagcuccagaucaaccgccaggucaucgucgaccgcggcaaccgcuccggcuacuccggcaucuucuccgucgagggcaaguccugcaucaaccgcugcuucuacgucgagcucauccgcggccgcaaggaggagaccgagguccucuggaccuccaacuccaucgucgucuucugcggcaccuccggcaccuacggcaccggcuccuggcccgacggcgccgacaucaaccucaugcccaucuga

SEQ ID NO: 117508 - RNA, 1410 nt, Artificial Sequence
  derived and/or modified CDS sequence (opt2) from neuraminidase__InfluenzaA__AEX34246
augaaccccaaccagaagaucaucaccaucggcuccgucucccucaccaucuccaccaucugcuucuucaugcagaucgccauccucaucaccaccgucacccuccacuucaagcaguacgaguucaacuccccccccaacaaccaggucaugcucugcgagcccaccaucaucgagcgcaacaucaccgagaucgucuaccucaccaacaccaccaucgagaaggagaucugccccaagcucgccgaguaccgcaacugguccaagccccagugcgacaucaccggcuucgcccccuucuccaaggacaacuccauccgccucuccgccggcggcgacaucugggucacccgcgagcccuacgucuccugcgaccccgacaagugcuaccaguucgcccucggccagggcaccacccucaacaacguccacuccaacgacaccguccgcggccgcacccccuaccgcacccuccucaugaacgagcucggcguccccuuccaccucggcaccaagcaggucugcaucgccugguccuccuccuccugccacgacggcaaggccuggcuccacgucugcaucaccggcgacgacaagaacgccaccgccuccuucaucuacaacggccgccucgucgacuccaucgucuccugguccaaggagauccuccgcacccaggaguccgagugcgucugcaucaacggcaccugcaccgucgucaugaccgacggcuccgccuccggcaaggccgacaccaagauccucuucaucgaggagggcaagaucguccacaccuccacccucuccggcuccgcccagcacgucgaggagugcuccugcuacccccgcuaccccggcguccgcugcgucugccgcgacaacuggaagggcuccaaccgccccaucgucgacaucaacaucaaggaccacuccaucgucuccuccuacgucugcuccggccucgucggcgacaccccccgcaagaacgacuccuccuccuccucccacugccucgaccccaacaacgaggagggcggccacggcgucaagggcugggccuucgacgacggcaacgacgucuggaugggccgcaccaucuccgagaagucccgccucggcuacgagaccuucaaggucaucgagggcugguccaaccccaaguccaagcuccaggucaaccgccaggucaucgucgaccgcggcaaccgcuccggcuacuccggcaucuucuccgucgagggcaaguccugcaucaaccgcugcuucuacgucgagcucauccgcggccgcaaggaggagaccgagguccucuggaccuccaacuccaucgucgucuucugcggcaccuccggcaccuacggcaccggcuccuggcccgacggcgccgacaucaaccucaugcccaucuga

SEQ ID NO: 117509 - RNA, 1410 nt, Artificial Sequence
  derived and/or modified CDS sequence (opt2) from neuraminidase__InfluenzaA__AEX34257
augaaccccaaccagaagaucaucaccaucggcuccgucucccucaccaucuccaccaucugcuucuucaugcagaucgccauccucaucaccaccgucacccuccacuucaagcaguacgaguucaacuccucccccaacaaccaggucaugcucugcgagcccaccaucaucgagcgcaacaucaccgagaucgucuaccucaccaacaccaccaucgagaaggagaucugccccaagcucgccgaguaccgcaacugguccaagccccagugcgacaucaccggcuucgcccccuucuccaaggacaacuccauccgccucuccgccggcggcgacaucugggucacccgcgagcccuacgucuccugcgaccccgacaagugcuaccaguucgcccucggccagggcaccacccucaacaacguccacuccaacaacaccguccgcaaccgcacccccuaccgcacccuccucaugaacgagcucggcguccccuuccaccucggcaccaagcaggucugcaucgccugguccuccuccuccugccacgacggcaaggccuggcuccacgucugcaucaccggcgacgacaagaacgccaccgccuccuucaucuacaacggccgccucgucgacuccaucgucuccugguccaaggagauccuccgcacccaggaguccgagugcgucugcaucaacggcaccugcaccgucgucaugaccgacggcuccgccuccggcaaggccgacaccaagauccucuucaucgaggagggcaagaucguccacaccuccacccucuccggcuccgcccagcacgucgaggagugcuccugcuacccccgcuaccccggcguccgcugcgucugccgcgacaacuggaagggcuccaaccgccccaucgucgacaucaacaucaaggaccacuccaucgucuccuccuacgucugcuccggccucgucggcgacaccccccgcaagaacgacuccuccuccuccucccacugccucgaccccaacaacgaggagggcggccacggcgucaagggcugggccuucgacgacggcaacgacgucuggaugggccgcaccaucuccgagaagucccgccucggcuacgagaccuucaaggucaucgagggcugguccaaccccaaguccaagcuccagaucaaccgccaggucaucgucgaccgcggcaaccgcuccggcuacuccggcaucuucuccgucgagggcaaguccugcaucaaccgcugcuucuacgucgagcucauccgcggccgcaaggaggagaccgagguccucuggaccuccaacuccaucgucgucuucugcggcaccuccggcaccuacggcaccggcuccuggcccgacggcgccgacaucaaccucaugcccaucuga

SEQ ID NO: 117510 - RNA, 1410 nt, Artificial Sequence
  derived and/or modified CDS sequence (opt2) from neuraminidase__InfluenzaA__AEX34268
augaaccccaacaagaagaucaucaccaucggcuccgucucccucaccaucuccaccaucugcuucuucaugcagaucgccauccucaucaccaccgucacccuccacuucaagcaguacgaguucaacuccccccccaacaaccaggucaugcucugcgagcccaccaucaucgagcgcaacaucaccgagaucgucuaccucaccaacaccaccaucgagaaggagaucugccccaagcucgccgaguaccgcaacugguccaagccccagugcgacaucaccggcuucgcccccuucuccaaggacaacuccauccgccucuccgccggcggcgacaucugggucacccgcgagcccuacgucuccugcgaccccgacaagugcuaccaguucgcccucggccagggcaccacccucaacaacguccacuccaacgacaccguccgcaaccgcacccccuaccgcacccuccucaugaacgagcucggcguccccuuccaccucggcaccaagcaggucugcaucgccugguccuccuccuccugccacgacggcaaggccuggcuccacgucugcaucaccggcgacgacaagaacgccaccgccuccuucaucuacaacggccgccucgucgacuccaucgucuccugguccaaggagauccuccgcacccaggaguccgagugcgucugcaucaacggcaccugcaccgucgucaugaccgacggcuccgccuccggcaaggccgacaccaagauccucuucaucgaggagggcaagaucguccacaccuccaagcucuccggcuccgcccagcacgucgaggagugcuccugcuacccccgcuaccccggcguccgcugcgucugccgcgacaacuggaagggcuccaaccgccccaucgucgacaucaacaucaaggaccacuccaucgucuccuccuacgucugcuccggccucgucggcgacaccccccgcaagaacgacuccuccuccuccucccacugccucgaccccaacaacgaggagggcggccacggcgucaagggcugggccuucgacgacggcaacgacgucuggaugggccgcaccaucuccgagaagucccgccucggcuacgagaccuucaaggucaucgagggcugguccaaccccaaguccaagcuccagaucaaccgccaggucaucgucgaccgcggcaaccgcuccggcuacuccggcaucuucuccgucgagggcaaguccugcaucaaccgcugcuucuacgucgagcucauccgcggccgcaaggaggagaccgagguccucuggaccuccaacuccaucgucgucuucugcggcaccuccggcaccuacggcaccggcuccuggcccgacggcgccgacaucaaccucaugcccaucuga

SEQ ID NO: 117511 - RNA, 1410 nt, Artificial Sequence
  derived and/or modified CDS sequence (opt2) from neuraminidase__InfluenzaA__AEX34278
augaaccccaaccagaagaucaucaccaucggcuccgucucccucaccaucuccaccaucugcuucuucaugcagaucgccauccucaucaccaccgucacccuccacuucaagcaguacgaguucuccuccccccccaacaaccaggucaugcucugcgagcccgccaucaucgagcgcaacaucaccgagaucgucuaccucaccaacaccaccaucgagaaggagaucugccccaagcucgccgaguaccgcaacugguccaagccccagugcgacaucaccggcuucgcccccuucuccaaggacaacuccauccgccucuccgccggcggcgacaucugggucacccgcgagcccuacgucuccugcgaccccgacaagugcuaccaguucgcccucggccagggcaccacccucaacaacguccacuccaacgacaccguccacgaccgcacccccuaccgcacccuccucaugaacgagcucggcguccccuuccaccucggcaccaagcaggucugcaucgccugguccuccuccuccugccacgacggcaaggccuggcuccacgucugcgucaccggcgacgacaagaacgccaccgccuccuucaucuacaacggccgccucgucgacuccaucgucuccugguccaaggagauccuccgcacccaggaguccgagugcgucugcaucaacggcaccugcaccgucgucaugaccgacggcuccgccuccggcaaggccgacaccaagauccucuucaucgaggagggcaagaucguccacaccuccacccucuccggcuccgcccagcacgucgaggagugcuccugcuacccccgcuaccccggcguccgcugcgucugccgcgacaacuggaagggcuccaaccgccccaucgucgacaucaacaucaaggacuacuccaucgucucccgcuacgucugcuccggccucgucggcgacaccccccgcaagaacgacuccuccuccuccucccacugccucgaccccaacaacgagaagggcggccacggcgucaagggcugggccuucgacgacggcaacgacgucuggaugggccgcaccaucuccgagaagucccgcuccggcuacgagaccuucaaggucaucgagggcugguccaaccccaacuccaagcuccagaucaaccgccaggucaucgucgaccgcggcaaccgcuccggcuacuccggcaucuucuccgucgagggcaaguccugcaucaaccgcugcuucuacgucgagcucauccgcggccgcaaggaggagaccgagguccucuggaccuccaacuccaucgucgucuucugcggcaccuccggcaccuacggcaccggcuccuggcccgacggcgccgacaucaaccucaugcccaucuga

SEQ ID NO: 117512 - RNA, 1413 nt, Artificial Sequence
  derived and/or modified CDS sequence (opt2) from neuraminidase__InfluenzaA__AEX34310
augaaccccaaccagaagaucaucaccaucggcuccaucuccaucgccaucggcaucaucucccucaugcuccagaucggcaacaucaucuccaucugggccucccacuccauccagaccggcacccagaaccacaccggcaucugcaaccagcgcaucaucaccuacgagaacuccaccugggucaaccacaccuacgucaacaucaacaacaccaacgucgucgccggcaaggacaagacccccgucacccucgucggcaacuccucccucugcuccaucuccggcugggccaucuacaccaaggacaacuccauccgcaucggcuccaagggcgacgucuucgucauccgcgagcccuucaucuccugcucccaccucgagugcaagaccuucuuccucacccagggcgcccuccucaacgacaagcacuccaacggcaccgucaaggaccgcucccccuaccgcgcccucauguccugcccccucggcgaggcccccucccccuacaacuccaaguucgaguccgucgccugguccgccuccgccugccacgacggcaucggcuggcucaccaucggcaucuccggccccgacaacggcgccgucgccguccucaaguacaagggcaucaucaccggcaccaucaaguccuggaagaagcagauccuccgcacccaggaguccgagugcgucugcaugaacggcuccugcuucaccaucaugaccgacggccccuccaacggcgccgccuccuacaagaucuucaagaucgagaagggcaaggucaccaaguccauggagcucaacgcccccaacuuccacuacgaggagugcuccugcuaccccgacaccggcaccgucaugugcgucugccgcgacaacuggcacggcuccaaccgccccugggucuccuucaaccagaaccucgacuaccagaucggcuacaucugcuccggcgucuucggcgacaacccccgccccaaggaccgcgagggcuccugcaaccccgucaccgucgacggcgccaacggcgucaagggcuucuccuacaaguacggcaacggcgucuggaucggccgcaccaaguccaaccgcauccgcaagggcuucgagaugaucugggaccccaacggcuggaccaacaccgacuccgacuucuccgucaagcaggacaucgucgccaucaccgacugguccggcuacuccggcuccuucguccagcaccccgagcucaccggccucgacugcauccgccccugcuucugggucgagcucguccgcggccuccccggcgagaacaccaccaucuggaccuccggcuccuccaucuccuucugcggcgucaacggcgacaucgccaacugguccuggcccgacggcgccgagcuccccuucaccaucgacaaguga

SEQ ID NO: 117513 - RNA, 1413 nt, Artificial Sequence
  derived and/or modified CDS sequence (opt2) from neuraminidase__InfluenzaA__AEX34321
augaaccccaaccagaagaucaucaccaucggcuccaucuccaucgccaucggcaucaucucccucaugcuccagaucggcaacaucaucuccaucugggucucccacuccauccagaccggcucccagaacaacaccggcaucugcaaccagcgcaucaucaccuacgagaacuccaccugggucaaccacaccuacgucaacaucaacaacaccaacgucgucgccggcgaggacaagaccuccgucacccucgccggcaacuccucccucugcuccaucuccggcugggccaucuacaccaaggacaacuccauccgcaucggcuccaagggcgacgucuucgucauccgcgagcccuucaucuccugcucccaccucgagugccgcaccuucuuccucacccagggcgcccuccucaacgacaagcacuccaacggcaccgucaaggaccgcucccccuaccgcgcccucauguccugcccccucggcgaggcccccucccccuacaacuccaaguucgaguccgucgccugguccgccuccgccugccacgacggcaugggcuggcucaccaucggcaucuccggccccgacaacggcgccgucgccguccucaaguacaacggcaucaucaccggcaccaucaaguccuggaagaagcagauccuccgcacccaggaguccgagugcgucugcaugaacggcuccugcuucaccaucaugaccgacggccccuccaacaaggccgccuccuacaagaucuucaagaucgagaagggcaaggucaccaaguccaucgagcucaacgcccccaacuucuacuacgaggagugcuccugcuaccccgacaccggcaucgucaugugcgucugccgcgacaacuggcacggcuccaaccgccccugggucuccuucaaccagaaccucgacuaccagaucggcuacaucugcuccggcgucuucggcgacaacccccgccccgaggacggcgagggcuccugcaaccccgucaccgucgacggcgccaacggcgucaagggcuucuccuacaaguacggcaacggcgucuggaucggccgcaccaaguccaaccgccuccgcaagggcuucgagaugaucugggaccccaacggcuggaccaacaccgacuccgacuucuccgucaagcaggacgucgucgccaucaccgacugguccggcuacuccggcuccuucguccagcaccccgagcucaccggccucgacugcauccgccccugcuucugggucgagcucguccgcggccucccccgcgagaacaccaccaucuggaccuccggcuccuccaucuccuucugcggcgucaacuccgacaccgccaacugguccuggcccgacggcgccgagcuccccuucaccaucgacaaguga

SEQ ID NO: 117514 - RNA, 1410 nt, Artificial Sequence; identical to SEQ ID NO: 112093
  derived and/or modified CDS sequence (opt2) from neuraminidase__InfluenzaA__AEX34356

SEQ ID NO: 117515 - RNA, 1410 nt, Artificial Sequence
  derived and/or modified CDS sequence (opt2) from neuraminidase__InfluenzaA__AEX34367
augaaccccaaccagaagaucaucaccaucggcuccgucucccucaccaucuccaccaucugcuucuucaugcagaucgccauccucaucaccaccgucacccuccacuucaagcaguacgaguucaacuccccccccaacaaccaggucaugcucugcgagcccaccaucaucgagcgcaacaucaccgagaucgucuaccucaccaacaccaccaucgagaaggagaucugccccaagcucgccgaguaccgcaacugguccaagccccagugcgacaucaccggcuucgcccccuucuccaaggacaacuccauccgccucuccgccggcggcgacaucugggucacccgcgagcccuacgucuccugcgaccccgacaagugcuaccaguucgcccucggccagggcaccacccucaacaacguccacuccaacgacaccguccgcgaccgcacccccuaccgcacccuccucaugaacgagcucggcguccccuuccaccucggcaccaagcaggucugcaucgccugguccuccuccuccugccacgacggcaaggccuggcuccacgucugcaucaccggcgacgacaagaacgccaccgccuccuucaucuacaacggccgccucgucgacuccaucgucuccugguccaaggagauccuccgcacccaggaguccgagugcgucugcaucaacggcaccugcaccgucgucaugaccgacggcuccgccuccggcaaggccgacaccaagauccucuucaucgaggagggcaagaucguccacaccuccacccucuccggcuccgccaagcacgucgaggagugcuccugcuacccccgccaccccggcguccgcugcgucugccgcgacaacuggaagggcuccaaccgccccaucgucgacaucaacaucaaggaccacuccaucgucuccuccuacgucugcuccggccucgucggcgacaccccccgcaagaacgacuccuccuccuccucccacugccucgaccccaacaacgaggagggcggccacggcgucaagggcugggccuucgacgacggcaacgacgucuggaugggccgcaccaucuccgagaagucccgccucggcuacgagaccuucaaggucaucgagggcugguccaaccccaaguccaagcuccagaucaaccgccaggucaucgucgaccgcggcaaccgcuccggcuacuccggcaucuucuccgucgagggcaaguccugcaucaaccgcugcuucuacgucgagcucauccgcggccgcaaggaggagaccgagguccucuggaccuccaacuccaucgucgucuucugcggcaccuccggcaccuacggcaccggcuccuggcccgacggcgccgacaucaaccucaugcccaucuga

SEQ ID NO: 117516 - RNA, 1410 nt, Artificial Sequence
  derived and/or modified CDS sequence (opt2) from neuraminidase__InfluenzaA__AEX34378
augaaccccaaccagaagaucaucaccaucggcuccgucucccucaccaucuccaccaucugcuucuucaugcagaucgccauccucaucaccaccgucacccuccacuucaagcaguacgaguucaacuccccccccaacaaccaggucaugcucugcgagcccaccaucaucgagcgcaacaucaccgagaucgucuaccucaccaacaccaccaucgagaaggagaucugccccaaccucgccgaguaccgcaacugguccaagccccagugcgacaucaccggcuucgcccccuucuccaaggacaacuccauccgccucuccgccggcggcgacaucugggucacccgcgagcccuacgucuccugcgaccccgacaagugcuaccaguucgcccucggccagggcaccacccucaacaacguccacuccaacgacaccguccgcgaccgcacccccuaccgcacccuccucaugaacgagcucggcguccccuuccaccucggcaccaagcaggucugcaucgccugguccuccuccuccugccacgacggcaaggccuggcuccacgucugcaucaccggcgacgacaagaacgccaccgccuccuucaucuacaacggccgccucgucgacuccaucgucuccugguccaaggagauccuccgcacccaggaguccgagugcgucugcaucaacggcaccugcaccgucgucaugaccgacggcuccgccuccggcaaggccgacaccaagauccucuucaucgaggagggcaagaucguccacaccuccacccucuccggcuccgccaagcacgucgaggagugcuccugcuacccccgccaccccggcguccgcugcgucugccgcgacaacuggaagggcuccaaccgccccaucgucgacaucaacaucaaggaccacuccaucgucuccuccuacgucugcuccggccucgucggcgacaccccccgcaagaacgacuccuccuccuccucccacugccucgaccccaacaacgaggagggcggccacggcgucaagggcugggccuucgacgacggcaacgacgucuggaugggccgcaccaucuccgagaagucccgccucggcuacgagaccuucaaggucaucgagggcugguccaaccccaaguccaagcuccagaucaaccgccaggucaucgucgaccgcggcaaccgcuccggcuacuccggcaucuucuccgucgagggcaaguccugcaucaaccgcugcuucuacgucgagcucauccgcggccgcaaggaggagaccgagguccucuggaccuccaacuccaucgucgucuucugcggcaccuccggcaccuacggcaccggcuccuggcccgacggcgccgacaucaaccucaugcccaucuga

SEQ ID NO: 117517 - RNA, 1410 nt, Artificial Sequence
  derived and/or modified CDS sequence (opt2) from neuraminidase__InfluenzaA__AEX34400
augaaccccaaccagaagaucaucaccaucggcuccgucucccucaccaucuccaccaucugcuucuucaugcagaucgccauccucaucaccaccgucacccuccacuucaagcaguacgaguucaacuccccccccaacaaccaggucaugcucugcgagcccaccaucaucgagcgcaacaucaccgagaucgucuaccucaccaacaccaccaucgagaaggagaucugccccaagcucgccgaguaccgcaacugguccaagccccagugcgacaucaccggcuucgcccccuucuccaaggacaacuccauccgccucuccgccggcggcgacaucugggucacccgcgagcccuacgucuccugcgaccccgacaagugcuaccaguucgcccucggccagggcaccacccucaacaacguccacuccaacgacaccguccgcggccgcacccccuaccgcacccuccucaugaacgagcucggcguccccuuccaccucggcaccaagcaggucugcaucgccugguccuccuccuccugccacgacggcaaggccuggcuccacgucugcaucaccggcgacgacaagaacgccaccgccuccuucaucuacaacggccgccucgucgacuccgucgucuccugguccaaggagauccuccgcacccaggaguccgagugcgucugcaucaacggcaccugcaccgucgucaugaccgacggcuccgccuccggcaaggccgacaccaagauccucuucaucaaggagggcaagaucguccacaccuccacccucuccggcuccgcccagcacgucgaggagugcuccugcuacccccgcuaccccggcguccgcugcgucugccgcgacaacuggaagggcuccaaccgccccaucgucgacaucaacaucaaggaccacuccaucgucuccuccuacgucugcuccggccucgucggcgacaccccccgcaagaacgacuccuccuccuccucccacugccucgaccccaacaacgaggagggcggccacggcgucaagggcugggccuucgacgacggcaacgacgucuggaugggccgcaccaucuccgagaagucccgccucggcuacgagaccuucaaggucaucgagggcugguccaaccccaaguccaagcuccagaucaaccgccaggucaucgucgaccgcggcaaccgcuccggcuacuccggcaucuucuccgucgagggcaaguccugcaucaaccgcugcuucuacgucgagcucauccgcggccgcaaggaggagaccgagguccucuggaccuccaacuccaucgucgucuucugcggcaccuccggcaccuacggcaccggcuccuggcccgacggcgccgacaucaaccucaugcccaucuga

SEQ ID NO: 117518 - RNA, 1413 nt, Artificial Sequence
  derived and/or modified CDS sequence (opt2) from neuraminidase__InfluenzaA__AEX34432
augaaccccaaccagaagaucaucaccaucggcuccaucuccaucgccaucggcaucaucucccucauccuccagaucggcaacaucaucuccaucugggccucccacuccauccagaccggcucccagaaccacaccggcaucugcaaccagcgcaucaucaccuacgagaacuccaccugggucaacaacaccuacgucaacaucaacaacaccaacgucgucgucgagaaggacaagaccuccgucacccucgccggcaacuccucccucugcuccaucuccggcugggccaucuacaccaaggacaacuccauccgcaucggcuccaagggcgacgucuucgucauccgcgagcccuucaucuccugcucccaccucgagugccgcaccuucuuccucacccagggcgcccuccucaacgacaagcacuccaacggcaccgucaaggaccgcucccccuaccgcgcccucauguccugcccccucggcgaggcccccucccccuacaacucccgcuucgaguccgucgccugguccgccuccgccugccacgacggcaugggcuggcucaccaucggcaucuccggccccgacaacggcgccgucgccguccucaaguacaacggcaucaucaccgagaccaucaaguccuggaagaagcgcauccuccgcacccaggaguccgagugcgucugcaugaacggcuccugcuucaccaucaugaccgacggccccuccaacggcaccgccuccuacaagaucuucaagaucgagaagggcaaggucaccaagaccaucgagcucaacgcccccaacuuccacuacgaggagugcuccugcuaccccgacaccggcaccgucaugugcgucugccgcgacaacuggcacggcuccaaccgccccugggucuccuucaaccagaaccucgacuaccagaucggcuacaucugcuccggcgucuucggcgacaacccccgccccaaggacggcgagggcuccugcaaccccgucaccgucgacggcgccgacggcgucaagggcuucuccuacaaguacggcaacggcgucuggaucggccgcaccaaguccaaccgccuccgcaagggcuucgagaugaucugggaccccaacggcuggaccaacaccgacuccgacuucuccgucaagcaggacgucgucgccaucaccgacugguccggcuacuccggcuccuucguccagcaccccgagcucaccggccucgacugcauccgccccugcuucugggucgagcucguccgcggccucccccgcgagaacaccaccaucuggaccuccggcuccuccaucuccuucugcggcgucaacuccggcaccgccaacugguccuggcccgacggcgccgagcuccccuucaccaucgacaaguga

SEQ ID NO: 117519 - RNA, 1413 nt, Artificial Sequence; identical to SEQ ID NO: 117518
  derived and/or modified CDS sequence (opt2) from neuraminidase__InfluenzaA__AEX34443

SEQ ID NO: 117520 - RNA, 1410 nt, Artificial Sequence; identical to SEQ ID NO: 112639
  derived and/or modified CDS sequence (opt2) from neuraminidase__InfluenzaA__AEX34454

SEQ ID NO: 117521 - RNA, 1413 nt, Artificial Sequence
  derived and/or modified CDS sequence (opt2) from neuraminidase__InfluenzaA__AEX34465
augaaccccaaccagaagaucaucaccaucggcuccaucuccaucgccaucggcaucaucucccucaugcuccagaucggcaacaucaucuccaucugggccucccacuccauccagaccggcucccagaaccacaccggcaucugcaaccagcgcaucaucaccuacgagaacuccaccugggucaaccacaccuacgucaacaucaacaacaccaacgucgucgccggcaaggacaagaccuccgucacccucgccggcaacuccucccucugcuccaucuccggcugggccaucuacaccaaggacaacuccauccgcaucggcuccaagggcgacgucuucgucauccgcgagcccuucaucuccugcucccaccucgagugccgcaccuucuuccucacccagggcgcccuccucaacgacaagcacuccaacggcaccgucaaggaccgcucccccuaccgcgcccucauguccugcccccucggcgaggcccccucccccuacaacuccaaguucgaguccgucgccugguccgccuccgccugccacgacggcaugggcuggcucaccaucggcaucuccggccccgacaacggcgccgucgccguccucaaguacaacggcaucaucaccgagaccaucaaguccuggaagaagcgcauccuccgcacccaggaguccgagugcgucugcgucaacggcuccugcuucaccaucaugaccgacggccccuccaacggcgccgccuccuacaagaucuucaagaucgagaagggcaaggucaccaaguccaucgagcucaacgcccccaacuuccacuacgaggagugcuccugcuaccccgacaccggcaccgucaugugcgucugccgcgacaacuggcacggcuccaaccgccccugggucuccuucaaccagaaccucgacuaccagaucggcuacaucugcuccggcgucuucggcgacaacccccgccccaaggacggcgagggcuccugcaaccccgucaccgucgacggcgccgacggcaucaagggcuucuccuacaaguacggcaacggcgucuggaucggccgcaccaaguccaaccgccuccgcaagggcuucgagaugaucugggaccccaacggcuggaccgacaccgacuccgacuucuccgucaagcaggacgucgucgccaucaccgacugguccggcuacuccggcuccuucguccagcaccccgagcucaccggccucgacugcaugcgccccugcuucugggucgagcucguccgcggccucccccgcgagaacaccaccaucuggaccuccggcuccuccaucuccuucugcggcgucaacuccgacaccgccaacugguccuggcccgacggcgccgagcuccccuucaccaucgacaaguga

SEQ ID NO: 117522 - RNA, 1413 nt, Artificial Sequence; identical to SEQ ID NO: 117475
  derived and/or modified CDS sequence (opt2) from neuraminidase__InfluenzaA__AEX34476

SEQ ID NO: 117523 - RNA, 1413 nt, Artificial Sequence; identical to SEQ ID NO: 117477
  derived and/or modified CDS sequence (opt2) from neuraminidase__InfluenzaA__AEX34487

SEQ ID NO: 117524 - RNA, 1413 nt, Artificial Sequence; identical to SEQ ID NO: 117477
  derived and/or modified CDS sequence (opt2) from neuraminidase__InfluenzaA__AEX34498

SEQ ID NO: 117525 - RNA, 1413 nt, Artificial Sequence; identical to SEQ ID NO: 117477
  derived and/or modified CDS sequence (opt2) from neuraminidase__InfluenzaA__AEX34509

SEQ ID NO: 117526 - RNA, 1413 nt, Artificial Sequence; identical to SEQ ID NO: 117477
  derived and/or modified CDS sequence (opt2) from neuraminidase__InfluenzaA__AEX34520

SEQ ID NO: 117527 - RNA, 1413 nt, Artificial Sequence; identical to SEQ ID NO: 117477
  derived and/or modified CDS sequence (opt2) from neuraminidase__InfluenzaA__AEX34531

SEQ ID NO: 117528 - RNA, 1413 nt, Artificial Sequence; identical to SEQ ID NO: 117477
  derived and/or modified CDS sequence (opt2) from neuraminidase__InfluenzaA__AEX34542

SEQ ID NO: 117529 - RNA, 1413 nt, Artificial Sequence; identical to SEQ ID NO: 117477
  derived and/or modified CDS sequence (opt2) from neuraminidase__InfluenzaA__AEX34553

SEQ ID NO: 117530 - RNA, 1413 nt, Artificial Sequence; identical to SEQ ID NO: 117477
  derived and/or modified CDS sequence (opt2) from neuraminidase__InfluenzaA__AEX34564

SEQ ID NO: 117531 - RNA, 1413 nt, Artificial Sequence; identical to SEQ ID NO: 117477
  derived and/or modified CDS sequence (opt2) from neuraminidase__InfluenzaA__AEX34575

SEQ ID NO: 117532 - RNA, 1413 nt, Artificial Sequence; identical to SEQ ID NO: 117477
  derived and/or modified CDS sequence (opt2) from neuraminidase__InfluenzaA__AEX34586

SEQ ID NO: 117533 - RNA, 1413 nt, Artificial Sequence; identical to SEQ ID NO: 117477
  derived and/or modified CDS sequence (opt2) from neuraminidase__InfluenzaA__AEX34597

SEQ ID NO: 117534 - RNA, 1413 nt, Artificial Sequence; identical to SEQ ID NO: 117477
  derived and/or modified CDS sequence (opt2) from neuraminidase__InfluenzaA__AEX34608

SEQ ID NO: 117535 - RNA, 1413 nt, Artificial Sequence; identical to SEQ ID NO: 117477
  derived and/or modified CDS sequence (opt2) from neuraminidase__InfluenzaA__AEX34619

SEQ ID NO: 117536 - RNA, 1413 nt, Artificial Sequence; identical to SEQ ID NO: 117477
  derived and/or modified CDS sequence (opt2) from neuraminidase__InfluenzaA__AEX34630

SEQ ID NO: 117537 - RNA, 1413 nt, Artificial Sequence; identical to SEQ ID NO: 117477
  derived and/or modified CDS sequence (opt2) from neuraminidase__InfluenzaA__AEX34641

SEQ ID NO: 117538 - RNA, 1413 nt, Artificial Sequence
  derived and/or modified CDS sequence (opt2) from neuraminidase__InfluenzaA__AEX34653
augaaccccaaccagaagaucaucaccaucggcuccaucuccaucgccaucggcaucaucucccucaugcuccaggucggcaacaucaucuccaucugggccucccacuccauccagaccggcucccagaaccacaccggcaucugcaaccagcgcaucaucaccuacgagaacuccaccugggucaaccacaccuacgucaacaucaacaacaccaacgucgucgccggcaaggacaagaccuccgucgcccucgccggcaacuccucccucugcuccaucuccggcugggccaucuacaccaaggacaacuccauccgcaucggcuccaagggcgacgucuucgucauccgcgagcccuucaucuccugcucccaccucgagugccgcaccuucuuccucacccagggcgcccuccucaacgacaagcacuccaacggcaccgucaaggaccgcucccccuaccgcgcccucauguccugcccccucggcgaggcccccucccccuacaacuccaaguucgaguccgucgccugguccgccuccgccugccacgacggccucggcuggcucaccaucggcaucuccggccccgacaacggcgccgucgccguccucaaguacaacggcaucaucaccgagaccaucaaguccuggaagaagcgcauccuccgcacccaggaguccgagugcgucugcgucaacggcuccugcuucaccaucaugaccgacggccccuccaacggcgccgccuccuacaagaucuucaagaucgagaagggccaggucaccaaguccgucgagcucaacgcccccaacuuccacuacgaggagugcuccugcuaccccgacaccggcaccgucaugugcgucugccgcgacaacuggcacggcuccaaccgccccugggucuccuucaaccaggaccucgacuaccagaucggcuacaucugcuccggcgucuucggcgacaacccccgccccaaggacggcaagggcuccugcaaccccgucaccgucgacggcgccgacggcgucaagggcuucuccuacaaguacggcaacggcgucuggaucggccgcaccaaguccaaccgccuccgcaagggcuucgagaugaucugggaccccaacggcuggaccgacaccgacuccgacuucuccgucaagcaggacgucgucgccaucaccgacugguccggcuacuccggcuccuucguccagcaccccgagcucaccggccucgacugcauccgccccugcuucugggucgagcucguccgcggccucccccgcgagaacaccaccaucuggaccuccggcuccuccaucuccuucugcggcgucgacuccgacaccgccaacugguccuggcccgacggcgccgagcuccccuucaccaucgacaaguga

SEQ ID NO: 117539 - RNA, 1413 nt, Artificial Sequence
  derived and/or modified CDS sequence (opt2) from neuraminidase__InfluenzaA__AEX34664
augaaccccaaccagaagaucaucaccaucggcuccaucuccaucgccaucggcaucaucucccucaugcuccagaucggcaacaucaucuccaucugggccucccacuccauccagaccggcucccagaaccacaccggcaucugcaaccagcgcaucaucaccuacgagaacuccaccugggucaaccacaccuacgucaacaucaacaacaccaacgucgucgccggcaaggacaagaccuccgucacccucgccggcaacuccucccucugcuccaucuccggcugggccaucuacaccaaggacaacuccauccgcaucggcuccaagggcgacgucuucgucauccgcgagcccuucaucuccugcucccaccucgagugccgcaccuucuuccucacccagggcgcccuccucaacgacaagcacuccaacggcaccgucaaggaccgcucccccuaccgcgcccucauguccugcccccucggcgaggcccccucccccuacaacuccaaguucgaguccgucgccugguccgccuccgccugccacgacggcaugggcuggcucaccaucggcaucuccggccccgacaacggcgccgucgccguccucaaguacaacggcaucaucaccgagaccaucaaguccuggaagaagcgcauccuccgcacccaggaguccgagugcgucugcgucaacggcuccugcuucaccaucaugaccgacggccccuccaacggcgccgccuccuacaagaucuucaagaucgagaagggcaaggucaccaagucccgcgagcucaacgcccccaacuuccacuacgaggagugcuccugcuaccccgacaccggcaccgucaugugcgucugccgcgacaacuggcacggcuccaaccgccccugggucuccuucaaccagaaccucgacuaccagaucggcuacaucugcuccggcgucuucggcgacaacccccgccccaaggacggcaagggcuccugcaaccccgucaccgccgacggcgccgacggcgucaagggcuucuccuacaaguacggcaacggcgucuggaucggccgcaccaaguccaaccgccuccgcaagggcuucgagaugaucugggaccccaacggcuggaccgacaccgacuccgacuucuccgucaagcaggacgucgucgccaucaccgacugguccggcuacuccggcuccuucguccagcaccccgagcucaccggccucgacugcauccgccccugcuucugggucgagcucguccgcggccucccccgcgagaacaccaccaucuggaccuccggcuccuccaucuccuucugcggcgucgacuccgacaccgccaacugguccuggcccgacggcgccgagcuccccuucaccaucgacaaguga

SEQ ID NO: 117540 - RNA, 1413 nt, Artificial Sequence; identical to SEQ ID NO: 117518
  derived and/or modified CDS sequence (opt2) from neuraminidase__InfluenzaA__AEX34686

SEQ ID NO: 117541 - RNA, 1413 nt, Artificial Sequence
  derived and/or modified CDS sequence (opt2) from neuraminidase__InfluenzaA__AEX34760
augaaccccaaccagaagaucaucaccaucggcuccaucuccaucgccaucggcaucaucucccucauccuccagaucggcaacaucaucuccaucugggccucccacuccauccagaccggcucccagaaccacaccggcaucugcaaccagcgcaucaucaccuacgagaacuccaccugggucaacaacaccuacgucaacaucaacaacaccaacgucgucgucgagaaggacaagaccuccgucacccucgccggcaacuccucccucugcuccaucuccggcugggccaucuacaccaaggacaacuccauccgcaucggcuccaagggcgacgucuucgucauccgcgagcccuucaucuccugcucccaccucgagugccgcaccuucuuccucacccagggcgcccuccucaacgacaagcacuccaacggcaccgucaaggaccgcucccccuaccgcgcccucauguccugcccccucggcgaggcccccucccccuacaacucccgcuucgaguccgucgccugguccgccuccgccugccacgacggcaugggcuggcucaccaucggcaucuccggccccgacaacggcgccgucgccguccucaaguacaacggcaucaucaccgagaccaucaaguccuggaagaagcgcauccuccgcacccaggaguccgagugcgucugcaugaacggcuccugcuucaccaucaugaccgacggccccuccaacggcgccgccuccuacaagaucuucaagaucgagaagggcaaggucaccaagaccaucgagcucaacgcccccaacuuccacuacgaggagugcuccugcuaccccgacaccggcaccgucaugugcgucugccgcgacaacuggcacggcuccaaccgccccugggucuccuucaaccagaaccucgacuaccagaucggcuacaucugcuccggcgucuucggcgacaacccccgccccaaggacggcgagggcuccugcaaccccgucaccgucgacggcgccgacggcgucaagggcuucuccuacaaguacggcaacggcgucuggaucggccgcaccaaguccaaccgccuccgcaagggcuucgagaugaucugggaccccaacggcuggaccaacaccgacuccgacuucuccgucaagcaggacgucgucgccaucaccgacugguccggcuacuccggcuccuucguccagcaccccgagcucaccggccucgacugcauccgccccugcuucugggucgagcucguccgcggccucccccgcgagaacaccaccaucuggaccuccggcuccuccaucuccuucugcggcgucaacuccggcaccgucaacugguccuggcccgacggcgccgagcuccccuucaccaucgacaaguga

SEQ ID NO: 117542 - RNA, 1413 nt, Artificial Sequence
  derived and/or modified CDS sequence (opt2) from neuraminidase__InfluenzaA__AEX34771
augaaccccaaccagaagaucaucaccaucggcuccaucuccaucgccaucggcaucaucucccucauccuccagaucggcaacaucaucuccaucugggccucccacuccauccagaccggcucccagaaccacaccggcaucugcaaccagcgcaucaucaccuacgagaacuccaccugggucaacaacaccuacgucaacaucaacaacaccaacgucgucgucgagaaggacaagaccuccgucacccucgccggcaacuccucccucugcuccaucuccggcugggccaucuacaccaaggacaacuccauccgcaucggcuccaagggcgacgucuucgucauccgcgagcccuucaucuccugcucccaccucgagugccgcaccuucuuccucacccagggcgcccuccucaacgacaagcacuccaacggcaccgucaaggaccgcucccccuaccgcgcccucauguccugcccccucggcgaggcccccucccccuacaacucccgcuucgaguccgucgccugguccgccuccgccugccacgacggcaugggcuggcucaccaucggcaucuccggccccgacaacggcgccgucgccguccucaaguacaacggcaucaucaccgagaccaucaaguccuggaagaagcgcauccuccgcacccaggaguccgagugcgucugcaugaacggcuccugcuucaccaucaugaccgacggccccuccaacggcgccgccuccuacaagaucuucaagaucgagaagggcaaggucaccaagaccaucgagcucaacgcccccaacuuccacuacgaggagugcuccugcuaccccgacaccggcaccgucaugugcgucugccgcgacaacuggcacggcuccaaccgccccugggucuccuucaaccagaaccucgacuaccagaucggcuacaucugcuccggcgucuucggcgacaacccccgccccaaggacggcgagggcuccugcaaccccgucaccgucgacggcgccgacggcgucaagggcuucuccuacaaguacggcaacggcgucuggaucggccgcaccaaguccaaccgccuccgcaagggcuucgagaugaucugggaccccaacggcuggaccaacaccgacuccgacuucuccgucaagcaggacgucgucgccaucaccgacugguccggcuacuccggcuccuucguccagcaccccgagcucaccggccucgacugcauccgccccugcuucugggucgagcucguccgcggccucccccgcgagaacaccaccaucuggaccuccggcuccuccaucuccuucugcggcgucaacuccggcaccgccaacugguccuggcccgacggcgccgagcuccccuucaccaucgacaaguga

SEQ ID NO: 117543 - RNA, 1413 nt, Artificial Sequence; identical to SEQ ID NO: 113497
  derived and/or modified CDS sequence (opt2) from neuraminidase__InfluenzaA__AEX34782

SEQ ID NO: 117544 - RNA, 1413 nt, Artificial Sequence
  derived and/or modified CDS sequence (opt2) from neuraminidase__InfluenzaA__AEX34793
augaaccccaaccagaagaucaucaccaucggcuccaucuccaucgccaucggcaucaucucccucaugcuccagaucggcaacaucaucuccaucugggccucccacuccauccagaccggcucccagaaccacaccggcaucugcaaccagcgcaucaucaccuacgagaacuccaccugggucaaccacaccuacgucaacaucaacaacaccaacgucgucgccggcaaggacaagacccccgucacccucgucggcaacuccucccucugcuccaucuccggcugggccaucuacaccaaggacaacuccauccgcaucggcuccaagggcgacgucuucgucauccgcgagcccuucaucuccugcucccaccucgagugcaagaccuucuuccucacccagggcgcccuccucaacgacaagcacuccaacggcaccgucaaggaccgcucccccuaccgcgcccucauguccugcccccucggcgaggcccccucccccuacaacuccaaguucgaguccgucgccugguccgccuccgccugccacgacggcaucggcuggcucaccaucggcaucuccggccccgacaacggcgccgucgccguccucaaguacaagggcaucaucaccggcaccaucaaguccuggaagaagcagauccuccgcacccaggaguccgagugcgucugcaugaacggcuccugcuucaccaucaugaccgacggccccuccaacggcgccgccuccuacaagaucuucaagaucgagaagggcaaggucaccaaguccauggagcucaacgcccccaacuuccacuacgaggagugcuccugcuaccccgacaccggcaccgucaugugcgucugccgcgacaacuggcacggcuccaaccgccccugggucuccuucaaccagaaccucgacuaccagaucggcuacaucugcuccggcgucuucggcgacaacccccgccccaaggaccgcgagggcuccugcaaccccgucaccgucgacggcgccaacggcgucaagggcuucuccuacaaguacggcaacggcgucuggaucggccgcaccaaguccaaccgcauccgcaagggcuucgagaugaucugggaccccaacggcuggaccaacaccgacuccgacuucuccgucaagcaggacaucgucgccaucaccgacugguccggcuacuccggcuccuucguccagcaccccgagcucaccggccucgacugcauccgccccugcuucugggucgagcucguccgcggccucccccgcgagaacaccaccaucuggaccuccggcuccuccaucuccuucugcggcgucaacggcgacaucgccaacugguccuggcccgacggcgccgagcuccccuucaccaucgacaaguga

SEQ ID NO: 117545 - RNA, 1413 nt, Artificial Sequence; identical to SEQ ID NO: 117544
  derived and/or modified CDS sequence (opt2) from neuraminidase__InfluenzaA__AEX34804

SEQ ID NO: 117546 - RNA, 1413 nt, Artificial Sequence
  derived and/or modified CDS sequence (opt2) from neuraminidase__InfluenzaA__AEX34815
augaaccccaaccagaagaucaucaccaucggcuccaucuccaucgccaucggcaucaucucccucaugcuccagaucggcaacaucaucuccaucugggccucccacuccauccagaccggcucccagaacaacaccggcaucugcaaccagcgcaucaucaccuacgagaacuccaccugggucaaccacaccuacgucaacaucaacaacaccaacgucgucgccggcgaggacaagaccuccgucacccucaccggcaacuccucccucugcuccaucuccggcugggccaucuacaccaaggacaacuccauccgcaucggcuccaagggcgacgucuucgucauccgcgagcccuucaucuccugcucccaccucgagugccgcaccuucuuccucacccagggcgcccuccucaacgacaagcacuccaacggcaccgucaaggaccgcucccccuaccgcgcccucauguccugcccccucggcgaggcccccucccccuacaacuccaaguucgaguccgucgccugguccgccuccgccugccacgacggcaugggcuggcucaccaucggcaucuccggccccgacaacggcgccgucgccguccucaaguacaacggcaucaucaccggcaccaucaaguccuggaagaagcagauccuccgcacccaggaguccgagugcgucugcaugaacggcuccugcuucaccaucaugaccgacggccccuccaacaaggccgccuccuacaagaucuucaagaucgagaagggcaaggucaccaaguccaucgagcucaacgcccccaacuucuacuacgaggagugcuccugcuaccccgacaccggcaucgucaugugcgucugccgcgacaacuggcacggcuccaaccgccccugggucuccuucaaccagaaccucgacuaccagaucggcuacaucugcuccggcgucuucggcgacaacccccgccccgaggacggcgagggcuccugcaaccccgucaccgucgacggcgccaacggcgucaagggcuucuccuacaaguacggcaacggcgucuggaucggccgcaccaaguccaaccgccuccgcaagggcuucgagaugaucugggaccccaacggcuggaccaacaccgacuccgacuucuccgucaagcaggacgucgucgccaucaccgacugguccggcuacuccggcuccuucguccagcaccccgagcucaccggccucgacugcauccgccccugcuucugggucgagcucguccgcggccucccccgcgagaacaccaccaucuggaccuccggcuccuccaucuccuucugcggcgucaacuccgacaccgccaacugguccuggcccgacggcgccgagcuccccuucaccaucgacaaguga

SEQ ID NO: 117547 - RNA, 1413 nt, Artificial Sequence; identical to SEQ ID NO: 117544
  derived and/or modified CDS sequence (opt2) from neuraminidase__InfluenzaA__AEX34826

SEQ ID NO: 117548 - RNA, 1413 nt, Artificial Sequence; identical to SEQ ID NO: 117544
  derived and/or modified CDS sequence (opt2) from neuraminidase__InfluenzaA__AEX34837

SEQ ID NO: 117549 - RNA, 1413 nt, Artificial Sequence
  derived and/or modified CDS sequence (opt2) from neuraminidase__InfluenzaA__AEX34859
augaaccccaaccagaagaucaucaccaucggcuccaccuccaucgccaucggcaucaucucccucaugcuccagaucggcaacaucaucuccaucugggccucccacuccauccagaccggcucccagaaccacaccggcaucugcaaccagcgcaucaucaccuacgagaacuccaccugggucaaccacaccuacgucaacaucaacaacaccaacgucgucgccggcaaggacaagacccccgucacccucaucggcaacuccucccucugcuccaucuccggcugggccaucuacaccaaggacaacuccauccgcaucggcuccaagggcgacgucuucgucauccgcgagcccuucaucuccugcucccaccucgagugcaagaccuucuuccucacccagggcgcccuccucaacgacaagcacuccaacggcaccgucaaggaccgcucccccuaccgcgcccucauguccugcccccucggcgaggcccccucccccuacaacuccaaguucgaguccgucgccugguccgccuccgccugccacgacggcaucggcuggcucaccaucggcaucuccggccccgacaacggcgccgucgccguccucaaguacaagggcaucaucaccggcaccaucaaguccuggaagaagcagauccuccgcacccaggaguccgagugcgucugcaugaacggcuccugcuucaccaucaugaccgacggccccuccaacggcgccgccuccuacaagaucuucaagaucgagaagggcaaggucaccaaguccauggagcucaacgcccccaacuuccacuacgaggagugcuccugcuaccccgacaccggcaccgucaugugcgucugccgcgacaacuggcacggcuccaaccgccccugggucuccuucaaccagaaccucgacuaccagaucggcuacaucugcuccggcgucuucggcgacaacccccgccccaaggaccgcgagggcuccugcaaccccgucaccgucgacggcgccaacggcgucaagggcuucuccuacaaguacggcaacggcgucuggaucggccgcaccaaguccaaccgcauccgcaagggcuucgagaugaucugggaccccaacggcuggaccaacaccgacuccgacuucuccgucaagcaggacaucgucgccaucaccgacugguccggcuacuccggcuccuucguccagcaccccgagcucaccggccucgacugcauccgccccugcuucugggucgagcucguccgcggccucccccgcgagaacaccaccaucuggaccuccggcuccuccaucuccuucugcggcgucaacggcgacaucgccaacugguccuggcccgacggcgccgagcuccccuucaccaucgacaaguga

SEQ ID NO: 117550 - RNA, 1413 nt, Artificial Sequence
  derived and/or modified CDS sequence (opt2) from neuraminidase__InfluenzaA__AEX34870
augaaccccaaccagaagaucaucaccaucggcuccaucuccaucgccaucggcaucaucucccucaugcuccagaucggcaacaucaucuccaucugggccucccacuccauccagaccggcucccagaacaacaccggcaucugcaaccagcgcaucaucaccuacgagaacuccaccugggucaaccacaccuacgucaacaucaacaacaccaacgucgucgccggcgaggacaagaucuccgucacccucgccggcaacuccucccucugcuccaucuccggcugggccaucuacaccaaggacaacuccauccgcaucggcuccaagggcgacgucuucgucauccgcgagcccuucaucuccugcucccaccucgagugccgcaccuucuuccucacccagggcgcccuccucaacgacaagcacuccaacggcaccgucaaggaccgcucccccuaccgcgcccucauguccugcccccucggcgaggcccccucccccuacaacuccaaguucgaguccgucgccugguccgccuccgccugccacgacggcaucggcuggcucaccaucggcaucuccggccccgacaacggcgccgucgccguccucaaguacaacggcaucaucaccggcaccaucaaguccuggaagaagcagauccuccgcacccaggaguccgagugcgucugcaugaacggcuccugcuucaccaucaugaccgacggccccuccaacaaggccgccuccuacaagaucuucaagaucgagaagggcaaggucaccaaguccaucgagcucaacgcccccaacuucuacuacgaggagugcuccugcuaccccgacaccggcaucgucaugugcgucugccgcgacaacuggcacggcuccaaccgccccugggucuccuucaaccagaaccucgacuaccagaucggcuacaucugcuccggcgucuucggcgacaacccccgccccgaggacggcgagggcuccugcaaccccgucaccgucgacggcgccaacggcgucaagggcuucuccuacaaguacggcaacggcgucuggaucggccgcaccaaguccaaccgccuccgcaagggcuucgagaugaucugggaccccaacggcuggaccaacaccgacuccgacuucuccgucaagcaggacgucgucgccaucaccgacugguccggcuacuccggcuccuucguccagcaccccgagcucaccggccucgacugcauccgccccugcuucugggucgagcucguccgcggccucccccgcgagaacaccaccaucuggaccuccggcuccuccaucuccuucugcggcgucaacuccgacaccgccaacugguccuggcccgacggcgccgagcuccccuucaccaucgacaaguga

SEQ ID NO: 117551 - RNA, 1413 nt, Artificial Sequence
  derived and/or modified CDS sequence (opt2) from neuraminidase__InfluenzaA__AEX34881
augaaccccaaccagaagaucaucaccaucggcuccaucuccaucgccaucggcaucaucucccucaugcuccagaucggcaacaucaucuccaucugggccucccacuccauccagaccggcucccagaaccacaccggcaucugcaaccagcgcaucaucaccuacgagaacuccaccugggucaaccacaccuacgucaacaucaacaacaccaacgucgucgccggcaaggacaaggcccccgucacccucaucggcaacuccucccucugcuccaucuccggcugggccaucuacaccaaggacaacuccauccgcaucggcuccaagggcgacgucuucgucauccgcgagcccuucaucuccugcucccaccucgagugcaagaccuucuuccucacccagggcgcccuccucaacgacaagcacuccaacggcaccgucaaggaccgcucccccuaccgcgcccucauguccugcccccucggcgaggcccccucccccuacaacuccaaguucgaguccgucgccugguccgccuccgccugccacgacggcaucggcuggcucaccaucggcaucuccggccccgacaacggcgccgucgccguccucaaguacaagggcaucaucaccggcaccaucaaguccuggaagaagcagauccuccgcacccaggaguccgagugcgucugcaugaacggcuccugcuucaccaucaugaccgacggccccuccaacggcgccgccuccuacaagaucuucaagaucgagaagggcaaggucaccaaguccauggagcucaacgcccccaacuuccacuacgaggagugcuccugcuaccccgacaccggcaccgucaugugcgucugccgcgacaacuggcacggcuccaaccgccccugggucuccuucaaccagaaccucgacuaccagaucggcuacaucugcuccggcgucuucggcgacaacccccgccccaaggaccgcgagggcuccugcaaccccgucaccgucgacggcgccaacggcgucaagggcuucuccuacaaguacggcaacggcgucuggaucggccgcaccaaguccaaccgcauccgcaagggcuucgagaugaucugggaccccaacggcuggaccaacaccgacuccgacuucuccgucaagcaggacaucgucgccaucaccgacugguccggcuacuccggcuccuucguccagcaccccgagcucaccggccucgacugcauccgccccugcuucugggucgagcucguccgcggccucccccgcgagaacaccaccaucuggaccuccggcuccuccaucuccuucugcggcgucaacggcgacaucgccaacugguccuggcccgacggcgccgagcuccccuucaccaucgacaaguga

SEQ ID NO: 117552 - RNA, 1413 nt, Artificial Sequence
  derived and/or modified CDS sequence (opt2) from neuraminidase__InfluenzaA__AEX34892
augaaccccaaccagaagaucaucaccaucggcuccaucuccaucgccaucggcaucaucucccucaugcuccagaucggcaacaucaucuccaucugggccucccacuccauccagaccggcucccagaacaacaccggcaucugcaaccagcgcaucaucaccuacgagaacuccaccugggucaaccacaccuacgucaacaucaacaacaccaacgucgucgccggcgaggacaagaccuccgucacccucgccggcaacuccucccucugcuccaucuccggcugggccaucuacaccaaggacaacuccauccgcaucggcuccaagggcgacgucuucgucauccgcgagcccuucaucuccugcucccaccucgagugccgcaccuucuuccucacccagggcgcccuccucaacgacaagcacuccaacggcaccgucaaggaccgcucccccuaccgcgcccucauguccugcccccucggcgaggcccccucccccuacaacuccaaguucgaguccgucgccugguccgccuccgccugccacgacggcaugggcuggcucaccaucggcaucuccggccccgacaacggcgccgucgccguccucaaguacaacggcaucaucaccggcaccaucaaguccuggaagaagcagauccuccgcacccaggaguccgagugcgucugcaugaacggcuccugcuucaccaucaugaccgacggccccuccaacaaggccgccuccuacaagaucuucaagaucgagaagggcaaggucaccaaguccaucgagcucaacgcccccaacuucuacuacgaggagugcuccugcuaccccgacaccggcaucgucaugugcgucugccgcgacaacuggcacggcuccaaccgccccugggucuccuucaaccagaaccucgacuaccagaucggcuacaucugcuccggcgucuucggcgacaacccccgccccgaggacggcgagggcuccugcaaccccgucaccgucgacggcgccaacggcgucaagggcuucuccuacaaguacggcaacggcgucuggaucggccgcaccaaguccaaccgccuccgcaagggcuucgagaugaucugggaccccaacggcuggaccaacaccgacuccgacuucuccgucaagcagaacgucgucgccaucaccgacugguccggcuacuccggcuccuucguccagcaccccgagcucaccggccucgacugcauccgccccugcuucugggucgagcucguccgcggccucccccgcgagaacaccaccaucuggaccuccggcuccuccaucuccuucugcggcgucaacuccgacaccgccaacugguccuggcccgacggcgccgagcuccccuucaccaucgacaaguga

SEQ ID NO: 117553 - RNA, 1413 nt, Artificial Sequence
  derived and/or modified CDS sequence (opt2) from neuraminidase__InfluenzaA__AEX34903
augaaccccaaccagaagaucaucaccaucggcuccaucuccaucgccaucggcaucaucucccucaugcuccagaucggcaacaucaucuccaucugggccucccgcuccauccagaccggcucccagaaccacaccggcaucugcaaccagcgcaucaucaccuacgagaacuccaccugggucaaccacaccuacgucaacaucaacaacaccaacgucgucgccggcaaggacaagacccccgucacccucgucggcaacuccucccucugcuccaucuccggcugggccaucuacaccaaggacaacuccauccgcaucggcuccaagggcgacgucuucgucauccgcgagcccuucaucuccugcucccaccucgagugcaagaccuucuuccucacccagggcgcccuccucaacgacaagcacuccaacggcaccgucaaggaccgcucccccuaccgcgcccucauguccugcccccucggcgaggcccccucccccuacaacuccaaguucgaguccgucgccugguccgccuccgccugccacgacggcaucggcuggcucaccaucggcaucuccggccccgacaacggcgccgucgccguccucaaguacaagggcaucaucaccggcaccaucaaguccuggaagaagcagauccuccgcacccaggaguccgagugcgucugcaugaacggcuccugcuucaccaucaugaccgacggccccuccaacggcgccgccuccuacaagaucuucaagaucgagaagggcaaggucaccaaguccauggagcucaacgcccccaacuuccacuacgaggagugcuccugcuaccccgacaccggcaccgucaugugcgucugccgcgacaacuggcacggcuccaaccgccccugggucuccuucaaccagaaccucgacuaccagaucggcuacaucugcuccggcgucuucggcgacaacccccgccccaaggaccgcgagggcuccugcaaccccgucaccgucgacggcgccaacggcgucaagggcuucuccuacaaguacggcaacggcgucuggaucggccgcaccaaguccaaccgcauccgcaagggcuucgagaugaucugggaccccaacggcuggaccaacaccgacuccgacuucuccguccgccaggacaucgucgccaucaccgacugguccggcuacuccggcuccuucguccagcaccccgagcucaccggccucgacugcauccgccccugcuucugggucgagcucguccgcggccucccccgcgagaacaccaccaucuggaccuccggcuccuccaucuccuucugcggcgucaacggcgacaucgccaacugguccuggcccgacggcgccgagcuccccuucaccaucgacaaguga

SEQ ID NO: 117554 - RNA, 1413 nt, Artificial Sequence; identical to SEQ ID NO: 113497
  derived and/or modified CDS sequence (opt2) from neuraminidase__InfluenzaA__AEX34914

SEQ ID NO: 117555 - RNA, 1413 nt, Artificial Sequence; identical to SEQ ID NO: 113497
  derived and/or modified CDS sequence (opt2) from neuraminidase__InfluenzaA__AEX34925

SEQ ID NO: 117556 - RNA, 1413 nt, Artificial Sequence; identical to SEQ ID NO: 113497
  derived and/or modified CDS sequence (opt2) from neuraminidase__InfluenzaA__AEX34936

SEQ ID NO: 117557 - RNA, 1413 nt, Artificial Sequence; identical to SEQ ID NO: 113497
  derived and/or modified CDS sequence (opt2) from neuraminidase__InfluenzaA__AEX34947

SEQ ID NO: 117558 - RNA, 1413 nt, Artificial Sequence; identical to SEQ ID NO: 113497
  derived and/or modified CDS sequence (opt2) from neuraminidase__InfluenzaA__AEX34958

SEQ ID NO: 117559 - RNA, 1413 nt, Artificial Sequence; identical to SEQ ID NO: 113497
  derived and/or modified CDS sequence (opt2) from neuraminidase__InfluenzaA__AEX34969

SEQ ID NO: 117560 - RNA, 1413 nt, Artificial Sequence; identical to SEQ ID NO: 113497
  derived and/or modified CDS sequence (opt2) from neuraminidase__InfluenzaA__AEX34980

SEQ ID NO: 117561 - RNA, 1413 nt, Artificial Sequence; identical to SEQ ID NO: 113497
  derived and/or modified CDS sequence (opt2) from neuraminidase__InfluenzaA__AEX34991

SEQ ID NO: 117562 - RNA, 1413 nt, Artificial Sequence
  derived and/or modified CDS sequence (opt2) from neuraminidase__InfluenzaA__AEX35002
augaaccccaaccagaagaucaucaccaucggcuccaucuccaucgccaucggcaucaucucccucaugcuccagaucggcaacaucaucuccaucugggccucccacuccauccagaccggcucccagaaccacaccggcaucugcaaccagcgcaucaucaccuacgagaacuccaccugggucaaccacaccuacgucaacaucaacaacaccaacgucgucgccggcaaggacaagacccccgucacccucaucggcaacuccucccucugcuccaucuccggcugggccaucuacaccaaggacaacuccauccgcaucggcuccaagggcgacgucuucgucauccgcgagcccuucaucuccugcucccaccucgagugcaagaccuucuuccucacccagggcgcccuccucaacgacaagcacuccaacggcaccgucaaggaccgcucccccuaccgcgcccucauguccugcccccucggcgaggcccccucccccuacaacuccaaguucgaguccgucgccugguccgccuccgccugccacgacggcaucggcuggcucaccaucggcaucuccggccccgacaacggcgccgucgccguccucaaguacaagggcaucaucaccggcaccaucaaguccuggaagaagcagauccuccgcacccaggaguccgagugcgucugcaugaacggcuccugcuucaccaucaugaccgacggccccuccaacggcgccgccuccuacaagaucuucaagaucgagaagggcaaggucaccaaguccauggagcucaacgcccccaacuuccacuacgaggagugcuccugcuaccccgacaccggcaccgucaugugcgucugccgcgacaacuggcacggcuccaaccgccccugggucuccuucaaccagaaccucgacuaccagaucggcuacaucugcuccggcgucuucggcgacaacccccgccccaaggaccgcgagggcuccugcaaccccgucaccgucgacggcgccaacggcgucaagggcuucuccuacaaguacggcaacggcgucuggaucggccgcaccaaguccaaccgcauccgcaagggcuucgagaugaucugggaccccaacggcuggaccaacaccgacuccgacuucuccgucaagcaggacaucgucgccaucaccgacugguccggcuacuccggcuccuucguccagcaccccgagcucaccggccucgacugcauccgccccugcuucugggucgagcucguccgcggccucccccgcgagaacaccaccaucuggaccuccggcuccuccaucuccuucugcggcgucaacggcgacaucgccaacugguccuggcccgacggcgccgagcuccccuucaccaucgacaaguga

SEQ ID NO: 117563 - RNA, 1413 nt, Artificial Sequence; identical to SEQ ID NO: 113497
  derived and/or modified CDS sequence (opt2) from neuraminidase__InfluenzaA__AEX35013

SEQ ID NO: 117564 - RNA, 1413 nt, Artificial Sequence; identical to SEQ ID NO: 113497
  derived and/or modified CDS sequence (opt2) from neuraminidase__InfluenzaA__AEX35024

SEQ ID NO: 117565 - RNA, 1413 nt, Artificial Sequence; identical to SEQ ID NO: 113497
  derived and/or modified CDS sequence (opt2) from neuraminidase__InfluenzaA__AEX35035

SEQ ID NO: 117566 - RNA, 1413 nt, Artificial Sequence; identical to SEQ ID NO: 113497
  derived and/or modified CDS sequence (opt2) from neuraminidase__InfluenzaA__AEX35046

SEQ ID NO: 117567 - RNA, 1413 nt, Artificial Sequence; identical to SEQ ID NO: 113497
  derived and/or modified CDS sequence (opt2) from neuraminidase__InfluenzaA__AEX35057

SEQ ID NO: 117568 - RNA, 1413 nt, Artificial Sequence; identical to SEQ ID NO: 113497
  derived and/or modified CDS sequence (opt2) from neuraminidase__InfluenzaA__AEX35068

SEQ ID NO: 117569 - RNA, 1413 nt, Artificial Sequence
  derived and/or modified CDS sequence (opt2) from neuraminidase__InfluenzaA__AEX35079
augaaccccaaccagaagaucaucaccaucggcuccaucuccaucgccaucggcaucaucucccucaugcuccagaucggcaacaucaucuccaugugggccucccacuccauccagaccggcucccagaacaacaccggcaucugcaaccagcgcaucaucaccuacgagaacuccaccugggucaaccacaccuacgucaacaucaacaacaccaacgucgucgccggcgaggacaagaccuccgucacccucgccggcaacuccucccucugcuccaucuccggcugggccaucuacaccaaggacaacuccauccgcaucggcuccaagggcgacgucuucgucauccgcgagcccuucaucuccugcucccaccucgagugccgcaccuucuuccucacccagggcgcccuccucaacgacaagcacuccaacggcaccgucaaggaccgcucccccuaccgcgcccucauguccugcccccucggcgaggcccccucccccuacaacuccaaguucgaguccgucgccugguccgccuccgccugccacgacggcaugggcuggcucaccaucggcaucuccggccccgacaacggcgccgucgccguccucaaguacaacggcaucaucaccggcaccaucaaguccuggaagaagcagauccuccgcacccaggaguccgagugcgucugcaugaacggcuccugcuucaccaucaugaccgacggccccuccaacaaggccgccuccuacaagaucuucaagaucgagaagggcaaggucaccaaguccaucgagcucaacgcccccaacuucuacuacgaggagugcuccugcuaccccgacaccggcaucgucaugugcgucugccgcgacaacuggcacggcuccaaccgccccugggucuccuucaaccaggaccucgacuaccagaucggcuacaucugcuccggcgucuucggcgacaacccccgccccgaggacggcgagggcuccugcaaccccgucaccgucgacggcgccaacggcgucaagggcuucuccuacaaguacggcaacggcgucuggaucggccgcaccaaguccaaccgccuccgcaagggcuucgagaugaucugggaccccaacggcuggaccaacaccgacuccgacuucuccgucaagcaggacgucgucgccaucaccgacugguccggcuacuccggcuccuucguccagcaccccgagcucaccggccucgacugcauccgccccugcuucugggucgagcucguccgcggccucccccgcgagaacaccaccaucuggaccuccggcuccuccaucuccuucugcggcgucaacuccgacaccgccaacugguccuggcccgacggcgccgagcuccccuucaccaucgacaaguga

SEQ ID NO: 117570 - RNA, 1413 nt, Artificial Sequence; identical to SEQ ID NO: 117544
  derived and/or modified CDS sequence (opt2) from neuraminidase__InfluenzaA__AEX35090

SEQ ID NO: 117571 - RNA, 1413 nt, Artificial Sequence
  derived and/or modified CDS sequence (opt2) from neuraminidase__InfluenzaA__AEX35101
augaaccccaaccagaagaucaucaccaucggcuccaucuccaucgccaucggcaucaucucccucaugcuccagaucggcaacaucaucuccaucugggccucccacuccauccagaccggcucccagaacaacaccggcaucugcaaccagcgcaucaucaccuacgagaacuccaccugggucaaccacaccuacgucaacaucaacaacaccaacgucgucgccggcgaggacaagaccuccgucacccucgccggcaacuccucccucugcuccaucuccggcugggccaucuacaccaaggacaacuccauccgcaucggcuccaagggcgacgucuucgucauccgcgagcccuucaucuccugcucccaccucgagugccgcaccuucuuccucacccagggcgcccuccucaacgacaagcacuccaacggcaccgucaaggaccgcucccccuaccgcgcccucauguccugcccccucggcgaggcccccucccccuacaacuccaaguucgaguccgucgccugguccgccuccgccugccacgacggcaugggcuggcucaccaucggcaucuccggccccgacaacggcgccgucgccguccucaaguacaacggcaucaucaccggcaccaucaaguccuggaagaagcagauccuccgcacccaggaguccgagugcgucugcaugaacggcuccugcuucaccaucaugaccgacggccccuccaacaaggccgccuccuacaagaucuucaagaucgagaagggcaaggucaccaaguccaucgagcucaacgcccccaacuuccacuacgaggagugcuccugcuaccccgacaccggcaucgucaugugcgucugccgcgacaacuggcacggcuccaaccgccccugggucuccuucaaccagaaccucgacuaccagaucggcuacaucugcuccggcgucuucggcgacaacccccgccccgaggacggcgagggcuccugcaaccccgucaccgucgacggcgccaacggcgucaagggcuucuccuacaaguacgacaacggcgucuggaucggccgcaccaaguccaaccgccuccgcaagggcuucgagaugaucugggaccccaacggcuggaccaacaccgacuccgucuucuccgucaagcaggacgucgucgccaucaccgacugguccggcuacuccggcuccuucguccagcaccccgagcucaccggccucgacugcauccgccccugcuucugggucgagcucguccgcggccucccccgcgagaacaccaccaucuggaccuccggcuccuccaucuccuucugcggcgucaacuccgacaccgccaacugguccuggcccgacggcgccgagcuccccuucaccaucgacaaguga

SEQ ID NO: 117572 - RNA, 1413 nt, Artificial Sequence
  derived and/or modified CDS sequence (opt2) from neuraminidase__InfluenzaA__AEX35112
augaaccccaaccagaagaucaucaccaucggcuccaucuccaucgccaucggcaucaucucccucaugcuccagaucggcaacaucaucuccaucugggccucccacuccauccagaccggcucccagaacaacaccggcaucugcaaccagcgcaucaucaccuacgagaacuccaccugggucaaccacaccuacgucaacaucaacaacaccaacgucgucgccggcgaggacaagaccuccgucacccucgccggcaacuccucccucugcuccaucuccggcugggccaucuacaccaaggacaacuccauccgcaucggcuccaagggcgacgucuucgucauccgcgagcccuucaucuccugcucccaccucgagugccgcaccuucuuccucacccagggcgcccuccucaacgacaagcacuccaacggcaccgucaaggaccgcucccccuaccgcgcccucauguccugcccccucggcgaggcccccucccccuacaacuccaaguucgaguccgucgccugguccgccuccgccugccacgacggcaugggcuggcucaccaucggcaucuccggccccgacaacggcgccgucgccguccucaaguacaacggcaucaucaccggcaccaucaaguccuggaagaagcagauccuccgcacccaggaguccgagugcgucugcaugaacggcuccugcuucaccaucaugaccgacggccccuccaacaaggccgccuccuacaagaucuucaagaucgagaagggcaaggucaccaaguccaucgagcucaacgccuccaacuucuacuacgaggagugcuccugcuaccccgacaccggcaucgucaugugcgucugccgcgacaacuggcacggcuccaaccgccccugggucuccuucaaccagaaccucgacuaccagaucggcuacaucugcuccggcgucuucggcgacaacccccgccccgaggacggcgagggcuccugcaaccccgucaccgucgacggcgccaacggcgucaagggcuucuccuacaaguacggcaacggcgucuggaucggccgcaccaaguccaaccgccuccgcaagggcuucgagaugaucugggaccccaacggcuggaccaacaccgacuccgacuucuccgucaagcaggacgucgucgccaucaccgacugguccggcuacuccggcuccuucguccagcaccccgagcucaccggccucgacugcauccgccccugcuucugggucgagcucguccgcggccucccccgcgagaacaccaccaucuggaccuccggcuccuccaucuccuucugcggcgucaacuccgacaccgccaacugguccuggcccgacggcgccgagcuccccuucaccaucgacaaguga

SEQ ID NO: 117573 - RNA, 1413 nt, Artificial Sequence; identical to SEQ ID NO: 113497
  derived and/or modified CDS sequence (opt2) from neuraminidase__InfluenzaA__AEX35123

SEQ ID NO: 117574 - RNA, 1413 nt, Artificial Sequence
  derived and/or modified CDS sequence (opt2) from neuraminidase__InfluenzaA__AEX35145
augaaccccaaccagaagaucaucaccaucggcuccaucuccaucgccaucggcaucaucucccucaugcuccagaucggcaacaucaucuccaucugggccucccacuccauccagaccggcucccagaacaacaccggcaucugcaaccagcgcaucaucaccuacgagaacuccaccugggucaaccacaccuacgucaacaucaacaacaccaacgucgucgccggcgaggacaagaccuccgucacccucgccggcaacuccucccucugcuccaucuccggcugggccaucuacaccaaggacaacuccauccgcaucggcuccaagggcgacgucuucgucauccgcgagcccuucaucuccugcucccaccucgagugccgcaccuucuuccucacccagggcgcccuccucaacgacaagcacuccaacggcaccgucaaggaccgcucccccuaccgcgcccucauguccugcccccucggcgaggcccccucccccuacaacuccaaguucgaguccgucgccugguccgccuccgccugccacgacggcaugggcuggcucaccaucggcaucuccggccccgacaacggcgccgucgccguccucaaguacaacggcaucaucaccggcaccaucaaguccuggaagaagcagauccuccgcacccaggaguccgagugcgucugcaugaacggcuccugcuucaccaucaugaccgacggccccuccaacaaggccgccuccuacaagaucuucaagaucgagaagggcaaggucaccaaguccaucgagcucaacgcccccaacuucuacuacgaggagugcuccugcuaccccgacaccggcaucgucaugugcgucugccgcgacaacuggcacggcuccaaccgccccugggucuccuucaaccagaaccucgacuaccagaucggcuacaucugcuccggcgucuucggcgacaacccccgccccgaggacggcgagggcuccugcaaccccgucaccgucgacggcgccaacggcgucaagggcuucuccuacaaguacggcaacggcgucuggaucggccgcaccaaguccaaccgccuccgcaagggcuucgagaugaucugggaccccaacggcuggaccaacaccgacuccgacuucuccgucaagcaggacaucgucgccaucaccgacugguccggcuacuccggcuccuucguccagcaccccgagcucaccggccucgacugcauccgccccugcuucugggucgagcucguccgcggccucccccgcgagaacaccaccaucuggaccuccggcuccuccaucuccuucugcggcgucaacuccgacaccgccaacugguccuggcccgacggcgccgagcuccccuucaccaucgacaaguga

SEQ ID NO: 117575 - RNA, 1413 nt, Artificial Sequence; identical to SEQ ID NO: 117544
  derived and/or modified CDS sequence (opt2) from neuraminidase__InfluenzaA__AEX35156

SEQ ID NO: 117576 - RNA, 1413 nt, Artificial Sequence; identical to SEQ ID NO: 113497
  derived and/or modified CDS sequence (opt2) from neuraminidase__InfluenzaA__AEX35167

SEQ ID NO: 117577 - RNA, 1413 nt, Artificial Sequence
  derived and/or modified CDS sequence (opt2) from neuraminidase__InfluenzaA__AEX35178
augaaccccaaccagaagaucaucaccaucggcuccaucuccaucgccaucggcaucaucucccucaugcuccagaucggcaacaucaucuccaucugggccucccacuccauccagaccggcucccagaaccacaccggcaucugcaaccagcgcaucaucaccuacgagaacuccaccugggucaaccacaccuacgucaacaucaacaacaccaacgucgucgccggcaaggacaagaccuccgucacccucgccggcaacuccucccucugcuccaucuccggcugggccaucuacaccaaggacaacuccauccgcaucggcuccaagggcgacgucuucgucauccgcgagcccuucaucuccugcucccaccucgagugccgcaccuucuuccucacccagggcgcccuccucaacgacaagcacuccaacggcaccgucaaggaccgcucccccuaccgcgcccucauguccugcccccucggcgaggcccccucccccuacaacuccaaguucgaguccgucgccugguccgccuccgccugccacgacggcaugggcuggcucaccaucggcaucuccggccccgacaacggcgccgucgccguccucaaguacaacggcaucaucaccgagaccaucaaguccuggaaggagcgcauccuccgcacccaggaguccgagugcgucugcgucaacggcuccugcuucaccaucaugaccgacggccccuccaacggcgccgccuccuacaagaucuucaagaucgagaagggcaaggucaccaagucccgcgagcucaacgcccccaacuuccacuacgaggagugcuccugcuaccccgacaccggcaccgucaugugcgucugccgcgacaacuggcacggcuccaaccgccccugggucuccuucaaccagaaccucgacuaccagaucggcuacaucugcuccggcgucuucggcgacaacccccgccccaaggacggcaagggcuccugcaaccccgucaccgccgacggcgccgacggcgucaagggcuucuccuacaaguacggcaacggcgucuggaucggccgcaccaaguccaaccgccuccgcaagggcuucgagaugaucugggaccccaacggcuggaccgacaccgacuccgacuucuccgucaagcaggacgucgucgccaucaccgacugguccggcuacuccggcuccuucguccagcaccccgagcucaccggccucgacugcauccgccccugcuucugggucgagcucguccgcggccucccccgcgagaacaccaccaucuggaccuccggcuccuccaucuccuucugcggcgucgacuccgacaccgccaacugguccuggcccgacggcgccgagcuccccuucaccaucgacaaguga

SEQ ID NO: 117578 - RNA, 1413 nt, Artificial Sequence; identical to SEQ ID NO: 117518
  derived and/or modified CDS sequence (opt2) from neuraminidase__InfluenzaA__AEX35189

SEQ ID NO: 117579 - RNA, 1413 nt, Artificial Sequence; identical to SEQ ID NO: 117518
  derived and/or modified CDS sequence (opt2) from neuraminidase__InfluenzaA__AEX35200

SEQ ID NO: 117580 - RNA, 1413 nt, Artificial Sequence; identical to SEQ ID NO: 113497
  derived and/or modified CDS sequence (opt2) from neuraminidase__InfluenzaA__AEX35211

SEQ ID NO: 117581 - RNA, 1410 nt, Artificial Sequence
  derived and/or modified CDS sequence (opt2) from neuraminidase__InfluenzaA__AEX35222
augaaccccaaccagaagaucaucaccaucggcuccgucucccucaccaucuccaccaucugcuucuucaugcagaucgccauccucgucaccaccgucacccuccacuucaagcaguacgagugcaacuccccccccaacaaccaggucaugcucugcgagcccaccaucaucgagcgcaacaucaccgagaucgucuaccucaccaacaccaccaucgagaaggagaucugccccaagcucgccgaguaccgcaacugguccaagccccagugcaacaucaccggcuucgcccccuucuccaaggacaacuccauccgccucuccgccggcggcgacaucugggucacccgcgagcccuacgucuccugcgaccccgacaagugcuaccaguucgcccucggccagggcaccacccucaacaacggccacuccaacgacaccguccacgaccgcacccccuaccgcacccuccucaugaacgagcucggcguccccuuccaccucggcaccaagcaggucugcaucgccugguccuccuccuccugccacgacggcaaggccuggcuccacgucugcgucaccggcgacgacgagaacgccaccgccuccuucaucuacaacggccgccucgucgacuccaucggcuccugguccaagaagauccuccgcacccaggaguccgagugcgucugcaucaacggcaccugcaccgucgucaugaccgacggcuccgccuccggcaaggccgacaccaagauccucuucaucgaggagggcaagaucguccacaccuccacccucuccggcuccgcccagcacgucgaggagugcuccugcuacccccgcuaccccggcguccgcugcgucugccgcgacaacuggaagggcuccaaccgccccaucgucgacaucaacaucaaggacuacuccaucgucuccuccuacgucugcuccggccucgucggcgacaccccccgcaagaacgacuccuccuccuccucccacugccucgaccccaacaacgaggagggcggccacggcgucaagggcugggccuucgacgacggcaacgacgucuggaugggccgcaccaucuccgagaagcuccgcuccggcuacgagaccuucaaggucaucgagggcugguccaagcccaacuccaagcuccagaucaaccgccaggucaucgucgaccgcggcaaccgcuccggcuacuccggcaucuucuccgucgagggcaaguccugcaucaaccgcugcuucuacgucgagcucauccgcggccgcaagcaggagaccgagguccucuggaccuccaacuccaucgucgucuucugcggcaccuccggcaccuacggcaccggcuccuggcccgacggcgccgacaucaaccucaugcccaucuga

SEQ ID NO: 117582 - RNA, 1413 nt, Artificial Sequence; identical to SEQ ID NO: 117477
  derived and/or modified CDS sequence (opt2) from neuraminidase__InfluenzaA__AEX35233

SEQ ID NO: 117583 - RNA, 1410 nt, Artificial Sequence
  derived and/or modified CDS sequence (opt2) from neuraminidase__InfluenzaA__AEX35244
augaaccccaaccagaagaucaucaccaucggcuccgucucccucaccaucuccaccaucugcuucuucaugcagaucgccauccucaucaacaccgucacccuccacuucaagcaguacgaguucaacuccccccccaacaaccaggucaugcucugcgagcccaccaucaucgagcgcaacaucaccgagaucgucuaccucaccaacaccaccaucgagaaggagaucugccccaagcucgccgaguaccgcaacugguccaagccccagugcaacaucaccggcuucgcccccuucuccaaggacaacuccauccgccucuccgccggcggcgacaucugggucacccgcgagcccuacgucuccugcgaccccgacaagugcuaccaguucgcccucggccagggcaccacccucaacaacguccacuccaacgacaccguccacgaccgcacccccuaccgcacccuccucaugaacgagcucggcguccccuuccaccucggcaccaagcaggucugcaucgccugguccuccuccuccugccacgacggcaaggccuggcuccacgucugcgucaccggcgacgacaagaacgccaccgccuccuucaucuacaacggccgccucgucgacuccaucgucuccugguccaagaagauccuccgcacccaggaguccgagugcgucugcaucaacggcaccugcaccgucgucaugaccgacggcuccgccuccggcaaggccgacaccaagauccucuucaucgaggagggcaagaucguccacaccuccacccucuccggcuccgcccagcacgucgaggagugcuccugcuacccccgcuaccccggcguccgcugcgucugccgcgacaacuggaagggcuccaaccgccccaucgucgacaucaacaucaaggacuacuccaucgucuccuccuacgucugcuccggccucgucggcgacaccccccgcaagaacgacuccuccuccuccucccacugccucgaccccaacaacgaggagggcggcaacggcgucaagggcugggccuucgacgacggcaacgacgucuggaugggccgcaccaucuccgagaagcuccgcuccggcuacgagaccuucaaggucaucgagggcugguccaaccccaacuccaagcuccagaucaaccgccaggucaucgucgaccgcggcaaccgcuccggcuacuccggcaucuucuccgucgagggcaaguccugcaucaaccgcugcuucuacgucgagcucauccgcggccgcaagcaggagaacgagguccucuggaccuccaacuccaucgucgucuucugcggcaccuccggcaccuacggcaccggcuccuggcccgacggcgccgacaucaaccucaugcccgucuga

SEQ ID NO: 117584 - RNA, 1410 nt, Artificial Sequence; identical to SEQ ID NO: 111965
  derived and/or modified CDS sequence (opt2) from neuraminidase__InfluenzaA__AEX35255

SEQ ID NO: 117585 - RNA, 1413 nt, Artificial Sequence; identical to SEQ ID NO: 117477
  derived and/or modified CDS sequence (opt2) from neuraminidase__InfluenzaA__AEX35266

SEQ ID NO: 117586 - RNA, 1413 nt, Artificial Sequence; identical to SEQ ID NO: 117477
  derived and/or modified CDS sequence (opt2) from neuraminidase__InfluenzaA__AEX35277

SEQ ID NO: 117587 - RNA, 1410 nt, Artificial Sequence
  derived and/or modified CDS sequence (opt2) from neuraminidase__InfluenzaA__AEX35288
augaaccccaaccagaagaucaucaccaucggcuccgucucccucaccaucuccaccaucugcuucuucaugcagaucgccauccucaucaccaccgucacccuccacuucaagcaguacgaguucaacuccccccccaacaaccaggucaugcucugcgagcccaccaucaucgagcgcaacaucaccgagaucgucuaccucaccaacaccaccaucgagaaggagaucugccccaagcucgccgaguaccgcaacugguccaagccccagugcgacaucaccggcuucgcccccuucuccaaggacaacuccauccgccucuccgccggcggcgacaucugggucacccgcgagcccuacgucuccugcgaccccgacaagugcuaccaguucgcccucggccagggcaccacccucaacaacguccacuccaacgacaccguccacaaccgcacccccuaccgcacccuccucaugaacgagcucggcguccccuuccaccucggcaccaagcaggucugcaucgccugguccuccuccuccugccacgacggcaaggccuggcuccacgucugcgucaccggcgacgacaagaacgccaccgccuccuucaucuacaacggccgccucgucgacuccaucgucuccugguccaagaagauccuccgcacccaggaguccgagugcgucugcaucaacggcaccugcaccgucgucaugaccgacggcuccgccuccggcaaggccgacaccaagauccucuucaucgaggagggcaagaucguccacaccuccacccucuccggcuccgcccagcacgucgaggagugcuccugcuacccccgcuaccccggcguccgcugcgucugccgcgacaacuggaagggcuccaaccgccccaucgucgacaucaacaucaaggacuacuccaucgucuccuccuacgucugcuccggccucgucggcgacaccccccgcaagaacgacuccuccuccuccucccacugccucgaccccaacaacgaggagggcggccacggcgucaagggcugggccuucgacgacggcaacgacgucuggaugggccgcaccaucuccgagaagcuccgcuccggcuacgagaccuucaaggucaucgagggcugguccaaccccaacuccaagcuccagaucaaccgccaggucaucgucgaccgcggcaaccgcuccggcuacuccggcaucuucuccgucgagggcaaguccugcaucaaccgcugcuucuacgucgagcucauccgcggccgcaaggaggagaccgagguccucuggaccuccaacuccaucgucgucuucugcggcaccuccggcaccuacggcaccggcuccuggcccgacggcgccgacaucaaccucaugcccaucuga

SEQ ID NO: 117588 - RNA, 1410 nt, Artificial Sequence; identical to SEQ ID NO: 110750
  derived and/or modified CDS sequence (opt2) from neuraminidase__InfluenzaA__AEX35299

SEQ ID NO: 117589 - RNA, 1410 nt, Artificial Sequence
  derived and/or modified CDS sequence (opt2) from neuraminidase__InfluenzaA__AEX35310
augaaccccaaccagaagaucaucaccaucggcuccgucucccucaccaucuccaccaucugcuucuucaugcagaucgccauccucaucaccaccgucacccuccacuucaagcaguacgaguucaacuccccccccaacaaccaggucaugcucugcgagcccaccaucaucgagcgcaacaucaccgagaucgucuaccucaccaacaccaccaucgagaaggagaucugccccaagcucgccgaguaccgcaacugguccaagccccagugcaacaucaccggcuucgcccccuucuccaaggacaacuccauccgccucuccgccggcggcgacaucugggucacccgcgagcccuacgucuccugcgaccccgacaagugcuaccaguucgcccucggccagggcaccacccucaacaacguccacuccaacgacaccguccacgaccgcacccccuaccgcacccuccucaugaacgagcucggcguccccuuccaccucggcaccaagcaggucugcaucgccugguccuccuccuccugccacgacggcaaggccuggcuccacgucugcgucaccggcgacgacgagaacgccaccgccuccuucaucuacaacggccgccucgucgacuccaucgucuccugguccaagaagauccuccgcacccaggaguccgagugcgucugcaucaacggcaccugcaccgucgucaugaccgacggcuccgccuccggcaaggccgacaccaagauccucuucaucgaggagggcaagaucguccacaccuccacccucuccggcuccgcccagcacgucgaggagugcuccugcuacccccgcuaccccggcguccgcugcgucugccgcgacaacuggaagggcuccaaccgccccaucgucgacaucaacaucaaggacuacuccaucgucuccuccuacgucugcuccggccucgucggcgacaccccccgcaagaacgacuccuccuccuccucccacugccucgaccccaacaacgaggagggcggccacggcgucaagggcugggccuucgacgacggcgacgacgucuggaugggccgcaccaucuccgagaagcuccgcuccggcuacgagaccuucaaggucaucgagggcugguccaaccccaacuccaagcuccagaucaaccgccaggucaucgucgaccgcggcaaccgcuccggcuacuccggcaucuucuccgucgagggcaaguccugcaucaaccgcugcuucuacgucgagcucauccgcggccgcaaccaggagaccgagguccucuggaccuccaacuccaucgucgucuucugcggcaccuccggcaccuacggcaccggcuccuggcccgacggcgccgacaucaaccucaugcccaucuga

SEQ ID NO: 117590 - RNA, 1410 nt, Artificial Sequence; identical to SEQ ID NO: 110750
  derived and/or modified CDS sequence (opt2) from neuraminidase__InfluenzaA__AEX35321

SEQ ID NO: 117591 - RNA, 1410 nt, Artificial Sequence; identical to SEQ ID NO: 111965
  derived and/or modified CDS sequence (opt2) from neuraminidase__InfluenzaA__AEX35332

SEQ ID NO: 117592 - RNA, 1410 nt, Artificial Sequence; identical to SEQ ID NO: 111965
  derived and/or modified CDS sequence (opt2) from neuraminidase__InfluenzaA__AEX35343

SEQ ID NO: 117593 - RNA, 1410 nt, Artificial Sequence
  derived and/or modified CDS sequence (opt2) from neuraminidase__InfluenzaA__AEX35354
augaaccccaaccagaagaucaucaccaucggcuccgucucccucaccaucuccaccaucugcuucuucaugcagaucgccauccucaucaccaccgucacccuccacuucaagcaguacgaguucaacuccccccccaacaaccaggucaugcucugcgagcccaccaucaucgagcgcaacaucaccgagaucgucuaccucaccaacaccaccaucgagaaggagaucugccccaagcucgccgaguaccgcaacugguccaagccccagugcgacaucaccggcuucgcccccuucuccaaggacaacuccauccgccucuccgccggcggcgacaucugggucacccgcgagcccuacgucuccugcgaccccgacaagugcuaccaguucgcccucggccagggcaccacccucaacaacguccacuccaacgacaccguccacgaccgcacccccuaccgcacccuccucaugaacgagcucggcguccccuuccaccucggcaccaagcaggucugcaucgccugguccuccuccuccugccacgacggcaaggccuggcuccacgucugcgucaccggcgacgacaagaacgccaccgccuccuucaucuacaacggccgccucgucgacuccaucgucuccugguccaagaagauccuccgcacccaggaguccgagugcgucugcaucaacggcaccugcaccgucgucaugaccgacggcuccaccuccggcaaggccgacaccaagauccucuucaucgaggagggcaagaucguccacaccuccacccucuccggcuccgcccagcacgucgaggagugcuccugcuacccccgcuaccccggcguccgcugcgucugccgcgacaacuggaagggcuccaaccgccccaucgucgacaucaacaucaaggacuacuccaucgucuccuccuacgucugcuccggccucgucggcgacaccccccgcaagaacgacuccuccuccuccucccacugccucgaccccaacaacgaggagggcggccacggcgucaagggcugggccuucgacgacggcaacgacgucuggaugggccgcaccaucuccgagaagcuccgcuccggcuacgagaccuucaaggucaucgagggcugguccaaccccaacuccaagcuccagaucaaccgccaggucaucgucgaccgcggcaaccgcuccggcuacuccggcaucuucuccgucgagggcaaguccugcaucaaccgcugcuucuacgucgagcucauccgcggccgcaaggaggagaccgagguccucuggaccuccaacuccaucgucgucuucugcggcaccuccggcaccuacggcaccggcuccuggcccgacggcgccgacaucaaccucaugcccaucuga

SEQ ID NO: 117594 - RNA, 1410 nt, Artificial Sequence; identical to SEQ ID NO: 110750
  derived and/or modified CDS sequence (opt2) from neuraminidase__InfluenzaA__AEX35365

SEQ ID NO: 117595 - RNA, 1410 nt, Artificial Sequence
  derived and/or modified CDS sequence (opt2) from neuraminidase__InfluenzaA__AEX35376
augaaccccaaccagaagaucaucaccaucggcuccgucucccucaccaucuccaccaucugcuucuucaugcagaucgccauccucaucaccaccgucacccuccacuucaagcaguacgaguucaacuccccccccaacaaccaggucaugcucugcgagcccaccaucaucgagcgcaacaucaccgagaucgucuaccucaccaacaccaccaucgagaaggagaucugccccaagcucgccgaguaccgcaacugguccaagccccagugcgacaucaccggcuucgcccccuucuccaaggacaacuccauccgccucuccgccggcggcgacaucugggucacccgcgagcccuacgucuccugcgaccccgacaagugcuaccaguucgcccucggccagggcaccacccucaacaacguccacuccaacgacaccguccacgagcgcacccccuaccgcacccuccucaugaacgagcucggcguccccuuccaccucggcaccaagcaggucugcaucgccugguccuccuccuccugccacgacggcaaggccuggcuccacgucugcgucaccggcgacgacaagaacgccaccgccuccuucaucuacaacggccgccucgucgacuccaucgucuccugguccaagaagauccuccgcacccaggaguccgagugcgucugcaucaacggcaccugcaccgucgucaugaccgacggcuccgccuccggcaaggccgacaccaagauccucuucaucgaggagggcaagaucguccacaccuccacccucuccggcuccgcccagcacgucgaggagugcuccugcuacccccgcuaccccggcguccgcugcgucugccgcgacaacuggaagggcuccaaccgccccaucgucgacaucaacaucaaggacuacuccaucgucuccuccuacgucugcuccggccucgucggcgacaccccccgcaagaacgacuccuccuccuccucccacugccucgaccccaacaacgaggagggcggccacggcgucaagggcugggccuucgacgacggcaacgacgucuggaugggccgcaccaucuccgagaagcuccgcuccggcuacgagaccuucaaggucaucgagggcugguccaaccccaacuccaagcuccagaucaaccgccaggucaucgucgaccgcggcaaccgcuccggcuacuccggcaucuucuccgucgagggcaaguccugcaucaaccgcugcuucuacgucgagcucauccgcggccgcaaggaggagaccgagguccucuggaccuccaacuccaucgucgucuucugcggcaccuccggcaccuacggcaccggcuccuggcccgacggcgccgacaucaaccucaugcccaucuga

SEQ ID NO: 117596 - RNA, 1410 nt, Artificial Sequence; identical to SEQ ID NO: 110750
  derived and/or modified CDS sequence (opt2) from neuraminidase__InfluenzaA__AEX35387

SEQ ID NO: 117597 - RNA, 1410 nt, Artificial Sequence
  derived and/or modified CDS sequence (opt2) from neuraminidase__InfluenzaA__AEX35398
augaaccccaaccagaagaucaucaccaucggcuccgucucccucaccaucuccaccaucugcuucuucaugcagaucgccauccucaucaccaccgucacccuccacuucaagcaguacgaguucaacuccccccccaacaaccaggucaugcucugcgagcccaccaucaucgagcgcaacaucaccgagaucgucuaccucaccaacaccaccaucgagaaggagaucugccccaagcucgccgaguaccgcaacugguccaagccccagugcgacaucaccggcuucgcccccuucuccaaggacaacuccauccgccucuccgccggcggcgacaucugggucacccgcgagcccuacgucuccugcgaccccgacaagugcuaccaguucgcccucggccagggcaccacccucaacaacguccacuccaacgacaccguccacgaccgcacccccuaccgcacccuccucaugaacgagcucggcguccccuuccaccucggcaccaagcaggucugcaucgccugguccuccuccuccugccacgacggcaaggccuggcuccacgucugcgucaccggcgacgacaagaacgccaccgccuccuucaucuacaacggccgccucgucgacuccaucgucuccugguccaagaagauccuccgcacccaggaguccgagugcgucugcaucaacggcaccugcgccgucgucaugaccgacggcuccgccuccggcaaggccgacaccaagauccucuucaucgaggagggcaagaucguccacaccuccacccucuccggcuccgcccagcacgucgaggagugcuccugcuacccccgcuaccccggcguccgcugcgucugccgcgacaacuggaagggcuccaaccgccccaucgucgacaucaacaucaaggacuacuccaucgucuccuccuacgucugcuccggccucgucggcgacaccccccgcaagaacgacuccuccuccuccucccacugccucgaccccaacaacgaggagggcggccacggcgucaagggcugggccuucgacgacggcaacgacgucuggaugggccgcaccaucuccgagaagcuccgcuccggcuacgagaccuucaaggucaucgagggcugguccaaccccaacuccaagcuccagaucaaccgccaggucaucgucgaccgcggcaaccgcuccggcuacuccggcaucuucuccgucgagggcaaguccugcaucaaccgcugcuucuacgucgagcucauccgcggccgcaaggaggagaccgagguccucuggaccuccaacuccaucgucgucuucugcggcaccuccggcaccuacggcaccggcuccuggcccgacggcgccgacaucaaccucaugcccaucuga

SEQ ID NO: 117598 - RNA, 1410 nt, Artificial Sequence; identical to SEQ ID NO: 110750
  derived and/or modified CDS sequence (opt2) from neuraminidase__InfluenzaA__AEX35409

SEQ ID NO: 117599 - RNA, 1410 nt, Artificial Sequence; identical to SEQ ID NO: 117587
  derived and/or modified CDS sequence (opt2) from neuraminidase__InfluenzaA__AEX35420

SEQ ID NO: 117600 - RNA, 1410 nt, Artificial Sequence
  derived and/or modified CDS sequence (opt2) from neuraminidase__InfluenzaA__AEX35431
augaaccccaaccagaagaucaucaccaucggcuccgucucccucaccaucuccaccaucugcuucuucaugcagaucgccauccucaucaccaccgucacccuccacuucaagcaguacgaguucaacuccccccccaacaaccaggucaugcucugcgagcccaccaucaucgagcgcaacaucaccgagaucgucuaccucaccaacaccaccaucgagaaggagaucugccccaagcucgccgaguaccgcaacugguccaagccccagugcaacaucaccggcuucgcccccuucuccaaggacaacuccauccgccucuccgccggcggcgacaucugggucacccgcgagcccuacgucuccugcgaccccgacaagugcuaccaguucgcccucggccagggcaccacccucaacaacguccacuccaacgacaccguccacgaccgcacccccuaccgcacccuccucaugaacgagcucggcguccccuuccaccucggcaccaagcaggucugcaucgccugguccuccuccuccugccacgacggcaaggccuggcuccacgucugcgucaccggcgacgacgagaacgccaccgccuccuucaucuacaacggccgccucgucgacuccaucgucuccugguccaagaagauccuccgcacccaggaguccgagugcgucugcaucaacggcaccugcaccgucgucaugaccgacggcuccgccuccggcaaggccgacaccaagauccucuucaucgaggagggcaagaucguccacaccuccacccucuccggcuccgcccagcacgucgaggagugcuccugcuacccccgcuaccccggcguccgcugcgucugccgcgacaacuggaagggcuccaaccgccccaucgucgacaucaacaucaaggacuacuccaucgucuccuccuacgucugcuccggccucgucggcgacaccccccgcaagaacgacuccuccuccuccucccacugccucgaccccaacaacgaggagggcggccacggcgucaagggcugggccuucgacgacggcaacgacgucuggaugggccgcaccaucuccgagaagcuccgcuccggcuacgagaccuucaaggucaucgagggcugguccaaccccaacuccaagcuccagaucaaccgccaggucaucgucgaccgcggcaaccgcuccggcuacuccggcaucuucuccgucgagggcaaguccugcaucaaccgcugcuucuacgucgagcucauccgcggccgcaagaaggagaccgagguccucuggaccuccaacuccaucgucgucuucugcggcaccuccggcaccuacggcaccggcuccuggcccgacggcgccgacaucaaccucaugcccaucuga

SEQ ID NO: 117601 - RNA, 1410 nt, Artificial Sequence; identical to SEQ ID NO: 110748
  derived and/or modified CDS sequence (opt2) from neuraminidase__InfluenzaA__AEX35453

SEQ ID NO: 117602 - RNA, 1410 nt, Artificial Sequence; identical to SEQ ID NO: 110748
  derived and/or modified CDS sequence (opt2) from neuraminidase__InfluenzaA__AEX35464

SEQ ID NO: 117603 - RNA, 1410 nt, Artificial Sequence; identical to SEQ ID NO: 110748
  derived and/or modified CDS sequence (opt2) from neuraminidase__InfluenzaA__AEX35475

SEQ ID NO: 117604 - RNA, 1410 nt, Artificial Sequence; identical to SEQ ID NO: 110748
  derived and/or modified CDS sequence (opt2) from neuraminidase__InfluenzaA__AEX35486

SEQ ID NO: 117605 - RNA, 1410 nt, Artificial Sequence
  derived and/or modified CDS sequence (opt2) from neuraminidase__InfluenzaA__AEX35497
augaaccccaaccagaagaucaucaccaucggcuccgucucccucaccaucuccaccaucugcuucuucaugcagaucgccauccucaucaccaccgucacccuccacuucaagcaguacgaguucaacuccccccccaacaaccaggucaugcucugcgagcccaccaucaucgagcgcaacaucaccgagaucgucuaccucaccaacaccaccaucgagaaggagaagugccccaagcucgccgaguaccgcaacugguccaagccccagugcaacaucaccggcuucgcccccuucuccaaggacaacuccauccgccucuccgccggcggcgacaucugggucacccgcgagcccuacgucuccugcgaccccgacaagugcuaccaguucgcccucggccagggcaccacccucaacaacguccacuccaacgacaccguccacgaccgcacccccuaccgcacccuccucaugaacgagcucggcguccccuuccaccucggcaccaagcaggucugcaucgccugguccuccuccuccugccacgacggcaaggccuggcuccacgucugcgucaccggcgacgacaagaacgccaccgccuccuucaucuacaacggccgccucgucgacuccaucgucuccugguccaaggagauccuccgcacccaggaguccgagugcgucugcaucaacggcaccugcaccgucgucaugaccgacggcuccgccuccggcaaggccgacaccaagauccucuucaucgaggagggcaagaucguccacaccuccacccucuccggcuccgcccagcacgucgaggagugcuccugcuacccccgcuaccccggcguccgcugcgucugccgcgacaacuggaagggcuccaaccgccccaucgucgacaucaacaucaaggacuacuccaucgucuccuccuacgucugcuccggccucgucggcgacaccccccgcaagaacgacuccuccuccuccucccacugccucgaccccaacaacgaggagggcggccacggcgucaagggcugggccuucgacgacggcaacgacgucuggaugggccgcaccaucuccgagaagcuccgcuccggcuacgagaccuucaaggucaucgagggcugguccaaccccaacuccaagcuccagaucaaccgccaggucaucgucgaccgcggcaaccgcuccggcuacuccggcaucuucuccgucgagggcaaguccugcaucaaccgcugcuucuacgucgagcucauccgcggccgcaaggaggagaccgagguccucuggaccuccaacuccaucgucgucuucugcggcaccuccggcaccuacggcaccggcuccuggcccgacggcgccgacaucaaccucaugcccaucuga

SEQ ID NO: 117606 - RNA, 1410 nt, Artificial Sequence; identical to SEQ ID NO: 110748
  derived and/or modified CDS sequence (opt2) from neuraminidase__InfluenzaA__AEX35508

SEQ ID NO: 117607 - RNA, 1410 nt, Artificial Sequence; identical to SEQ ID NO: 117605
  derived and/or modified CDS sequence (opt2) from neuraminidase__InfluenzaA__AEX35519

SEQ ID NO: 117608 - RNA, 1410 nt, Artificial Sequence
  derived and/or modified CDS sequence (opt2) from neuraminidase__InfluenzaA__AEX35530
augaaccccaaccagaagaucaucaccaucggcuccgucucccucaccaucuccaccaucugcuucuucaugcagaucgccauccucaucaccaccgucacccuccacuucaagcaguacgaguucaacuccccccccaacaaccaggucaugcagugcgagcccaccaucaucgagcgcaacaucaccgagaucgucuaccucaccaacaccaccaucgagaaggagaucugccccaagcucgccgaguaccgcaacugguccaagccccagugcgacaucaccggcuucgcccccuucuccaaggacaacuccauccgccucuccgccggcggcgacaucugggucacccgcgagcccuacgucuccugcgaccccgacaagugcuaccaguucgcccucggccagggcaccacccucaacaacguccacuccaacgacaccguccacgaccgcacccccuaccgcacccuccucaugaacgagcucggcguccccuuccaccucggcaccaagcaggucugcaucgccugguccuccuccuccugccacgacggcaaggccuggcuccacgucugcgucaccggcgacgacaagaacgccaccgccuccuucaucuacaacggccgccucgucgacuccaucgucuccugguccaaggagauccuccgcacccaggaguccgagugcgucugcaucaacggcaccugcaccgucgucaugaccgacggcuccgccuccggcaaggccgacaccaagauccucuucaucgaggagggcaagaucguccacaccuccacccucuccggcuccgcccagcacgucgaggagugcuccugcuacccccgcuaccccggcguccgcugcgucugccgcgacaacuggaagggcuccaaccgccccaucgucgacaucaacaccaaggacuacuccaucgucuccuccuacgucugcuccggccucgucggcgacaccccccgcaagaacgacuccuccuccuccucccacugccucaaccccaacaacgaggagggcggccacggcgucaagggcugggccuucgacgacggcaacgacgucuggaugggccgcaccaucuccgagaagcuccgccucggcuacgagaccuucaaggucaucgagggcugguccaaccccaacuccaagcuccagaucaaccgccaggucaucgucgaccgcggcaaccgcuccggcuacuccggcaucuucuccgucgagggcaaguccugcaucaaccgcugcuucuacgucgagcucauccgcggccgcaaggaggagaccgagguccucuggaccuccaacuccaucgucgucuucugcggcaccuccggcaccuacggcaccggcuccuggcccgacggcgccgacaucaaccucaugcccaucuga

SEQ ID NO: 117609 - RNA, 1410 nt, Artificial Sequence; identical to SEQ ID NO: 110748
  derived and/or modified CDS sequence (opt2) from neuraminidase__InfluenzaA__AEX35541

SEQ ID NO: 117610 - RNA, 1410 nt, Artificial Sequence
  derived and/or modified CDS sequence (opt2) from neuraminidase__InfluenzaA__AEX35552
augaaccccaaccagaagaucaucaccaucggcuccgccucccucaccaucuccaccaucugcuucuucaugcagaucgccauccucaucaccaccgucacccuccacuucaagcaguacgaguucaaccccccccccaacaaccaggccaugcucugcgagcccaccaucaucgagcgcaacaucaccgagaucgucuaccucaccaacaccaccaucgagaaggagaucugccccaagcucgccgaguaccgcaacugguccaagccccagugcgacaucaccggcuucgcccccuucuccaaggacaacuccauccgccucuccgccggcggcgacaucugggucacccgcgagcccuacgucuccugcgaccccgacaagugcuaccaguucgcccucggccagggcaccacccucaacaacguccacuccaacgacaccguccacgaccgcacccccuaccgcacccuccucaugaacgagcucggcguccccuuccaccucggcaccaagcaggucugcaucgccugguccuccuccuccugccacgacggcaaggccuggcuccacgucugcgucaccggcgacgacaagaacgccaccgccuccuucaucuacaacggccgccucgucgacuccaucgucuccugguccaaggagauccuccgcacccaggaguccgagugcgucugcaucaacggcaccugcaccgucgucaugaccgacggcuccgccuccggcaaggccgacaccaagauccucuucaucgaggagggcaagaucguccacaccuccacccucuccggcuccgcccagcacgucgaggagugcuccugcuacccccgcuaccccggcguccgcugcgucugccgcgacaacuggaagggcuccaaccgccccaucgucgacaucaacaucaaggacuacuccaucgccuccuccuacgucugcuccggccucgucggcgacaccccccgcaagaacgacuccuccuccuccucccacugccucgaccccaacaacgaggagggcggccacggcgucaagggcugggccuucgacgacggcaacgacgucuggaugggccgcaccaucuccgagaagcuccgcuccggcuacgagaccuucaaggucaucgagggcugguccaaccccaacuccaagcuccagaucaaccgccaggucaucgucgaccgcggcaaccgcuccggcuacuccggcaucuucuccgucgagggcaaguccugcaucaaccgcugcuucuacgucgagcucauccgcggccgcaaggaggagaccgagguccucuggaccuccaacuccaucgucgucuucugcggcaccuccggcaccuacggcaccggcuccuggcccgacggcgccgacaucaaccucaugcccaucuga

SEQ ID NO: 117611 - RNA, 1410 nt, Artificial Sequence
  derived and/or modified CDS sequence (opt2) from neuraminidase__InfluenzaA__AEX35563
augaaccccaaccagaagaucaucaccaucggcuccgucucccucaccaucuccaccaucugcuucuucaugcagaucgccauccucaucaccaccgucacccuccacuucaagcaguacgaguucaacuccccccccaacaaccaggucaugcucugcgagcccaccaucaucgagcgcaacaucaccgagaucgucuaccucaccaacaccaccaucgagaaggagaucugccccaagcucgccgaguaccgcaacugguccaagccccagugcgacaucaccggcuucgcccccuucuccaaggacaacuccauccgccucuccgccggcggcgacaucugggucacccgcgagcccuacgucuccugcgaccccgacaagugcuaccaguucgcccucggccagggcaccacccucaacaacguccacuccaacgacaccguccacgaccgcacccccuaccgcacccuccucaugaacgagcucggcguccccuuccaccucggcaccaagcaggucugcaucgccugguccuccuccuccugccacgacggcaaggccuggcuccacgucugcgucaccggcgacgacaagaacgccaccgccuccuucaucuacaacggccgccucgucgacuccaucgucuccugguccaaggagauccuccgcacccaggaguccgagugcgucugcaucaacggcaccugcaccgucgucaugaccgacggcuccgccuccggcaaggccgacaccaagauccucuucaucgaggagggcaagaucguccacaccuccacccucuccggcuccgcccagcacgucgaggagugcuccugcuacccccgcuaccccggcguccgcugcgucugccgcgacaacuggaagggcuccaaccgccccaucgucgacaucaacaucaaggacuacuccaucgucuccuccuacgucugcuccggccucgucggcgacaccccccgcaagaacgacuccuccuccuccucccacugccucaaccccaacaacgaggagggcggccacggcgucaagggcugggccuucgacgacggcaacgacgucuggaugggccgcaccaucuccgagaagcuccgccucggcuacgagaccuucaaggucaucgagggcugguccaaccccaacuccaagcuccagaucaaccgccaggucaucgucgaccgcggcaaccgcuccggcuacuccggcaucuucuccgucgagggcaaguccugcaucaaccgcugcuucuacgucgagcucauccgcggccgcaaggaggagaccgagguccucuggaccuccaacuccaucgucgucuucugcggcaccuccggcaccuacggcaccggcuccuggcccgacggcgccgacaucaaccucaugcccaucuga

SEQ ID NO: 117612 - RNA, 1410 nt, Artificial Sequence; identical to SEQ ID NO: 117492
  derived and/or modified CDS sequence (opt2) from neuraminidase__InfluenzaA__AEX35585

SEQ ID NO: 117613 - RNA, 1410 nt, Artificial Sequence
  derived and/or modified CDS sequence (opt2) from neuraminidase__InfluenzaA__AEX35596
augaaccccaaccagaagaucaucaccaucggcuccgucucccucaccaucuccaccaucugcuucuucaugcagaucgccauccucaucaccaccgucacccuccacuucaagcaguacgaguucaacuccccccccaacaaccaggucaugcucugcgagcccaccaucaucgagcgcaacaucaccgagaucgucuaccucaccaacaccaccaucgagaaggagaucugccccaagcucgccgaguaccgcaacugguccaagccccagugcaacaucaccggcuucgcccccuucuccaaggacaacuccauccgccucuccgccggcggcgacaucugggucacccgcgagcccuacgucuccugcgaccccgacaagugcuaccaguucgcccucggccagggcaccacccucaacaacguccacuccaacgacaccguccacgaccgcacccccuaccgcacccuccucaugaacgagcucggcguccccuuccaccucggcaccaagcaggucugcaucgccugguccuccuccuccugccacgacggcaaggccuggcuccacgucugcgucaccggcgacgacaagaacgccaccgccuccuucaucuacaacggccgccucgucgacuccaucgucuccugguccaaggagauccuccgcacccaggaguccgagugcgucugcaucaacggcaccugcaccgucgucaugaccgacggcuccgccuccggcaaggccgacaccaagauccucuucaucgaggagggcaagaucguccacaccuccacccucuccggcuccgcccagcacgucgaggagugcuccugcuacccccgcuaccccggcguccgcugcgucugccgcgacaacuggaagggcuccaaccgccccaucgucgacaucaacaucaaggacuacuccaucgucuccuccuacgucugcuccggccucgucggcgacaccccccgcaagaacgacuccuccuccuccucccacugccucgaccccaacaacgaggagggcggccacggcgucaagggcugggccuucgacgacggcaacgacgucuggaugggccgcaccaucuccgagaagcuccgcuccggcuacgagaccuucaaggucaucgagggcugguccaaccccgacuccaagcuccagaucaaccgccaggucaucgucgaccgcggcaaccgcuccggcuacuccggcaucuucuccgucgagggcaaguccugcaucaaccgcugcuucuacgucgagcucauccgcggccgcaaggaggagaccgagguccucuggaccuccaacuccaucgucgucuucugcggcaccuccggcaccuacggcaccggcuccuggcccgacggcgccgacaucaaccucaugcccaucuga

SEQ ID NO: 117614 - RNA, 1410 nt, Artificial Sequence; identical to SEQ ID NO: 110748
  derived and/or modified CDS sequence (opt2) from neuraminidase__InfluenzaA__AEX35607

SEQ ID NO: 117615 - RNA, 1410 nt, Artificial Sequence
  derived and/or modified CDS sequence (opt2) from neuraminidase__InfluenzaA__AEX35618
augaaccccaaccagaagaucaucaccaucggcuccgucucccucaccaucuccaccaucugcuucuucaugcagaucgccauccucaucaccaccgucacccuccacuucaagcaguacgagcucaacuccccccccaacaaccaggucaugcucugcgagcccaccaucaucgagcgcaacaucaccgagaucgucuaccucaccaacaccaccaucgagaaggagaccugccccaagcucgccgaguaccgcaacugguccaagccccagugcuacaucaccggcuucgcccccuucuccaaggacaacuccauccgccucuccgccggcggcgacaucugggucacccgcgagcccuacgucuccugcgaccccgacaagugcuaccaguucgcccucggccagggcaccacccucaacaacguccacuccaacgacaccguccgcgaccgcacccccuaccgcacccuccucaugaacgagcucggcguccccuuccaccucggcaccaagcaggucugcaucgccugguccuccuccuccugccacgacggcaaggccuggcuccacgucugcaucaccggcgacgacaagaacgccaccgccuccuucaucuacaacggccgccucgucgacuccaucgucuccugguccaaggagauccuccgcacccaggaguccgagugcgucugcaucaacggcaccugcaccgucgucaugaccgacggcuccgccuccggcaaggccgacaccaagauccucuucaucgaggagggcaagaucguccacaccuccacccucuccggcuccgcccagcacgucgaggagugcuccugcuacccccgcuaccccggcguccgcugcgucugccgcgacaacuggaagggcuccaaccgccccaucgucgacaucaacaucaaggaccacuccaucgucuccuccuacgucugcuccggccucgucggcgacaccccccgcaagaacgacuccuccuccuccucccacugccucgaccccaacaacgaggagggcggccacggcgucaagggcugggccuucgacgacggcaacgacgucuggaugggccgcaccaucuccgagaagucccgccucggcuacgagaccuucaaggucaucgagggcugguccaaccccaaguccaagcuccagaucaaccgccaggucaucgucgaccgcgacaaccgcuccggcuacuccggcaucuucuccgucgagggcaaguccugcaucaaccgcugcuucuacgucgagcucauccgcggccgcaaggaggagaccgagguccucuggaccuccaacuccaucgucgucuucugcggcaccuccggcaccuacggcaccggcuccuggcccgacggcgccgacaucaaccucaugcccaucuga

SEQ ID NO: 117616 - RNA, 1410 nt, Artificial Sequence
  derived and/or modified CDS sequence (opt2) from neuraminidase__InfluenzaA__AEX35640
augaaccccaaccagaagaucaucaccaucggcuccgucucccucaccaucuccaccaucugcuucuucaugcagaucgccauccucaucaccaccgucacccuccacuucaagcaguacgaguucaacuccccccccaacaaccaggucaugcucugcgagcccaccaucaucgagcgcaacaucaccgagaucgucuaccucaccaacaccaccaucgagaaggagaucugccccaagcucgccgaguaccgcaagugguccaagccccagugcaacaucaccggcuucgcccccuucuccaaggacaacuccauccgccucuccgccggcggcgacaucugggucacccgcgagcccuacgucuccugcgaccccgacaagugcuaccaguucgcccucggccagggcaccacccucaacaacguccacuccaacgacaccguccgcgaccgcacccccuaccgcacccuccucaugaacgagcucggcguccccuuccaccucggcaccaagcaggucugcaucgccugguccuccuccuccugccacgacggcaaggccuggcuccacgucugcgucaccggcgacaacaagaacgccaccgccuccuucaucuacaacggccgccucgucgacuccaucgucuccugguccaaggagauccuccgcacccaggaguccgagugcgucugcaucaacggcaccugcaccgucgucaugaccgacggcuccgccuccggcaaggccgacaccaagauccucuucaucgaggagggcaagaucguccacaccuccacccucuccggcuccgcccagcacgucgaggagugcuccugcuacccccgcuaccccggcguccgcugcgucugccgcgacaacuggcgcggcuccaaccgccccaucgucgacaucaacaugaaggacuacuccaucgucuccuccuacgucugcuccggccucgucggcgacaccccccgcaagaacgacuccuccuccuccggccacugccucgaccccaacgacgaggagggcggccacggcgucaagggcugggccuucgacgacggcaacgacgucuggaugggccgcaccaucuccgagaagucccgcuccggcuacgagaccuucaaggucaucgagggcugguccaaccccaacuccaagcuccagaucaaccgccaggucaucgucgaccgcggcaaccgcuccggcuacuccggcaucuucuccgucgagggcaaguccugcaucaaccgcugcuucuacgucgagcucauccgcggccgcaaggaggagaccgagguccucuggaccuccaacuccaucgucgucuucugcggcaccuccggcaccuacggcaccggcuccuggcccgacggcgccgacaucaaccucaugcccaucuga

SEQ ID NO: 117617 - RNA, 1410 nt, Artificial Sequence
  derived and/or modified CDS sequence (opt2) from neuraminidase__InfluenzaA__AEX35651
augaaccccaaccagaagaucaucaccaucggcuccgucucccucaccaucuccaccaucugcuucuucaugcagaucgccauccucaucaccaccgucacccuccacuucaagcaguacgaguucaacuccccccccaacaaccaggucaugcucugcgagcccaccaucaucgagcgcaacaucaccgagaucgucuaccucaccaacaccaccaucgagaaggagaucugccccaagcucgccgaguaccgcaacugguccaagccccagugcgacaucaccggcuucgcccccuucuccaaggacaacuccauccgccucuccgccggcggcgacaucugggucacccgcgagcccuacgucuccugcgaccccgacaagugcuaccaguucgcccucggccagggcaccacccucaacaacguccacuccaacgacaccguccgcgaccgcacccccuaccgcacccuccucaugaacgagcucggcguccccuuccaccucggcaccaagcaggucugcaucgccugguccuccuccuccugccacgacggcaaggccuggcuccacgucugcaucaccggcgacgacaagaacgccaccgccuccuucaucuacaacggccgccucgucgacuccgucgucuccugguccaaggagauccuccgcacccaggaguccgagugcgucugcaucaacggcaccugcaccgucgucaugaccgacggcuccgccuccggcaaggccgacaccaagauccucuucaucgaggagggcaagaucguccacaccuccacccucuccggcuccgcccagcacgucgaggagugcuccugcuacccccgcuaccccggcguccgcugcgucugccgcgacaacuggaagggcuccaaccgccccaucgucgacaucaacaucaaggaccacuccaucgucuccuccuacgucugcuccggccucgucggcgacaccccccgcaagaacgacuccuccuccuccucccacugccucgaccccaacaacgaggagggcggccacggcgucaagggcugggccuucgacgacggcaacgacgucuggaugggccgcaccaucuccgagaagucccgccucggcuacgagaccuucaaggucaucgagggcugguccaaccccaaguccaagcuccagaucaaccgccaggucaucgucgaccgcggcaaccgcuccggcuacuccggcaucuucuccgucgaggacaaguccugcaucaaccgcugcuucuacgucgagcucauccgcggccgcaaggaggagaccgagguccucuggaccuccaacuccaucgucgucuucugcggcaccuccggcaccuacggcaccggcuccuggcccgacggcgccgacaucaaccucaugcccaucuga

SEQ ID NO: 117618 - RNA, 1410 nt, Artificial Sequence; identical to SEQ ID NO: 111920
  derived and/or modified CDS sequence (opt2) from neuraminidase__InfluenzaA__AEX36105

SEQ ID NO: 117619 - RNA, 1410 nt, Artificial Sequence
  derived and/or modified CDS sequence (opt2) from neuraminidase__InfluenzaA__AEX36116
augaaccccaaccagaagaucaucaccaucggcuccgucucccucaccaucuccaccaucugcuucuucaugcagaucgccauccucaucaccaccgucacccuccacuucaagcaguacgaguucaacuccccccccaacaaccaggucaugcucugcgagcccaccaucaucgagcgcaacaucaccgagaucgucuaccucaccaacaccaccaucgagaaggagaucugccccaagcucgccgaguaccgcaacugguccaagccccagugcgacaucaccggcuucgcccccuucuccaaggacaacuccauccgccucuccgccggcggcgacaucugggucacccgcgagcccuacgucuccugcgaccccgacaagugcuaccaguucgcccucggccagggcaccacccucaacaacguccacuccaacgacaccguccgcaaccgcacccccuaccgcacccuccucaugaacgagcucggcguccccuuccaccucggcaccaagcaggucugcaucgccugguccuccuccuccugccacgacggcaaggccuggcuccacgucugcaucaccggcgacgacaagaacgccaccgccuccuucaucuacaacggccgccucgucgacuccaucgucuccugguccaaggagauccuccgcacccaggaguccgagugcgucugcaucaacggcaccugcaccgucgucaugaccgacggcuccgccuccggcgaggccgacaccaagauccucuucaucgaggagggcaagaucguccacaccuccacccucuccggcuccgcccagcacgucgaggagugcuccugcuacccccgcuaccccggcguccgcugcgucugccgcgacaacuggaagggcuccaaccgccccaucgucgacaucaacaucaaggaccacuccaucgucuccuccuacgucugcuccggccucgucggcgacaccccccgcaagaacgacuccuccuccuccucccacugccucgaccccaacaacgaggagggcggccacggcgucaagggcugggccuucgacgacggcaacgacgucuggaugggccgcaccaucuccgagaagucccgccucggcuacgagaccuucaaggucaucgagggcugguccaaccccaaguccaagcuccagaucaaccgccaggucaucgucgaccgcggcaaccgcuccggcuacuccggcaucuucuccgucgagggcaaguccugcaucaaccgcugcuucuacgucgagcucauccgcggccgcaaggaggagaccgagguccucuggaccuccaacuccaucgucgucuucugcggcaccuccggcaccuacggcaccggcuccuggcccgacggcgccgacaucaaccucaugcccaucuga

SEQ ID NO: 117620 - RNA, 1410 nt, Artificial Sequence
  derived and/or modified CDS sequence (opt2) from neuraminidase__InfluenzaA__AEX36127
augaaccccaaccagaagaucaucaccaucggcuccgucucccucaccaucuccaccaucugcuucuucaugcagaucgccauccucaucaccaccgucacccuccacuucaagcaguacgaguucaacuccccccccaacaaccaggucaugcucugcgagcccaccaucaucgagcgcaacaucaccgagaucgucuaccucaccaacaccaccaucgagaaggagaucugccccaagcucgccgaguaccgcaacuggcucaagccccagugcgacaucaccggcuucgcccccuucuccaaggacaacuccauccgccucuccgccggcggcgacaucugggucacccgcgagcccuacgucuccugcgaccccgacaagugcuaccaguucgcccucggccagggcaccacccucaacaacguccacuccaacgacaccguccgcgaccgcacccccuaccgcacccuccucaugaacgagcucggcguccccuuccaccucggcaccaagcaggucugcaucgccugguccuccuccuccugccacgacggcaaggccuggcuccacgucugcaucaccggcgacgacaagaacgccaccgccuccuucaucuacaacggccgccucgucgacuccgucgucuccugguccaaggagauccuccgcacccaggaguccgagugcgucugcaucaacggcaccugcaccgucgucaugaccgacggcuccgccuccggcaaggccgacaccaagauccucuucaucgaggagggcaagaucguccacaccuccacccucuccggcuccgcccagcacgucgaggagugcuccugcuacccccgcuaccccggcguccgcugcgucugccgcgacaacuggaagggcuccaaccgccccaucgucgacaucaacaucaaggaccacuccaucgucuccuccuacgucugcuccggccucgucggcgacaccccccgcaagaacgacuccuccuccuccucccacugccucgaccccaacaacgaggagggcggccacggcgucaagggcugggccuucgacgacggcgacgacgucuggaugggccgcaccaucuccgagaagucccgccucggcuacgagaccuucaaggucaucgagggcugguccaaccccaaguccaagcuccagaucaaccgccaggucaucgucgaccgcggcaaccgcuccggcuacuccggcaucuucuccgucgagggcaaguccugcaucaaccgcugcuucuacgucgagcucauccgcggccgcaaggaggagaccgagguccucuggaccuccaacuccaucgucgucuucugcggcaccuccggcaccuacggcaccggcuccuggcccgacggcgccgacaucaaccucaugcccaucuga

SEQ ID NO: 117621 - RNA, 1410 nt, Artificial Sequence
  derived and/or modified CDS sequence (opt2) from neuraminidase__InfluenzaA__AEX36149
augaaccccaaccagaagaucaucaccaucggcuccgucucccucaccaucuccaccaucugcuucuucaugcagaucgccauccucaucaccaccgucacccuccacuucaagcaguacgaguucaacuccccccccaacaaccaggucaugcucugcgagcccaccaucaucgagcgcaacaucaccgagaucgucuaccucaccaacaccaccaucgagaaggagaucugccccaagcucgccgaguaccgcaacugguccaagccccagugcgacaucaccggcuucgcccccuucuccaaggacaacuccauccgccucuccgccggcggcgacaucugggucacccgcgagcccuacgucuccugcgaccccgacaagugcuaccaguucgcccucggccagggcaccacccucaacaacguccacuccaacgacaccguccgcgaccgcacccccuaccgcacccuccucaugaacgagcucggcguccccuuccaccucggcaccaagcaggucugcaucgccugguccuccuccuccugccacgacggcaaggccuggcuccacgucugcaucaccggcgacgacaagaacgccaccgccuccuucaucuacaacggccgccucgucgacuccgucgucuccugguccaaggagauccuccgcacccaggaguccgagugcgucugcaucaacggcaccugcaccgucgucaugaccgacggcuccgccuccggcaaggccgacaccaagauccucuucaucgaggagggcaagaucguccacaccuccacccucuccggcuccgcccagcacgucgaggagugcuccugcuacccccgcuaccccggcguccgcugcgucugccgcgacaacuggaagggcuccaaccgccccaucgucgacaucaacaucaaggaccacuccaucgucuccuccuacgucugcuccggccucgucggcgacaccccccgcaagaacgacuccuccuccuccucccacugccucgaccccaacaacgaggagggcggccacggcgucaagggcugggccuucgacgacggcaacgacgucuggaugggccgcaccaucuccgagaagucccgccucggcuacgagaccuucaaggucaucgagggcugguccaaccccaaguccaagcuccagaucaaccgccaggucaucgucgaccgcggcaaccgcuccggcuacuccggcaucuucuccgucgaggacaaguccugcaucaaccgcugcuucuacgucgagcucauccgcggccgcaaggaggagaccgagguccucuggaccaccaacuccaucgucgucuucugcggcaccuccggcaccuacggcaccggcuccuggcccgacggcgccgacaucaaccucaugcccaucuga

SEQ ID NO: 117622 - RNA, 1410 nt, Artificial Sequence; identical to SEQ ID NO: 112548
  derived and/or modified CDS sequence (opt2) from neuraminidase__InfluenzaA__AEX36160

SEQ ID NO: 117623 - RNA, 1410 nt, Artificial Sequence
  derived and/or modified CDS sequence (opt2) from neuraminidase__InfluenzaA__AEX36171
augaaccccaaccagaagaucaucaccaucggcuccgucucccucaccaucuccaccaucugcuucuucaugcagaucgccauccucaucaccaccgucacccuccacuucaagcaguacgaguucuccuccccccccaacaaccaggucaugcucugcgagcccaccaucaucgagcgcaacaucaccgagaucgucuaccucaccaacaccaccaucgagaaggagaucugccccaagcucgccgaguaccgcaacugguccaagccccagugcgacaucaccggcuucgcccccuucuccaaggacaacuccauccgccucuccgccggcggcgacaucugggucacccgcgagcccuacgucuccugcgaccccgacaagugcuaccaguucgcccucggccagggcaccacccucaacaacguccacuccaacgacaccguccacaaccgcacccccuaccgcacccuccucaugaacgagcucggcguccccuuccaccucggcaccaagcaggucugcaucgccugguccuccuccuccugccacgacggcaaggccuggcuccacgucugcgucaccggcgacgacaagaacgccaccgccuccuucaucuacaacggccgccucgucgacuccaucgucuccugguccaaggagauccuccgcacccaggaguccgagugcgucugcaucaacggcaccugcgccgucgucaugaccgacggcuccgccuccggcaaggccgacaccaagauccucuucaucgaggagggcaagaucguccacaccuccacccucuccggcuccgcccagcacgucgaggagugcuccugcuacccccgcuaccccggcguccgcugcgucugccgcgacaacuggaagggcuccaaccgccccaucgucgacaucaacaucaaggacuacuccaucgucucccgcuacgucugcuccggccucgucggcgacaccccccgcaagaacgacuccuccuccuccucccacugccucgaccccaacaacgaggagggcggccacggcgucaagggcugggccuucgacgacggcgacgacgucuggaugggccgcaccaucuccgagaagucccgcuccggcuacgagaccuucaaggucaucgagggcugguccaaccccaacuccaagcuccagaucaaccgccaggucaucgucgaccgcggcaaccgcuccggcuacuccggcaucuucuccgucgagggcaaguccugcaucaaccgcugcuucuacgucgagcucauccgcggccgcaaggaggagaccgagguccucuggaccuccaacuccaucgucgucuucugcggcaccuccggcaccuacggcaccggcuccuggcccgacggcgccgacaucaaccucaugcccaucuga

SEQ ID NO: 117624 - RNA, 1410 nt, Artificial Sequence
  derived and/or modified CDS sequence (opt2) from neuraminidase__InfluenzaA__AEX36193
augaaccccaaccagaagaucaucaccaucggcuccgucucccucaccaucuccaccaucugcuucuucaugcagaucgccauccucaucaccaccgucacccuccacuucaagcaguacgaguucaacuccucccccaacaaccaggucaugcucugcgagcccaccaucaucgagcgcaacaucaccgagaucgucuaccucaccaacaccaccaucgagaaggagaucugccccaagcucgccgaguaccgcaacugguccaagccccagugcgacaucaccggcuucgcccccuucuccaaggacaacuccauccgccucuccgccggcggcgacaucugggucacccgcgagcccuacgucuccugcgaccccgacaagugcuaccaguucgcccucggccagggcaccacccucaacaacguccacuccaacaacaccguccgcgaccgcacccccuaccgcacccuccucaugaacgagcucggcguccccuuccaccucggcaccaagcaggucugcaucgccugguccuccuccuccugccacgacggcaaggccuggcuccacgucugcaucaccggcgacgacaagaacgccaccgccuccuucaucuacaacggcaugcucgucgacuccaucgucuccugguccaaggagauccuccgcacccaggaguccgagugcgucugcaucaacggcaccugcaccgucgucaugaccgacggcuccgccuccggcaaggccgacaccaagauccucuucaucgaggagggcaagaucguccacaccuccacccucuccggcuccgcccagcacgucgaggagugcuccugcuacccccgcuaccccggcguccgcugcgucugccgcgacaacuggaagggcuccaaccgccccaucgucgacaucaacaucaaggaccacuccaucgucuccuccuacgucugcuccggccucgucggcgacaccccccgcaagaacgacuccuccuccuccucccacugccucgaccccaacaacgaggagggcggccacggcgucaagggcugggccuucgacgacggcaacgacgucuggaugggccgcaccaucuccgagaagucccgccucggcuacgagaccuucaaggucaucgagggcugguccaaccccaaguccaagcuccagaucaaccgccaggucaucgucgaccgcggcaaccgcuccggcuacuccggcaucuucuccgucgagggcaaguccugcaucaaccgcugcuucuacgucgagcucauccgcggccgcaaggaggagaccgagguccucuggaccuccaacuccaucgucgucuucugcggcaccuccggcaccuacggcaccggcuccuggcccgacggcgccgacaucaaccucaugcccaucuga

SEQ ID NO: 117625 - RNA, 1410 nt, Artificial Sequence
  derived and/or modified CDS sequence (opt2) from neuraminidase__InfluenzaA__AEX36204
augaaccccaaccagaagaucaucaccaucggcuccgucucccucaccaucuccaccaucugcuucuucaugcagaucgccauccucaucaccaccgucacccuccacuucaagcaguacgaguucaacuccccccccaacaaccaggucaugcucugcgagcccgccaucaucgagcgcaacaucaccgagaucgucuaccucaccaacaccaccaucgagaaggagaucugccccaagcucgccgaguaccgcaacugguccaagccccagugcgacaucaccggcuucgcccccuucuccaaggacaacuccauccgccucuccgccggcggcgacaucugggucacccgcgagcccuacgucuccugcgaccccgacaagugcuaccaguucgcccucggccagggcaccacccucaacaacguccacuccaacgacaccguccacgagcgcacccccuaccgcacccuccucaugaacgagcucggcguccccuuccaccucggcaccaagcaggucugcaucgccugguccuccuccuccugccacgacggcaaggccuggcuccacgucugcgucaccggcgacgacaagaacgccaccgccuccuucaucuacaacggccgccucgucgacuccaucgucuccugguccaaggagauccuccgcacccaggaguccgagugcgucugcaucaacggcaccugcaccgucgucaugaccgacggcuccgccuccggcaaggccgacaccaagauccucuucaucgaggagggcaagaucguccacaccuccacccucuccggcuccgcccagcacgucgaggagugcuccugcuacccccgcuaccccggcguccgcugcgucugccgcgacaacuggaagggcuccaaccgccccaucgucgacaucaacaucaaggacuacuccaucgucucccgcuacgucugcuccggccucgucggcgacaccccccgcaagaacgacuccuccuccuccucccacugccucgaccccaacaacgaggagggcggccacggcgucaagggcugggccuucgacgacggcaacgacgucuggaugggccgcaccaucuccgagaagucccgcuccggcuacgagaccuucaaggucaucgagggcugguccaaccccaacuccaagcuccagaucaaccgccaggucaucgucgaccgcggcaaccgcuccggcuacuccggcaucuucuccgucgagggcaaguccugcaucaaccgcugcuucuacgucgagcucauccgcggccgcaaggaggagaccgagguccucuggaccuccaacuccaucgucgucuucugcggcaccuccggcaccuacggcaccggcuccuggcccgacggcgccgacaucaaccucaugcccaucuga

SEQ ID NO: 117626 - RNA, 1410 nt, Artificial Sequence
  derived and/or modified CDS sequence (opt2) from neuraminidase__InfluenzaA__AEX36215
augaaccccaaccagaagaucaucaccaucggcuccgucucccucaccaucuccaccaucugcuucuucaugcagaucgccauccucaucaccaccgucacccuccacuucaagcaguacgaguucuccuccccccccaacaaccaggucaugcucugcgagcccgccaucaucgagaagaacaucaccgagaucgucuaccucaccaacaccaccaucgagaaggagaucugccccaagcucgccgaguaccgcaacugguccaagccccagugcgacaucaccggcuucgcccccuucuccaaggacaacuccauccgccucuccgccggcggcgacaucugggucacccgcgagcccuacgucuccugcgaccccgacaagugcuaccaguucgcccucggccagggcaccacccucaacaacguccacuccaacgacaccguccacgagcgcacccccuaccgcacccuccucaugaacgagcucggcguccccuuccaccucggcaccaagcaggucugcaucgccugguccuccuccuccugccacgacggcaaggccuggcuccacgucugcgucaccggcgacgacaagaacgccaccgccuccuucaucuacaacggccgccucgucgacuccaucgucuccugguccaaggagauccuccgcacccaggaguccgagugcgucugcaucaacggcaccugcaccgucgucaugaccgacggcuccgccuccggcaaggccgacaccaagauccucuucaucgaggagggcaagaucguccacaccuccacccucuccggcuccgcccagcacgucgaggagugcuccugcuacccccgcuaccccggcguccgcugcgucugccgcgacaacuggaagggcuccaaccgccccaucgucgacaucaacaucaaggacuacuccaucgucucccgcuacgucugcuccggccucgucggcgacaccccccgcaagaacgacuccuccuccuccucccacugccucgaccccaacaacgaggagggcggccacggcgucaagggcugggccuucgacgacggcaacgacgucuggaugggccgcaccaucuccgagaagucccgcuccggcuacgagaccuucaaggucaucgagggcugguccaaccccaacuccaagcuccagaucaaccgccaggucaucgucgaccgcggcaaccgcuccggcuacuccggcaucuucuccgucgagggcaaguccugcaucaaccgcugcuucuacgucgagcucauccgcggccgcaaggaggagaccgagguccucuggaccuccaacuccaucgucgucuucugcggcaccuccggcaccuacggcaccggcuccuggcccgacggcgccgacaucaaccucaugcccaucuga

SEQ ID NO: 117627 - RNA, 1410 nt, Artificial Sequence
  derived and/or modified CDS sequence (opt2) from neuraminidase__InfluenzaA__AEX36226
augaaccccaaccagaagaucaucaccaucggcuccgucucccucaccaucuccaccaucugcuucuucaugcagaucgccauccucaucaccaccgucacccuccacuucaagcaguacgaguucuccuccccccccaacaaccaggucaugcucugcgagcccgccaucaucgagcgcaacaucaccgagaucgucuaccucaccaacaccaccaucgagaaggagaucugccccaagcucgccgaguaccgcaacugguccaagccccagugcgacaucaccggcuucgcccccuucuccaaggacaacuccauccgccucuccgccggcggcgacaucugggucacccgcgagcccuacgucuccugcgaccccgacaagugcuaccaguucgcccucggccagggcaccacccucaacaacguccacuccaacgacaccguccacaaccgcacccccuaccgcacccuccucaugaacgagcucggcguccccuuccaccucggcaccaagcaggucugcaucgccugguccuccuccuccugccacgacggcaaggccuggcuccacgucugcgucaccggcgacgacaagaacgccaccgccuccuucaucuacaacggccgccucgucgacuccaucgucuccugguccaaggagauccuccgcacccaggaguccgagugcgucugcaucaacggcaccugcaccgucgucaugaccgacggcuccgccuccggcaaggccgacaccaagauccucuucaucgaggagggcaagaucguccacaccuccacccucuccggcuccgcccagcacgucgaggagugcuccugcuacccccgcuaccccggcguccgcugcgucugccgcgacaacuggaagggcuccaaccgccccaucgucgacaucaacaucaaggacuacuccaucgucucccgcuacgucugcuccggcaucgucggcgacaccccccgcaagaacgacuccuccuccuccucccacugccucgaccccaacaacgaggagggcggccacggcgucaagggcugggccuucgacgacggcaacgacgucuggaugggccgcaccaucuccgagaagucccgcuccggcuacgagaccuucaaggucaucgagggcugguccaaccccaacuccaagcuccagaucaaccgccaggucaucgucgaccgcggcaaccgcuccggcuacuccggcaucuucuccgucgagggcaaguccugcaucaaccgcugcuucuacgucgagcucauccgcggccgcaaggaggagaccgagguccucuggaccuccaacuccaucgucgucuucugcggcaccuccggcaccuacggcaccggcuccuggcccgacggcgccgacaucaaccucaugcccaucuga

SEQ ID NO: 117628 - RNA, 1410 nt, Artificial Sequence
  derived and/or modified CDS sequence (opt2) from neuraminidase__InfluenzaA__AEX36237
augaaccccaaccagaagaucaucaccaucggcuccgucucccucaccaucuccaccaucugcuucuucaugcagaucgccauccucaucaccaccgucacccuccacuucaagcaguacgaguucaacuccccccccaacaaccaggucaugcucugcgagcccaccaucaucgagcgcaacaucaccgagaucgucuaccucaccaacaccaccaucgagaaggagaucugccccaagcucgccgaguaccgcaagugguccaagccccagugcaacaucaccggcuucgcccccuucuccaaggacaacuccauccgccucuccgccggcggcgacaucugggucacccgcgagcccuacgucuccugcgaccccgacaagugcuaccaguucgcccucggccagggcaccacccucaacaacguccacuccaacgacaccguccgcgagcgcacccccuaccgcacccuccucaugaacgagcucggcguccccuuccaccucggcaccaagcaggucugcaucgccugguccuccuccuccugccacgacggcaaggccuggcuccacgucugcgucaccggcgacgacaagaacgccaccgccuccuucaucuacaacggccgccucgucgacuccaucgucuccugguccaaggagauccuccgcacccaggaguccgagugcgucugcaucaacggcaccugcaccgucgucaugaccgacggcuccgccuccggcaaggccgacaccaagauccucuucaucgaggagggcaagaucguccacaccuccacccucuccggcuccgcccagcacgucgaggagugcuccugcuacccccgcuaccccggcguccgcugcgucugccgcgacaacuggcgcggcuccaaccgccccaucgucgacaucaacaugaaggacuacuccaucgucuccuccuacgucugcuccggccucgucggcgacaccccccgcaagaacgacuccuccuccuccggccacugccucgaccccaacgacgaggagggcggccacggcgucaagggcugggccuucgacgacggcaacgacgucuggaugggccgcaccaucuccgagaagucccgcuccggcuacgagaccuucaaggucaucgagggcugguccaaccccaacuccaagcuccagaucaaccgccaggucaucgucgaccgcggcaaccgcuccggcuacuccggcaucuucuccgucgagggcaaguccugcaucaaccgcugcuucuacgucgagcucauccgcggccgcaaggaggagaccgagguccucuggaccuccaacuccaucgucgucuucugcggcaccuccggcaccuacggcaccggcuccuggcccgacggcgccgacaucaaccucaugcccaucuga

SEQ ID NO: 117629 - RNA, 1410 nt, Artificial Sequence
  derived and/or modified CDS sequence (opt2) from neuraminidase__InfluenzaA__AEX36248
augaaccccaaccagaagaucaucaccaucggcuccgucucccucaccaucuccaccaucugcuucuucaugcagaucgccauccucaucaccaccgucacccuccacuucaagcaguacgaguucuccuccccccccaacaaccaggucaugcucugcgagcccgccaucaucgagcgcaacaucaccgagaucgucuaccucaccaacaccaccaucgagaaggagaucugccccaagcucgccgaguaccgcaacugguccaagccccagugcgacaucaccggcuucgcccccuucuccaaggacaacuccauccgccucuccgccggcggcgacaucugggucacccgcgagcccuacgucuccugcgaccccgacaagugcuaccaguucgcccucggccagggcaccacccucaacaacguccacuccaacgacaccguccacaaccgcacccccuaccgcacccuccucaugaacgagcucggcguccccuuccaccucggcaccaagcaggucugcaucgccugguccuccuccuccugccacgacggcaaggccuggcuccacgucugcgucaccggcgacgacaagaacgccaccgccuccuucaucuacaacggccgccucgucgacuccaucgucuccugguccaaggagauccuccgcacccaggaguccgagugcgucugcaucaacggcaccugcaccgucgucaugaccgacggcuccgccuccggccgcgccgacaccaagauccucuucaucgaggagggcaagaucguccacaccuccacccucuccggcuccgcccagcacgucgaggagugcuccugcuacccccgcuaccccggcguccgcugcgucugccgcgacaacuggaagggcuccaaccgccccaucgucgacaucaacaucaaggacuacuccaucgucucccgcuacgucugcuccggccucgucggcgacaccccccgcaagaacgacuccuccuccuccucccacugccucgaccccaacaacgaggagggcggccacggcgucaagggcugggccuucgacgacggcaacgacgucuggaugggccgcaccaucuccgagaagucccgcuccggcuacgagaccuucaaggucaucgagggcugguccaaccccaacuccaagcuccagaucaaccgccaggucaucgucgaccgcggcaaccgcuccggcuacuccggcaucuucuccgucgagggcaaguccugcaucaaccgcugcuucuacgucgagcucauccgcggccgcaaggaggagaccgagguccucuggaccuccaacuccaucgucgucuucugcggcaccuccggcaccuacggcaccggcuccuggcccgacggcgccgacaucaaccucaugcccaucuga

SEQ ID NO: 117630 - RNA, 1410 nt, Artificial Sequence; identical to SEQ ID NO: 112548
  derived and/or modified CDS sequence (opt2) from neuraminidase__InfluenzaA__AEX36259

SEQ ID NO: 117631 - RNA, 1410 nt, Artificial Sequence
  derived and/or modified CDS sequence (opt2) from neuraminidase__InfluenzaA__AEX36270
augaaccccaaccagaagaucaucaccaucggcuccgucucccucaccaucuccaccaucugcuucuucaugcagaucgccauccucaucaccaccgucacccuccacuucaagcaguacgaguucuccuccccccccaacaaccaggucaugcucugcgagcccgccaucaucgagcgcaacaucaccgagaucgucuaccucaccaacaccaccaucgagaaggagaucugccccaagcucgccgaguaccgcaacugguccaagccccagugcgacaucaccggcuucgcccccuucuccaaggacaacuccauccgccucuccgccggcggcgacaucugggucacccgcgagcccuacgucuccugcgaccccgacaagugcuaccaguucgcccucggccagggcaccacccucaacaacguccacuccaacgacaccguccacggccgcacccccuaccgcacccuccucaugaacgagcucggcguccccuuccaccucggcaccaagcaggucugcaucgccugguccuccuccuccugccacgacggcaaggccuggcuccacgucugcgucaccggcgacgacaagaacgccaccgccuccuucaucuacaacggccgccucgucgacuccaucgucuccugguccaaggagauccuccgcacccaggaguccgagugcgucugcaucaacggcaccugcaccgucgucaugaccgacggcuccgccuccggcaaggccgacaccaagauccucuucaucgaggagggcaagaucguccacaccuccacccucuccggcuccgcccagcacgucgaggagugcuccugcuacccccgcuaccccggcguccgcugcgucugccgcgacaacuggaagggcuccaaccgccccaucgucgacaucaacaucaaggacuacuccaucgucucccgcuacgucugcuccggccucgucggcgacaccccccgcaagaacgacuccuccuccuccucccacugccucgaccccaacaacgaggagggcggccacggcgucaagggcugggccuucgacgacggcaacgacgucuggaugggccgcaccaucuccgagaagucccgcuccggcuacgagaccuucaaggucaucgagggcugguccaaccccaacuccaagcuccagaucaaccgccaggucaucgucgaccgcggcaaccgcuccggcuacuccggcaucuucuccgucgagggcaaguccugcaucaaccgcugcuucuacgucgagcucauccgcggccgcgaggaggagaccaagguccucuggaccuccaacuccaucgucgucuucugcggcaccuccggcaccuacggcaccggcuccuggcccgacggcgccgacaucaaccucaugcccaucuga

SEQ ID NO: 117632 - RNA, 1410 nt, Artificial Sequence
  derived and/or modified CDS sequence (opt2) from neuraminidase__InfluenzaA__AEX36281
augaaccccaaccagaagaucaucaccaucggcuccgucucccucaccaucuccaccaucugcuucuucaugcagaucgccauccucaucaccaccgucacccuccacuucaagcaguacgaguucuccuccccccccaacaaccaggucaugcucugcgagcccgccaucaucgagcgcaacaucaccgagaucgucuaccucaccaacaccaccaucgagaaggagaucugccccaagcucgccgaguaccgcaacugguccaagccccagugcgacaucaccggcuucgcccccuucuccaaggacaacuccauccgccucuccgccggcggcgacaucugggucacccgcgagcccuacgucuccugcgaccccgacaagugcuaccaguucgcccucggccagggcaccacccucaacaacguccacuccaacgacaccguccacggccgcacccccuaccgcacccuccucaugaacgagcucggcguccccuuccaccucggcaccaagcaggucugcaucgccugguccuccuccuccugccacgacggcaaggccuggcuccacgucugcgucaccggcgacgacaagaacgccaccgccuccuucaucuacaacggccgccucgucgacuccaucgucuccugguccaaggagauccuccgcacccaggaguccgagugcgucugcaucaacggcaccugcaccgucgucaugaccgacggcuccgccuccggcaaggccgacaccaagauccucuucaucgaggagggcaagaucguccacaccuccacccucuccggcuccgcccagcacgucgaggagugcuccugcuacccccgcuaccccggcguccgcugcgucugccgcgacaacuggaagggcuccaaccgccccaucgucgacaucaacaucaaggacuacuccaucgucucccgcuacgucugcuccggccucgucggcgacaccccccgcaagaacgacuccuccuccuccucccacugccucgaccccaacaacgaggagggcggccacggcgucaagggcugggccuucgacgacggcaacgacgucuggaugggccgcaccaucuccgagaagucccgcuccggcuacgagaccuucaaggucaucgagggcugguccaaccccaacuccaagcuccagaucaaccgccaggucaucgucgaccgcggcaaccgcuccggcuacuccggcaucuucuccgucgagggcaaguccugcaucaaccgcugcuucuacgucgagcucauccgcggccgcaaggaggagaccgagguccucuggaccuccaacuccaucgucgucuucugcggcaccuccggcaccuacggcaccggcuccuggcccgacggcgccgacaucaaccucaugcccaucuga

SEQ ID NO: 117633 - RNA, 1410 nt, Artificial Sequence; identical to SEQ ID NO: 117632
  derived and/or modified CDS sequence (opt2) from neuraminidase__InfluenzaA__AEX36292

SEQ ID NO: 117634 - RNA, 1410 nt, Artificial Sequence
  derived and/or modified CDS sequence (opt2) from neuraminidase__InfluenzaA__AEX36303
augaaccccaaccagaagaucaucaccaucggcuccgucucccucaccaucuccaccaucugcuucuucaugcagaucgccauccucaucaccaccgucacccuccacuucaagcaguacgaguucuccuccccccccaacaaccaggucaugcucugcgagcccgccaucaucgagcgcaacaucaccgagaucgucuaccucaccaacaccaccaucgagaaggagaucugccccaagcucgccgaguaccgcaacugguccaagccccagugcgacaucaccggcuucgcccccuucuccaaggacaacuccauccgccucuccgccggcggcgacaucugggucacccgcgagcccuacgucuccugcgaccccgacaagugcuaccaguucgcccucggccagggcaccacccucaacaacguccacuccaacgacaccguccacgagcgcacccccuaccgcacccuccucaugaacgagcucggcguccccuuccaccucggcaccaagcaggucugcaucgccugguccuccuccuccugccacgacggcaaggccuggcuccacgucugcgucaccggcgacgacaagaacgccaccgccuccuucaucuacaacggccgccucgucgacuccaucgucuccugguccaaggagauccuccgcacccaggaguccgagugcgucugcaucaacggcaccugcaccgucgucaugaccgacggcuccgccuccggcaaggccgacaccaagauccucuucaucgaggagggcaagaucguccacaccuccacccucuccggcuccgcccagcacgucgaggagugcuccugcuacccccgcuaccccggcguccgcugcgucugccgcgacaacuggaagggcuccaaccgccccaucgucgacaucaacaucaaggacuacuccaucgucucccgcuacgucugcuccggccucgucggcgacaccccccgcaagaacgacuccuccuccuccucccacugccucgaccccaacaacgaggagggcggccacggcgucaagggcugggccuucgacgacggcaacgacgucuggaugggccgcaccaucuccgagaagucccgcuccggcuacgagaccuucaaggucaucgagggcugguccaaccccaacuccaagcuccagaucaaccgccaggucaucgucgaccgcggcaaccgcuccggcuacuccggcaucuucuccgucgagggcaaguccugcaucaaccgcugcuucuacgucgagcucauccgcggccgcaaggaggagaccgagguccucuggaccuccaacuccaucgucgucuucugcggcaccuccggcaccuacggcaccggcuccuggcccgacggcgccgacaucaaccucaugcccaucuga

SEQ ID NO: 117635 - RNA, 1410 nt, Artificial Sequence
  derived and/or modified CDS sequence (opt2) from neuraminidase__InfluenzaA__AEX36314
augaaccccaaccagaagaucaucaccaucggcuccgucucccucaccaucuccaccaucugcuucuucaugcagaucgccauccucaucaccaccgucacccuccacuucaagcaguacgaguucuccuccccccccaacaaccaggucaugcucugcgagcccaccaucaucgagcgcaacaucaccgagaucgucuaccucaccaacaccaccaucgagaaggagaucugccccaagcucgccgaguaccgcaacugguccaagccccagugcgacaucaccggcuucgcccccuucuccaaggacaacuccauccgccucuccgccggcggcgacaucugggucacccgcgagcccuacgucuccugcgaccccgacaagugcuaccaguucgcccucggccagggcaccacccucaacaacguccacuccaacgacaccguccacaaccgcacccccuaccgcacccuccucaugaacgagcucggcguccccuuccaccucggcaccaagcaggucugcaucgccugguccuccuccuccugccacgacggcaaggccuggcuccacgucugcgucaccggcgacgacaagaacgccaccgccuccuucaucuacaacggccgccucgucgacuccaucgucuccugguccaaggagauccuccgcacccaggaguccgagugcgucugcaucaacggcaccugcgccgucgucaugaccgacggcuccgccuccggcaaggccgacaccaagauccucuucaucgaggagggcaagaucguccacaccuccacccucuccggcuccgcccagcacgucgaggagugcuccugcuacccccgcuaccccggcguccgcugcgucugccgcgacaacuggaagggcuccaaccgccccaucgucgacaucaacaucaaggacuacuccaucgucucccgcuacgucugcuccggccucgucggcgacaccccccgcaagaacgacuccuccuccuccucccacugccucgaccccaacaacgaggagggcgaccacggcgucaagggcugggccuucgacgacggcaacgacgucuggaugggccgcaccaucuccgagaagucccgcuccggcuacgagaccuucaaggucaucgagggcugguccaaccccaacuccaagcuccagaucaaccgccaggucaucgucgaccgcggcaaccgcuccggcuacuccggcaucuucuccgucgagggcaaguccugcaucaaccgcugcuucuacgucgagcucauccgcggccgcaaggaggagaccgagguccucuggaccuccaacuccaucgucgucuucugcggcaccuccggcaccuacggcaccggcuccuggcccgacggcgccgagaucaaccucaugcccaucuga

SEQ ID NO: 117636 - RNA, 1410 nt, Artificial Sequence; identical to SEQ ID NO: 117632
  derived and/or modified CDS sequence (opt2) from neuraminidase__InfluenzaA__AEX36336

SEQ ID NO: 117637 - RNA, 1410 nt, Artificial Sequence
  derived and/or modified CDS sequence (opt2) from neuraminidase__InfluenzaA__AEX36347
augaaccccaaccagaagaucaucaccaucggcuccgucucccucaccaucuccaccaucugcuucuucaugcagaucgccauccucaucaccaccgucacccuccacuucaagcaguacgaguucuccuccccccccaacaaccaggucaugcucugcgagcccaucaucaucgagcgcaacaucaccgagaucgucuaccucaccaacaccaccaucgagaaggagaucugccccaagcucgccgaguaccgcaacugguccaagccccagugcgacaucaccggcuucgcccccuucuccaaggacaacuccauccgccucuccgccggcggcgacaucugggucacccgcgagcccuacgucuccugcgaccccgacaagugcuaccaguucgcccucggccagggcaccacccucaacaacguccacuccaacgacaccguccacaaccgcacccccuaccgcacccuccucaugaacgagcucggcguccccuuccaccucggcaccaagcaggucugcaucgccugguccuccuccuccugccacgacggcaaggccuggcuccacgucugcgucaccggcgacgacaagaacgccaccgccuccuucaucuacaacggccgccucgucgacuccaucgucuccugguccaaggagauccuccgcacccaggaguccgagugcgucugcaucaacggcaccugcgccgucgucaugaccgacggcuccgccuccggcaaggccgacaccaagauccucuucaucgaggagggcaagaucguccacgccuccacccucuccggcuccgcccagcacgucgaggagugcuccugcuacccccgcuaccccggcguccgcugcgucugccgcgacaacuggaagggcuccaaccgccccaucgucgacaucaacaucaaggacuacuccaucgucucccgcuacgucugcuccggccucgucggcgacaccccccgcaagaacgacuccuccuccuccucccacugccucgaccccaacaacgaggagggcggccacggcgucaagggcugggccuucgacgacggcaacgacgucuggaugggccgcaccaucuccgagaagucccgcuccggcuacgagaccuucaaggucaucgagggcugguccaaccccaacuccaagcuccagaucaaccgccaggucaucgucgaccgcggcaaccgcuccggcuacuccggcaucuucuccgucgagggcaaguccugcaucaaccgcugcuucuacgucgagcucauccgcggccgcaaggaggagaccgagguccucuggaccuccaacuccaucgucgucuucugcggcaccuccggcaccuacggcaccggcuccuggcccgacggcgccgacaucaaccucaugcccaucuga

SEQ ID NO: 117638 - RNA, 1410 nt, Artificial Sequence; identical to SEQ ID NO: 111920
  derived and/or modified CDS sequence (opt2) from neuraminidase__InfluenzaA__AEX36358

SEQ ID NO: 117639 - RNA, 1410 nt, Artificial Sequence
  derived and/or modified CDS sequence (opt2) from neuraminidase__InfluenzaA__AEX36369
augaaccccaaccagaagaucaucaccaucggcuccgucucccucaccaucuccaccaucugcuucuucaugcagaucgccauccucaucaccaccgucacccuccacuucaagcaguacgaguucaacuccccccccaacaaccaggucaugcucugcgagcccaccaucaucgagcgcaacaucaccgagaucgucuaccucaccaacaccaccaucgagaaggagaucugccccaagcucgccgaguaccgcaacugguccaagccccagugcgacaucaccggcuucgcccccuucuccaaggacaacuccauccgccucuccgccggcggcgacaucugggucacccgcgagcccuacgucuccugcgaccccgacaagugcuaccaguucgcccucggccagggcaccacccucaacaacguccacuccaacgacaccguccgcaaccgcacccccuaccgcacccuccucaugaacgagcucggcguccccuuccaccucggcaccaagcaggucugcaucgccugguccuccuccuccugccacgacggcaaggccuggcuccacgucugcaucaccggcgacgacaagaacgccaccgccuccuucaucuacaacggccgccucgucgacuccaucgucuccugguccaaggagauccuccgcacccaggaguccgagugcgucugcaucaacggcaccugcaccgucgucaugaccgacggcuccgccuccggcaaggccgacaccaagauccucuucaucgaggagggcaagaucguccacaccuccacccucuccggcuccgcccagcacgucgaggagugcuccugcuacccccgcuaccccggcguccgcugcgucugccgcgacaacuggaagggcuccaaccgccccaucgucgacaucaacaucaaggaccacuccaucgucuccuccuacgucugcuccggccucgucggcgacaccccccgcaagaacgacuccuccuccuccucccacugccucgaccccaacaacgaggagggcggccacggcgucaagggcugggccuucgacgacggcaacgacgucuggaugggccgcaccaucuccgagaagucccgccucggcuacgagaccuucaaggucaucgagggcugguccaaccccaaguccaagcuccagaucaaccgccaggucaucgucgaccgcggcaaccgcaccggcuacuccggcaucuucuccgucgagggcaaguccugcaucaaccgcugcuucuacgucgagcucauccgcggccgcaaggaggagaccgagguccucuggaccuccaacuccaucgucgucuucugcggcaccuccggcaccuacggcaccggcuccuggcccgacggcgccgacaucaaccucaugcccaucuga

SEQ ID NO: 117640 - RNA, 1410 nt, Artificial Sequence
  derived and/or modified CDS sequence (opt2) from neuraminidase__InfluenzaA__AEX36391
augaaccccaaccagaagaucaucaccaucggcuccgucucccucaccaucuccaccaucugcuucuucaugcagaucgccauccucaucaccaccgucacccuccacuucaagcaguacgaguucaacuccccccccaacaaccaggucaugcucugcgagcccaccaucaucgagcgcaacaucaccgagaucgucuaccucaccaacaccaccaucgagaaggagaucugccccaagcucgccgaguaccgcaacugguccaagccccagugcgacaucgccggcuucgcccccuucuccaaggacaacuccauccgccucuccgccggcggcgacaucugggucacccgcgagcccuacgucuccugcgaccccgacaagugcuaccaguucgcccucggccagggcaccacccucaacaacguccacuccaacgacaccguccgcaaccgcacccccuaccgcacccuccucaugaacgagcucggcguccccuuccaccucggcaccaagcaggucugcaucgccugguccuccuccuccugccacgacggcaaggccuggcuccacgucugcaucaccggcgacgacaagaacgccaccgccuccuucaucuacaacggccgccucgucgacuccaucgucuccugguccaaggagauccuccgcacccaggaguccgagugcgucugcaucaacggcaccugcaccgucgucaugaccgacggcuccgccuccggcaaggccgacaccaagauccucuucaucgaggagggcaagaucguccacaccuccacccucuccggcuccgcccagcacgucgaggagugcuccugcuacccccgcuaccccggcguccgcugcgucugccgcgacaacuggaagggcuccaaccgccccaucgucgacaucaacaucaaggaccacuccaucgucuccuccuacgucugcuccggccucgucggcgacaccccccgcaagaacgacuccuccuccuccucccacugccucgaccccaacaacgaggagggcggccacggcgucaagggcugggccuucgacgacggcaacgacgucuggaugggccgcaccaucuccgagaagucccgccucggcuacgagaccuucaaggucaucgagggcugguccaaccccaaguccaagcuccagaucaaccgccaggucaucgucgaccgcggcgaccgcuccggcuacuccggcaucuucuccgucgagggcaaguccugcaucaaccgcugcuucuacgucgagcucauccgcggccgcaaggaggagaccgagguccucuggaccuccaacuccaucgucgucuucugcggcaccuccggcaccuacggcaccggcuccuggcccgacggcgccgacaucaaccucaugcccaucuga

SEQ ID NO: 117641 - RNA, 1410 nt, Artificial Sequence
  derived and/or modified CDS sequence (opt2) from neuraminidase__InfluenzaA__AEX36402
augaaccccaaccagaagaucaucaccaucggcuccgucucccucaccaucuccaccaucugcuucuucaugcagaucgccauccucaucaccaccgucacccuccacuucaagcaguacgaguucaacuccccccccaacaaccaggucaugcucugcgagcccaccaucaucgagcgcaacaucaccgagaucgucuaccucaccaacaccaccaucgagaaggagaucugccccaagcucgccgaguaccgcaacugguccaagccccagugcgacaucaccggcuucgcccccuucuccaaggacaacuccauccgccucuccgccggcggcgacaucugggucacccgcgagcccuacgucuccugcgaccccgacaagugcuaccaguucgcccucggccagggcaccacccucaacaacguccacuccaacgacaccguccgcggccgcacccccuaccgcacccuccucaugaacgagcucggcguccccuuccaccucggcaccaagcaggucugcaucgccugguccuccuccuccugccacgacggcaaggccuggcuccacgucugcaucaccggcgacgacaagaacgccaccgccuccuucaucuacaacggccgccucgucgacuccaucgucuccugguccaaggagauccuccgcacccaggaguccgagugcgucugcaucaacggcaccugcaccgucgucaugaccgacggcuccgccuccggcaaggccgacaccaagauccucuucaucgaggagggcaagaucguccacaccuccacccucuccggcuccgcccagcacgucgaggagugcuccugcuacccccgcuuccccggcguccgcugcgucugccgcgacaacuggaagggcuccaaccgccccaucgucgacaucaacaucaaggaccacuccaucgucuccuccuacgucugcuccggccucgucggcgacaccccccgcaagaacgacuccuccuccuccucccacugccucgaccccaacaacgaggagggcggccacggcgucaagggcugggccuucgacgacggcaacgacgucuggaugggccgcaccaucuccgagaagucccgccucggcuacgagaccuucaaggucaucgagggcugguccaaccccaaguccaagcuccagaucaaccgccaggucaucgucgaccgcggcaaccgcaccggcuacuccggcaucuucuccgucgagggcaaguccugcaucaaccgcugcuucuacgucgagcucauccgcggccgcaaggaggagaccgagguccucuggaccuccaacuccaucgucgucuucugcggcaccuccggcaccuacggcaccggcuccuggcccgacggcgccgacaucaaccucaugcccaucuga

SEQ ID NO: 117642 - RNA, 1410 nt, Artificial Sequence; identical to SEQ ID NO: 111920
  derived and/or modified CDS sequence (opt2) from neuraminidase__InfluenzaA__AEX36413

SEQ ID NO: 117643 - RNA, 1410 nt, Artificial Sequence
  derived and/or modified CDS sequence (opt2) from neuraminidase__InfluenzaA__AEX36424
augaaccccaaccagaagaucaucaccaucggcuccgucucccucaccaucuccaccaucugcuucuucaugcagaucgccauccucaucaccaccgucacccuccacuucaagcaguacgaguucaacuccccccccaacaaccaggucaugcucugcgagcccaccaucaucgagcgcaacaucaccgagaucgucuaccucaccaacaccaccaucgagaaggagaucugcuccaagcucgccgaguaccgcaacugguccaagccccagugcgacaucaccggcuucgcccccuucuccaaggacaacuccauccgccucuccgccggcggcgacaucugggucacccgcgagcccuacgucuccugcgaccccgacaagugcuaccaguucgcccucggccagggcaccacccucaacaacguccacuccaacgacaccauccgcgaccgcacccccuaccgcacccuccucaugaacgagcucggcguccccuuccaccucggcaccaagcaggucugcaucgccugguccuccuccuccugccacgacggcaaggccuggcuccacgucugcaucaccggcgacgacaagaacgccaccgccuccuucaucuacaacggccgccucgucgacuccgucgucuccugguccaaggagauccuccgcacccaggaguccgagugcgucugcaucaacggcaccugcaccgucgucaugaccgacggcuccgccuccggcaaggccgacaccaagauccucuucaucgaggagggcaagaucguccacaccuccacccucuccggcuccgcccagcacgucgaggagugcuccugcuacccccgcuaccccggcguccgcugcgucugccgcgacaacuggaagggcuccaaccgccccaucgucgacaucaacaucaaggaccacuccaucgucuccuccuacgucugcuccggccucgucggcgacaccccccgcaagaacgacuccuccuccuccucccacugccucgaccccaacaacgaggagggcggccacggcgucaagggcugggccuucgacgacggcaacgacgucuggaugggccgcaccaucuccgagaagucccgccucggcuacgagaccuucaaggucaucgagggcugguccaaccccaaguccaagcuccagaucaaccgccaggucaucgucgaccgcggcaaccgcuccggcuacuccggcaucuucuccgucgagggcaaguccugcaucaaccgcugcuucuacgucgagcucauccgcggccgcaaggaggagaccgagguccucuggaccuccaacuccaucgucgucuucugcggcaccuccggcaccuacggcaccggcuccuggcccgacggcgccgacaucaaccucaugcccaucuga

SEQ ID NO: 117644 - RNA, 1410 nt, Artificial Sequence
  derived and/or modified CDS sequence (opt2) from neuraminidase__InfluenzaA__AEX36435
augaaccccaaccagaagaucaucaccaucggcuccgucucccucaccaucuccaccaucugcuucuucaugcagaucgccauccucaucaccaccgucacccuccacuucaagcaguacgaguucaacuccccccccaacaaccaggucaugcucugcgagcccaccaucaucgagcgcaacaucaccgagaucgucuaccucaccaacaccaccaucgagaaggagaucugccccaagcucgccgaguaccgcaacugguccaagccccagugcgacaucaccggcuucgcccccuucuccaaggacaacuccauccgccucuccgccggcggcgacaucugggucacccgcgagcccuacgucuccugcgaccccgacaagugcuaccaguucgcccucggccagggcaccacccucaacaacguccacuccaacgacaccguccgcgaccgcacccccuaccgcacccuccucaugaacgagcucggcguccccuuccaccucggcaccaagcaggucugcaucgccugguccuccuccuccugccacgacggcaaggccuggcuccacgucugcaucaccggcgacgacaagaacgccaccgccuccuucaucuacaacggccgccucgucgacuccgucgucuccugguccaaggagauccuccgcacccaggaguccgagugcgucugcaucaacggcaccugcaccgucgucaugaccgacggcuccgccuccggcaaggccgacaccaagauccucuucaucaaggagggcaagaucguccacaccuccacccucuccggcuccgcccagcacgucgaggagugcuccugcuacccccgcuaccccggcguccgcugcgucugccgcgacaacuggaagggcuccaaccgccccaucgucgacaucaacaucaaggaccacuccaucgucuccuccuacgucugcuccggccucgucggcgacaccccccgcaagaacgacuccuccuccuccucccacugccucgaccccaacaacgaggagggcggccacggcgucaagggcugggccuucgacgacggcaacgacgucuggaugggccgcaccaucuccgagaagucccgccucggcuacgagaccuucaaggucaucgagggcugguccaacuccaaguccaagcuccagaucaaccgccaggucaucgucgaccgcggcaaccgcuccggcuacuccggcaucuucuccgucgagggcaaguccugcaucaaccgcugcuucuacgucgagcucauccgcggccgcaaggaggagaccgagguccucuggaccuccaacuccaucgucgucuucugcggcaccuccggcaccuacggcaccggcuccuggcccgacggcgccgacaucaaccucaugcccaucuga

SEQ ID NO: 117645 - RNA, 1410 nt, Artificial Sequence; identical to SEQ ID NO: 112102
  derived and/or modified CDS sequence (opt2) from neuraminidase__InfluenzaA__AEX36446

SEQ ID NO: 117646 - RNA, 1410 nt, Artificial Sequence; identical to SEQ ID NO: 112102
  derived and/or modified CDS sequence (opt2) from neuraminidase__InfluenzaA__AEX36457

SEQ ID NO: 117647 - RNA, 1410 nt, Artificial Sequence
  derived and/or modified CDS sequence (opt2) from neuraminidase__InfluenzaA__AEX36468
augaaccccaaccagaagaucaucaccaucggcuccgucucccucaccaucuccaccaucugcuucuucaugcagaucgccauccucaucaccaccgucacccuccacuucaagcaguacgaguucuccuccccccccaacaaccaggucaugcucugcgagcccaccaucaucgagcgcaacaucaccgagaucgucuaccucaccaacaccaccaucgagaaggagaucugccccaagcucgccgaguaccgcaacugguccaagccccagugcgacaucaccggcuucgcccccuucuccaaggacaacuccauccgccucuccgccggcggcgacaucugggucacccgcgagcccuacgucuccugcgaccccgacaagugcuaccaguucgcccucggccagggcaccacccucaacaacguccacuccaacgacaccguccacaaccgcacccccuaccgcacccuccucaugaacgagcucggcguccccuuccaccucggcaccaagcaggucugcaucgccugguccuccuccuccugccacgacggcaaggccuggcuccacgucugcgucaccggcgacgacaagaacgccaccgccuccuucaucuacaacggccgccucgucgacuccaucgucuccugguccaaggagauccuccgcacccaggaguccgagugcgucugcaucaacggcaccugcaccgucgucaugaccgacggcuccgccuccggcaaggccgacaccaagauccucuucaucgaggagggcaagaucguccacaccuccacccucuccggcaacgcccagcacgucgaggagugcuccugcuacccccgcuaccccggcguccgcugcgucugccgcgacaacuggaagggcuccaaccgccccaucgucgacaucaacaucaaggacuacuccaucgucucccgcuacgucugcuccggccucgucggcgacaccccccgcaagaacgacuccuccuccuccucccacugccucgaccccaacaacgaggagggcggccacggcgucaagggcugggccuucgacgacggcaacgacgucuggaugggccgcaccaucuccgagaagucccgcuccggcuacgagaccuucaaggucaucgagggcugguccaaccccaacuccaagcuccagaucaaccgccaggucaucgucgaccgcggcaaccgcuccggcuacuccggcaucuucuccgucgagggcaaguccugcaucaaccgcugcuucuacgucgagcucauccgcggccgcaaggaggagaccaagguccucuggaccuccaacuccaucgucgucuucugcggcaccuccggcaccuacggcaccggcuccuggcccgacggcgccgacaucaaccucaugcccaucuga

SEQ ID NO: 117648 - RNA, 1410 nt, Artificial Sequence
  derived and/or modified CDS sequence (opt2) from neuraminidase__InfluenzaA__AEX36479
augaaccccaaccagaagaucaucaccaucggcuccgucucccucaccaucuccaccaucugcuucuucaugcagaucgccauccucaucaccaccgucacccuccacuucaagcaguacgaguucuccuccccccccaacaaccaggucaugcucugcgagcccaccaucaucgagcgcaacaucaccgagaucgucuaccccaccaacaccaccaccgagaaggagaucugccccaagcucgccgaguaccgcaacugguccaagccccagugcgacaucaccggcuucgcccccuucuccaaggacaacuccauccgccucuccgccggcggcgacaucugggucacccgcgagcccuacgucuccugcgaccccgacaagugcuaccaguucgcccucggccagggcaccacccucaacaacguccacuccaacgacaccguccacgaccgcacccccuaccgcacccuccucaugaacgagcucggcguccccuuccaccucggcaccaagcaggucugcaucgccugguccuccuccuccugccacgacggcaaggccuggcuccacgucugcgucaccggcgacgacaagaacgccaccgccuccuucaucuacaacggccgccucgucgacuccaucgucuccugguccaaggagauccuccgcacccaggaguccgagugcgucugcaucaacggcaccugcaccgucgucaugaccgacggcuccgccuccggcaaggccgacaccaagauccucuucaucgaggagggcaagaucguccacaccuccacccucuccggcuccgcccagcacgucgaggagugcuccugcuacccccgcuaccccggcguccgcugcgucugccgcgacaacuggaagggcuccaaccgccccaucgucgacaucaacaucaaggacuacuccaucgucucccgcuacgucugcuccggccucgucggcgacaccccccgcaagaacgacuccuccuccuccucccacugccucgaccccaacaacgaggagggcggccacggcgucaagggcugggccuucgacgacggcaacgacgucuggaugggccgcaccaucuccgagaagcuccgcuccggcuacgagaccuucaaggucaucgagggcugguccaaccccaacuccaagcuccagaucaaccgccaggucaucgucgaccgcggcaaccgcuccggcuacuccggcaucuucuccgucgagggcaaguccugcaucaaccgcugcuucuacgucgagcucauccgcggccgcaaggaggagaccgagguccucuggaccuccaacuccaucgucgucuucugcggcaccuccggcaccuacggcaccggcuccuggcccgacggcgccgacaucaaccucaugcccaucuga

SEQ ID NO: 117649 - RNA, 1410 nt, Artificial Sequence
  derived and/or modified CDS sequence (opt2) from neuraminidase__InfluenzaA__AEX36490
augaaccccaaccagaagaucaucaccaucggcuccgucucccucaccaucuccaccaucugcuucuucaugcagaucgccauccucaucaccaccgucacccuccacuucaagcaguacgaguucuccuacccccccaacaaccaggucaugcucugcgagcccaccaucaucgagcgcaacaucaccgagaucgucuaccucaccaacaccaccaucgagaaggagaucugccccaagcucgccgaguaccgcaacugguccaagccccagugcgacaucaccggcuucgcccccuucuccaaggacaacuccauccgccucuccgccggcggcgacaucugggucacccgcgagcccuacgucuccugcgaccccgacaagugcuaccaguucgcccucggccagggcaccacccucaacaacguccacuccaacgacaccguccacgaccgcacccccuaccgcacccuccucaugaacgagcucggcguccccuuccaccucggcaccaagcaggucugcaucgccugguccuccuccuccugccacgacggcaaggccuggcuccacgucugcgucaccggcgacgacaagaacgccaccgccuccuucaucuacaacggccgccucgucgacuccaucgucuccugguccaaggagauccuccgcacccaggaguccgagugcgucugcaucaacggcaccugcaccgucgucaugaccgacggcuccgccuccggcaaggccgacaccaagauccucuucaucgaggagggcaagaucguccacaccuccacccucuccggcaacgcccagcacgucgaggagugcuccugcuacccccgcuaccccggcguccgcugcgucugccgcgacaacuggaagggcuccaaccgccccaucgucgacaucaacaucaaggacuacuccaucgucucccgcuacgucugcuccggccucgucggcgacaccccccgcaagaacgacuccuccuccuccucccacugccucgaccccaacaacgaggagggcggccacggcgucaagggcugggccuucgacgacggcaacgacgucuggaugggccgcaccaucuccgagaagucccgcuccggcuacgagaccuucaaggucaucgagggcugguccaaccccaacuccaagcuccagaucaaccgccaggucaucgucgaccgcggcaaccgcuccggcuacuccggcaucuucuccgucgagggcaaguccugcaucaaccgcugcuucuacgucgagcucauccgcggccgcaaggaggagaccaagguccucuggaccuccaacuccaucgucgucuucugcggcaccuccggcaccuacggcaccggcuccuggcccgacggcgccgacaucaaccucaugcccaucuga

SEQ ID NO: 117650 - RNA, 1410 nt, Artificial Sequence
  derived and/or modified CDS sequence (opt2) from neuraminidase__InfluenzaA__AEX36501
augaaccccaaccagaagaucaucaccaucggcuccgucucccucaccaucuccaccaucugcuucuucaugcagaucgccauccucaucaccaccgucacccuccacuucaagcaguacgaguucuccuccccccccaacaaccaggucaugcucugcgagcccgccaucaucgagcgcaacaucaccgagaucgucuaccucaccaacaccaccaucgagaaggagaagugccccaagcucgccgaguaccgcaacugguccaagccccagugcgacaucaccggcuucgcccccuucuccaaggacaacuccauccgccucuccgccggcggcgacaucugggucacccgcgagcccuacgucuccugcgaccccgacaagugcuaccaguucgcccucggccagggcaccacccucaacaacguccacuccaacgacaccguccacggccgcacccccuaccgcacccuccucaugaacgagcucggcguccccuuccaccucggcaccaagcaggucugcaucgccugguccuccuccuccugccacgacggcaaggccuggcuccacgucugcgucaccggcgacgacaagaacgccaccgccuccuucaucuacaacggccgccucgucgacuccaucgucuccugguccaaggagauccuccgcacccaggaguccgagugcgucugcaucaacggcaccugcaccgucgucaugaccgacggcuccgccuccggcaaggccgacaccaagauccucuucaucgaggagggcaagaucguccacaccuccacccucuccggcuccgcccagcacgucgaggagugcuccugcuacccccgcuaccccggcguccgcugcgucugccgcgacaacuggaagggcuccaaccgccccaucgucgacaucaacaucaaggacuacuccaucgucucccgcuacgucugcuccggccucgucggcgacaccccccgcaaguccgacuccuccuccuccucccacugccucgaccccaacaacgaggagggcggccacggcgucaagggcugggccuucgacgacggcaacgacgucuggaugggccgcaccaucuccgagaagucccgcuccggcuacgagaccuucaaggucaucgagggcugguccaaccccaacuccaagcuccagaucaaccgccaggucaucgucgaccgcggcaaccgcuccggcuacuccggcaucuucuccgucgagggcaaguccugcaucaaccgcugcuucuacgucgagcucauccgcggccgcaaggaggagaccgagguccucuggaccuccaacuccaucgucgucuucugcggcaccuccggcaccuacggcaccggcuccuggcccgacggcgccgacaucaaccucaugcccaucuga

SEQ ID NO: 117651 - RNA, 1410 nt, Artificial Sequence
  derived and/or modified CDS sequence (opt2) from neuraminidase__InfluenzaA__AEX36512
augaaccccaaccagaagaucaucaccaucggcuccgucucccucaccaucuccaccaucugcuucuucaugcagaucgccauccucaucaccaccgucacccuccacuucaagcaguacgaguucuccuccccccccaacaaccaggucaugcucugcgagcccgccaucaucgagcgcaacaucaccgagaucgucuaccucaccaacaccaccaucgagaaggagaucugccccaagcucgccgaguaccgcaacugguccaagccccagugcgacaucaccggcuucgcccccuucuccaaggacaacuccauccgccucuccgccggcggcgacaucugggucacccgcgagcccuacgucuccugcgaccccgacaagugcuaccaguucgcccucggccagggcaccacccucaacaacguccacuccaacgacaccguccacgaccgcacccccuaccgcacccuccucaugaacgagcucggcguccccuuccaccucggcaccaagcaggucugcaucgccugguccuccuccuccugccacgacggcaaggccuggcuccacgucugcgucaccggcgacgacaagaacgccaccgccuccuucaucuacaacggccgccucgucgacuccaucgucuccugguccaaggagauccuccgcacccaggaguccgagugcgucugcaucaacggcaccugcaccgucgucaugaccgacggcuccgccuccggcaaggccgacaccaagauccucuucaucgaggagggcaagaucguccacaccuccacccucuccggcuccgcccagcacgucgaggagugcuccugcuacccccgcuaccccggcguccgcugcgucugccgcgacaacuggaagggcuccaaccgccccaucgucgacaucaacaucaaggacuacuccaucgucucccgcuacgucugcuccggccucgucggcgacaccccccgcaagaacgacuccuccuccuccucccacugccucgaccccaacaacgaggagggcggccacggcgucaagggcugggccuucgacgacggcaacgacgucuggaugggccgcaccaucuccgagaagucccgcuccggcuacgagaccuucaaggucaucgagggcugguccaaccccaacuccaagcuccagaucaaccgccaggucaucgucgaccgcggcaaccgcuccggcuacuccggcaucuucuccgucgagggcaaguccugcaucaaccgcugcuucuacgucgagcucauccgcggccgcaaggaggagaccgagguccucuggaccuccaacuccaucgucgucuucugcggcaccuccggcaccuacggcaccggcuccuggcccgacggcgccgacaucaaccucaugcccaucuga

SEQ ID NO: 117652 - RNA, 1410 nt, Artificial Sequence
  derived and/or modified CDS sequence (opt2) from neuraminidase__InfluenzaA__AEX36523
augaaccccaaccagaagaucaucaccaucggcuccgucucccucaccaucuccaccaucugcuucuucaugcagaucgccauccucaucaccaccgucacccuccacuucaagcaguacgaguucaacuccccccccaacaaccaggucaugcucugcgagcccaccaucaucgagcgcaacaucaccgagaucgucuaccucaccaacaccaccaucgagaaggagaucugccccaagcucgccgaguaccgcaacugguccaagccccagugcgacaucaccggcuucgcccccuucuccaaggacaacuccauccgccucuccgccggcggcgacaucugggucacccgcgagcccuacgucuccugcgaccccgacaagugcuaccaguucgcccucggccagggcaccacccucaacaacguccacuccaacgacaccguccgcgaccgcacccccuaccgcacccuccucaugaacgagcucggcguccccuuccaccucggcaccaagcaggucugcaucgccugguccuccuccuccugccacgacggcaaggccuggcuccacgucugcaucaccggcgacgacaagaacgccaccgccuccuucaucuacaacggccgccucgucgacuccgucgucuccugguccaaggagauccuccgcacccaggaguccgagugcgucugcaucaacggcaccugcaccgucgucaugaccgacggcuccgccuccggcgaggccgacaccaagauccucuucaucgaggagggcaagaucguccacaccuccacccucuccggcuccgcccagcacgucgaggagugcuccugcuacccccgcuaccccggcguccgcugcgucugccgcgacaacuggaagggcuccaaccgccccaucgucgacaucaacaucaaggaccacuccaucgucuccuccuacgucugcuccggccucgucggcgacaccccccgcaagaacgacuccuccuccuccucccacugccucgaccccaacaacgaggagggcggccacggcgucaagggcugggccuucgacgacggcaacgacgucuggaugggccgcaccaucuccgagaagucccgccucggcuacgagaccuucaaggucaucgagggcugguccaaccccaaguccaagcuccagaucaaccgccaggucaucgucgaccgcggcaaccgcuccggcuacuccggcaucuucuccgucgagggcaaguccugcaucaaccgcugcuucuacgucgagcucauccgcggccgcaaggaggagaccgagguccucuggaccuccaacuccaucgucgucuucugcggcaccuccggcaccuacggcaccggcuccuggcccgacggcgccgacaucaaccucaugcccaucuga

SEQ ID NO: 117653 - RNA, 1410 nt, Artificial Sequence; identical to SEQ ID NO: 112635
  derived and/or modified CDS sequence (opt2) from neuraminidase__InfluenzaA__AEX36534

SEQ ID NO: 117654 - RNA, 1410 nt, Artificial Sequence
  derived and/or modified CDS sequence (opt2) from neuraminidase__InfluenzaA__AEX36545
augaaccccaaccagaagaucaucaccaucggcuccgucucccucaccaucuccaccaucugcuucuucaugcagaucgccauccucaucaccaccgucacccuccacuucaagcaguacgaguucaacuccccccccaacaaccaggucaugcucugcgagcccaccaucaucgagcgcaacaucaccgagaucgucuaccucaccaacaccaccaucgagaaggagaucugccccaagcucgccgaguaccgcaacugguccaagccccagugcgacaucaccggcuucgcccccuucuccaaggacaacuccauccgccucuccgccggcggcgacaucugggucacccgcgagcccuacgucuccugcgaccccgacaagugcuaccaguucgcccucggccagggcaccacccucaacaacguccacuccaacgacaccguccgcgaccgcacccccuaccgcacccuccucaugaacgagcucggcguccccuuccaccucggcaccaagcaggucugcaucgccugguccuccuccuccugccacgacggcaaggccuggcuccacgucugcaucaccggcgacgacaagaacgccaccgccuccuucaucuacaacggccgccucgucgacuccgucgucuccugguccaaggagauccuccgcacccaggaguccgagugcgucugcaucaacggcaccugcaccgucgucaugaccgacggcuccgcccucggcaaggccgacaccaagauccucuucaucgaggagggcaagaucguccacaccuccacccucuccggcuccgcccagcacgucgaggagugcuccugcuacccccgcuaccccggcguccgcugcgucugccgcgacaacuggaagggcuccaaccgccccaucgucgacaucaacaucaaggaccacuccaucgucuccuccuacgucugcuccggccucgucggcgacaccccccgcaagaacgacuccuccuccuccucccacugccucgaccccaacaacgaggagggcggccacggcgucaagggcugggccuucgacgacggcaacgacgucuggaugggccgcaccaucuccgagaagucccgccucggcuacgagaccuucaaggucaucgagggcugguccaaccccaaguccaagcuccagaucaaccgccaggucaucgucgaccgcggcaaccgcuccggcuacuccggcaucuucuccgucgagggcaaguccugcaucaaccgcugcuucuacgucgagcucauccgcggccgcaaggaggagaccgagguccucuggaccuccaacuccaucgucgucuucugcggcaccuccggcaccuacggcaccggcuccuggcccgacggcgccgacaucaaccucaugcccaucuga

SEQ ID NO: 117655 - RNA, 1410 nt, Artificial Sequence; identical to SEQ ID NO: 112548
  derived and/or modified CDS sequence (opt2) from neuraminidase__InfluenzaA__AEX36556

SEQ ID NO: 117656 - RNA, 1410 nt, Artificial Sequence; identical to SEQ ID NO: 112548
  derived and/or modified CDS sequence (opt2) from neuraminidase__InfluenzaA__AEX36567

SEQ ID NO: 117657 - RNA, 1410 nt, Artificial Sequence
  derived and/or modified CDS sequence (opt2) from neuraminidase__InfluenzaA__AEX36578
augaaccccaaccagaagaucaucaccaucggcuccgucucccucaccaucuccaccaucugcuucuucaugcagaucgccauccucaucaccaccgucacccuccacuucaagcaguacgaguucaacuccccccccaacaaccaggucaugcucugcgagcccaccaucaucgagcgcaacaucaccgagaucgucuaccucaccaacaccaccaucgagaaggagaucugccccaagcucgccgaguaccgcaacugguccaagccccagugcgacaucaccggcuucgcccccuucuccaaggacaacuccauccgccucuccgccggcggcgacaucugggucacccgcgagcccuacgucuccugcgaccccgacaagugcuaccaguucgcccucggccagggcaccacccucaacaacguccacuccaacgacaccguccgcgaccgcacccccuaccgcacccuccucaugaacgagcucggcguccccuuccaccucggcaccaagcaggucugcaucgccugguccuccuccuccugccacgacggcaaggccuggcuccacgucugcaucaccggcgacgacaagaacgccaccgccuccuucaucuacaacggccgccucgucgacuccgucgucuccugguccaaggagauccuccgcacccaggaguccgagugcgucugcaucaacggcaccugcaccgucgucaugaccgacggcuccgccuccggcaaggccgacaccaagauccucuucaucaaggagggcaagaucguccacaccuccacccucuccggcuccgcccagcacgucgaggagugcuccugcuacccccgcuaccccggcguccgcugcgucugccgcgacaacuggaagggcuccaaccgccccaucgucgacaucaacaucaaggaccacuccaucgucuccuccuacgucugcuccggccucgucggcgacaccccccgcaagaacgacuccuccuccuccucccacugccucgaccccaacaacgaggagggcggccacggcgucaagggcugggccuucgacgacggcaacgacgucuggaugggccgcaccaucuccgagaagucccgccucggcuacgagaccuucaaggucaucgagggcugguccaaccccaaguccaagcuccagaucaaccgccaggucaucgucgaccgcggcaaccgcuccggcuacuccggcaucuucuccgucgagggcaaguccugcaucaaccgcugcuucuacgucgagcucauccgcggccgcaaggaggagaccgagguccucuggaccuccaacuccaucgucgucuucugcggcaccuccggcaccuacggcaccggcuccuggcccgacggcgccgacaucaaccucaugcccaucuga

SEQ ID NO: 117658 - RNA, 1410 nt, Artificial Sequence; identical to SEQ ID NO: 117657
  derived and/or modified CDS sequence (opt2) from neuraminidase__InfluenzaA__AEX36589

SEQ ID NO: 117659 - RNA, 1410 nt, Artificial Sequence
  derived and/or modified CDS sequence (opt2) from neuraminidase__InfluenzaA__AEX36600
augaaccccaaccagaagaucaucaccaucggcuccgucucccucaccaucuccaccaucugcuucuucaugcagaucgccauccucaucaccaccgucacccuccacuucaagcaguacgaguucaacuccccccccaacaaccaggucaugcucugcgagcccaccaucaucgagcgcaacaucaccgagaucgucuaccucaccaacaccaccaucgagaaggagaucugccccaagcucgccgaguaccgcaacugguccaagccccagugcgacaucaccggcuucgcccccuucuccaaggacaacuccauccgccucuccgccggcggcgacaucugggucacccgcgagcccuacgucuccugcgaccccgacaagugcuaccaguucgcccucggccagggcaccacccucaacaacguccacuccaacgacaccguccgcgaccgcacccccuaccgcacccuccucaugaacgagcucggcguccccuuccaccucggcaccaagcaggucugcaucgccugguccuccuccuccugccacgacggcaaggccuggcuccacgucugcaucaccggcgacgacaagaacgccaccgccuccuucaucuacaacggccgccucgucgacuccgucgucuccugguccaaggagauccuccgcacccaggaguccgagugcgucugcaucaacggcaccugcaccgucgucaugaccgacggcuccgccuccggcaaggccgacaccaagauccucuucaucaaggagggcaagaucguccacaccuccacccucuccggcuccgcccagcacgucgaggagugcuccugcuacccccgcuaccccggcguccgcugcgucugccgcgacaacuggaagggcuccaaccgccccaucgucgacaucaacaucaaggaccacuccaucgucuccuccuacgucugcuccggccucgucggcgacaccccccgcaagaacgacuccuccuccuccucccacugccucgaccccaacaacgaggagggcggccacggcgucaagggcugggccuucgacgacggcaacaacgucuggaugggccgcaccaucuccgagaagucccgccucggcuacgagaccuucaaggucaucgagggcugguccaaccccaaguccaagcuccagaucaaccgccaggucaucgucgaccgcggcaaccgcuccggcuacuccggcaucuucuccgucgagggcaaguccugcaucaaccgcugcuucuacgucgagcucauccgcggccgcaaggaggagaccgagguccucuggaccuccaacuccaucgucgucuucugcggcaccuccggcaccuacggcaccggcuccuggcccgacggcgccgacaucaaccucaugcccaucuga

SEQ ID NO: 117660 - RNA, 1410 nt, Artificial Sequence; identical to SEQ ID NO: 110750
  derived and/or modified CDS sequence (opt2) from neuraminidase__InfluenzaA__AEX36622

SEQ ID NO: 117661 - RNA, 1410 nt, Artificial Sequence
  derived and/or modified CDS sequence (opt2) from neuraminidase__InfluenzaA__AEX63619
augaaccccaaccagaagaucaucaccaucggcuccaucugcaugaccaucggcaucgccucccucauccuccagaucggcaacaucaucuccaucuggaucucccacuccauccagaccgagaaccagaaccagcccgagaucugcaaccagaacgucaucaccuacgagaacaacaccugggucaaccagaccuacgucaacgucuccaacaccaacuucgucgccgagcaggccgucgccuccgucaagcucgccggcaacuccucccucugccccgucuccggcugggccaucuacuccaaggacaacuccguccgcaucggcuccaagggcgacgucuucgucauccgcgagcccuucaucuccugcucccacuccgagugccgcaccuucuuccucacccagggcgcccuccucaacgacaagcacuccaacggcaccaucaaggaccgcucccccuaccgcacccucauguccugccccaucggcgagguccccucccccuacaacucccgcuucgaguccgucgccugguccgccuccgccugccacgacggcaccuccuggcucaccaucggcaucuccggccccgacaacggcgccgucgccguccucaaguacaacggcaucaucaccgacaccaucaaguccuggcgcaagaacauccuccgcacccaggaguccgagugcgccugcgucaacggcuccugcuucaccgucaugaccgacggccccuccaacggccaggccuccuacaaggucuucaagaucgagcgcggcaaggucgucaaguccgucgagcucaacgcccccaacuaccacuacgaggagugcuccugcuaccccgaguccuccgagaucaccugcgucugccgcgacaacuggcacggcuccaaccgccccugggucuccuucaaccagaaccucgaguaccagaugggcuacaucugcuccggcaucuucggcgacaacccccgccccaacgacaagaccggcuccugcggccccgucuucuccaacggcgccaacggcgucaagggcuucuccuucaaguacggcaacggcgucuggaucggccgcaccaaguccaccuccucccgcaugggcuucgagaugaucugggaccccgacggcuggaccaagaccgacgacaaguucuccgucaagcaggacaucaucggcaucaccgacugguccggcuacuccggcuccuucguccagcaccccgagcucaccggccucgacugcaugcgccccugcuucugggucgagcucauccgcggccgccccaaggagaacaccaucuggaccuccggcuccuccaucuccuucugcggcgucaacuccgacaccgucggcugguccuggcccgacggcgccgagcuccccuucaccaucgacaaguga

SEQ ID NO: 117662 - RNA, 1365 nt, Artificial Sequence; identical to SEQ ID NO: 111755
  derived and/or modified CDS sequence (opt2) from neuraminidase__InfluenzaA__AEX92876

SEQ ID NO: 117663 - RNA, 1365 nt, Artificial Sequence; identical to SEQ ID NO: 111755
  derived and/or modified CDS sequence (opt2) from neuraminidase__InfluenzaA__AEX92887

SEQ ID NO: 117664 - RNA, 1365 nt, Artificial Sequence; identical to SEQ ID NO: 111755
  derived and/or modified CDS sequence (opt2) from neuraminidase__InfluenzaA__AEX92904

SEQ ID NO: 117665 - RNA, 1365 nt, Artificial Sequence; identical to SEQ ID NO: 111755
  derived and/or modified CDS sequence (opt2) from neuraminidase__InfluenzaA__AEX96924

SEQ ID NO: 117666 - RNA, 1410 nt, Artificial Sequence; identical to SEQ ID NO: 114505
  derived and/or modified CDS sequence (opt2) from neuraminidase__InfluenzaA__AEY69091

SEQ ID NO: 117667 - RNA, 1410 nt, Artificial Sequence; identical to SEQ ID NO: 112635
  derived and/or modified CDS sequence (opt2) from neuraminidase__InfluenzaA__AEY69101

SEQ ID NO: 117668 - RNA, 1410 nt, Artificial Sequence; identical to SEQ ID NO: 112635
  derived and/or modified CDS sequence (opt2) from neuraminidase__InfluenzaA__AEY69112

SEQ ID NO: 117669 - RNA, 1410 nt, Artificial Sequence
  derived and/or modified CDS sequence (opt2) from neuraminidase__InfluenzaA__AEY69145
augaacaccaaccagaagaucaucaccaucggcuccgucucccucaccaucuccaccaucugcuucuucaugcagaucgccauccucaucaccaccgucacccuccacuucaagcaguacgaguucaacuccccccccaacaaccaggucaugcucugcgagcccaccaucaucgagcgcaacaucaccgagaucgucuaccucaccaacaccaccaucgagaaggagaucugccccaagcucgccgaguaccgcaacugguccaagccccagugcgacaucaccggcuucgcccccuucuccaaggacaacuccauccgccucuccgccggcggcgacaucugggucacccgcgagcccuacgucuccugcgaccccgacaagugcuaccaguucgcccucggccagggcaccaccaucaacaacguccacuccaacaacaccguccgcgaccgcacccccuaccgcacccuccucaugaacgagcucggcguccccuuccaccucggcaccaagcaggucugcaucgccugguccuccuccuccugccacgacggcaaggccuggcuccacgucugcaucaccggcgacgacaagaacgccaccgccuccuucaucuacaacggccgccucgucgacuccgucgucuccugguccaaggagauccuccgcacccaggaguccgagugcgucugcaucaacggcaccugcaccgucgucaugaccgacggcuccgccuccggcaaggccgacaccaagauccucuucaucgaggagggcaagaucguccacaccuccacccucuccggcuccgcccagcacgucgaggagugcuccugcuacccccgcuaccccggcguccgcugcgucugccgcgacaacuggaagggcuccaaccgccccaucgucgacaucaacaugaaggaccacuccaucgucuccuccuacgucugcuccggccucgucggcgacaccccccgcaagaacgacuccuccuccuccucccacugccucgaccccaacaacgaggagggcggccacggcgucaagggcugggccuucgacgacggcaacgacgucuggaugggccgcaccaucuccgagaagucccgccucggcuacgagaccuucaaggucaucgagggcugguccaaccccaaguccaagcuccagaucaaccgccaggucaucgucgaccgcggcaaccgcuccggcuacuccggcaucuucuccgucgagggcaaguccugcaucaaccgcugcuucuacgucgagcucauccgcggccgcaaggaggagaccgagguccucuggaccuccaacuccgucgucgucuucugcggcaccuccggcaccuacggcaccggcuccuggcccgacggcgccgacaucaaccucaugcccaucuga

SEQ ID NO: 117670 - RNA, 1410 nt, Artificial Sequence; identical to SEQ ID NO: 112635
  derived and/or modified CDS sequence (opt2) from neuraminidase__InfluenzaA__AEY69156

SEQ ID NO: 117671 - RNA, 1410 nt, Artificial Sequence
  derived and/or modified CDS sequence (opt2) from neuraminidase__InfluenzaA__AEY69167
augaaccccaaccagaagaucaucaccaucggcuccgucucccucaccaucuccaccaucugcuucuucaugcagaucgccauccucaucaccaccgucacccuccacuucaagcaguacgaguucaacuccccccccaacaaccaggucaugcucugcgagcccaccaucaucgagcgcaacaucaccgagaucgucuaccucaccaacaccaccaucgagaaggagaucugccccaagcucgccgaguaccgcaacugguccaagccccagugcgacaucaccggcuucgcccccuucuccaaggacaacuccauccgccucuccgccggcggcgacaucugggucacccgcgagcccuacgucuccugcgaccccgacaagugcuaccaguucgcccucggccagggcaccacccucaacaacguccacuccaacaacaccguccgcgaccgcacccccuaccgcacccuccucaugaacgagcucggcguccccuuccaccucggcaccaagcaggucugcaucgccugguccuccuccuccugccacgacggcaaggccuggcuccacgucugcaucaccggcgacgacaagaacgccaccgccuccuucaucuacaacggccgccucgucgacuccgucgucuccugguccaaggagauccuccgcacccaggaguccgagugcgucugcaucaacggcaccugcaccgucgucaugaccgacggcuccgccuccggcaaggccgacaccaagauccucuucaucgaggagggcaagaucguccacaccuccacccucuccggcuccgcccagcacgucgaggagugcuccugcuacccccgcuaccccggcguccgcugcgucugccgcgacaacuggaagggcuccaaccgccccaucgucgacaucaacaucaaggaccacuccaucgucuccuccuacgucugcuccggccucgucggcgacaccccccgcaagaacgacuccuccuccuccucccacugccucgaccccaacaacgaggagggcggccacggcgucaagggcugggccuucgacgacggcaacgacgucuggaugggccgcaccaucuccgagaagucccgccucggcuacgagaccuucaaggucaucgagggcugguccaaccccaaguccaagcuccagaucaaccgccaggucaucgucgaccgcggcaaccgcuccggcuacuccggcaucuucuccgucgagggcaaguccugcaucaaccgcugcuucuacgucgagcucauccgcggccgcaaggaggagaccgagguccucuggaccuccaacuccaucgucgucuucugcggcaccuccggcaccuacggcaccggcuccuggcccgacggcgccgacaucaaccucaugcccgucuga

SEQ ID NO: 117672 - RNA, 1410 nt, Artificial Sequence; identical to SEQ ID NO: 117671
  derived and/or modified CDS sequence (opt2) from neuraminidase__InfluenzaA__AEY69178

SEQ ID NO: 117673 - RNA, 1410 nt, Artificial Sequence; identical to SEQ ID NO: 117671
  derived and/or modified CDS sequence (opt2) from neuraminidase__InfluenzaA__AEY69189

SEQ ID NO: 117674 - RNA, 1410 nt, Artificial Sequence
  derived and/or modified CDS sequence (opt2) from neuraminidase__InfluenzaA__AEY69211
augaaccccaaccagaagaucaucaccaucggcuccgucucccucaccaucuccaccaucugcuucuucaugcagaucgccauccucaucaccaccgucacccuccacuucaagcaguacaaguucaacuccccccccaacaaccaggucaugcucugcgagcccaccaucaucgagcgcaacaucaccgagaucgucuaccucaccaacaccaccaucgagaaggagaucugccccaagcucgccgaguaccgcaacugguccaagccccagugcgacaucaccggcuucgcccccuucuccaaggacaacuccauccgccucuccgccggcggcgacaucugggucacccgcgagcccuacgucuccugcgaccccgacaagugcuaccaguucgcccucggccagggcaccacccucaacaacguccacuccaacaacaccguccgcgaccgcacccccuaccgcacccuccucaugaacgagcucggcguccccuuccaccucggcaccaagcaggucugcaucgccugguccuccuccuccugccacgacggcaaggccuggcuccacgucugcaucaccggcgacgacaagaacgccaccgccuccuucaucuacaacggccgccucgucgacuccgucgucuccugguccaaggagauccuccgcacccaggaguccgagugcgucugcaucaacggcaccugcaccgucgucaugaccgacggcuccgccuccggcaaggccgacaccaagauccucuucaucgaggagggcaagaucguccacaccuccacccucuccggcuccgcccagcacgucgaggagugcuccugcuacccccgcuaccccggcguccgcugcgucugccgcgacaacuggaagggcuccaaccgccccaucgucgacaucaacaucaaggaccacuccaucgucuccuccuacgucugcuccggccucgucggcgacaccccccgcaagaacgacuccuccuccuccucccacugccucgaccccaacaacgaggagggcggccacggcgucaagggcugggccuucgacgacggcaacgacgucuggaugggccgcaccaucuccgagaagucccgccucggcuacgagaccuucaaggucaucgagggcugguccaaccccaaguccaagcuccagaucaaccgccaggucaucgucgaccgcggcaaccgcuccggcuacuccggcaucuucuccgucgagggcaaguccugcaucaaccgcugcuucuacgucgagcucauccgcggccgcaaggaggagaccgagguccucuggaccuccaacuccaucgucgucuucugcggcaccuccggcaccuacggcaccggcuccuggcccgacggcgccgacaucaaccucaugcccgucuga

SEQ ID NO: 117675 - RNA, 1410 nt, Artificial Sequence; identical to SEQ ID NO: 117671
  derived and/or modified CDS sequence (opt2) from neuraminidase__InfluenzaA__AEY69233

SEQ ID NO: 117676 - RNA, 1410 nt, Artificial Sequence; identical to SEQ ID NO: 117671
  derived and/or modified CDS sequence (opt2) from neuraminidase__InfluenzaA__AEY69272

SEQ ID NO: 117677 - RNA, 1410 nt, Artificial Sequence; identical to SEQ ID NO: 117671
  derived and/or modified CDS sequence (opt2) from neuraminidase__InfluenzaA__AEY69283

SEQ ID NO: 117678 - RNA, 1410 nt, Artificial Sequence
  derived and/or modified CDS sequence (opt2) from neuraminidase__InfluenzaA__AEY69294
augaaccccaaccagaagaucaucaccaucggcuccgucucccucaccaucuccaccaucugcuucuucaugcagaccgccauccucaucaccaccgucacccuccacuucaagcagugcgaguucaacuccccccccaacaaccaggucaugcucugcgagcccaccaucaucgagcgcaacaucaccgagaucgucuaccucaccaacaccaccaucgagaaggagaucugccccaagcucgccgaguaccgcaacugguccaagccccagugcgacaucaccggcuucgcccccuucuccaaggacaacuccauccgccucuccgccggcggcgacaucugggucacccgcgagcccuacgucuccugcgaccccgacaagugcuaccaguucgcccucggccagggcaccacccucaacaacguccacuccaacaacaccguccgcgaccgcacccccuaccgcacccuccucaugaacgagcucggcguccccuuccaccucggcaccaagcaggucugcaucgccugguccuccuccuccugccacgacggcaaggccuggcuccacgucugcaucaccggcgacgacaagaacgccaccgccuccuucaucuacaacggccgccucgucgacuccgucgucuccugguccaaggagauccuccgcacccaggaguccgagugcgucugcaucaacggcaccugcaccgucgucaugaccgacggcuccgccuccggcaaggccgacaccaagauccucuucaucgaggagggcaagaucguccacaccuccacccucuccggcuccgcccagcacgucgaggagugcuccugcuacccccgcuaccccggcguccgcugcgucugccgcgacaacuggaagggcuccaaccgccccaucgucgacaucaacaucaaggaccacuccaucgucuccuccuacgucugcuccggccucgucggcgacaccccccgcaagaacgacuccuccuccuccucccacugccucgaccccaacaacgaggagggcggcaacggcgucaagggcugggccuucgacgacggcaacgacgucuggaugggccgcaccaucuccgagaagucccgccucggcuacgagaccuucaaggucaucgagggcugguccaaccccaaguccaagcuccagaucaaccgccaggucaucgucgaccgcggcaaccgcuccggcuacuccggcaucuucuccgucgagggcaaguccugcaucaaccgcugcuucuacgucgagcucauccgcggccgcaaggaggagaccgagguccucuggaccuccaacuccaucgucgucuucugcggcaccuccggcaccuacggcaccggcuccuggcccgacggcgccgacaucaaccucaugcccaucuga

SEQ ID NO: 117679 - RNA, 1410 nt, Artificial Sequence; identical to SEQ ID NO: 117678
  derived and/or modified CDS sequence (opt2) from neuraminidase__InfluenzaA__AEY69305

SEQ ID NO: 117680 - RNA, 1410 nt, Artificial Sequence; identical to SEQ ID NO: 117678
  derived and/or modified CDS sequence (opt2) from neuraminidase__InfluenzaA__AEY69316

SEQ ID NO: 117681 - RNA, 1410 nt, Artificial Sequence; identical to SEQ ID NO: 117678
  derived and/or modified CDS sequence (opt2) from neuraminidase__InfluenzaA__AEY69788

SEQ ID NO: 117682 - RNA, 1410 nt, Artificial Sequence; identical to SEQ ID NO: 112635
  derived and/or modified CDS sequence (opt2) from neuraminidase__InfluenzaA__AEY69799

SEQ ID NO: 117683 - RNA, 1410 nt, Artificial Sequence; identical to SEQ ID NO: 112635
  derived and/or modified CDS sequence (opt2) from neuraminidase__InfluenzaA__AEY69810

SEQ ID NO: 117684 - RNA, 1410 nt, Artificial Sequence; identical to SEQ ID NO: 117671
  derived and/or modified CDS sequence (opt2) from neuraminidase__InfluenzaA__AEY69832

SEQ ID NO: 117685 - RNA, 1410 nt, Artificial Sequence
  derived and/or modified CDS sequence (opt2) from neuraminidase__InfluenzaA__AEY69843
augaaccccaaccagaagaucaucaccaucggcuccgucucccucaccaucuccaccaucugcuucuucaugcagaucgccauccucaucaccaccgucacccuccacuucaagcaguacgaguucaacuccccccccaacaaccaggucaugcucugcgagcccaccaucaucgagcgcaacaucaccgagaucgucuaccucaccaacaccaccaucgagaaggagaucugccccaagcucgccgaguaccgcaacugguccaagccccagugcgacaucaccggcuucgcccccuucuccaaggacaacuccauccgccucuccgccggcggcgacaucugggucacccgcgagcccuacgucuccugcgaccccgacaagugcuaccaguucgcccucggccagggcaccacccucaacaacguccacuccaacaacaccguccgcgaccgcacccccuaccgcacccuccucaugaacgagcucggcguccccuuccaccucggcaccaagcaggucugcaucgccugguccuccuccuccugccacgacggcaaggccuggcuccacgucugcaucgccggcgacgacaagaacgccaccgccuccuucaucuacaacggccgccucgucgacuccgucgucuccugguccaaggagauccuccgcacccaggaguccgagugcgucugcaucaacggcaccugcaccgucgucaugaccgacggcuccgccuccggcaaggccgacaccaagauccucuucaucgaggagggcaagaucguccacaccuccacccucuccggcuccgcccagcacgucgaggagugcuccugcuacccccgcuaccccggcguccgcugcgucugccgcgacaacuggaagggcuccaaccgccccaucgucgacaucaacaucaaggaccacuccaucgucuccuccuacgucugcuccggccucgucggcgacaccccccgcaagaacgacuccuccuccuccucccacugccucgaccccaacaacgaggagggcggccacggcgucaagggcugggccuucgacgacggcaacgacgucuggaugggccgcaccaucuccgagaagucccgccucggcuacgagaccuucaaggucaucgagggcugguccaaccccaaguccaagcuccagaucaaccgccaggucaucgucgaccgcggcaaccgcuccggcuacuccggcaucuucuccgucgagggcaaguccugcaucaaccgcugcuucuacgucgagcucauccgcggccgcaaggaggagaccgagguccucuggaccuccaacuccaucgucgucuucugcggcaccuccggcaccuacggcaccggcuccuggcccgacggcgccgacaucaaccucaugcccgucuga

SEQ ID NO: 117686 - RNA, 1410 nt, Artificial Sequence; identical to SEQ ID NO: 117671
  derived and/or modified CDS sequence (opt2) from neuraminidase__InfluenzaA__AEY69854

SEQ ID NO: 117687 - RNA, 1410 nt, Artificial Sequence; identical to SEQ ID NO: 117671
  derived and/or modified CDS sequence (opt2) from neuraminidase__InfluenzaA__AEY69876

SEQ ID NO: 117688 - RNA, 1410 nt, Artificial Sequence; identical to SEQ ID NO: 117671
  derived and/or modified CDS sequence (opt2) from neuraminidase__InfluenzaA__AEY69887

SEQ ID NO: 117689 - RNA, 1410 nt, Artificial Sequence; identical to SEQ ID NO: 117671
  derived and/or modified CDS sequence (opt2) from neuraminidase__InfluenzaA__AEY69898

SEQ ID NO: 117690 - RNA, 1410 nt, Artificial Sequence; identical to SEQ ID NO: 112635
  derived and/or modified CDS sequence (opt2) from neuraminidase__InfluenzaA__AEY69909

SEQ ID NO: 117691 - RNA, 1410 nt, Artificial Sequence
  derived and/or modified CDS sequence (opt2) from neuraminidase__InfluenzaA__AEY69942
augaaccccaaccagaagaucaucaccaucggcuccgucucccucaccaucuccaccaucugcuucuucaugcagaucgccauccucaucaccaccgucacccuccacuucaagcaguacgaguucaacuccccccccaacaaccaggucaugcucugcgagcccaccaucaucgagcgcaacaucaccgagaucgucuaccucaccaacaccaccaucgagaaggagaucugccccaagcucgccgaguaccgcaacugguccaagccccagugcgacaucaccggcuucgcccccuucuccaaggacaacuccauccgccucuccgacggcggcgacaucugggucacccgcgagcccuacgucuccugcgaccccgacaagugcuaccaguucgcccucggccagggcaccacccucaacaacauccacuccaacaacaccguccgcgaccgcacccccuaccgcacccuccucaugaacgagcucggcguccccuuccaccucggcaccaagcaggucugcaucgccugguccuccuccuccugccacgacggcaaggccuggcuccacgucugcaucaccggcgacgacaagaacgccaccgccuccuucaucuacaacggccgccucgucgacuccgucgucuccugguccaaggagauccuccgcacccaggaguccgagugcgucugcaucaacggcaccugcaccgucgucaugaccgacggcuccgccuccggcaaggccgacaccaagauccucuucaucgaggagggcaagaucguccacaccuccacccucuccggcuccgcccagcacgucgaggagugcuccugcuacccccgcuaccccggcguccgcugcgucugccgcgacaacuggaagggcuccaaccgccccaucgucgacaucaacaucaaggaccacuccaucgucuccuccuacgucugcuccggccucgucggcgacaccccccgcaagaacgacuccuccuccuccucccacugccucgaccccaacaacgaggagggcggccacggcgucaagggcugggccuucgacgacggcaacgacgucuggaugggccgcaccaucuccgagaagucccgccucggcuacgagaccuucaaggucaucgagggcugguccaaccccaaguccaagcuccagaucaaccgccaggucaucgucgaccgcggcaaccgcuccggcuacuccggcaucuucuccgucgagggcaaguccugcaucaaccgcugcuucuacgucgagcucauccgcggccgcaaggaggagaccgagguccucuggaccuccaacuccaucgucgucuucugcggcaccuccggcaccuacggcaccggcuccuggcccgacggcgccgacaucaaccucaugcccgucuga

SEQ ID NO: 117692 - RNA, 1410 nt, Artificial Sequence; identical to SEQ ID NO: 117691
  derived and/or modified CDS sequence (opt2) from neuraminidase__InfluenzaA__AEY69953

SEQ ID NO: 117693 - RNA, 1410 nt, Artificial Sequence; identical to SEQ ID NO: 117691
  derived and/or modified CDS sequence (opt2) from neuraminidase__InfluenzaA__AEY69964

SEQ ID NO: 117694 - RNA, 1410 nt, Artificial Sequence; identical to SEQ ID NO: 117671
  derived and/or modified CDS sequence (opt2) from neuraminidase__InfluenzaA__AEY69975

SEQ ID NO: 117695 - RNA, 1410 nt, Artificial Sequence; identical to SEQ ID NO: 117671
  derived and/or modified CDS sequence (opt2) from neuraminidase__InfluenzaA__AEY69986

SEQ ID NO: 117696 - RNA, 1410 nt, Artificial Sequence; identical to SEQ ID NO: 117671
  derived and/or modified CDS sequence (opt2) from neuraminidase__InfluenzaA__AEY69997

SEQ ID NO: 117697 - RNA, 1410 nt, Artificial Sequence; identical to SEQ ID NO: 117671
  derived and/or modified CDS sequence (opt2) from neuraminidase__InfluenzaA__AEY70008

SEQ ID NO: 117698 - RNA, 1410 nt, Artificial Sequence; identical to SEQ ID NO: 117671
  derived and/or modified CDS sequence (opt2) from neuraminidase__InfluenzaA__AEY70019

SEQ ID NO: 117699 - RNA, 1410 nt, Artificial Sequence; identical to SEQ ID NO: 117671
  derived and/or modified CDS sequence (opt2) from neuraminidase__InfluenzaA__AEY70259

SEQ ID NO: 117700 - RNA, 1410 nt, Artificial Sequence; identical to SEQ ID NO: 117671
  derived and/or modified CDS sequence (opt2) from neuraminidase__InfluenzaA__AEY70270

SEQ ID NO: 117701 - RNA, 1410 nt, Artificial Sequence; identical to SEQ ID NO: 117671
  derived and/or modified CDS sequence (opt2) from neuraminidase__InfluenzaA__AEY70281

SEQ ID NO: 117702 - RNA, 1410 nt, Artificial Sequence; identical to SEQ ID NO: 112635
  derived and/or modified CDS sequence (opt2) from neuraminidase__InfluenzaA__AEY70303

SEQ ID NO: 117703 - RNA, 1410 nt, Artificial Sequence; identical to SEQ ID NO: 112635
  derived and/or modified CDS sequence (opt2) from neuraminidase__InfluenzaA__AEY70314

SEQ ID NO: 117704 - RNA, 1410 nt, Artificial Sequence
  derived and/or modified CDS sequence (opt2) from neuraminidase__InfluenzaA__AEY70325
augaaccccaaccagaagaucaucaccaucggcuccgucucccucaccaucuccaccaucugcuucuucaugcagaucgccauccucaugaccaccgucacccuccacuucaagcaguacgaguucaaccccccccccaacaaccaggucaugcucugcgagcccaccaucaucgagcgcaacaucaccgagaucgucuaccucaccaacaccaccaucgagaaggagaucugccccaagcucgccgaguaccgcaacugguccaagccccagugcgacaucaccggcuucgcccccuucuccaaggacaacuccauccgccucuccgccggcggcgacaucugggucacccgcgagcccuacgucuccugcgaccccgacaagugcuaccaguucgcccucggccagggcaccacccucaacaacguccacuccaacaacaccguccgcgaccgcacccccuaccgcacccuccucaugaacgagcucggcguccccuuccaccucggcaccaagcaggucugcaucgccugguccuccuccuccugccacgacggcaaggccuggcuccacgucugcaucaccggcgacgacaagaacgccaccgccuccuucaucuacaacggccgccucgucgacuccgucgucuccugguccaaggagauccuccgcacccaggaguccgagugcgucugcaucaacggcaccugcaccgucgucaugaccgacggcuccgccuccggcaaggccgacaccaagauccucuucaucgaggagggcaagaucguccacaccuccacccucuccggcuccgcccagcacgucgaggagugcuccugcuacccccgcuaccccggcguccgcugcgucugccgcgacaacuggaagggcuccaaccgccccaucgucgacaucaacaucaaggaccacuccaucgucuccuccuacgucugcuccggccucgucggcgacaccccccgcaagaacgacuccuccuccuccucccacugccucgaccccaacaacgaggagggcggccacggcgucaagggcugggccuucgacgacggcaacgacgucuggaugggccgcaccaucuccgagaagucccgccucggcuacgagaccuucaaggucaucgagggcugguccaaccccaaguccaagcuccagaucaaccgccaggucaucgucgaccgcggcaaccgcuccggcuacuccggcaucuucuccgucgagggcaaguccugcaucaaccgcugcuucuacgucgagcucauccgcggccgcaaggaggagaccgagguccucuggaccuccaacuccaucgucgucuucugcggcaccuccggcaccuacggcaccggcuccuggcccgacggcgccgacaucaaccucaugcccgucuga

SEQ ID NO: 117705 - RNA, 1410 nt, Artificial Sequence
  derived and/or modified CDS sequence (opt2) from neuraminidase__InfluenzaA__AEY70336
augaaccccaaccagaagaucaucaccaucggcuccgucucccucaccaucuccaccaucugcuucuucaugcagaucgccauccucaucaccaccgucacccuccacuucaagcaguacgaguucaacuccccccccaacaaccaggucaugcucugcgagcccaccaucaucgagcgcaacaucaccgagaucgucuaccucaccaacaccaccaucgagaaggagaucugccccaagcucgccgaguaccgcaacugguccaagccccagugcgacaucaccggcuucgcccccuucuccaaggacaacuccauccgccucuccgccggcggcgacaucugggucacccgcgagcccuacgucuccugcgaccccgacaagugcuaccaguucgcccucggccagggcaccacccucaacaacguccacuccaacaacaccguccgcgaccgcacccccuaccgcacccuccucaugaacgagcucggcguccccuuccaccucggcaccaagcaggucugcaucgccugguccuccuccuccugccacgacggcaaggccuggcuccacgucugcaucaccggcgacgacaagaacgccaccgccuccuucaucuacaacggccgccucgucgacuccgucgucuccugguccaaggagauccuccgcacccaggaguccgagugcgucugcaucaacggcaccugcaccgucgucaugaccgacggcuccgccuccggcaaggccgacaccaagauccucuucaucgaggagggcaagaucguccacaccuccacccucuccggcuccgcccagcacgucgaggagugcuccugcuacccccgcuaccccggcguccgcugcaucugccgcgacaacuggaagggcuccaaccgccccaucgucgacaucaacaucaaggaccacuccaucgucuccuccuacgucugcuccggccucgucggcgacaccccccgcaagaacgacuccuccuccuccucccacugccucgaccccaacaacgaggagggcggccacggcgucaagggcugggccuucgacgacggcaacgacgucuggaugggccgcaccaucuccgagaagucccgccucggcuacgagaccuucaaggucaucgagggcugguccaaccccaaguccaagcuccagaucaaccgccaggucaucgucgaccgcggcaaccgcuccggcuacuccggcaucuucuccgucgaggacaaguccugcaucaaccgcugcuucuacgucgagcucauccgcggccgcaaggaggagaccgagguccucuggaccuccaacuccaucgucgucuucugcggcaccuccggcaccuacggcaccggcuccuggcccgacggcgccgacaucaaccucaugcccgucuga

SEQ ID NO: 117706 - RNA, 1410 nt, Artificial Sequence; identical to SEQ ID NO: 112774
  derived and/or modified CDS sequence (opt2) from neuraminidase__InfluenzaA__AEY70358

SEQ ID NO: 117707 - RNA, 1410 nt, Artificial Sequence; identical to SEQ ID NO: 112635
  derived and/or modified CDS sequence (opt2) from neuraminidase__InfluenzaA__AEY70379

SEQ ID NO: 117708 - RNA, 1410 nt, Artificial Sequence; identical to SEQ ID NO: 114397
  derived and/or modified CDS sequence (opt2) from neuraminidase__InfluenzaA__AFB70139

SEQ ID NO: 117709 - RNA, 1410 nt, Artificial Sequence; identical to SEQ ID NO: 112774
  derived and/or modified CDS sequence (opt2) from neuraminidase__InfluenzaA__AFB70141

SEQ ID NO: 117710 - RNA, 1410 nt, Artificial Sequence; identical to SEQ ID NO: 114397
  derived and/or modified CDS sequence (opt2) from neuraminidase__InfluenzaA__AFB70147

SEQ ID NO: 117711 - RNA, 1410 nt, Artificial Sequence; identical to SEQ ID NO: 112774
  derived and/or modified CDS sequence (opt2) from neuraminidase__InfluenzaA__AFB70153

SEQ ID NO: 117712 - RNA, 1410 nt, Artificial Sequence; identical to SEQ ID NO: 112774
  derived and/or modified CDS sequence (opt2) from neuraminidase__InfluenzaA__AFB70155

SEQ ID NO: 117713 - RNA, 1410 nt, Artificial Sequence; identical to SEQ ID NO: 113744
  derived and/or modified CDS sequence (opt2) from neuraminidase__InfluenzaA__AFB70157

SEQ ID NO: 117714 - RNA, 1410 nt, Artificial Sequence; identical to SEQ ID NO: 112774
  derived and/or modified CDS sequence (opt2) from neuraminidase__InfluenzaA__AFB70159

SEQ ID NO: 117715 - RNA, 1410 nt, Artificial Sequence
  derived and/or modified CDS sequence (opt2) from neuraminidase__InfluenzaA__AFB70161
augaaccccaaccagaagaucaucaccaucggcuccgucugcaugaccaucggcauggccaaccucauccuccagaucggcaacaucaucuccaucuggaucucccacuccauccagcucggcaaccagaaccagaucgagaccugcaaccaguccgucaucaccuacgagaacaacaccugggucaaccagaccuacgucaacaucuccaacaccaacuucgccgccggccaguccgucgucuccgucaagcucgccggcaacuccucccucugccccgucuccggcugggccaucuacuccaaggacaacuccauccgcaucggcuccaagggcgacgucuucgucauccgcgagcccuucaucuccugcuccccccucgagugccgcaccuucuuccucacccagggcgcccuccucaacgacaagcacuccaacggcaccaucaaggaccgcucccccuaccgcacccucauguccugccccaucggcgagguccccucccccuacaacucccgcuucgaguccgucgccugguccgccuccgccugccacgacggcaucaacuggcucaccaucggcaucuccggccccgacaacggcgccgucgccguccucaaguacaacggcaucaucaccgacaccaucaaguccuggcgcaacaacauccuccgcacccaggaguccgagugcgccugcgucaacggcuccugcuucaccgucaugaccgacggccccuccgacggccaggccuccuacaagaucuuccgcaucgagaagggcaagaucgucaaguccgucgagaugaacgcccccaacuaccacuacgaggagugcuccugcuaccccgacuccuccgagaucaccugcgucugccgcgacaacuggcacggcuccaaccgccccugggucuccuucaaccagaaccucgaguaccagaucggcuacaucugcuccggcaucuucggcgacaacccccgccccaacgacaagaccggcuccugcggccccgucuccuccaacggcgccaacggcgucaagggcuucuccuucaaguacggcaacggcgucuggaucggccgcaccaaguccaucuccucccgcaacggcuucgagaugaucugggaccccaacggcuggaccggcaccgacaacaacuucuccaccaagcaggacaucgucggcaucaacgagugguccggcuacuccggcuccuucguccagcaccccgagcucaccggccucgacugcauccgccccugcuucugggucgagcucauccgcggccgccccaaggagaacaccaucuggaccuccggcuccuccaucuccuucugcggcgucaacuccgacaccgucggcugguacuggcccgacggcgccgagcuccccuucaccaucgacaaguga

SEQ ID NO: 117716 - RNA, 1410 nt, Artificial Sequence
  derived and/or modified CDS sequence (opt2) from neuraminidase__InfluenzaA__AFB70163
augaaccccaaccagaagaucaucaccaucggcuccgucugcaugaccaucggcauggccaaccucauccuccagaucggcaacaucaucuccaucuggaucucccacuccauccagcucggcaaccagaaccagaucgagaccugcaaccaguccgucaucaccuacgagaacaacaccugggucaaccagaccuacgucaacaucuccaacaccaacuucgccgccggccaguccgucgucuccgucaagcucgccggcaacuccucccucugccccgucuccggcugggccaucuacuccaaggacaacuccauccgcaucggcuccaagggcgacgucuucgucauccgcgagcccuucaucuccugcuccccccucgagugccgcaccuucuuccucacccagggcgcccuccucaacgacaagcacuccaacggcaccaucaaggaccgcucccccuaccgcacccucauguccugccccaucggcgagguccccucccccuacaacucccgcuucgaguccgucgccugguccgccuccgccugccacgacggcaucaacuggcucaccaucggcaucuccggccccgacaacggcgccgucgccguccucaaguacaacggcaucaucaccgacaccaucaaguccuggcgcaacaacauccuccgcacccaggaguccgagugcgccugcgucaacggcuccugcuucaccgucaugaccgacggccccuccgacggccaggccuccuacaagaucuuccgcaucgagaagggcaagaucgucaaguccgucgagaugaacgcccccaacuaccacuacgaggagugcuccugcuaccccgacuccuccgagaucaccugcgucugccgcgacaacuggcacggcuccaaccgccccugggucuccuucaaccagaaccucgaguaccagaucggcuacaucugcuccggcaucuucggcgacaacccccgccccaacgacaagaccggcuccugcggccccgucuccuccaacggcgccaacggcgucaagggcuucuccuucaaguacggcaacggcgucuggaucggccgcaccaaguccaucuccucccgcaacggcuucgagaugaucugggaccccaacggcuggaccggcaccgacaacaacuucuccaucaagcaggacaucgucggcaucaacgagugguccggcuacuccggcuccuucguccagcaccccgagcucaccggccucgacugcauccgccccugcuucugggucgagcucauccgcggccgccccaaggagaacgccaucuggaccuccggcuccuccaucuccuucugcggcgucaacuccgacaccgucggcugguccuggcccgacggcgccgagcuccccuucaccaucgacaaguga

SEQ ID NO: 117717 - RNA, 1410 nt, Artificial Sequence
  derived and/or modified CDS sequence (opt2) from neuraminidase__InfluenzaA__AFB70169
augaaccccaaccagaagaucaucaccaucggcuccgucugcaugaccaucggcauggccaaccucauccuccagaucggcaacaucaucuccaucuggaucaaccacuccauccagcucggcaaccagaaccagaucgagaccugcaaccaguccgucaucaccuacgagaacaacaccugggucaaccagaccuacgucaacaucuccaacaccaacuucgccgccggccaguccgucgucuccgucaagcucgccggcaacuccucccucugccccgucuccggcugggccaucuacuccaaggacaacuccauccgcaucggcuccaagggcgacgucuucgucauccgcgagcccuucaucuccugcuccccccucgagugccgcaccuucuuccucacccagggcgcccuccucaacgacaagcacuccaacggcaccaucaaggaccgcucccccuaccgcacccucauguccugccccaucggcgagguccccucccccuacaacucccgcuucgaguccgucgccugguccgccuccgccugccacgacggcaucaacuggcucaccaucggcaucuccggccccgacaacggcgccgucgccguccucaaguacaacggcaucaucaccgacaccaucaaguccuggcgcaacaacauccuccgcacccaggaguccgagugcgccugcgucaacggcuccugcuucaccgucaugaccgacggccccuccgacggccaggccuccuacaagaucuuccgcaucgagaagggcaagaucgucaaguccgucgagaugaacgcccccaacuaccacuacgaggagugcuccugcuaccccgacuccuccgagaucaccugcgucugccgcgacaacuggcacggcuccaaccgccccugggucuccuucaaccagaaccucgaguaccagaucggcuacaucugcuccggcaucuucggcgacaacccccgccccaacgacaagaccggcuccugcggccccgucuccuccaacggcgccaacggcgucaagggcuucuccuucaaguacggcaacggcgucuggaucggccgcaccaaguccaucuccucccgcaacggcuucgagaugaucugggaccccaacggcuggaccggcaccgacaacaacuucuccaucaagcaggacaucgucggcaucaacgagugguccggcuacuccggcuccuucguccagcaccccgagcucaccggccucgacugcauccgccccugcuucugggucgagcucauccgcggccgccccaaggagaacaccaucuggaccuccggcuccuccaucuccuucugcggcgucaacuccgacaccgucggcugguccuggcccgacggcgccgagcuccccuucaccaucgacaaguga

SEQ ID NO: 117718 - RNA, 1410 nt, Artificial Sequence; identical to SEQ ID NO: 112774
  derived and/or modified CDS sequence (opt2) from neuraminidase__InfluenzaA__AFB70199

SEQ ID NO: 117719 - RNA, 1410 nt, Artificial Sequence; identical to SEQ ID NO: 112774
  derived and/or modified CDS sequence (opt2) from neuraminidase__InfluenzaA__AFB70209

SEQ ID NO: 117720 - RNA, 1410 nt, Artificial Sequence; identical to SEQ ID NO: 112774
  derived and/or modified CDS sequence (opt2) from neuraminidase__InfluenzaA__AFB70219

SEQ ID NO: 117721 - RNA, 1410 nt, Artificial Sequence; identical to SEQ ID NO: 112774
  derived and/or modified CDS sequence (opt2) from neuraminidase__InfluenzaA__AFB70229

SEQ ID NO: 117722 - RNA, 1410 nt, Artificial Sequence; identical to SEQ ID NO: 112774
  derived and/or modified CDS sequence (opt2) from neuraminidase__InfluenzaA__AFB70239

SEQ ID NO: 117723 - RNA, 1410 nt, Artificial Sequence; identical to SEQ ID NO: 112774
  derived and/or modified CDS sequence (opt2) from neuraminidase__InfluenzaA__AFB70249

SEQ ID NO: 117724 - RNA, 1410 nt, Artificial Sequence; identical to SEQ ID NO: 112774
  derived and/or modified CDS sequence (opt2) from neuraminidase__InfluenzaA__AFB70259

SEQ ID NO: 117725 - RNA, 1410 nt, Artificial Sequence; identical to SEQ ID NO: 113744
  derived and/or modified CDS sequence (opt2) from neuraminidase__InfluenzaA__AFB70269

SEQ ID NO: 117726 - RNA, 1410 nt, Artificial Sequence; identical to SEQ ID NO: 112774
  derived and/or modified CDS sequence (opt2) from neuraminidase__InfluenzaA__AFB70279

SEQ ID NO: 117727 - RNA, 1410 nt, Artificial Sequence; identical to SEQ ID NO: 112774
  derived and/or modified CDS sequence (opt2) from neuraminidase__InfluenzaA__AFB70289

SEQ ID NO: 117728 - RNA, 1410 nt, Artificial Sequence; identical to SEQ ID NO: 112774
  derived and/or modified CDS sequence (opt2) from neuraminidase__InfluenzaA__AFB70299

SEQ ID NO: 117729 - RNA, 1410 nt, Artificial Sequence; identical to SEQ ID NO: 112774
  derived and/or modified CDS sequence (opt2) from neuraminidase__InfluenzaA__AFB70309

SEQ ID NO: 117730 - RNA, 1410 nt, Artificial Sequence; identical to SEQ ID NO: 114397
  derived and/or modified CDS sequence (opt2) from neuraminidase__InfluenzaA__AFB70319

SEQ ID NO: 117731 - RNA, 1410 nt, Artificial Sequence; identical to SEQ ID NO: 112774
  derived and/or modified CDS sequence (opt2) from neuraminidase__InfluenzaA__AFB70329

SEQ ID NO: 117732 - RNA, 1410 nt, Artificial Sequence; identical to SEQ ID NO: 112774
  derived and/or modified CDS sequence (opt2) from neuraminidase__InfluenzaA__AFB70349

SEQ ID NO: 117733 - RNA, 1410 nt, Artificial Sequence; identical to SEQ ID NO: 112774
  derived and/or modified CDS sequence (opt2) from neuraminidase__InfluenzaA__AFB70359

SEQ ID NO: 117734 - RNA, 1410 nt, Artificial Sequence; identical to SEQ ID NO: 112774
  derived and/or modified CDS sequence (opt2) from neuraminidase__InfluenzaA__AFB70369

SEQ ID NO: 117735 - RNA, 1410 nt, Artificial Sequence; identical to SEQ ID NO: 112774
  derived and/or modified CDS sequence (opt2) from neuraminidase__InfluenzaA__AFB70379

SEQ ID NO: 117736 - RNA, 1410 nt, Artificial Sequence; identical to SEQ ID NO: 112774
  derived and/or modified CDS sequence (opt2) from neuraminidase__InfluenzaA__AFB70389

SEQ ID NO: 117737 - RNA, 1410 nt, Artificial Sequence; identical to SEQ ID NO: 112774
  derived and/or modified CDS sequence (opt2) from neuraminidase__InfluenzaA__AFB70399

SEQ ID NO: 117738 - RNA, 1410 nt, Artificial Sequence; identical to SEQ ID NO: 112774
  derived and/or modified CDS sequence (opt2) from neuraminidase__InfluenzaA__AFB70409

SEQ ID NO: 117739 - RNA, 1410 nt, Artificial Sequence
  derived and/or modified CDS sequence (opt2) from neuraminidase__InfluenzaA__AFB77614
augcaccccaaccaggaggucaucuccaucgucuccgucugcaugaccaucggcauggccaaccucauccuccagaucggcaacaucaucuccaucuggaucucccacuccauccagcucggcaaccagaaccagaucgagaccugcaaccaguccgucaucaccuacgagaacaacaccugggucaaccagaccuacgucaacaucuccaacaccaacuucgccgccggccaguccgucgucuccgucaagcucgccggcaacuccucccucugccccgucuccggcugggccaucuacuccaaggacaacuccauccgcaucggcuccaagggcgacgucuucgucauccgcgagcccuucaucuccugcuccccccucgagugccgcaccuucuuccucacccagggcgcccuccucaacgacaagcacuccaacggcaccaucaaggaccgcucccccuaccgcacccucauguccugccccaucggcgagguccccucccccuacaacucccgcuucgaguccgucgccugguccgccuccgccugccacgacggcaucaacuggcucaccaucggcaucuccggccccgacaacggcgccgucgccguccucaaguacaacggcaucaucaccgacaccaucaaguccuggcgcaacaacauccuccgcacccaggaguccgagugcgccugcgucaacggcuccugcuucaccaucaugaccgacggccccuccgacggccaggccuccuacaagaucuuccgcaucgagaagggcaagaucgucaaguccgucgagaugaacgcccccaacuaccacuacgaggagugcuccugcuaccccgacuccuccgagaucaccugcgucugccgcgacaacuggcacggcuccaaccgccccugggucuccuucaaccagaaccucgaguaccagaucggcuacaucugcuccggcaucuucggcgacaacccccgccccaacgacaagaccggcuccugcggccccgucuccuccaacggcgccaacggcgucaagggcuucuccuucaaguacggcaacggcgucuggaucggccgcaccaaguccaucuccucccgcaagggcuucgagaugaucugggaccccaacggcuggaccggcaccgacaacaacuucuccaucaagcaggacaucgucggcaucaacgagugguccggcuacuccggcuccuucguccagcaccccgagcucaccggccucgacugcauccgccccugcuucugggucgagcucauccgcggccgccccaaggagaacaccaucuggaccuccggcuccuccaucuccuucugcggcgucaacuccgacaccgucggcugguucuggcccgacggcgccgagcuccccuucaccaucgacaaguga

SEQ ID NO: 117740 - RNA, 1410 nt, Artificial Sequence
  derived and/or modified CDS sequence (opt2) from neuraminidase__InfluenzaA__AFB77615
augcaccccaaccaggagaucaucaccuucgucuccgucugcaugaccaucggcauggccaaccucauccuccagaucggcaacaucaucuccaucuggaucucccacuccauccagcucggcaaccagaaccagaucgagaccugcaaccaguccgucaucaccuacgagaacaacaccugggucaaccagaccuacgucaacaucuccaacaccaacuucgccgccggccaguccgucgucuccgucaagcucgccggcaacuccucccucugccccgucuccggcugggccaucuacuccaaggacaacuccauccgcaucggcuccaagggcgacgucuucgucauccgcgagcccuucaucuccugcuccccccucgagugccgcaccuucuuccucacccagggcgcccuccucaacgacaagcacuccaacggcaccaucaaggaccgcucccccuaccgcacccucauguccugccccaucggcgagguccccucccccuacaacucccgcuucgaguccgucgccugguccgccuccgccugccacgacggcaucaacuggcucaccaucggcaucuccggccccgacaacggcgccgucgccguccucaaguacaacggcaucaucaccgacaccaucaaguccuggcgcaacaacauccuccgcacccaggaguccgagugcgccugcgucaacggcuccugcuucaccaucaugaccgacggccccuccgacggccaggccuccuacaagaucuuccgcaucgagaagggcaagaucgucaaguccgucgagaugaacgcccccaacuaccacuacgaggagugcuccugcuaccccgacuccuccgagaucaccugcgucugccgcgacaacuggcacggcuccaaccgccccugggucuccuucaaccagaaccucgaguaccagaucggcuacaucugcuccggcaucuucggcgacaacccccgccccaacgacaagaccggcuccugcggccccgucuccuccaacggcgccaacggcgucaagggcuucuccuucaaguacggcaacggcgucuggaucggccgcaccaaguccaucuccucccgcaagggcuucgagaugaucugggaccccaacggcuggaccggcaccgacaacaacuucuccaucaagcaggacaucgucggcaucaacgagugguccggcuacuccggcuccuucguccagcaccccgagcucaccggccucgacugcauccgccccugcuucugggucgagcucauccgcggccgccccaaggagaacaccaucuggaccuccggcuccuccaucuccuucugcggcgucaacuccgacaccgucggcugguccuggcccgacggcgccgagcuccccuucaccaucgacaaguga

SEQ ID NO: 117741 - RNA, 1410 nt, Artificial Sequence
  derived and/or modified CDS sequence (opt2) from neuraminidase__InfluenzaA__AFB78128
augaaccccaaccagaagaucaucaccaucggcuccgucucccucaccaucgccaccaucugcuuccucaugcagaucgucauccucgucaccaccgucacccuccacuucaagcagcacgagugcaacuccccccccaacaaccaggucaugcucugcgagcccaccaucaucgagcgcaacaucaccgagaucgucuaccucaccaacaccaccaucgagaaggagaucugccccaagcucgccgaguaccgcaacugguccaagccccagugcaagaucaccggcuucgcccccuucuccaaggacaacuccauccgccucuccgccggcggcgacaucugggucacccgcgagcccuacgucuccugcgaccccgacaagugcuaccaguucgcccucggccagggcaccacccucaacaaccgccacuccaacgacaccguccacgaccgcacccccuaccgcacccuccucaugaacgagcucggcguccccuuccaccucggcaccaagcaggucugcaucgccugguccuccuccuccugccacgacggcaaggccuggcuccacgucugcgucaccggccacgacgagaacgccaccgccuccuucaucuacgacggccgccucgucgacuccaucggcuccugguccaagaagauccuccgcacccaggaguccgagugcgucugcaucaacggcaccugcaccgucgucaugaccgacggcuccgccuccggccgcgccgacaccaagauccucuucaucgaggagggcaagaucguccacaccuccaagcucuccggcuccgcccagcacgucgaggagugcuccugcuacccccgcuaccccggcguccgcugcgucugccgcgacaacuggaagggcuccaaccgccccaucgucgacaucaacgucaaggacuacuccaucgucuccuccuacgucugcuccggccucgucggcgacaccccccgcaagaacgacuccuccuccuccucccacugccucgaccccaacaacgaggagggcggccacggcgucaagggcugggccuucgacgacggcaacgacgucuggaugggccgcaccaucuccgagaagucccgcuccggcuacgagaccuucaaggucaucgagggcugguccaagcccaacuccaagcuccagaucaaccgccaggucaucgucgagcgcggcaacauguccggcuacuccggcaucuucuccgucgagggcaaguccugcaucaaccgcugcuucuacgucgagcucauccgcggccgcaagcaggagaccgaggucugguggaccuccaacuccaucgucgucuucugcggcaccuccggcaccuacggcaccggcuccuggcccgacggcgccgacaucaaccucaugcccaucuga

SEQ ID NO: 117742 - RNA, 1410 nt, Artificial Sequence
  derived and/or modified CDS sequence (opt2) from neuraminidase__InfluenzaA__AFC62078
augaaccccaaccagaagaucaucaccaucggcuccgucugcaugaccaucggcauggccaaccucauccuccagaucggcaacaucaucuccaucuggaucucccacuccauccagcucggcaaccagucccagaucgagaccugcaaccaguccgucaucaccuacgagaacaacaccugggucaaccagaccuacgucaacaucuccaacaccaacuucgccgccggccaguccgucgucuccgucaagcucgccggcaacuccucccucugccccgucuccggcugggccaucuacuccaaggacaacuccauccgcaucggcuccaagggcgacgucuucgucauccgcgagcucuucaucuccugcuccccccucgagugccgcaccuucuuccucacccagggcgcccuccucaacgacaagcacuccaacggcaccaucaaggaccgcucccccuaccgcacccucauguccugccccaucggcgagguccccucccccuacaacucccgcuucgaguccgucgccugguccgccuccgccugccacgacggcaucaacuggcucaccaucggcaucuccggccccgacaacggcgccgucgccguccucaaguacaacggcaucaucaccgacaccaucaaguccuggcgcaacgacauccuccgcacccaggaguccgagugcgccugcgucaacggcuccugcuucaccaucaugaccgacggccccuccgacggccaggccuccuacaagaucuuccgcaucgagaagggcaagaucgucaaguccgucgagaugaacgcccccaacuaccacuacgaggagugcuccugcuaccccgacuccuccgagaucaccugcgucugccgcgacaacuggcacggcuccaaccgccccugggucuccuucaaccagaaccucgaguaccagaucggcuacaucugcuccggcaucuucggcgacaacccccgccccaacgacaagaccggcuccugcggccccgucuccuccaacggcgccaacggcgucaagggcuucuccuucaaguacggcaacggcgucuggaucggccgcaccaaguccaucuccucccgcaagggcuucgagaugaucugggaccccaacggcuggaccggcaccgacaacaacuucuccaucaagcaggacaucgucggcaucaacgagugguccggcuacuccggcuccuucguccagcaccccgagcucaccggcauggacugcauccgccccugcuucugggucgagcucauccgcggccgccccaaggagaacaccaucuggaccuccggcuccuccaucuccuucugcggcgucaacuccgacaccgucggcugguccuggcccgacggcgccgagcuccccuucaccaucgacaaguga

SEQ ID NO: 117743 - RNA, 1410 nt, Artificial Sequence
  derived and/or modified CDS sequence (opt2) from neuraminidase__InfluenzaA__AFC62079
augaaccccaaccagaagaucaucaccaucggcuccgucugcaugaccaucggcauggccaaccucauccuccagaucggcaacaucaucuccaucuggaucucccacuccauccagcucggcaaccagaaccagaucgagaccugcaaccaguccgucaucaccuacgagaacaacaccugggucaaccagaccuacgucaacaucuccaacaccaacuucgccgccggccaguccgucgucuccgucaagcucgccggcaacuccucccucugccccgucuccggcugggccaucuacuccaaggacaacuccauccgcaucggcuccaagggcgacgucuucgucauccgcgagcccuucaucuccugcuccccccucgagugccgcaccuucuuccucacccagggcgcccuccucaacgacaagcacuccaacggcaccaucaaggaccgcucccccuaccgcacccucauguccugccccaucggcgagguccccucccccuacaacucccgcuucgaguccgucgccugguccgccuccgccugccacgacggcaucaacuggcucaccaucggcaucuccggccccgacaacggcgccgucgccguccucaaguacaacggcaucaucaccgacaccaucaaguccuggcgcaacaacauccuccgcacccaggaguccgagugcgccugcgucaacggcuccugcuucaccgucaugaccgacggccccuccgacggccaggccuccuacaagaucuuccgcaucgagaagggcaagaucaucaaguccgucgagaugaacgcccccaacuaccacuacgaggagugcuccugcuaccccgacuccuccgagaucaccugcgucugccgcgacaacuggcacggcuccaaccgccccugggucuccuucaaccagaaccucgaguaccagaucggcuacaucugcuccggcauccucggcgacaacccccgccccaacgacaagaccggcuccugcggccccgucuccuccaacggcgccaacggcgucaagggcuucuccuucaaguacggcaacggcgucugggucggccgcaccaaguccaucuccucccgcaacggcuucgagaugaucugggaccccaacggcuggaccggcaccgacaacaacuucuccaucaagcaggacaucgucggcaucaaggagugguccggcuacuccggcuccuucguccagcaccccgagcucaccggccucgacugcauccgccccugcuucugggucgagcucauccgcggccgccccaaggagaacaccaucuggaccuccggcuccaucaucuccuucugcggcgucaacuccgacaccgucggcugguccuggcccgacggcgccgagcuccccuucaccaucgacaaguga

SEQ ID NO: 117744 - RNA, 1410 nt, Artificial Sequence
  derived and/or modified CDS sequence (opt2) from neuraminidase__InfluenzaA__AFC62080
augaaccccaaccagaagaucaucaccaucggcuccgucugcaugaccaucggcauggccaaccucauccuccagaucggcaacaucaucuccaucuggaucucccacuccauccagcucggcaaccagucccagaucgagaccugcaaccaguccgucaucaccuacgagaacaacaccugggucaaccagaccuacgucaacaucuccaacaccaacuucgccgccggccaguccgucgucuccgucaagcucgccggcaacuccucccucugccccgucuccggcugggccaucuacuccaaggacaacuccauccgcaucggcuccaagggcgacgucuucgucauccgcgagcccuucaucuccugcuccccccucgagugccgcaccuucuuccucacccagggcgcccuccucaacgacaagcacuccaacggcaccaucaaggaccgcucccccuaccgcacccucauguccugccccaucggcgagguccccucccccuacaacucccgcuucgaguccgucgccugguccgccuccgccugccacgacggcaucaacuggcucaccaucggcaucuccggccccgacaacggcgccgucgccguccucaaguacaacggcaucaucaccgacaccaucaaguccuggcgcaacaacauccuccgcacccaggaguccgagugcgccugcgucaacggcuccugcuucaccaucaugaccgacggccccuccgacggccaggccuccuacaagaucuuccgcaucgagaagggcaagaucgucaaguccgucgagaugaacgcccccaacuacuacuacgaggagugcuccugcuaccccgacuccuccgagaucaccugcgucugccgcgacaacuggcacggcuccaaccgccccugggucuccuucaaccagaaccucgaguaccagaucggcuacaucugcuccggcaucuucggcgacaacccccgccccaacgacaagaccggcuccugcggccccgucuccuccaacggcgccaacggcgucaagggcuucuccuucaaguacggcaacggcgucuggaucggccgcaccaaguccaucuccucccgcaagggcuucgagaugaucugggaccccaacggcuggaccggcaccgacaacaacuucuccaucaagcaggacaucgucggcaucaacgagugguccggcuacuccggcuccuucguccagcaccccgagcucaccggcaugggcugcauccgccccugcuucugggucgagcucauccgcggccgccccaaggagaacaccaucuggaccuccggcuccuccaucuccuucugcggcgucaacuccgacaccgucggcugguccuggcccgacggcgccgagcuccccuucaccaucgacaaguga

SEQ ID NO: 117745 - RNA, 1410 nt, Artificial Sequence
  derived and/or modified CDS sequence (opt2) from neuraminidase__InfluenzaA__AFC62082
augaaccccaaccagaagaucaucaccaucggcuccgucucccucaccaucuccaccaucugcuucuucaugcagaucgccauccucaucaccaccgucacccuccacuucaagcaguacgaguucaacuccccccccaacaaccaggucaugcucugcgagcccaccaucaucgagcgcaacaucaccgagaucgucuaccucaccaacaccaccaucgagaaggagaucugccccaagcucgccgaguaccgcaacugguccaagccccagugcgacaucaccggcuucgcccccuucuccaaggacaacuccauccgccucuccgccggcggcgacaucugggucacccgcgagcccuacgucuccugcgaccccaacaagugcuaccaguucgcccucggccagggcaccacccucaacaacguccacuccaacaacaccguccgcggccgcacccccuaccgcacccuccucaugaacgagcucggcguccccuuccaccucggcaccaagcaggucugcaucgccugguccuccuccuccugccacgacggcaaggccuggcuccacgucugcaucaccggcgacgacaagaacgccaccgccuccuucaucuacaacggccgccucgucgacuccgucgucuccugguccaaggagauccuccgcacccaggaguccgagugcgucugcaucaacggcaccugcaccgucgucaugaccgacggcuccgccuccggcaaggccgacaccaagauccucuucaucgaggagggcaagaucguccacaccuccacccucuccggcuccgcccagcacgucgaggagugcuccugcuacccccgcuaccccggcguccgcugcgucugccgcgacaacuggaagggcuccaaccgccccaucgucgacaucaacaugaaggaccacuccaucgucuccuccuacgucugcuccggccucgucggcgacaccccccgcaagaacgacuccuccuccuccucccacugcuucgaccccaacgacgaggagggcggccacggcgucaagggcugggccuucgacgacggcaacgacgucuggaugggccgcaccaucuccgagaagucccgccucggcuacgagaccuucaaggucaucgagggcugguccaaccccaaguccaagcuccagaucaaccgccaggucaucgucgaccgcggcgaccgcuccggcuacuccggcaucuucuccgucgagggcaaguccugcaucaaccgcugcuucuacgucgagcucauccgcggcuccaaggaggagaccgagguccucuggaccuccaacuccaucgucgucuucugcggcaccuccggcaccuacggcaccggcuccuggcccgacggcgccgacaucaaccucaugcccaucuga

SEQ ID NO: 117746 - RNA, 1410 nt, Artificial Sequence; identical to SEQ ID NO: 110261
  derived and/or modified CDS sequence (opt2) from neuraminidase__InfluenzaA__AFD63529

SEQ ID NO: 117747 - RNA, 1410 nt, Artificial Sequence; identical to SEQ ID NO: 110261
  derived and/or modified CDS sequence (opt2) from neuraminidase__InfluenzaA__AFD63540

SEQ ID NO: 117748 - RNA, 1410 nt, Artificial Sequence
  derived and/or modified CDS sequence (opt2) from neuraminidase__InfluenzaA__AFD63551
augaaccccaaccagaagaucaucaccaucggcuccgucucccucaccaucgccgccaucugcuuccucaugcagaucgccauccucgucaccaccgucacccuccacuucaagcagcacgagugcaaccccccccccaacaaccaggucaugcucugcgagcccaccaucaucgagcgcaacaucaccgagaucgucuaccucaccaacaccaccaucgagaaggagaucugccccaagcucgccgaguaccgcaacugguccaagccccagugcaacaucaccggcuucgcccccuucuccaaggacaacuccauccgccucuccgccggcggcgacaucugggucacccgcgagcccuacgucuccugcgaccccgacaagugcuaccaguucgcccucggccagggcaccacccucaacaacggccacuccaacgacaccguccacggccgcacccccuaccgcacccuccucaugaacgagcucggcguccccuuccaccucggcacccgccaggucugcaucgccugguccuccuccuccugccacgacggcaaggccuggcuccacgucugcgucaccggcgacgacaagaacgccaccgccuccuucaucuacaacggccgccucgucgacuccaucggcuccugguccaagaagauccuccgcacccaggaguccgagugcgucugcaucaacggcaccugcaccgucgucaugaccgacggcuccgccuccggcaaggccgacaccaagauccucuucaucgaggagggcaagaucguccacaucuccacccucuccggcuccgcccagcacgucgaggagugcuccugcuacccccgcuaccccggcguccgcugcgucugccgcgacaacuggaagggcuccaaccgccccaucgucgacaucaacgucaaggacuacuccaucgucuccuccuacgucugcuccggccucgucggcgacaccccccgcaagaacgacuccuucuccuccucccacugccucgaccccaacaacgaggagggcggccacggcgucaagggcugggccuucgacgacggcaacgacgucuggaugggccgcaccaucuccgagaagcuccgcuccggcuacgagaccuucaaggucaucgagggcugguccaagcccaacuccaagcuccagaucaaccgccaggucaucgucgagcgcggcaaccgcuccggcuacuccggcaucuucuccgucgagggcaaguccugcaucaaccgcugcuucuacgucgagcucauccgcggccgcaaggaggagaccgaggucugguggaccuccaacuccaucgucgucuucugcggcaccuccggcaccuacggcaccggcuccuggcccgacggcgccgacaucaaccucaugcccaucuga

SEQ ID NO: 117749 - RNA, 1410 nt, Artificial Sequence; identical to SEQ ID NO: 110261
  derived and/or modified CDS sequence (opt2) from neuraminidase__InfluenzaA__AFD63562

SEQ ID NO: 117750 - RNA, 1410 nt, Artificial Sequence
  derived and/or modified CDS sequence (opt2) from neuraminidase__InfluenzaA__AFD63573
augaaccccaaccagaagaucaucaccaucggcuccgucucccucaccaucgccaccaucugcuuccucaugcagaucgccauccucgucaccaccgucacccuccacuucaagcagcacgagugcaacuccccccccaacaaccaggucaugcucugcgagcccaccaucaucggccgcaacaucaccgagaucgucuaccucaccaacaccaccaucgagaaggagaucugccccaagcucgccgaguaccgcaacugguccaagccccagugcaacaucaccggcuucgcccccuucuccaaggacaacuccauccgccucuccgccggcggcgacaucugggucacccgcgagcccuacgucuccugcgaccccgacaagugcuaccaguucgcccucggccagggcaccacccucaacaacggccacuccaacgacaccguccacgaccgcacccccuaccgcacccuccucaugaacgagcucggcguccccuuccaccucggcacccgccaggucugcaucgccugguccuccuccuccugccacgacggcaaggccuggcuccacgucugcgucaccggcgacgacaagaacgccaccgccuccuucaucuacaacggccgccucgucgacuccaucggcuccugguccaagaagauccuccgcacccaggaguccgagugcgucugcaucaacggcaccugcaccgucgucaugaccgacggcuccgccuccggcaaggccgacaccaagauccucuucaucgaggagggcaagaucguccacaucuccacccucuccggcuccgcccagcacgucgaggagugcuccugcuacccccgcuaccccggcguccgcugcgucugccgcgacaacuggaagggcuccaaccgccccaucgucgacaucaacgucaaggacuacuccaucgucuccuccuacgucugcuccggccucgucggcgacaccccccgcaagaacgacuccuucuccuccucccacugccucgaccccaacaacgaggagggcggccacggcgucaagggcugggccuucgacgacggcaacgacgucuggaugggccgcaccaucuccgagaagcuccgcuccggcuacgagaccuucaaggucaucgagggcugguccaagcccaacuccaagcuccagaucaaccgccaggucaucgucgagcgcggcaaccgcuccggcuacuccggcaucuucuccgucgagggcaaguccugcaucaaccgcugcuucuacgucgagcucauccgcggccgcaaggaggagaccgaggucugguggaccuccaacuccaucgucgucuucugcggcaccuccggcaccuacggcaccggcuccuggcccgacggcgccgacaucaaccucaugcccaucuga

SEQ ID NO: 117751 - RNA, 1410 nt, Artificial Sequence
  derived and/or modified CDS sequence (opt2) from neuraminidase__InfluenzaA__AFD63584
augaaccccaaccagaagaucaucaccaucggcuccgucucccucaccaucgccaccaucugcuuccucaugcagaucgccauccucgucaccaccgucacccuccacuucaagcaguacgagugcaacuccccccccaacaaccaggucaugcucugcgagcccaccaucaucgagcgcaacaucaccgagaucgucuaccucaccaacaccaccaucgagaaggagaucugccccaagcucgccgaguaccgcaacugguccaagccccagugcaacaucaccggcuucgcccccuucuccaaggacaacuccauccgccucuccgccggcggcgacaucugggucacccgcgagcccuacgucuccugcgaccccgacaagugcuaccaguucgcccucggccagggcaccacccucaacaacggccacuccaacgacaccguccacgagcgcacccccuaccgcacccuccucaugaacgagcucggcguccccuuccaccucggcacccgccaggucugcaucgccugguccuccuccuccugccacgacggcaaggccuggcuccacgucugcgucaccggcgacgacaagaacgccaccgccuccuucaucuacaacggccgccucgucgacuccaucggcuccugguccaagaagauccuccgcacccaggaguccgagugcgucugcaucaacggcaccugcaccgucgucaugaccgacggcuccgccuccggcaaggccgacaccaagauccucuucaucgaggagggcaagaucauccacaucuccacccucuccggcuccgcccagcacgucgaggagugcuccugcuacccccgcuaccccggcguccgcugcgucugccgcgacaacuggaagggcuccaaccgccccaucgucgacaucaacgucaaggacuacuccaucgucuccuccuacgucugcuccggccucgucggcgacaccccccgcaagaacgacuccuccuccuccucccacugccucgaccccaacaacgaggagggcggccacggcgucaagggcugggccuucgacgacggcaacgacgucuggaugggccgcaccaucuccgagaagcuccgcuccggcuacgagaccuucaaggucaucgagggcugguccaagcccaacuccaagcuccagaucaaccgccaggucaucgucgagcgcggcaaccgcuccggcuacuccggcaucuucuccgucgagggcaaguccugcaucaaccgcugcuucuacgucgagcucauccgcggccgcaaggaggagaccgaggucugguggaccuccaacuccaucgucgucuucugcggcaccuccggcaccuacggcaccggcuccuggcccgacggcgccgacaucaaccucaugcccaucuga

SEQ ID NO: 117752 - RNA, 1410 nt, Artificial Sequence
  derived and/or modified CDS sequence (opt2) from neuraminidase__InfluenzaA__AFD63595
augaaccccaaccagaagaucaucaccaucggcuccgucucccucaccaucgccgccaucugcuuccucaugcagaucgccauccucgucaccaccgucacccuccacuucaagcagcacgagugcaacuccccccccaacaaccaggucaugcucugcgagcccaccaucaucgagcgcaacaucaccgagaucgucuaccucaccaacaccaccaucgagaaggagaucugccccaagcucgccgaguaccgcaacugguccaagccccagugcaacaucaccggcuucgcccccuucuccaaggacaacuccauccgccucuccgccggcggcgacaucugggucacccgcgagcccuacgucuccugcgaccccgacaagugcuaccaguucgcccucggccagggcaccacccucaacaacggccacuccaacgacaccguccacgaccgcacccccuaccgcacccuccucaugaacgagcucggcguccccuuccaccucggcacccgccaggucugcaucgccugguccuccuccuccugccacgacggcaaggccuggcuccacgucugcgucaccggcgacgacaagaacgccaccgccuccuucaucuacaacggccgccucgucgacuccaucggcuccugguccaagaagauccuccgcacccaggaguccgagugcgucugcaucaacggcaccugcaccgucgucaugaccgacggcuccgccuccggcaaggccgacaccaagauccucuucaucgaggagggcaagaucguccacaucuccacccucuccggcuccgcccagcacgucgaggagugcuccugcuacccccgcuaccccggcguccgcugcgucugcaaggacaacuggaagggcuccaaccgccccaucgucgacaucaacgucaaggacuacuccaucgucuccuccuacgucugcuccggccucgucggcgacaccccccgcaagaacgacuccuucuccuccucccacugccucgaccccaacaacgaggagggcggccacggcgucaagggcugggccuucgacgacggcaacgacgucuggaugggccgcaccaucuccgagaagcuccgcuccggcuacgagaccuucaaggucaucgagggcugguccaagcccaacuccaagcuccagaucaaccgccaggucaucgucgagcgcggcaaccgcuccggcuacuccggcaucuucuccgucgagggcaaguccugcaucaaccgcugcuucuacgucgagcucauccgcggccgcaaggaggagaccgaggucugguggaccuccaacuccaucgucgucuucugcggcaccuccggcaccuacggcaccggcuccuggcccgacggcgccgacaucaaccucaugcccaucuga

SEQ ID NO: 117753 - RNA, 1410 nt, Artificial Sequence; identical to SEQ ID NO: 110261
  derived and/or modified CDS sequence (opt2) from neuraminidase__InfluenzaA__AFD63606

SEQ ID NO: 117754 - RNA, 1410 nt, Artificial Sequence; identical to SEQ ID NO: 110181
  derived and/or modified CDS sequence (opt2) from neuraminidase__InfluenzaA__AFD63628

SEQ ID NO: 117755 - RNA, 1410 nt, Artificial Sequence; identical to SEQ ID NO: 110261
  derived and/or modified CDS sequence (opt2) from neuraminidase__InfluenzaA__AFD63639

SEQ ID NO: 117756 - RNA, 1410 nt, Artificial Sequence; identical to SEQ ID NO: 110261
  derived and/or modified CDS sequence (opt2) from neuraminidase__InfluenzaA__AFD63650

SEQ ID NO: 117757 - RNA, 1410 nt, Artificial Sequence
  derived and/or modified CDS sequence (opt2) from neuraminidase__InfluenzaA__AFD63661
augaaccccaaccagaagaucaucaccaucggcuccgucucccucaccaucgccgccaucugcuuccucaugcagaucgccauccucgucaccaccgucacccuccacuucaagcagcacgagugcaacuccccccccaacaaccaggucaugcucugcgagcccaccaucaucgagcgcaacaucaccgagaucgucuaccucaccaacuccaccaucgagaaggagaucugccccaagcucgccgaguaccgcaacugguccaagccccagugcaacaucaccggcuucgcccccuucuccaaggacaacuccauccgccucuccgccggcggcgacaucugggucacccgcgagcccuacgucuccugcgaccccgacaagugcuaccaguucgcccucggccagggcaccacccucaacaacggccacuccaacgacaccguccacgaccgcacccccuaccgcacccuccucaugaacgagcucggcguccccuuccaccucggcacccgccaggucugcaucgccugguccuccuccuccugccacgacggcaaggccuggcuccacgucugcgucaccggcgacgacaagaacgccaccgccuccuucaucuacaacggccgccucgucgacuccaucggcuccugguccaagaagauccuccgcacccaggaguccgagugcgucugcaucaacggcaccugcaccgucgucaugaccgacggcuccgccuccggcaaggccgacaccaagauccucuucaucgaggagggcaagaucguccacaucuccacccucuccggcuccgcccagcacgucgaggagugcuccugcuacccccgcuaccccggcguccgcugcgucugccgcgacaacuggaagggcuccaaccgccccaucgucgacaucaacgucaaggacuacuccaucgucuccuccuacgucugcuccggccucgucggcgacaccccccgcaagaacgacuccuucuccuccucccacugccucgaccccaacaacgaggagggcggccacggcgucaagggcugggccuucgacgacggcaacgacgucuggaugggccgcaccaucuccgagaagcuccgcuccggcuacgagaccuucaaggucaucgagggcugguccaagcccaacuccaagcuccagaucaaccgccaggucaucgucgagcgcggcaaccgcuccggcuacuccggcaucuucuccgucgagggcaaguccugcaucaaccgcugcuucuacgucgagcucauccgcggccgcaaggaggagaccgaggucugguggaccuccaacuccaucgucgucuucugcggcaccuccggcaccuacggcaccggcuccuggcccgacggcgccgacaucaaccucaugcccaucuga

SEQ ID NO: 117758 - RNA, 1410 nt, Artificial Sequence; identical to SEQ ID NO: 111967
  derived and/or modified CDS sequence (opt2) from neuraminidase__InfluenzaA__AFD63672

SEQ ID NO: 117759 - RNA, 1410 nt, Artificial Sequence
  derived and/or modified CDS sequence (opt2) from neuraminidase__InfluenzaA__AFD63683
augaaccccaaccagaagaucaucaccaugggcuccgucucccucaccaucgccaccaucugcuuccucaugcagaucgccauccucgucaccaccgucacccuccacuucaagcaguacgagugcaacuccccccccaacaaccaggucaugcucugcgagcccaccaucaucgagcgcaacaucaccgagaucgucuaccucaccaacaccaccaucgagaaggagaucugccccaagcucgccgaguaccgcaacugguccaagccccagugcaacaucaccggcuucgcccccuucuccaaggacaacuccauccgccucuccgccggcggcgacaucugggucacccgcgagcccuacgucuccugcgaccccgacaagugcuaccaguucgcccucggccagggcaccacccucaacaacggccacuccaacgacaccguccacggccgcacccccuaccgcacccuccucaugaacgagcucggcguccccuuccaccucggcacccgccaggucugcaucgccugguccuccuccuccugccacgacggcaaggccuggcuccacgucugcgucaccggcgacgacaagaacgccaccgccuccuucaucuacaacggccgccucgucgacuccaucggcuccugguccaagaagauccuccgcacccaggaguccgagugcgucugcaucaacggcaccugcaccgucgucaugaccgacggcuccgccuccggcaaggccgacaccaagauccucuucaucgaggagggcaagaucauccacaucuccacccucuccggcuccgcccagcacgucgaggagugcuccugcuacccccgcuaccccggcguccgcugcgucugccgcgacaacuggaagggcuccaaccgccccaucgucgacaucaacgucaaggacuacuccaucgucuccuccuacgucugcuccggccucgucggcgacaccccccgcaagaacgacuccuccuccuccucccacugccucgaccccaacaacgaggagggcggccacggcgucaagggcugggccuucgacgacggcaacgacgucuggaugggccgcaccaucuccgagaagcuccgcuccggcuacgagaccuucaaggucaucgagggcugguccaagcccaacuccaagcuccagaucaaccgccaggucaucgucgagcgcggcaaccgcuccggcuacuccggcaucuucuccgucgagggcaaguccugcaucaaccgcugcuucuacgucgagcucauccgcggccgcaaggaggagaccgaggucugguggaccuccaacuccaucgucgucuucugcggcaccuccggcaccuacggcaccggcuccuggcccgacggcgccgacaucaaccucaugcccaucuga

SEQ ID NO: 117760 - RNA, 1410 nt, Artificial Sequence
  derived and/or modified CDS sequence (opt2) from neuraminidase__InfluenzaA__AFD63694
augaaccccaaccagaagaucaucaccaucggcuccgucucccucaccaucgccaccaucugcuuccucaugcagaucgccauccucgucaccaccaucacccuccacuucaagcagcacgagugcaacuccccccccaacaaccaggucaugcucugcgagcccaccaucaucgagcgcaacaucaccgagaucgucuaccucaccaacaccaccaucgagaaggagaucugccccaagcucgccgaguaccgcaacugguccaagccccagugcaacaucaccggcuucgcccccuucuccaaggacaacuccauccgccucuccgccggcggcgacaucugggucacccgcgagcccuacgucuccugcgaccccgacaagugcuaccaguucgcccucggccagggcaccacccucaacaacggccacuccaacgacaccguccacgaccgcacccccuaccgcacccuccucaugaacgagcucggcguccccuuccaccucggcacccgccaggucugcaucgccugguccuccuccuccugccacgacggcaaggccuggcuccacgucugcgucaccggcgacgacaagaacgccaccgccuccuucaucuacaacggccgccucgucgacuccaucggcuccugguccaagaagauccuccgcacccaggaguccgagugcgucugcaucaacggcaccugcaccgucgucaugaccgacggcuccgccuccggcaaggccgacaccaagauccucuucaucgaggagggcaagaucguccacaucuccacccucuccggcuccgcccagcacgucgaggagugcuccugcuacccccgcuaccccggcguccgcugcgucugccgcgacaacuggaagggcuccaaccgccccaucgucgacaucaacgucaaggacuacuccaucgucuccuccuacgucugcuccggccucgucggcgacaccccccgcaagaacgacuccuucuccuccucccacugccucgaccccaacaacgaggagggcggccacggcgucaagggcugggccuucgacgacggcaacgacgucuggaugggccgcaccaucuccgagaagcuccgcuccggcuacgagaccuucaaggucaucgagggcugguccaagcccaacuccaagcuccagaucaaccgccaggucaucgucgagcgcggcaaccgcuccggcuacuccggcaucuucuccgucgagggcaaguccugcaucaaccgcugcuucuacgucgagcucauccgcggccgcaaggaggagaccgaggucugguggaccuccaacuccaucgucgucuucugcggcaccuccggcaccuacggcaccggcuccuggcccgacggcgccgacaucaaccucaugcccaucuga

SEQ ID NO: 117761 - RNA, 1410 nt, Artificial Sequence
  derived and/or modified CDS sequence (opt2) from neuraminidase__InfluenzaA__AFD63705
augaaccccaaccagaagaucaucaccaucggcuccgucucccucaccaucgccgccaucugcuuccucaugcagaucgccauccucgucaccaccgucacccuccacuucaagcagcacgagugcaacuccccccccaacaaccaggucaugcucugcgagcccaccaucaucgagcgcaacaucaccgagaucgucuaccucaccaacaccaccaucgagaaggagaucugccccaagcucgccgaguaccgcaacugguccaagccccagugcaacaucaccggcuucgcccccuucuccaaggacaacuccauccgccucuccgccggcggcgacaucugggucacccgcgagcccuacgucuccugcgaccccgacaagugcuaccaguucgcccucggcaagggcaccacccucaacaacggccacuccaacgacaccguccacgaccgcacccccuaccgcacccuccucaugaacgagcucggcguccccuuccaccucggcacccgccaggucugcaucgccugguccuccuccuccugccacgacggcaaggccuggcuccacgucugcgucaccggcgacgacaagaacgccaccgccuccuucaucuacaacggccgccucgucgacuccaucggcuccugguccaagaagauccuccgcacccaggaguccgagugcgucugcaucaacggcaccugcaccgucgucaugaccgacggcuccgccuccggcaaggccgacaccaagauccucuucaucgaggagggcaagaucguccacaucuccacccucuccggcuccgcccagcacgucgaggagugcuccugcuacccccgcuaccccggcguccgcugcgucugccgcgacaacuggaagggcuccaaccgccccaucgucgacaucaacgucaaggacuacuccaucgucuccuccuacgucugcuccggccucgucggcgacaccccccgcaagaacgacuccuucuccuccucccacugccucgaccccaacaacgaggagggcggccacggcgucaagggcugggccuucgacgacggcaacgacgucuggaugggccgcaccaucuccgagaagcuccgcuccggcuacgagaccuucaaggucaucgagggcugguccaagcccaacuccaagcuccagaucaaccgccaggucaucgucgagcgcggcaaccgcuccggcuacuccggcaucuucuccgucgagggcaaguccugcaucaaccgcugcuucuacgucgagcucauccgcggccgcaaggaggagaccgaggucugguggaccuccaacuccaucgucgucuucugcggcaccuccggcaccuacggcaccggcuccuggcccgacggcgccgacaucaaccucaugcccaucuga

SEQ ID NO: 117762 - RNA, 1410 nt, Artificial Sequence
  derived and/or modified CDS sequence (opt2) from neuraminidase__InfluenzaA__AFD63716
augaaccccaaccagaagaucaucaccaucggcuccgucucccucaccaucgccgccaucugcuuccucaugcagaucgccauccucgucaccaccgucacccuccacuucaagcagcacgagugcaacuccccccccaacaaccaggucaugcucugcgagcccaccaucaucgagcgcaacaucaccgagaucgucuaccucaccaacaccaccaucgagaaggagaucugccccaagcucgccgaguaccgcaacugguccaagccccagugcaacaucaccggcuucgcccccuucuccaaggacaacuccauccgccucuccgccggcggcgacaucugggucacccgcgagcccuacgucuccugcgaccccgacaagugccaccaguucgcccucggccagggcaccacccucaacaacggccacuccaacgacaccguccacgaccgcacccccuaccgcacccuccucaugaacgagcucggcguccccuuccaccucggcacccgccaggucugcaucgccugguccuccuccuccugccacgacggcaaggccuggcuccacgucugcgucaccggcgacgacaagaacgccaccgccuccuucaucuacaacggccgccucgucgacuccaucggcuccugguccaagaagauccuccgcacccaggaguccgagugcgucugcaucaacggcaccugcaccgucgucaugaccgacggcuccgccuccggcaaggccgacaccaagauccucuucaucgaggagggcaagaucguccacaucuccacccucuccggcuccgcccagcacgucgaggagugcuccugcuacccccgcuaccccggcguccgcugcgucugccgcgacaacuggaagggcuccaaccgccccaucgucgacaucaacgucaaggacuacuccaucgucuccuccuacgucugcuccggccucgucggcgacaccccccgcaagaacgacuccuucuccuccucccacugccucgaccccaacaacgaggagggcggccacggcgucaagggcugggccuucgacgacggcaacgacgucuggaugggccgcaccaucuccgagaagcuccgcuccggcuacgagaccuucaaggucaucgagggcugguccaagcccaacuccaagcuccagaucaaccgccaggucaucgucgagcgcggcaaccgcuccggcuacuccggcaucuucuccgucgagggcaaguccugcaucaaccgcugcuucuacgucgagcucauccgcggccgcaaggaggagaccgaggucugguggaccuccaacuccaucgucgucuucugcggcaccuccggcaccuacggcaccggcuccuggcccgacggcgccgacaucaaccucaugcccaucuga

SEQ ID NO: 117763 - RNA, 1410 nt, Artificial Sequence; identical to SEQ ID NO: 110261
  derived and/or modified CDS sequence (opt2) from neuraminidase__InfluenzaA__AFD63727

SEQ ID NO: 117764 - RNA, 1410 nt, Artificial Sequence; identical to SEQ ID NO: 110261
  derived and/or modified CDS sequence (opt2) from neuraminidase__InfluenzaA__AFD63738

SEQ ID NO: 117765 - RNA, 1410 nt, Artificial Sequence
  derived and/or modified CDS sequence (opt2) from neuraminidase__InfluenzaA__AFD63749
augaaccccaaccagaagaucaucaccaucuccuccgucucccucaccaucgccaccaucugcuuccucaugcagaucgccauccucgucaccaccgucacccuccacuucaagcagcacgagugcaacuccccccccaacaaccaggucaugcucugcgagcccaccaucaucgagcgcaacaucaccgagaucgucuaccucaccaacaccaccaucgagaaggagaucugccccaagcucgccgaguaccgcaacugguccaagccccagugcaacaucaccggcuucgcccccuucuccaaggacaacuccauccgccucuccgccggcggcgacaucugggucacccgcgagcccuacgucuccugcgaccccgacaagugcuaccaguucgcccucggccagggcaccacccucaacaacggccacuccaacgacaccguccacgaccgcacccccuaccgcacccuccucaugaacgagcucggcguccccuuccaccucggcacccgccaggucugcaucgccugguccuccuccuccugccacgacggcaaggccuggcuccacgucugcgucaccggcgacgacaagaacgccaccgccuccuucaucuacaacggccgccucgucgacuccaucggcuccugguccaagaagauccuccgcacccaggaguccgagugcgucugcaucaacggcaccugcaccgucgucaugaccgacggcuccgccuccggcaaggccgacaccaagauccucuucaucgaggagggcaagaucguccacaucuccacccucuccggcuccgcccagcacgucgaggagugcuccugcuacccccgcuaccccggcguccgcugcgucugccgcgacaacuggaagggcuccaaccgccccaucgucgacaucaacgucaaggacuacuccaucgucuccuccuacgucugcuccggccucgucggcgacaccccccgcaagaacgacuccuucuccuccucccacugccucgaccccaacaacgaggagggcggccacggcgucaagggcugggccuucgacgacggcaacgacgucuggaugggccgcaccaucuccgagaagcuccgcuccggcuacgagaccuucaaggucaucgagggcugguccaagcccaacuccaagcuccagaucaaccgccaggucaucgucgagcgcggcaaccgcuccggcuacuccggcaucuucuccgucgagggcaaguccugcaucaaccgcugcuucuacgucgagcucauccgcggccgcaaggaggagaccgaggucugguggaccuccaacuccaucgucgucuucugcggcaccuccggcaccuacggcaccggcuccuggcccgacggcgccgacaucaaccucaugcccaucuga

SEQ ID NO: 117766 - RNA, 1410 nt, Artificial Sequence
  derived and/or modified CDS sequence (opt2) from neuraminidase__InfluenzaA__AFD63760
augaaccccaaccagaagaucaucaccaucggcuccgucucccucaccaucgccaccaucugcuuccucaugcagaucgccauccucgucaccaccgucacccuccacuucaagcaguacgagugcaacuccccccccaacaaccaggucaugcucugcgagcccaccaucaucgagcgcaacaucaccgagaucgucuaccucaccaacaccaccaucgagaaggagaucugccccaagcucgccgaguaccgcaacugguccaagccccagugcaacaucaccggcuucgcccccuucuccaaggacaacuccauccgccucuccgccggcggcgacaucugggucacccgcgagcccuacgucuccugcgaccccgacaagugcuaccaguucgcccucggccagggcaccacccucaacaacggccacuccaacgacaccguccacgaccgcacccccuaccgcacccuccucaugaacgagcucggcguccccuuccaccucggcacccgccaggucugcaucgccugguccuccuccuccugccacgacggcaaggccuggcuccacgucugcgucaccggcgacgacaagaacgccaccgccuccuucaucuacaacggccgccucgucgacuccaucggcuccugguccaagaagauccuccgcacccaggaguccgagugcgucugcaucaacggcaccugcaccgucgucaugaccgacggcuccgccuccggcaaggccgacaccaagauccucuucaucgaggagggcaagaucauccacaucuccacccucuccggcuccgcccagcacgucgaggagugcuccugcuacccccgcuaccccggcguccgcugcgucugccgcgacaacuggaagggcuccaaccgccccaucgucgacaucaacgucaaggacuacuccaucgucuccuccuacgucugcuccggccucgucggcgacaccccccgcaagaacgacuccuccuccuccucccacugccucgaccccaacaacgaggagggcggccacggcgucaagggcugggccuucgacgacggcaacgacgucuggaugggccgcaccaucuccgagaagcuccgcuccggcuacgagaccuucaaggucaucgagggcugguccaagcccaacuccaagcuccagaucaaccgccaggucaucgucgagcgcggcaaccgcuccggcuacuccggcaucuucuccgucgagggcaaguccugcaucaaccgcugcuucuacgucgagcucauccgcggccgcaaggaggagaccgaggucugguggaccuccaacuccaucgucgucuucugcggcaccuccggcaccuacggcaccggcuccuggcccgacggcgccgacaucaaccucaugcccaucuga

SEQ ID NO: 117767 - RNA, 1410 nt, Artificial Sequence; identical to SEQ ID NO: 110261
  derived and/or modified CDS sequence (opt2) from neuraminidase__InfluenzaA__AFD63771

SEQ ID NO: 117768 - RNA, 1410 nt, Artificial Sequence; identical to SEQ ID NO: 110261
  derived and/or modified CDS sequence (opt2) from neuraminidase__InfluenzaA__AFD63782

SEQ ID NO: 117769 - RNA, 1410 nt, Artificial Sequence; identical to SEQ ID NO: 117766
  derived and/or modified CDS sequence (opt2) from neuraminidase__InfluenzaA__AFD63793

SEQ ID NO: 117770 - RNA, 1410 nt, Artificial Sequence; identical to SEQ ID NO: 110261
  derived and/or modified CDS sequence (opt2) from neuraminidase__InfluenzaA__AFD63804

SEQ ID NO: 117771 - RNA, 1410 nt, Artificial Sequence; identical to SEQ ID NO: 110261
  derived and/or modified CDS sequence (opt2) from neuraminidase__InfluenzaA__AFD63815

SEQ ID NO: 117772 - RNA, 1410 nt, Artificial Sequence; identical to SEQ ID NO: 110261
  derived and/or modified CDS sequence (opt2) from neuraminidase__InfluenzaA__AFD63826

SEQ ID NO: 117773 - RNA, 1410 nt, Artificial Sequence; identical to SEQ ID NO: 117766
  derived and/or modified CDS sequence (opt2) from neuraminidase__InfluenzaA__AFD63837

SEQ ID NO: 117774 - RNA, 1410 nt, Artificial Sequence
  derived and/or modified CDS sequence (opt2) from neuraminidase__InfluenzaA__AFD63848
augaaccccaaccagaagaucaucaccaucggcuccgucucccucaccaucgccgccaucugcuuccucaugcagaucgccauccucgucaccaccgucacccuccacuucaagcagcgcgagugcaacuccccccccaacaaccaggucaugcucugcgagcccaccaucaucgagcgcaacaucaccgagaucgucuaccucaccaacaccaccaucgagaaggagaucugccccaagcucgccgaguaccgcaacugguccaagccccagugcaacaucaccggcuucgcccccuucuccaaggacaacuccauccgccucuccgccggcggcgacaucugggucacccgcgagcccuacgucuccugcgaccccgacaagugcuaccaguucgcccucggccagggcaccacccucaacaacggccacuccaacgacaccguccacgaccgcacccccuaccgcacccuccucaugaacgagcucggcguccccuuccaccucggcacccgccaggucugcaucgccugguccuccuccuccugccacgacggcaaggccuggcuccacgucugcgucaccggcgacgacaagaacgccaccgccuccuucaucuacaacggccgccucgucgacuccaucggcuccugguccaagaagauccuccgcacccaggaguccgagugcgucugcaucaacggcaccugcaccgucgucaugaccgacggcuccgccuccggcaaggccgacaccaagauccucuucaucgaggagggcaagaucguccacaucuccacccucuccggcuccgcccagcacgucgaggagugcuccugcuacccccgcuaccccggcguccgcugcgucugccgcgacaacuggaagggcuccaaccgccccaucgucgacaucaacgucaaggacuacuccaucgucuccuccuacgucugcuccggccucgucggcgacaccccccgcaagaacgacuccuucuccuccucccacugccucgaccccaacaacgaggagggcggccacggcgucaagggcugggccuucgacgacggcaacgacgucuggaugggccgcaccaucuccgagaagcuccgcuccggcuacgagaccuucaaggucaucgagggcugguccaagcccaacuccaagcuccagaucaaccgccaggucaucgucgagcgcggcaaccgcuccggcuacuccggcaucuucuccgucgagggcaaguccugcaucaaccgcugcuucuacgucgagcucauccgcggccgcaaggagaagaccgaggucugguggaccuccaacuccaucgucgucuucugcggcaccuccggcaccuacggcaccggcuccuggcccgacggcgccgacaucaaccucaugcccaucuga

SEQ ID NO: 117775 - RNA, 1410 nt, Artificial Sequence; identical to SEQ ID NO: 110181
  derived and/or modified CDS sequence (opt2) from neuraminidase__InfluenzaA__AFD63859

SEQ ID NO: 117776 - RNA, 1410 nt, Artificial Sequence; identical to SEQ ID NO: 110181
  derived and/or modified CDS sequence (opt2) from neuraminidase__InfluenzaA__AFD63870

SEQ ID NO: 117777 - RNA, 1410 nt, Artificial Sequence; identical to SEQ ID NO: 110261
  derived and/or modified CDS sequence (opt2) from neuraminidase__InfluenzaA__AFD63881

SEQ ID NO: 117778 - RNA, 1410 nt, Artificial Sequence; identical to SEQ ID NO: 110261
  derived and/or modified CDS sequence (opt2) from neuraminidase__InfluenzaA__AFD63892

SEQ ID NO: 117779 - RNA, 1410 nt, Artificial Sequence
  derived and/or modified CDS sequence (opt2) from neuraminidase__InfluenzaA__AFD63903
augaaccccaaccagaagaucaucaccaucggcuccgucucccucaccaucgccgccaucugcuuccucaugcagaucgccauccucgucaccaccgucacccuccacuucaagcagcacgagugcaacuccccccccaacaaccaggucaugcucugcgagcccaccaucaucgagcgcaacaucaccggcaucgucuaccucaccaacaccaccaucgagaaggagaucugccccaagcucgccgaguaccgcaacugguccaagccccagugcaacaucaccggcuucgcccccuucuccaaggacaacuccauccgccucuccgccggcggcgacaucugggucacccgcgagcccuacgucuccugcgaccccgacaagugcuaccaguucgcccucggccagggcaccacccucaacaacggccacuccaacgacaccguccacgaccgcacccccuaccgcacccuccucaugaacgagcucggcguccccuuccaccucggcacccgccaggucugcaucgccugguccuccuccuccugccacgacggcaaggccuggcuccacgucugcgucaccggcgacgacaagaacgccaccgccuccuucaucuacaacggccgccucgucgacuccaucggcuccugguccaagaagauccuccgcacccaggaguccgagugcgucugcaucaacggcaccugcaccgucgucaugaccgacggcuccgccuccggcaaggccgacaccaagauccucuucaucgaggagggcaagaucguccacaucuccacccucuccggcuccgcccagcacgucgaggagugcuccugcuacccccgcuaccccggcguccgcugcgucugccgcgacaacuggaagggcuccaaccgccccaucgucgacaucaacgucaaggacuacuccaucgucuccuccuacgucugcuccggccucgucggcgacaccccccgcaagaacgacuccuucuccuccucccacugccucgaccccaacaacgaggagggcggccacggcgucaagggcugggccuucgacgacggcaacgacgucuggaugggccgcaccaucuccgagaagcuccgcuccggcuacgagaccuucaaggucaucgagggcugguccaagcccaacuccaagcuccagaucaaccgccaggucaucgucgagcgcggcaaccgcuccggcuacuccggcaucuucuccgucgagggcaaguccugcaucaaccgcugcuucuacgucgagcucauccgcggccgcaaggaggagaccgaggucugguggaccuccaacuccaucgucgucuucugcggcaccuccggcaccuacggcaccggcuccuggcccgacggcgccgacaucaaccucaugcccaucuga

SEQ ID NO: 117780 - RNA, 1410 nt, Artificial Sequence
  derived and/or modified CDS sequence (opt2) from neuraminidase__InfluenzaA__AFD63914
augaaccccaaccagaagaucaucaccaucggcuccgucucccucaccaucgccgccaucugcuuccucaugcagaucgccauccucgucaccaccgucacccuccacuucaagcagcacgagugcaacuccccccccaacaaccaggucaugcucugcgagcccaccaucaucgagcgcaacaucaccgagaucgucuaccucaccaacaccaccaucgagaaggagaucugccccaagcucgccgaguaccgcaacugguccaagccccagugcaacaucaccggcuucgcccccuucuccaaggacaacuccauccgccucuccgccggcggcgacaucugggucacccgcgagcccuacgucuccugcgaccccgacaagugcuaccaguucgcccucggccagggcaccacccucaacaacggccacuccaacgacaccguccacgaccgcacccccuaccgcacccuccucaugaacgagcucggcguccccuuccaccucggcacccgccaggucugcaucgccugguccuccuccuccugccacgacggcaaggccuggcuccacgucugcgucaccggcgacgacaagaacgccaccgccuccuucaucuacaacggccgccucgucgacuccaucggcuccugguccaagaagauccuccgcacccaggaguccgagugcgucugcaucaacggcaccugcaccgucgucaugaccgacggcuccgccuccggcaaggccgacaccaagauccucuucaucgaggagggcaagaucguccacaucuccacccucuccggcuccgcccagcacgucgaggagugcuccugcuacccccgcuaccccggcguccgcugcgucugccgcgacaacuggaagggcuccaaccgccccaucgucgacaucaacgucaaggacuacuccaucgucuccuccuacgucugcuccggccucgucggcgacaccccccgcaagaacgacuccuucuccuccucccacugccucgaccccaacaacgaggagggcggccacggcgucaagggcugggccuucgacgacggcaacgacgucuggaugggccgcaccaucuccgagaagcuccgcuccggcuacgagaccuucaaggucaucgagggcugguccaagcccaacuccaagcuccagaucaaccgccaggucaucgucgagcgcggcaaccgcuccggcuacuccggcaucuucuccgucgagggcaaguccugcaucaaccgcugcuucuacgucgagcucauccgcggccgcaaggagaagaccgaggucugguggaccuccaacuccaucgucgucuucugcggcaccuccggcaccuacggcaccggcuccuggcccgacggcgccgacaucaaccucaugcccaucuga

SEQ ID NO: 117781 - RNA, 1410 nt, Artificial Sequence; identical to SEQ ID NO: 117766
  derived and/or modified CDS sequence (opt2) from neuraminidase__InfluenzaA__AFD63925

SEQ ID NO: 117782 - RNA, 1410 nt, Artificial Sequence
  derived and/or modified CDS sequence (opt2) from neuraminidase__InfluenzaA__AFD63936
augaaccccaaccagaagaucaucaccaucggcuccgucucccucaccaucgccaccaucugcuuccucaugcagaucgccauccucgucaccaccgucacccuccacuucaagcagcacgagugcaaccccccccccaacaaccaggucaugcucugcgagcccaccaucaucgagcgcaacaucaccgagaucgucuaccucaccaacaccaccaucgagaaggagaucugccccaagcucgccgaguaccgcaacugguccaagccccagugcaacaucaccggcuucgcccccuucuccaaggacaacuccauccgccucuccgccggcggcgacaucugggucacccgcgagcccuacgucuccugcgaccccgacaagugcuaccaguucgcccucggccagggcaccacccucaacaacggccacuccaacgacaccguccacgaccgcacccccuaccgcacccuccucaugaacgagcucggcguccccuuccaccucggcacccgccaggucugcaucgccugguccuccuccuccugccacgacggcaaggccuggcuccacgucugcgucaccggcgacgacaagaacgccaccgccuccuucaucuacaacggccgccucgucgacuccaucggcuccugguccaagaagauccuccgcacccaggaguccgagugcgucugcaucaacggcaccugcaccgucgucaugaccgacggcuccgccuccggcaaggccgacaccaagauccucuucaucgaggagggcaagaucguccacaucuccacccucuccggcuccgcccagcacgucgaggagugcuccugcuacccccgcuaccccggcguccgcugcgucugccgcgacaacuggaagggcuccaaccgccccaucgucgacaucaacgucaaggacuacuccaucgucuccuccuacgucugcuccggccucgucggcgacaccccccgcaagaacgacuccuucuccuccucccacugccucgaccccaacaacgaggagggcggccacggcgucaagggcugggccuucgacgacggcaacgacgucuggaugggccgcaccaucuccgagaagcuccgcuccggcuacgagaccuucaaggucaucgagggcugguccaagcccaacuccaagcuccagaucaaccgccaggucaucgucgagcgcggcaaccgcuccggcuacuccggcaucuucuccgucgagggcaaguccugcaucaaccgcugcuucuacgucgagcucauccgcggccgcaaggaggagaccgaggucugguggaccuccaacuccaucgucgucuucugcggcaccuccggcaccuacggcaccggcuccuggcccgacggcgccgacaucaaccucaugcccaucuga

SEQ ID NO: 117783 - RNA, 1410 nt, Artificial Sequence; identical to SEQ ID NO: 110261
  derived and/or modified CDS sequence (opt2) from neuraminidase__InfluenzaA__AFD63947

SEQ ID NO: 117784 - RNA, 1410 nt, Artificial Sequence; identical to SEQ ID NO: 110261
  derived and/or modified CDS sequence (opt2) from neuraminidase__InfluenzaA__AFD63958

SEQ ID NO: 117785 - RNA, 1410 nt, Artificial Sequence; identical to SEQ ID NO: 110261
  derived and/or modified CDS sequence (opt2) from neuraminidase__InfluenzaA__AFD63969

SEQ ID NO: 117786 - RNA, 1410 nt, Artificial Sequence; identical to SEQ ID NO: 110261
  derived and/or modified CDS sequence (opt2) from neuraminidase__InfluenzaA__AFD63980

SEQ ID NO: 117787 - RNA, 1410 nt, Artificial Sequence
  derived and/or modified CDS sequence (opt2) from neuraminidase__InfluenzaA__AFD64002
augaaccccaaccagaagaucaucaccaucggcuccgucucccucaccaucgccgccaucugcuuccucaugcagaucgccauccucgucaccaccgucacccuccacuucaagcagcacgagugcaacuccccccccaacaaccaggucaugcucugcgagcccaccaucaucgagcgcaacaucaccgagaucgucuaccucaccaacaccaccaucgagaaggagaucugccccaagcucgccgaguaccgcaacugguccaagccccagugcaacaucaccggcuucgcccccuucuccaaggacaacuccauccgccucuccgccggcggcgacaucugggucacccgcgagcccuacgucuccugcgaccccgacaagugcuaccaguucgcccucggccagggcaccacccucaacaacggccacuccaacgacaccguccacgaccgcacccccuaccgcacccuccucaugaacgagcucggcguccccuuccaccucggcacccgccaggucugcaucgccugguccuccuccuccugccacgacggcaaggccuggcuccacgucugcgucaccggcgacgacaagaacgccaccgccuccuucaucuacaacggccgccucgucgacuccaucggcuccugguccaagaagauccuccgcacccaggaguccgagugcgucugcaucaacggcaccugcaccgucgucaugaccgacggcuccgccuccggcaaggccgacaccaagauccucuucaucgaggagggcaagaucguccacaucuccacccucuccggcuccgcccagcacgucgaggagugcuccugcuacccccgcuaccccggcguccgcugcgucugccgcgacaacuggaagggcuccaaccgccccaucgucgacaucaacgucaaggacuacuccaucgucuccuccuacgucugcuccggccucgucggcgacaccccccgcaagaccgacuccuucuccuccucccacugccucgaccccaacaacgaggagggcggccacggcgucaagggcugggccuucgacgacggcaacgacgucuggaugggccgcaccaucuccgagaagcuccgcuccggcuacgagaccuucaaggucaucgagggcugguccaagcccaacuccaagcuccagaucaaccgccaggucaucgucgagcgcggcaaccgcuccggcuacuccggcaucuucuccgucgagggcaaguccugcaucaaccgcugcuucuacgucgagcucauccgcggccgcaaggaggagaccgaggucugguggaccuccaacuccaucgucgucuucugcggcaccuccggcaccuacggcaccggcuccuggcccgacggcgccgacaucaaccucaugcccaucuga

SEQ ID NO: 117788 - RNA, 1410 nt, Artificial Sequence; identical to SEQ ID NO: 110171
  derived and/or modified CDS sequence (opt2) from neuraminidase__InfluenzaA__AFD64013

SEQ ID NO: 117789 - RNA, 1410 nt, Artificial Sequence
  derived and/or modified CDS sequence (opt2) from neuraminidase__InfluenzaA__AFD64024
augaaccccaaccagaagaucaucaccaucggcuccgucucccucaccaucgccgccaucugcuuccucaugcagaucgccauccucgucaccaccgucacccuccacuucaagcagcacgagugcaacuccccccccaacaaccaggucaugcucugcgagcccaccaucaucgagaagaacaucaccgagaucgucuaccucaccaacaccaccaucgagaaggagaucugccccaagcucgccgaguaccgcaacugguccaagccccagugcaacaucaccggcuucgcccccuucuccaaggacaacuccauccgccucuccgccggcggcgacaucugggucacccgcgagcccuacgucuccugcgaccccgacaagugcuaccaguucgcccucggccagggcaccacccucaacaacggccacuccaacgacaccguccacgaccgcacccccuaccgcacccuccucaugaacgagcucggcguccccuuccaccucggcacccgccaggucugcaucgccugguccuccuccuccugccacgacggcaaggccuggcuccacgucugcgucaccggcgacgacaagaacgccaccgccuccuucaucuacaacggccgccucgucgacuccaucggcuccugguccaagaagauccuccgcacccaggaguccgagugcgucugcaucaacggcaccugcaccgucgucaugaccgacggcuccgccuccggcaaggccgacaccaagauccucuucaucgaggagggcaagaucguccacaucuccacccucuccggcuccgcccagcacgucgaggagugcuccugcuacccccgcuaccccggcguccgcugcgucugccgcgacaacuggaagggcuccaaccgccccaucgucgacaucaacgucaaggacuacuccaucgucuccuccuacgucugcuccggccucgucggcgacaccccccgcaagaacgacuccuucuccuccucccacugccucgaccccaacaacgaggagggcggccacggcgucaagggcugggccuucgacgacggcaacgacgucuggaugggccgcaccaucuccgagaagcuccgcuccggcuacgagaccuucaaggucaucgagggcugguccaagcccaacuccaagcuccagaucaaccgccaggucaucgucgagcgcggcaaccgcuccggcuacuccggcaucuucuccgucgagggcaaguccugcaucaaccgcugcuucuacgucgagcucauccgcggccgcaaggaggagaccgaggucugguggaccuccaacuccaucgucgucuucugcggcaccuccggcaccuacggcaccggcuccuggcccgacggcgccgacaucaaccucaugcccaucuga

SEQ ID NO: 117790 - RNA, 1410 nt, Artificial Sequence
  derived and/or modified CDS sequence (opt2) from neuraminidase__InfluenzaA__AFD64035
augaaccccaaccagaagaucaucaccaucggcuccgucucccucaccaucgccgccaucugcuuccucaugcagaucgccauccucgucaccaccgucacccuccacuucaagcagcacgagugcaacuccccccccaacaaccaggucaugcucugcgagcccaccaucaucgagcgcaacaucaccgagaucgucuaccucaccaacaccaccaucgagaaggagaucugccccaagcucgccgaguaccgcaacugguccaagccccagugcaacaucaccggcuucgcccccuucuccaaggacaacuccauccgccucuccgccggcggcgacaucugggucacccgcgagcccuacgucuccugcgaccccgacaagugcuaccaguucgcccucggccagggcaccacccucaacaacggccacuccaacgacaccguccacgaccgcacccccuaccgcacccuccucaugaacgagcucggcguccccuuccaccucggcacccgccaggucugcaucgccugguccuccuccuccugccacgacggcaaggccuggcuccacgucugcgucaccggcgacgacaagaacgccaccgccuccuucaucuacaacggccgccucgucgacuccaucggcuccugguccaagaagauccuccgcacccaggaguccgagugcgucugcaucaacggcaccugcaccgucgucaugaccgacggcuccgccuccggcaaggccgacaccaagauccucuucaucgaggagggcaagaucguccacaucuccacccucuccggcuccgcccagcacgucgaggagugcuccugcuacccccgcuaccccggcguccgcugcgucugccgcgacaacuggaagggcuccaaccgccccaucgucgacaucaacgucaaggacuacuccaucgucuccuccuacgucugcuccggccucgucggcgacaccccccgcaagaacgacuccuucuccuccucccacugccucgaccccaacaacgaggagggcggccacggcgucaagggcugggccuucgacgacggcaacgacgucuggaugggccgcaccaucuccgagaagcuccgcuccggcuacgagaccuucaaggucaucgagggcugguccaagcccaacuccaagcuccagaucaaccgccaggucaucgucgagcgcggcaaccgcuccggcuacuccggcaucuucuccgucgagggcaaguccugcaucaaccgcugcuucuacgucgagcucauccgcggccgcaaggaggagaccgaggucugguggaccuccaacuccgucgucgucuucugcggcaccuccggcaccuacggcaccggcuccuggcccgacggcgccgacaucaaccucaugcccaucuga

SEQ ID NO: 117791 - RNA, 1410 nt, Artificial Sequence
  derived and/or modified CDS sequence (opt2) from neuraminidase__InfluenzaA__AFD64046
augaaccccaaccagaagaucaucaccaucggcuccgucucccucaccaucgccaccaucugcuuccucaugcagaucgccauccucgucaccaccgucacccuccacuucaagcagcacgagugcaacuccccccccaacaaccaggucaugcucugcgagcccaccaucaucgagcgcaacaucaccgagaucgucuaccucaccaacaccaccaucgagaaggagaucugccccaagcucgccgaguaccgcaacugguccaagccccagugcaacaucaccggcuucgcccccuucuccaaggacaacuccauccgccucuccgccggcggcgacaucugggucacccgcgagcccuacgucuccugcgaccccgacaagugcuaccaguucgcccucggccagggcaccacccucaacaacggccacuccaacgacaccguccacgagcgcacccccuaccgcacccuccucaugaacgagcucggcguccccuuccaccucggcacccgccaggucugcaucgccugguccuccuccuccugccacgacggcaaggccuggcuccacgucugcgucaccggcgacgacaagaacgccaccgccuccuucaucuacaacggccgccucgucgacuccaucggcuccugguccaagaagauccuccgcacccaggaguccgagugcgucugcaucaacggcaccugcaccgucgucaugaccgacggcuccgccuccggcaaggccgacaccaagauccucuucaucgaggagggcaagaucguccacaucuccacccucuccggcuccgcccagcacgucgaggagugcuccugcuacccccgcuaccccggcguccgcugcgucugccgcgacaacuggaagggcuccaaccgccccaucgucgacaucaacgucaaggacuacuccaucgucuccuccuacgucugcuccggccucgucggcgacaccccccgcaagaacgacuccuucuccuccucccacugccucgaccccaacaacgaggagggcggccacggcgucaagggcugggccuucgacgacggcaacgacgucuggaugggccgcaccaucuccgagaagcuccgcuccggcuacgagaccuucaaggucaucgagggcugguccaagcccaacuccaagcuccagaucaaccgccaggucaucgucgagcgcggcaaccgcuccggcuacuccggcaucuucuccgucgagggcaaguccugcaucaaccgcugcuucuacgucgagcucauccgcggccgcaaggaggagaccgaggucugguggaccuccaacuccaucgucgucuucugcggcaccuccggcaccuacggcaccggcuccuggcccgacggcgccgacaucaaccucaugcccaucuga

SEQ ID NO: 117792 - RNA, 1410 nt, Artificial Sequence; identical to SEQ ID NO: 117766
  derived and/or modified CDS sequence (opt2) from neuraminidase__InfluenzaA__AFD64057

SEQ ID NO: 117793 - RNA, 1410 nt, Artificial Sequence
  derived and/or modified CDS sequence (opt2) from neuraminidase__InfluenzaA__AFD64068
augaaccccaaccagaagaucaucaccaucggcuccgucucccucaccaucuccaccaucugcuucuucaugcagaucgccauccucaucaccaccgucacccuccacuucaagcaguacgaguucaacuccccccccaacaaccaggucaugcucugcgagcccaccaucaucgagcgcaacaucaccgagaucgucuaccucaccaacaccaccaucgagaaggagaucugccccaagcucgccgaguaccgcaacugguccaagccccagugcgacaucaccggcuucgcccccuucuccaaggacaacuccauccgccucuccgccggcggcgacaucugggucacccgcgagcccuacgucuccugcgaccccgacaagugcuaccaguucgcccucggccagggcaccacccucaacaacguccacuccaacgacaccguccacaaccgcacccccuaccgcacccuccucaugaacgagcucggcguccccuuccaccucggcaccaagcaggucugcaucgccugguccuccuccuccugccacgacggcaaggccuggcuccacgucugcgucaccggcgacgacaagaacgccaccgccuccuucaucuacaacggccgccucgucgacuccaucgucuccugguccaagaagauccuccgcacccaggaguccgagugcgucugcaucaacggcaccugcaccgucgucaugaccgacggcuccgccuccggcaaggccgacaccaagauccucuucaucgaggagggcaagaucguccacaccuccacccucuccggcuccgcccagcacgucgaggagugcuccugcuacccccgcuaccccggcguccgcugcgucugccgcgacaacuggaagggcuccaaccgccccaucgucgacaucaacaucaaggacuacuccaucgucuccuccuacgucugcuccggccucgucggcgacaccccccgcaagaacgacuccuccuccuccucccacugccucgaccccaacaacgaggagggcggccacggcgucaagggcugggccuucgacgacggcaacgacgucuggaugggccgcaccaucuccgagaagucccgcuccggcuacgagaccuucaaggucaucgagggcugguccaaccccaacuccaagcuccagaucaaccgccaggucaucgucgaccgcggcaaccgcuccggcuacuccggcaucuucuccgucgagggcaaguccugcaucaaccgcugcuucuacgucgagcucauccgcggccgcaaggaggagaccgagguccucuggaccuccaacuccaucgucgucuucugcggcaccuccggcaccuacggcaccggcuccuggcccgacggcgccgacaucaaccucaugcccaucuga

SEQ ID NO: 117794 - RNA, 1410 nt, Artificial Sequence
  derived and/or modified CDS sequence (opt2) from neuraminidase__InfluenzaA__AFD64079
augaaccccaaccagaagaucaucaccaucggcuccgucucccucaccaucgccgccaucugcuuccucaugcagaucgccauccucgucaccaccgucacccuccacuucaagcagcacgagugcaacuccccccccaacaaccaggucaugcucugcgagcccaccaucaucgagcgcaacaucaccgagaucgucuaccucaccaacaccaccaucgagaaggagaucugccccaagcucgccgaguaccgcaacugguccaagccccagugcaacaucaccggcuucgcccccuucuccaaggacaacuccauccgcaucuccgccggcggcgacaucugggucacccgcgagcccuacgucuccugcgaccccgacaagugcuaccaguucgcccucggccagggcaccacccucaacaacggccacuccaacgacaccguccacgaccgcacccccuaccgcacccuccucaugaacgagcucggcguccccuuccaccucggcacccgccaggucugcaucgccugguccuccuccuccugccacgacggcaaggccuggcuccacgucugcgucaccggcgacgacaagaacgccaccgccuccuucaucuacaacggccgccucgucgacuccaucggcuccugguccaagaagauccuccgcacccaggaguccgagugcgucugcaucaacggcaccugcaccgucgucaugaccgacggcuccgccuccggcaaggccgacaccaagauccucuucaucgaggagggcaagaucguccacaucuccacccucuccggcuccgcccagcacgucgaggagugcuccugcuacccccgcuaccccggcguccgcugcgucugccgcgacaacuggaagggcuccaaccgccccaucgucgacaucaacgucaaggacuacuccaucgucuccuccuacgucugcuccggccucgucggcgacaccccccgcaagaacgacuccuucuccuccucccacugccucgaccccaacaacgaggagggcggccacggcgucaagggcugggccuucgacgacggcaacgacgucuggaugggccgcaccaucuccgagaagcuccgcuccggcuacgagaccuucaaggucaucgagggcugguccaagcccaacuccaagcuccagaucaaccgccaggucaucgucgagcgcggcaaccgcuccggcuacuccggcaucuucuccgucgagggcaaguccugcaucaaccgcugcuucuacgucgagcucauccgcggccgcaaggaggagaccgaggucugguggaccuccaacuccaucgucgucuucugcggcaccuccggcaccuacggcaccggcuccuggcccgacggcgccgacaucaaccucaugcccaucuga

SEQ ID NO: 117795 - RNA, 1410 nt, Artificial Sequence; identical to SEQ ID NO: 110261
  derived and/or modified CDS sequence (opt2) from neuraminidase__InfluenzaA__AFD64090

SEQ ID NO: 117796 - RNA, 1410 nt, Artificial Sequence
  derived and/or modified CDS sequence (opt2) from neuraminidase__InfluenzaA__AFD64101
augaaccccaaccagaagaucaucaccaucggcuccgucucccucaccaucgccgccaucugcuuccucaugcagaucgccauccucgucaccaccgucacccuccacuucaagcagcacgagugcaacuccccccccaacaaccaggucaugcucugcgagcccaccaucaucgagcgcaacaucaccgagaucgucuaccucaccaacaccaccaucgagaaggagaucugccccaagcucgccgaguaccgcaacugguccaagccccagugcaacaucaccggcuucgcccccuucuccaaggacaacuccauccgccucuccgccggcggcgacaucugggucacccgcgagcccuacgucuccugcgaccccgacaagugcuaccaguucgcccucggccagggcaccacccucaacaacggccacuccaacgacaccguccacggccgcacccccuaccgcacccuccucaugaacgagcucggcguccccuuccaccucggcacccgccaggucugcaucgccugguccuccuccuccugccacgacggcaaggccuggcuccacgucugcgucaccggcgacgacaagaacgccaccgccuccuucaucuacaacggccgccucgucgacuccaucggcuccugguccaagaagauccuccgcacccaggaguccgagugcgucugcaucaacggcaccugcaccgucgucaugaccgacggcuccgccuccggcaaggccgacaccaagauccucuucaucgaggagggcaagaucguccacaucuccacccucuccggcuccgcccagcacgucgaggagugcuccugcuacccccgcuaccccggcguccgcugcgucugccgcgacaacuggaagggcuccaaccgccccaucgucgacaucaacgucaaggacuacuccaucgucuccuccuacgucugcuccggccucgucggcgacaccccccgcaagaacgacuccuucuccuccucccacugccucgaccccaacaacgaggagggcggccacggcgucaagggcugggccuucgacgacggcaacgacgucuggaugggccgcaccaucuccgagaagcuccgcuccggcuacgagaccuucaaggucaucgagggcugguccaagcccaacuccaagcuccagaucaaccgccaggucaucgucgagcgcggcaaccgcuccggcuacuccggcaucuucuccgucgagggcaaguccugcaucaaccgcugcuucuacgucgagcucauccgcggccgcaaggaggagaccgaggucugguggaccuccaacuccaucgucgucuucugcggcaccuccggcaccuacggcaccggcuccuggcccgacggcgccgacaucaaccucaugcccaucuga

SEQ ID NO: 117797 - RNA, 1410 nt, Artificial Sequence
  derived and/or modified CDS sequence (opt2) from neuraminidase__InfluenzaA__AFD64112
augaaccccaaccagaagaucaucaccaucggcuccgucucccucaccaucgccaccaucugcuuccucaugcagaucgccauccucgucaccaccgucacccuccacuucaagcaguacgagugcaacuccccccccaacaaccaggucaugcucugcgagcccaccaucaucgagcgcaacaucaccgagaucgucuaccucaccaacaccaccaucgagaaggagaucugccccaagcucgccgaguaccgcaacugguccaagccccagugcaacaucaccggcuucgcccccuucuccaaggacaacuccauccgccucuccgccggcggcgacaucugggucacccgcgagcccuacgucuccugcgaccccgacaagugcuaccaguucgcccucggccagggcaccacccucaacaacggccacuccaacgacaccguccacgaccgcacccccuaccgcacccuccucaugaacgagcucggcguccccuuccaccucggcacccgccaggucugcaucgccugguccuccuccuccugccacgacggcaaggccuggcuccacgucugcgucaccggcgacgacaagaacgccaccgccuccuucaucuacaacggccgccucgucgacuccaucggcuccugguccaagaagauccuccgcacccaggaguccgagugcgucugcaucaacggcaccugcaccgucgucaugaccgacggcuccgccuccggcaaggccgacaccaagauccucuucaucgaggagggcaagaucauccacaucuccacccucuccggcuccgcccagcacgucgaggagugcuccugcuacccccgcuaccccggcguccgcugcgucugccgcgacaacuggaagggcuccaaccgccccaucgucgacaucaacgucaaggacuacuccaucgucuccuccuacgucugcuccggccucgucggcgacaccccccgcaagaacgacuccuccuccuccucccacugccucgaccccaacaacgaggagggcggccacggcgucaagggcugggccuucgacgacggcaacgacgucuggaugggccgcaccaucuccgagaagcuccgcuccggcuacgagaccuucaaggucaucgagggcugguccaagcccaacuccaagcuccagaucaaccgccaggucaucgucgagcgcgacaaccgcuccggcuacuccggcaucuucuccgucgagggcaaguccugcaucaaccgcugcuucuacgucgagcucauccgcggccgcaaggaggagaccgaggucugguggaccuccaacuccaucgucgucuucugcggcaccuccggcaccuacggcaccggcuccuggcccgacggcgccgacaucaaccucaugcccaucuga

SEQ ID NO: 117798 - RNA, 1410 nt, Artificial Sequence; identical to SEQ ID NO: 111967
  derived and/or modified CDS sequence (opt2) from neuraminidase__InfluenzaA__AFD64123

SEQ ID NO: 117799 - RNA, 1410 nt, Artificial Sequence; identical to SEQ ID NO: 110261
  derived and/or modified CDS sequence (opt2) from neuraminidase__InfluenzaA__AFD64134

SEQ ID NO: 117800 - RNA, 1410 nt, Artificial Sequence; identical to SEQ ID NO: 110261
  derived and/or modified CDS sequence (opt2) from neuraminidase__InfluenzaA__AFD64145

SEQ ID NO: 117801 - RNA, 1410 nt, Artificial Sequence; identical to SEQ ID NO: 110261
  derived and/or modified CDS sequence (opt2) from neuraminidase__InfluenzaA__AFD64156

SEQ ID NO: 117802 - RNA, 1410 nt, Artificial Sequence; identical to SEQ ID NO: 110181
  derived and/or modified CDS sequence (opt2) from neuraminidase__InfluenzaA__AFD64167

SEQ ID NO: 117803 - RNA, 1410 nt, Artificial Sequence; identical to SEQ ID NO: 110261
  derived and/or modified CDS sequence (opt2) from neuraminidase__InfluenzaA__AFD64181

SEQ ID NO: 117804 - RNA, 1410 nt, Artificial Sequence
  derived and/or modified CDS sequence (opt2) from neuraminidase__InfluenzaA__AFD64192
augaaccccaaccagaagaucaucaccaucggcuccgucucccucaccaucgccgccaucugcuuccucaugcagaucgccauccucgucaccaccgucacccuccacuucaagcagcacgagugcaacuccccccccaacaaccaggucaugcucugcgagcccaccaucaucgagcgcaacaucaccgagaucgucuaccucaccaacaccaccaucgagaaggagaucugccccaagcucgccgaguaccgcaacugguccaagccccagugcaacaucaccggcuucgcccccuucuccaaggacaacuccauccgccucuccgccggcggcgacaucugggucacccgcgagcccuacgucuccugcgaccccgacaagugcuaccaguucgcccucggccagggcaccacccucaacaacggccacuccaacgacaccguccacgaccgcacccccuaccgcacccuccucaugaacgagcucggcguccccuuccaccucggcacccgccaggucugcaucgccugguccuccuccuccugccacgacggcaaggccuggcuccacgucugcgucaccggcgacgacaagaacgccaccgccuccuucaucuacaacggccgccucgucgacuccaucggcuccugguccaagaagauccuccgcacccaggaguccgagugcgucugcaucaacggcaccugcaccgucgucaugaccgacggcuccgccuccggcaaggccgacaccaagauccucuucaucgaggagggcaagaucguccacgucuccacccucuccggcuccgcccagcacgucgaggagugcuccugcuacccccgcuaccccggcguccgcugcgucugccgcgacaacuggaagggcuccaaccgccccaucgucgacaucaacgucaaggacuacuccaucgucuccuccuacgucugcuccggccucgucggcgacaccccccgcaagaacgacuccuucuccuccucccacugccucgaccccaacaacgaggagggcggccacggcgucaagggcugggccuucgacgacggcaacgacgucuggaugggccgcaccaucuccgagaagcuccgcuccggcuacgagaccuucaaggucaucgagggcugguccaagcccaacuccaagcuccagaucaaccgccaggucaucgucgagcgcggcaaccgcuccggcuacuccggcaucuucuccgucgagggcaaguccugcaucaaccgcugcuucuacgucgagcucauccgcggccgcaaggaggagaccgaggucugguggaccuccaacuccaucgucgucuucugcggcaccuccggcaccuacggcaccggcuccuggcccgacggcgccgacaucaaccucaugcccaucuga

SEQ ID NO: 117805 - RNA, 1410 nt, Artificial Sequence
  derived and/or modified CDS sequence (opt2) from neuraminidase__InfluenzaA__AFD64203
augaaccccaaccagaagaucaucaccaucggcuccgucucccucaccaucgccgccaucugcuuccucaugcagaucgccauccucgucaccaccgucacccuccacuucaagcagcacgagugcaacuccccccccaacaaccaggucaugcucugcgagcccaccaucaucgagcgcaacaucaccgagaucgucuaccucaccaacaccaccaucgagaaggagaucugccccaagcucgccgaguaccgcaacugguccaagccccagugcaacaucaccggcuucgcccccuucuccaaggacaacuccauccgccucuccgccggcggcgacaucugggucacccgcgagcccuacgucuccugcgaccccgacaagugcuaccaguucgcccucggccagggcaccacccucaacaaccgccacuccaacgacaccguccacgaccgcacccccuaccgcacccuccucaugaacgagcucggcguccccuuccaccucggcacccgccaggucugcaucgccugguccuccuccuccugccacgacggcaaggccuggcuccacgucugcgucaccggcgacgacaagaacgccaccgccuccuucaucuacaacggccgccucgucgacuccaucggcuccugguccaagaagauccuccgcacccaggaguccgagugcgucugcaucaacggcaccugcaccgucgucaugaccgacggcuccgccuccggcaaggccgacaccaagauccucuucaucgaggagggcaagaucguccacaucuccacccucuccggcuccgcccagcacgucgaggagugcuccugcuacccccgcuaccccggcguccgcugcgucugccgcgacaacuggaagggcuccaaccgccccaucgucgacaucaacgucaaggacuacuccaucgucuccuccuacgucugcuccggccucgucggcgacaccccccgcaagaacgacuccuucuccuccucccacugccucgaccccaacaacgaggagggcggccacggcgucaagggcugggccuucgacgacggcaacgacgucuggaugggccgcacccucuccgagaagcuccgcuccggcuacgagaccuucaaggucaucgagggcugguccaagcccaacuccaagcuccagaucaaccgccaggucaucgucgagcgcggcaaccgcuccggcuacuccggcaucuucuccgucgagggcaaguccugcaucaaccgcugcuucuacgucgagcucauccgcggccgcaaggaggagaccgaggucugguggaccuccaacuccaucgucgucuucugcggcaccuccggcaccuacggcaccggcuccuggcccgacggcgccgacaucaaccucaugcccaucuga

SEQ ID NO: 117806 - RNA, 1410 nt, Artificial Sequence; identical to SEQ ID NO: 117766
  derived and/or modified CDS sequence (opt2) from neuraminidase__InfluenzaA__AFD64214

SEQ ID NO: 117807 - RNA, 1410 nt, Artificial Sequence; identical to SEQ ID NO: 111965
  derived and/or modified CDS sequence (opt2) from neuraminidase__InfluenzaA__AFD64225

SEQ ID NO: 117808 - RNA, 1410 nt, Artificial Sequence; identical to SEQ ID NO: 110261
  derived and/or modified CDS sequence (opt2) from neuraminidase__InfluenzaA__AFD64317

SEQ ID NO: 117809 - RNA, 1410 nt, Artificial Sequence; identical to SEQ ID NO: 111967
  derived and/or modified CDS sequence (opt2) from neuraminidase__InfluenzaA__AFD64328

SEQ ID NO: 117810 - RNA, 1410 nt, Artificial Sequence; identical to SEQ ID NO: 117766
  derived and/or modified CDS sequence (opt2) from neuraminidase__InfluenzaA__AFD64339

SEQ ID NO: 117811 - RNA, 1410 nt, Artificial Sequence; identical to SEQ ID NO: 110261
  derived and/or modified CDS sequence (opt2) from neuraminidase__InfluenzaA__AFD64350

SEQ ID NO: 117812 - RNA, 1410 nt, Artificial Sequence; identical to SEQ ID NO: 117766
  derived and/or modified CDS sequence (opt2) from neuraminidase__InfluenzaA__AFD64361

SEQ ID NO: 117813 - RNA, 1410 nt, Artificial Sequence; identical to SEQ ID NO: 117766
  derived and/or modified CDS sequence (opt2) from neuraminidase__InfluenzaA__AFD64372

SEQ ID NO: 117814 - RNA, 1410 nt, Artificial Sequence; identical to SEQ ID NO: 110261
  derived and/or modified CDS sequence (opt2) from neuraminidase__InfluenzaA__AFD64383

SEQ ID NO: 117815 - RNA, 1410 nt, Artificial Sequence; identical to SEQ ID NO: 117766
  derived and/or modified CDS sequence (opt2) from neuraminidase__InfluenzaA__AFD64394

SEQ ID NO: 117816 - RNA, 1410 nt, Artificial Sequence; identical to SEQ ID NO: 110261
  derived and/or modified CDS sequence (opt2) from neuraminidase__InfluenzaA__AFD64405

SEQ ID NO: 117817 - RNA, 1410 nt, Artificial Sequence; identical to SEQ ID NO: 110261
  derived and/or modified CDS sequence (opt2) from neuraminidase__InfluenzaA__AFD64416

SEQ ID NO: 117818 - RNA, 1410 nt, Artificial Sequence; identical to SEQ ID NO: 110261
  derived and/or modified CDS sequence (opt2) from neuraminidase__InfluenzaA__AFD64427

SEQ ID NO: 117819 - RNA, 1410 nt, Artificial Sequence
  derived and/or modified CDS sequence (opt2) from neuraminidase__InfluenzaA__AFD64438
augaaccccaaccagaagaucaucaccaucggcuccgucucccucaccaucgccgccaucugcuuccucaugcagaucgccauccucgucaccaccgucacccuccacuucaagcagcacgagugcaacuccccccccaacaaccaggucaugcucugcgagcccaccaucaucgagcgcaacaucaccgagaucgucuaccucaccaacaccaccaucgagaaggagaucugccccaaccucgccgaguaccgcaacugguccaagccccagugcaacaucaccggcuucgcccccuucuccaaggacaacuccauccgccucuccgccggcggcgacaucugggucacccgcgagcccuacgucuccugcgaccccgacaagugcuaccaguucgcccucggccagggcaccacccucaacaacggccacuccaacgacaccguccacgaccgcacccccuaccgcacccuccucaugaacgagcucggcguccccuuccaccucggcacccgccaggucugcaucgccugguccuccuccuccugccacgacggcaaggccuggcuccacgucugcgucaccggcgacgacaagaacgccaccgccuccuucaucuacaacggccgccucgucgacuccaucggcuccugguccaagaagauccuccgcacccaggaguccgagugcgucugcaucaacggcaccugcaccgucgucaugaccgacggcuccgccuccggcaaggccgacaccaagauccucuucaucgaggagggcaagaucguccacaucuccacccucuccggcuccgcccagcacgucgaggagugcuccugcuacccccgcuaccccggcguccgcugcgucugccgcgacaacuggaagggcuccaaccgccccaucgucgacaucaacgucaaggacuacuccaucgucuccuccuacgucugcuccggccucgucggcgacaccccccgcaagaacgacuccuucuccuccucccacugccucgaccccaacaacgaggagggcggccacggcgucaagggcugggccuucgacgacggcaacgacgucuggaugggccgcaccaucuccgagaagcuccgcuccggcuacgagaccuucaaggucaucgagggcugguccaagcccaacuccaagcuccagaucaaccgccaggucaucgucgagcgcggcaaccgcuccggcuacuccggcaucuucuccgucgagggcaaguccugcaucaaccgcugcuucuacgucgagcucauccgcggccgcaaggaggagaccgaggucugguggaccuccaacuccaucgucgucuucugcggcaccuccggcaccuacggcaccggcuccuggcccgacggcgccgacaucaaccucaugcccaucuga

SEQ ID NO: 117820 - RNA, 1410 nt, Artificial Sequence; identical to SEQ ID NO: 110261
  derived and/or modified CDS sequence (opt2) from neuraminidase__InfluenzaA__AFD64449

SEQ ID NO: 117821 - RNA, 1410 nt, Artificial Sequence; identical to SEQ ID NO: 110181
  derived and/or modified CDS sequence (opt2) from neuraminidase__InfluenzaA__AFD64460

SEQ ID NO: 117822 - RNA, 1410 nt, Artificial Sequence; identical to SEQ ID NO: 117179
  derived and/or modified CDS sequence (opt2) from neuraminidase__InfluenzaA__AFD98098

SEQ ID NO: 117823 - RNA, 1410 nt, Artificial Sequence
  derived and/or modified CDS sequence (opt2) from neuraminidase__InfluenzaA__AFD98120
augaaccccaaccagaagaucaucaccaucggcuccgucucccucaccaucuccaccaucugcuucuucaugcagaucgccauccucaucaccaccgucacccuccacuucaagcaguacgaguucaacuccccccccaacaaccaggucaugcucugcgagcccaccaucaucgagcgcaacaucaccgagaucgucuaccucaccaacaccaccaucgagaaggagaucugccccaagcucgccgaguaccgcaacugguccaagccccagugcgacaucaccggcuucgcccccuucuccaaggacaacuccauccgccucuccgccggcggcgacaucugggucacccgcgagcccuacgucuccugcgaccccgacaagugcuaccaguucgcccucggccagggcaccacccucaacaacguccacuccaacaacaccguccgcgaccgcacccccuaccgcacccuccucaugaacgagcucggcguccccuuccaccucggcaccaagcaggucugcaucgccugguccuccuccuccugccacgacggcaaggccuggcuccacgucugcaucaccggcgacgacaagaacgccaccgccuccuucaucuacaacggccgccucgucgacuccgucgucuccugguccaaggagauccuccgcacccaggaguccgagugcgucugcaucaacggcaccugcaccgucgucaugaccgacggcuccgccuccggcaaggccgacaccaagauccucuucaucgaggagggcaagaucguccacaccuccacccucuccggcuccgcccagcacgucgaggagugcuccugcuacccccgcuaccccggcguccgcugcgucugccgcgacaacuggaagggcuccaaccgccccaucgucgacaucaacaucaaggaccacuccaucgucuccuccuacgucugcuccggccucgucggcgacaccccccgcaagaacgacuccuccuccuccucccacugccucgaccccaacaacgaggagggcggccacggcgucaagggcugggccuucgacgacggcaacgacgucuggaugggccgcaccaucaacgagaccucccgccucggcuacgagaccuucaaggucaucgagggcugguccaaccccaaguccaagcuccagaucaaccgccaggucaucgucgacaagggcaaccgcuccggcuacuccggcaucuucuccgucgagggcaaguccugcaucaaccgcugcuucuacgucgagcucauccgcggccgcaaggaggagaccgagguccucuggaccuccaacuccaucgucgucuucugcggcaccuccggcaccuacggcaccggcuccuggcccgacggcgccgaccucaaccucaugcccaucuga

SEQ ID NO: 117824 - RNA, 1410 nt, Artificial Sequence; identical to SEQ ID NO: 115554
  derived and/or modified CDS sequence (opt2) from neuraminidase__InfluenzaA__AFD98131

SEQ ID NO: 117825 - RNA, 1410 nt, Artificial Sequence; identical to SEQ ID NO: 117179
  derived and/or modified CDS sequence (opt2) from neuraminidase__InfluenzaA__AFD98142

SEQ ID NO: 117826 - RNA, 1410 nt, Artificial Sequence; identical to SEQ ID NO: 117823
  derived and/or modified CDS sequence (opt2) from neuraminidase__InfluenzaA__AFD98164

SEQ ID NO: 117827 - RNA, 1410 nt, Artificial Sequence
  derived and/or modified CDS sequence (opt2) from neuraminidase__InfluenzaA__AFD98175
augaaccccaaccagaagaucaucaccaucggcuccgucucccucaccaucuccaccaucugcuucuucaugcagaucgccauccucaucaccaccgucacccuccacuucaagcaguacgaguucaacuccccccccaacaaccaggucaugcucugcgagcccaccaucaucgagcgcaacaucaccgagaucgucuaccucaccaacaccaccaucgagaaggagaucugccccaagcucgccgaguaccgcaacugguccaagccccagugcgacaucaccggcuucgcccccuucuccaaggacaacuccauccgccucuccgccggcggcgacaucugggucacccgcgagcccuacgucuccugcgaccccgacaagugcuaccaguucgcccucggccagggcaccacccucaacaacguccacuccaacaacaccguccacgaccgcacccccuaccgcacccuccucaugaacgagcucggcguccccuuccaccucggcaccaagcaggucugcaucgccugguccuccuccuccugccacgacggcaaggccuggcuccacgucugcaucaccggcgacgacaagaacgccaccgccuccuucaucuacaacggccgccucgucgacuccgucgucuccugguccaaggagauccuccgcacccaggaguccgagugcgucugcaucaacggcaccugcaccgucgucaugaccgacggcuccgccuccggcaaggccgacaccaagauccucuucaucgaggagggcaagaucguccacaccuccacccucuccggcuccgcccagcacgucgaggagugcuccugcuacccccgcuaccccggcguccgcugcgucugccgcgacaacuggaagggcuccaaccgccccaucgucgacaucaacaucaaggaccacuccaucgucuccuccuacgucugcuccggccucgucggcgacaccccccgcaagaacgacuccuccuccuccucccacugccucgaccccaacaacgaggagggcggccacggcgucaagggcugggccuucgacgacggcaacgacgucuggaugggccgcaccaucaacgagaccucccgccucggcuacgagaccuucaaggucaucgagggcugguccaaccccaaguccaagcuccagaucaaccgccaggucaucgucgacaagggcaaccgcuccggcuacuccggcaucuucuccgucgagggcaaguccugcaucaaccgcugcuucuacgucgagcucauccgcggccgcaaggaggagaccgagguccucuggaccuccaacuccaucgucgucuucugcggcaccuccggcaccuacggcaccggcuccuggcccgacggcgccgaccucaaccucaugcccaucuga

SEQ ID NO: 117828 - RNA, 1410 nt, Artificial Sequence
  derived and/or modified CDS sequence (opt2) from neuraminidase__InfluenzaA__AFD98186
augaaccccaaccagaagaucaucaccaucggcuccgucucccucaccaucuccaccaucugcuucuucaugcagaucgccauccucaucaccaccgucacccuccacuucaagcaguacgaguucaacuccccccccaacaaccaggucaugcucugcgagcccaccaucaucgagcgcaacaucaccgagaucgucuaccucaccaacaccaccaucgagaaggagaucugccccaagcucgccgaguaccgcaacugguccaagccccagugcgacaucaccggcuucgcccccuucuccaaggacaacuccauccgccucuccgccggcggcgacaucugggucacccgcgagcccuacgucuccugcgaccccgacaagugcuaccaguucgcccucggccagggcaccacccucaacaacguccacuccaacaacaccguccgcgaccgcacccccuaccgcacccuccucaugaacgagcucggcguccccuuccaccucggcaccaagcaggucugcaucgccugguccuccuccuccugccacgacggcaaggccuggcuccacgucugcaucaccggcgacgacaagaacgccaccgccuccuucaucuacaacggcaagcucgucgacuccgucgucuccugguccaaggagauccuccgcacccaggaguccgagugcgucugcaucaacggcaccugcaccgucgucaugaccgacggcuccgccuccggcaaggccgacaccaagauccucuucgucgaggagggcaagaucguccacaccuccacccucuccggcuccgcccagcacgucgaggagugcuccugcuacccccgcuaccccggcguccgcugcgucugccgcgacaacuggaagggcuccaaccgccccaucgucgacaucaacaucaaggaccacuccaucaucuccuccuacgucugcuccggccucgucggcgacaccccccgcaagaacgacuccuccuccuccucccacugccucgaccccaacaacgaggagggcggccacggcgucaagggcugggccuucgacgacggcaacgacgucuggaugggccgcaccaucaacgagaccucccgccucggcuacgagaccuucaaggucaucgagggcugguccaaccccaaguccaagcuccagaucaaccgccaggucaucgucgaccgcggcaaccgcuccggcuacuccggcaucuucuccgucgagggcaaguccugcaucaaccgcugcuucuacgucgagcucauccgcggccgcaaggaggagaccgagguccucuggaccuccaacuccaucgucgucuucugcggcaccuccggcaccuacggcaccggcuccuggcccgacggcgccgaccucaaccucaugcccaucuga

SEQ ID NO: 117829 - RNA, 1410 nt, Artificial Sequence; identical to SEQ ID NO: 115554
  derived and/or modified CDS sequence (opt2) from neuraminidase__InfluenzaA__AFD98197

SEQ ID NO: 117830 - RNA, 1410 nt, Artificial Sequence; identical to SEQ ID NO: 116291
  derived and/or modified CDS sequence (opt2) from neuraminidase__InfluenzaA__AFD98208

SEQ ID NO: 117831 - RNA, 1410 nt, Artificial Sequence
  derived and/or modified CDS sequence (opt2) from neuraminidase__InfluenzaA__AFD98218
augaaccccaaccagaagaucaucaccaucggcuccgucucccucaccaucuccaccaucugcuucuucaugcagaucgccauccucaucaccaccgucacccuccacuucaagcaguacgaguucaacuccccccccaacaaccaggucaugcucugcgagcccaccaucaucgagcgcaacaucaccgagaucgucuaccucaccaacaccaccaucgagaaggagaucugccccaagcccgccgaguaccgcaacugguccaagccccagugcgacaucaccggcuucgcccccuucuccaaggacaacuccauccgccucuccgccggcggcgacaucugggucacccgcgagcccuacgucuccugcgaccccgacaagugcuaccaguucgcccucggccagggcaccacccucaacaacguccacuccaacaacaccguccgcgaccgcacccccuaccgcacccuccucaugaacgagcucggcguccccuuccaccucggcaccaagcaggucugcaucgccugguccuccuccuccugccacgacggcaaggccuggcuccacgucugcaucaccggcgacgacaagaacgccaccgccuccuucaucuacaacggccgccucgucgacuccgucgucuccugguccaaggagauccuccgcacccaggaguccgagugcgucugcaucaacggcaccugcaccgucgucaugaccgacggcuccgccuccggcaaggccgacaccaagauccucuucaucgaggagggcaagaucguccacaccuccacccucuccggcuccgcccagcacgucgaggagugcuccugcuacccccgcuaccccggcguccgcugcgucugccgcgacaacuggaagggcuccaaccgccccaucgucgacaucaacaucaaggaccacuccaucgucuccuccuacgucugcuccggccucgucggcgacaccccccgcaagaacgacuccuccuccuccucccacugccucgaccccaacaacgaggagggcggccacggcgucaagggcugggccuucgacgacggcaacgacgucuggaugggccgcaccaucgacgagaccucccgccucggcuacgagaccuucaaggucaucgagggcugguccaaccccaaguccaagcuccagaucaaccgccaggucaucgucgacaagggcaaccgcuccggcuacuccggcaucuucuccgucgagggcaaguccugcaucaaccgcugcuucuacgucgagcucauccgcggccgcaaggaggagaccgagguccucuggaccuccaacuccaucgucgucuccugcggcaccuccggcaccuacggcaccggcuccuggcccgacggcgccgaccucaaccucaugcccaucuga

SEQ ID NO: 117832 - RNA, 1410 nt, Artificial Sequence; identical to SEQ ID NO: 115554
  derived and/or modified CDS sequence (opt2) from neuraminidase__InfluenzaA__AFD98229

SEQ ID NO: 117833 - RNA, 1410 nt, Artificial Sequence; identical to SEQ ID NO: 115554
  derived and/or modified CDS sequence (opt2) from neuraminidase__InfluenzaA__AFD98240

SEQ ID NO: 117834 - RNA, 1410 nt, Artificial Sequence; identical to SEQ ID NO: 117823
  derived and/or modified CDS sequence (opt2) from neuraminidase__InfluenzaA__AFD98251

SEQ ID NO: 117835 - RNA, 1410 nt, Artificial Sequence; identical to SEQ ID NO: 117823
  derived and/or modified CDS sequence (opt2) from neuraminidase__InfluenzaA__AFD98262

SEQ ID NO: 117836 - RNA, 1410 nt, Artificial Sequence; identical to SEQ ID NO: 116745
  derived and/or modified CDS sequence (opt2) from neuraminidase__InfluenzaA__AFD98273

SEQ ID NO: 117837 - RNA, 1410 nt, Artificial Sequence; identical to SEQ ID NO: 116293
  derived and/or modified CDS sequence (opt2) from neuraminidase__InfluenzaA__AFD98283

SEQ ID NO: 117838 - RNA, 1410 nt, Artificial Sequence; identical to SEQ ID NO: 115554
  derived and/or modified CDS sequence (opt2) from neuraminidase__InfluenzaA__AFD98293

SEQ ID NO: 117839 - RNA, 1410 nt, Artificial Sequence; identical to SEQ ID NO: 116745
  derived and/or modified CDS sequence (opt2) from neuraminidase__InfluenzaA__AFD98313

SEQ ID NO: 117840 - RNA, 1410 nt, Artificial Sequence; identical to SEQ ID NO: 116293
  derived and/or modified CDS sequence (opt2) from neuraminidase__InfluenzaA__AFD98323

SEQ ID NO: 117841 - RNA, 1410 nt, Artificial Sequence; identical to SEQ ID NO: 116745
  derived and/or modified CDS sequence (opt2) from neuraminidase__InfluenzaA__AFD98333

SEQ ID NO: 117842 - RNA, 1410 nt, Artificial Sequence; identical to SEQ ID NO: 117823
  derived and/or modified CDS sequence (opt2) from neuraminidase__InfluenzaA__AFD98343

SEQ ID NO: 117843 - RNA, 1410 nt, Artificial Sequence
  derived and/or modified CDS sequence (opt2) from neuraminidase__InfluenzaA__AFD98354
augaaccccaaccagaagaucaucaccaucggcuccgucucccucaccaucuccaccaucugcuucuucaugcagaucgccauccucaucaccaccgucacccuccacuucaagcaguacgaguucaacuccccccccaacaaccaggucaugcucugcgagcccaccaucaucgagcgcaacaucaccgagaucgucuaccucaccaacaccaccaucgagaaggagaucugccccaagcucgccgaguaccgcaacugguccaagccccagugcgacaucaccggcuucgcccccuucuccaaggacaacuccauccgccucuccgccggcggcgacaucugggucacccgcgagcccuacgucuccugcgaccccgacaagugcuaccaguucgcccucggccagggcaccacccucaacaacguccacuccaacaacaccguccgcgaccgcacccccuaccgcacccuccucaugaacgagcucggcguccccuuccaccucggcaccaagcaggucugcaucgccugguccuccuccuccugccacgacggcaaggccuggcuccacgucugcaucaccggcgacgacaagaacgccaccgccuccuucaucuacaacggccgccucgucgacuccgucgucuccugguccaaggagauccuccgcacccaggaguccgagugcgucugcaucaacggcaccugcaccgucgucaugaccgacggcaacgccuccggcaaggccgacaccaagauccucuucaucgaggagggcaagaucguccacaccuccacccuccucggcuccgcccagcacgucgaggagugcuccugcuacccccgcuaccccggcguccgcugcgucugccgcgacaacuggaagggcuccaaccgccccaucgucgacaucaacaucaaggaccacuccaucgucuccuccuacgucugcuccggccucgucggcgacaccccccgcaagaacgacuccuccuccuccucccacugccucgaccccaacaacgaggagggcggccacggcgucaagggcugggccuucgacgacggcaacgacgucuggaugggccgcaccaucaacgagaccucccgccucggcuacgagaccuucaaggucaucgagggcugguccaaccccaaguccaagcuccagaucaaccgccaggucaucgucgacaagggcaaccgcuccggcuacuccggcaucuucuccgucgagggcaaguccugcaucaaccgcugcuucuacgucgagcucauccgcggccgcaaggaggagaccgagguccucuggaccuccaacuccaucgucgucuucugcggcaccuccggcaccuacggcaccggcuccuggcccgacggcgccgaccucaaccucaugcccaucuga

SEQ ID NO: 117844 - RNA, 1410 nt, Artificial Sequence
  derived and/or modified CDS sequence (opt2) from neuraminidase__InfluenzaA__AFD98365
augaaccccaaccagaagaucaucaccaucggcuccgucucccucaccaucuccaccaucugcuucuucaugcagaucgccauccucaucaccaccgucacccuccacuucaagcaguacgaguucuacuccccccccaacaaccaggucaugcucugcgagcccaccaucaucgagcgcaacaucaccgagaucgucuaccucaccaacaccaccaucgagaaggagaucugccccaagcucgccgaguaccgcaacugguccaagccccagugcgacaucaccggcuucgcccccuucuccaaggacaacuccauccgccucuccgccggcggcgacaucugggucacccgcgagcccuacgucuccugcgaccccgacaagugcuaccaguucgcccucggccagggcaccacccucaacaacguccacuccaacaacaccguccgcgaccgcacccccuaccgcacccuccucaugaacgagcucggcguccccuuccaccucggcaccaagcaggucugcaucgccugguccuccuccuccugccacgacggcaaggccuggcuccacgucugcaucaccggcgacgacaagaacgccaccgccuccuucaucuacaacggccgccucgucgacuccgucgucuccugguccaaggagauccuccgcacccaggaguccgagugcgucugcaucaacggcaccugcaccgucgucaugaccgacggcuccgccuccggcaaggccgacaccaagauccucuucaucgaggagggcaagaucguccacaccuccacccucuccggcuccgcccagcacgucgaggagugcuccugcuacccccgcuaccccggcguccgcugcgucugccgcgacaacuggaagggcuccaaccgccccaucgucgacaucaacaucaaggaccacuccaucgucuccuccuacgucugcuccggccucgucggcgacaccccccgcaagaacgacuccuccuccuccucccacugccucgaccccaacaacgaggagggcggccacggcgucaagggcugggccuucgacgacggcaacgacgucuggaugggccgcaccaucaacgagaccucccgccucggcuacgagaccuucaaggucaucgagggcugguccaaccccaaguccaagcuccagaucaaccgccaggucaucgucgaccgcggcaaccgcuccggcuacuccggcaucuucuccgucgagggcaaguccugcaucaaccgcugcuucuacgucgagcucauccgcggccgcaaggaggagaccaagguccucuggaccuccaacuccaucgucgucuucugcggcaccuccggcaccuacggcaccggcuccuggcccgacggcgccgaccucaaccucaugcccaucuga

SEQ ID NO: 117845 - RNA, 1410 nt, Artificial Sequence
  derived and/or modified CDS sequence (opt2) from neuraminidase__InfluenzaA__AFD98376
augaaccccaaccagaagaucaucaccaucggcuccgucucccucaccaucuccaccaucugcuucuucaugcagaucgccauccucaucaccaccgucacccuccacuucaagcaguacgaguucaacuucccccccaacaaccaggucaugcucugcgagcccaccaucaucgagcgcaacaucaccgagaucgucuaccucaccaacaccaccaucgagaaggagaucugccccaagcucgccgaguaccgcaacugguccaagccccagugcgacaucaccggcuucgcccccuucuccaaggacaacuccauccgccucuccgccggcggcgacaucugggucacccgcgagcccuacgucuccugcgaccccgacaagugcuaccaguucgcccucggccagggcaccacccucaacaacguccacuccaacaacaccguccgcgaccgcacccccuaccgcacccuccucaugaacgagcucggcguccccuuccaccucggcaccaagcaggucugcaucgccugguccuccuccuccugccacgacggcaaggccuggcuccacgucugcaucaccggcgacgacaagaacgccaccgccuccuucaucuacaacggccgccucgucgacuccgucgucuccugguccaaggagauccuccgcacccaggaguccgagugcgucugcaucaacggcaccugcaccgucgucaugaccgacggcuccgccuccggcaaggccgacaccaagauccucuucaucgaggagggcaagaucguccacaccuccacccucuccggcuccgcccagcacgucgaggagugcuccugcuacccccgcuaccccggcguccgcugcgucugccgcgacaacuggaagggcuccaaccgccccaucgucgacaucaacaucaaggaccacuccaucgucuccuccuacgucugcuccggccucgucggcgacaccccccgcaagaacgacuccuccuccuccggccacugccucgaccccaacaacgaggagggcggccacggcgucaagggcugggccuucgacgacggcaacgacgucuggaugggccgcaccaucaacgagaccucccgccucggcuacgagaccuucaaggucaucgagggcugguccaaccccaaguccaagcuccagaucaaccgccaggucaucgucgacaagggcaaccgcuccggcuacuccggcaucuucuccgucgagggcaaguccugcaucaaccgcugcuucuacgucgagcucauccgcggccgcaaggaggagaccgagguccucuggaccuccaacuccaucgucgucuucugcggcaccuccggcaccuacggcaccggcuccuggcccgacggcgccgaccucaaccucaugcccaucuga

SEQ ID NO: 117846 - RNA, 1410 nt, Artificial Sequence
  derived and/or modified CDS sequence (opt2) from neuraminidase__InfluenzaA__AFD98387
augaaccccaaccagaagaucaucaccaucggcuccgucucccucaccaucuccaccaucugcuuccucaugcagaucgccauccucaucaccaccgucacccuccacuucaagcaguacgaguucaacuccccccccaacaaccaggucaugcucugcgagcccaccaucaucgagcgcaacaucaccgagaucgucuaccucaccaacaccaccaucgagaaggagaucugccccaagcucgccgaguaccgcgacugguccaagccccagugcgacaucaccggcuucgcccccuucuccaaggacaacuccauccgccucuccgccggcggcgacaucugggucacccgcgagcccuacgucuccugcgaccccgacaagugcuaccaguucgcccucggccagggcaccacccucaacaacguccacuccaacaacaccguccgcgaccgcacccccuaccgcacccuccucaugaacgagcucggcguccccuuccaccucggcaccaagcaggucugcaucgccugguccuccuccuccugccacgacggcaaggccuggcuccacgucugcaucaccggcgacgacaagaacgccaccgccuccuucaucuacaacggcaagcucgucgacuccgucgucuccugguccaaggagauccuccgcacccaggaguccgagugcgucugcaucaacggcaccugcaccgucgucaugaccgacggcuccgccuccggcaaggccgacaccaagauccucuucaucgaggagggcaagaucguccacaccuccacccucuccggcuccgcccagcacgucgaggagugcuccugcuacccccgcuaccccggcguccgcugcgucugccgcgacaacuggaagggcuccaaccgccccaucgucgacaucaacaucaaggaccacuccaucgucuccuccuacgucugcuccggccucgucggcgacaccccccgcaagaacgaccgcuccuccaacucccacugccucgaccccaacaacgaggagggcggccacggcgucaagggcugggccuucgacgacggcaacgacgucuggaugggccgcaccaucaacgagaccucccgccucggcuacgagaccuucaaggucaucgagggcugguccaaccccaaguccaagcuccagaucaaccgccaggucaucgucgaccgcggcaaccgcuccggcuacuccggcaucuucuccgucgagggcaaguccugcaucaaccgcugcuucuacgucgagcucauccgcggccgcaaggaggagaccgagguccucuggaccuccaacuccaucgucgucuucugcggcaccuccggcaccuacggcaccggcuccuggcccgacggcgccgaccucaaccucaugcccaucuga

SEQ ID NO: 117847 - RNA, 1410 nt, Artificial Sequence
  derived and/or modified CDS sequence (opt2) from neuraminidase__InfluenzaA__AFD98398
augaaccccaaccagaagaucaucaccaucggcuccgucucccucaccaucuccaccaucugcuucuucaugcagaucgccauccucaucaccaccgucacccuccacuucaagcaguacgaguucaacuccccccccaacaaccaggucaugcucugcgagcccaccaucaucgagcgcaacaucaccgagaucgucuaccucaccaacaccaccaucgagaaggagaucugccccaagcucgccgaguaccgcaacugguccaagccccagugcgacaucaccggcuucgcccccuucuccaaggacaacuccauccgccucuccgccggcggcgacaucugggucacccgcgagcccuacgucuccugcgaccccgacaagugcuaccaguucgcccucggccagggcaccacccucaacaacguccacuccaacaacaccguccgcgaccgcacccccuaccgcacccuccucaugaacgagcucggcguccccuuccaccucggcacccgccaggucugcaucgccugguccuccuccuccugccacgacggcaaggccuggcuccacgucugcaucaccggcgacgacaagaacgccaccgccuccuucaucuacaacggccgccucgucgacuccgucgucuccugguccaaggagauccuccgcacccaggaguccgagugcgucugcaucaacggcaccugcaccgucgucaugaccgacggcuccgccuccggcaaggccgacaccaagauccucuucaucgaggagggcaagaucguccacaccuccacccucuccggcuccgcccagcacgucgaggagugcuccugcuacccccgcuaccccggcguccgcugcgucugccgcgacaacuggaagggcuccaaccgccccaucgucgacaucaacaucaaggaccacuccaucgucuccuccuacgucugcuccggccucgucggcgacaccccccgcaagaacgacuccuccuccuccucccacugccucgaccccaacaacgaggagggcggccacggcgucaagggcugggccuucgacgacggcaacgacgucuggaugggccgcaccaucaacgagaccucccgccucggcuacgagaccuucaaggucaucgagggcugguccaaccccaaguccaagcuccagaucaaccgccaggucaucgucgacaagggcaaccgcuccggcuacuccggcaucuucuccgucgagggcaaguccugcaucaaccgcugcuucuacgucgagcucauccgcggccgcaaggaggagaccgagguccucuggaccuccaacuccaucgucgucuucugcggcaccuccggcaccuacggcaccggcuccuggcccgacggcgccgaccucaaccucaugcccaucuga

SEQ ID NO: 117848 - RNA, 1410 nt, Artificial Sequence
  derived and/or modified CDS sequence (opt2) from neuraminidase__InfluenzaA__AFD98409
augaaccccaaccagaagaucaucaccaucggcuccgucucccucaccaucuccaccaucugcuucuucaugcagaucgccauccucaucaccaccgucacccuccacuucaagcaguacgaguucaacuccccccccaacaaccaggucaugcucugcgagcccaccaucaucgagcgcaacaucaccgagaucgucuaccucaccaacaccaccaucgagaaggagaucugccccaagcucgccgaguaccgcaacugguccaagccccagugcgacaucaccggcuucgcccccuucuccaaggacaacuccauccgccucuccgccggcggcgacaucugggucacccgcgagcccuacgucuccugcgaccccgacaagugcuaccaguucgcccucggccagggcaccacccucaacaacguccacuccaacaacaccguccgcgaccgcacccccuaccgcacccuccucaugaacgagcucggcguccccuuccaccucggcaccaagcaggucugcaucgccugguccuccuccuccugccacgacggcaaggccuggcuccacgucugcaucaccggcgacgacaagaacgccaccgccuccuucaucuacaacggccgccucgucgacuccgucgucuccugguccaaggagauccuccgcacccaggaguccgagugcgucugcaucaacggcaccugcaccgucgucaugaccgacggcuccgccuccggcaaggccgacaccaagauccucuucaucgaggagggcaagaucguccacaccuccacccucuccggcuccgcccagcacgucgaggagugcuccugcuacccccgcuaccccggcguccgcugcgucugccgcgacaacuggaagggcuccaaccgccccaucgucgacaucaacaucaaggaccacuccaucgucuccuccuacgucugcuccggccucgucggcgacaccccccgcaagaacgacuccuccuccuccggccacugccucgaccccaacaacgaggagggcggccacggcgucaagggcugggccuucgacgacggcaacgacgucuggaugggccgcaccaucaacgagaccucccgccucggcuacgagaccuucaaggucaucgagggcugguccaaccccaaguccaagcuccagaucaaccgccaggucaucgucgacaagggcaaccgcuccggcuacuccggcaucuucuccgucgagggcaaguccugcaucaaccgcugcuucuacgucgagcucauccgcggccgcaaggaggagaccgagguccucuggaccuccaacuccaucgucgucuucugcggcaccuccggcaccuacggcaccggcuccuggcccgacggcgccgaccucaaccucaugcccaucuga

SEQ ID NO: 117849 - RNA, 1410 nt, Artificial Sequence; identical to SEQ ID NO: 117823
  derived and/or modified CDS sequence (opt2) from neuraminidase__InfluenzaA__AFD98420

SEQ ID NO: 117850 - RNA, 1410 nt, Artificial Sequence
  derived and/or modified CDS sequence (opt2) from neuraminidase__InfluenzaA__AFD98431
augaaccccaaccagaagaucaucaccaucggcuccgucucccucaccaucuccaccaucugcuucuucaugcagaucgccauccucaucaccaccgucacccuccacuucaagcaguacgaguucaacuccccccccaacaaccaggucaugcucugcgagcccaccaucaucgagcgcaacaucaccgagaucgucuaccucaccaacaccaccaucgagaaggagaucugccccaagcucgccgaguaccgcaacugguccaagccccagugcgacaucaccggcuucgcccccuucuccaaggacaacuccauccgccucuccgccggcggcgacaucugggucacccgcgagcccuacgucuccugcgaccccgacaagugcuaccaguucgcccucggccagggcaccacccucaacaacguccacuccaacaacaccguccgcgaccgcacccccuaccgcacccuccucaugaacgagcucggcguccccuuccaccucggcaccaagcaggucugcaucgccugguccuccuccuccugccacgacggcaaggccuggcuccacgucugcaucaccggcgacgacaagaacgccaccgccuccuucaucuacaacggccgccucgucgacuccgucgucuccugguccaaggagauccuccgcacccaggaguccgagugcgucugcaucaacggcaccugcaccgucgucaugaccgacggcuccgccuccggcaaggccgacaccaagauccucuucaucgaggagggcaagaucguccacaccuccacccucuccggcuccgcccagcacgucgaggagugcuccugcuacccccgcuaccccggcguccgcugcgucugccgcgacaacuggaagggcuccaaccgccccaucgucgacaucaacaucaaggaccacuccaucgucuccuccuacgucugcuccggccucgucggcgacaccccccgcaagaacgacuccuccuccuccucccacugccucgaccccaacaacgaggagggcggccacggcgucaagggcugggccuucgacgacggcaacgacgucuggaugggccgcaccaucaacgagaccucccgccucggcuacgagaccuucaaggucaucgagggcugguccaaccccaaguccaagcuccagaucaaccgccaggucaucgucggccgcggcaaccgcuccggcuacuccggcaucuucuccgucgagggcaaguccugcaucaaccgcugcuucuacgucgagcucauccgcggccgcaaggaggagaccgagguccucuggaccuccaacuccaucgucgucuucugcggcaccuccggcaccuacggcaccggcuccuggcccgacggcgccgaccucaaccucaugcccaucuga

SEQ ID NO: 117851 - RNA, 1410 nt, Artificial Sequence
  derived and/or modified CDS sequence (opt2) from neuraminidase__InfluenzaA__AFD98442
augaaccccaaccagaagaucaucaccaucggcuccgucugcaugaccaucggcauggccaaccucauccuccagaucggcaacaucaucuccaucuggaucucccacuccauccagcucggcaaccagaaccagaucgagaccugcaaccaguccgucaucaccuacgagaacaacaccugggucaaccagaccuacgucaacaucuccaacaccaacuucgccgccggccaguccgucgucuccgucaagcucgccggcaacuccucccucugccccgucuccggcugggccaucuacuccaaggacaacuccauccgcaucggcuccaagggcgacgucuucgucauccgcgagcccuucaucuccugcuccccccucgagugccgcaccuucuuccucacccagggcgcccuccucaacgacaagcacuccaacggcaccaucaaggaccgcucccccuaccgcacccucauguccugccccaucggcgagguccccucccccuacaacucccgcuucgaguccgucgccugguccgccuccgccugccacgacggcaucaacuggcucaccaucggcaucuccggccccgacaacggcgccgucgccguccucaaguacaacggcaucaucaccgacaccaucaaguccuggcgcaacaacauccuccgcacccaggaguccgagugcgccugcgucaacggcuccugcuucaccaucaugaccgacggccccuccgacggccaggccuccuacaagaucuuccgcaucgagaagggcaagaucgucaaguccgucgagaugaacgcccccaacuaccacuacgaggagugcuccugcuaccccgacuccggcgagaucaccugcgucugccgcgacaacuggcacggcuccaaccgccccugggucuccuucaaccagaaccucgaguaccagaucggcuacaucugcuccggcaucuucggcgacaacccccgccccaacgacaagaccggcuccugcggccccgucuccuccaacggcgccaacggcgucaagggcuucuccuucaaguacggcaacggcgucuggaucggccgcaccaaguccaucuccucccgcaagggcuucgagaugaucugggaccccaacggcuggaccggcaccgacaacaacuucgccaucaagcaggacaucgucggcaucaacgagugguccggcuacuccggcuccuucguccagcaccccgagcucaccggccucgacugcauccgccccugcuucugggucgagcucauccgcggccgccccaaggagaacaccaucuggaccuccggcuccuccaucuccuucugcggcgucaacuccgacaccgucggcugguccuggcccgacggcgccgagcuccccuucaccaucgacaaguga

SEQ ID NO: 117852 - RNA, 1410 nt, Artificial Sequence
  derived and/or modified CDS sequence (opt2) from neuraminidase__InfluenzaA__AFD98452
augaaccccaaccagaagaucaucacccucggcuccgucucccucaccaucuccaccaucugcuucuucauccagaucgccauccucaucaccaccgucacccuccacuucaagcaguacgaguucaacuccccccccaacaaccaggucaugcucugcgagcccaccaucaucgagcgcaacaucaccgagaucgucuaccucaccaacaccaccaucgagaaggagaucugccccaagcucgccgaguaccgcaacugguccaagccccagugcgacaucaccggcuucgcccccuucuccaaggacaacuccauccgccucuccgccggcggcgacaucugggucacccgcgagcccuacgucuccugcgaccccgacaagugcuaccaguucgcccucggccagggcaccacccucaacaacguccacuccaacaacaccguccgcgaccgcacccccuaccgcacccuccucaugaacgagcucggcguccccuuccaccucggcaccaagcaggucugcaucgccugguccuccuccuccugccacgacggcaaggccuggcuccacgucugcaucaccggcgacgacaagaacgccaccgccuccuucaucuacaacggccgccucgucgacuccgucgucuccugguccaaggagauccuccgcacccaggaguccgagugcgucugcaucaacggcaccugcaccgucgucaugaccgacggcuccgccuccggcaaggccgacaccaagauccucuucaucgaggagggcaagaucguccacaccuccacccucuccggcuccgcccagcacgucgaggagugcuccugcuacccccgcuaccccggcguccgcugcgucugccgcgacaacuggaagggcuccaaccgccccaucgucgacaucaacaucaaggaccacuccaucgucuccuccuacgucugcuccggccucgucggcgacaccccccgcaagaacgacuccuccuccuccucccacugccucgaccccaacaacgaggagggcggccacggcgucaagggcugggccuucgacgacggcaacgacgucuggaugggccgcaccaucaacgagaccucccgccucggcuacgagaccuucaaggucaucgagggcugguccaaccccaaguccaagcuccagaucaaccgccaggucaucgucgaccgcggcaaccgcuccggcuacuccggcaucuucuccgucgagggcaaguccugcaucaaccgcugcuucuacgucgagcucauccgcggccgcaaggaggagaccgagguccucuggaccuccaacuccaucgucgucuucugcggcaccuccggcaccuacggcaccggcuccuggcccgacggcgccgaccucaaccucaugcccaucuga

SEQ ID NO: 117853 - RNA, 1410 nt, Artificial Sequence; identical to SEQ ID NO: 117823
  derived and/or modified CDS sequence (opt2) from neuraminidase__InfluenzaA__AFD98463

SEQ ID NO: 117854 - RNA, 1410 nt, Artificial Sequence
  derived and/or modified CDS sequence (opt2) from neuraminidase__InfluenzaA__AFD98474
augaaccccaaccagaagaucaucaccaucggcuccgucugcaugaccaucggcauggccaaccucauccuccagaucggcaacaucaucuccaucuggaucucccacuccauccagcucggcaaccagaaccagaucgagaccugcaaccaguccgucaucaccuacgagaacaacaccugggucaaccagaccuacgucaacaucuccaacaccaacuucgccgccggccaguccgucgucuccgucaagcucgccggcaacuccucccucugccccgucuccggcugggccaucuacuccaaggacaacuccauccgcaucggcuccaagggcgacgucuucgucauccgcgagcccuucaucuccugcuccccccucgagugccgcaccuucuuccucacccagggcgcccuccucaacgacaagcacuccaacggcaccaucaaggaccgcucccccuaccgcacccucauguccugccccaucggcgagguccccucccccuacaacucccgcuucgaguccgucgccugguccgccuccgccugccacgacggcaucaacuggcucaccaucggcaucuccggccccgacaacggcgccgucgccguccucaaguacaacggcaucaucaccgacaccaucaaguccuggcgcaacaacauccuccgcacccaggaguccgagugcgccugcgucaacggcuccugcuucaccaucaugaccgacggccccuccgacggccaggccuccuacaagaucuuccgcaucgagaagggcaagaucgucaaguccgucgagaugaacgcccccaacuaccacuacgaggagugcuccugcuaccccgacuccuccgagaucaccugcgucugccgcgacaacuggcacggcuccaaccgccccugggucuccuucaaccagaaccucgaguaccagaucggcuacaucugcuccggcaucuucggcgacaacccccgccccaacgacaagaccggcuccugcggccccgucuccuccaacggcgccaacggcgucaagggcuucuccuucaaguacggcaacggcgucuggaucggccgcaccaaguccaucuccucccgcaagggcuucgagaugaucugggaccccaacggcuggaccggcaccgacaacaacuucuccaucaagcaggacaucaucggcaucaacgagugguccggcuacuccggcuccuucguccagcaccccgagcucaccggccucgacugcauccgccccugcuucugggucgagcucauccgcggccgccccaaggagaacaccaucuggaccuccggcuccuccaucuccuucugcggcgucaacuccgacaccgucggcugguccuggcccgacggcgccgagcuccccuucaccaucgacaaguga

SEQ ID NO: 117855 - RNA, 1410 nt, Artificial Sequence
  derived and/or modified CDS sequence (opt2) from neuraminidase__InfluenzaA__AFD98484
augaaccccaaccagaagaucaucaccaucggcuccgucucccucaccaucuccaccaucugcuucuucaugcagaucgccauccucaucaccaccgucacccuccacuucaagcaguacgaguucaacuccccccccaacaaccaggucaugcucugcgagcccaccaucaucgagcgcaacaucaccgagaucgucuaccucaccaacaccaccaucgagaaggagaucugccccaagcucgccgaguaccgcaacugguccaagccccagugcgacaucaccggcuucgcccccuucuccaaggacaacuccauccgccucuccgccggcggcgacaucugggucacccgcgagcccuacgucuccugcgaccccgacaagugcuaccaguucgcccucggccagggcaccacccucaacaacguccacuccaacaacaccguccgcgaccgcacccccuaccgcacccuccucaugaacgagcucggcguccccuuccaccucggcaccaagcaggucugcaucgccugguccuccuccuccugccacgacggcaaggccuggcuccacgucugcaucaccggcgacgacaagaacgccaccgccuccuucaucuacaacggccgccucgucgacuccgucgucuccugguccaaggagauccuccgcacccaggaguccgagugcgucugcaucaacggcaccugcaccgucgucaugaccgacggcuccgccuccggcaaggccgacaccaagauccucuucaucgaggagggcaagaucguccacaccuccacccucuccggcuccgcccagcacgucgaggagugcuccugcuacccccgcuaccccggcguccgcugcgucugccgcgacaacuggaagggcuccaaccgccccaucgucgacaucaacaucaaggaccacuccaucgucuccuccuacgucugcuccggccucgucggcgacaccccccgcaagaacgacuccuccuccuccucccacugccucgaccccaacaacgaggagggcggccacggcgucaagggcugggccuucgacgacggcaacgacgucuggaugggccgcaccaucaacgagaccucccgccucggcuacgagaccuucaaggucaucgagggcugguccaaccccaaguccaagcuccagaugaaccgccaggucaucgucgaccgcggcaaccgcuccggcuacuccggcaucuucuccgucgagggcaaguccugcaucaaccgcugcuucuacgucgagcucauccgcggccgcaaggaggagaccgagguccucuggaccuccaacuccaucgucgucuucugcggcaccuccggcaccuacggcaccggcuccuggcccgacggcgccgaccucaaccucaugcccaucuga

SEQ ID NO: 117856 - RNA, 1410 nt, Artificial Sequence
  derived and/or modified CDS sequence (opt2) from neuraminidase__InfluenzaA__AFD98495
augaaccccaaccagaagaucaucaccaucggcuccgucucccucaccaucuccaccaucugcuucuucaugcagaucgccauccucaucaccaccgucacccuccacuucaagcaguacgaguucaacuccccccccaacaaccaggucaugcucugcgagcccaccaucaucgagcgcaacaucaccgagaucgucuaccucaccaacaccaccaucgagaaggagaucugccccaagcucgccgaguaccgcaacugguccaagccccagugcgacaucaccggcuucgcccccuucuccaaggacaacuccauccgccucuccgccggcggcgacaucugggucacccgcgagcccuacgucuccugcgaccccgacaagugcuaccaguucgcccucggccagggcaccacccucaacaacguccacuccaacaacaccguccgcgaccgcacccccuaccgcacccuccucaugaacgagcucggcguccccuuccaccucggcaccaagcaggucugcaucgccugguccuccuccuccugccacgacggcaaggccuggcuccacgucugcaucaccggcgacgacaagaacgccaccgccuccuucaucuacaacggcaagcucgucgacuccgucgucuccugguccaaggagauccuccgcacccaggaguccgagugcgucugcaucaacggcaccugcaccgucgucaugaccgacggcuccgccuccggcaaggccaacaccaagauccucuucaucgaggagggcaagaucguccacaccuccacccucuccggcuccgcccagcacgucgaggagugcuccugcuacccccgcuaccccggcguccgcugcgucugccgcgacaacuggaagggcuccaaccgccccaucgucgacaucaacaucaaggaccacuccaucgucuccuccuacgucugcuccggccucgucggcgacaccccccgcaagaacgacuccuccuccuccucccacugccucgaccccaacaacgaggagggcggccacggcgucaagggcugggccuucgacgacggcaacgacgucuggaugggccgcaccaucaacgagaccucccgccucggcuacgagaccuucaaggucaucgagggcugguccaaccccaaguccaagcuccagaucaaccgccaggucaucgucgaccgcggcaaccgcuccggcuacuccggcaucuucuccgucgagggcaaguccugcaucaaccgcugcuucuacgucgagcucauccgcggccgcaaggaggagaccgagguccucuggaccuccaacuccaucgucgucuucugcggcaccuccggcaccuacggcaccggcuccuggcccgacggcgccgaccucaaccucaugcccaucuga

SEQ ID NO: 117857 - RNA, 1410 nt, Artificial Sequence; identical to SEQ ID NO: 117823
  derived and/or modified CDS sequence (opt2) from neuraminidase__InfluenzaA__AFD98506

SEQ ID NO: 117858 - RNA, 1410 nt, Artificial Sequence
  derived and/or modified CDS sequence (opt2) from neuraminidase__InfluenzaA__AFD98517
augaaccccaaccagaagaucaucaccaucggcuccgucucccucaccaucuccaccaucugcuucuucaugcagaucgccauccucaucaccaccgucacccuccacuucaagcaguacgaguucaacuccccccccaacaaccaggucaugcucugcgagcccaccaucaucgagcgcaacaucaccgagaucgucuaccucaccaacaccaccaucgagaaggagaucugccccaagcucgccgaguaccgcaacugguccaagccccagugcgacaucaccggcuucgcccccuucuccaaggacaacuccauccgccucuccgccggcggcgacaucugggucacccgcgagcccuacgucuccugcgaccccgacaagugcuaccaguucgcccucggccagggcaccacccucaacaacguccacuccaacaacaccguccgcgaccgcacccccuaccgcacccuccucaugaacgagcucggcguccccuuccaccucggcaccaagcaggucugcaucgccugguccuccuccuccugccacgacggcaaggccuggcuccacgucugcaucaccggcgacgacaagaacgccaccgccuccuucaucuacaacggcaagcucgucgacuccgucgucuccugguccaaggagauccuccgcacccaggaguccgagugcgucugcaucaacggcaccugcaccgucgucaugaccgacggcuccgccuccggcaaggccgacaccaagauccucuucaucaaggagggcaagaucguccacaccuccacccucuccggcuccgcccagcacgucgaggagugcuccugcuacccccgcuaccccggcguccgcugcgucugccgcgacaacuggaagggcuccaaccgccccaucgucgacaucaacaucaaggaccacuccaucgucuccuccuacgucugcuccggccucgucggcgacaccccccgcaagaacgacuccuccuccuccucccacugccucgaccccaacaacgaggagggcggccacggcgucaagggcugggccuucgacgacggcaacgacgucuggaugggccgcaccaucaacgagaccucccgccucggcuacgagaccuucaaggucaucgagggcugguccaaccccaaguccaagcuccagaucaaccgccaggucaucgucgaccgcggcaaccgcuccggcuacuccggcaucuucuccgucgagggcaaguccugcaucaaccgcugcuucuacgucgagcucauccgcggccgcaaggaggagaccgagguccucuggaccuccaacuccaucgucgucuucugcggcaccuccggcaccuacggcaccggcuccuggcccgacggcgccgaccucaaccucaugcccaucuga

SEQ ID NO: 117859 - RNA, 1410 nt, Artificial Sequence; identical to SEQ ID NO: 115554
  derived and/or modified CDS sequence (opt2) from neuraminidase__InfluenzaA__AFD98528

SEQ ID NO: 117860 - RNA, 1410 nt, Artificial Sequence; identical to SEQ ID NO: 117823
  derived and/or modified CDS sequence (opt2) from neuraminidase__InfluenzaA__AFD98539

SEQ ID NO: 117861 - RNA, 1410 nt, Artificial Sequence; identical to SEQ ID NO: 117823
  derived and/or modified CDS sequence (opt2) from neuraminidase__InfluenzaA__AFD98550

SEQ ID NO: 117862 - RNA, 1410 nt, Artificial Sequence
  derived and/or modified CDS sequence (opt2) from neuraminidase__InfluenzaA__AFD98561
augaaccccaaccagaagaucaucaccaucggcuccgucucccucaccaucuccaccaucugcuucuucaugcagaucgccauccucaucaccaccgucacccuccacuucaagcaguacgaguucaacuccccccccaacaaccaggucaugcucugcgagcccaccaucaucgagcgcaacaucaccgagaucgucuaccucaccaacaccaccaucgagaaggagaucugccccaagcucgccgaguaccgcaacugguccaagccccagugcgacaucaccggcuucgcccccuucuccaaggacaacuccauccgccucuccgccggcggcgacaucugggucacccgcgagcccuacgucuccugcgaccccgacaagugcuaccaguucgcccucggccagggcaccacccucaacaacguccacuccaacaacaccguccgcgaccgcacccccuaccgcacccuccucaugaacgagcucggcguccccuuccaccucggcaccaagcaggucugcaucgccugguccuccuccuccugccacgacggcaaggccuggcuccacgucugcaucaccggcgacgacaagaacgccaccgccuccuucaucuacaacggccgccucgucgacuccgucgucuccugguccaaggagauccuccgcacccaggaguccgagugcgucugcaucaacggcaccugcgccgucgucaugaccgacggcuccgccuccggcaaggccgacaccaagauccucuucaucgaggagggcaagaucguccacaccuccacccucuccggcuccgcccagcacgucgaggagugcuccugcuacccccgcuaccccggcguccgcugcgucugccgcgacaacuggaagggcuccaaccgccccaucgucgacaucaacaucaaggaccacuccaucgucuccuccuacgucugcuccggccucgucggcgacaccccccgcaaguccgacuccuccuccuccucccacugccucgaccccaacaacgaggagggcggccacggcgucaagggcugggccuucgacgacggcaacgacgucuggaugggccgcaccaucaacgagaccucccgccucggcuacgagaccuucaaggucaucgagggcugguccaaccccaaguccaagcuccagaucaaccgccaggucaucgucgaccgcggcaaccgcuccggcuacuccggcaucuucuccgucgagggcaaguccugcaucaaccgcugcuucuacgucgagcucauccgcggccgcaaggaggagaccgagguccucuggaccuccaacuccaucgucgucuucugcggcaccuccggcaccuacggcaccggcuccuggcccgacggcgccgaccucaaccucaugcccaucuga

SEQ ID NO: 117863 - RNA, 1410 nt, Artificial Sequence
  derived and/or modified CDS sequence (opt2) from neuraminidase__InfluenzaA__AFD98572
augaaccccaaccagaagaucaucaccaucggcuccgucucccucaccaucuccaccaucugcuucuucaugcagaucgccauccucaucaccaccgucacccuccacuucaagcaguacgaguucaacuccccccccaacaaccaggucaugcucugcgagcccaccaucaucgagcgcaacaucaccgagaucgucuaccucaccaacaccacccucgagaaggagaucugccccaagcucgccgaguaccgcaacugguccaagccccagugcgacaucaccggcuucgcccccuucuccaaggacaacuccauccgccucuccgccggcggcgacaucugggucacccgcgagcccuacgucuccugcgaccccgacaagugcuaccaguucgcccucggccagggcaccacccucaacaacguccacuccaacaacaccguccgcgaccgcacccccuaccgcacccuccucaugaacgagcucggcguccccuuccaccucggcaccaagcaggucugcaucgccugguccuccuccuccugccacgacggcaaggccuggcuccacgucugcaucaccggcgacgacaagaacgccaccgccuccuucaucuacaacggccgccucgucgacuccgucgucuccugguccaaggagauccuccgcacccaggaguccgagugcgucugcaucaacggcaccugcaccgucgucaugaccgacggcuccgccuccggcaaggccgacaccaagauccucuucaucgaggagggcaagaucguccacaccuccacccucuccggcuccgcccagcacgucgaggagugcuccugcuacccccgcuaccccggcguccgcugcgucugccgcgacaacuggaagggcuccaaccgccccaucgucgacaucaacaucaaggaccacuccaucgucuccuccuacgucugcuccggccucgucggcgacaccccccgcaagaacgacuccuccuccuccucccacugccucgaccccaacaacgaggagggcggccacggcgucaagggcugggccuucgacgacggcaacgacgucuggaugggccgcaccaucaacgagaccucccgccucggcuacgagaccuucaaggucaucgagggcugguccaaccccaaguccaagcuccagaucaaccgccaggucaucgucgaccgcggcaaccgcuccggcuacuccggcaucuucuccgucgagggcaaguccugcaucaaccgcugcuucuacgucgagcucauccgcggccgcaaggaggagaccgagguccucuggaccuccaacuccaucgucgucuucugcggcaccuccggcaccuacggcaccggcuccuggcccgacggcgccgaccucaaccucaugcccaucuga

SEQ ID NO: 117864 - RNA, 1410 nt, Artificial Sequence
  derived and/or modified CDS sequence (opt2) from neuraminidase__InfluenzaA__AFD98583
augaaccccaaccagaagaucaucaccaucggcuccgucucccucaccaucuccaccaucugcuucuucaugcagaucgccauccucaucaccaccgucacccuccacuucaagcaguacgaguucaacuccccccccaacaaccaggucaugcucugcgagcccaccaucaucgagcgcaacaucaccgagaucgucuaccucaccaacaccaccaucgagaaggagaucugccccaagcucgccgaguaccgcaacugguccaagccccagugcgacaucaccggcuucgcccccuucucccgcgacaacuccauccgccucuccgccggcggcgacaucugggucacccgcgagcccuacgucuccugcgaccccgacaagugcuaccaguucgcccucggccagggcaccacccucaacaacguccacuccaacaacaccguccgcgaccgcacccccuaccgcacccuccucaugaacgagcucggcguccccuuccaccucggcaccaagcaggucugcaucgccugguccuccuccuccugccacgacggcaaggccuggcuccacgucugcaucaccggcgacgacaagaacgccaccgccuccuucaucuacaacggccgccucgucgacuccgucgucuccugguccaaggagauccuccgcacccaggaguccgagugcgucugcaucaacggcaccugcaccgucgucaugaccgacggcuccgccuccggcaaggccgacaccaagauccucuucaucgaggagggcaagaucguccacaccuccacccucuccggcuccgcccagcacgucgaggagugcuccugcuacccccgcuaccccggcguccgcugcgucugccgcgacaacuggaagggcuccaaccgccccaucgucgacaucaacaucaaggaccacuccaucgucuccuccuacgucugcuccggccucgucggcgacaccccccgcaaguccgacuccuccuccuccucccacugccucgaccccaacaacgaggagggcggccacggcgucaagggcugggccuucgacgacggcaacgacgucuggaugggccgcaccaucaacgagaccucccgccucggcuacgagaccuucaaggucaucgagggcugguccaaccccaaguccaagcuccagaucaaccgccaggucaucgucgaccgcggcaaccgcuccggcuacuccggcaucuucuccgucgagggcaaguccugcaucaaccgcugcuucuacgucgagcucauccgcggccgcaaggaggagaccgagguccucuggaccuccaacuccaucgucgucuucugcggcaccuccggcaccuacggcaccggcuccuggcccgacggcgccgaccucaaccucaugcccaucuga

SEQ ID NO: 117865 - RNA, 1410 nt, Artificial Sequence
  derived and/or modified CDS sequence (opt2) from neuraminidase__InfluenzaA__AFE02944
augaaccccaaccagaagaucaucaccaucggcuccgucugcaugaccaucggcauggccaaccucauccuccagaucggcaacaucaucuccaucuggaucucccacuccauccagcucggcaaccagaaccagaucgagaccugcaaccaguccgucaucaccuacgagaacaacaccugggucaaccagaccuacgucaacaucuccaacaccaacuucgccgccggccaguccgucgucuccgucaagcucgccggcaacuccucccucugccccgucuccggcugggccaucuacuccaaggacaacuccauccgcaucggcuccaagggcgacgucuucgucauccgcgagcccuucaucuccugcuccccccucgagugccgcaccuucuuccucacccagggcgcccuccucaacgacaagcacuccaacggcaccaucaaggaccgcucccccuaccgcacccucauguccugccccaucggcgagguccccucccccuacaacucccgcuucgaguccgucgccugguccgccuccgccugccacgacggcaucaacuggcucaccaucggcaucuccggccccgacaacggcgccgucgccguccucaaguacaacggcaucaucaccgacaccaucaaguccuggcgcaacaacauccuccgcacccaggaguccgagugcgccugcgucaacggcuccugcuucaccgucaugaccgacggccccuccgacggccaggccuccuacaagaucuuccgcaucgagaagggcaagaucgucaaguccgucgagaugaacgcccccaacuaccacuacgaggagugcuccugcuaccccgacuccuccgagaucaccugcgucugccgcgacaacuggcacggcuccaaccgccccugggucuccuucaaccagaaccucgaguaccagaucggcuacaucugcuccggcaucuucggcgacaacccccgccccaacgacaagaccggcuccugcggccccgucuccuccaacggcgccaacggcgucaagggcuucuccuucaaguacggcaacggcgucuggaucggccgcaccaaguccaucuccucccgcaacggcuucgagaugaucugggaccccaacggcuggaccggcaccgacaacaacuucuccaucaagcaggacaucgucggcaucaacgagugguccggcuacuccggcuccuucguccagcaccccgagcucaccggccucaacugcauccgccccugcuucugggucgagcucauccgcggccgccccaaggagaacaccgucuggaccuccggcuccuccaucuccuucugcggcgucaacuccgacaccgucggcugguccuggcccgacggcgccgagcuccccuucaccaucgacaaguga

SEQ ID NO: 117866 - RNA, 1410 nt, Artificial Sequence
  derived and/or modified CDS sequence (opt2) from neuraminidase__InfluenzaA__AFE47627
augaaccccaaccagaagaucaucaccaucggcuccgucucccucaccaucgccaccaucugcuuccucaugcagaucgccauccucgucaccaccgucacccuccacuucaagcaguacgagugcaacuccccccccaacaaccaggucaugcucugcgagcccaccaucaucgagcgcaacaucaccgagaucgucuaccucaccaacaccaccaucgagaaggagaucugccccaagcucgccgaguaccgcaacugguccaagccccagugcaacaucaccggcuucgcccccuucuccaaggacaacuccauccgccucuccgccggcggcgacaucugggucacccgcgagcccuacgucuccugcgaccccgacaagugcuaccaguucgcccucggccagggcaccacccucaacaacggccacuccaacgacaccguccacgaccgcacccccuaccgcacccuccucaugaacgagcucggcguccccuuccaccucggcaccaagcaggucugcaucgccugguccuccuccuccugccacgacggcaaggccuggcuccacgucugcgucaccggcgacgacgagaacgccaccgccuccuucaucuacaacggccgccucgucgacuccaucggcuccugguccaagaagauccuccgcacccaggaguccgagugcgucugcaucaacggcaccugcaccgucgucaugaccgacggcuccgccuccggcaaggccgacaccaagauccucuucaucgaggagggcaagaucguccacaccuccucccucuccggcuccgcccagcacgucgaggagugcuccugcuacccccgcuaccccggcguccgcugcgucugccgcgacaacuggaagggcuccaaccgccccaucgucgacaucaacgucaaggacuacuccaucgucuccuccuacgucugcuccggccucgucggcgacaccccccgcaagaacgacuccuccuccuccucccacugccucgaccccaacaacgaggagggcggccacggcgucaagggcugggccuucgacgacggcaacgacgucuggaugggccgcaccaucuccgagaagcuccgcuccggcuacgagaccuucaaggucaucgagggcugguccaagcccaacuccaagcuccagaccaaccgccaggucaucgucgaccgcggcaaccgcuccggcuacuccggcaucuucuccgucgaguccaaguccugcaucaaccgcugcuucuacgucgagcucauccgcggccgcaagcaggagaccgagguccucuggaccuccaacuccaucgucgucuucugcggcaccuccggcaccuacggcaccggcuccuggcccgacggcgccgacaucaaccucaugcccaucuga

SEQ ID NO: 117867 - RNA, 1410 nt, Artificial Sequence; identical to SEQ ID NO: 117179
  derived and/or modified CDS sequence (opt2) from neuraminidase__InfluenzaA__AFF18509

SEQ ID NO: 117868 - RNA, 1410 nt, Artificial Sequence
  derived and/or modified CDS sequence (opt2) from neuraminidase__InfluenzaA__AFF57129
augaaccccaaccagaagaucaucaccaucggcuccgucugcaugaccaucggcauggccaaccucauccuccagaucggcaacaucaucuccaucuggaucucccacuccauccagcucggcaaccagaaccagaucgagaccugcaaccaguccgucaucaccuacgagaacaacaccugggucaaccagaccuacgucaacaucuccaacaccaacuucgccgccggccaguccgucgucuccgucaagcucgccggcaacuccucccucugccccgucuccggcugggccaucuacuccaaggacaacuccauccgcaucggcuccaagggcgacgucuucgucauccgcgagcccuucaucuccugcuccccccucgagugccgcaccuucuuccucacccagggcgcccuccucaacgacaagcacuccaacggcaccaucaaggaccgcucccccuaccgcacccucauguccugccccaucggcgagguccccucccccuacaacucccgcuucgaguccgucgccugguccgccuccgccugccacgacggcaucaacuggcucaccaucggcaucuccggccccgacaacggcgccgucgccguccucaaguacaacggcaucaucaccgacaccaucaaguccuggcgcaacaacauccuccgcacccaggaguccgagugcgccugcgucaacggcuccugcuucaccaucaugaccgacggccccuccgacggccaggccuccuacaagaucuuccgcaucgagaagggcaagaucgucaaguccgucgagaugaacgcccccaacuaccacuacgaggagugcuccugcuaccccgacuccuccgagaucaccugcgucugccgcgacaacuggcacggcuccaaccgccccugggucuccuucaaccagaaccucgaguaccagaucggcuacaucugcuccggcaucuucggcgacaacccccgccccaacgacaagaccggcuccugcggccccgucuccuccaacggcgccaacggcgucaagggcuucuccuucaaguacggcaacggcgucuggaucggccgcaccaaguccaucuccucccgcaagggcuucgagaugaucugggaccccaacggcuggaacggcaccgacaacaacuucuccaucaagcaggacaucgucggcaucaacgagugguccggcuacuccggcuccuucguccagcaccccgagcucaccggccucgacugcauccgccccugcuucugggucgagcucauccgcggccgccccaaggagaacaccaucuggaccuccggcuccuccaucuccuucugcggcgucaacuccgacaccgucggcugguccuggcccgacggcgccgagcuccccuucaccaucgacaaguga

SEQ ID NO: 117869 - RNA, 1410 nt, Artificial Sequence
  derived and/or modified CDS sequence (opt2) from neuraminidase__InfluenzaA__AFF57133
augaaccccaaccagaagaucaucaccaucggcuccgucugcaugaccaucggcauggccaaccucauccuccagaucggcaacaucaucuccaucuggaucucccacuccauccagcucggcaaccagucccagaucgagaccugcaaccaguccgucaucaccuacgagaacaacaccuggcucaaccagaccuacgucaacaucuccaacaccaacuucgccgccggccaguccgucgucuccgucaagcucgccggcaacuccucccucugccccgucuccggcugggccaucuacuccaaggacaacuccauccgcaucggcuccaagggcgacgucuucgucauccgcgagcccuucaucuccugcucccccuccgagugccgcaccuucuuccucacccagggcgcccuccucaacgacaagcacuccaacggcaccaucaaggaccgcucccccuaccgcacccucauguccugccccaucggcgagguccccucccccuacaacucccgcuucgaguccgucgccugguccgccuccgccugccacgacggcaucaacuggcucaccaucggcaucuccggccccgacaacggcgccgucgccguccucaaguacaacggcaucaucaccgacaccaucaaguccuggcgcaacaacauccuccgcacccaggaguccgagugcgccugcgucaacggcuccugcuucaccaucaugaccgacggccccuccgacggccaggccuccuacaagaucuuccgcaucgagaagggcaagaucgucaaguccgucgagaugaacgcccccaacuaccacuacgaggagugcuccugcuaccccgacuccuccgagaucaccugcgucugccgcgacaacuggcacggcuccaaccgccccugggucuccuucaaccagaaccucgaguaccagaucggcuacaucugcuccggcaucuucggcgacaacccccgccccaacgacaagaccggcuccugcggccccgucuccuccaacggcgccaacggcgucaagggcuucuccuucaaguacggcaacggcgucuggaucggccgcaccaaguccaucuccucccgcaagggcuucgagaugaucugggaccccaacggcuggaccggcaccgacaacaacuucuccaucaagcaggacaucgucggcaucaacgagugguccggcuacuccggcuccuucguccagcaccccgagcucaccggccucgacugcauccgccccugcuucugggucgagcucauccgcggccgccccaaggagaacaccaucuggaccuccggcuccuccaucuccuucugcggcgucaacuccgacaccgucggcugguccuggcccgacggcgccgagcuccccuucaccaucgacaaguga

SEQ ID NO: 117870 - RNA, 1410 nt, Artificial Sequence; identical to SEQ ID NO: 112929
  derived and/or modified CDS sequence (opt2) from neuraminidase__InfluenzaA__AFF57137

SEQ ID NO: 117871 - RNA, 1410 nt, Artificial Sequence; identical to SEQ ID NO: 112929
  derived and/or modified CDS sequence (opt2) from neuraminidase__InfluenzaA__AFF57141

SEQ ID NO: 117872 - RNA, 1410 nt, Artificial Sequence; identical to SEQ ID NO: 112929
  derived and/or modified CDS sequence (opt2) from neuraminidase__InfluenzaA__AFF57145

SEQ ID NO: 117873 - RNA, 1410 nt, Artificial Sequence; identical to SEQ ID NO: 112929
  derived and/or modified CDS sequence (opt2) from neuraminidase__InfluenzaA__AFF57149

SEQ ID NO: 117874 - RNA, 1410 nt, Artificial Sequence; identical to SEQ ID NO: 112929
  derived and/or modified CDS sequence (opt2) from neuraminidase__InfluenzaA__AFF57153

SEQ ID NO: 117875 - RNA, 1410 nt, Artificial Sequence; identical to SEQ ID NO: 112929
  derived and/or modified CDS sequence (opt2) from neuraminidase__InfluenzaA__AFF57157

SEQ ID NO: 117876 - RNA, 1410 nt, Artificial Sequence; identical to SEQ ID NO: 112929
  derived and/or modified CDS sequence (opt2) from neuraminidase__InfluenzaA__AFF57161

SEQ ID NO: 117877 - RNA, 1410 nt, Artificial Sequence; identical to SEQ ID NO: 112929
  derived and/or modified CDS sequence (opt2) from neuraminidase__InfluenzaA__AFF57165

SEQ ID NO: 117878 - RNA, 1410 nt, Artificial Sequence; identical to SEQ ID NO: 112929
  derived and/or modified CDS sequence (opt2) from neuraminidase__InfluenzaA__AFF57169

SEQ ID NO: 117879 - RNA, 1410 nt, Artificial Sequence; identical to SEQ ID NO: 112929
  derived and/or modified CDS sequence (opt2) from neuraminidase__InfluenzaA__AFF57173

SEQ ID NO: 117880 - RNA, 1410 nt, Artificial Sequence; identical to SEQ ID NO: 112929
  derived and/or modified CDS sequence (opt2) from neuraminidase__InfluenzaA__AFF57177

SEQ ID NO: 117881 - RNA, 1410 nt, Artificial Sequence; identical to SEQ ID NO: 112929
  derived and/or modified CDS sequence (opt2) from neuraminidase__InfluenzaA__AFF57181

SEQ ID NO: 117882 - RNA, 1410 nt, Artificial Sequence; identical to SEQ ID NO: 112929
  derived and/or modified CDS sequence (opt2) from neuraminidase__InfluenzaA__AFF57185

SEQ ID NO: 117883 - RNA, 1410 nt, Artificial Sequence; identical to SEQ ID NO: 112929
  derived and/or modified CDS sequence (opt2) from neuraminidase__InfluenzaA__AFF57189

SEQ ID NO: 117884 - RNA, 1350 nt, Artificial Sequence
  derived and/or modified CDS sequence (opt2) from neuraminidase__InfluenzaA__AFF60789
augaaccccaacaagaagaucaucaccaucggcuccaucugcauggucaccggcauggucucccucaugcuccagaucggcaaccucaucuccaucugggucucccacuccauccacaccggcaaccagcacaaggccgagcccaucuccaacaccaacuuccucaccgagaaggccgucgccuccgucaagcucgccggcaacuccucccucugccccaucaacggcugggccgucuacuccaaggacaacuccauccgcaucggcuccaagggcgacgucuucgucauccgcgagcccuucaucuccugcucccaccucgagugccgcaccuucuuccucacccagggcgcccuccucaacgacaagcacuccaacggcaccgucaaggaccgcuccccccaccgcacccucauguccugccccgucggcgaggcccccucccccuacaacucccgcuucgaguccgucgccugguccgccuccgccugccacgacggcaccuccuggcucaccaucggcaucuccggccccgacaacggcgccgucgccguccucaaguacaacggcaucaucaccgacaccaucaaguccuggcgcaacaacauccuccgcacccaggaguccgagugcgccugcgucaacggcuccugcuucaccgucaugaccgacggccccuccaacggccaggccucccacaagaucuucaagauggagaagggcaaggucgucaaguccgucgagcucgacgcccccaacuaccacuacgaggagugcuccugcuaccccgacgccggcgagaucaccugcgucugccgcgacaacuggcacggcuccaaccgccccugggucuccuucaaccagaaccucgaguaccagaucggcuacaucugcuccggcgucuucggcgacaacccccgccccaacgacggcaccggcuccugcggccccgucuccuccaacggcgccuacggcgucaagggcuucuccuucaaguacggcaacggcgucuggaucggccgcaccaaguccaccaacucccgcuccggcuucgagaugaucugggaccccaacggcuggaccgagaccgacuccuccuucuccgucaagcaggacaucgucgccaucaccgacugguccggcuacuccggcuccuucguccagcaccccgagcucaccggccucgacugcauccgccccugcuucugggucgagcucauccgcggccgccccaaggaguccaccaucuggaccuccggcuccuccaucuccuucugcggcgucaccuccgacaccgucggcugguccuggcccgacggcgccgagcuccccuucaccaucgacaaguga

SEQ ID NO: 117885 - RNA, 1410 nt, Artificial Sequence
  derived and/or modified CDS sequence (opt2) from neuraminidase__InfluenzaA__AFG29043
augaaccccaaccagaagaucaucaccaucggcuccgucugcaugaccaucggcauggccaaccucauccuccagaucggcaacaucaucuccaucuggaucucccacuccauccagcucggcaaccagaaccagaucgagaccugcaaccaguccgucaucaccuacgagaacaacaccugggucaaccagaccuacgucaacaucuccaacaccaacuucgccgccggccaguccgucgucuccgucaagcucgccggcaacuccucccucugccccgucuccggcugggccaucuacuccaaggacaacuccauccgcaucggcuccaagggcgacgucuucgucauccgcgagcccuucaucuccugcuccccccucgagugccgcaccuucuuccucacccagggcgcccuccucaacgacaagcacuccaacggcaccauccgcgaccgcucccccuaccgcacccucauguccugccccaucggcgagguccccucccccuacaacucccgcuucgaguccgucgccugguccgccuccgccugccacgacggcaucaacuggcucaccaucggcaucuccggccccgacaacggcgccgucgccguccucaaguacaacggcaucaucaccgacaccaucaaguccuggcgcaacaacauccuccgcacccaggaguccgagugcgccugcgucaacggcuccugcuucaccgucaugaccgacggccccuccgacggccaggccuccuacaagaucuuccgcaucgagaagggcaagaucgucaaguccgucgagaugaacgcccccaacuaccacuacgaggagugcuccugcuaccccgacuccuccgagaucaccugcgucugccgcgacaacuggcacggcuccaaccgccccugggucuccuucaaccagaaccucgaguaccagaucggcuacaucugcuccggcaucuucggcgacaacccccgccccaacgacaagaccggcuccugcggccccgucuccuccaacggcgccaacggcgucaagggcuucuccuucaaguacggcaacggcgucuggaucggccgcaccaaguccaucuccucccgcaacggcuucgagaugaucugggaccccaacggcuggaccggcaccgacaacaacuucuccaucaagcaggacaucgucggcaucaacgagugguccggcuacuccggcuccuucguccagcaccccgagcucaccggccucgacugcauccgccccugcuucugggucgagcucauccgcggccgccccaaggagaacaccaucuggaccuccggcuccuccaucuccuucugcggcgucaacuccgacaccgucggcugguccuggcccgacggcgccgagcuccccuucaccaucgacaaguga

SEQ ID NO: 117886 - RNA, 1410 nt, Artificial Sequence; identical to SEQ ID NO: 114555
  derived and/or modified CDS sequence (opt2) from neuraminidase__InfluenzaA__AFG29045

SEQ ID NO: 117887 - RNA, 1410 nt, Artificial Sequence; identical to SEQ ID NO: 114687
  derived and/or modified CDS sequence (opt2) from neuraminidase__InfluenzaA__AFG31063

SEQ ID NO: 117888 - RNA, 1410 nt, Artificial Sequence; identical to SEQ ID NO: 112774
  derived and/or modified CDS sequence (opt2) from neuraminidase__InfluenzaA__AFG31073

SEQ ID NO: 117889 - RNA, 1410 nt, Artificial Sequence
  derived and/or modified CDS sequence (opt2) from neuraminidase__InfluenzaA__AFG31083
augaaccccaaccagaagaucaucaccaucggcuccgucugcaugaccaucggcauggccaaccucauccuccagaucggcaacaucaucuccaucuggaucucccacuccauccagcucgucaaccagaaccagaucgagaccugcaaccaguccgucaucaccuacgagaacaacaccugggucaaccagaccuacgucaacaucuccaacaccaacuucgccgccggccaguccgucgucuccgucaagcucgccggcaacuccucccucugccccgucuccggcugggccaucuacuccaaggacaacuccguccgcaucggcuccaagggcgacgucuucgucauccgcgagcccuucaucuccugcuccccccucgagugccgcaccuucuuccucacccagggcgcccuccucaacgacaagcacuccaacggcaccaucaaggaccgcucccccuaccgcacccucauguccugccccaucggcgagguccccucccccuacaacucccgcuucgaguccgucgccugguccgccuccgccugccacgacggcaucaacuggcucaccaucggcaucuccggccccgacaacggcgccgucgccguccucaaguacaacggcaucaucaccgacaccaucaaguccuggcgcaacaacauccuccgcacccaggaguccgagugcgccugcgucaacggcuccugcuucaccgucaugaccgacggccccuccaacggccaggccuccuacaagaucuuccgcaucgagaagggcaagaucgucaaguccgucgagaugaacgcccccaacuaccacuacgaggagugcuccugcuaccccgacuccuccgagaucaccugcgucugccgcgacaacuggcacggcuccaaccgccccugggucuccuucaaccagaaccucgaguaccagaucggcuacaucugcuccggcaucuucggcgacaacccccgccccaacgacaagaccggcuccugcggccccgucuccuccaacggcgccaacggcgucaagggcuucuccuucaaguacggcaacggcgucuggaucggccgcaccaaguccaucuccucccgcaacggcuucgagaugaucugggaccccaacggcuggaccggcaccgacaacaacuucuccaucaagcaggacaucgucggcaucaacgagugguccggcuacuccggcuccuucguccagcaccccgagcucaccggccucgacugcauccgccccugcuucugggucgagcucauccgcggccgccccaaggagaacaccaucuggaccuccggcuccuccaucuccuucugcggcgucaacuccgacaccgucggcugguccuggcccgacggcgccgagcuccccuucaccaucgacaaguga

SEQ ID NO: 117890 - RNA, 1410 nt, Artificial Sequence; identical to SEQ ID NO: 112774
  derived and/or modified CDS sequence (opt2) from neuraminidase__InfluenzaA__AFG31093

SEQ ID NO: 117891 - RNA, 1410 nt, Artificial Sequence; identical to SEQ ID NO: 112774
  derived and/or modified CDS sequence (opt2) from neuraminidase__InfluenzaA__AFG31103

SEQ ID NO: 117892 - RNA, 1410 nt, Artificial Sequence; identical to SEQ ID NO: 112774
  derived and/or modified CDS sequence (opt2) from neuraminidase__InfluenzaA__AFG31113

SEQ ID NO: 117893 - RNA, 1410 nt, Artificial Sequence; identical to SEQ ID NO: 112774
  derived and/or modified CDS sequence (opt2) from neuraminidase__InfluenzaA__AFG31123

SEQ ID NO: 117894 - RNA, 1410 nt, Artificial Sequence; identical to SEQ ID NO: 112774
  derived and/or modified CDS sequence (opt2) from neuraminidase__InfluenzaA__AFG31133

SEQ ID NO: 117895 - RNA, 1410 nt, Artificial Sequence; identical to SEQ ID NO: 112774
  derived and/or modified CDS sequence (opt2) from neuraminidase__InfluenzaA__AFG31143

SEQ ID NO: 117896 - RNA, 1410 nt, Artificial Sequence; identical to SEQ ID NO: 112774
  derived and/or modified CDS sequence (opt2) from neuraminidase__InfluenzaA__AFG31153

SEQ ID NO: 117897 - RNA, 1410 nt, Artificial Sequence; identical to SEQ ID NO: 112774
  derived and/or modified CDS sequence (opt2) from neuraminidase__InfluenzaA__AFG31163

SEQ ID NO: 117898 - RNA, 1410 nt, Artificial Sequence
  derived and/or modified CDS sequence (opt2) from neuraminidase__InfluenzaA__AFG31173
augaaccccaaccagaagaucaucaccaucggcuccgucugcaugaccaucggcauggccaaccucauccuccagaucggcaacaucaucuccaucuggaucucccacuccauccagcucggcaaccagaaccagaucgagaccugcaaccaguccgucaucaccuacgagaacaacaccugggucaaccagaccuacgucaacaucuccaacaccaacuucgccgccggccaguccgucgucuccgucaagcucgccggcaacuccucccucugccccgucuccggcugggccaucuacuccaaggacaacuccauccgcaucggcuccaagggcgacgucuucgucauccgcgagcccuucaucuccugcuccccccucgagugccgcaccuucuuccucacccagggcgcccuccucaacgacaagcacuccaacggcaccaucaaggaccgcucccccuaccgcacccucauguccugccccaucggcgagguccccucccccuacaacucccgcuucgaguccgucgccugguccgccuccgccugccacgacggcaucaacuggcucaccaucggcaucuccggccccgacaacggcgccgucgccguccucaaguacaacggcaucaucaccgacaccaucaaguccuggcgcaacaacauccuccgcacccaggaguccgagugcgccugcgucaacggcuccugcuucaccgucaugaccgacggccccuccgacggccaggccuccuacaagaucuuccgcaucgagaagggcaagaucgucaaguccgucgagaugaacgcccccaacuaccacuacgaggagugcuccugcuaccccgacuccuccgagaucaccugcgucugccgcgacaacuggcacggcuccaaccgccccugggucuccuucaaccagaaccucgaguaccagaucggcuacaucugcuccggcaucuucggcgacaacccccgccccaacgacaagaccggcuccugcggccccgucuccuccaacggcgccaacggcgucaagggcuucuccuucaaguacggcaacggcgucuggaucggccgcaccaaguccaucuccucccgcaacggcuucgagaugaucugggaccccaacggcuggaccggcaccgacaacaacuucuccaucaagcaggacaucgucggcaucaacgagugguccggcuacuccggcuccuucguccagcaccccgagcucaccggccucgacugcauccgccccugcuucugggucgagcucauccgcggccuccccaaggagaacaccaucuggaccuccggcuccuccaucuccuucugcggcgucaacuccgacaccgucggcugguccuggcccgacggcgccgagcuccccuucaccaucgacaaguga

SEQ ID NO: 117899 - RNA, 1410 nt, Artificial Sequence; identical to SEQ ID NO: 117898
  derived and/or modified CDS sequence (opt2) from neuraminidase__InfluenzaA__AFG31183

SEQ ID NO: 117900 - RNA, 1410 nt, Artificial Sequence; identical to SEQ ID NO: 112774
  derived and/or modified CDS sequence (opt2) from neuraminidase__InfluenzaA__AFG31193

SEQ ID NO: 117901 - RNA, 1410 nt, Artificial Sequence; identical to SEQ ID NO: 112774
  derived and/or modified CDS sequence (opt2) from neuraminidase__InfluenzaA__AFG31203

SEQ ID NO: 117902 - RNA, 1410 nt, Artificial Sequence; identical to SEQ ID NO: 112774
  derived and/or modified CDS sequence (opt2) from neuraminidase__InfluenzaA__AFG31213

SEQ ID NO: 117903 - RNA, 1410 nt, Artificial Sequence; identical to SEQ ID NO: 112774
  derived and/or modified CDS sequence (opt2) from neuraminidase__InfluenzaA__AFG31223

SEQ ID NO: 117904 - RNA, 1410 nt, Artificial Sequence; identical to SEQ ID NO: 112774
  derived and/or modified CDS sequence (opt2) from neuraminidase__InfluenzaA__AFG31233

SEQ ID NO: 117905 - RNA, 1410 nt, Artificial Sequence
  derived and/or modified CDS sequence (opt2) from neuraminidase__InfluenzaA__AFG31243
augaaccccaaccagaagaucaucaccaucggcuccgucugcaugaccaucggcauggccaaccucauccuccagaucggcaacaucaucuccaucuggaucucccacuccauccagcucggcaaccagaaccagaucgagaccugcaaccaguccgucaucaccuacgagaacaacaccugggucaaccagaccuacgucaacaucuccaacaccaacuucgucgccggccaguccgucgucuccgucaagcucgccggcaacuccucccucugccccgucuccggcugggccaucuacuccaaggacaacuccauccgcaucggcuccaagggcgacgucuucgucauccgcgagcccuucaucuccugcuccccccucgagugccgcaccuucuuccucacccagggcgcccuccucaacgacaagcacuccaacggcaccaucaaggaccgcucccccuaccgcacccucauguccugccccaucggcgagguccccucccccuacaacucccgcuucgaguccgucgccugguccgccuccgccugccacgacggcaucaacuggcucaccaucggcaucuccggccccgacaacggcgccgucgccguccucaaguacaacggcaucaucaccgacaccaucaaguccuggcgcaacaacauccuccgcacccaggaguccgagugcgccugcgucaacggcuccugcuucaccgucaugaccgacggccccuccgacggccaggccuccuacaagaucuuccgcaucgagaagggcaagaucgucaaguccgucgagaugaacgcccccaacuaccacuacgaggagugcuccugcuaccccgacuccuccgagaucaccugcgucugccgcgacaacuggcacggcuccaaccgccccugggucuccuucaaccagaaccucgaguaccagaucggcuacaucugcuccggcaucuucggcgacaacccccgccccaacgacaagaccggcuccugcggccccgucuccuccaacggcgccaacggcgucaagggcuucuccuucaaguacggcaacggcgucuggaucggccgcaccaaguccaucuccucccgcaacggcuucgagaugaucugggaccccaacggcuggaccggcaccgacaacaacuucuccaucaagcaggacaucgucggcaucaacgagugguccggcuacuccggcuccuucguccagcaccccgagcucaccggccucgacugcauccgccccugcuucugggucgagcucauccgcggccgccccaaggagaacaccaucuggaccuccggcuccuccaucuccuucugcggcgucaacuccgacaccgucggcugguccuggcccgacggcgccgagcuccccuucaccaucgacaaguga

SEQ ID NO: 117906 - RNA, 1410 nt, Artificial Sequence; identical to SEQ ID NO: 115766
  derived and/or modified CDS sequence (opt2) from neuraminidase__InfluenzaA__AFG31253

SEQ ID NO: 117907 - RNA, 1410 nt, Artificial Sequence; identical to SEQ ID NO: 112774
  derived and/or modified CDS sequence (opt2) from neuraminidase__InfluenzaA__AFG31263

SEQ ID NO: 117908 - RNA, 1410 nt, Artificial Sequence; identical to SEQ ID NO: 112774
  derived and/or modified CDS sequence (opt2) from neuraminidase__InfluenzaA__AFG31273

SEQ ID NO: 117909 - RNA, 1410 nt, Artificial Sequence; identical to SEQ ID NO: 112774
  derived and/or modified CDS sequence (opt2) from neuraminidase__InfluenzaA__AFG31283

SEQ ID NO: 117910 - RNA, 1410 nt, Artificial Sequence; identical to SEQ ID NO: 112774
  derived and/or modified CDS sequence (opt2) from neuraminidase__InfluenzaA__AFG31293

SEQ ID NO: 117911 - RNA, 1410 nt, Artificial Sequence; identical to SEQ ID NO: 112774
  derived and/or modified CDS sequence (opt2) from neuraminidase__InfluenzaA__AFG31303

SEQ ID NO: 117912 - RNA, 1410 nt, Artificial Sequence; identical to SEQ ID NO: 112774
  derived and/or modified CDS sequence (opt2) from neuraminidase__InfluenzaA__AFG31313

SEQ ID NO: 117913 - RNA, 1410 nt, Artificial Sequence; identical to SEQ ID NO: 112774
  derived and/or modified CDS sequence (opt2) from neuraminidase__InfluenzaA__AFG31326

SEQ ID NO: 117914 - RNA, 1410 nt, Artificial Sequence; identical to SEQ ID NO: 112774
  derived and/or modified CDS sequence (opt2) from neuraminidase__InfluenzaA__AFG31336

SEQ ID NO: 117915 - RNA, 1410 nt, Artificial Sequence; identical to SEQ ID NO: 115766
  derived and/or modified CDS sequence (opt2) from neuraminidase__InfluenzaA__AFG31346

SEQ ID NO: 117916 - RNA, 1410 nt, Artificial Sequence; identical to SEQ ID NO: 115766
  derived and/or modified CDS sequence (opt2) from neuraminidase__InfluenzaA__AFG31356

SEQ ID NO: 117917 - RNA, 1410 nt, Artificial Sequence; identical to SEQ ID NO: 115766
  derived and/or modified CDS sequence (opt2) from neuraminidase__InfluenzaA__AFG31366

SEQ ID NO: 117918 - RNA, 1410 nt, Artificial Sequence; identical to SEQ ID NO: 115766
  derived and/or modified CDS sequence (opt2) from neuraminidase__InfluenzaA__AFG31379

SEQ ID NO: 117919 - RNA, 1410 nt, Artificial Sequence; identical to SEQ ID NO: 115766
  derived and/or modified CDS sequence (opt2) from neuraminidase__InfluenzaA__AFG31389

SEQ ID NO: 117920 - RNA, 1410 nt, Artificial Sequence; identical to SEQ ID NO: 115766
  derived and/or modified CDS sequence (opt2) from neuraminidase__InfluenzaA__AFG31399

SEQ ID NO: 117921 - RNA, 1410 nt, Artificial Sequence; identical to SEQ ID NO: 115766
  derived and/or modified CDS sequence (opt2) from neuraminidase__InfluenzaA__AFG31409

SEQ ID NO: 117922 - RNA, 1410 nt, Artificial Sequence; identical to SEQ ID NO: 112774
  derived and/or modified CDS sequence (opt2) from neuraminidase__InfluenzaA__AFG31419

SEQ ID NO: 117923 - RNA, 1410 nt, Artificial Sequence; identical to SEQ ID NO: 112774
  derived and/or modified CDS sequence (opt2) from neuraminidase__InfluenzaA__AFG31429

SEQ ID NO: 117924 - RNA, 1410 nt, Artificial Sequence; identical to SEQ ID NO: 112774
  derived and/or modified CDS sequence (opt2) from neuraminidase__InfluenzaA__AFG31439

SEQ ID NO: 117925 - RNA, 1410 nt, Artificial Sequence; identical to SEQ ID NO: 112774
  derived and/or modified CDS sequence (opt2) from neuraminidase__InfluenzaA__AFG31449

SEQ ID NO: 117926 - RNA, 1410 nt, Artificial Sequence; identical to SEQ ID NO: 112774
  derived and/or modified CDS sequence (opt2) from neuraminidase__InfluenzaA__AFG31459

SEQ ID NO: 117927 - RNA, 1410 nt, Artificial Sequence; identical to SEQ ID NO: 112774
  derived and/or modified CDS sequence (opt2) from neuraminidase__InfluenzaA__AFG31469

SEQ ID NO: 117928 - RNA, 1410 nt, Artificial Sequence; identical to SEQ ID NO: 112774
  derived and/or modified CDS sequence (opt2) from neuraminidase__InfluenzaA__AFG31479

SEQ ID NO: 117929 - RNA, 1410 nt, Artificial Sequence; identical to SEQ ID NO: 112774
  derived and/or modified CDS sequence (opt2) from neuraminidase__InfluenzaA__AFG31499

SEQ ID NO: 117930 - RNA, 1410 nt, Artificial Sequence; identical to SEQ ID NO: 114665
  derived and/or modified CDS sequence (opt2) from neuraminidase__InfluenzaA__AFG31509

SEQ ID NO: 117931 - RNA, 1410 nt, Artificial Sequence; identical to SEQ ID NO: 115766
  derived and/or modified CDS sequence (opt2) from neuraminidase__InfluenzaA__AFG31519

SEQ ID NO: 117932 - RNA, 1410 nt, Artificial Sequence; identical to SEQ ID NO: 112774
  derived and/or modified CDS sequence (opt2) from neuraminidase__InfluenzaA__AFG31529

SEQ ID NO: 117933 - RNA, 1410 nt, Artificial Sequence; identical to SEQ ID NO: 114665
  derived and/or modified CDS sequence (opt2) from neuraminidase__InfluenzaA__AFG31539

SEQ ID NO: 117934 - RNA, 1410 nt, Artificial Sequence; identical to SEQ ID NO: 112774
  derived and/or modified CDS sequence (opt2) from neuraminidase__InfluenzaA__AFG31549

SEQ ID NO: 117935 - RNA, 1410 nt, Artificial Sequence; identical to SEQ ID NO: 112774
  derived and/or modified CDS sequence (opt2) from neuraminidase__InfluenzaA__AFG31559

SEQ ID NO: 117936 - RNA, 1410 nt, Artificial Sequence; identical to SEQ ID NO: 115766
  derived and/or modified CDS sequence (opt2) from neuraminidase__InfluenzaA__AFG31569

SEQ ID NO: 117937 - RNA, 1410 nt, Artificial Sequence; identical to SEQ ID NO: 112774
  derived and/or modified CDS sequence (opt2) from neuraminidase__InfluenzaA__AFG31579

SEQ ID NO: 117938 - RNA, 1410 nt, Artificial Sequence; identical to SEQ ID NO: 112774
  derived and/or modified CDS sequence (opt2) from neuraminidase__InfluenzaA__AFG31589

SEQ ID NO: 117939 - RNA, 1410 nt, Artificial Sequence; identical to SEQ ID NO: 112774
  derived and/or modified CDS sequence (opt2) from neuraminidase__InfluenzaA__AFG31599

SEQ ID NO: 117940 - RNA, 1410 nt, Artificial Sequence; identical to SEQ ID NO: 112774
  derived and/or modified CDS sequence (opt2) from neuraminidase__InfluenzaA__AFG31609

SEQ ID NO: 117941 - RNA, 1410 nt, Artificial Sequence; identical to SEQ ID NO: 112774
  derived and/or modified CDS sequence (opt2) from neuraminidase__InfluenzaA__AFG31619

SEQ ID NO: 117942 - RNA, 1410 nt, Artificial Sequence; identical to SEQ ID NO: 112774
  derived and/or modified CDS sequence (opt2) from neuraminidase__InfluenzaA__AFG31629

SEQ ID NO: 117943 - RNA, 1410 nt, Artificial Sequence; identical to SEQ ID NO: 115766
  derived and/or modified CDS sequence (opt2) from neuraminidase__InfluenzaA__AFG31639

SEQ ID NO: 117944 - RNA, 1410 nt, Artificial Sequence; identical to SEQ ID NO: 112774
  derived and/or modified CDS sequence (opt2) from neuraminidase__InfluenzaA__AFG31649

SEQ ID NO: 117945 - RNA, 1410 nt, Artificial Sequence; identical to SEQ ID NO: 112774
  derived and/or modified CDS sequence (opt2) from neuraminidase__InfluenzaA__AFG31659

SEQ ID NO: 117946 - RNA, 1410 nt, Artificial Sequence; identical to SEQ ID NO: 112774
  derived and/or modified CDS sequence (opt2) from neuraminidase__InfluenzaA__AFG31669

SEQ ID NO: 117947 - RNA, 1410 nt, Artificial Sequence; identical to SEQ ID NO: 110131
  derived and/or modified CDS sequence (opt2) from neuraminidase__InfluenzaA__AFG71868

SEQ ID NO: 117948 - RNA, 1410 nt, Artificial Sequence; identical to SEQ ID NO: 110131
  derived and/or modified CDS sequence (opt2) from neuraminidase__InfluenzaA__AFG71890

SEQ ID NO: 117949 - RNA, 1410 nt, Artificial Sequence; identical to SEQ ID NO: 110131
  derived and/or modified CDS sequence (opt2) from neuraminidase__InfluenzaA__AFG71901

SEQ ID NO: 117950 - RNA, 1410 nt, Artificial Sequence; identical to SEQ ID NO: 110150
  derived and/or modified CDS sequence (opt2) from neuraminidase__InfluenzaA__AFG71912

SEQ ID NO: 117951 - RNA, 1410 nt, Artificial Sequence
  derived and/or modified CDS sequence (opt2) from neuraminidase__InfluenzaA__AFG71934
augaaccccaaccagaagaucaucaccaucggcuccgucucccucaccaucgccaccgucugcuuccucaugcagaucgccauccucaucaccaccgucacccuccacuucaagcaguacgagugcgacucccccgccaacaaccaggucaugcccugcgagcccaucaucaucgagcgcaacaucaccgagaucgucuaccucaccaacaccaccaucgagaaggagaucugccccaagcucgucgaguaccgcaacugguccaagccccagugcaagaucaccggcuucgcccccuucuccaaggacaacuccauccgccucuccgccggcggcgacaucugggucacccgcgagcccuacgucuccugcgaccccggcaagugcuaccaguucgcccucggccagggcaccacccucgacaacaagcacuccaacgacaccauccacgaccgcaucccccaccgcacccuccucaugaacgagcucggcguccccuuccaccucggcacccgccaggucugcaucgccugguccuccuccuccugccacgacggcaaggccuggcuccacgucugcgucaccggcgacgacaagaacgccaccgccuccuucaucuacgacggccgccucgucgacuccaucggcuccuggucccagaacauccuccgcacccaggaguccgagugcgucugcaucaacggcaccugcaccgucgucaugaccgacggcuccgccuccggccgcgccgacacccgcauccucuucaucgaggagggcaagaucguccacaucuccccccucuccggcuccgcccagcacgucgaggagugcuccugcuacccccgcuaccccggcguccgcugcaucugccgcgacaacuggaagggcuccaaccgccccgucgucgacaucaacgucaaggacuacuccaucgacucccgcuacgucugcuccggccucgucggcgacaccccccgcaacaacgaccgcuucuccaacuccaacugccgcaaccccaacaacgagcgcggcaaccacggcgucaagggcugggccuucgacgacggcaacgacgucuggaugggccgcaccaucuccaaggacucccgcuccggcuacgagaccuucaaggucaucggcggcugguccacccccaacuccaagucccagaucaaccgccaggucaucgucgacuccgacaaccgcuccggcuacuccggcaucuucuccgucgagggcaaguccugcaucaaccgcugcuucuacgucgagcucauccgcggccgcgagcaggagacccgcgucugguggaccuccaacuccaucgucgucuucugcggcaccuccggcaccuacggcaccggcuccuggcccgacggcgccgacaucaaccucaugcccaucuga

SEQ ID NO: 117952 - RNA, 1410 nt, Artificial Sequence
  derived and/or modified CDS sequence (opt2) from neuraminidase__InfluenzaA__AFG71945
augaaccccaaccagaagaucaucaccaucggcuccgucucccucaccaucgccaccgucugcuuccucaugcagaucgccauccucgucaccaccgucacccuccacuucaagcaguacgagugcgacucccccgccaacaaccaggucaugcccugcgagcccaucaucaucgagcgcaacaucaccgagaucgucuaccucaccaacaccaccaucgagaaggagaucugccccaagcucgucgaguaccgcaacugguccaagccccagugcaagaucaccggcuucgcccccuucuccaaggacaacuccauccgccucuccgccggcggcgacaucugggucacccgcgagcccuacgucuccugcgaccccggcaagugcuaccaguucgcccucggccagggcaccacccucgacaacaagcacuccaacgacaccauccacgaccgcaucccccaccgcacccuccucaugaacgagcucggcguccccuuccaccucggcacccgccaggucugcaucgccugguccuccuccuccugccacgacggcaaggccuggcuccacgucugcgucaccggcgacgacgagaacgccaccgccuccuucaucuacgacggccgccucgucgacuccaucggcuccuggucccagaacauccuccgcacccaggaguccgagugcgucugcaucaacggcaccugcaccgucgucaugaccgacggcuccgccuccggccgcgccgacacccgcauccucuucaucgaggagggcaagaucguccacaucuccccccucuccggcuccgcccagcacgucgaggagugcuccugcuacccccgcuaccccggcguccgcugcaucugccgcgacaacuggaagggcuccaaccgccccgucgucgacaucaacgucaaggacuacuccaucgacucccgcuacgucugcuccggccucgucggcgacaccccccgcaacaacgacaaguccuccaacuccaacugccgcaaccccaacaacgacaagggcaaccacggcgucaagggcugggccuucgacgacggcaacgacgucuggaugggccgcaccaucuccaaggacucccgcuccggcuacgagaccuucaaggucaucggcggcugguccacccccaacuccaagucccagaucaaccgccaggucaucgucgacuccgacaaccgcuccggcuacuccggcaucuucuccgucgagggcaaguccugcaucaaccgcugcuucuacgucgagcucauccgcggccgcgagcaggagaccaaggucugguggaccuccaacuccaucgucgucuucugcggcaccuccggcaccuacggcaccggcuccuggcccgacggcgccgacaucaaccucauguccaucuga

SEQ ID NO: 117953 - RNA, 1410 nt, Artificial Sequence; identical to SEQ ID NO: 110154
  derived and/or modified CDS sequence (opt2) from neuraminidase__InfluenzaA__AFG71967

SEQ ID NO: 117954 - RNA, 1410 nt, Artificial Sequence; identical to SEQ ID NO: 110154
  derived and/or modified CDS sequence (opt2) from neuraminidase__InfluenzaA__AFG71978

SEQ ID NO: 117955 - RNA, 1410 nt, Artificial Sequence
  derived and/or modified CDS sequence (opt2) from neuraminidase__InfluenzaA__AFG71988
augaaccccaaccagaagaucaucaccaucggcuccgucucccucaccaucgccaccaucugcuuccucaugcagaucgccauccucgucaccaccgucacccuccacuucaagcaguacgagugcgacucccccgccaacaaccaggucaugcccugcgagcccaucaucaucgagcgcaacaucaccgagaucgucuaccucaccaacaccaccaucgagaaggagaucugccccaagcucgucgaguaccgcaacugguccaagccccagugcaagaucaccggcuucgcccccuucuccaaggacaacuccauccgccucuccgccggcggcgacaucugggucacccgcgagcccuacgucuccugcgaccccggcaagugcuaccaguucgcccucggccagggcaccacccucgacaacaagcacuccaacgacaccauccacgaccgcaccccccaccgcacccuccucaugaacgagcucggcguccccuuccaccucggcacccgccaggucugcaucgccugguccuccuccuccugccacgacggcaaggccuggcuccacgucugcgucaccggcuacgacaagaacgccaccgccuccuucaucuacgacggccgccucgucgacuccaucggcuccuggucccagaacauccuccgcacccaggaguccgagugcaucugcaucaacggcaccugcaccgucgucaugaccgacggcuccgccuccggccgcgccgacaccaagauccucuucaucgaggagggcaagaucguccacaucuccccccucuccggcuccgcccagcacgucgaggagugcuccugcuacccccgcuaccccggcguccgcugcaucugccgcgacaacuggaagggcuccaaccgccccgucgucgacaucaacgucaaggacuacuccaucgacuccuccuacgucugcuccggccucgucggcgacaccccccgcaacaacgaccgcuccuccaacuccuacugccgcaaccccaacaacgagaagggcaaccacggcgucaagggcugggccuucgacgacggcaacgacgucuggaugggccgcaccaucuccgaggacucccgcuccggcuacgagaccuucaaggucaucggcggcugguccacccccaacuccaagcuccagaucaaccgccaggucaucgucgacuccgacaaccgcuccggcuacuccggcaucuucuccgucgagggcaaguccugcaucaaccgcugcuucuacgucgagcucauccgcggccgcgagcaggagacccgcgucugguggaccuccaacuccaucgucgucuucugcggcaccuccggcaccuacggcaccggcuccuggcccgacggcgccgacaucaaccucaugcccaucuga

SEQ ID NO: 117956 - RNA, 1410 nt, Artificial Sequence; identical to SEQ ID NO: 110154
  derived and/or modified CDS sequence (opt2) from neuraminidase__InfluenzaA__AFG71999

SEQ ID NO: 117957 - RNA, 1410 nt, Artificial Sequence; identical to SEQ ID NO: 110612
  derived and/or modified CDS sequence (opt2) from neuraminidase__InfluenzaA__AFG72021

SEQ ID NO: 117958 - RNA, 1410 nt, Artificial Sequence
  derived and/or modified CDS sequence (opt2) from neuraminidase__InfluenzaA__AFG72032
augaaccccaaccagaagaucaucaccaucggcuccgucucccucaccaucgccaccaucugcuuccucaugcagaucgccauccucgucaccaccgucacccuccacuucaagcaguacgagugcuccuccccccccaacaaccaggucaugcccugcgagcccaucaucaucgagcgcaacaucaccgagaucgucuaccucaccaacaccaccaucgagaaggagaucugccccaagcucgucgaguaccgcaacugguccaagccccagugcaagaucaccggcuucgcccccuucuccaaggacaacuccauccgccucuccgccggcggcgacaucugggucacccgcgagcccuacgucuccugcgaccccggcaagugcuaccaguucgcccucggccagggcaccacccucgacaacaagcacuccaacgacaccauccacgaccgcacccccuaccgcacccuccucaugaacgagcucggcguccccuuccaccucggcacccgccaggucugcaucgccugguccuccuccuccugccacgacggcaaggccuggcuccacgucugcgucaccggcuacgacaagaacgccaccgccuccuucaucuacgacggccgccucgucgacuccaucggcuccugguccaagaacauccuccgcacccaggaguccgagugcgucugcaucaacggcaccugcaccgucgucaugaccgacggcuccgccuccgagcgcgccgacaccaagauccucuucaucgaggagggcaagaucguccacaucuccccccucuccggcuccgcccagcacgucgaggagugcuccugcuacccccgcuaccccggcguccgcugcgucugccgcgacaacuggaagggcuccaaccgccccgucgucgacaucaacgucaaggacuacuccaucgucuccuccuacgucugcuccggccucgucggcgacaccccccgcaagaacgaccgcuccuccuccuccuacugccgcaaccccaacaacgagaagggcaaccacggcgucaagggcugggccuucgacgacggcaacgacgucuggaugggccgcaccaucuccgaggagucccgcuccggcuacgagaccuucaaggucaucggcggcugguccacccccaacuccaagcuccagaucaaccgccaggucaucgucgacuccgacaaccgcuccggcuacuccggcaucuucuccgucgagggcaaguccugcaucaaccgcugcuucuacgucgagcucauccgcggccgcgagcaggagacccgcgucugguggaccuccaacuccaucgucgucuucugcggcaccuccggcaccuacggcaccggcuccuggcccgacggcgccgacaucaaccucaugcccaucuga

SEQ ID NO: 117959 - RNA, 1410 nt, Artificial Sequence; identical to SEQ ID NO: 110849
  derived and/or modified CDS sequence (opt2) from neuraminidase__InfluenzaA__AFG72088

SEQ ID NO: 117960 - RNA, 1410 nt, Artificial Sequence
  derived and/or modified CDS sequence (opt2) from neuraminidase__InfluenzaA__AFG72121
augaaccccaaccagaagaucaucaccaucggcuccgucucccucaccaucgccaccaucugcuuccucaugcagaucgccauccucgucaccaccgucacccuccacuucaagcaguacgagugcuccuccccccccaacaaccgcgucaugcccugcgagcccaccaucaucgagcgcaacaucaccgagaucgucuaccucaccaacaccaccaucgagaaggagaucugccccaagcucgucgaguaccgcaacugguccaagccccagugcaagaucaccggcuucgcccccuucuccaaggacaacuccauccgccucuccgccggcggcgacaucugggucacccgcgagcccuacgucuccugcgaccccggcaagugcuaccaguucgcccucggccagggcaccacccucaacaaccgccacuccaacgacaccguccacgaccgcacccccuaccgcacccuccucaugaacgagcucggcguccccuuccaccucggcaccaagcaggucugcauggccugguccuccuccuccugccacgacggcaaggccuggcuccacgucugcgucaccggccacgacgagaacgccaccgccuccuucaucuacgacggccgccucgucgacuccaucggcuccugguccaagaacauccuccgcacccaggaguccgagugcgucugcaucaacggcaccugcaccgucgucaugaccgacggcuccgccuccgagcgcgccgacaccaagauccucuucaucgaggagggcaagaucguccacaucuccccccucuccggcuccgcccagcacgucgaggagugcuccugcuacccccgcuaccccggcguccgcugcgucugccgcgacaacuggaagggcuccaaccgccccaucgucgacaucaacgucaaggacuacuccaucgucuccuccuacgucugcuccggccucgucggcgacaccccccgcaagaacgaccgcuccuccuccuccuacugccgcaaccccaacaacgagaagggcucccacggcgucaagggcugggccuucgacgacggcaacgacgucuggaugggccgcaccaucggcgaggagcuccgcuccggcuacgagaccuucaaggucaucggcggcugguccacccccaacuccaagcuccagaucaaccgccaggucaucgucgacuccggcaaccgcuccggcuacuccggcaucuucuccgucgagggcaaguccugcaucaaccgcugcuucuacgucgagcucauccgcggccgcaagcaggagacccgcgucugguggaccuccaacuccaucgucgucuucugcggcaccuccggcaccuacggcaccggcuccuggcccgacggcgccgacaucaaccucaugcccaucuga

SEQ ID NO: 117961 - RNA, 1410 nt, Artificial Sequence
  derived and/or modified CDS sequence (opt2) from neuraminidase__InfluenzaA__AFG72143
augaaccccaaccagaagaucaucaccaucggcuccgucucccucaccaucgccaccaucugccuccucaugcagaucgccauccucgucaccaccgucacccuccacuucaagcaguacgagugcuccuccccccccaacaaccaggucaugcccugcgagcccaccaucaucgagcgcaacaucaccgagaucgucuaccucaccaacaccaccaucgagaaggagaucugccccaagcucgucgaguaccgcaacugguccaagccccagugcaagaucaccggcuucgcccccuucuccaaggacaacuccauccgccucuccgccggcggcgacaucugggucacccgcgagcccuacgucuccugcgaccccggcaagugcuaccaguucgcccucggccagggcaccacccucaacaaccgccacuccaacgacaccguccacgaccgcacccccuaccgcacccuccucaugaacgagcucggcguccccuuccaccucggcaccaagcaggucugcaucgccugguccuccuccuccugccacgacggcaaggccuggcuccacgucugcgucaccggccacgacgagaacgccaccgccuccuucaucuacgacggccgccucgucgacuccaucggcuccugguccaagaacauccuccgcacccaggaguccgagugcgucugcaucaacggcaccugcaccgucgucaugaccgacggcuccgccuccgagcgcgccgacaccaagauccucuucaucgaggagggcaagaucguccacaucuccccccucuccggcuccgcccagcacgucgaggagugcuccugcuacccccgcuaccccggcguccgcugcgucugccgcgacaacuggaagggcuccaaccgccccaucgucgacaucaacgucaaggacuacuccaucgucuccuccuacgucugcuccggccucgucggcgacaccccccgcaagaacgacuccuccuccuccuccuacugccgcaaccccaacaacgagaagggcucccacggcgucaagggcugggccuucgacgacggcaacgacgucuggaugggccgcaccaucggcgaggagcuccgcuccggcuacgagaccuucaaggucaucggcggcugguccacccccaacuccaagcuccagaucaaccgccaggucaucgucgacuccggcaaccgcuccggcuacuccggcaucuucuccgucgagggcaaguccugcaucaaccgcugcuucuacgucgagcucauccgcggccgcaagcaggagaccaaggucugguggaccuccaacuccaucgucgucuucugcggcaccuccggcaccuacggcaccggcuccuggcccgacggcgccgacaucaaccucaugcccaucuga

SEQ ID NO: 117962 - RNA, 1410 nt, Artificial Sequence
  derived and/or modified CDS sequence (opt2) from neuraminidase__InfluenzaA__AFG72165
augaaccccaaccagaagaucaucaccaucggcuccgucucccucaccaucgccaccaucugcuuccucaugcagaucgccauccucgucaccaccgucacccuccacuucaagcaguacgagugcaacuccccccccaacaaccaggucaugcccugcgagcccaccaucaucgagcgcaacaucaccgagaucgucuaccucaccaacaccaccaucgagaaggagaucugccccaagcucgucgaguaccgcaacugguccaagccccagugcaagaucaccggcuucgcccccuucuccaaggacaacuccauccgccucuccgccggcggcgacaucugggucacccgcgagcccuacgucuccugcgaccccggcaagugcuaccaguucgcccucggccagggcaccacccucaacaaccgccacuccaacgacaccguccacgaccgcacccccuaccgcacccuccucaugaacgagcucggcguccccuuccaccucggcaccaagcaggucugcaucgccugguccuccuccuccugccacgacggcaaggccuggcuccacgucugcgucaccggccacgacgagaacgccaccgccuccuucaucuacgacggccgccucgucgacuccaucgucuccugguccaagaacauccuccgcacccaggaguccgagugcgucugcaucaacggcaccugcaccgucgucaugaccgacggcuccgccuccgagcgcgccgacaccaagauccucuucaucgaggagggcaagaucguccacaucuccccccucuccggcuccgcccagcacgucgaggagugcuccugcuacccccgcuaccccggcguccgcugcgucugccgcgacaacuggaagggcuccaaccgccccaucgucgacaucaacgucaaggacuacuccaucgucuccuccuacgucugcuccggccucgucggcgacaccccccgcaagaacgacuccuccuccuccuccuacugccgcaaccccaacaacgagaagggcucccacggcgucaagggcugggccuucgacgacggcaacgacgucuggaugggccgcaccaucggcgaggagcuccgcuccggcuacgagaccuucaaggucaucggcggcugguccacccccaacuccaagcuccagaccaaccgccaggucaucgucgaccgcggcaaccgcuccggcuacuccggcaucuucuccgucgagggcaaguccugcaucaaccgcugcuucuacgucgagcucauccgcggccgcaagcaggagaccaaggucugguggaccuccaacuccaucgucgucuucugcggcaccuccggcaccuacggcaccggcuccuggcccgacggcgccgacaucaaccucaugcccaucuga

SEQ ID NO: 117963 - RNA, 1410 nt, Artificial Sequence
  derived and/or modified CDS sequence (opt2) from neuraminidase__InfluenzaA__AFG72176
augaaccccaaccagaagaucaucaccaucggcuccgucucccucaccaucgccaccaucugcuuccucaugcagaucaccauccucgucaccaccgucacccuccacuucaagcaguacgagugcaacuccccccccaacaaccaggucaugcucugcgagcccaccaucaucgagcgcaacaucaccgagaucgucuaccucaccaacaccaccaucgagaaggagaagugccccaagcucgucgaguaccgcaacugguccaagccccagugcaagaucaccggcuucgcccccuucuccaaggacaacuccauccgccucuccgccggcggcgacaucugggucacccgcgagcccuacgucuccugcgaccccggcaagugcuaccaguucgcccucggccagggcaccacccucaacaaccgccacuccaacgacaccguccacgaccgcacccccuaccgcacccuccucaugaacgagcucggcguccccuuccaccucggcaccaagcaggucugcaucgccugguccuccuccuccugccacgacggcaaggccuggcuccacgucugcgucaccggccacgacgagaacgccaccgccuccuucaucuacgacggccgccucgucgacuccaucggcuccugguccaagaacauccuccgcacccaggaguccgagugcgucugcaucaacggcaccugcaccgucgucaugaccgacggcuccgccuccgagcgcgccgacaccaagauccucuucaucgaggagggcaagaucguccacaucuccccccucuccggcuccgcccagcacgucgaggagugcuccugcuacccccgcuaccccggcguccgcugcgucugccgcgacaacuggaagggcuccaaccgccccaucgucgacaucaacgucaaggacuacuccaucgucuccuccuacgucugcuccggccucgucggcgacaccccccgcaagaacgacuccuccuccuccuccuacugccgcaaccccaacaacgagaagggcucccacggcgucaagggcugggccuucgacgacggcaacgacgucuggaugggccgcaccaucuccgaggagcuccgcuccggcuacgagaccuucaaggucaucggcggcugguccacccccaacuccaagcuccagaucaaccgccaggucaucgucgaccgcggcaaccgcuccggcuacuccggcaucuucuccgucgagggcaaguccugcaucaaccgcugcuucuacgucgagcucauccgcggccgcaagcaggagaacaaggucugguggaccuccaacuccaucgucgucuucugcggcaccuccggcaccuacggcaccggcuccuggcccgacggcgccgacaucaaccucaugcccaucuga

SEQ ID NO: 117964 - RNA, 1410 nt, Artificial Sequence; identical to SEQ ID NO: 117962
  derived and/or modified CDS sequence (opt2) from neuraminidase__InfluenzaA__AFG72198

SEQ ID NO: 117965 - RNA, 1410 nt, Artificial Sequence; identical to SEQ ID NO: 117962
  derived and/or modified CDS sequence (opt2) from neuraminidase__InfluenzaA__AFG72209

SEQ ID NO: 117966 - RNA, 1410 nt, Artificial Sequence
  derived and/or modified CDS sequence (opt2) from neuraminidase__InfluenzaA__AFG72220
augaaccccaaccagaagaucaucaccaucggcuccgucucccucaccaucgccaccaucugcuuccucaugcagaucgccauccucgucaccaccgucacccuccacuucaagcaguacgagugcaacuccccccccaacaaccaggucaugcucugcgagcccaccaucaucgagcgcaacaucaccgagaucguccaccucaccaacaccaccaucgagaaggagaucugccccaagcucgccgaguaccgcaacugguccaagccccagugcaagaucaccggcuucgcccccuucuccaaggacaacuccauccgccucuccgccggcggcgacaucugggucacccgcgagcccuacgucuccugcgaccccggcaagugcuaccaguucgcccucggccagggcaccacccucaacaaccgccacuccaacgacaccguccacgaccgcacccccuaccgcacccuccucaugaacgagcucggcguccccuuccaccucggcaccaagcaggucugcaucgccugguccuccuccuccugccacgacggcaaggccuggcuccacgucugcgucaccggccacgacgagaacgccaccgccuccuucaucuacgacggccgccucgucgacuccaucggcuccugguccaagaacauccuccgcacccaggaguccgagugcgucugcaucaacggcaccugcaccgucgucaugaccgacggcuccgccuccgagcgcgccgacaccaagauccucuucaucgaggagggcaagaucguccacaucuccccccucuccggcuccgcccagcacgucgaggagugcuccugcuacccccgcuaccccggcguccgcugcgucugccgcgacaacuggaagggcuccaaccgccccaucgucgacaucaacgucaaggacuacuccaucgucuccuccuacgucugcuccggccucgucggcgacaccccccgcaagaacgacuccuccuccuccuccuacugccgcaaccccaacaacgagaagggcucccacggcgucaagggcugggccuucgacgacggcaacgacgucuggaugggccgcaccaucuccgaggagcuccgcuccggcuacgagaccuucaaggucaucggcggcugguccaagcccaacuccaagcuccagaucaaccgccaggucaucgucgaccgcggcaaccgcuccggcuacuccggcaucuucuccgucgagggcaaguccugcaucaaccgcugcuucuacgucgagcucauccgcggccgcaagcaggagaccgaggucugguggaccuccaacuccaucgucgucuucugcggcaccuccggcaccuacggcaccggcuccuggcccgacggcgccgacaucaaccucaugcccaucuga

SEQ ID NO: 117967 - RNA, 1410 nt, Artificial Sequence; identical to SEQ ID NO: 117962
  derived and/or modified CDS sequence (opt2) from neuraminidase__InfluenzaA__AFG72231

SEQ ID NO: 117968 - RNA, 1410 nt, Artificial Sequence
  derived and/or modified CDS sequence (opt2) from neuraminidase__InfluenzaA__AFG72297
augaaccccaaccagaagaucaucaccaucggcuccgucucccucaccaucgccaccaucugcuuccucaugcagaucgccauccucgucaccaccgucacccuccacuucaagcaguacgagugcaacuccccccccaacaaccaggucaugcucugcgagcccaccaucaucgagcgcaacaucaccgagaucgucuaccucaccaacaccaccaucgagcgcgagaucugccccaagcucgccgaguaccgcaacugguccaagccccagugcaagaucaccggcuucgcccccuucuccaaggacaacuccauccgccucuccgccggcggcgacaucugggucacccgcgagcccuacgucuccugcgaccccggcaagugcuaccaguucgcccucggccagggcaccacccucaacaaccgccacuccaacgacaccguccacgagcgcacccccuaccgcacccuccucaugaacgagcucggcguccccuuccaccucggcaccaagcaggucugcaucgccugguccuccuccuccugccacgacggcaaggccuggcuccacgucugcgucaccggccacgacgagaacgccaccgccuccuucaucuacgacggccgccucgucgacuccaucggcuccugguccaagaacauccuccgcacccaggaguccgagugcgucugcaucaacggcaccugcaccgucgucaugaccgacggcuccgccuccgagcgcgccgacaccaagauccucuucaucgaggagggcaagaucguccacaucuccccccucuccggcuccgcccagcacgucgaggagugcuccugcuacccccgcuaccccggcguccgcugcgucugccgcgacaacuggaagggcuccaaccgccccaucgucgacaucaacgucaaggacuacuccaucgucuccuccuacgucugcuccggccucgucggcgacaccccccgcaagaacgacuccuccuccuccuccuacugccgcaaccccaacaacgagaagggcucccacggcgucaagggcugggccuucgacgacggcaacgacgucuggaugggccgcaccaucuccgaggagcuccgcuccggcuacgagaccuucaaggucaucggcggcugguccaagcccaacuccaagcuccagaucaaccgccaggucaucgucgaccgcggcaaccgcuccggcuacuccggcaucuucuccgucgagggcaaguccugcaucaaccgcugcuucuacgucgagcucauccgcggccgcaagcaggagaccgaggucugguggaccuccaacuccaucgucgucuucugcggcaccuccggcaccuacggcaccggcuccuggcccgacggcgccgacaucaaccucaugcccaucuga

SEQ ID NO: 117969 - RNA, 1410 nt, Artificial Sequence
  derived and/or modified CDS sequence (opt2) from neuraminidase__InfluenzaA__AFG72308
augaaccccaaccagaagaucaucaccaucggcuccgucucccucaccaucgccaccaucugcuuccucaugcagaucgccauccucgucaccaccgucacccuccacuucaagcaguacgagugcaacuccccccccuccaaccaggucaugcucugcgagcccaccaucaucgagcgcaacaucaccgagaucgucuaccucaccaacaccaccaucgagaaggagaucugccccaagcucgccgaguaccgcaacugguccaagccccagugcaagaucaccggcuucgcccccuucuccaaggacaacuccauccgccucuccgccggcggcgacaucugggucacccgcgagcccuacgucuccugcgaccccggcaagugcuaccaguucgcccucggccagggcaccacccucaacaaccgccacuccaacgacaccguccacgaccgcacccccuaccgcacccuccucaugaacgagcucggcguccccuuccaccucggcaccaagcaggucugcaucgccugguccuccuccuccugccacgacggcaaggccuggcuccacgucugcgucaccggccacgacgagaacgccaccgccuccuucaucuacgacggccgccucgucgacuccaucggcuccugguccaagaacauccuccgcacccaggaguccgagugcgucugcaucaacggcaccugcaccgucgucaugaccgacggcuccgccuccgagcgcgccgacaccaagauccucuucaucgaggagggcaagaucguccacaucuccccccucuccggcuccgcccagcacgucgaggagugcuccugcuacccccgcuaccccggcguccgcugcgucugccgcgacaacuggaagggcuccaaccgccccaucgucgacaucaacgucaaggacuacuccaucgucuccuccuacgucugcuccggccucgucggcgacaccccccgcaagaacgacuccuccuccuccuccuacugccgcaaccccaacaacgagaagggcucccacggcgucaagggcugggccuucgacgacggcaacgacgucuggaugggccgcaccaucuccgaggagcuccgcuccggcuacgagaccuuccgcgucaucggcggcugguccaagcccaacuccaagcuccagaucaaccgccaggucaucgucgaccgcggcaaccgcuccggcuacuccggcaucuucuccgucgagggcaaguccugcaucaaccgcugcuucuacgucgagcucauccgcggccgcaagcaggagaccgaggucugguggaccuccaacuccaucgucgucuucugcggcaccuccggcaccuacggcaccggcuccuggcccgacggcgccgacaucaaccucaugcccaucuga

SEQ ID NO: 117970 - RNA, 1410 nt, Artificial Sequence; identical to SEQ ID NO: 111221
  derived and/or modified CDS sequence (opt2) from neuraminidase__InfluenzaA__AFG72320

SEQ ID NO: 117971 - RNA, 1410 nt, Artificial Sequence
  derived and/or modified CDS sequence (opt2) from neuraminidase__InfluenzaA__AFG72331
augaaccccaaccagaagaucaucaccaucggcuccgucucccucaccgucgccaccaucugcuuccucaugcagaucgccauccucgucaccaccgucacccuccacuucaagcaguacgagugcaacuccccccccaacaaccaggucaugcucugcgagcccaccaucaucgagcgcaacaucaccgagaucgucuaccucaccaacaccaccaucgagaaggagaucugccccaagcucgccgaguaccgcaacugguccaagccccagugcaagaucaccggcuucgcccccuucuccaaggacaacuccauccgccucuccgccggcggcgacaucugggucacccgcgagcccuacgucuccugcgaccccggcaagugcuaccaguucgcccucggccagggcaccacccucaacaaccgccacuccaacgacaccguccacgaccgcacccccuaccgcacccuccucaugaacgagcucggcguccccuuccaccucggcaccaagcaggucugcaucgccugguccuccuccuccugccacgacggcaaggccuggcuccacgucugcgucaccggccacgacgagaacgccaccgccuccuucaucuacgacggccgccucgucgacuccaucggcuccugguccaagaacauccuccgcacccaggaguccgagugcgucugcaucaacggcaccugcaccgucgucaugaccgacggcuccgccuccgagcgcgccgacaccaagauccucuucaucgaggagggcaagaucguccacaucuccccccucuccggcuccgcccagcacgucgaggagugcuccugcuacccccgcuaccccggcguccgcugcgucugccgcgacaacuggaagggcuccaaccgccccaucgucgacaucaacgucaaggacuacuccaucgucuccuccuacgucugcuccggccucgucggcgacaccccccgcaagaacgacuccuccuccuccuccuacugccgcaaccccaacaacgagaagggcucccacggcgucaagggcugggccuucgacgacggcaacgacgucuggaugggccgcaccaucuccgaggagcuccgcuccggcuacgagaccuucaaggucaucggcggcugguccaagcccaacuccaagcuccagaucaaccgccaggucaucgucgaccgcggcaaccgcuccggcuacuccggcaucuucuccgucgagggcaaguccugcaucaaccgcugcuucuacgucgagcucauccgcggccgcaagcaggagaccgaggucugguggaccuccaacuccaucgucgucuucugcggcaccuccggcaccuacggcaccggcuccuggcccgacggcgccgacaucaaccucaugcccaucuga

SEQ ID NO: 117972 - RNA, 1410 nt, Artificial Sequence
  derived and/or modified CDS sequence (opt2) from neuraminidase__InfluenzaA__AFG72353
augaaccccaaccagaagaucaucaccaucggcuccgucucccucaccaucgccaccaucugcuuccucaugcagaucgccauccucgucaccaccgucacccuccacuucaagcaguacgagugcaacuccccccccaacaaccaggucaugcucugcgagcccaccaucaucgagcgcaacaucaccgagaucgucuaccucaccaacaccaccaucgagaaggagaucugccccaagcucgccgaguaccgcaacugguccaagccccagugcaagaucaccggcuucgcccccuucuccaaggacaacuccauccgccucuccgccggcggcgacaucugggucacccgcgagcccuacgucuccugcgacuccggcaagugcuaccaguucgcccucggccagggcaccacccucaacaaccgccacuccaacgacaccguccacgaccgcacccccuaccgcacccuccucaugaacgagcucggcguccccuuccaccucggcaccaagcaggucugcaucgccugguccuccuccuccugccacgacggcaaggccuggcuccacgucugcgucaccggccacgacgagaacgccaccgccuccuucaucuacgacggccgccucgucgacuccaucggcuccugguccaagaacauccuccgcacccaggaguccgagugcgucugcaucaacggcaccugcaccgucgucaugaccgacggcuccgccuccgagcgcgccgacaccaagauccucuucaucgaggagggcaagaucguccacaucuccccccucuccggcuccgcccagcacgucgaggagugcuccugcuacccccgcuaccccggcguccgcugcgucugccgcgacaacuggaagggcuccaaccgccccaucgucgacaucaacgucaaggacuacuccaucgucuccuccuacgucugcuccggccucgucggcgacaccccccgcaagaacgacuccuccuccuccuccuacugccgcaaccccaacaacgagaagggcucccacggcgucaagggcugggccuucgacgacggcaacgacgucuggaugggccgcaccaucuccgaggagcuccgcuccggcuacgagaccuucaaggucaucggcggcugguccaagcccaacuccaagcuccagaucaaccgccaggucaucgucgaccgcggcaaccgcuccggcuacuccggcaucuucuccgucgagggcaaguccugcaucaaccgcugcuucuacgucgagcucauccgcggccgcaagcaggagaccgaggucugguggaccuccaacuccaucgucgucuucugcggcaccuccggcaccuacggcaccggcuccuggcccgacggcgccgacaucaaccucaugcccaucuga

SEQ ID NO: 117973 - RNA, 1410 nt, Artificial Sequence; identical to SEQ ID NO: 111221
  derived and/or modified CDS sequence (opt2) from neuraminidase__InfluenzaA__AFG72364

SEQ ID NO: 117974 - RNA, 1410 nt, Artificial Sequence
  derived and/or modified CDS sequence (opt2) from neuraminidase__InfluenzaA__AFG72430
augaaccccaaccagaagaucaucaccaucggcuccgucucccucaccaucaccaccaucugcuuccucaugcagaucgccauccucgucaucaccgucacccuccacuucaagcagugcgagugcaacuccccccccaacaaccaggucaugcucugcgagcccaccaucaucgagcgcaacaucaccgagaucgucuaccucaccaacaccaccaucgagaaggagaucugccccaagcucgccgaguaccgcaacugguccaagccccagugcaagaucaccggcuucgcccccuucuccaaggacaacuccauccgccucuccgccggcggcgacaucugggucacccgcgagcccuacgucuccugcgaccccggcaagugcuaccaguucgcccucggccagggcaccacccucaacaaccgccacuccaacgacaccguccacgaccgcacccccuaccgcacccuccucaugaacgagcucggcguccccuuccaccucggcaccaagcaggucugcaucgccugguccuccuccuccugccacgacggcaaggccuggcuccacgucugcgucaccggccacaacgagaacgccaccgccuccuucaucuacgacggccgccucgucgacuccaucggcuccugguccaagaacauccuccgcacccaggaguccgagugcgucugcaucaacggcaccugcaccgucgucaugaccgacggcuccgccuccggccgcgccgacaccaagauccucuucaucgaggagggcaagaucguccacaucucccagcucuccggcuccgcccagcacgucgaggagugcuccugcuacccccgcuaccccggcguccgcugcgucugccgcgacaacuggaagggcuccaaccgccccaucgucgacaucaacgucaaggacuacuccaucgucuccuccuacgucugcuccggccucgucggcgacaccccccgcaagaacgacuccuccuccuccuccaacugccucgaccccaacaacgaggagggcggccacggcgucaagggcugggccuucgacgacggcaacgacgucuggaugggccgcaccaucuccgagaagcuccgcuccggcuacgagaccuucaaggucaucggcggcugguccaagcccaacuccaagcuccagaucaaccgccaggucaucgucgaccgcggcaaccgcuccggcuacuccggcaucuucuccgucgagggcaaguccugcaucaaccgcugcuucuacgucgagcucauccgcggccgcaagcaggagaccgaggucugguggaccuccaacuccaucgucgucuucugcggcaccuccggcaccuacggcaccggcuccuggcccgacggcgccgacaucaaccucaugcccaucuga

SEQ ID NO: 117975 - RNA, 1410 nt, Artificial Sequence; identical to SEQ ID NO: 111221
  derived and/or modified CDS sequence (opt2) from neuraminidase__InfluenzaA__AFG72452

SEQ ID NO: 117976 - RNA, 1410 nt, Artificial Sequence
  derived and/or modified CDS sequence (opt2) from neuraminidase__InfluenzaA__AFG72474
augaaccccaaccagaagaucaucaccaucggcuccgucucccucaccaucgccaccaucugcuuccucaugcagaucgccauccucgucaccaccgucacccuccacuucaagcaguacgagugcaacuccccccccaacaaccaggucaugcucugcgagcccaccaucaucgagcgcaacaucaccgagaucgucuaccucaccaacaccaccaucgagaaggagaucugccccaagcucgccgaguaccgcaacugguccaagccccagugcgagaucaccggcuucgcccccuucuccaaggacaacuccauccgccucuccgccggcggcgacaucugggucacccgcgagcccuacgucuccugcgaccccggcaagugcuaccaguucgcccucggccagggcaccacccucaacaaccgccacuccaacgacaccguccacgaccgcacccccuaccgcacccuccucaugaacgagcucggcguccccuuccaccucggcaccaagcaggucugcaucgccugguccuccuccuccugccacgacggcaaggccuggcuccacgucugcgucaccggccacgacgagaacgccaccgccuccuucaucuacgacggccgccucgucgacuccaucggcuccugguccaagaacauccuccgcacccaggaguccgagugcgucugcaucaacggcaccugcaccgucgucaugaccgacggcuccgccuccgagcgcgccgacaccaagauccucuucaucgaggagggcaagaucguccacaucuccccccucuccggcuccgcccagcacgucgaggagugcuccugcuacccccgcuaccccggcguccgcugcgucugccgcgacaacuggaagggcuccaaccgccccaucgucgacaucaacgucaaggacuacuccaucgucuccuccuacgucugcuccggccucgucggcgacaccccccgcaagaacgacuccuccuccuccuccuacugccgcaaccccaacaacgagaagggcucccacggcgucaagggcugggccuucgacgacggcaacgacgucuggaugggccgcaccaucuccgaggagcuccgcuccggcuacgagaccuucaaggucaucggcggcugguccaagcccaacuccaagcuccagaucaaccgccaggucaucgucgaccgcggcaaccgcuccggcuacuccggcaucuucuccgucgagggcaaguccugcaucaaccgcugcuucuacgucgagcucauccgcggccgcaagcaggagaccgaggucugguggaccuccaacuccaucgucgucuucugcggcaccuccggcaccuacggcaccggcuccuggcccgacggcgccgacaucaaccucaugcccaucuga

SEQ ID NO: 117977 - RNA, 1410 nt, Artificial Sequence
  derived and/or modified CDS sequence (opt2) from neuraminidase__InfluenzaA__AFG72485
augaaccccaaccagaagaucaucaccaucggcuccgucucccucaccaucgccaccaucugcuuccucaugcagaucgccauccucgucaccaccgucacccuccacuucaagcagcacgagugcaacuccccccccaacaaccaggucaugcucugcgagcccaccaucaucgagcgcaacaucaccgagaucgucuaccucaccaacaccaccaucgagaaggagaucugccccaagcucgccgaguaccgcaacugguccaagccccagugcaagaucaccggcuucgcccccuucuccaaggacaacuccauccgccucuccgccggcggcgacaucugggucacccgcgagcccuacgucuccugcgaccccggcaagugcuaccaguucgcccucggccagggcaccacccucaacaaccgccacuccaacgacaccguccacgaccgcacccccuaccgcacccuccucaugaacgagcucggcguccccuuccaccucggcaccaagcaggucugcaucgccugguccuccuccuccugccacgacggcaaggccuggcuccacgucugcgucaccggccacgacgagaacgccaccgccuccuucaucuacgacggccgccucgucgacuccaucggcuccugguccaagaacauccuccgcacccaggaguccgagugcgucugcaucaacggcaccugcaccgucgucaugaccgacggcuccgccuccgagcgcgccgacaccaagauccucuucaucgaggagggcaagaucguccacaucuccccccucuccggcuccgcccagcacgucgaggagugcuccugcuacccccgcuaccccggcguccgcugcgucugccgcgacaacuggaagggcuccaaccgccccaucgucgacaucaacgucaaggacuacuccaucgucuccuccuacgucugcuccggccucgucggcgacaccccccgcaagaacgacuccuccuccuccuccuacugccgcaaccccaacaacgagaagggcucccacggcgucaagggcugggccuucgacgacggcaacgacgucuggaugggccgcaccaucuccgaggagcuccgcuccggcuacgagaccuucaaggucaucggcggcugguccaagcccaacuccaagcuccagaucaaccgccaggucaucgucgaccgcggcaaccgcuccggcuacuccggcaucuucuccgucgagggcaaguccugcaucaaccgcugcuucuacgucgagcucauccgcggccgcaagcaggagaccgaggucugguggaccuccaacuccaucgucgucuucugcggcaccuccggcaccuacggcaccggcuccuggcccgacggcgccgacaucaaccucaugcccaucuga

SEQ ID NO: 117978 - RNA, 1410 nt, Artificial Sequence; identical to SEQ ID NO: 111137
  derived and/or modified CDS sequence (opt2) from neuraminidase__InfluenzaA__AFG72507

SEQ ID NO: 117979 - RNA, 1410 nt, Artificial Sequence
  derived and/or modified CDS sequence (opt2) from neuraminidase__InfluenzaA__AFG72529
augaaccccaaccagaagaucaucaccaucggcuccgucucccucaccaucgccaccaucugcuuccucaugcagaucgccauccucgucaccaccgucacccuccacuucaagcaguacgagugcaacuccccccccaacaaccaggucaugcucugcgagcccaccaucaucgagcgcaacaucaccgagaucgucuaccucaccaacaccaccaucgagaaggagaucugccccaagcucgccgaguaccgcaacugguccaagccccagugcaagaucaccggcuucgcccccuucuccaaggacaacuccauccgccucuccgccggcggcgacaucugggucacccgcgagcccuacgucuccugcgaccccggcaagugcuaccaguucgcccucggccagggcaccacccucaacaaccgccacuccaacgacaccguccacgaccgcacccccuaccgcacccuccucaugaacgagcucggcguccccuuccaccucggcaccaagcaggucugcaucgccugguccuccuccuccugccacgacggcaaggccuggcuccacgucugcgucaccggccacgacgagaacgccaccgccuccuucaucuacgacggccgccucgucgacuccaucggcuccugguccaagaagauccuccgcacccaggaguccgagugcgucugcaucaacggcaccugcaccgucgucaugaccgacggcuccgccuccgagcgcgccgacaccaagauccucuucaucgaggagggcaagaucguccacaucuccccccucuccggcuccgcccagcacgucgaggagugcuccugcuacccccgcuaccccggcguccgcugcgucugccgcgacaacuggaagggcuccaaccgccccaucgucgacaucaacgucaaggacuacuccaucgucuccuccuacgucugcuccggccucgucggcgacaccccccgcaagaacgacuccuccuccuccuccuacugccagaaccccaacaacgagaacggcucccacggcgucaagggcugggccuucgacgacggcaacgacgucuggaugggccgcaccaucuccgaggagcuccgcuccggcuacgagaccuucaaggucaucggcggcugguccaagcccaacuccaagcuccagaucaaccgccaggucaucgucgaccgcggcaaccgcuccggcuacuccggcaucuucuccgucgagggcaaguccugcaucaaccgcugcuucuacgucgagcucauccgcggccgcaagcaggagaccgaggucugguggaccuccaacuccaucgucgucuucugcggcaccuccggcaccuacggcaccggcuccuggcccgacggcgccgacaucaaccucaugcccaucuga

SEQ ID NO: 117980 - RNA, 1410 nt, Artificial Sequence
  derived and/or modified CDS sequence (opt2) from neuraminidase__InfluenzaA__AFG72540
augaaccccaaccagaagaucaucaccaucggcuccgucucccucaccaucgccaccaucugcuuccucaugcagaucgccauccucgucaccaccgucacccuccacuucaagcaguacgagugcaaccccccccccaacaaccaggucaugcucugcgagcccaccaucaucgagcgcaacaucaccgagaucgucuaccucaccaacaccaccaucaagaaggagaucugccccaagcucgccgaguaccgcaacugguccaagccccagugcaagaucaccggcuucgcccccuucuccaaggacaacuccauccgccucuccgccggcggcgacaucugggucacccgcgagcccuacgucuccugcgaccccggcaagugcuaccaguucgcccucggccagggcaccacccucaacaaccgccacuccaacgacaccguccacgaccgcacccccuaccgcacccuccucaugaacgagcucggcguccccuuccaccucggcaccaagcaggucugcaucgccugguccuccuccuccugccacgacggcaaggccuggcuccacgucugcgucaccggccacgacgagaacgccaccgccuccuucaucuacgacggccgccucgucgacuccaucggcuccugguccaagaacauccuccgcacccaggaguccgagugcgucugcaucaacggcaccugcaccgucgucaugaccgacggcuccgccuccgagcgcgccgacaccaagauccucuucaucgaggagggcaagaucguccacaucuccccccucuccggcuccgcccagcacgucgaggagugcuccugcuacccccgcuaccccggcguccgcugcgucugccgcgacaacuggaagggcuccaaccgccccaucgucgacaucaacgucaaggacuacuccaucgucuccuccuacgucugcuccggccucgucggcgacaccccccgcaagaacgacuccuccuccuccuccuacugcuggaaccccaacaacgagaagggcggccacggcgucaagggcugggccuucgacgacggcaacgacgucuggaugggccgcaccaucuccgaggagcuccgcuccggcuacgagaccuucaaggucaucggcggcugguccaagcccaacuccaagcuccagaucaaccgccaggucaucgucgaccgcggcaaccgcuccggcuacuccggcaucuucuccgucgagggcaaguccugcaucaaccgcugcuucuacgucgagcucauccgcggccgcaagcaggagaccgaggucugguggaccuccaacuccaucgucgucuucugcggcaccuccggcaccuacggcaccggcuccuggcccgacggcgccgacaucaaccucaugcccaucuga

SEQ ID NO: 117981 - RNA, 1410 nt, Artificial Sequence
  derived and/or modified CDS sequence (opt2) from neuraminidase__InfluenzaA__AFG72562
augaaccccaaccagaagaucaucaccaucggcuccgucucccucaccaucgccaccaucugcuuccucaugcagaucgccauccucgucaccaccgucacccuccacuucaagcaguacgagugcaacuccccccccaacaaccaggucaugcucugcgagcccaccaucaucgagcgcaacaucaccgagaucgucuaccucaccaacaccaccaucgagaaggagaucugccccaagcucgccgaguaccgcaacugguccaagccccagugcaagaucaccggcuucgcccccuucuccaaggacaacuccauccgccucuccgccggcggcgacaucugggucacccgcgagcccuacgucuccugcgaccccggcaagugcuaccaguucgcccucggccagggcaccacccucaacaaccgccacuccaacgacaccguccacgaccgcacccccuaccgcacccuccucaugaacgagcucggcguccccuuccaccucggcaccaagcaggucugcaucgccugguccuccuccuccugccacgacggcaaggccuggcuccacgucugcgucaccggccacgacgagaacgccaccgccuccuucaucuacgacggccgccucgucgacuccaucggcuccugguccaagaacauccuccgcacccaggaguccgagugcgucugcaucaacggcaccugcaccgucgucaugaccgacggcuccgccuccgagcgcgccgacaccaagauccucuucaucgaggagggcaagaucguccacaucuccccccucuccggcuccgcccagcacgucgaggagugcuccugcuacccccgcuaccccggcguccgcugcgucugccgcgacaacuggaagggcuccaaccgccccaucgucgacaucaacgucaaggacuacuccaucgucuccuccuacgucugcuccggccucgucggcgacaccccccgcaagaacgacuccuccuccuccuccuacugcuggaaccccaacaacgagaagggcggccacggcgucaagggcugggccuucgacgacggcaacgacgucuggaugggccgcaccaucuccgaggagcuccgcuccggcuacgagaccuucaaggucaucggcggcugguccaagcccaacuccaagcuccagaucaaccgccaggucaucgucgaccgcggcaaccgcuccggcuacuccggcaucuucuccgucgagggcaaguccugcaucaaccgcugcuucuacgucgagcucauccgcggccgcaagcaggagaccgaggucugguggaccuccaacuccaucgucgucuucugcggcaccuccggcaccuacggcaccggcuccuggcccgacggcgccgacaucaaccucaugcccaucuga

SEQ ID NO: 117982 - RNA, 1410 nt, Artificial Sequence
  derived and/or modified CDS sequence (opt2) from neuraminidase__InfluenzaA__AFG72584
augaaccccaaccagaagaucaucaccaucggcuccgucucccucaccaucgccaccaucugcuuccucaugcagaucgccauccucgucaccaccgucacccuccacuucaagcaguacgagugcaacuccccccccaacaaccaggucaugcucugcgagcccaccaucaucgagcgcaacaucaccgagaucgucuaccucaccaacaccaccaucgagaaggaggucugccccaagcucgccgaguaccgcaacugguccaagccccagugcaagaucaccggcuucgcccccuucuccaaggacaacuccauccgccucuccgccggcggcgacaucugggucacccgcgagcccuacgucuccugcgaccccggcaagugcuaccaguucgcccucggccagggcaccacccucaacaacaagcacuccaacgacaccguccacgaccgcacccccuaccgcacccuccucaugaacgagcucggcguccccuuccaccucggcaccaagcaggucugcaucgccugguccuccuccuccugccacgacggcaaggccuggcuccacgucugcgucaccggccacgacgagaacgccaccgccuccuucaucuacgacggccgccucgucgacuccaucggcuccugguccaagaacauccuccgcacccaggaguccgagugcgucugcaucaacggcaccugcaccgucgucaugaccgacggcuccgccuccgagaaggccgacaccaagauccucuucaucgaggagggcaagaucguccacaucuccccccucuccggcuccgcccagcacgucgaggagugcuccugcuacccccgcuaccccggcguccgcugcgucugccgcgacaacuggaagggcuccaaccgccccaucgucgacaucaacgucaaggacuacuccaucgucuccuccuacgucugcuccggccucgucggcgacaccccccgcaagaacgacuccuccuccuccuccuacugcuggaaccccaacaacgagaagggcggccacggcgucaagggcugggccuucgacgacggcaacgacgucuggaugggccgcaccaucuccgaggagcuccgcuccggcuacgagaccuucaaggucaucggcggcugguccaagcccaacuccaagcuccagaucaaccgccaggucaucgucgaccgcggcaaccgcuccggcuacuccggcaucuucuccgucgagggcaaguccugcaucaaccgcugcuucuacgucgagcucauccgcggccgcaagcaggagaccgaggucugguggaccuccaacuccaucgucgucuucugcggcaccuccggcaccuacggcaccggcuccuggcccgacggcgccgacaucaaccucaugcccaucuga

SEQ ID NO: 117983 - RNA, 1410 nt, Artificial Sequence
  derived and/or modified CDS sequence (opt2) from neuraminidase__InfluenzaA__AFG72606
augaaccccaaccagaagaucaucaccaucggcuccgucucccucaccaucgccaccaucugcuuccucaugcagaucgccauccucgucaccaccgucacccuccacuucaagcaguacgagugcaacuccccccccaacaaccaggucaugcucugcgagcccaccaucaucgagcgcaacaucaccgagaucgucuaccucaccaacaccaccaucgagaaggagaucugccccaagcucgccgaguaccgcaacugguccaagccccagugcaagaucaccggcuucgcccccuucuccaaggacaacuccauccgccucuccgccggcggcgacaucugggucacccgcgagcccuacgucuccugcgaccccggcaagugcuaccaguucgcccucggccagggcaccacccucaacaaccgccacuccaacgacaccguccacgaccgcacccccuaccgcacccuccucaugaacgagcucggcguccccuuccaccucggcaccaagcaggucugcaucgccugguccuccuccuccugccacgacggcaaggccuggcuccacgucugcgucaccggccacgacgagaacgccaccgccuccuucaucuacgacggccgccucgucgacuccaucggcuccugguccaagaacauccuccgcacccaggaguccgagugcgucugcaucaacggcaccugcaccgucgucaugaccgacggcuccgccuccgagcgcgccgacaccaagauccucuucaucgaggagggcaagaucguccacaucuccccccucuccggcuccgcccagcacgucgaggagugcuccugcuacccccgcuaccccggcguccgcugcgucugccgcgacaacuggaagggcuccaaccgccccaucgucgacaucaacgucaaggaccacuccaucgucuccuccuacgucugcuccggccucgucggcgacaccccccgcaagaacgacuccuccuccuccuccuacugccucaaccccaacaacgaggagggcggccacggcgucaagggcugggccuucgacgacggcaacgacgucuggaugggccgcaccaucuccgagaagcuccgcuccggcuacgagaccuucaaggucaucggcggcugguccaagcccaacuccaagcuccagaucaaccgccaggucaucgucgaccgcggcaaccgcuccggcuacuccggcaucuucuccgucgagggcaaguccugcgucaaccgcugcuucuacgucgagcucauccgcggccgcaagcaggagaccgaggucugguggaccuccaacuccaucgucgucuucugcggcaccuccggcaccuacggcaccggcuccuggcccgacggcgccgacaucaaccucaugcccaucuga

SEQ ID NO: 117984 - RNA, 1410 nt, Artificial Sequence
  derived and/or modified CDS sequence (opt2) from neuraminidase__InfluenzaA__AFG72617
augaaccccaaccagaagaucaucaccaucggcuccgucucccucaccaucaccaccaucugcuuccucaugcagaucgccauccucgucaucaccgucacccuccacuucaagcagugcgagugcaacuccccccccaacaaccaggucaugcucugcgagcccaccaucaucgagcgcaacaucaccgagaucgucuaccucaccaacaccaccaucgagaaggagaucugccccaagcucgccgaguaccgcaacugguccaagccccagugcaagaucaccggcuucgcccccuucuccaaggacaacuccauccgccucuccgccggcggcgacaucugggucacccgcgagcccuacgucuccugcgaccccggcaagugcuaccaguucgcccucggccagggcaccacccucaacaaccgccacuccaacgacaccguccacgaccgcacccccuaccgcacccuccucaugaacgagcucggcguccccuuccaccucggcaccaagcaggucugcaucgccugguccuccuccuccugccacgacggcaaggccuggcuccacgucugcgucaccggccacaacgagaacgccaccgccuccuucaucuacgacggccgccucgucgacuccaucggcuccugguccaagaacauccuccgcacccaggaguccgagugcgucugcaucaacggcaccugcaccgucgucaugaccgacggcuccgccuccggccgcgccgacaccaagauccucuucaucgaggagggcaagaucguccacaucuccccccucuccggcuccgcccagcacgucgaggagugcuccugcuacccccgcuaccccggcguccgcugcgucugccgcgacaacuggaagggcuccaaccgccccaucgucgacaucaacgucaaggacuacuccaucgucuccuccuacgucugcuccggccucgucggcgacaccccccgcaagaacgacuccuccuccuccuccuacugccucaaccccaacaacgaggagggcggccacggcgucaagggcugggccuucgacgacggcaacgacgucuggaugggccgcaccaucuccgagaagcuccgcuccggcuacgagaccuucaaggucaucggcggcugguccaagcccaacuccaagcuccagaucaaccgccaggucaucgucgaccgcggcaaccgcuccggcuacuccggcaucuucuccgucgagggcaaguccugcaucaaccgcugcuucuacgucgagcucauccgcggccgcaagcaggagaccgaggucugguggaccuccaacuccaucgucgucuucugcggcaccuccggcaccuacggcaccggcuccuggcccgacggcgccgacaucaaccucaugcccaucuga

SEQ ID NO: 117985 - RNA, 1410 nt, Artificial Sequence
  derived and/or modified CDS sequence (opt2) from neuraminidase__InfluenzaA__AFG72628
augaaccccaaccagaagaucaucaccaucggcuccgucucccucaccaucgccaccaucugcuuccucaugcagaucgccauccucgucaccaccgucacccuccacuucaagcaguacgagugcaacuccccccccaacaaccaggucaugcucugcgagcccaccaucaucgagcgcaacaucaccgagaucgucuaccucaccaacaccaccaucgagaaggagaucugccccaagcucgccgaguaccgcaacugguccaagccccagugcaagaucaccggcuucgcccccuucuccaaggacaacuccauccgccucuccgccggcggcgacaucugggucacccgcgagcccuacgucuccugcgaccccgacaagugcuaccaguucgcccucggccagggcaccacccucaacaaccgccacuccaacgacaccguccacgaccgcacccccuaccgcacccuccucaugaacgagcucggcguccccuuccaccucggcaccaagcaggucugcaucgccugguccuccuccuccugccacgacggcaaggccuggcuccacgucugcgucaccggccacgacgagaacgccaccgccuccuucaucuacgacggccgccucgucgacuccaucggcuccugguccaagaagauccuccgcacccaggaguccgagugcgucugcaucaacggcaccugcaccgucgucaugaccgacggcuccgccuccggccgcgccgacaccaagauccucuucaucgaggagggcaagaucguccacaucuccccccucuccggcuccgcccagcacgucgaggagugcuccugcuacccccgcuacuccggcguccgcugcgucugccgcgacaacuggaagggcuccaaccgccccaucgucgacaucaacgucaaggacuacuccaucgucuccuccuacgucugcuccggccucgucggcgacaccccccgcaagaacgacuccuccuccuccucccacugccucaaccccaacaacgaggagggcggccacggcgucaagggcugggccuucgacgacggcaacgacgucuggaugggccgcaccaucuccgagaagcuccgcuccggcuacgagaccuucaaggucaucggcggcugguccaagcccaacuccaagcuccagaucaaccgccaggucaucgucgaccgcggcaaccgcuccggcuacuccggcaucuucuccgucgagggcaaguccugcaucaaccgcugcuucuacgucgagcucauccgcggccgcaagcaggagaccgaggucugguggaccuccaacuccaucgucgucuucugcggcaccuccggcaccuacggcaccggcuccuggcccgacggcgccgacaucaaccucaugcccaucuga

SEQ ID NO: 117986 - RNA, 1410 nt, Artificial Sequence; identical to SEQ ID NO: 111016
  derived and/or modified CDS sequence (opt2) from neuraminidase__InfluenzaA__AFG72639

SEQ ID NO: 117987 - RNA, 1410 nt, Artificial Sequence
  derived and/or modified CDS sequence (opt2) from neuraminidase__InfluenzaA__AFG72650
augaaccccaaccagaagaucaucaccaucggcuccgucucccucaccaucgccaccaucugcuuccucaugcagaucgccauccucgucaccaccgucacccuccacuucaagcaguacgagugcaacuccccccccaacaaccaggucaugcucugcgagcccaccaucaucgagcgcaacaucaccgagaucgucuaccucaccaacaccaccaucgagaaggagaucugccccaagcucgccgaguaccgcaacugguccaagccccagugcaagaucaccggcuucgcccccuucuccaaggacaacuccauccgccucuccgccggcggcgacaucugggucacccgcgagcccuacgucuccugcgaccccggcaagugcuaccaguucgcccucggccagggcaccacccucaacaaccgccacuccaacgacaccguccacgaccgcacccccuaccgcacccuccucaugaacgagcucggcguccccuuccaccucggcaccaagcaggucugcaucgccugguccuccuccuccugccacgacggcaaggccuggcuccacgucugcgucaccggccacgacgagaacgccaccgccuccuucaucuacgacggccgccucgucgacuccaucggcuccugguccaagaacauccuccgcacccaggaguccgagugcgucugcaucaacggcaccugcaccgucgucaugaccgacggcuccgccuccgagcgcgccgacaccaagauccucuucaucgaggagggcaagaucguccacaucuccccccucuccggcuccgcccagcacgucgaggagugcuccugcuacccccgcuaccccggcguccgcugcgucugccgcgacaacuggaagggcuccaaccgccccaucgucgacaucaacgucaaggacuacuccaucgucuccuccuacgucugcuccggccucgucggcgacaccccccgcaagaacgacuccuccuccuccuccuacugccucaaccccaacaacgaggagggcggccacggcgucaagggcugggccuucgacgacggcaacgacgucuggaugggccgcaccaucuccgagaagcuccgcuccggcuacgagaccuucaaggucaucggcggcugguccaagcccaacuccaagcuccagaucaaccgccaggucaucgucgaccgcggcaaccgcuccggcuacuccggcaucuucuccgucgagggcaaguccugcgucaaccgcugcuucuacgucgagcucauccgcggccgcaagcaggagaccgaggucugguggaccuccaacuccaucgucgucuucugcggcaccuccggcaccuacggcaccggcuccuggcccgacggcgccgacaucaaccucaugcccaucuga

SEQ ID NO: 117988 - RNA, 1410 nt, Artificial Sequence; identical to SEQ ID NO: 117985
  derived and/or modified CDS sequence (opt2) from neuraminidase__InfluenzaA__AFG72672

SEQ ID NO: 117989 - RNA, 1407 nt, Artificial Sequence
  derived and/or modified CDS sequence (opt2) from neuraminidase__InfluenzaA__AFG72683
augaaccccaaccagaagaucaucaccaucggcuccgucucccucaccaucgccaccaucugcuuccucaugcagaucgccauccucgucaucaccgucacccuccacuucaagcaguacgagugcaacuccccccccaacaaccaggucaugcucugcgagcccaccaucaucgagcgcaacaucaccgagaucgucuaccucaccaacaccaccaucgagaaggagaucugccccaagcucgccgaguaccgcaacugguccaagccccagugcaagaucaccggcuucgcccccuucuccaaggacaacuccauccgccucuccgccggcggcgacaucugggucacccgcgagcccuacgucuccugcgaccccggcaagugcuaccaguucgcccucggccagggcaccacccucaacaaccgccacuccaacgagguccacgaccgcacccccuaccgcacccuccucaugaacgagcucggcguccccuuccaccucggcaccaagcaggucugcaucgccugguccuccuccuccugccacgacggcaaggccuggcuccacgucugcgucaccggccacaacgagaacgccaccgccuccuucaucuacgacggccgccucgucgacuccaucggcuccugguccaagaacauccuccgcacccaggaguccgagugcgucugcaucaacggcaccugcaccgucgucaugaccgacggcuccgccuccggccgcgccgacaccaagauccucuucaucgaggagggcaagaucguccacaucuccccccucuccggcuccgcccagcacgucgaggagugcuccugcuacccccgcuaccccggcguccgcugcgucugccgcgacaacuggaagggcuccaaccgccccaucgucgacaucaacgucaaggacuacuccaucgucuccuccuacgucugcuccggccucgucggcgacaccccccgcaagaacgacuccuccuccuccucccacugccucaaccccaacaacgaggagggcggccacggcgucaagggcugggccuucgacgacggcaacgacgucuggaugggccgcaccaucuccgagaagcuccgcuccggcuacgagaccuucaaggucaucggcggcugguccaagcccaacuccaagcuccagaucaaccgccaggucaucgucgaccgcggcaaccgcuccggcuacuccggcaucuucuccgucgagggcaaguccugcaucaaccgcugcuucuacgucgagcucauccgcggccgcaagcaggagaccgaggucugguggaccuccaacuccaucgucgucuucugcggcaccuccggcaccuacggcaccggcuccuggcccgacggcgccgacaucaaccucaugcccaucuga

SEQ ID NO: 117990 - RNA, 1410 nt, Artificial Sequence
  derived and/or modified CDS sequence (opt2) from neuraminidase__InfluenzaA__AFG72705
augaaccccaaccagaagaucaucaccaucggcuccgucucccucaccaucgccaccaucugcuuccucaugcagaucgccauccucgucaccaccgucacccuccacuucaagcaguacgagugcaacuccccccccaacaaccaggucaugcucugcgagcccaccaucaucgagcgcaacaucaccgagaucgucuaccucaccaacaccaccaucgagaaggagaucugccccaagcucgccgaguaccgcaacugguccaagccccagugcaagaucaccggcuucgcccccuucuccaaggacaacuccauccgccucuccgccggcggcgacaucugggucacccgcgagcccuacgucuccugcgaccccgacaagugcuaccaguucgcccucggccagggcaccacccucaacaaccgccacuccaacgacaccguccacgaccgcacccccuaccgcacccuccucaugaacgagcucggcguccccuuccaccucggcaccaagcaggucugcaucgccugguccuccuccuccugccacgacggcaaggccuggcuccacgucugcgucaccggccacgacgagaacgccaccgccuccuucaucuacgacggccgccucgucgacuccaucggcuccugguccaagaagauccuccgcacccaggaguccgagugcgucugcaucaacggcaccugcaccgucgucaugaccgacggcuccgccuccggccgcgccgacaccaagauccucuucaucgaggagggcaagaucguccacaucucccagcucuccggcuccgcccagcacgucgaggagugcuccugcuacccccgcuaccccggcguccgcugcgucugccgcgacaacuggaagggcuccaaccgccccaucgucgacaucaacgucaaggaccacuccaucgucuccuccuacgucugcuccggccucgucggcgacaccccccgcaagaacgacuccuccuccuccucccacugccucaaccccaacaacgaggagggcggccacggcgucaagggcugggccuucgacgacggcaacgacgucuggaugggccgcaccaucuccgagaagcuccgcuccggcuacgagaccuucaaggucaucgagggcugguccaagcccaacuccaagcuccagaucaaccgccaggucaucgucgaccgcggcaaccgcuccggcuacuccggcaucuucuccgucgagggcaaguccugcaucaaccgcugcuucuacgucgagcucauccgcggccgcaagcaggagaccgaggucugguggaccuccaacuccaucgucgucuucugcggcaccuccggcaccuacggcaccggcuccuggcccgacggcgccgacaucaaccucaugcccaucuga

SEQ ID NO: 117991 - RNA, 1410 nt, Artificial Sequence
  derived and/or modified CDS sequence (opt2) from neuraminidase__InfluenzaA__AFG72716
augaaccccaaccagaagaucaucaccaucggcuccgucucccucaccaucaccaccaucugcuuccucaugcagaucgccauccucgucaucaccgucacccuccacuucaagcagugcgagugcaacuccccccccaacaaccaggucaugcucugcgagcccaccaucaucgagcgcaacaucaccgagaucgucuaccucaccaacaccaccaucgagaaggagaucugccccaagcucgccgaguaccgcaacugguccaagccccagugcaagaucaccggcuucgcccccuucuccaaggacaacuccauccgccucuccgccggcggcgacaucugggucacccgcgagcccuacgucuccugcgaccccggcaagugcuaccaguucgcccucggccagggcaccacccucaacaaccgccacuccaacgacaccguccacgaccgcacccccuaccgcacccuccucaugaacgagcucggcguccccuuccaccucggcaccaagcaggucugcaucgccugguccuccuccuccugccacgacggcaaggccuggcuccacgucugcgucaccggccacaacgagaacgccaccgccuccuucaucuacgacggccgccucgucgacuccaucggcuccugguccaagaacauccuccgcacccaggaguccgagugcgucugcaucaacggcaccugcaccgucgucaugaccgacggcuccgccuccggccgcgccgacaccaagauccucuucaucgaggagggcaagaucguccacaucuccccccucuccggcuccgcccagcacgucgaggagugcuccugcuacccccgcuaccccggcguccgcugcgucugccgcgacaacuggaagggcuccaaccgccccaucgucgacaucaacgucaaggacuacuccaucgucuccuccuacgucugcuccggccucgucggcgacaccccccgcaagaacgacuccuccuccuccuccuacugccucgaccccaacaacgaggagggcggccacggcgucaagggcugggccuucgacgacggcaacgacgucuggaugggccgcaccaucuccgagaagucccgcuccggcuacgagaccuucaaggucaucggcggcugguccaagcccaacuccaagcuccagaucaaccgccaggucaucgucgaccgcggcaaccgcuccggcuacuccggcaucuucuccgucgagggcaaguccugcaucaaccgcugcuucuacgucgagcucauccgcggccgccgccaggagaccgaggucugguggaccuccaacuccaucgucgucuucugcggcaccuccggcaccuacggcaccggcuccuggcccgacggcgccgacaucaaccucaugcccaucuga

SEQ ID NO: 117992 - RNA, 1410 nt, Artificial Sequence
  derived and/or modified CDS sequence (opt2) from neuraminidase__InfluenzaA__AFG72738
augaaccccaaccagaagaucaucaccaucggcuccgucucccucaccaucaccaccaucugcuuccucaugcagaucgccauccucgucaucaccgucacccuccacuucaagcagugcgagugcaacuccccccccaacaaccaggucaugcucugcgagcccaccaucaucgagcgcaacaucaccgagaucgucuaccucaccaacaccaccaucgagaaggagaucugccccaagcucgccgaguaccgcaacugguccaagccccagugcaagaucaccggcuucgcccccuucuccaaggacaacuccauccgccucuccgccggcggcgacaucugggucacccgcgagcccuacgucuccugcgaccccggcaagugcuaccaguucgcccucggccagggcaccacccucaacaaccgccacuccaacgacaccguccacgaccgcacccccuaccgcacccuccucaugaacgagcucggcguccccuuccaccucggcaccaagcaggucugcaucgccugguccuccuccuccugccacgacggcaaggccuggcuccacgucugcgucaccggccacaacgagaacgccaccgccuccuucaucuacgacggccgccucgucgacuccaucggcuccugguccaagaacauccuccgcacccaggaguccgagugcgucugcaucaacggcaccugcaccgucgucaugaccgacggcuccgccuccggccgcgccgacaccaagauccucuucaucgaggagggcaagaucguccacaucucccagcucuccggcuccgcccagcacgucgaggagugcuccugcuacccccgcuaccccggcguccgcugcgucugccgcgacaacuggaagggcuccaaccgccccaucgucgacaucaacgucaaggacuacuccaucgucuccuccuacgucugcuccggccucgucggcgacaccccccgcaagaacgacuccuccuccuccuccuacugccucgaccccaacaacgaggagggcggccacggcgucaagggcugggccuucgacgacggcaacgacgucuggaugggccgcaccaucuccgagaagcuccgcuccggcuacgagaccuucaaggucaucggcggcugguccaagcccaacuccaagcuccagaucaaccgccaggucaucgucgaccgcggcaaccgcuccggcuacuccggcaucuucuccgucgagggcaaguccugcaucaaccgcugcuucuacgucgagcucauccgcggccgcaagcaggagaccgaggucugguggaccuccaacuccaucgucgucuucugcggcaccuccggcaccuacggcaccggcuccuggcccgacggcgccgacaucaaccucaugcccaucuga

SEQ ID NO: 117993 - RNA, 1410 nt, Artificial Sequence; identical to SEQ ID NO: 111221
  derived and/or modified CDS sequence (opt2) from neuraminidase__InfluenzaA__AFG72749

SEQ ID NO: 117994 - RNA, 1410 nt, Artificial Sequence; identical to SEQ ID NO: 110609
  derived and/or modified CDS sequence (opt2) from neuraminidase__InfluenzaA__AFG72760

SEQ ID NO: 117995 - RNA, 1410 nt, Artificial Sequence; identical to SEQ ID NO: 110076
  derived and/or modified CDS sequence (opt2) from neuraminidase__InfluenzaA__AFG72771

SEQ ID NO: 117996 - RNA, 1410 nt, Artificial Sequence
  derived and/or modified CDS sequence (opt2) from neuraminidase__InfluenzaA__AFG72782
augaaccccaaccagaagaucaucaccaucggcuccgucucccucaccaucgccaccaucugcuuccucaugcagaucgccauccucgucaccaccgucacccuccacuucaagcaguacgagugcaacucccuccccaacaaccaggucaugcucugcgagcccaccaucaucgagcgcaacaucaccgagaucgucuaccucaccaacaccaccaucgagaaggagaucugccccaagcucgccgaguaccgcaacugguccaagccccagugcaagaucaccggcuucgcccccuucuccaaggacaacuccauccgccucuccgccggcggcgacaucugggucacccgcgagcccuacgucuccugcgaccccgacaagugcuaccaguucgcccucggccagggcaccacccucaacaaccgccacuccaacgacaccguccacgaccgcacccccuaccgcacccuccucaugaacgagcucggcguccccuuccaccucggcaccaagcaggucugcaucgccugguccuccuccuccugccacgacggcaaggccuggcuccacgucugcgucaccggccacgacgagaacgccaccgccuccuucaucuacgacggccgccucgucgacuccaucggcuccugguccaagaagauccuccgcacccaggaguccgagugcgucugcaucaacggcaccugcaccgucgucaugaccgacggcuccgccuccggccgcgccgacaccaagauccucuucaucgaggagggcaagaucauccacaccucccagcucuccggcuccgcccagcacgucgaggagugcuccugcuacccccgcuaccccggcguccgcugcgucugccgcgacaacuggaagggcuccaaccgccccaucgucgacaucaacgucaaggacuacuccaucgucuccuccuacgucugcuccggccucgucggcgacaccccccgcaagaacgacuccuccuccuccucccacugccucaaccccaacaacgaggagggcggccacggcgucaagggcugggccuucgacgacggcaacgacgucuggaugggccgcaccaucuccgagaaguuccgcuccggcuacgagaccuucaaggucaucgagggcugguccaagcccaacuccaagcuccagaucaaccgccaggucaucgucgaccgcgacaaccgcuccggcuacuccggcaucuucuccgucgagggcaaguccugcaucaaccgcugcuucuacgucgagcucauccgcggccgcaagcaggagaccgaggucugguggaccuccaacuccaucgucgucuucugcggcaccuccggcaccuacggcaccggcuccuggcccgacggcgccgacaucaaccucaugcccaucuga

SEQ ID NO: 117997 - RNA, 1410 nt, Artificial Sequence; identical to SEQ ID NO: 111785
  derived and/or modified CDS sequence (opt2) from neuraminidase__InfluenzaA__AFG72793

SEQ ID NO: 117998 - RNA, 1410 nt, Artificial Sequence; identical to SEQ ID NO: 110320
  derived and/or modified CDS sequence (opt2) from neuraminidase__InfluenzaA__AFG72804

SEQ ID NO: 117999 - RNA, 1410 nt, Artificial Sequence; identical to SEQ ID NO: 111965
  derived and/or modified CDS sequence (opt2) from neuraminidase__InfluenzaA__AFG72826

SEQ ID NO: 118000 - RNA, 1410 nt, Artificial Sequence
  derived and/or modified CDS sequence (opt2) from neuraminidase__InfluenzaA__AFG72837
augaaccccaaccagaagaucaucaccaucggcuccgucucccucaccaucgccaccaucugcuuccucaugcagaucgccauccucgucaccaccgucacccuccacuucaagcaguacgagugcaacuccccccccaacaaccaggucaugcucugcgagcccaccaucaucgagcgcaacaucaccgagaucgucuaccucaccaacaccaccaucgagaaggagaucugccccaagcucgccgaguaccgcaacugguccaagccccagugcaacaucaccggcuucgcccccuucuccaaggacaacuccauccgccucuccgccggcggcgacaucugggucacccgcgagcccuacgucuccugcgaccccgacaagugcuaccaguucgcccucggccagggcaccacccucaacaacggccacuccaacgacaccguccacgagcgcacccccuaccgcacccuccucaugaacgagcucggcguccccuuccaccucggcaccaagcaggucugcaucgccugguccuccuccuccugccacgacggcaaggccuggcuccacgucugcgucaccggcgacgacgagaacgccaccgccuccuucaucuacaacggccgccucgucgacuccaucggcuccugguccaagaagauccuccgcacccaggaguccgagugcgucugcaucaacggcaccugcaccgucgucaugaccgacggcuccgccuccggcaaggccgacaccaagauccucuucaucgaggagggcaagaucguccacaucuccacccucuccggcuccgcccagcacgucgaggagugcuccugcuacccccgcuaccccggcguccgcugcgucugccgcgacaacuggaagggcuccaaccgccccaucgucgacaucaacgucaaggacuacuccaucgucuccuccuacgucugcuccggccucgucggcgacaccccccgcaagaacgacuccuucuccuccucccacugccucgaccccaacaacgaggagggcggccacggcgucaagggcugggccuucgacgacggcaacgacgucuggaugggccgcaccaucuccgagaagcuccgcuccggcuacgagaccuucaaggucaucgagggcugguccaagcccaacuccaagcuccagaucaaccgccaggucaucgucgagcgcggcaaccgcuccggcuacuccggcaucuucuccgucgagggcaaguccugcaucaaccgcugcuucuacgucgagcucauccgcggccgcaaggaggagaccgaggucugguggaccuccaacuccaucgucgucuucugcggcaccuccggcaccuacggcaccggcuccuggcccgacggcgccgacaucaaccucaugcccaucuga

SEQ ID NO: 118001 - RNA, 1413 nt, Artificial Sequence
  derived and/or modified CDS sequence (opt2) from neuraminidase__InfluenzaA__AFG72848
augaaccccaaccagaagaucaucaccaucggcuccgucucccucaccaucgccaccaucugcuuccucaugcagaucgccauccucgucaccaccgucacccuccacuucaagcaguacgagugcaacuccccccccaacaaccaggucaugcucugcgagcccaccaucaucgagcgcaacaucaccgagaucgucuaccucaccaacaccaccaucgagaaggagaucugccccaaguccgccgaguaccgcaacugguccaagccccagugcaacaucaccggcuucgcccccuucuccaaggacaacuccauccgccucuccgccggcggcgacaucugggucacccgcgagcccuacgucuccugcgaccccgacaagugcuaccaguucgcccucggccagggcaccacccucaacaacggccacuccaacgacaccguccacgaccgcacccccuaccgcacccuccucaugaacgagcucggcguccccuuccaccucggcacccgccaggucugcaucgccugguccuccuccuccugccacgacggcaaggccuggcuccacgucugcgucaccggcgacgacaagaacgccaccgccuccuucaucuacaacggccgccucgucgacuccaucggcuccugguccaagaaguacauccuccgcacccaggaguccgagugcgucugcaucaacggcaccugcaccgucgucaugaccgacggcuccgccuccggcaaggccgacaccaagauccucuucaucgaggagggcaagaucauccacaucuccacccucuccggcuccgcccagcacgucgaggagugcuccugcuacccccgcuaccccggcguccgcugcgucugccgcgacaacuggaagggcuccaaccgccccaucgucgacaucaacgucaaggacuacuccaucgucuccuccuacgucugcuccggccucgucggcgacaccccccgcaagaacgacuccuccuccuccucccacugccucgaccccaacaacgaggagggcggccacggcgucaagggcugggccuucgacgacggcaacgacgucuggaugggccgcaccaucuccgagaagcuccgcuccggcuacgagaccuucaaggucaucgagggcugguccaagcccaacuccaagcuccagaucaaccgccaggucaucgucgagcgcggcaaccgcuccggcuacuccggcaucuucuccgucgagggcaaguccugcaucaaccgcugcuucuacgucgagcucauccgcggccgcaaggaggagaccgaggucugguggaccuccaacuccaucgucgucuucugcggcaccuccggcaccuacggcaccggcuccuggcccgacggcgccgacaucaaccucaugcccaucuga

SEQ ID NO: 118002 - RNA, 1410 nt, Artificial Sequence
  derived and/or modified CDS sequence (opt2) from neuraminidase__InfluenzaA__AFG72859
augaaccccaaccagaagaucaucaccaucggcuccgucucccucaccaucuccaccaucugcuucuucaugcagaucgccauccucaucaccaccgucacccuccacuucaagcaguacgaguucaacuccccccccaacaaccaggucaugcucugcgagcccaccaucaucgagcgcaacaucaccgagaucgucuaccucaccaacaccaccaucgagaaggagaucugccccaagcucgccgaguaccgcaacugguccaagccccagugcaacaucaccggcuucgcccccuucuccaaggacaacuccauccgccucuccgccggcggcgacaucugggucacccgcgagcccuacgucuccugcgaccccgacaagugcuaccaguucgcccucggccagggcaccacccucaacaacguccacuccaacgacaucguccacgaccgcacccccuaccgcacccuccucaugaacgagcucggcguccccuuccaccucggcaccaagcaggucugcaucgccugguccuccuccuccugccacgacggcaaggccuggcuccacgucugcgucaccggcgacgacgagaacgccaccgccuccuucaucuacaacggccgccucgucgacuccaucgucuccugguccaagaagauccuccgcacccaggaguccgagugcgucugcaucaacggcaccugcaccgucgucaugaccgacggcuccgccuccggcaaggccgacaccaagauccucuucaucgaggagggcaagaucguccacaccuccacccucuccggcuccgcccagcacgucgaggagugcuccugcuacccccgcuaccccggcguccgcugcgucugccgcgacaacuggaagggcuccaaccgccccaucgucgacaucaacaucaaggacuacuccaucgucuccuccuacgucugcuccggccucgucggcgacaccccccgcaagaacgacuccuccuccuccucccacugccucgaccccaacaacgaggagggcggccacggcgucaagggcugggccuucgacgacggcaacgacgucuggaugggccgcaccaucuccgagaagcuccgcuccggcuacgagaccuucaaggucaucgagggcugguccaaccccaacuccaagcuccagaucaaccgccaggucaucgucgaccgcggcaaccgcuccggcuacuccggcaucuucuccgucgagggcaaguccugcaucaaccgcugcuucuacgucgagcucauccgcggccgcaagcaggagaccgagguccucuggaccuccaacuccaucgucgucuucugcggcaccuccggcaccuacggcaccggcuccuggcccgacggcgccgacaucaaccucaugcccaucuga

SEQ ID NO: 118003 - RNA, 1410 nt, Artificial Sequence
  derived and/or modified CDS sequence (opt2) from neuraminidase__InfluenzaA__AFG72870
augaaccccaaccagaagaucaucaccaucggcuccgucucccucaccaucgccaccaucugcuuccucaugcagaucgccauccucgucaccaccgucacccuccacuucaagcaguacgagugcaacuccccccccaacaaccaggucaugcucugcgagcccaccaucaucgagcgcaacaucaccgagaucgucuaccucaccaacaccaccaucgagaaggagaucugccccaagcucgccgaguaccgcaacugguccaagccccagugcaacaucaccggcuucgcccccuucuccaaggacaacuccauccgccucuccgccggcggcgacaucugggucacccgcgagcccuacgucuccugcgaccccgacaagugcuaccaguucgcccucggccagggcaccacccucaacaacggccacuccaacgacaccguccacgaccgcacccccuaccgcacccuccucaugaacgagcucggcguccccuuccaccucggcaccaagcaggucugcaucgccugguccuccuccuccugccacgacggcaaggccuggcuccacgucugcgucaccggcgacgacgagaacgccaccgccuccuucaucuacaacggccgccucgucgacuccaucggcuccugguccaagaagauccuccgcacccaggaguccgagugcgucugcaucaacggcaccugcaccgucgucaugaccgacggcuccaccuccggcaaggccgacaccaagauccucuucaucgaggagggcaagaucguccacaucuccacccucuccggcuccgcccagcacgucgaggagugcuccugcuacccccgcuaccccggcguccgcugcgucugccgcgacaacuggaagggcuccaaccgccccaucgucgacaucaacgucaaggacuacuccaucgucuccuccuacgucugcuccggccucgucggcgacaccccccgcaagaacgacuccuucuccuccucccacugccucgaccccaacaacgaggagggcggccacggcgucaagggcugggccuucgacgacggcaacgacgucuggaugggccgcaccaucuccgagaagcuccgcuccggcuacgagaccuucaaggucaucgagggcugguccaagcccaacuccaagcuccagaucaaccgccaggucaucgucgagcgcggcaaccgcuccggcuacuccggcaucuucuccgucgaguccaaguccugcaucaaccgcugcuucuacgucgagcucauccgcggccgcaaggaggagaccgaggucugguggaccuccaacuccaucgucgucuucugcggcaccuccggcaccuacggcaccggcuccuggcccgacggcgccgacaucaaccucaugcccaucuga

SEQ ID NO: 118004 - RNA, 1410 nt, Artificial Sequence
  derived and/or modified CDS sequence (opt2) from neuraminidase__InfluenzaA__AFG72892
augaaccccaaccagaagaucaucaccaucggcuccgucucccucaccaucuccaccaucugcuucuucaugcagaucgccauccucaucaccaccgucacccuccacuucaagcaguacgaguucaacuccccccccaacaaccaggucaugcucugcgagcccaccaucaucgagcgcaacaucaccgagaucgucuaccucaccaacaccaccaucgagaaggagaucugccccaagcucgccgaguaccgcaacugguccaagccccagugcgacaucaccggcuucgcccccuucuccaaggacaacuccauccgccucuccgccggcggcgacaucugggucacccgcgagcccuacgucuccugcgaccccgacaagugcuaccaguucgcccucggccagggcaccacccucaacaacguccacuccaacgacaccguccacgaccgcacccccuaccgcacccuccucaugaacgagcucggcguccccuuccaccucggcaccaagcaggucugcaucgccugguccuccuccuccugccacgacggcaaggccuggcuccacgucugcgucaccggcgacgacaagaacgccaccgccuccuucaucuacaacggccgccucgucgacuccaucgucuccugguccaaggagauccuccgcacccaggaguccgagugcgucugcaucaacggcaccugcaccgucgucaugaccgacggcuccgccuccggcaaggccgacaccaagauccucuucaucgaggagggcaagaucguccacaccuccacccucuccggcuccgcccagcacgucgaggagugcuccugcuacccccgcuaccccggcguccgcugcgucugccgcgacaacuggaagggcuccaaccgccccaucgucgacaucaacaucaaggacuacuccaucgucuccuccuacgucugcuccggccucgucggcgacaccccccgcaagaacgacuccuccuccuccucccacugccucgaccccaacaacgaggagggcggccacggcgucaagggcugggccuucgacgacggcaacgacgucuggaugggccgcaccaucuccgagaagcuccgcuccggcuacgagaccuucaaggucaucgagggcugguccaaccccaacuccaagcuccagaucaaccgccaggucaucgucgaccgcggcaaccgcuccggcuacuccggcaucuucuccgucgagggcaaguccugcaucaaccgcugcuucuacgucgagcucauccgcggccgcaaggagaagaccgagguccucuggaccuccaacuccaucgucgucuucugcggcaccuccggcaccuacggcaccggcuccuggcccgacggcgccgacaucaaccucaugcccaucuga

SEQ ID NO: 118005 - RNA, 1410 nt, Artificial Sequence
  derived and/or modified CDS sequence (opt2) from neuraminidase__InfluenzaA__AFG72903
augaaccccaaccagaagaucaucaccaucggcuccgucucccucaccaucuccaccaucugcuucuucaugcagaucgccauccucaucaccaccgucacccuccacuucaagcaguacgaguucaacuccccccccaacaaccaggucaugcucugcgagcccaccaucaucgagcgcaacaucaccgagaucgucuaccucaccaacaccaccaucgagaaggagaucugccccaagcucgccgaguaccgcaacugguccaagccccagugcaacaucaccggcuucgcccccuucuccaaggacaacuccauccgccucuccgccggcggcgacaucugggucacccgcgagcccuacgucuccugcgaccccgacaagugcuaccaguucgcccucggccagggcaccacccucaacaacguccacuccaacgacaccguccacgaccgcacccccuaccgcacccuccucaugaacgagcucggcguccccuuccaccucggcaccaagcaggucugcaucgccugguccuccuccuccugccacgacggcaaggccuggcuccacgucugcgucaccggcgacgacaagaacgccaccgccuccuucaucuacaacggccgccucgucgacuccaucgucuccugguccaaggagauccuccgcacccaggaguccgagugcgucugcaucaacggcaccugcaccgucgucaugaccgacggcuccgccuccggcaaggccgacaccaagauccucuucaucgaggagggcaagaucguccacaccuccacccucuccggcuccgcccagcacgucgaggagugcuccugcuacccccgcuaccccggcguccgcugcgucugccgcgacaacuggaagggcuccaaccgccccaucgucgacaucaacaucaaggacuacuccaucgucuccuccuacgucugcuccggccucgucggcgacaccccccgcaagaaggacuccuccuccuccucccacugccucgaccccaacaacgaggagggcggccacggcgucaagggcugggccuucgacgacggcaacgacgucuggaugggccgcaccaucuccgagaagcuccgcuccggcuacgagaccuucaaggucaucgagggcugguccaaccccaacuccaagcuccagaucaaccgccaggucaucgucgaccgcggcgaccgcuccggcuacuccggcaucuucuccgucgagggcaaguccugcaucaaccgcugcuucuacgucgagcucauccgcggccgcaaggaggagaccgagguccucuggaccuccaacuccaucgucgucuucugcggcaccuccggcaccuacggcaccggcuccuggcccgacggcgccgacaucaaccucaugcccaucuga

SEQ ID NO: 118006 - RNA, 1410 nt, Artificial Sequence
  derived and/or modified CDS sequence (opt2) from neuraminidase__InfluenzaA__AFG72936
augaaccccaaccagaagaucaucaccaucggcuccgucucccucaccaucuccaccaucugcuucuucauccagaucgccauccucaucaccaccgucacccuccacuucaagcaguacgaguucaacuccccccccaacaaccaggucaugcucugcgagcccaccaucaucgagcgcaacaucaccgagaucgucuaccucaccaacaccaccaucgagaaggagaucugccccaagcucgccgaguaccgcaacugguccaagccccagugcgacaucaccggcuucgcccccuucuccaaggacaacuccauccgccucuccgccggcggcgacaucugggucacccgcgagcccuacgucuccugcgaccccgacaagugcuaccaguucgcccucggccagggcaccacccucaacaacguccacuccaacaacaucguccgcgaccgcacccccuaccgcacccuccucaugaacgagcucggcguccccuuccaccucggcaccaagcaggucugcaucgccugguccuccuccuccugccacgacggcaaggccuggcuccacgucugcaucaccggcgacgacaagaacgccaccgccuccuucaucuacaacggccgccucgucgacuccgucgucuccugguccaaggagauccuccgcacccaggaguccgagugcgucugcaucaacggcaccugcaccgucgucaugaccgacggcuccgccuccggcaaggccgacaccaagauccucuucaucgaggagggcaagaucguccacaccuccacccucuccggcuccgcccagcacgucgaggagugcuccugcuacccccgcuaccccggcguccgcugcgucugccgcgacaacuggaagggcuccaaccgccccaucgucgacaucaacaucaaggaccacuccaucgucuccuccuacgucugcuccggccucgucggcgacaccccccgcaagaacgacuccuccuccuccucccacugccucgaccccaacaacgaggagggcggccacggcgucaagggcugggccuucgacgacggcaacgacgucuggaugggccgcaccaucuccgagaagucccgccucggcuacgagaccuucaaggucaucgagggcugguccaaccacaaguccaagcuccagaucaaccgccaggucaucgucgaccgcggcaaccgcuccggcuacuccggcaucuucuccgucgagggcaaguccugcaucaaccgcugcuucuacgucgagcucauccgcggccgcaaggaggagaccgagguccucuggaccuccaacuccaucgucgucuucugcggcaccuccggcaccuacggcaccggcuccuggcccgacggcgccgaccucaaccucaugcccaucuga

SEQ ID NO: 118007 - RNA, 1410 nt, Artificial Sequence
  derived and/or modified CDS sequence (opt2) from neuraminidase__InfluenzaA__AFG72958
augaaccccaaccagaagaucaucaccaucggcuccgucucccucaccaucuccaccaucugcuucuucaugcagaucgccauccucaucaccaccgucacccuccacuucaagcaguacgaguucaacuccccccccaacaaccaggucaugcucugcgagcccaccaucaucgagcgcaacaucaccgagaucgucuaccucaccaacaccaccaucgagaaggagaucugccccaagcucgccgaguaccgcaacugguccaagccccagugcgacaucaccggcuucgcccccuucuccaaggacaacuccauccgccucuccgccggcggcgacaucugggucacccgcgagcccuacgucuccugcgaccccgacaagugcuaccaguucgcccucggccagggcaccacccucaacaacguccacuccaacaacaucguccgcgaccgcacccccuaccgcacccuccucaugaacgagcucggcguccccuuccaccucggcaccaagcaggucugcaucgccugguccuccuccuccugccacgacggcaaggccuggcuccacgucugcaucaccggcgacgacaagaacgccaccgccuccuucaucuacaacggccgccucgucgacuccgucgucuccugguccaaggagauccuccgcacccaggaguccgagugcgucugcaucaacggcaccugcaccgucgucaugaccgacggcuccgccuccggcaaggccgacaccaagauccucuucaucgaggagggcaagaucguccacaccuccacccucuccggcuccgcccagcacgucgaggagugcuccugcuacccccgcuaccccggcguccgcugcgucugccgcgacaacuggaagggcuccaaccgccccaucgucgacaucaacaucaaggaccacuccaucgucuccuccuacgucugcuccggccucgucggcgacaccccccgcaagaacgacuccuccuccuccucccacugccucgaccccaacaacgaggagggcggccacggcgucaagggcugggccuucgacgacggcaacgacgucuggaugggccgcaccaucaacgagaccucccgccucggcuacgagaccuucaaggucaucgagggcugguccaaccccaaguccaagcuccagaucaaccgccaggucaucgucgaccgcggcaaccgcuccggcuacuccggcaucuucuccgucgagggcaaguccugcaucaaccgcugcuucuacgucgagcucauccgcggccgcaaggaggagaccgagguccucuggaccuccaacuccaucgucgucuucugcggcaccuccggcaccuacggcaccggcuccuggcccgacggcgccgaccucaaccucaugcccaucuga

SEQ ID NO: 118008 - RNA, 1410 nt, Artificial Sequence; identical to SEQ ID NO: 110139
  derived and/or modified CDS sequence (opt2) from neuraminidase__InfluenzaA__AFG98811

SEQ ID NO: 118009 - RNA, 1410 nt, Artificial Sequence
  derived and/or modified CDS sequence (opt2) from neuraminidase__InfluenzaA__AFG98822
augaaccccaaccagaagaucaucaccaucggcuccgucucccucaucaucgccaccgucugcuuccucaugcagaucgccauccucgucaccaccgucacccuccacuucaagcagcacgagugcgacucccccuccuccaaccaggucaugcucugcgagcccaucaucaucgagcgcaacaucaccgagaucgucuaccucaacaacaccaccaucgagaaggagaccugccccaagcucgucgaguaccgcaacugguccaagccccagugcaagaucaccggcuucgcccccuucuccaaggacaacuccauccgccucuccgccggcggcgacaucugggucacccgcgagcccuacgucuccugcgaccccggcaagugcuaccaguucgcccucggccagggcaccacccucgacaacaagcacuccaacgacaccauccacgaccgcaucccccaccgcacccuccucaugaacgagcucggcguccccuuccaccucggcacccgccaggucugcaucgccugguccuccuccuccugccacgacggcaaggccuggcuccacgucugcgucaccggcgacgacaagaacgccaccgccuccuucaucuacgacggccgccucgucgacuccaucggcuccuggucccagaacauccuccgcacccaggaguccgagugcgucugcaucaacggcaccugcaccgucgucaugaccgacggcuccgccuccggccgcgccgacacccgcauccucuucaucgaggagggcaagaucguccacaucuccccccucuccggcuccgcccagcacgucgaggagugcuccugcuacccccgcuaccccgacguccgcugcaucugccgcgacaacuggaagggcuccaaccgccccaucgucgacaucaacaugaaggacuacuccaucgacuccuccuacgucugcuccggccucgucggcgacaccccccgcaacgacgaccgcuccuccaaguccaacugccgcaaccccaacaacgagcgcggcaaccacggcgucaagggcugggccuucgacaacggcaacgacgucuggaugggccgcaccaucuccaaggaccuccgcuccggcuacgagaccuucaaggucaucggcggcugguccacccccaacuccaagucccagaucaaccgccaggucaucgucgacuccgacaaccgcuccggcuacuccggcaucuucuccgucgagggcaaguccugcaucaaccgcugcuucuacgucgagcucauccgcggccgcgagcaggagacccgcgucugguggaccuccaacuccaucgucgucuucugcggcaccuccggcaccuacggcaccggcuccuggcccgacggcgccaacaucaacuucaugcccaucuga

SEQ ID NO: 118010 - RNA, 1410 nt, Artificial Sequence; identical to SEQ ID NO: 116163
  derived and/or modified CDS sequence (opt2) from neuraminidase__InfluenzaA__AFG98833

SEQ ID NO: 118011 - RNA, 1410 nt, Artificial Sequence
  derived and/or modified CDS sequence (opt2) from neuraminidase__InfluenzaA__AFG98844
augaaccccaaccagaagaucaucaccaucggcuccgucucccucaccaucgccaccaucugcuuccucaugcagaucgccauccucgucaccaccgucacccuccacuucaagcaguacgagugcgacucccccgccaacaaccaggucaugcccugcgagcccaucaucaucgagcgcaacaucaccgagaucgucuaccucaccaacaccaccaucgagaaggagaugugccccaagcucgucgaguaccgcaacugguccaagccccagugcaagaucaccggcuucgcccccuucuccaaggacaacuccauccgccucuccgccggcggcgacaucugggucacccgcgagcccuacgucuccugcgaccccggcaagugcuaccaguucgcccucggccagggcaccacccucaacaaccgccacuccaacgacaccauccacgaccgcaucccccaccgcacccuccucaugaacgagcucggcguccccuuccaccucggcacccgccaggucugcaucgccugguccuccuccuccugccacgacggcaaggccuggcuccacgucugcgucaccggcgacgacaagaacgccaccgccuccuucaucuacgacggccgccucgucgacuccaucggcuccuggucccagaacauccuccgcacccaggaguccgagugcgucugcaucaaccgcaccugcaccgucgucaugaccgacggcuccgccuccggcaaggccgacacccgcauccucuucaucgaggagggcaagaucguccacaucuccccccucuccggcuccgcccagcacgucgaggagugcuccugcuacccccgcuaccccggcguccgcugcaucugccgcgacaacuggaagggcuccaaccgccccgucgucgacaucaacgucaaggacuacuccaucgacuccuccuacgucugcuccggccucgucggcgacaccccccgcaacaacgaccgcuccuccuccuccuacugccgcaaccccaacaacgagcgcggcaaccacggcgucaagggcugggccuucgacgacgagaacgacgucuggaugggccgcaccaucuccaaggacucccgcuccggcuacgagaccuucaaggucaucggcggcugguccacccccaacuccaagucccagaucaaccgccaggucaucgucgacuccgacaaccgcuccggcuacuccggcaucuucuccgucgagggcaaguccugcaucaaccgcugcuucuacgucgagcucauccgcggccgcgagcaggagacccgcgucugguggaccuccaacuccaucgucgucuucugcggcaccuccggcaccuacggcaccggcuccuggcccgacggcgccgacaucaaccucaugcccaucuga

SEQ ID NO: 118012 - RNA, 1410 nt, Artificial Sequence; identical to SEQ ID NO: 110154
  derived and/or modified CDS sequence (opt2) from neuraminidase__InfluenzaA__AFG98855

SEQ ID NO: 118013 - RNA, 1410 nt, Artificial Sequence; identical to SEQ ID NO: 111008
  derived and/or modified CDS sequence (opt2) from neuraminidase__InfluenzaA__AFG98866

SEQ ID NO: 118014 - RNA, 1410 nt, Artificial Sequence
  derived and/or modified CDS sequence (opt2) from neuraminidase__InfluenzaA__AFG98877
augaaccccaaccagaagaucaucaccaucggcuccgucucccucaccaucgccaccaucugcuuccucaugcagaucgccauccucgucaccaccgucacccuccacuucaagcaguacgagugcgacuccccccccaacaaccaggucaugcccugcgagcccaucaucaucgagcgcaacaucaccgagaucgucuaccucaccaacaccaccaucgagaaggagaucugccccaagcucgucgaguaccgcaacugguccaagccccagugcaagaucaccggcuucgcccccuucuccaaggacaacuccauccgccucuccgccggcggcgacaucugggucacccgcgagcccuacgucuccugcgaccccggcaagugcuaccaguucgcccucggccagggcaccacccucgacaacaagcacuccaacgacaccauccacgaccgcaccccccaccgcacccuccucaugaacgagcucggcguccccuuccaccucggcacccgccaggucugcaucgccugguccuccuccuccugccacgacggcaaggccuggcuccacgucugcgucaccggcuacgacaagaacgccaccgccuccuucaucuacgacggccgccucgucgacuccaucggcuccuggucccagaacauccuccgcacccaggaguccgagugcgucugcaucaacggcaccugcaccgucgucaugaccgacggcuccgccuccggccgcgccgacaccaagauccucuucaucgaggagggcaagaucguccacaucuccccccucuccggcuccgcccagcacgucgaggagugcuccugcuacccccgcuaccccggcguccgcugcaucugccgcgacaacuggaagggcuccaaccgccccgucgucgacaucaacgucaaggacuacuccaucgacuccuccuacgucugcuccggccucgucggcgacaccccccgcaacaacgaccgcuccuccaacuccuacugccgcaaccccaacaacgagaagggcaaccacggcgucaagggcugggccuucgacgacggcaacgacgucuggaugggccgcaccaucuccgaggacucccgcuccggcuacgagaccuucaaggucaucggcggcugguccacccccaacuccaagcuccagaucaaccgccaggucaucgucgacuccgacaaccgcuccggcuacuccggcaucuucuccgucgagggcaaguccugcaucaaccgcugcuucuacgucgagcucauccgcggccgcgagcaggagacccgcgucugguggaccuccaacuccaucgucgucuucugcggcaccuccggcaccuacggcaccggcuccuggcccgacggcgccgacaucaaccucaugcccaucuga

SEQ ID NO: 118015 - RNA, 1410 nt, Artificial Sequence; identical to SEQ ID NO: 110154
  derived and/or modified CDS sequence (opt2) from neuraminidase__InfluenzaA__AFG98888

SEQ ID NO: 118016 - RNA, 1410 nt, Artificial Sequence
  derived and/or modified CDS sequence (opt2) from neuraminidase__InfluenzaA__AFG98899
augaaccccaaccagaagaucaucaccaucggcuccgucucccucaucaucgccaccaucugcuuccucaugcagaucgccauccucgucaccaccgucacccuccacuucaagcaguacgagugcgacucccccgccaacaaccaggucaugcccugcgagcccaucaucaucgagcgcaacaucaccgagaucgucuaccucaccaacaccaccaucgagaaggagaucugccccaagcucgucgaguaccgcaacugguccaagccccagugcaagaucaccggcuucgcccccuucuccaaggacaacuccauccgccucuccgccggcggcgacaucugggucacccgcgagcccuacgucuccugcgaccccggcaagugcuaccaguucgcccucggccagggcaccacccucgacaacaagcacuccaacgacaccauccacgaccgcaccccccaccgcacccuccucaugaacgagcucggcguccccuuccaccucggcacccgccaggucugcaucgccugguccuccuccuccugccacgacggcaaggccuggcuccacgucugcgucaccggcuacgacaagaacgccaccgccuccuucaucuacgacggccgccucgucgacuccaucggcuccuggucccagaacauccuccgcacccaggaguccgagugcgucugcaucaacggcaccugcaccgucgucaugaccgacggcuccgccuccggccgcgccgacaccaagauccucuucaucgaggagggcaagaucguccacaucuccccccucuccggcuccgcccagcacgucgaggagugcuccugcuacccccgcuaccccggcguccgcugcaucugccgcgacaacuggaagggcuccaaccgccccgucgucgacaucaacgucaaggacuacuccaucgacuccuccuacgucugcuccggccucgucggcgacaccccccgcaacaacgaccgcuccuccaacuccuacugccgcaaccccaacaacgagaagggcaaccacggcgucaagggcugggccuucgacgacggcaacgacgucuggaugggccgcaccaucuccgaggacucccgcuccggcuacgagaccuucaaggucaucggcggcugguccacccccaacuccaagcuccagaucaaccgccaggucaucgucgacuccgacaaccgcuccggcuacuccggcaucuucuccgucgagggcaaguccugcaucaaccgcugcuucuacgucgagcucauccgcggccgcgagcaggagacccgcgucugguggaccuccaacuccaucgucgucuucugcggcaccuccggcaccuacggcaccggcuccuggcccgacggcgccgacaucaaccucaugcccaucuga

SEQ ID NO: 118017 - RNA, 1410 nt, Artificial Sequence; identical to SEQ ID NO: 110154
  derived and/or modified CDS sequence (opt2) from neuraminidase__InfluenzaA__AFG98910

SEQ ID NO: 118018 - RNA, 1410 nt, Artificial Sequence; identical to SEQ ID NO: 110154
  derived and/or modified CDS sequence (opt2) from neuraminidase__InfluenzaA__AFG98921

SEQ ID NO: 118019 - RNA, 1410 nt, Artificial Sequence
  derived and/or modified CDS sequence (opt2) from neuraminidase__InfluenzaA__AFG98932
augaaccccaaccagaagaucaucaccaucggcuccgucucccucaccaucgccaccaucugcuuccucaugcagaucgccauccucgucaccaccgucacccuccacuucaagcaguacgagugcgacucccccgccaacaaccaggucaugcccugcgagcccaucaucgucgagcgcaacaucaccgagaucgucuaccucaccaacaccaccaucgagaaggagaucugccccaagcucgucgaguaccgcaagugguccaagccccagugcaagaucaccggcuucgcccccuucuccaaggacaacuccauccgccucuccgccggcggcgacaucugggucacccgcgagcccuacgucuccugcgaccccggcaagugcuaccaguucgcccucggccagggcaccacccucgacaacaagcacuccaacgacaccauccacgaccgcaccccccaccgcacccuccucaugaacgagcucggcguccccuuccaccucggcacccgccaggucugcaucgccugguccuccuccuccugccacgacggcaaggccuggcuccacgucugcgucaccggcuacgacaagaacgccaccgccuccuucaucuacgacggccgccucgucgacuccaucggcuccuggucccagaacauccuccgcacccaggaguccgagugcgucugcaucaacggcaccugcaccgucgucaugaccgacggcuccgccuccggccgcgccgacaccaagauccucuucaucgaggagggcaagaucguccacaucuccccccucuccggcuccgcccagcacgucgaggagugcuccugcuacccccgcuaccccggcguccgcugcaucugccgcgacaacuggaagggcuccaaccgccccgucgucgacaucaacgucaaggacuacuccaucgacuccuccuacgucugcuccggccucgucggcgacaccccccgcaacaacgaccgcuccuccaacuccuacugccgcaaccccaacaacgagaagggcaaccacggcgucaagggcugggccuucgacgacggcaacgacgucuggaugggccgcaccaucuccgaggacucccgcuccggcuacgagaccuucaaggucaucggcggcugguccacccccaacuccaagcuccagaucaaccgccaggucaucgucgacuccgacaaccgcuccggcuacuccggcaucuucuccgucgagggcaaguccugcaucaaccgcugcuucuacgucgagcucauccgcggccgcgagcaggagacccgcgucugguggaccuccaacuccaucgucgucuucugcggcaccuccggcaccuacggcaccggcuccuggcccgacggcgccgacaucaaccucaugcccaucuga

SEQ ID NO: 118020 - RNA, 1410 nt, Artificial Sequence
  derived and/or modified CDS sequence (opt2) from neuraminidase__InfluenzaA__AFG98943
augaaccccaaccagaagaucaucaccaucggcuccgucucccucaccaucgccaccaucugcuuccucaugcagaucgccauccucgucaccaccgucacccuccacuucaagcaguacgagugcgacucccccgccaacaaccaggucaugcccugcgagcccaucaucaucgagcgcaacaucaccgagaucgucuaccucaccaacaccaccaucgagaaggagaucugccccaagcucgucgaguaccgcaacugguccaagccccagugcaagaucaccggcuucgcccccuucuccaaggacaacuccauccgccucuccgccggcggcgacaucugggucacccgcgagcccuacgucuccugcgaccccggcaagugcuaccaguucgcccucggccagggcaccacccucgacaacaagcacuccaacgacaccauccacgaccgcaccccccaccgcacccuccucaugaacgagcucggcguccccuuccaccucggcacccgccaggucugcaucgccugguccuccuccuccugccacgacggcaaggccuggcuccacgucugcgucaccggcuacgacaagaacgccaccgccuccuucaucuacgacggccgccucgucgacuccaucggcuccuggucccagaacauccuccgcacccaggaguccgagugcgucugcaucaacggcaccugcaccgucgucaugaccgacggcuccgccuccggccgcgccgacaccaagauccucuucaucgaggagggcaagaucguccacaucuccccccucuccggcuccgcccagcacgucgaggagugcuccugcuacccccgcuaccccggcguccgcugcaucugccgcgacaacuggaagggcuccaaccgccccgucgucgacaucaacgucaaggacuacuccaucgacuccuccuacgucugcuccggccucgucggcgacaccccccgcaagaacgaccgcuccuccaacuccuacugccgcaaccccaacaacgagaagggcaaccacggcgucaagggcugggccuucgacgacggcaacgacgucuggaugggccgcaccaucuccgaggacucccgcuccggcuacgagaccuucaaggucaucggcggcugguccacccccaacuccaagcuccagaucaaccgccaggucaucgucgacuccgacaaccgcuccggcuacuccggcaucuucuccgucgagggcaaguccugcaucaaccgcugcuucuacgucgagcucauccgcggccgcgagcaggagacccgcgucugguggaccuccaacuccaucgucgucuucugcggcaccuccggcaccuacggcaccggcuccuggcccgacggcgccgacaucgaccucaugcccaucuga

SEQ ID NO: 118021 - RNA, 1410 nt, Artificial Sequence
  derived and/or modified CDS sequence (opt2) from neuraminidase__InfluenzaA__AFG98965
augaaccccaaccagaagaucaucaccaucggcuccgucucccucaccaucgccaccaucugcuuccucaugcagaucgccauccucgucaccaccgucacccuccacuucaagcaguacgagugcgacucccccgccaacaaccaggucaugcccugcgagcccaccaucaucgagcgcaacaucaccgagaucgucuaccucaccaacaucaccaucgagaaggagaucugccccaagcucgucgaguaccgcaacugguccaagccccagugcaagaucaccggcuucgcccccuucuccaaggacaacuccauccgccucuccgccggcggcgacaucugggucacccgcgagcccuacgucuccugcgaccccggcaagugcuaccaguucgcccucggccagggcaccacccucgacaacaagcacuccaacgacaccauccacgaccgcaccccccaccgcacccuccucaugaacgagcucggcguccccuuccaccucggcacccgccaggucugcaucgccugguccuccuccuccugccacgacggcaaggccuggcuccacgucugcgucaccggcuacgacaagaacgccaccgccuccuucaucuacgacggccgccucgucgacuccaucggcuccuggucccagaacauccuccgcacccaggaguccgagugcgucugcaucaacggcaccugcaccgucgucaugaccgacggcuccgccuccggccgcgccgacaccaagauccucuucaucgaggagggcaagaucguccacaucuccccccucuccggcuccgcccagcacgucgaggagugcuccugcuacccccgcuaccccggcguccgcugcaucugccgcgacaacuggaagggcuccaaccgccccgucgucgacaucaacgucaaggacuacuccaucgacuccuccuacgucugcuccggccucgucggcgacaccccccgcaacaacgaccgcuccuccaacuccuacugccgcaaccccaacaacgagaagggcaaccacggcgucaagggcugggccuucgacgacggcaacgacgucuggaugggccgcaccaucuccgaggacucccgcuccggcuacgagaccuucaaggucaucggcggcugguccacccccaacuccaagcuccagaucaaccgccaggucaucgucgacuccgacaaccgcuccggcuacuccggcaucuucuccgucgagggcaaguccugcaucaaccgcugcuucuacgucgagcucauccgcggccgcgagcaggagacccgcgucugguggaccuccaacuccaucgucgucuucugcggcaccuccggcaccuacggcgccggcuccuggcccgacggcgccgacaucaaccucaugcccaucuga

SEQ ID NO: 118022 - RNA, 1410 nt, Artificial Sequence
  derived and/or modified CDS sequence (opt2) from neuraminidase__InfluenzaA__AFG98976
augaaccccaaccagaagaucaucaccaucggcuccgucucccucaccaucgccaccaucugcuuccucaugcagaucgccauccucgucaccaccgucacccuccacuucaagcaguacgagugcgacucccccgccaacaaccaggucaugcccugcgagcccaucaucaucgagcgcaacaucaccgagaucgucuaccucgccaacaccaccaucgagaaggagaucugccccaagcucgucgaguaccgcaacugguccaagccccagugcaagaucaccggcuucgcccccuucuccaaggacaacuccauccgccucuccgccggcggcgacaucugggucacccgcgagcccuacgucuccugcgaccccggcaagugcuaccaguucgcccucggccagggcaccacccucgacaacaagcacuccaacgacaccauccacgaccgcaccccccaccgcacccuccucaugaacgagcucggcguccccuuccaccucggcacccgccaggucugcaucgccugguccuccuccuccugccacgacggcaaggccuggcuccacgucugcgucaccggcuacgacaagaacgccaccgccuccuucaucuacgacggccgccucgucgacuccaucggcuccugguccaagaacauccuccgcacccaggaguccgagugcgucugcaucaacggcaccugcaccgucgucaugaccgacggcuccgccuccggccgcgccgacaccaagauccucuucaucgaggagggcaagaucguccacaucuccccccucuccggcuccgcccagcacgucgaggagugcuccugcuacccccgcuaccccggcguccgcugcaucugccgcgacaacuggaagggcuccaaccgccccgucgucgacaucaacgucaaggacuacuccaucgacuccuccuacgucugcuccggccucgucggcgacaccccccgcaacaacgaccgcuccuccuccuccuacugccgcaaccccaacaacgagaagggcaaccacggcgucaagggcugggccuucgacgacggcaacgacgucuggaugggccgcaccaucuccgaggacucccgcuccggcuacgagaccuucaaggucaucggcggcugguccacccccaacuccaagcuccagaucaaccgccaggucaucgucgacuccgacaaccgcuccggcuacuccggcgucuucuccgucgagggcaaguccugcaucaaccgcugcuucuacgucgagcucauccgcggccgcgagcucgagacccgcgucugguggaccuccaacuccaucgucgucuucugcggcaccuccggcaccuacggcaccggcuccuggcccgacggcgccgacaucaaccucaugcccaucuga

SEQ ID NO: 118023 - RNA, 1410 nt, Artificial Sequence; identical to SEQ ID NO: 118022
  derived and/or modified CDS sequence (opt2) from neuraminidase__InfluenzaA__AFG98987

SEQ ID NO: 118024 - RNA, 1410 nt, Artificial Sequence
  derived and/or modified CDS sequence (opt2) from neuraminidase__InfluenzaA__AFG98998
augaaccccaaccagaagaucaucaccaucggcuccgucucccucaccaucgccaccaucugcuuccucaugcagaucgccauccucgucaccaccgucacccuccacuucaagcaguacgagugcgacucccccgccaacaaccaggucaugcccugcgagcccaucaucaucgagcgcaacaucaccgagaucgucuaccucaccaacaccaccaucgagaaggagaucugccccaagcucgucgaguaccgcaacugguccaagccccagugcaagaucaccggcuucgcccccuucuccaaggacaacuccauccgccucuccgccggcggcgacaucugggucacccgcgagcccuacgucuccugcgaccccggcaagugcuaccaguucgcccucggccagggcaccacccucgagaacaagcacuccaacgacaccauccacgaccgcaccccccaccgcacccuccucaugaacgagcucggcguccccuuccaccucggcacccgccaggucugcaucgccugguccuccuccuccugccacgacggcaaggccuggcuccacgucugcgucaccggcuacgacaagaacgccaccgccuccuucaucuacgacggccgccucgucgacuccaucggcuccuggucccagaacauccuccgcacccaggaguccgagugcgucugcaucaacggcaccugcaccgucgucaugaccgacggcuccgccuccggccgcgccgacaccaagauccucuucaucgaggagggcaagaucguccacaucuccccccucuccggcuccgcccagcacgucgaggagugcuccugcuacccccgcuaccccggcguccgcugcaucugccgcgacaacuggaagggcuccaaccgccccgucgucgacaucaacgucaaggacuacuccaucgacuccuccuacgucugcuccggccucgucggcgacaccccccgcaagaacgaccgcuccuccuccuccuacugccgcaaccccaacaacgagaagggcaaccacggcgucaagggcugggccuucgacgacggcaacgacgucuggaugggccgcaccaucuccgaggacucccgcuccggcuacgagaccuucaaggucaucggcggcugguccacccccaacuccaagcuccagaucaaccgccaggucaucgucgacuccgccaaccgcuccggcuacuccggcaucuucuccgucgagggcaaguccugcaucaaccgcugcuucuacgucgagcucauccgcggccgcgagcaggagacccgcgucugguggaccuccaacuccaucgucgucuucugcggcaccuccggcaccuacggcaccggcuccuggcccgacggcgccgacaucaaccucaugcccaucuga

SEQ ID NO: 118025 - RNA, 1410 nt, Artificial Sequence; identical to SEQ ID NO: 118022
  derived and/or modified CDS sequence (opt2) from neuraminidase__InfluenzaA__AFG99009

SEQ ID NO: 118026 - RNA, 1410 nt, Artificial Sequence
  derived and/or modified CDS sequence (opt2) from neuraminidase__InfluenzaA__AFG99020
augaaccccaaccagaagaucaucaccaucggcuccgucucccucaccaucgccaccaucugcuuccucaugcagaucgccauccucgucaccaccgucacccuccacuucaagcaguacgagugcgacucccccgccaacaaccaggucaugcccugcgagcccaucaucaucgagcgcaacaucaccgagaucgucuaccucaccaacaccaccaucgagaaggagaucugccccaagcucgucgaguaccgcaacugguccaagccccagugcaagaucaccggcuucgcccccuucuccaaggacaacuccauccgccucuccgccggcggcgacaucugggucacccgcgagcccuacgucuccugcgaccccggcaagugcuaccaguucgcccucggccagggcaccacccucgacaacaagcacuccaacgacaccauccacgaccgcaccccccaccgcacccuccucaugaacgagcucggcguccccuuccaccucggcacccgccaggucugcaucgccugguccuccuccuccugccacgacggcaaggccuggcuccacgucugcgucaccggcuacgacaagaacgccaccgccuccuucaucuacgacggccgccucgucgacuccaucggcuccuggucccagaacauccuccgcacccaggaguccgagugcgucugcaucaacggcaccugcaccgucgucaugaccgacggcuccgccuccggccgcgccgacaccaagauccucuucaucgaggagggcaagaucguccacaccuccccccucuccggcuccgcccagcacgucgaggagugcuccugcuacccccgcuaccccggcguccgcugcaucugccgcgacaacuggaagggcuccaaccgccccgucgucgacaucaacgucaaggacuacuccaucgacuccuccuacgucugcuccggccucgucggcgacaccccccgcaacaacgaccgcuccuccuccuccuacugccgcaaccccaacaacgagaagggcacccacggcgucaagggcugggccuucgacgacggcaacgacgucuggaugggccgcaccaucuccgaggacucccgcuccggcuacgagaccuucaaggucaucggcggcugguccacccccaacuccaagcuccagaucaaccgccaggucaucgucgacuccgacaaccgcuccggcuacuccggcaucuucuccgucgagggcaaguccugcaucaaccgcugcuucuacgucgagcucauccgcggccgcgagcaggagacccgcgucugguggaccuccaacuccaucgucgucuucugcggcaccuccggcaccuacggcaccggcuccuggcccgacggcgccgacaucaacaucaugcccaucuga

SEQ ID NO: 118027 - RNA, 1410 nt, Artificial Sequence
  derived and/or modified CDS sequence (opt2) from neuraminidase__InfluenzaA__AFG99031
augaaccccaaccagaagaucaucaccaucggcuccgucucccucaccaucgccaccaucugcuuccucaugcagaucgccauccucgucaccaccgucacccuccacuucaagcaguacgagugcgacucccccgccaacaaccaggucaugcccugcgagcccaucaucaucgagcgcaacaucaccgagaucgucuaccucaccaacaccaccaucgagaaggagaucugccccaagcucgucgaguaccgcaacugguccaagccccagugcaagaucaccggcuucgcccccuucuccaaggacaacuccauccgccucuccgccggcggcgacaucugggucacccgcgagcccuacgucuccugcgaccccggcaagugcuaccaguucgcccucggccagggcaccacccucgacaacaagcacuccaacgacaccauccacgaccgcaccccccaccgcacccuccucaugaacgagcucggcguccccuuccaccucggcacccgccaggucugcaucgccugguccuccuccuccugccacgacggcaaggccuggcuccacgucugcgucaccggcuacgacaagaacgccaccgccuccuucaucuacgacggccgccucgucgacuccaucggcuccuggucccagaacauccuccgcacccaggaguccgagugcgucugcaucaacggcaccugcaccgucgucaugaccgacggcuccgccuccggccgcgccgacaccaagauccucuucaucgaggagggcaagaucguccacaccuccccccucuccggcuccgcccagcacgucgaggagugcuccugcuacccccgcuaccccggcguccgcugcaucugccgcgacaacuggcgcggcuccaaccgccccgucgucgacaucaacgucaaggacuacuccaucgacuccuccuacgucugcuccggccucgucggcgacaccccccgcaacaacgaccgcuccuccuccuccuacugccgcaaccccaacaacgagaagggcacccacggcgucaagggcugggccuucgacgacggcaacgacgucuggaugggccgcaccaucuccgaggacucccgcuccggcuacgagaccuucaaggucaucggcggcugguccacccccaacuccaagcuccagaucaaccgccaggucaucgucgacuccgacaaccgcuccggcuacuccggcaucuucuccgucgagggcaaguccugcaucaaccgcugcuucuacgucgagcucguccgcggccgcgagcaggagacccgcgucugguggaccuccaacuccaucgucgucuucugcggcaccuccggcaccuacggcaccggcuccuggcccgacggcgccgacaucaaccucaugcccaucuga

SEQ ID NO: 118028 - RNA, 1410 nt, Artificial Sequence; identical to SEQ ID NO: 110612
  derived and/or modified CDS sequence (opt2) from neuraminidase__InfluenzaA__AFG99042

SEQ ID NO: 118029 - RNA, 1410 nt, Artificial Sequence
  derived and/or modified CDS sequence (opt2) from neuraminidase__InfluenzaA__AFG99053
augaaccccaaccagaagaucaucaccaucggcuccgucucccucaccaucgccaccaucugcuuccucaugcagaucgccauccucgucaccaccgucacccuccacuucaagcaguacgagugcgacucccccgccaacaaccaggucaugcccugcgagcccaucaucaucgagcgcaacaucaccgagaucgucuaccucaccaacaccaccaucgagaaggagaucugccccaagcucgucgaguaccgcaacugguccaagccccagugcaagaucaccggcuucgcccccuucuccaaggacaacuccauccgccucuccgccggcggcgacaucugggucacccgcgagcccuacgucuccugcgaccccggcaagugcuaccaguucgcccucggccagggcaccacccucgacaacaagcacuccaacgacaccauccacgaccgcaccccccaccgcacccuccucaugaacgagcucggcguccccuuccaccucggcacccgccaggucugcaucgccugguccuccuccuccugccacgacggcaaggccuggcuccacgucugcgucaccggcuacgacaagaacgccaccgccuccuucaucuacgacggccgccucgucgacuccaucggcuccuggucccagaacauccuccgcacccaggaguccgagugcgucugcaucaacggcaccugcaccgucgucaugaccgacggcuccgccuccggccgcgccgacaccaagauccucuucaucgaggagggcaagaucguccacaccuccucccucuccggcuccgcccagcacgucgaggagugcuccugcuacccccgcuaccccggcguccgcugcaucugccgcgacaacuggaagggcuccaaccgccccgucgucgacaucaacgucaaggacuacuccaucgacuccuccuacgucugcuccggccucgucggcgacaccccccgcaacaacgaccgcuccuccuccuccuacugccgcaaccccaacaacgagaagggcacccacggcgucaagggcugggccuucgacgacggcaacgacgucuggaugggccgcaccaucuccgaggacucccgcuccggcuacgagaccuucaaggucaucggcggcugguccauccccaacuccaagcuccagaucaaccgccaggucaucgucgacuccgacaaccgcuccggcuacuccggcaucuucuccgucgagggcaaguccugcaucaaccgcugcuucuacgucgagcucauccgcggccgcgagcaggagacccgcgucugguggaccuccaacuccaucgucgucuucugcggcaccuccggcaccuacggcaccggcuccuggcccgacggcgccgacaucaaccucaugcccaucuga

SEQ ID NO: 118030 - RNA, 1410 nt, Artificial Sequence
  derived and/or modified CDS sequence (opt2) from neuraminidase__InfluenzaA__AFG99064
augaaccccaaccagaagaucaucaccaucggcuccgucucccucaccaucgccaccgucugcuuccucaugcagaucgccauccucgucaccaccgucacccuccacuucaagcaguacgagugcgacuccccccccaacaaccaggucaugcccugcgagcccaucaucaucgagcgcaacgucaccgagaucgucuaccucaccaacaccaccaucgagaaggagaucugccccaagcucgucgaguaccgcaacugguccaagccccagugcaagaucaccggcuucgcccccuucuccaaggacaacuccauccgccucuccgccggcggcgacaucugggucacccgcgagcccuacgucuccugcgaccccuccaagugcuaccaguucgcccucggccagggcaccacccucgacaacaagcacuccaacgacaccauccacgaccgcaccccccaccgcacccuccucaugaacgagcucggcguccccuuccaccucggcacccgccaggucugcaucgccugguccuccuccuccugccacgacggcaaggccuggcuccacgucugcaucaccggcuacgacaagaacgccaccgccuccuucaucuacgacggccgccucgucgacuccaucggcuccugguccaagaacauccuccgcacccaggaguccgagugcgucugcaucaacggcaccugcaccgucgucaugaccgacggcuccgccuccgagcgcgccgacaccaagauccucuucaucgaggagggcaagaucguccacaucuccccccucuccggcuccgcccagcacgucgaggagugcuccugcuacccccgcuaccccggcguccgcugcaucugccgcgacaacuggaagggcuccaaccgccccgucgucgacaucaacgucaaggacuacuccaucgucuccuccuacgucugcuccggccucgucggcgacaccccccgcaagaacgaccgcuccuccuccuccuacugccgcaaccccaacaacgagaagggcaaccacggcgucaagggcugggccuucgacgacggcaacgacgucuggaugggccgcaccaucuccgaggagucccgcuccggcuacgagaccuucaaggucaucggcggcugguccacccccaacuccaagcuccagaucaaccgccaggucaucgucgacuccgacaaccgcuccggcuacuccggcaucuucuccgucgagggcaaguccugcaucaaccgcugcuucuacgucgagcucauccgcggccgcgagcaggagacccgcgucugguggaccuccaacuccaucgucgucuucugcggcaccuccggcaccuacggcaccggcuccuggcccgacggcgccgacaucaaccucaugcccaucuga

SEQ ID NO: 118031 - RNA, 1410 nt, Artificial Sequence
  derived and/or modified CDS sequence (opt2) from neuraminidase__InfluenzaA__AFG99086
augaaccccaaccagaagaucaucaccaucggcuccgucucccucaccaucgccaccaucugcuuccucaugcagaucgccauccucgucaccaccgucacccuccacuucaagcaguacgagugcgacucccccgccaacaaccaggucaugcccugcgagcccaucaucaucgagcgcaacgucaccgagaucgucuaccucaccaacaccaccaucgagaaggagaucugccccaagcucgucgaguaccgcaacugguccaagccccagugcaagaucaccggcuucgcccccuucuccaaggacaacuccauccgccucuccgccggcggcgacaucugggucacccgcgagcccuacgucuccugcgaccccggcaagugcuaccaguucgcccucggccagggcaccacccucgacaacaagcacuccaacgacaccauccacgaccgcacccccuaccgcacccuccucaugaacgagcucggcguccccuuccaccucggcacccgccaggucugcaucgccugguccuccuccuccugccacgacggcaaggccuggcuccacgucugcgucaccggcuacgacaagaacgccaccgccuccuucaucuacgacggccgccucgucgacuccaucggcuccugguccaagaacauccuccgcacccaggaguccgagugcgucugcaucaacggcaccugcaccgucgucaugaccgacggcuccgccuccgagcgcgccgacaccaagauccucuucaucgaggagggcaagaucguccacaucuccccccucuccggcuccgcccagcacgucgaggagugcuccugcuacccccgcuaccccggcguccgcugcaucugccgcgacaacuggaagggcuccaaccgccccgucgucgacaucaacgucaaggacuacuccaucgucuccuccuacgucugcuccggccucgucggcgacaccccccgcaagaacgaccgcuccuccuccuccuacugccgcaaccccaacaacgagaagggcaaccacggcgucaagggcugggccuucgacgacggcaacgacgucuggaugggccgcaccaucuccgaggagucccgcuccggcuacgagaccuucaaggucaucggcggcugguccacccccaacuccaagcuccagaucaaccgccaggucaucgucgacuccgacaaccgcuccggcuacuccggcaucuucuccgucgagggcaaguccugcaucaaccgcugcuucuacgucgagcucauccgcggccgcgagcaggagacccgcgucugguggaccuccaacuccaucgucgucuucugcggcaccuccggcaccuacggcaccggcuccuggcccgacggcgccgacaucaaccucaugcccaucuga

SEQ ID NO: 118032 - RNA, 1410 nt, Artificial Sequence
  derived and/or modified CDS sequence (opt2) from neuraminidase__InfluenzaA__AFG99097
augaaccccaaccagaagaucaucaccaucggcuccgucucccucaccaucgccaccaucugcuuccucaugcagaucgccauccucgucaccaccgucacccuccacuucaagcaguacgagugcgacucccccgccaacaaccaggucaugcccugcgagcccaucaucaucgagcgcaacgucaccgagaucgucuaccucaccaacaccaccaucgagaaggagaucugccccaagcucgucgaguaccgcaacugguccaagccccagugcaagaucaccggcuucgcccccuucuccaaggacaacuccauccgccucuccgccggcggcgacaucugggucacccgcgagcccuacgucuccugcgaccccggcaagugcuaccaguucgcccucggccagggcaccacccucgacaacaagcacuccaacgacaccauccacgaccgcacccccuaccgcacccuccucaugaacgagcucggcguccccuuccaccucggcacccgccaggucugcaucgccugguccuccuccuccugccacgacggcaaggccuggcuccacgucugcgucaccggcuacgacaagaacgccaccgccuccuucaucuacgacggccgccucgucgacuccaucggcuccugguccaagaacauccuccgcacccaggaguccgagugcgucugcaucaacggcaccugcaccgucgucaugaccgacggcuccgccuccgagcgcgccgacaccaagauccucuucaucgaggagggcaagaucguccacaucuccccccucuccggcuccgcccagcacgucgaggagugcuccugcuacccccgcuaccccggcguccgcugcaucugccgcgacaacuggaagggcuccaaccgccccgucgucgacaucaacgucaaggacuacuccaucgucuccuccuacgucugcuccggccucgucggcgacaccccccgcaagaacgaccgcuccuccuccuccuacugccgcaaccccaacaacgagaagggcaaccacggcgucaagggcugggccuucgacgacggcaacgacgucuggaugggccgcaccaucuccgaggagucccgccucggcuacgagaccuucaaggucaucggcggcugguccacccccaacuccaagcuccagaucaaccgccaggucaucgucgacuccgacaaccgcuccggcuacuccggcaucuucuccgucgagggcaaguccugcaucaaccgcugcuucuacgucgagcucauccgcggccgcgagcaggagacccgcgucugguggaccuccaacuccaucgucgucuucugcggcaccuccggcaccuacggcaccggcuccuggcccgacggcgccgacaucaaccucaugcccaucuga

SEQ ID NO: 118033 - RNA, 1410 nt, Artificial Sequence
  derived and/or modified CDS sequence (opt2) from neuraminidase__InfluenzaA__AFG99119
augaaccccaaccagaagaucaucaccaucggcuccgucucccucaccaucgccaccaucugcuuccucaugcagaucgccauccucgucaccaccgucacccuccacuucaagcaguacgagugcuccuccccccccaacaaccaggucaugcccugcgagcccaucaucaucgagcgcaacaucaccgagaucgucuaccucaccaacaccaccaucgagaaggagaucugccccaagcucgucgaguaccgcaacugguccaagccccagugcaagaucaccggcuucgcccccuucuccaaggacaacuccauccgccucuccgccggcggcgacaucugggucacccgcgagcccuacgucuccugcgaccccggcaagugcuaccaguucgcccucggccagggcaccacccucgacaacaagcacuccaacgacaccauccacgaccgcacccccuaccgcacccuccucaugaacgagcucggcguccccuuccaccucggcacccgccaggucugcaucgccugguccuccuccuccugccacgacggcaaggccuggcuccacgucugcgucaccggccacgacaagaacgccaccgccuccuucaucuacgacggccgccucgucgacuccaucggcuccugguccaagaacauccuccgcacccaggaguccgagugcgucugcaucaacggcaccugcaccgucgucaugaccgacggcuccgccuccgagcgcgccgacaccaagauccucuucaucgaggagggcaagaucguccacaucuccccccucuccggcuccgcccagcacgucgaggagugcuccugcuacccccgcuaccccggcguccgcugcgucugccgcgacaacuggaagggcuccaaccgccccaucgucgacaucaacgucaaggacuacuccaucgucuccuccuacgucugcuccggccucgucggcgacaccccccgcaagaacgaccgcuccuccuccuccuacugccgcaaccccaacaacgagaagggcaaccacggcgucaagggcugggccuucgacgacggcaacgacgucuggaugggccgcaccaucuccgaggagucccgcuccggcuacgagaccuucaaggucaucggcggcugguccacccccaacuccaagcuccagaucaaccgccaggucaucgucgacuccgacaaccgcuccggcuacuccggcaucuucuccgucgagggcaaguccugcaucaaccgcugcuucuacgucgagcucauccgcggccgcgagcaggagacccgcgucugguggaccuccaacuccaucgucgucuucugcggcaccuccggcaccuacggcaccggcuccuggcccgacggcgccgacaucaaccucaugcccaucuga

SEQ ID NO: 118034 - RNA, 1410 nt, Artificial Sequence
  derived and/or modified CDS sequence (opt2) from neuraminidase__InfluenzaA__AFG99130
augaaccccaaccagaagaucaucaccaucggcuccgucucccucaccaucgccaccaucugcuuccucaugcagaucgccauccucgucaccaccgucacccuccacuucaagcaguacgagugcuccuccccccccaacaaccaggucaugcccugcggccccaucaucaucgagcgcaacaucaccgagaucgucuaccucaccaacaccaccaucgagaaggagaucugccccaagcucgucgaguaccgcaacugguccaagccccagugcaagaucaccggcuucgcccccuucuccaaggacaacuccauccgccucuccgccggcggcgacaucugggucacccgcgagcccuacgucuccugcgaccccggcaagugcuaccaguucgcccucggccagggcaccacccucgacaacaagcacuccaacgacaccauccacgaccgcacccccuaccgcacccuccucaugaacgagcucggcguccccuuccaccucggcacccgccaggucugcaucgccugguccuccuccuccugccacgacggcaaggccuggcuccacgucugcgucaccggccacgacaagaacgccaccgccuccuucaucuacgacggccgccucgucgacuccaucggcuccugguccaagaacauccuccgcacccaggaguccgagugcgucugcaucaacggcaccugcaccgucgucaugaccgacggcuccgccuccgagcgcgccgacaccaagauccucuucaucgaggagggcaagaucguccacaucuccccccucuccggcuccgcccagcacgucgaggagugcuccugcuacccccgcuaccccggcguccgcugcgucugccgcgacaacuggaagggcuccaaccgccccgucgucgacaucaacgucaaggacuacuccaucgucuccuccuacgucugcuccggccucgucggcgacaccccccgcaagaacgaccgcuccuccuccuccuacugccgcaaccccaacaacgagaagggcaaccacggcgucaagggcugggccuucgacgacggcaacgacgucuggaugggccgcaccaucuccgaggagucccgcuccggcuacgagaccuucaaggucaucggcggcugguccacccccaacuccaagcuccagaccaaccgccaggucaucgucgacuccgacaaccgcuccggcuacuccggcaucuucuccgucgagggcaaguccugcaucaaccgcugcuucuacgucgagcucauccgcggccgcgagcaggagacccgcgucugguggaccuccaacuccaucgucgucuucugcggcaccuccggcaccuacggcaccggcuccuggcccgacggcgccgacaucaaccucaugcccaucuga

SEQ ID NO: 118035 - RNA, 1410 nt, Artificial Sequence
  derived and/or modified CDS sequence (opt2) from neuraminidase__InfluenzaA__AFG99141
augaaccccaaccagaagaucaucaccaucggcuccgucucccucaccaucgccaccaucugcuuccucaugcagaucgccauccucgucaccaccgucacccuccacuucaagcaguacgagugcuccuccccccccaacaaccaggucaugcccugcgagcccaucaucaucgagcgcaacaucaccgagaucgucuaccucaccaacaccaccaucgagaaggagaucugccccaagcucgucgaguaccgcaacugguccaagccccagugcaagaucaccggcuucgcccccuucuccaaggacaacuccauccgccucuccgccggcggcgacaucugggucacccgcgagcccuacgucuccugcgaccccggcaagugcuaccaguucgcccucggccagggcaccacccucgacaacaagcacuccaacgacaccauccacgaccgcacccccuaccgcacccuccucaugaacgagcucggcguccccuuccaccucggcacccgccaggucugcaucgccugguccuccuccuccugccacgacggcaaggccuggcuccacgucugcgucaccggccacgacaagaacgccaccgccuccuucaucuacgacggccgccucgucgacuccaucggcuccugguccaagaacauccuccgcacccaggaguccgagugcgucugcaucaacggcaccugcaccgucgucaugaccgacggcuccgccuccgagcgcgccgagaccaagauccucuucaucgaggagggcaagaucguccacaucuccccccucuccggcuccgcccagcacgucgaggagugcuccugcuacccccgcuaccccggcguccgcugcgucugccgcgacaacuggaagggcuccaaccgccccgucgucgacaucaacgucaaggacuacuccaucgucuccuccuacgucugcuccggccucgucggcgacaccccccgcaagaacgaccgcuccuccuccuccuacugccgcaaccccaacaacgagaagggcaaccacggcgucaagggcugggccuucgacgacggcaacgacgucuggaugggccgcaccaucuccgaggagucccgcuccggcuacgagaccuucaaggucaucggcggcugguccacccccaacuccaagcuccagaucaaccgccaggucaucgucgacuccgacaaccgcuccggcuacuccggcaucuucuccgucgagggcaaguccugcaucaaccgcugcuucuacgucgagcucauccgcggccgcgagcaggagacccgcgucugguggaccuccaacuccaucgucgucuucugcggcaccuccggcaccuacggcaccggcuccuggcccgacggcgccgacaucaaccucaugcccaucuga

SEQ ID NO: 118036 - RNA, 1410 nt, Artificial Sequence
  derived and/or modified CDS sequence (opt2) from neuraminidase__InfluenzaA__AFG99152
augaaccccaaccagaagaucaugaccaucggcuccgucucccucaccaucgccaccaucugcuuccucaugcagaucgccauccucgucaccaccgucacccuccacuucaagcacuacgaguucuccuccccccccaacaaccaggucaugcccugcgagcccaucaucaucgagcgcaacaucaccgagaucgucuaccucaccaacaccaccaucgagaaggaggucugccccaagcucgucgaguaccgcaacugguccaagccccagugcaagaucaccggcuucgcccccuucuccaaggacaacuccauccgccucuccgccggcggcgacaucugggucacccgcgagcccuacgucuccugcgaccccggcaagugcuaccaguucgcccucggccagggcaccacccucaacaacaagcacuccaacgacaccauccacgaccgcacccccuaccgcacccuccucaugaacgagcucggcguccccuuccaccucggcacccgccaggucugcaucgccugguccuccuccuccugccacgacggcaaggccuggcuccacgucugcgucaccggccacgacaagaacgccaccgccuccuucaucuacgacggccgccucgucgacuccaucggcuccugguccaagaacauccuccgcacccaggaguccgagugcgucugcaucaacggcaccugcaccgucgucaugaccgacggcuccgccuccggccgcgccgacaccaagauccucuucaucgaggagggcaagaucguccacaucuccccccucuccggcuccgcccagcacgucgaggagugcuccugcuacccccgcuaccccggcguccgcugcgucugccgcgacaacuggaagggcuccaaccgccccaucgucgacaucaacgucaaggacuacuccaucgucuccuccuacgucugcuccggccucgucggcgacaccccccgcaagaacgaccgcuccuccuccuccuacugccgcaaccccaacaacgagaagggcaaccacggcgucaagggcugggccuucgacgacggcaacgacgucuggaugggccgcaccaucggcgaggagcuccgcuccggcuacgagaccuucaaggucaucggcggcugguccacccccaacuccaagcuccagaucaaccgccaggucaucgucgacuccgacaaccgcuccggcuacuccggcaucuucuccgucgagggcaaguccugcaucaaccgcugcuucuacgucgagcucauccgcggccgcgagcaggagacccgcguccucuggaccuccaacuccaucgucgucuucugcggcaccuccggcaccuacggcaccggcuccuggcccgacggcgccgacaucaaccucaugcccaucuga

SEQ ID NO: 118037 - RNA, 1410 nt, Artificial Sequence; identical to SEQ ID NO: 115031
  derived and/or modified CDS sequence (opt2) from neuraminidase__InfluenzaA__AFG99163

SEQ ID NO: 118038 - RNA, 1410 nt, Artificial Sequence
  derived and/or modified CDS sequence (opt2) from neuraminidase__InfluenzaA__AFG99174
augaaccccucccagaagaucaucaccaucggcuccgucucccucaccaucgccaccaucugcuuccucaugcagaucgccauccucgucaccaccgucacccuccacuucaagcaguacgagugcuccuccccccccaacaaccaggucaugcccugcgagcccaucaucaucgagcgcaacaucaccgagaucgucuaccucaccaacaccaccaucgagaaggagaucugccccaagcucauggaguaccgcaacugguccaagccccagugcaagaucaccggcuucgcccccuucuccaaggacaacuccauccgccucuccgccggcggcgacaucugggucacccgcgagcccuacgucuccugcgaccccggcaagugcuaccaguucgcccucggccagggcaccacccucgacaacaagcacuccaacgacaccauccacgaccgcacccccuaccgcacccuccucaugaacgagcucggcguccccuuccaccucggcacccgccaggucugcaucgccugguccuccuccuccugccacgacggcaaggccuggcuccacgucugcgucaccggccacgacaagaacgccaccgccuccuucaucuacgacggccgccucgucgacuccaucggcuccugguccaagaacauccuccgcacccaggaguccgagugcgucugcaucaacggcaccugcaccgucgucaugaccgacggcuccgccuccgagcgcgccgagaccaagauccucuucaucgaggagggcaagaucguccacaucuccccccucuccggcuccgcccagcacgucgaggagugcuccugcuacccccgcuaccccggcguccgcugcgucugccgcgacaacuggaagggcuccaaccgccccgucgucgacaucaacgucaaggacuacuccaucgucuccuccuacgucugcuccggccucgucggcgacaccccccgcaagaacgaccgcuccuccuccuccuacugccgcaaccccaacaacgagaagggcaaccacggcgucaagggcugggccuucgacgacggcaacgacgucuggaugggccgcaccaucuccgaggagucccgcuccggcuacgagaccuucaaggucaucggcggcugguccacccccaacuccaagcuccagaucaaccgccaggucaucgucgacuccgacaaccgcuccggcuacuccggcaucuucuccgucgagggcaaguccugcaucaaccgcugcuucuacgucgagcucauccgcggccgcgagcaggagacccgcgucugguggaccuccaacuccaucgucgucuucugcggcaccuccggcaccuacggcaccggcuccuggcccgacggcgccgacaucaaccucaugcccaucuga

SEQ ID NO: 118039 - RNA, 1410 nt, Artificial Sequence
  derived and/or modified CDS sequence (opt2) from neuraminidase__InfluenzaA__AFG99185
augaaccccaaccagaagaucaucaccaucggcuccgucucccucaccaucgccaccaucugcuuccucaugcagaucgccauccucgucaccaccgucacccuccacuucaagcaguacgagugcuccuccccccccaacaaccaggucaugcccugcgagcccaucaucaucgagcgcaacaucaccgagaucgucuaccucaccaacaccaccaucgagaaggagaucugccccaagcucgucgaguaccgcaacugguccaagccccagugcaagaucaccggcuucgcccccuucuccaaggacaacuccauccgccucuccgccggcggcgacaucugggucacccgcgagcccuacgucuccugcgaccccggcaagugcuaccaguucgcccucggccagggcaccacccucaacaacaagcacuccaacgacaccauccacgaccgcacccccuaccgcacccuccucaugaacgagcucggcguccccuuccaccucggcaccaagcaggucugcaucgccugguccuccuccuccugccacgacggcaaggccuggcuccacgucugcgucaccggccacgacaagaacgccaccgccuccuucaucuacgacggccgccucgucgacuccaucggcuccugguccaagaacauccuccgcacccaggaguccgagugcgucugcaucaacggcaccugcaccgucgucaugaccgacggcuccgccuccgagcgcgccgacaccaagauccucuucaucgaggagggcaagaucguccacaucuccccccucuccggcuccgcccagcacgucgaggagugcuccugcuacccccgcuaccccggcguccgcugcgucugccgcgacaacuggaagggcuccaaccgccccaucgucgacaucaacgucaaggacuacuccaucgucuccuccuacgucugcuccggccucgucggcgacaccccccgcaagaacgaccgcuccuccuccuccuacugccgcaaccccaacaacgagaagggcaaccacggcgucaagggcugggccuucgacgacggcaacgacgucuggaugggccgcaccaucggcgaggagcuccgcuccggcuacgagaccuucaaggucaucggcggcugguccacccccaacuccaagcuccagaucaaccgccaggucaucgucgacuccaagaaccgcuccggcuacuccggcaucuucuccgucgagggcaaguccugcaucaaccgcugcuucuacgucgagcucauccgcggccgcgagcaggagacccgcgucugguggaccuccaacuccaucgucgucuucugcggcaccuccggcaccuacggcaccggcuccuggcccgacggcgccgacaucaaccucaugcccaucuga

SEQ ID NO: 118040 - RNA, 1410 nt, Artificial Sequence
  derived and/or modified CDS sequence (opt2) from neuraminidase__InfluenzaA__AFG99196
augaaccccaaccagaagaucaucaccaucggcuccgucucccucaccaucgccaccaucugcuuccucacccagaucgccauccucgucaccaccgucacccuccacuucaagcaguacgagugcuccuccucccccaacaaccaggucaugcccugcgagcccaucaucaucgagcgcaacaucaccgagaucgucuaccucaccaacaccaccaucgagaaggagaucugccccaagcucgucgaguaccgcaacugguccaagccccagugcaagaucaccggcuucgcccccuucuccaaggacaacuccauccgccucuccgccggcggcgacaucugggucacccgcgagcccuacgucuccugcgaccccggcaagugcuaccaguucgcccucggccagggcaccacccucaacaacaagcacuccaacgacaccauccacgaccgcacccccuaccgcacccuccucaugaacgagcucggcguccccuuccaccucggcaccaagcaggucugcaucgccugguccuccuccuccugccacgacggcaaggccuggcuccacgucugcaucaccggccacgacaagaacgccaccgccuccuucaucuacgacggccgccucgucgacuccaucggcuccugguccaagaacauccuccgcacccaggaguccgagugcgucugcaucaacggcaccugcaccgucgucaugaccgacggcuccgccuccgagcgcgccgacaccaagauccucuucaucgaggagggcaagaucguccacaucuccccccucuccggcuccgcccagcacgucgaggagugcuccugcuacccccgcuaccccggcguccgcugcgucugccgcgacaacuggaagggcuccaaccgccccaucgucgacaucaacgucaaggacuacuccaucgucuccuccuacgucugcuccggccucgucggcgacaccccccgcaagaacgaccgcuccuccuccuccuacugccgcaaccccaacaacgagaagggcaaccacggcgucaagggcugggccuucgacgacggcaacgacgucuggaugggccgcaccaucggcgaggagcuccgcuccggcuacgagaccuucaaggucaucggcggcugguccacccccaacuccaagcuccagaucaaccgccaggucaucgucgacuccggcaaccgcuccggcuacuccggcaucuucuccgucgagggcaaguccugcaucaaccgcugcuucuacgucgagcucauccgcggccgcgagcaggagacccgcgucugguggaccuccaacuccaucgucgucuucugcggcaccuccggcaccuacggcaccggcuccuggcccgacggcgccgacaucaaccucaugcccaucuga

SEQ ID NO: 118041 - RNA, 1410 nt, Artificial Sequence
  derived and/or modified CDS sequence (opt2) from neuraminidase__InfluenzaA__AFG99207
augaaccccaaccagaagaucaucaccaucggcuccgucucccucaccaucgccaccaucugcuuccucaugcagaucgccauccucgucaccaccgucacccuccacuucaagcccuacgagugcuccuccccccccaacaaccaggucaugcccugcgagcccaucaucaucgagcgcaacaucaccgagaucgucuaccucaccaacaccaccaucgagaaggagaucugccccaagcucgucgaguaccgcaacugguccaagccccagugcaagaucaccggcuucgcccccuucuccaaggacaacuccauccgccucuccgccggcggcgacaucugggucacccgcgagcccuacgucuccugcgaccccggcaagugcuaccaguucgcccucggccagggcaccacccucaacaacaagcacuccaacgacaccauccacgaccgcacccccuaccgcacccuccucaugaacgagcucggcguccccuuccaccucggcaccaagcaggucugcaucgccugguccuccuccuccugccacgacggcaaggccuggcuccacgucugcgucaccggccacgacaagaacgccaccgccuccuucaucuacgacggccgccucgucgacuccaucggcuccugguccaagaacauccuccgcacccaggaguccgagugcgucugcaucaacggcaccugcaccgucgucaugaccgacggcuccgccuccgagcgcgccgacaccaagauccucuucaucgaggagggcaagaucguccacaucuccccccucuccggcuccgcccagcacgucgaggagugcuccugcuacccccgcuaccccggcguccgcugcgucugccgcgacaacuggaagggcuccaaccgccccaucgucgacaucaacgucaaggacuacuccaucgucuccuccuacgucugcuccggccucgucggcgacaccccccgcaagaacgaccgcuccuccuccuccuacugccgcaaccccaacaacgagaagggcaaccacggcgucaagggcugggccuucgacgacggcaacgacgucuggaugggccgcaccaucggcgaggagcuccgcuccggcuacgagaccuucaaggucaucggcggcugguccacccccaacuccaagcuccagaucaaccgccaggucaucgucgacuccaagucccgcuccggcuacuccggcaucuucuccgucgagggcaaguccugcaucaaccgcugcuucuacgucgagcucauccgcggccgcgagcaggagacccgcgucugguggaccuccaacuccaucgucgucuucugcggcaccuccggcaccuacggcaccggcuccuggcccgacggcgccgacaucaaccucaugcccaucuga

SEQ ID NO: 118042 - RNA, 1410 nt, Artificial Sequence; identical to SEQ ID NO: 110850
  derived and/or modified CDS sequence (opt2) from neuraminidase__InfluenzaA__AFG99218

SEQ ID NO: 118043 - RNA, 1410 nt, Artificial Sequence
  derived and/or modified CDS sequence (opt2) from neuraminidase__InfluenzaA__AFG99229
augaaccccaaccagaagaucaucaccaucggcuccgucucccucaccaucgccaccaucugcuuccucaugcagaucgccauccucgucaccaccgucacccuccacuucaagcaguacgagugcuccuccccccccaacaaccaggucaugcccugcgagcccaucaucaucgagcgcaacaucaccaagaucgucuaccucaccaacaccaccaucgagaaggagaucugccccaagcucgucgaguaccgcaacugguccaagccccagugcaagaucaccggcuucgcccccuucuccaaggacaacuccauccgccucuccgccggcggcgacaucugggucacccgcgagcccuacgucuccugcgaccccggcaagugcuaccaguucgcccucggccagggcaccacccucaacaacaagcacuccaacgacaccauccacgaccgcacccccuaccgcacccuccucaugaacgagcucggcguccccuuccaccucggcaccaagcaggucugcaucgccugguccuccuccuccugccacgacggcaaggccuggcuccacgucugcgucaccggccacgacaagaacgccaccgccuccuucaucuacgacggccgccucgucgacuccaucggcuccugguccaagaacauccuccgcacccaggaguccgagugcgucugcaucaacggcaccugcaccgucgucaugaccgacggcuccgccuccgagcgcgccgacaccaagauccucuucaucgaggagggcaagaucguccacaucuccccccucuccggcuccgcccagcacgucgaggagugcuccugcuacccccgcuaccccggcguccgcugcgucugccgcgacaacuggaagggcuccaaccgccccaucgucgacaucaacgucaaggacuacuccaucgucuccuccuacgucugcuccggccucgucggcgacaccccccgcaagaacgaccgcuccuccuccuccuacugccgcaaccccaacaacgagaagggcaaccacggcgucaagggcugggccuucgacgacggcaacgacgucuggaugggccgcaccaucggcgaggagcuccgcuccggcuacgagaccuucaaggucaucggcggcugguccacccccaacuccaagcuccagaucaaccgccaggucaucgucgacuccaagaaccgcuccggcuacuccggcaucuucuccgucgagggcaaguccugcaucaaccgcugcuucuacgucgagcucauccgcggccgcgagcaggagacccgcgucugguggaccuccaacuccaucgucgucuucugcggcaccuccggcaccuacggcaccggcuccuggcccgacggcgccgacaucaaccucaugcccaucuga

SEQ ID NO: 118044 - RNA, 1410 nt, Artificial Sequence
  derived and/or modified CDS sequence (opt2) from neuraminidase__InfluenzaA__AFG99240
augaaccccaaccagaagaucaucaccaucggcuccgucucccucaccaucgccaccaucugcuuccucaugcagaucgccauccucgucaccaccgucacccuccacuucaagcaguacgagugcuccuccccccccuccaaccaggucaugcccugcgagcccaucaucaucgagcgcaacaucaccgagaucgucuaccucaccaacaccaccaucgagaaggagaucugccccaagcccgucgaguaccgcaacugguccaagccccagugcaagaucaccggcuucgcccccuucuccaaggacaacuccauccgccucuccgccggcggcgacaucugggucacccgcgagcccuacgucuccugcgaccccggcaagugcuaccaguucgcccucggccagggcaccacccucaacaacaagcacuccaacgacaccauccacgaccgcacccccuaccgcacccuccucaugaacgagcucggcguccccuuccaccucggcaccaagcaggucugcaucgccugguccuccuccuccugccacgacggcaaggccuggcuccacgucugcgucaccggccacgacaagaacgccaccgccuccuucaucuacgacggccgccucgucgacuccaucggcuccugguccaagaacauccuccgcacccaggaguccgagugcgucugcaucaacggcaccugcaccgucgucaugaccgacggcuccgccuccgagcgcgccgacaccaagauccucuucaucgaggagggcaagaucguccacaucuccccccucuccggcuccgcccagcacgucgaggagugcuccugcuacccccgcuaccccggcguccgcugcgucugccgcgacaacuggaagggcuccaaccgccccaucgucgacaucaacgucaaggacuacuccaucgucuccuccuacgucugcuccggccucgucggcgacaccccccgcaagaacgaccgcuucuccuccuccuacugccgcaaccccaacaacgagaagggcaaccacggcgucaagggcugggccuucgacgacggcaacgacgucuggaugggccgcaccaucggcgaggagcuccgcuccggcuacgagaccuucaaggucaucggcggcugguccacccccaacuccaagcuccagaucaaccgccaggucaucgucgacuccaagaaccgcuccggcuacuccggcaucuucuccgucgagggcaaguccugcaucaaccgcugcuucuacgucgagcucauccgcggccgcgagcaggagacccgcgucugguggaccuccaacuccaucgucgucuucugcggcaccuccggcaccuacggcaccggcuccuggcccgacggcgccgacaucaaccucaugcccaucuga

SEQ ID NO: 118045 - RNA, 1410 nt, Artificial Sequence; identical to SEQ ID NO: 110849
  derived and/or modified CDS sequence (opt2) from neuraminidase__InfluenzaA__AFG99251

SEQ ID NO: 118046 - RNA, 1410 nt, Artificial Sequence
  derived and/or modified CDS sequence (opt2) from neuraminidase__InfluenzaA__AFG99273
augaaccccaaccagaagaucaucaccaucggcuccgucucccucaccaucgccaccaugugcuuccucaugcagaucgccauccucgucaccaccgucacccuccacuucaagcaguacgagugcuccuccccccccaacaaccaggucaugcccugcgagcccaccaucaucgagcgcaacaucaccgagaucgucuaccucaccaacaccaccaucgagaaggagaucugccccaagcucgucgaguaccgcaacugguccaagccccagugcaagaucaccggcuucgcccccuucuccaaggacaacuccauccgccucuccgccggcggcgacaucugggucacccgcgagcccuacgucuccugcgaccccggcaagugcuaccaguucgcccucggccagggcaccacccucaacaaccgccacuccaacgacaccguccacgaccgcacccccuaccgcacccuccucaugaacgagcucggcguccccuuccaccucggcaccaagcaggucugcaucgccugguccuccuccuccugccacgacggcaaggccuggcuccacgucugcgucaccggccacgacaagaacgccaccgccuccuucaucuacgacggccgccucgucgacuccaucggcuccugguccaagaacauccuccgcacccaggaguccgagugcgucugcaucaacggcaccugcaccgucgucaugaccgacggcuccgccuccgagcgcgccgacaccaagauccucuucaucgaggagggcaagaucguccacaucuccccccucuccggcuccgcccagcacgucgaggagugcuccugcuacccccgcuaccccggcguccgcugcgucugccgcgacaacuggaagggcuccaaccgccccaucgucgacaucaacgucaaggacuacuccaucgucuccuccuacgucugcuccggccucgucggcgacaccccccgcaagaacgaccgcuccuccuccuccuacugccgcaaccccaacaacgagaagggcucccacggcgucaagggcugggccuucgacgacggcaacgacgucuggaugggccgcaccaucggcgaggagcuccgcuccggcuacgagaccuucaaggucaucggcggcugguccacccccaacuccaagcuccagaucaaccgccaggucaucgucgacuccggcaaccgcuccggcuacuccggcaucuucuccgucgagggcaaguccugcaucaaccgcugcuucuacgucgagcucauccgcggccgcgagcaggagacccgcgucugguggaccuccaacuccaucgucgucuucugcggcaccuccggcaccuacggcaccggcuccuggcccgacggcgccgacaucaaccucaugcccaucuga

SEQ ID NO: 118047 - RNA, 1410 nt, Artificial Sequence
  derived and/or modified CDS sequence (opt2) from neuraminidase__InfluenzaA__AFG99284
augaaccccaaccagaagaucaucaccaucggcuccgucucccucaccaucgccaccaucugcuuccucaugcagaucgccauccucgucaccaccgucacccuccacuucaagcaguacgagugcuccuccccccccuccaaccaggucaugcccugcgagcccaucaucaucgagcgcaacaucaccaagaucgucuaccucaccaacaccaccaucgagaaggagaucugccccaagcucgucgaguaccgcaacugguccaagccccagugcaagaucaccggcuucgcccccuucuccaaggacaacuccauccgccucuccgccggcggcgacaucugggucacccgcgagcccuacgucuccugcgaccccuccaagugcuaccaguucgcccucggccagggcaccacccucaacaacaagcacuccaacgacaccauccacgaccgcacccccuaccgcacccuccucaugaacgagcucggcguccccuuccaccucggcaccaagcaggucugcaucgccugguccuccuccuccugccacgacggcaaggccuggcuccacgucugcgucaccggccacgacgacaacgccaccgccuccuucaucuacgacggccgccucgucgacuccaucggcuccugguccaagaacauccuccgcacccaggaguccgagugcgucugcaucaacggcaccugcaccgucgucaugaccgacggcuccgccuccgagcgcgccgacaccaagauccucuucaucgaggagggcaagaucguccacaucuccccccucuccggcuccgcccagcacgucgaggagugcuccugcuacccccgcuaccccggcguccgcugcgucugccgcgacaacuggaagggcuccaaccgccccaucgucgacaucaacgucaaggacuacuccaucgucuccuccuacgucugcuccggccucgucggcgacaccccccgcaagaacgaccgcuccuccuccuccuacugccgcaaccccaacaacgagaagggcucccacggcgucaagggcugggccuucgacgacggcaacgacgucuggaugggccgcaccaucggcgaggagcuccgcuccggcuacgagaccuucaaggucaucggcggcugguccacccccaacuccaagcuccagaucaaccgccaggucaucgucgacuccaagaaccgcuccggcuacuccggcaucuucuccgucgagggcaaguccugcaucaaccgcugcuucuacgucgagcucauccgcggccgcgagcaggagacccgcgucugguggaccuccaacuccaucgucgucuucugcggcaccuccggcaccuacggcaccggcuccuggcccgacggcgccgacaucaaccucaugcccaucuga

SEQ ID NO: 118048 - RNA, 1410 nt, Artificial Sequence
  derived and/or modified CDS sequence (opt2) from neuraminidase__InfluenzaA__AFG99295
augaaccccaaccagaagaucaucaccaucggcuccgucucccucaccaucgccaccaucugcuuccucaugcagaucgccauccucgucaccaccgucacccuccacuucaagcaguacgagugcuccuccccccccaacaaccaggucaugcccugcgagcccaccaucaucgagcgcaacaucaccgagaucgucuaccucaccaacaccaccaucgagaaggagaucugccccaagcucgucgaguaccgcaacugguccaagccccagugcaagaucaccggcuucgcccccuucuccaaggacaacuccauccgccucuccgccggcggcgacaucugggucacccgcgagcccuacgucuccugcgaccccgacaagugcuaccaguucgcccucggccagggcaccacccucaacaaccgccacuccaacgacaccguccacgaccgcacccccuaccgcacccuccucaugaacgagcucggcguccccuuccaccucggcaccaagcaggucugcaucgccugguccuccuccuccugccacgacggcaaggccuggcuccacgucugcgucaccggccacgacaagaacgccaccgccuccuucaucuacaacggccgccucgucgacuccaucggcuccugguccaagaacauccuccgcacccaggaguccgagugcgucugcaucaacggcaccugcaccgucgucaugaccgacggcuccgccuccgagcgcgccgacaccaagauccucuucaucgaggagggcaagaucguccacaucuccccccucuccggcuccgcccagcacgucgaggagugcuccugcuacccccgcuaccccggcguccgcugcgucugccgcgacaacuggaagggcuccaaccgccccaucgucgacaucaacgucaaggacuacuccaucaucuccuccuacgucugcuccggccucgucggcgacaccccccgcaagaacgaccgcuccuccuccuccuacugccagaaccccaacaacgagaagggcucccacggcgucaagggcugggccuucgacgacggcaacgacgucuggaugggccgcaccaucggcgaggagcuccgcuccggcuacgagaccuucaaggucaucggcggcugguccacccccaacuccaagcuccagaucaaccgccaggucaucgucgacuccggcaaccgcuccggcuacuccggcaucuucuccgucgagggcaaguccugcaucaaccgcugcuucuacgucgagcucauccgcggccgcaagcaggagacccgcgucugguggaccuccaacuccaucgucgucuucugcggcaccuccggcaccuacggcaccggcuccuggcccgacggcgccgacaucaaccucaugcccaucuga

SEQ ID NO: 118049 - RNA, 1410 nt, Artificial Sequence
  derived and/or modified CDS sequence (opt2) from neuraminidase__InfluenzaA__AFG99317
augaaccccaaccagaagaucaucaccaucggcuccgucucccucaccaucgccaccaucugcuuccucaugcagaucgccauccucgucaccaccgucacccuccacuucaagcaguacgagugcuccuccccccccaacaaccaggucaugcccugcgagcccaccaucaucgagcgcaacaucaccgagaucgucuaccucaccaacaccaccaucgagaaggagaucugccccaagcucgucgaguaccgcaacugguccaagccccagugcaacaucaccggcuucgcccccuucuccaaggacaacuccauccgccucuccgccggcggcgacaucugggucacccgcgagcccuacgucuccugcgaccccggcaagugcuaccaguucgcccucggccagggcaccacccucaacaaccgccacuccaacgacaccguccacgaccgcacccccuaccgcacccuccucaugaacgagcucggcguccccuuccaccucggcaccaagcaggucugcaucgccugguccuccuccuccugccacgacggcaaggccuggcuccacgucugcgucaccggccacgacgagaacgccaccgccuccuucaucuacgacggccgccucgucgacuccaucggcuccugguccaagaacauccuccgcacccaggaguccgagugcgucugcaucaacggcaccugcaccgucgucaugaccgacggcuccgccuccgagcgcgccgacaccaagauccucuucaucgaggagggcaagaucguccacaucuccccccucuccggcuccgcccagcacgucgaggagugcuccugcuacccccgcuaccccggcguccgcugcgucugccgcgacaacuggaagggcuccaaccgccccaucgucgacaucaacgucaaggacuacuccaucgucuccuccuacgucugcuccggccucgucggcgacaccccccgcaagaacgaccgcuccuccuccuccuacugccgcaaccccaacaacgagaagggcucccacggcgucaagggcugggccuucgacgacggcaacgacgucuggaugggccgcaccaucgacgaggagcuccgcuccggcuacgagaccuucaaggucaucggcggcugguccacccccaacuccaagcuccagaucaaccgccaggucaucgucgacuccggcaaccgcuccggcuacuccggcaucuucuccgucgagggcaaguccugcaucaaccgcugcuucuacgucgagcucauccgcggccgcaagcaggagacccgcgucugguggaccuccaacuccaucgucgucuucugcggcaccuccggcaccuacggcaccggcuccuggcccgacggcgccgacaucaaccucaugcccaucuga

SEQ ID NO: 118050 - RNA, 1410 nt, Artificial Sequence
  derived and/or modified CDS sequence (opt2) from neuraminidase__InfluenzaA__AFG99328
augaaccccaaccagaagaucaucaccaucggcuccgucucccucacccucgccaccaucugcuuccucaugcagaucgccauccucgucaccaccgucacccuccacuucaagcaguacgagugcuccuccccccccaacaaccaggucaugcccugcgagcccaccaucaucgagcgcaacaucaccgagaucgucuaccucaccaacaccaccaucgagaaggagaucugccccaagcucgucgaguaccgcaacugguccaagccccagugcaagaucaccggcuucgcccccuucuccaaggacaacuccauccgccucuccgccggcggcgacaucugggucacccgcgagcccuacgucuccugcgaccccuccaagugcuaccaguucgcccucggccagggcaccacccucaacaaccgccacuccaacgacaccguccacgaccgcacccccuaccgcacccuccucaugaacgagcucggcguccccuuccaccucggcacccgccaggucugcauggccugguccuccuccuccugccacgacggcaaggccuggcuccacgucugcgucaccggccacgacgagaacgccaccgccuccuucaucuacgacggccgccucgucgacuccaucggcuccugguccaagaacguccuccgcacccaggaguccgagugcgucugcaucaacggcaccugcaccgucgucaugaccgacggcuccgccuccgagcgcgccgacaccaagauccucuucaucgaggagggcaagaucguccacaucuccccccucuccggcaacgcccagcacgucgaggagugcuccugcuacccccgcuaccccggcguccgcugcgucugccgcgacaacuggaagggcuccaaccgccccaucgucgacaucaacgucaaggacuacuccaucgucuccuccuacgucugcuccggccucgucggcgacaccccccgcaagaacgaccgcuccuccuccuccuacugccgcaaccccaacaacgagaagggcucccacggcgucaagggcugggccuucgacgacggcaacgacgucuggaugggccgcaccaucggcgaggagcuccgcuccggcuacgagaccuucaaggucaucggcggcugguccacccccaacuccaagcuccagaucaaccgccaggucaucgucgacuccggcaaccgcuccggcuacuccggcaucuucuccgucgagggcaaguccugcaucaaccgcugcuucuacgucgagcucauccgcggccgcaagcaggagacccgcgucugguggaccuccaacuccaucgucgucuucugcggcaccuccggcaccuacggcaccggcuccuggcccgacggcgccgacaucaaccucaugcccaucuga

SEQ ID NO: 118051 - RNA, 1410 nt, Artificial Sequence
  derived and/or modified CDS sequence (opt2) from neuraminidase__InfluenzaA__AFG99350
augaaccccaaccagaagaucaucaccaucggcuccgucucccucacccucgccaccaucugcuuccucaugcagaucgccauccucgucaccaccgucacccuccacuucaagcaguacgagugcuccuccccccccaacaaccaggucaugcccugcgagcccaccaucaucgagcgcaacaucaccgagaucgucuaccucaccaacaccaccaucgagaaggagaucugccccaagcucgucgaguaccgcaacugguccaagccccagugcaagaucaccggcuucgcccccuucuccaaggacaacuccauccgccucuccgccggcggcgacaucugggucacccgcgagcccuacgucuccugcgaccccuccaagugcuaccaguucgcccucggccagggcaccacccucaacaaccgccacuccaacgacaccguccacgaccgcacccccuaccgcacccuccucaugaacgagcucggcguccccuuccaccucggcacccgccaggucugcauggccugguccuccuccuccugccacgacggcaaggccuggcuccacgucugcgucaccggccacgacgagaacgccaccgccuccuucaucuacgacggccgccucgucgacuccaucggcuccugguccaagaacauccuccgcacccaggaguccgagugcgucugcaucaacggcaccugcaccgucgucaugaccgacggcuccgccuccgagcgcgccgacaccaagauccucuucaucgaggagggcaagaucguccacaucuccccccucuccggcuccgcccagcacgucgaggagugcuccugcuacccccgcuaccccggcguccgcugcgucugccgcgacaacuggaagggcuccaaccgccccaucgucgacaucaacgucaaggacuacuccaucgucuccuccuacgucugcuccggccucgucggcgacaccccccgcaagaacgaccgcuccuccuccuccuacugccgcaaccccaacaacgagaagggcucccacggcgucaagggcugggccuucgacgacggcaacgacgucuggaugggccgcaccaucggcgaggagcuccgcuccggcuacgagaccuucaaggucaucggcggcugguccacccccaacuccaagcuccagaucaaccgccaggucaucgucgacuccggcaaccgcuccggcuacuccggcaucuucuccgucgagggcaaguccugcaucaaccgcugcuucuacgucgagcucauccgcggccgcaagcaggagacccgcgucugguggaccuccaacuccaucgucgucuucugcggcaccuccggcaccuacggcaccggcuccuggcccgacggcgccgacaucaaccucaugcccaucuga

SEQ ID NO: 118052 - RNA, 1410 nt, Artificial Sequence
  derived and/or modified CDS sequence (opt2) from neuraminidase__InfluenzaA__AFG99361
augaaccccaaccagaagaucaucaccaucggcuccgucucccucaccaucgccaccaucugcuuccucaugcagaucgccauccucgucaccaccgucacccuccacuucaagcaguacgagugcaacuccccccccaacaaccaggucaugcucugcgagcccaccaucaucgagcgcaacaucaccgagaucgucuaccucaccaacaccaccaucgagaaggagaagugccccaagcucgccgaguaccgcaacugguccaagccccagugcaagaucaccggcuucgcccccuucuccaaggacaacuccauccgccucuccgccggcggcgacaucugggucacccgcgagcccuacgucuccugcgaccccggcaagugcuaccaguucgcccucggccagggcaccacccucaacaaccgccacuccaacgacaccguccacgaccgcacccccuaccgcacccuccucaugaacgagcucggcguccccuuccaccucggcaccaagcaggucugcaucgccugguccuccuccuccugccacgacggcaaggccuggcuccacgucugcgucaccggccacgacgagaacgccaccgccuccuucaucuacgacggccgccucgucgacuccaucggcuccugguccaagaacauccuccgcacccaggaguccgagugcgucugcaucaacggcaccugcaccgucgucaugaccgacggcuccgccuccgagcgcgccgacaccaagauccucuucaucgaggagggcaagaucguccacaucuccccccucuccggcuccgcccagcacgucgaggagugcuccugcuacccccgcuaccccggcguccgcugcgucugccgcgacaacuggaagggcuccaaccgccccaucgucgacaucaacgucaaggacuacuccaucgucuccuccuacgucugcuccggccucgucggcgacaccccccgcaagaacgacuccuccuccuccuccuacugccgcaaccccaacaacgagaagggcucccacggcgucaagggcugggccuucgacgacggcaacgacgucuggaugggccgcaccaucuccgaggagcuccgcuccggcuacgagaccuucaaggucaucggcggcugguccaagcccaacuccaagcuccagaucaaccgccaggucaucgucgaccgcggcaaccgcuccggcuacuccggcaucuucuccgucgagggcaaguccugcaucaaccgcugcuucuacgucgagcucauccgcggccgcaagcaggagaccgaggucugguggaccuccaacuccaucgucgucuucugcggcaccuccggcaccuacggcaccggcuccuggcccgacggcgccgacaucaaccucaugcccaucuga

SEQ ID NO: 118053 - RNA, 1410 nt, Artificial Sequence
  derived and/or modified CDS sequence (opt2) from neuraminidase__InfluenzaA__AFG99383
augaaccccaaccagaagaucaucaccaucggcuccgucucccucaccaucgccaccaucugcuuccucaugcagaucgccauccucgucaccaccgucacccuccacuucaagcaguacgagugcuccuccccccccaacaaccaggucaugcccugcgagcccaccaucaucgagcgcaacaucaccgagaucgucuaccucaccaacaccaccaucgagaaggagaucugccccaagcucgucgaguaccgcaacugguccaagccccagugcaagaucaccggcuucgcccccuucuccaaggacaacuccauccgccucuccgccggcggcgacaucugggucacccgcgagcccuacgucuccugcgaccccggcaagugcuaccaguucgcccucggccagggcaccacccucaacaaccgccacuccaacgacaccguccacgaccgcacccccuaccgcacccuccucaugaacgagcucggcguccccuuccaccucggcaccaagcaggucugcaucgccugguccuccuccuccugccacgacggcaaggccuggcuccacgucugcgucaccggccacgacgagaacgccaccgccuccuucaucuacgacggccgccucgucgacuccaucggcuccugguccaagaacauccuccgcacccaggaguccgagugcgucugcaucaacggcaccugcaccgucgucaugaccgacggcuccgccuccgagcgcgccgacaccaagauccucuucaucgaggagggcaagaucguccacaucuccccccucuccggcuccgcccagcacgucgaggagugcuccugcuacccccgcuaccccggcguccgcugcgucugccgcgacaacuggaagggcuccaaccgccccaucgucgacaucaacgucaaggacuacuccaucgucuccuccuacgucugcuccggccucgucggcgacaccccccgcaagaacgacuccuccuccuccuccuacugccgcaaccccaacaacgagaagggcucccacggcgucaagggcugggccuucgacgacggcaacgacgucuggaugggccgcaccaucggcgaggagcuccgcuccggcuacgagaccuucaaggucaucggcggcugguccacccccaacuccaagcuccagaucaaccgccaggucaucgucgacuccggcaaccgcuccggcuacuccggcaucuucuccgucgagggcaaguccugcaucaaccgcugcuucuacgucgagcucauccgcggccgcaagcaggagaccaaggucugguggaccuccaacuccaucgucgucuucugcggcaccuccggcaccuacggcaccggcuccuggcccgacggcgccgacaucaaccucaugcccaucuga

SEQ ID NO: 118054 - RNA, 1410 nt, Artificial Sequence; identical to SEQ ID NO: 118053
  derived and/or modified CDS sequence (opt2) from neuraminidase__InfluenzaA__AFG99394

SEQ ID NO: 118055 - RNA, 1410 nt, Artificial Sequence
  derived and/or modified CDS sequence (opt2) from neuraminidase__InfluenzaA__AFG99405
augaaccccaaccagaagaucaucaccaucggcuccgucucccucaccaucgccaccaucugcuuccucaugcagaucgccauccucgucaccaccgucacccuccacuucaagcaguacgagugcuccuccccccccaacaaccaggucaugcccugcgagcccaccaucaucgagcgcaacaucaccgagaucgucuaccucaccaacaccaccaucgagaaggagaucugccccaagcucgucgaguaccgcaacugguccaagccccagugcaagaucaccggcuucgcccccuucuccaaggacaacuccauccgccucuccgccggcggcgacaucugggucacccgcgagcccuacgucuccugcgaccccggcaagugcuaccaguucgcccucggccagggcaccacccucaacaaccgccacuccaacgacaccguccacgaccgcacccccuaccgcacccuccucaugaacgagcucggcguccccuuccaccucggcaccaagcaggucugcaucgccugguccuccuccuccugccacgacggcaaggccuggcuccacgucugcgucaccggccacgacaagaacgccaccgccuccuucaucuacgacggccgccucgucgacuccaucggcuccugguccaagaacauccuccgcacccaggaguccgagugcgucugcaucaacggcaccugcaccgucgucaugaccgacggcuccgccuccgagcgcgccgacaccaagauccucuucaucgaggagggcaagaucguccacaucuccccccucuccggcuccgcccagcacgucgaggagugcuccugcuacccccgcuaccccggcguccgcugcgucugccgcgacaacuggaagggcuccaaccgccccaucgucgacaucaacgucaaggacuacuccaucaucuccuccuacgucugcuccggccucgucggcgacaccccccgcaagaacgaccgcuccuccuccuccuacugccgcaaccccaacaacgagaagggcucccacggcgucaagggcugggccuucgacgacggcaacgacgucuggaugggccgcaccaucggcgaggagcuccgcuccggcuacgagaccuucaaggucaucggcggcugguccacccccaacuccaagcuccagaucaaccgccaggucaucgucgacuccggcaaccgcuccggcuacuccggcaucuucuccgucgagggcaaguccugcaucaaccgcugcuucuacgucgagcucauccgcggccgcgagcaggagacccgcgucugguggaccuccaacuccaucgucgucuucugcggcaccuccggcaccuacggcaccggcuccuggcccgacggcgccgacaucaaccucaugcccaucuga

SEQ ID NO: 118056 - RNA, 1410 nt, Artificial Sequence
  derived and/or modified CDS sequence (opt2) from neuraminidase__InfluenzaA__AFG99416
augaaccccaaccagaagaucaucaccaucggcuccgucucccucaccaucgccaccaucugcuuccucaugcagaucgccauccucgucaccaccgucacccuccacuucaagcaguacgagugcuccuccccccccaacaaccaggucaugcccugcgagcccaccaucaucgagcgcaacaucaccgagaucgucuaccucaccaacaccaccaucgagaaggagaucugccccaagcucgucgaguaccgcaacugguccaagccccagugcaagaucaccggcuucgcccccuucuccaaggacaacuccauccgccucuccgccggcggcgacaucugggucacccgcgagcccuacgucuccugcgaccccggcaagugcuaccaguucgcccucggccagggcaccacccucaacaaccgccacuccaacgacaccguccacgaccgcacccccuaccgcacccuccucaugaacgagcucggcguccccuuccaccucggcaccaagcaggucugcaucgccugguccuccuccuccugccacgacggcaaggccuggcuccacgucugcgucaccggccacgacgagaacgccaccgccuccuucaucuacgacggccgccucgucgacuccaucggcuccugguccaagaacauccuccgcacccaggaguccgagugcgucugcaucaacggcaccugcaccgucgucaugaccgacggcuccgccuccgagcgcgccgacaccaagauccucuucaucgaggagggcaagaucauccacaucuccccccucuccggcuccgcccagcacgucgaggagugcuccugcuacccccgcuaccccggcguccgcugcgucugccgcgacaacuggaagggcuccaaccgccccaucgucgacaucaacgucaaggacuacuccaucgucuccuccuacgucugcuccggccucgucggcgacaccccccgcaagaacgacuccuccuccuccuccuacugccgcaaccccaacaacgagaagggcucccacggcgucaagggcugggccuucgacgacggcaacgacgucuggaugggccgcaccaucggcgaggagcuccgcuccggcuacgagaccuucaaggucaucggcggcugguccacccccaacuccaagcuccagaucaaccgccaggucaucgucgacggcggcaaccgcuccggcuacuccggcaucuucuccgucgagggcaaguccugcaucaaccgcugcuucuacgucgagcucauccgcggccgcaagcaggagaccaaggucugguggaccuccaacuccaucgucgucuucugcggcaccuccggcaccuacggcaccggcuccuggcccgacggcgccgacaucaaccucaugcccaucuga

SEQ ID NO: 118057 - RNA, 1410 nt, Artificial Sequence
  derived and/or modified CDS sequence (opt2) from neuraminidase__InfluenzaA__AFG99427
augaaccccaaccagaagaucaucaccaucggcuccgucucccucaccaucgccaccaucugcuuccucaugcagaucgccauccucgucaccaccgucacccuccacuucaagcaguacgagugcuccuccccccccaacaaccaggucaugcccugcgagcccaccaucaucgagcgcaacaucaccgagaucgucuaccucaccaacaccaccaucgagaaggaggucugccccaagcucgucgaguaccgcaacugguccaagccccagugcaagaucaccggcuucgcccccuucuccaaggacaacuccauccgccucuccgccggcggcgacaucugggucacccgcgagcccuacgucuccugcgaccccggcaagugcuaccaguucgcccucggccagggcaccacccucaacaaccgccacuccaacgacaccguccacgaccgcacccccuaccgcacccuccucaugaacgagcucggcguccccuuccaccucggcaccaagcaggucugcaucgccugguccuccuccuccugccacgacggcaaggccuggcuccacgucugcgucaccggccacgacgagaacgccaccgccuccuucaucuacgacggccgccucgucgacuccaucggcuccugguccaagaacauccuccgcacccaggaguccgagugcgucugcaucaacggcaccugcaccgucgucaugaccgacggcuccgccuccgagcgcgccgacaccaagauccucuucaucgaggagggcaagaucauccacaucuccccccucuccggcuccgcccagcacgucgaggagugcuccugcuacccccgcuaccccggcguccgcugcgucugccgcgacaacuggaagggcuccaaccgccccaucgucgacaucaacgucaaggacuacuccaucgucuccuccuacgucugcuccggccucgucggcgacaccccccgcaagaacgacuccuccuccuccuccuacugccgcaaccccaacaacgagaagggcucccacggcgucaagggcugggccuucgacgacggcaacgacgucuggaugggccgcaccaucggcgaggagcuccgcuccggcuacgagaccuucaaggucaucggcggcugguccacccccaacuccaagcuccagaucaaccgccaggucaucgucgacuccggcaaccgcuccggcuacuccggcaucuucuccgucgagggcaaguccugcaucaaccgcugcuucuacgucgagcucauccgcggccgcaagcaggagaccaaggucugguggaccuccaacuccaucgucgucuucugcggcaccuccggcaccuacggcaccggcuccuggcccgacggcgccgacaucaaccucaugcccaucuga

SEQ ID NO: 118058 - RNA, 1410 nt, Artificial Sequence
  derived and/or modified CDS sequence (opt2) from neuraminidase__InfluenzaA__AFG99438
augaaccccaaccagaagaucaucaccaucggcuccgucucccucaccaucgccaccaucugcuuccucaugcagaucgccauccucgucaccaccgucacccuccacuuccgccaguacgagugcuccuccccccccaacaaccaggucaugcccugcgagcccaccaucaucgagcgcaacaucaccgagaucgucuaccucaccaacaccaccaucgagaaggagaucugccccaagcucgucgaguaccgcaacugguccaagccccagugcaagaucaccggcuucgcccccuucuccaaggacaacuccauccgccucuccgccggcggcgacaucugggucacccgcgagcccuacgucuccugcgaccccggcaagugcuaccaguucgcccucggccagggcaccacccucaacaaccgccacuccaacgacaccguccacgaccgcacccccuaccgcacccuccucaugaacgagcucggcguccccuuccaccucggcaccaagcaggucugcauggccugguccuccuccuccugccacgacggcaaggccuggcuccacgucugcgucaccggccacgacgagaacgccaccgccuccuucaucuacgacggccgccucgucgacuccaucggcuccugguccaagaacauccuccgcacccaggaguccgagugcgucugcaucaacggcaccugcaccgucgucaugaccgacggcuccgccuccgagcgcgccgacaccaagauccucuucaucgaggagggcaagaucguccacaucuccccccucuccggcuccgcccagcacgucgaggagugcuccugcuacccccgcuaccccggcguccgcugcgucugccgcgacaacuggaagggcuccaaccgccccaucgucgacaucaacgucaaggacuacuccaucgucuccuccuacgucugcuccggccucgucggcgacaccccccgcaagaacgaccgcuccuccuccuccuacugccgcaaccccaacaacgagaagggcucccacggcgucaagggcugggccuucgacgacggcaacgacgucuggaugggccgcaccaucggcgaggagcuccgcuccggcuacgagaccuucaaggucaucggcggcugguccacccccaacuccaagcuccagaucaaccgccaggucaucgucgacuccggcaaccgcuccggcuacuccggcaucuucuccgucgagggcaaguccugcaucaaccgcugcuucuacgucgagcucauccgcggccgcaagcaggagacccgcgucugguggaccuccaacuccaucgucgucuucugcggcaccuccggcaccuacggcaccggcuccuggcccgacggcgccgacaucaaccucaugcccaucuga

SEQ ID NO: 118059 - RNA, 1410 nt, Artificial Sequence
  derived and/or modified CDS sequence (opt2) from neuraminidase__InfluenzaA__AFG99449
augaaccccaaccagaagaucaucaccaucggcuccgucucccucaccaucgccaccaucugcuuccucaugcagaucgccauccucgucaccaccgucacccuccacuuccgccaguacgagugcuccuccccccccaacaaccaggucaugcccugcgagcccaccaucaucgagcgcaacaucaccgagaucgucuaccucaccaacaccaccaucgagaaggagaucugccccaagcucgucgaguaccgcaacugguccaagccccagugcaagaucaccggcuucgcccccuucuccaaggacaacuccauccgccucuccgccggcggcgacaucugggucacccgcgagcccuacgucuccugcgaccccggcaagugcuaccaguucgcccucggccagggcaccacccucaacaaccgccacuccaacgacaccguccacgaccgcacccccuaccgcacccuccucaugaacgagcucggcguccccuuccaccucggcaccaagcaggucugcauggccugguccuccuccuccugccacgacggcaaggccuggcuccacgucugcgucaccggccacgacgagaacgccaccgccuccuucaucuacgacggccgccucgucgacuccaucggcuccugguccaagaacauccuccgcacccaggaguccgagugcgucugcaucaacggcaccugcaccgucgucaugaccgacggcuccgccuccgagcgcgccgacaccaagauccucuucaucgaggagggcaagaucguccacaucuccccccucuccggcuccgcccagcacgucgaggagugcuccugcuacccccgcuaccccggcguccgcugcgucugccgcgacaacuggaagggcuccaaccgccccaucgucgacaucaacgucaaggacuacuccaucgucuccuccuacgucugcuccggccucgucggcgacaccccccgcaagaacgaccgcuccuccuccuccuacugccgcaaccccaacaacgagaagggcucccacggcgucaagggcugggccuucgacgacggcaacgacgucuggaugggccgcaccaucggcgaggagcuccgcuccggcuacgagaccuucaaggucaucggcggcugguccacccccaacuccaagcuccagaucaaccgccaggucaucgucgacuccggcaaccgcuccggcuacuccggcaucuucuccgucgagggcaagaacugcaucaaccgcugcuucuacgucgagcucauccgcggccgcaagcaggagacccgcgucugguggaccuccaacuccaucgucgucuucugcggcaccuccggcaccuacggcaccggcuccuggcccgacggcgccgacaucaaccucaugcccaucuga

SEQ ID NO: 118060 - RNA, 1410 nt, Artificial Sequence
  derived and/or modified CDS sequence (opt2) from neuraminidase__InfluenzaA__AFG99471
augaaccccaaccagaagaucaucaccaucggcuccgucucccucauccucgccaccaucugcuuccucaugcagaucgccauccucgucaccaccgucacccuccacuucaagcaguacgagugcuccuccccccccaacaaccaggucaugcccugcgagcccaccaucaucgagcgcaacaucaccgagaucgucuaccucaccaacaccaccaucgagaaggagaucugccccaagcucgucgaguaccgcaacugguccaagccccagugcaagaucaccggcuucgcccccuucuccaaggacaacuccauccgccucuccgccggcggcgacaucugggucacccgcgagcccuacgucuccugcgaccccggcaagugcuaccaguucgcccucggccagggcaccacccucaacaaccgccacuccaacgacaccguccacgaccgcaaccccuaccgcacccuccucaugaacgagcucggcguccccuuccaccucggcacccgccaggucugcauggccugguccuccuccuccugccacgacggcaaggccuggcuccacgucugcgucaccggccacgacgagaacgccaccgccuccuucaucuacgacggccgccucgucgacuccaucggcuccugguccaagaacauccuccgcacccaggaguccgagugcgucugcaucaacggcaccugcaccgucgucaugaccgacggcuccgccuccgagcgcgccgacaccaagauccucuucaucgaggagggcaagaucguccacaucuccccccucuccggcuccgcccagcacgucgaggagugcuccugcuacccccgcuaccccggcguccgcugcgucugccgcgacaacuggaagggcuccaaccgccccaucgucgacaucaacgucaaggacuacuccaucgucuccuccuacgucugcuccggccucgucggcgacaccccccgcaagaacgaccgcuccuccuccuccuacugccgcaaccccaacaacgagaagggcucccacggcgucaagggcugggccuucgacgacggcaacgacgucuggaugggccgcaccaucggcgaggagcuccgcuccggcuacgagaccuucaaggucaucggcggcugguccacccccaacuccaagcuccagaucaaccgccaggucaucgucgacuccggcaaccgcuccggcuacuccggcaucuucuccgucgagggcaaguccugcaucaaccgcugcuucuacgucgagcucauccgcggccgcaagcaggagacccgcgucugguggaccuccaacuccaucgucgucuucugcggcaccuccggcaccuacggcaccggcuccuggcccgacggcgccgacaucaaccucaugcccaucuga

SEQ ID NO: 118061 - RNA, 1410 nt, Artificial Sequence
  derived and/or modified CDS sequence (opt2) from neuraminidase__InfluenzaA__AFG99482
augaaccccaaccagaagaucaucaccaucggcuccgucucccucaccaucgccaccaucugcuuccucaugcagaucgccauccucgucaccaccgucacccuccacuucaagcaguacgagugcaacuccccccccaacaaccaggucaugcccugcgagcccaccaucaucgagcgcaacaucaccgagaucgucuaccucaccaacaccaccaucgagaaggagaucugccccaagcucgucgaguaccgcaacugguccaagccccagugcaagaucaccggcuucgcccccuucuccaaggacaacuccauccgccucuccgccggcggcgacaucugggucacccgcgagcccuacgucuccugcgaccccggcaagugcuaccaguucgcccucggccagggcaccacccucaacaaccgccacuccaacgacaccguccacgaccgcacccccuaccgcacccuccucaugaacgagcucggcguccccuuccaccucggcaccaagcaggucugcaucgccugguccuccuccuccugccacgacggcaaggccuggcuccacgucugcgucaccggccacgacgagaacgccaccgccuccuucaucuacgacggccgccucgucgacuccaucggcuccugguccaagaacauccuccgcacccaggaguccgagugcgucugcaucaacggcaccugcaccgucgucaugaccgacggcuccgccuccggccgcgccgacaccaagauccucuucaucgaggagggcaagaucguccacaucuccccccucuccggcuccgcccagcacgucgaggagugcuccugcuacccccgcuaccccggcguccgcugcgucugccgcgacaacuggaagggcuccaaccgccccaucgucgacaucaacgucaaggacuacuccaucgucuccuccuacgucugcuccggccucgucggcgacaccccccgcaagaacgacuccuccuccuccuccuacugccgcaaccccaacaacgagaagggcucccacggcgucaagggcugggccuucgacgacggcaacgacgucuggaugggccgcaccaucggcgaggagcuccgcuccggcuacgagaccuucaaggucaucggcggcugguccacccccaacuccaagcuccagaucaaccgccaggucaucgucgaccgcggcaaccgcuccggcuacuccggcaucuucuccgucgagggcaagaacugcaucaaccgcugcuucuacgucgagcucauccgcggccgcaagcaggagaccaaggucugguggaccuccaacuccaucgucgucuucugcggcaccuccggcaccuacggcaccggcuccuggcccgacggcgccgacaucaaccucauguccaucuga

SEQ ID NO: 118062 - RNA, 1410 nt, Artificial Sequence
  derived and/or modified CDS sequence (opt2) from neuraminidase__InfluenzaA__AFG99493
augaaccccaaccagaagaucaucaccaucggcuccgucucccucaccaucgccaccaucugcuuccucaugcagaucgccauccucgucaccaccgucacccuccacuucaagcaguacgagugcaacuccccccccaacaaccaggucaugcccugcgagcccaccaucaucgagcgcaacaucaccgagaucgucuaccucaccaacaccaccaucgagaaggagaucugccccaagcucgucgaguaccgcaacugguccaagccccagugcaagaucaccggcuucgcccccuucuccaaggacaacuccauccgccucuccgccggcggcgacaucugggucacccgcgagcccuacgucuccugcgaccccggcaagugcuaccaguucgcccucggccagggcaccacccucaacaaccgccacuccaacgacaccguccacgaccgcacccccuaccgcacccuccucaugaacgagcucggcguccccuuccaccucggcaccaagcaggucugcaucgccugguccuccuccuccugccacgacggcaaggccuggcuccacgucugcgucaccggccacgacgagaacgccaccgccuccuucaucuacgacggccgccucgucgacuccaucggcuccugguccaagaacauccuccgcacccaggaguccgagugcgucugcaucaacggcaccugcaccgucgucaugaccgacggcuccgccuccggccgcgccgacaccaagauccucuucaucgaggagggcaagaucguccacaucuccccccucuccggcuccgcccagcacgucgaggagugcuccugcuacccccgcuaccccggcguccgcugcgucugccgcgacaacuggaagggcuccaaccgccccaucgucgacaucaacgucaaggacuacuccaucgucuccuccuacgucugcuccggccucgucggcgacaccccccgcaagaacgacuccuccuccuccuccuacugccgcaaccccaacaacgagaagggcucccacggcgucaagggcugggccuucgacgacggcaacgacgucuggaugggccgcaccaucggcgaggagcuccgcuccggcuacgagaccuucaaggucaucggcggcugguccacccccaacuccaagcuccagaucaaccgccaggucaucgucgaccgcggcaaccgcuccggcuacuccggcaucuucuccgucgagggcaaguccugcaucaaccgcugcuucuacgucgagcucauccgcggccgcaagcaggagaccaaggucugguggaccuccaacuccaucgucgucuucugcggcaccuccggcaccuacggcaccggcuccuggcccgacggcgccgacaucaaccucaugcccaucuga

SEQ ID NO: 118063 - RNA, 1410 nt, Artificial Sequence
  derived and/or modified CDS sequence (opt2) from neuraminidase__InfluenzaA__AFG99504
augaaccccaaccagaagaucaucaccaucggcuccgucucccucaccaucgccaccaucugcuuccucaugcagaucgccauccucgucaccaccgucacccuccacuucaagcaguacgagugcuccuccccccccaacaaccaggucaugcccugcgagcccaccaucaucgagcgcaacaucaccgagaucgucuaccucaccaacaccaccaucgagaaggagaucugccccaagcucgucgaguaccgcaacugguccaagccccagugcaagaucaccggcuucgcccccuucuccaaggacaacuccauccgccucuccgccggcggcgacaucugggucacccgcgagcccuacgucuccugcgaccccggcaagugcuaccaguucgcccucggccagggcaccacccucaacaaccgccacuccaacgacaccguccacgaccgcacccccuaccgcacccuccucaugaacgagcucggcguccccuuccaccucggcaccaagcaggucugcaucgccugguccuccuccuccugccacgacggcaaggccuggcuccacgucugcgucaccggccacgacgagaacgccaccgccuccuucaucuacgacggccgccucgucgacuccaucggcuccugguccaagaacauccuccgcacccaggaguccgagugcgucugcaucaacggcaccugcaccgucgucaugaccgacggcuccgccuccgagcgcgccgacaccaagauccucuucaucgaggagggcaagaucguccacaucuccccccucuccggcuccgcccagcacgucgaggagugcuccugcuacccccgcuaccccggcguccgcugcgucugccgcgacaacuggaagggcuccaaccgccccaucgucgacaucaacgucaaggacuacuccaucgucuccuccuacgucugcuccggccucgucggcgacaccccccgcaagaacgaccgcuccuccuccuccuacugccgcaaccccaacaacgagaagggcucccacggcgucaagggcugggccuucgacgacggcaacgacgucuggaugggccgcaccaucggcgaggagcuccgcuccggcuacgagaccuucaaggucaucggcggcugguccacccccaacuccaagcuccagaucaaccgccaggucaucgucgacuccggcaaccgcuccggcuacuccggcaucuucuccgucgagggcaaguccugcaucaaccgcugcuucuacgucgagcucauccgcggccgcaagcaggagacccgcgucugguggaccuccaacuccaucgucgucuucugcggcaccuccggcaccuacggcaccggcuccuggcccgacggcgccgacaucaaccucaugcccaucuga

SEQ ID NO: 118064 - RNA, 1410 nt, Artificial Sequence
  derived and/or modified CDS sequence (opt2) from neuraminidase__InfluenzaA__AFG99515
augaaccccaaccagaagaucaucaccaucggcuccgucucccucaccaucgccaccaucugcuuccucaugcagaucgccauccucgucaccaccgucacccuccacuucaagcaguacgagugcaacuccccccccaacaaccaggucaugcucugcgagcccaccaucaucgagcgcaacaucaccgagaucgucuaccucaccaacaccaccaucgagaaggagaucugccccaagcucgccgaguaccgcaacugguccaagccccagugcaagaucaccggcuucgcccccuucuccaaggacaacuccauccgccucuccgccggcggcgacaucugggucacccgcgagcccuacgucuccugcgaccccggcaagugcuaccaguucgcccucggccagggcaccacccucaacaaccgccacuccaacgacaccguccacgaccgcacccccuaccgcacccuccucaugaacgagcucggcguccccuuccaccucggcaccaagcaggucugcaucgccugguccuccuccuccugccacgacggcaaggccuggcuccacgucugcgucaccggccacgacgagaacgccaccgccuccuucaucuacgacggccgccucgucgacuccaucggcuccugguccaagaacauccuccgcacccaggaguccgagugcgucugcaucaacggcaccugcaccgucgucaugaccgacggcuccgccuccgagcgcgccgacaccaagauccucuucaucgaggagggcaagaucguccacaucuccccccucuccggcuccgcccagcacgucgaggagugcuccugcuacccccgcuaccccggcguccgcugcgucugccgcgacaacuggaagggcuccaaccgccccaucgucgacaucaacgucaaggacuacuccaucgucuccuccuacgucugcuccggccucgucggcgacaccccccgcaagaacgacuccuccuccuccuccuacugccgcaaccccaacaacgagaagggcucccacggcgucaagggcugggccuucgacgacggcaacgacgucuggaugggccgcaccaucggcgaggagcuccgcuccggcuacgagaccuucaaggucaucggcggcugguccacccccaacuccaagcuccagaucaaccgccaggucaucgucgaccgcggcaaccgcuccggcuacuccggcaucuucuccgucgagggcaaguccugcaucaaccgcugcuucuacgucgagcucauccgcggccgcaagcaggagaccgaggucugguggaccuccaacuccaucgucgucuucugcggcaccuccggcaccuacggcaccggcuccuggcccgacggcgccgacaucaaccucaugcccaucuga

SEQ ID NO: 118065 - RNA, 1410 nt, Artificial Sequence
  derived and/or modified CDS sequence (opt2) from neuraminidase__InfluenzaA__AFG99526
augaaccccaaccagaagaucaucaccaucggcuccgucucccucacccucgccaccaucugcuuccucaugcagaucgccauccucgucaccaccgucacccuccacuucaagcaguacgagugcuccuccccccccaacaaccaggucaugcccugcgagcccaccaucaucgagcgcaacaucaccgagaucgucuaccucaccaacaccaccaucgagaaggaggucugccccaagcucgucgaguaccgcaacugguccaagccccagugcaagaucaccggcuucgcccccuucuccaaggacaacuccauccgccucuccgccggcggcgacaucugggucacccgcgagcccuacgucuccugcgaccccggcaagugcuaccaguucgcccucggccagggcaccacccucaacaaccgccacuccaacgacaccguccacgaccgcacccccuaccgcacccuccucaugaacgagcucggcguccccuuccaccucggcacccgccaggucugcauggccugguccuccuccuccugccacgacggcaaggccuggcuccacgucugcgucaccggccacgacgagaacgccaccgccuccuucaucuacgacggccgccucgucgacuccaucggcuccugguccaagaacauccuccgcacccaggaguccgagugcgucugcaucaacggcaccugcaccgucgucaugaccgacggcuccgccuccggccgcgccgacaccaagauccucuucaucgaggagggcaagaucguccacaucuccccccucuccggcuccgcccagcacgucgaggagugcuccugcuacccccgcuaccccggcguccgcugcgucugccgcgacaacuggaagggcuccaaccgccccaucgucgacaucaacgucaaggacuacuccaucgucuccuccuacgucugcuccggccucgucggcgacaccccccgcaagaacgaccgcuccuccuccuccuacugccgcaaccccaacaacgagaagggcucccacggcgucaagggcugggccuucgacgacggcaacgacgucuggaugggccgcaccaucggcgaggagcuccgcuccggcuacgagaccuucaaggucaucggcggcugguccacccccaacuccaagcuccagaucaaccgccaggucaucgucgacuccggcaaccgcuccggcuacuccggcaucuucuccgucgagggcaaguccugcaucaaccgcugcuucuacgucgagcucauccgcggccgcaagcaggagacccgcgucugguggaccuccaacuccaucgucgucuucugcggcaccuccggcaccuacggcaccggcuccuggcccgacggcgccgacaucaaccucaugcccaucuga

SEQ ID NO: 118066 - RNA, 1410 nt, Artificial Sequence; identical to SEQ ID NO: 117962
  derived and/or modified CDS sequence (opt2) from neuraminidase__InfluenzaA__AFG99537

SEQ ID NO: 118067 - RNA, 1410 nt, Artificial Sequence; identical to SEQ ID NO: 117962
  derived and/or modified CDS sequence (opt2) from neuraminidase__InfluenzaA__AFG99548

SEQ ID NO: 118068 - RNA, 1410 nt, Artificial Sequence; identical to SEQ ID NO: 117962
  derived and/or modified CDS sequence (opt2) from neuraminidase__InfluenzaA__AFG99559

SEQ ID NO: 118069 - RNA, 1410 nt, Artificial Sequence; identical to SEQ ID NO: 117962
  derived and/or modified CDS sequence (opt2) from neuraminidase__InfluenzaA__AFG99570

SEQ ID NO: 118070 - RNA, 1410 nt, Artificial Sequence; identical to SEQ ID NO: 117962
  derived and/or modified CDS sequence (opt2) from neuraminidase__InfluenzaA__AFG99581

SEQ ID NO: 118071 - RNA, 1410 nt, Artificial Sequence
  derived and/or modified CDS sequence (opt2) from neuraminidase__InfluenzaA__AFG99592
augaaccccaaccagaagaucaucaccaucggcuccgucucccucaccaucgccaccaccugcuuccucaugcagaucgccauccucgucaccaccgucacccuccacuucaagcaguacgagugcaacuccccccccaacaaccaggucaugcccugcgagcccaccaucaucgagcgcaacaucaccgagaucgucuaccucaccaacaccaccaucgagaaggagaucugccccaagcucgucgaguaccgcaacugguccaagccccagugcaagaucaccggcuucgcccccuucuccaaggacaacuccauccgccucuccgccggcggcgacaucugggucacccgcgagcccuacgucuccugcgaccccggcaagugcuaccaguucgcccucggccagggcaccacccucaacaaccgccacuccaacgacaccguccacgaccgcacccccuaccgcacccuccucaugaacgagcucggcguccccuuccaccucggcaccaagcaggucugcaucgccugguccuccuccuccugccacgacggcaaggccuggcuccacgucugcgucaccggccacgacgagaacgccaccgccuccuucaucuacgacggccgccucgucgacuccaucgucuccugguccaagaacauccuccgcacccaggaguccgagugcgucugcaucaacggcaccugcaccgucgucaugaccgacggcuccgccuccgagcgcgccgacaccaagauccucuucaucgaggagggcaagaucguccacaucuccccccucuccggcuccgcccagcacgucgaggagugcuccugcuacccccgcuaccccggcguccgcugcgucugccgcgacaacuggaagggcuccaaccgccccaucgucgacaucaacgucaaggacuacuccaucgucuccuccuacgucugcuccggccucgucggcgacaccccccgcaagaacgacuccuccuccuccuccuacugccgcaaccccaacaacgagaagggcucccacggcgucaagggcugggccuucgacgacggcaacgacgucuggaugggccgcaccaucggcgaggagcuccgcuccggcuacgagaccuucaaggucaucggcggcugguccacccccaacuccaagcuccagaccaaccgccaggucaucgucgaccgcggcaaccgcuccggcuacuccggcaucuucuccgucgagggcaaguccugcaucaaccgcugcuucuacgucgagcucauccgcggccgcaagcaggagaccaaggucugguggaccuccaacuccaucgucgucuucugcggcaccuccggcaccuacggcaccggcuccuggcccgacggcgccgacaucaaccucaugcccaucuga

SEQ ID NO: 118072 - RNA, 1410 nt, Artificial Sequence; identical to SEQ ID NO: 117962
  derived and/or modified CDS sequence (opt2) from neuraminidase__InfluenzaA__AFG99603

SEQ ID NO: 118073 - RNA, 1410 nt, Artificial Sequence; identical to SEQ ID NO: 117962
  derived and/or modified CDS sequence (opt2) from neuraminidase__InfluenzaA__AFG99614

SEQ ID NO: 118074 - RNA, 1410 nt, Artificial Sequence; identical to SEQ ID NO: 117962
  derived and/or modified CDS sequence (opt2) from neuraminidase__InfluenzaA__AFG99625

SEQ ID NO: 118075 - RNA, 1410 nt, Artificial Sequence
  derived and/or modified CDS sequence (opt2) from neuraminidase__InfluenzaA__AFG99636
augaaccccaaccagaagaucaucaccaucggcuccgucucccucaccaucgccaccaucugcuuccucaugcagaucgccauccucgucaccaccgucacccuccacuucaagcaguacgagugcaacuccccccccaacaaccaggucaugcucugcgagcccaccaucaucgagcgcaacaucaccgagaucgucuaccucaccaacaccaccaucgagaaggagaucugccccaagcucgccgaguaccgcaacugguccaagccccagugcaagaucaccggcuucgcccccuucuccaaggacaacuccauccgccucuccgccggcggcgacaucugggucacccgcgagcccuacgucuccugcgaccccggcaagugcuaccaguucgcccucggccagggcaccacccucaacaaccgccacuccaacgacaccguccacgaccgcacccccuaccgcacccuccucaugaacgagcucggcguccccuuccaccucggcaccaagcaggucugcaucgccugguccuccuccuccugccacgacggcaaggccuggcuccacgucugcgucaccggccacgacgagaacgccaccgccuccuucaucuacgacggccgccucgucgacuccaucgucuccugguccaagaacauccuccgcacccaggaguccgagugcgucugcaucaacggcaccugcaccgucgucaugaccgacggcuccgccuccgagcgcgccgacaccaagauccucuucaucgaggagggcaagaucguccacaucuccccccucuccggcuccgcccagcacgucgaggagugcuccugcuacccccgcuaccccggcguccgcugcgucugccgcgacaacuggaagggcuccaaccgccccaucgucgacaucaacgucaaggacuacuccaucgucuccuccuacgucugcuccggccucgucggcgacaccccccgcaagaacgacuccuccuccuccuccuacugccgcaaccccaacaacgagaagggcucccacggcgucaagggcugggccuucgacgacggcaacgacgucuggaugggccgcaccaucggcgaggaccuccgcuccggcuacgagaccuucaaggucaucggcggcugguccacccccaacuccaagcuccagaccaaccgccaggucaucgucgaccgcggcaaccgcuccggcuacuccggcaucuucuccgucgagggcaaguccugcaucaaccgcugcuucuacgucgagcucauccgcggccgcaagcaggagaccaaggucugguggaccuccaacuccaucgucgucuucugcggcaccuccggcaccuacggcaccggcuccuggcccgacggcgccgacaucaaccucaugcccaucuga

SEQ ID NO: 118076 - RNA, 1410 nt, Artificial Sequence
  derived and/or modified CDS sequence (opt2) from neuraminidase__InfluenzaA__AFG99658
augaaccccaaccagaagaucaucaccaucggcuccgucucccucaccaucgccaccaucugcuuccucaugcagaucaccauccucgucaccaccgucacccuccacuucaagcaguacgagugcaacuccccccccaacaaccaggucaugcucugcgagcccaccaucaucgagcgcaacaucaccgagaucgucuaccucaccaacaccaccaucgagaaggagaucugccccaagcucgucgaguaccgcaacugguccaagccccagugcaagaucaccggcuucgcccccuucuccaaggacaacuccauccgccucuccgccggcggcgacaucugggucacccgcgagcccuacgucuccugcgaccccggcaagugcuaccaguucgcccucggccagggcaccacccucaacaaccgccacuccaacgacaccguccacgaccgcacccccuaccgcacccuccucaugaacgagcucggcguccccuuccaccucggcaccaagcaggucugcaucgccugguccuccuccuccugccacgacggcaaggccuggcuccacgucugcgucaccggccacgacgagaacgccaccgccuccuucaucuacgacggccgccucgucgacuccaucuccuccugguccaagaacauccuccgcacccaggaguccgagugcgucugcaucaacggcaccugcaccgucgucaugaccgacggcuccgccuccgagcgcgccgacaccaagauccucuucaucgaggagggcaagaucguccacaucuccccccucuccggcuccgcccagcacgucgaggagugcuccugcuacccccgcuaccccggcguccgcugcgucugccgcgacaacuggaagggcuccaaccgccccaucgucgacaucaacgucaaggacuacuccaucgucuccuccuacgucugcuccggccucgucggcgacaccccccgcaagaacgacuccuccuccuccuccuacugccgcaaccccaacaacgagaagggcucccacggcgucaagggcugggccuucgacgacggcaacgacgucuggaugggccgcaccaucuccgaggagcuccgcuccggcuacgagaccuucaaggucaucggcggcugguccacccccaacuccaagcuccagaucaaccgccaggucaucgucgaccgcggcaaccgcuccggcuacuccggcaucuucuccgucgagggcaaguccugcaucaaccgcugcuucuacgucgagcucauccgcggccgcaagcaggagaacaaggucugguggaccuccaacuccaucgucgucuucugcggcaccuccggcaccuacggcaccggcuccuggcccgacggcgccgacaucaaccucaugcccaucuga

SEQ ID NO: 118077 - RNA, 1410 nt, Artificial Sequence
  derived and/or modified CDS sequence (opt2) from neuraminidase__InfluenzaA__AFG99680
augaaccccaaccagaagaucaucaccaucggcuccgucucccucaccaucgccaccaucugcuuccucaugcagaucgccauccucgucaccaccgucacccuccacuucaagcaguacgagugcuccuccccccccaacaaccaggucauccucugccagcccaccaucaucgagcgcaacaucaccgagaucgucuaccucaccaacaccaccaucgagaaggagaucugccccaagcucgucgaguaccgcaacugguccaagccccagugcaagaucaccggcuucgcccccuucuccaaggacaacuccauccgccucuccgccggcggcgacaucugggucacccgcgagcccuacgucuccugcgaccccuccaagugcuaccaguucgcccucggccagggcaccacccucaacaaccgccacuccaacgacaccguccacgaccgcacccccuaccgcacccuccucaugaacgagcucggcguccccuuccaccucggcaccaagcaggucugcaucgccugguccuccuccuccugccacgacggcaaggccuggcuccacgucugcgucaccggccacgacgagaacgccaccgccuccuucaucuacgacggccgccucgucgacuccaucggcuccugguccaagaacauccuccgcacccaggaguccgagugcgucugcaucaacggcaccugcaccgucgucaugaccgacggcuccgccuccgagcgcgccgacaccaagauccucuucaucgaggagggcaaggucguccacaucuccccccucuccggcuccgcccagcacgucgaggagugcuccugcuacccccgcuaccccggcguccgcugcgucugccgcgacaacuggaagggcuccaaccgccccaucgucgacaucaacgucaaggacuacuccaucgucuccuccuacgucugcuccggccucgucggcgacaccccccgcaagaacgacuccuccuccuccuccuacugccgcaaccccaacaacgagaagggcucccacggcgucaagggcugggccuucgacgacggcaacgacgucuggaugggccgcaccaucuccgaggagcuccgcuccggcuacgagaccuucaaggucaucggcggcugguccacccccaacuccaagcuccagaucaaccgccaggucaucgucgacuccggcaaccgcuccggcuacuccggcaucuucuccgucgagggcaaguccugcaucaaccgcugcuucuacgucgagcucauccgcggccgcaagcaggagaccaaggucugguggaccuccaacuccaucgucgucuucugcggcaccuccggcaccuacggcaccggcuccuggcccgacggcgccgacaucaaccucaugcccaucuga

SEQ ID NO: 118078 - RNA, 1410 nt, Artificial Sequence
  derived and/or modified CDS sequence (opt2) from neuraminidase__InfluenzaA__AFG99691
augaaccccaaccagaagaucaucaccaucggcuccgucucccucaccaucgccaccaucugcuuccucaugcagaucgccauccucgucaccaccgucacccuccacuucaagcaguacgagugcaacuccccccccaacaaccaggucaugcccugcgagcccaccaucaucgagcgcaacaccaccgagaucgucuaccucaccaacaccaccaucgagaaggagaucugccccaagcucgucgaguaccgcaacugguccaagccccagugcaagaucaccggcuucgcccccuucuccaaggacaacuccauccgccucuccgccggcggcgacaucugggucacccgcgagcccuacgucuccugcgaccccggcaagugcuaccaguucgcccucggccagggcaccacccucaacaaccgccacuccaacgacaccguccacgaccgcacccccuaccgcacccuccucaugaacgagcucggcguccccuuccaccucggcaccaagcaggucugcaucgccugguccuccuccuccugccacgacggcaaggccuggcuccacgucugcgucaccggccacgacgagaacgccaccgccuccuucaucuacgacggccgccucgucgacuccaucgucuccugguccaagaacauccuccgcacccaggaguccgagugcgucugcaucaacggcaccugcaccgucgucaugaccgacggcuccgccuccgagcgcgccgacaccaagauccucuucaucgaggagggcaagaucguccacaucuccccccucuccggcuccgcccagcacgucgaggagugcuccugcuacccccgcuaccccggcguccgcugcgucugccgcgacaacuggaagggcuccaaccgccccaucgucgacaucaacgucaaggacuacuccaucgucuccuccuacgucugcuccggccucgucggcgacaccccccgcaagaacgacuccuccuccuccuccuacugccgcaaccccaacaacgagaagggcucccacggcgucaagggcugggccuucgacgacggcaacgacgucuggaugggccgcaccaucggcgaggagcuccgcuccggcuacgagaccuucaaggucaucggcggcugguccacccccaacuccaagcuccagaccaaccgccaggucaucgucgaccgcggcaaccgcuccggcuacuccggcaucuucuccgucgagggcaaguccugcaucaaccgcugcuucuacgucgagcucauccgcggccgcaagcaggagaccaaggucugguggaccuccaacuccaucgucgucuucugcggcaccuccggcaccuacggcaccggcuccuggcccgacggcgccgacaucaaccucaugcccaucuga

SEQ ID NO: 118079 - RNA, 1410 nt, Artificial Sequence; identical to SEQ ID NO: 117962
  derived and/or modified CDS sequence (opt2) from neuraminidase__InfluenzaA__AFG99704

SEQ ID NO: 118080 - RNA, 1410 nt, Artificial Sequence; identical to SEQ ID NO: 117962
  derived and/or modified CDS sequence (opt2) from neuraminidase__InfluenzaA__AFG99715

SEQ ID NO: 118081 - RNA, 1410 nt, Artificial Sequence; identical to SEQ ID NO: 117962
  derived and/or modified CDS sequence (opt2) from neuraminidase__InfluenzaA__AFG99726

SEQ ID NO: 118082 - RNA, 1410 nt, Artificial Sequence
  derived and/or modified CDS sequence (opt2) from neuraminidase__InfluenzaA__AFG99737
augaaccccaaccagaagaucaucaccaucggcuccgucucccucaccaucgccaccaucugcuuccucaugcagaucaccauccucgucaccaccgucacccuccacuucaagcaguacgagugcaacuccccccccaacaaccaggucaugcucugcgagcccaccaucaucgagcgcaacaucaccgagaucgucuaccucaccaacaccaccaucgagaaggagaucugccccaagcucgucgaguaccgcaacugguccaagccccagugcaagaucaccggcuucgcccccuucuccaaggacaacuccauccgccucuccgccggcggcgacaucugggucacccgcgagcccuacgucuccugcgaccccggcaagugcuaccaguucgcccucggccagggcaccacccucaacaaccgccacuccaacgacaccguccacgaccgcacccccuaccgcacccuccucaugaacgagcucggcguccccuuccaccucggcaccaagcaggucugcaucgccugguccuccuccuccugccacgacggcaaggccuggcuccacgucugcgucaccggccacgacgagaacgccaccgccuccuucaucuacgacggccgccucgucgacuccaucggcuccugguccaagaacauccuccgcacccaggaguccgagugcgucugcaucaacggcaccugcaccgucgucaugaccgacggcuccgccuccgagcgcgccgacaccaagauccucuucaucgaggagggcaagaucguccacaucuccccccucuccggcuccgcccagcacgucgaggagugcuccugcuacccccgcuaccccggcguccgcugcgucugccgcgacaacuggaagggcuccaaccgccccaucgucgacaucaacgucaaggacuacuccaucgucuccuccuacgucugcuccggccucgucggcgacaccccccgcaagaacgacuccuccuccuccuccuacugccgcaaccccaacaacgagaagggcucccacggcgucaagggcugggccuucgacgacggcaacgacgucuggaugggccgcaccaucuccgaggagcuccgcuccggcuacgagaccuucaaggucaucggcggcugguccacccccaacuccaagcuccagaucaaccgccaggucaucgucgaccgcggcaaccgcuccggcuacuccggcaucuucuccgucgagggcaaguccugcaucaaccgcugcuucuacgucgagcucauccgcggccgcaagcaggagaacaaggucugguggaccuccaacuccaucgucgucuucugcggcaccuccggcaccuacggcaccggcuccuggcccgacggcgccgacaucaaccucaugcccaucuga

SEQ ID NO: 118083 - RNA, 1410 nt, Artificial Sequence
  derived and/or modified CDS sequence (opt2) from neuraminidase__InfluenzaA__AFG99748
augaaccccaaccagaagaucaucaccaucggcuccgucucccucaccaucgccaccaucugcuuccucaugcagaucgccauccucgucaccaccgucacccuccacuucaagcaguacgacugcaacuccccccccaacaaccaggccaugcucugcgagcccaccaucaucgagcgcaacaucaccgagaucgucuaccucaccaacaccaccaucgagaaggagaucugccccaagcucgccgaguaccgcaacugguccaagccccagugcaagaucaccggcuucgcccccuucuccaaggacaacuccauccgccucuccgccggcggcgacaucugggucacccgcgagcccuacgucuccugcgaccccggcaagugcuaccaguucgcccucggccagggcaccacccucaacaaccgccacuccaacgacaccguccacgaccgcacccccuaccgcacccuccucaugaacgagcucggcguccccuuccaccucggcaccaagcaggucugcaucgccugguccuccuccuccugccacgacggcaaggccuggcuccacgucugcgucaccggccacgacgagaacgccaccgccuccuucaucuacgacggccgccucgucgacuccaucggcuccugguccaagaacauccuccgcacccaggaguccgagugcgucugcaucaacggcaccugcaccgucgucaugaccgacggcuccgccuccgagcgcgccgacaccaagauccucuucaucgaggagggcaagaucguccacaucuccccccucuccggcuccgcccagcacgucgaggagugcuccugcuacccccgcuaccccggcguccgcugcgucugccgcgacaacuggaagggcuccaaccgccccaucgucgacaucaacgucaaggacuacuccaucgucuccuccuacgucugcuccggccucgucggcgacaccccccgcaagaacgacuccuccuccuccuccuacugccgcaaccccaacaacgagaagggcucccacggcgucaagggcugggccuucgacgacggcaacgacgucuggaugggccgcaccaucggcgaggagcuccgcuccggcuacgagaccuucaaggucaucggcggcugguccacccccaacuccaagcuccagaucaaccgccaggucaucgucgaccgcggcaaccgcuccggcuacuccggcaucuucuccgucgagggcaaguccugcaccaaccgcugcuucuacgucgagcucauccgcggccgcaagcaggagaccgaggucugguggaccuccaacuccaucgucgucuucugcggcaccuccggcaccuacggcaccggcuccuggcccgacggcgccgacaucaaccucaugcccaucuga

SEQ ID NO: 118084 - RNA, 1410 nt, Artificial Sequence; identical to SEQ ID NO: 117962
  derived and/or modified CDS sequence (opt2) from neuraminidase__InfluenzaA__AFG99759

SEQ ID NO: 118085 - RNA, 1410 nt, Artificial Sequence
  derived and/or modified CDS sequence (opt2) from neuraminidase__InfluenzaA__AFG99770
augaaccccaaccagaagaucaucaccaucggcuccgucucccucaccaucgccaccaucugcuuccucaugcagaucgccauccucgucaccaccgucacccuccacuucaagcaguacgagugcaacuccccccccaacaaccagaucaugcucugcgagcccaccaucaucgagcgcaacaucaccgagaucgucuaccucaccaacaccaccaucgagcgcgagaucugccccaagcucgucgaguaccgcaacugguccaagccccagugcaagaucaccggcuucgcccccuucuccaaggacaacuccauccgccucuccgccggcggcgacaucugggucacccgcgagcccuacgucuccugcgaccccggcaagugcuaccaguucgcccucggccagggcaccacccucaacaaccgccacuccaacgacaccguccacgaccgcacccccuaccgcacccuccucaugaacgagcucggcguccccuuccaccucggcaccaagcaggucugcaucgccugguccuccuccuccugccacgacggcaaggccuggcuccacgucugcgucaccggccacgacgagaacgccaccgccuccuucaucuacgacggccgccucgucgacuccaucggcuccugguccaagaacauccuccgcacccaggaguccgagugcgucugcaucaacggcaccugcaccgucgucaugaccgacggcuccgccuccgagcgcgccgacaccaagauccucuucaucgaggagggcaagaucguccacaucuccccccucuccggcuccgcccagcacgucgaggagugcuccugcuacccccgcuaccccggcguccgcugcgucugccgcgacaacuggaagggcuccaaccgccccaucgucgacaucaacgucaaggacuacuccaucgucuccuccuacgucugcuccggccucgucggcgacaccccccgcaagaacgacuccuccuccuccuccuacugccgcaaccccaacaacgagaagggcucccacggcgucaagggcugggccuucgacgacggcaacgacgucuggaugggccgcaccaucggcgaggagcuccgcuccggcuacgagaccuucaaggucaucggcggcugguccacccccaacuccaagcuccagaucaaccgccaggucaucgucgaccgcggcaaccgcuccggcuacuccggcaucuucuccgucgagggcaaguccugcaucaaccgcugcuucuacgucgagcucauccgcggccgcaagcaggagaccgaggucugguggaccuccaacuccaucgucgucuucugcggcaccuccggcaccuacggcaccggcuccuggcccgacggcgccgacaucaaccucaugcccaucuga

SEQ ID NO: 118086 - RNA, 1410 nt, Artificial Sequence
  derived and/or modified CDS sequence (opt2) from neuraminidase__InfluenzaA__AFG99781
augaaccccaaccagaagaucaucaccaucggcuccgucucccucaccaucgccaccaucugcuuccucaugcagaucgccauccucgucaccaccgucacccuccacuucaagcaguacgagugcuccuccccccccaacaaccaggucaugcucugccagcccaccaucaucgagcgcaacaucaccgagaucgucuaccucaccaacaccaccaucgagaaggagaucugccccaagcucgucgaguaccgcaacugguccaagccccagugcaagaucaccggcuucgcccccuucuccaaggacaacuccauccgccucuccgccggcggcgacaucugggucacccgcgagcccuacgucuccugcgaccccggcaagugcuaccaguucgcccucggccagggcaccacccucaacaaccgccacuccaacgacaccguccacgaccgcacccccuaccgcacccuccucaugaacgagcucggcguccccuuccaccucggcaccaagcaggucugcaucgccugguccuccuccuccugccacgacggcaaggccuggcuccacgucugcgucaccggccacgacgagaacgccaccgccuccuucaucuacgacggccgccucgucgacuccaucggcuccugguccaagaacauccuccgcacccaggaguccgagugcgucugcaucaacggcaccugcaccgucgucaugaccgacggcuccgccuccaagcgcgccgacaccaagauccucuucaucgaggagggcaagaucguccacaucuccccccucuccggcuccgcccagcacgucgaggagugcuccugcuacccccgcuaccccggcguccgcugcgucugccgcgacaacuggaagggcuccaaccgccccaucgucgacaucaacgucaaggacuacuccaucgucuccuccuacgucugcuccggccucgucggcgacaccccccgcaagaacgacuccuccuccuccuccuacugccgcaaccccaacaacgagaagggcucccacggcgucaagggcugggccuucgacgacggcaacgacgucuggaugggccgcaccaucuccgaggagcuccgcuccggcuacgagaccuucaaggucaucggcggcugguccacccccaacuccaagcuccagaccaaccgccaggucaucgucgacuccggcaaccgcuccggcuacuccggcaucuucuccgucgagggcaaguccugcaucaaccgcugcuucuacgucgagcucauccgcggccgcaagcaggagaccaaggucugguggaccuccaacuccaucgucgucuucugcggcaccuccggcaccuacggcaccggcuccuggcccgacggcgccgacaucaaccucaugcccaucuga

SEQ ID NO: 118087 - RNA, 1410 nt, Artificial Sequence; identical to SEQ ID NO: 117962
  derived and/or modified CDS sequence (opt2) from neuraminidase__InfluenzaA__AFG99792

SEQ ID NO: 118088 - RNA, 1410 nt, Artificial Sequence; identical to SEQ ID NO: 118082
  derived and/or modified CDS sequence (opt2) from neuraminidase__InfluenzaA__AFG99803

SEQ ID NO: 118089 - RNA, 1410 nt, Artificial Sequence; identical to SEQ ID NO: 117962
  derived and/or modified CDS sequence (opt2) from neuraminidase__InfluenzaA__AFG99825

SEQ ID NO: 118090 - RNA, 1410 nt, Artificial Sequence; identical to SEQ ID NO: 117962
  derived and/or modified CDS sequence (opt2) from neuraminidase__InfluenzaA__AFG99836

SEQ ID NO: 118091 - RNA, 1410 nt, Artificial Sequence; identical to SEQ ID NO: 117962
  derived and/or modified CDS sequence (opt2) from neuraminidase__InfluenzaA__AFG99847

SEQ ID NO: 118092 - RNA, 1410 nt, Artificial Sequence; identical to SEQ ID NO: 117962
  derived and/or modified CDS sequence (opt2) from neuraminidase__InfluenzaA__AFG99858

SEQ ID NO: 118093 - RNA, 1410 nt, Artificial Sequence; identical to SEQ ID NO: 117962
  derived and/or modified CDS sequence (opt2) from neuraminidase__InfluenzaA__AFG99869

SEQ ID NO: 118094 - RNA, 1410 nt, Artificial Sequence; identical to SEQ ID NO: 117962
  derived and/or modified CDS sequence (opt2) from neuraminidase__InfluenzaA__AFG99880

SEQ ID NO: 118095 - RNA, 1410 nt, Artificial Sequence
  derived and/or modified CDS sequence (opt2) from neuraminidase__InfluenzaA__AFG99891
augaaccccaaccagaagaucaucaccaucggcuccgucucccucaccaucgccaccaucugcuuccucaugcagaucgccauccucgucaccaccgucacccuccacuucaagcaguacgagugcaacuccccccccaacaaccaggucaugcucugcgagcccaccaucaucgagcgcaacaucaccgagaucgucuacuucaccaacaccaccaucgagaaggagaucugccccaagcucgccgaguaccgcaacugguccaagccccagugcaagaucaccggcuucgcccccuucuccaaggacaacuccauccgccucuccgccggcggcgacaucugggucacccgcgagcccuacgucuccugcgaccccggcaagugcuaccaguucgcccucggccagggcaccacccucaacaaccgccacuccaacgacaccguccacgaccgcacccccuaccgcacccuccucaugaacgagcucggcguccccuuccaccucggcaccaagcaggucugcaucgccugguccuccuccuccugccacgacggcaaggccuggcuccacgucugcgucaccggccacgacgagaacgccaccgccuccuucaucuacgacggccgccucgucgacuccaucggcuccugguccaagaacauccuccgcacccaggaguccgagugcgucugcaucaacggcaccugcaccgucgucaugaccgacggcuccgccuccgagcgcgccgacaccaagauccucuucaucgaggagggcaagaucguccacaucuccucccucuccggcuccgcccagcacgucgaggagugcuccugcuacccccgcuaccccggcguccgcugcgucugccgcgacaacuggaagggcuccaaccgccccaucgucgacaucaacgucaaggacuacuccaucgucuccuccuacgucugcuccggccucgucggcgacaccccccgcaagaacgacuccuccuccuccuccuacugccgcaaccccaacaacgagaagggcucccacggcgucaagggcugggccuucgacgacggcaacgacgucuggaugggccgcaccaucggcgaggagcuccgcuccggcuacgagaccuuccgcgucaucggcggcugguccacccccaacuccaagcuccagaucaaccgccaggucaucgucgaccgcggcaaccgcuccggcuacuccggcaucuucuccgucgagggcaaguccugcaucaaccgcugcuucuacgucgagcucauccgcggccgcaagcaggagaccgaggucugguggaccuccaacuccaucgucgucuucugcggcaccuccggcaccuacggcaccggcuccuggcccgacggcgccgacaucaaccucaugcccaucuga

SEQ ID NO: 118096 - RNA, 1410 nt, Artificial Sequence; identical to SEQ ID NO: 117962
  derived and/or modified CDS sequence (opt2) from neuraminidase__InfluenzaA__AFG99902

SEQ ID NO: 118097 - RNA, 1410 nt, Artificial Sequence; identical to SEQ ID NO: 117962
  derived and/or modified CDS sequence (opt2) from neuraminidase__InfluenzaA__AFG99913

SEQ ID NO: 118098 - RNA, 1410 nt, Artificial Sequence; identical to SEQ ID NO: 117962
  derived and/or modified CDS sequence (opt2) from neuraminidase__InfluenzaA__AFG99924

SEQ ID NO: 118099 - RNA, 1410 nt, Artificial Sequence
  derived and/or modified CDS sequence (opt2) from neuraminidase__InfluenzaA__AFG99935
augaaccccaaccagaagaucaucaccaucggcuccgucucccucaccaucgccaccaucugcuuccucaugcagaucgccauccucgucaccaccgucacccuccacuucaagcaguacgagugcaacuccccccccaacaaccaggucaugcucugcgagcccaccaucgucgagcgcaacaucaccgagaucgucuaccucaccaacaccaccaucgagaaggagaucugccccaagcucgccgaguaccgcaacugguccaagccccagugcaagaucaccggcuucgcccccuucuccaaggacaacuccauccgccucuccgccggcggcgacaucugggucacccgcgagcccuacgucuccugcgaccccuccaagugcuaccaguucgcccucggccagggcaccacccucaacaaccgccacuccaacgacaccguccacgaccgcacccccuaccgcacccuccucaugaacgagcucggcguccccuuccaccucggcaccaagcaggucugcaucgccugguccuccuccuccugccacgacggcaaggccuggcuccacgucugcgucaccggccacgacgagaacgccaccgccuccuucaucuacgacggccgccucgucgacuccaucggcuccugguccaagaacauccuccgcacccaggaguccgagugcgucugcaucaacggcaccugcaccgucgucaugaccgacggcuccgccuccgagcgcgccgacaccaagauccucuucaucgaggagggcaagaucguccacaucuccccccucuccggcuccgcccagcacgucgaggagugcuccugcuacccccgcuaccccggcguccgcugcgucugccgcgacaacuggaagggcuccaaccgccccaucgucgacaucaacaugaaggacuacuccaucgucuccuccuacgucugcuccggccucgucggcgacaccccccgcaacaacgacuccuccuccuccuccuacugccgcaaccccaacaacgagaagggcucccacggcgucaagggcugggccuucgacgacggcaacgacgucuggaugggccgcaccaucggcgaggagcuccgcuccggcuacgagaccuucaaggucaucggcggcugguccacccccaacuccaagcuccagaucaaccgccaggucaucgucgaccgcggcaaccgcuccggcuacuccggcaucuucuccgucgagggcaaguccugcaucaaccgcugcuucuacgucgagcucauccgcggccgcaagcaggagaccgaggucugguggaccuccaacuccaucgucgucuucugcggcaccuccggcaccuacggcaccggcuccuggcccgacggcgccgacaucaaccucaugcccaucuga

SEQ ID NO: 118100 - RNA, 1410 nt, Artificial Sequence; identical to SEQ ID NO: 117962
  derived and/or modified CDS sequence (opt2) from neuraminidase__InfluenzaA__AFG99946

SEQ ID NO: 118101 - RNA, 1410 nt, Artificial Sequence
  derived and/or modified CDS sequence (opt2) from neuraminidase__InfluenzaA__AFG99957
augaaccccaaccagaagaucaucaccaucggcuccgucucccucaccaucgccaccaucugcuuccucaugcagaucgccauccucgucaccaccgucacccuccacuucaagcaguacgagugcaacuccccccccaacaaccaggccaugcucugcgagcccaccaucaucgagcgcaacaucaccgagaucgucuaccucaccaacaccaccaucgagaaggagaucugccccaagcucgccgaguaccgcaacugguccaagccccagugcaagaucaccggcuucgcccccuucuccaaggacaacuccauccgccucuccgccggcggcgacaucugggucacccgcgagcccuacgucuccugcgaccccggcaagugcuaccaguucgcccucggccagggcaccacccucaacaaccgccacuccaacgacaccguccacgaccgcacccccuaccgcacccuccucaugaacgagcucggcguccccuuccaccucggcaccaagcaggucugcaucgccugguccuccuccuccugccacgacggcaaggccuggcuccacgucugcgucaccggccacgacgagaacgccaccgccuccuucaucuacgacggccgccucgucgacuccaucggcuccugguccaagaacauccuccgcacccaggaguccgagugcgucugcaucaacggcaccugcaccgucgucaugaccgacggcuccgccuccgagcgcgccgacaccaagauccucuucaucgaggagggcaagaucguccacaucuccccccucuccggcuccgcccagcacgucgaggagugcuccugcuacccccgcuaccccggcguccgcugcgucugccgcgacaacuggaagggcuccaaccgccccaucgucgacaucaacgucaaggacuacuccaucgucuccuccuacgucugcuccggccucgucggcgacaccccccgcaagaacgacuccuccuccuccuccuacugccgcaaccccaacaacgagaagggcucccacggcgucaagggcugggccuucgacgacggcaacgacgucuggaugggccgcaccaucggcgaggagcuccgcuccggcuacgagaccuucaaggucaucggcggcugguccacccccaacuccaagcuccagaucaaccgccaggucaucgucgaccgcggcaaccgcuccggcuacuccggcaucuucuccgucgagggcaaguccugcaccaaccgcugcuucuacgucgagcucauccgcggccgcaagcaggagaccgaggucugguggaccuccaacuccaucgucgucuucugcggcaccuccggcaccuacggcaccggcuccuggcccgacggcgccgacaucaaccucaugcccaucuga

SEQ ID NO: 118102 - RNA, 1410 nt, Artificial Sequence; identical to SEQ ID NO: 117962
  derived and/or modified CDS sequence (opt2) from neuraminidase__InfluenzaA__AFG99968

SEQ ID NO: 118103 - RNA, 1410 nt, Artificial Sequence
  derived and/or modified CDS sequence (opt2) from neuraminidase__InfluenzaA__AFG99979
augaaccccaaccagaagaucaucaccaucggcuccgucucccucaccaucgccaccaucugcuuccucaugcagaucgccauccucgucaccaccgucacccuccacuucaagcaguacgagugcaacuccccccccaacaaccaggucaugcccugcgagcccaccaucaucgagcgcaacaucaccgagaucgucuaccucaccaacaccaccaucgagaaggagaucugccccaagcucgucgaguaccgcaacugguccaagccccagugcaagaucaccggcuucgcccccuucuccaaggacaacuccauccgccucuccgccggcggcgacaucugggucacccgcgagcccuacgucuccugcgaccccggcaagugcuaccaguucgcccucggccagggcaccacccucaacaaccgccacuccaacgacaccguccacgaccgcacccccuaccgcacccuccucaugaacgagcucggcguccccuuccaccucggcaccaagcaggucugcaucgccugguccuccuccuccugccacgacggcaaggccuggcuccacgucugcgucaccggccacgacgagaacgccaccgccuccuucaucuacgacggccgccucgucgacuccaucgucuccugguccaagaacauccuccgcacccaggaguccgagugcgucugcaucaacggcaccugcaccgucgucaugaccgacggcuccgccuccgagcgcgccgacaccaagauccucuucaucgaggagggcaagaucguccacaucuccccccucuccggcuccgcccagcacgucgaggagugcuccugcuacccccgcuaccccggcguccgcugcgucugccgcgacaacuggaagggcuccaaccgccccaucgucgacaucaacgucaaggacuacuccaucgucuccuccuacgucugcuccggccucgucggcgacaccccccgcaagaacgacuccuccuccuccuccuacugccucaaccccaacaacgagaagggcucccacggcgucaagggcugggccuucgacgacggcaacgacgucuggaugggccgcaccaucggcgaggagcuccgcuccggcuacgagaccuucaaggucaucggcggcugguccacccccaacuccaagcuccagaccaaccgccaggucaucgucgaccgcggcaaccgcuccggcuacuccggcaucuucuccgucgaguccaaguccugcaucaaccgcugcuucuacgucgagcucauccgcggccgcaagcaggagaccaaggucugguggaccuccaacuccaucgucgucuucugcggcaccuccggcaccuacggcaccggcuccuggcccgacggcgccgacaucaaccucaugcccaucuga

SEQ ID NO: 118104 - RNA, 1410 nt, Artificial Sequence
  derived and/or modified CDS sequence (opt2) from neuraminidase__InfluenzaA__AFG99990
augaaccccaaccagaagaucaucaccaucggcuccgucucccucaccaucgccaccaucugcuuccucaugcagaucgccauccucgucaccaccgucacccuccacuucaagcaguacgagugcaacuccccccccaacaaccaggccaugcucugcgagcccaagaucaucgagcgcaacaucaccgagaucgucuaccucaccaacaccaccaucgagaaggagaucugccccaagcucgccgaguaccgcaacugguccaagccccagugcaagaucaccggcuucgcccccuucuccaaggacaacuccauccgccucuccgccggcggcgacaucugggucacccgcgagcccuacgucuccugcgaccccggcaagugcuaccaguucgcccucggccagggcaccacccucaacaaccgccacuccaacgacaccguccacgaccgcacccccuaccgcacccuccucaugaacgagcucggcguccccuuccaccucggcaccaagcaggucugcaucgccugguccuccuccuccugccacgacggcaaggccuggcuccacgucugcgucaccggccacgacgagaacgccaccgccuccuucaucuacgacggccgccucgucgacuccaucggcuccugguccaagaacauccuccgcacccaggaguccgagugcgucugcaucaacggcaccugcaccgucgucaugaccgacggcuccgccuccgagcgcgccgacaccaagauccucuucaucgaggagggcaagaucguccacaucuccccccucuccggcuccgcccagcacgucgaggagugcuccugcuacccccgcuaccccggcguccgcugcgucugccgcgacaacuggaagggcuccaaccgccccaucgucgacaucaacgucaaggacuacuccaucgucuccuccuacgucugcuccggccucgucggcgacaccccccgcaagaacgacuccuccuccuccuccuacugccgcaaccccaacaacgagaagggcucccacggcgucaagggcugggccuucgacgacggcaacgacgucuggaugggccgcaccaucuccgaggagcuccgcuccggcuacgagaccuucaaggucaucggcggcugguccaagcccaacuccaagcuccagaucaaccgccaggucaucgucgaccgcggcaaccgcuccggcuacuccggcaucuucuccgucgagggcaaguccugcaucaaccgcugcuucuacgucgagcucauccgcggccgcaagcaggagaccgaggucugguggaccuccaacuccaucgucgucuucugcggcaccuccggcaccuacggcaccggcuccuggcccgacggcgccgacaucaaccucaugcccaucuga

SEQ ID NO: 118105 - RNA, 1410 nt, Artificial Sequence
  derived and/or modified CDS sequence (opt2) from neuraminidase__InfluenzaA__AFH00002
augaaccccaaccagaagaucaucaccaucggcuccgucucccucaccaucgccaccaucugcuuccucaugcagaucgccauccucgucaccaccgucacccuccacuucaagcaguacgagugcuccuccccccccaacaaccaggucauccccugccagcccaccaucaucgagcgcaacaucaccgagaucgucuaccucaccaacaccaccaucgagaaggagaucugccccaagcucgucgaguaccgcaacugguccaagccccagugcaagaucaccggcuucgcccccuucuccaaggacaacuccauccgccucuccgccggcggcgacaucugggucacccgcgagcccuacgucuccugcgaccccggcaagugcuaccaguucgcccucggccagggcaccacccucaacaaccgccacuccaacgacaccguccacgaccgcacccccuaccgcacccuccucaugaacgagcucggcguccccuuccaccucggcaccaagcaggucugcaucgccugguccuccuccuccugccacgacggcaaggccuggcuccacgucugcgucaccggccacgacgagaacgccaccgccuccuucaucuacgacggccgccucgucgacuccaucggcuccugguccaagaacauccuccgcacccaggaguccgagugcgucugcaucaacggcaccugcgccgucgucaugaccgacggcuccgccuccgagcgcgccgacaccaagauccucuucaucgaggagggcaaggucguccacaucuccccccucuccggcuccgcccagcacgucgaggagugcuccugcuacccccgcuaccccggcguccgcugcgucugccgcgacaacuggaagggcuccaaccgccccaucgucgacaucaacgucaagaacuacuccaucgucuccuccuacgucugcuccggccucgucggcgacaccccccgcaagaacgacuccuccuccuccuccuacugccgcaaccccaacaacgagaagggcucccacggcgucaagggcugggccuucgacgacggcaacgacgucuggaugggccgcaccaucuccgaggagcuccgcuccggcuacgagaccuucaaggucaucggcggcugguccacccccaacuccaagcuccagaucaaccgccaggucaucgucgacuccggcaaccgcuccggcuacuccggcaucuucuccgucgagggcaaguccugcaucaaccgcugcuucuacgucgagcucauccgcggccgcaagcaggagaccaaggucugguggaccuccaacuccaucgucgucuucugcggcaccuccggcaccuacggcaccggcuccuggcccgacggcgccgacaucaaccucaugcccaucuga

SEQ ID NO: 118106 - RNA, 1410 nt, Artificial Sequence; identical to SEQ ID NO: 111221
  derived and/or modified CDS sequence (opt2) from neuraminidase__InfluenzaA__AFH00013

SEQ ID NO: 118107 - RNA, 1410 nt, Artificial Sequence
  derived and/or modified CDS sequence (opt2) from neuraminidase__InfluenzaA__AFH00024
augaaccccaaccagaagaucaucaccaucggcuccgucucccucaccaucgccaccaucugcuuccucaugcagaucaccauccucgucaccaccgucacccuccacuucaagcaguacgagugcaacuccccccccaacaaccaggucaugcucugcgagcccaccaucaucgagcgcaacaucaccgagaucgucuaccucaccaacaccaccaucgagaaggagaucugccccaagcucgucgaguaccgcaacugguccaagccccagugcaagaucaccggcuucgcccccuucuccaaggacaacuccauccgccucuccgccggcggcgacaucugggucacccgcgagcccuacgucuccugcgaccccggcaagugcuaccaguucgcccucggccagggcaccacccucaacaaccgccacuccaacgacaccguccacgaccgcacccccuaccgcacccuccucaugaacgagcucggcguccccuuccaccucggcaccaagcaggucugcaucgccugguccuccuccuccugccacgacggcaaggccuggcuccacgucugcgucaccggccacgacgagaacgccaccgccuccuucaucuacgacggccgccucgucgacuccaucggcuccugguccaagaacauccuccgcacccaggaguccgagugcgucugcaucaacggcaccugcaccgucgucaugaccgacggcuccgccuccgagcgcgccgacaccaagauccucuucaucgaggagggccgcaucguccacaucuccccccucuccggcuccgcccagcacgucgaggagugcuccugcuacccccgcuaccccggcguccgcugcgucugccgcgacaacuggaagggcuccaaccgccccaucgucgacaucaacgucaaggacuacuccaucgucuccuccuacgucugcuccggccucgucggcgacaccccccgcaagaacgacuccuccuccuccuccuacugccgcaaccccaacaacgagaagggcucccacggcgucaagggcugggccuucgacgacggcaacgacgucuggaugggccgcaccaucuccgaggagcuccgcuccggcuacgagaccuucaaggucaucggcggcugguccacccccaacuccaagcuccagaucaaccgccaggucaucgucgaccgcggcaaccgcuccggcuacuccggcaucuucuccgucgagggcaaguccugcaucaaccgcugcuucuacgucgagcucauccgcggccgcaagcaggagaacaaggucugguggaccuccaacuccaucgucgucuucugcggcaccuccggcaccuacggcaccggcuccuggcccgacggcgccgacaucaaccucaugcccaucuga

SEQ ID NO: 118108 - RNA, 1410 nt, Artificial Sequence; identical to SEQ ID NO: 111221
  derived and/or modified CDS sequence (opt2) from neuraminidase__InfluenzaA__AFH00035

SEQ ID NO: 118109 - RNA, 1410 nt, Artificial Sequence; identical to SEQ ID NO: 111221
  derived and/or modified CDS sequence (opt2) from neuraminidase__InfluenzaA__AFH00046

SEQ ID NO: 118110 - RNA, 1410 nt, Artificial Sequence
  derived and/or modified CDS sequence (opt2) from neuraminidase__InfluenzaA__AFH00057
augaaccccaaccagaagaucaucaccaucggcuccgucucccucaccaucgccaccaucugcuuccucaugcagaucgccauccucgucaccaccgucacccuccacuucaagcaguacgagugcaacuccccccccaacaaccaggucaugcucugcgagcccaccaucaucgagcgcaacaucaccgagaucgucuaccucaccaacaccaccaucgagaaggagaucugccccaagcucgccgaguaccgcaacugguccaagccccagugcaagaucaccggcuucgcccccuucuccaaggacaacuccauccgccucuccgccggcggcgacaucugggucacccgcgagcccuacgucuccugcgaccccggcaagugcuaccaguucgcccucggccagggcaccacccucaacaaccgccacuccaacgacaccguccacgaccgcacccccuaccgcacccuccucaugaacgagcucggcguccccuuccaccucggcaccaagcaggucugcaucgccugguccuccuccuccugccacgacggcaaggccuggcuccacgucugcgucaccggccacgacgagaacgccaccgccuccuucaucuacgacggccgccucgucgacuccaucggcuccugguccaagaacguccuccgcacccaggaguccgagugcgucugcaucaacggcaccugcaccgucgucaugaccgacggcuccgccuccgagcgcgccgacaccaagauccucuucaucgaggagggcaagaucguccacaucuccccccucuccggcuccgcccagcacgucgaggagugcuccugcuacccccgcuaccccggcguccgcugcgucugccgcgacaacuggaagggcuccaaccgccccaucgucgacaucaacgucaaggacuacuccaucgucuccuccuacgucugcuccggccucgucggcgacaccccccgcaagaacgacuccuccuccuccuccuacugccgcaaccccaacaacgagaagggcucccacggcgucaagggcugggccuucgacgacggcaacgacgucuggaugggccgcaccaucuccgaggagcuccgcuccggcuacgagaccuucaaggucaucggcggcugguccaaccccaacuccaagcuccagaucaaccgccaggucaucgucgaccgcggcaaccgcuccggcuacuccggcaucuucuccgucgagggcaaguccugcaucaaccgcugcuucuacgucgagcucauccgcggccgcaagcaggagaccgaggucugguggaccuccaacuccaucgucgucuucugcggcaccuccggcaccuacggcaccggcuccuggcccgacggcgccgacaucaaccucaugcccaucuga

SEQ ID NO: 118111 - RNA, 1410 nt, Artificial Sequence; identical to SEQ ID NO: 111221
  derived and/or modified CDS sequence (opt2) from neuraminidase__InfluenzaA__AFH00068

SEQ ID NO: 118112 - RNA, 1410 nt, Artificial Sequence
  derived and/or modified CDS sequence (opt2) from neuraminidase__InfluenzaA__AFH00079
augaaccccaaccagaagaucaucaccaucggcuccgucucccucaccaucgccaccaucugcuuccucaugcagaucgccauccucgucaccaccgucacccuccacuucaagcaguacgagugcaacuccccccccaacaaccaggucaugcucugcgagcccaccaucaucgagcgcaacaucaccgagaucgucuaccucaccaacaccaccaucgagaaggagaucugccccaagcucgccgaguaccgcaacugguccaagccccagugcaagaucaccggcuucgcccccuucuccaaggacaacuccauccgccucuccgccggcggcgacaucugggucacccgcgagcccuacgucuccugcgaccccggcaagugcuaccaguucgcccucggccagggcaccacccucaacaaccgccacuccaacgacaccguccacgaccgcacccccuaccgcacccuccucaugaacgagcucggcguccccuuccaccucggcaccaagcaggucugcaucgccugguccuccuccuccugccacgacggcaaggccuggcuccacgucugcgucaccggccacgacgagaacgccaccgccuccuucaucuacgacggccgccucgucgacuccaucggcuccugguccaagaacauccuccgcacccaggaguccgagugcgucugcaucaacggcaccugcaccgucgucaugaccgacggcuccgccuccgagcgcgccgacaccaagauccucuucaucgaggagggcaagaucguccacaucuccccccucuccggcuccgcccagcacgucgaggagugcuccugcuacccccgcuaccccggcguccgcugcgucugccgcgacaacuggaagggcuccaaccgccccaucgucgacaucaacgucaaggacuacuccaucgucuccuccuacgucugcuccggccucgucggcgacaccccccgcaagaacgacuccuccuccuccuccuacugccgcaaccccaacaacgagaagggcucccacggcgucaagggcugggccuucgacgacggcaacgacgucuggaugggccgcaccaucuccgaggagcuccgcuccggcuacgagaccuucaaggucaucgagggcugguccaagcccaacuccaagcuccagaucaaccgccaggucaucgucgaccgcggcaaccgcuccggcuacuccggcaucuucuccgucgagggcaaguccugcaucaaccgcugcuucuacgucgagcucauccgcggccgcaagcaggagaccgaggucugguggaccuccaacuccaucgucgucuucugcggcaccuccggcaccuacggcaccggcuccuggcccgacggcgccgacaucaaccucaugcccaucuga

SEQ ID NO: 118113 - RNA, 1410 nt, Artificial Sequence
  derived and/or modified CDS sequence (opt2) from neuraminidase__InfluenzaA__AFH00090
augaaccccaaccagaagaucaucaccaucggcuccgucucccucaccaucgccaccaucugcuuccucaugcagaucgccauccucgucaccaccgucacccuccacuucaagcaguacgagugcaacuccccccccaacaaccaggucaugcucugcgagcccaccaucaucgagcgcaacaucaccgagaucgucuaccucaccaacaccaccaucgagaaggagaucugccccaagcucgccgaguaccgcaacugguccaagccccagugcaagaucaccggcuucgcccccuucuccaaggacaacuccauccgccucuccgccggcggcgacaucugggucacccgcgagcccuacgucuccugcgaccccggcaagugcuaccaguucgcccucggccagggcaccacccucaacaaccgccacuccaacgacaccguccacgaccgcacccccuaccgcacccuccucaugaacgagcucggcguccccuuccaccucggcaccaagcaggucugcaucgccugguccuccuccuccugccacgacggcaaggccuggcuccacgucugcgucaccggccacgacgagaacgccaccgccuccuucaucuacgacggccgccucgucgacuccaucggcuccugguccaagaacauccuccgcacccaggaguccgagugcgucugcaucaacggcaccugcaccgucgucaugaccgacggcuccgccuccgagcgcgccgacaccaagauccucuucaucgaggagggcaagaucguccacaucuccccccucuccggcuccgcccagcacgucgaggagugcuccugcuacccccgcuaccccggcguccgcugcgucugccgcgacaacuggaagggcuccaaccgccccaucgucgacaucaacgucaaggacuacuccaucgucuccuccuacgucugcuccggccucgucggcgacaccccccgcaagaacgacuccuccuccuccuccuacugcuggaaccccaacaacgagaagggcucccacggcgucaagggcugggccuucgacgacggcaacgacgucuggaugggccgcaccaucuccgaggagcuccgcuccggcuacgagaccuucaaggucaucggcggcugguccaagcccaacuccaagcuccagaucaaccgccaggucaucgucgaccgcggcaaccgcuccggcuacuccggcaucuucuccgucgagggcaaguccugcaucaaccgcugcuucuacgucgagcucauccgcggccgcaagcaggagaccgaggucugguggaccuccaacuccaucgucgucuucugcggcaccuccggcaccuacggcaccggcuccuggcccgacggcgccgacaucaaccucaugcccaucuga

SEQ ID NO: 118114 - RNA, 1410 nt, Artificial Sequence
  derived and/or modified CDS sequence (opt2) from neuraminidase__InfluenzaA__AFH00101
augaaccccaaccagaagaucaucaccaucggcuccgucucccucaccaucgccaccaucugcuuccucaugcagaucgccauccucgucaccaccgucacccuccacuucaagcaguacgagugcaacuccccccccaacaaccaggucaugcucugcgagcccaccaucaucgagcgcaacaucaccgagaucgucuaccucaccaacaccaccaucgagaaggagaucugccccaagcucgccgaguaccgcaacugguccaagccccagugcaagaucaccggcuucgcccccuucuccaaggacaacuccauccgccucuccgccggcggcgacaucugggucacccgcgagcccuacgucuccugcgaccccggcaagugcuaccaguucgcccucggccagggcaccacccucaacaaccgccacuccaacgacaccguccacgaccgcacccccuaccgcacccuccucaugaacgagcucggcguccccuuccaccucggcaccaagcaggucugcaucgccugguccuccuccuccugccacgacggcaaggccuggcuccacgucugcgucaccggccacgacgagaacgccaccgccuccuucaucuacgacggccgccucgucgacuccaucggcuccugguccaagaagauccuccgcacccaggaguccgagugcgucugcaucaacggcaccugcaccgucgucaugaccgacggcuccgccuccgagcgcgccgacaccaagauccucuucaucgaggagggcaagaucguccacaucuccccccucuccggcuccgcccagcacgucgaggagugcuccugcuacccccgcuaccccggcguccgcugcgucugccgcgacaacuggaagggcuccaaccgccccaucgucgacaucaacgucaaggacuacuccaucgucuccuccuacgucugcuccggccucgucggcgacaccccccgcaagaacgacuccuccuccuccuccuacugccgcaaccccaacaacgagaagggcucccacggcgucaagggcugggccuucgacgacggcaacgacgucuggaugggccgcaccaucuccgaggagcuccgcuccggcuacgagaccuucaaggucaucggcggcugguccaagcccaacuccaagcuccagaucaaccgccaggucaucgucgaccgcggcaaccgcuccggcuacuccggcaucuucuccgucgagggcaaguccugcaucaaccgcugcuucuacgucgagcucauccgcggccgcaagcaggagaccgaggucugguggaccuccaacuccaucgucgucuucugcggcaccuccggcaccuacggcaccggcuccuggcccgacggcgccgacaucaaccucaugcccaucuga

SEQ ID NO: 118115 - RNA, 1410 nt, Artificial Sequence; identical to SEQ ID NO: 111137
  derived and/or modified CDS sequence (opt2) from neuraminidase__InfluenzaA__AFH00112

SEQ ID NO: 118116 - RNA, 1410 nt, Artificial Sequence; identical to SEQ ID NO: 111137
  derived and/or modified CDS sequence (opt2) from neuraminidase__InfluenzaA__AFH00123

SEQ ID NO: 118117 - RNA, 1410 nt, Artificial Sequence
  derived and/or modified CDS sequence (opt2) from neuraminidase__InfluenzaA__AFH00156
augaaccccaaccagaagaucaucaccaucggcuccgucucccucaccaucgccaccaucugcuuccucaugcagaucgccauccucgucaccaccgucacccuccacuucaagcaguacgagugcaacuccccccccaacaaccaggucaugcucugcgagcccaccaucaucgagcgcaacaucaccgagaucgucuaccucaccaacaccaccaucgagaaggagaucugccccaagcucgccgaguaccgcaacugguccaagccccagugcaagaucaccggcuucgcccccuucuccaaggacaacuccauccgccucuccgccggcggcgacaucugggucacccgcgagcccuacgucuccugcgaccccggcaagugcuaccaguucgcccucggccagggcaccacccucaacaaccgccacuccaacgacaccguccacgaccgcacccccuaccgcacccuccucaugaacgagcucggcguccccuuccaccucggcaccaagcaggucugcaucgccugguccuccuccuccugccacgacggcaaggccuggcuccacgucugcgucaccggccacgacgagaacgccaccgccuccuucaucuacgacggccgccucgucgacuccaucggcuccugguccaagaacauccuccgcacccaggaguccgagugcgucugcaucaacggcaccugcaccgucgucaugaccgacggcuccgccuccgagcgcgccgacaccaagauccucuucaucgaggagggcaagaucguccacaucuccccccucuccggcuccgcccagcacgucgaggagugcuccugcuacccccgcuaccccggcguccgcugcgucugccgcgacaacuggaagggcuccaaccgccccaucaucgacaucaacgucaaggacuacuccaucgucuccuccuacgucugcuccggccucgucggcgacaccccccgcaagaacgacuccuccuccuccuccuacugccgcaaccccaacaacgagaagggcucccacggcgucaagggcugggccuucgacgacggcaacgacgucuggaugggccgcaccaucuccgaggagcuccgcuccggcuacgagaccuucaaggucaucggcggcugguccaagcccaacuccaagcuccagaucaaccgccaggucaucgucgaccgcggcaaccgcuccggcuacuccggcaucuucuccgucgagggcaaguccugcaucaaccgcugcuucuacgucgagcucauccgcggccgcaagcaggagaccgaggucugguggaccuccaacuccaucgucgucuucugcggcaccuccggcaccuacggcaccggcuccuggcccgacggcgccgacaucaaccucaugcccaucuga

SEQ ID NO: 118118 - RNA, 1410 nt, Artificial Sequence
  derived and/or modified CDS sequence (opt2) from neuraminidase__InfluenzaA__AFH00167
augaaccccaaccagaagaucaucaccaucggcuccgucucccucaccaucgccaccaugugcuuccucaugcagaucgccauccucgucaccaccgucacccuccacuucaagcaguacgagugcaacuccccccccaacaaccaggucaugcucugcgagcccaccaucaucgagcgcaacaucaccgagaucgucuaccucaccaacaccaccaucgagaaggagaucugccccaagcucgccgaguaccgcaacugguccaagccccagugcaagaucaccggcuucgcccccuucuccaaggacaacuccauccgccucuccgccggcggcgacaucugggucacccgcgagcccuacgucuccugcgaccccggcaagugcuaccaguucgcccucggccagggcaccacccucaacaaccgccacuccaacgacaccguccacgaccgcacccccuaccgcacccuccucaugaacgagcucggcguccccuuccaccucggcaccaagcaggucugcaucgccugguccuccuccuccugccacgacggcaaggccuggcuccacgucugcgucaccggccacgacgagaacgccaccgccuccuucaucuacgacggccgccucgucgacuccaucggcuccugguccaagaacauccuccgcacccaggaguccgagugcgucugcaucaacggcaccugcaccgucgucaugaccgacggcuccgccuccgagcgcgccgacaccaagauccucuucaucgaggagggcaagaucguccacaucuccccccucuccggcuccgcccagcacgucgaggagugcuccugcuacccccgcuaccccggcguccgcugcgucugccgcgacaacuggaagggcuccaaccgccccaucgucgacaucaacgucaaggacuacuccaucgucuccuccuacgucugcuccggccucgucggcgacaccccccgcaagaacgacuccuccuccuccuccuacugccgcaaccccaacaacgagaagggcucccacggcgucaagggcugggccuucgacgacggcaacgacgucuggaugggccgcaccaucuccgaggagcuccgcuccggcuacgagaccuucaaggucaucggcggcugguccaagcccaacuccaagcuccagaucaaccgccaggucaucgucgaccgcggcaaccgcuccggcuacuccggcaucuucuccgucgagggcaaguccugcaucaaccgcugcuucuacgucgagcucauccgcggccgcaagcaggagaccgaggucugguggaccuccaacuccaucgucgucuucugcggcaccuccggcaccuacggcaccggcuccuggcccgacggcgccgacaucaaccucaugcccaucuga

SEQ ID NO: 118119 - RNA, 1410 nt, Artificial Sequence; identical to SEQ ID NO: 118117
  derived and/or modified CDS sequence (opt2) from neuraminidase__InfluenzaA__AFH00178

SEQ ID NO: 118120 - RNA, 1410 nt, Artificial Sequence
  derived and/or modified CDS sequence (opt2) from neuraminidase__InfluenzaA__AFH00189
augaaccccaaccagaagaucaucaccaucggcuccgucucccucaccaucgccaccaucugcuuccucaugcagaucgccauccucgucaccaccgucacccuccacuucaagcaguacgaguacaacuccccccccaacaaccaggucaugcucugcgagcccaagaucaucgagcgcaacaucaccgagaucgucuaccucaccaacaccaccaucgagaaggagaucugccccaagcucgccgaguaccgcaacugguccaagccccagugcaagaucaccggcuucgcccccuucuccaaggacaacuccauccgccucuccgccggcggcgacaucugggucacccgcgagcccuacgucuccugcgaccccggcaagugcuaccaguucgcccucggccagggcaccacccucaacaaccgccacuccaacgacaccguccacgaccgcacccccuaccgcacccuccucaugaacgagcucggcguccccuuccaccucggcaccaagcaggucugcaucgccugguccuccuccuccugccacgacggcaaggccuggcuccacgucugcgucaccggccacgacgagaacgccaccgccuccuucaucuacgacggccgccucgucgacuccaucggcuccugguccaagaacauccuccgcacccaggaguccgagugcgucugcaucaacggcaccugcaccgucgucaugaccgacggcuccgccuccgagcgcgccgacaccaagauccucuucaucgaggagggcaagaucguccacaucuccccccucuccggcuccgcccagcacgucgaggagugcuccugcuacccccgcuaccccggcguccgcugcgucugccgcgacaacuggaagggcuccaaccgccccaucgucgacaucaacgucaaggacuacuccaucgucuccuccuacgucugcuccggccucgucggcgacaccccccgcaagaacgacuccuccuccuccuccuacugccgcaaccccaacaacgagaagggcucccacggcgucaagggcugggccuucgacgacggcaacgacgucuggaugggccgcaccaucuccgaggagcuccgcuccggcuacgagaccuucaaggucaucggcggcugguccaagcccaacuccaagcuccagaucaaccgccaggucaucgucgaccgcggcaaccgcuccggcuacuccggcaucuucuccgucgagggcaaguccugcaucaaccgcugcuucuacgucgagcucauccgcggccgcaagcaggagaccgaggucugguggaccuccaacuccaucgucgucuucugcggcaccuccggcaccuacggcaccggcuccuggcccgacggcgccgacaucaaccucaugcccaucuga

SEQ ID NO: 118121 - RNA, 1410 nt, Artificial Sequence; identical to SEQ ID NO: 111221
  derived and/or modified CDS sequence (opt2) from neuraminidase__InfluenzaA__AFH00200

SEQ ID NO: 118122 - RNA, 1410 nt, Artificial Sequence; identical to SEQ ID NO: 118118
  derived and/or modified CDS sequence (opt2) from neuraminidase__InfluenzaA__AFH00211

SEQ ID NO: 118123 - RNA, 1410 nt, Artificial Sequence
  derived and/or modified CDS sequence (opt2) from neuraminidase__InfluenzaA__AFH00222
augaaccccaaccagaagaucaucaccaucggcuccgucucccucaccaucgccaccaucugcuuccucaugcagaucgccauccucgucaccaccgucacccuccacuucaagcaguacgagugcaacuccccccccaacaaccaggucaugcucugcgagcccaccaucaucgagcgcaacaucaccgagaucgucuaccucaccaacaccaccaucgagaaggagaucugccccaagcucgccgaguaccgcaacugguccaagccccagugcaagaucaccggcuucgcccccuucuccaaggacaacuccauccgccucuccgccggcggcgacaucugggucacccgcgagcccuacgucuccugcgaccccggcaagugcuaccaguucgcccucggccagggcaccacccucaacaaccgccacuccaacaacaccguccacgaccgcacccccuaccgcacccuccucaugaacgagcucggcguccccuuccaccucggcaccaagcaggucugcaucgccugguccuccuccuccugccacgacggcaaggccuggcuccacgucugcgucaccggccacgacgagaacgccaccgccuccuucaucuacgacggccgccucgucgacuccaucggcuccugguccaagaacauccuccgcacccaggaguccgagugcgucugcaucaacggcaccugcaccgucgucaugaccgacggcuccgccuccgagcgcgccgacaccaagauccucuucaucgaggagggcaagaucguccacaucuccccccucuccggcuccgcccagcacgucgaggagugcuccugcuacccccgcuaccccggcguccgcugcgucugccgcgacaacuggaagggcuccaaccgccccaucgucgacaucaacgucaaggacuacuccaucgucuccuccuacgucugcuccggccucgucggcgacaccccccgcaagaacgacuccuccuccuccuccuacugccgcaaccccaacaacgagaagggcucccacggcgucaagggcugggccuucgacgacggcaacgacgucuggaugggccgcaccaucuccgaggagcuccgcuccggcuacgagaccuucaaggucaucggcggcugguccaagcccaacuccaagcuccagaucaaccgccaggucaucgucgaccgcggcaaccgcuccggcuacuccggcaucuucuccgucgagggcaaguccugcaucaaccgcugcuucuacgucgagcucauccgcggccgcaagcaggagaccgaggucugguggaccuccaacuccaucgucgucuucugcggcaccuccggcaccuacggcaccggcuccuggcccgacggcgccgacaucaaccucaugcccaucuga

SEQ ID NO: 118124 - RNA, 1410 nt, Artificial Sequence; identical to SEQ ID NO: 111137
  derived and/or modified CDS sequence (opt2) from neuraminidase__InfluenzaA__AFH00233

SEQ ID NO: 118125 - RNA, 1410 nt, Artificial Sequence
  derived and/or modified CDS sequence (opt2) from neuraminidase__InfluenzaA__AFH00244
augaaccccaaccagaagaucaucaccaucggcuccgucucccucaccaucgccaccaucugcuuccucaugcagaucgccauccucgucaccaccgucacccucuacuucaagcaguacgagugcaacuccccccccuccaaccaggucaugcucugcgagcccaccaucgucgagcgcaacaucaccgagaucgucuaccucaccaacaccaccaucgagaaggagaucugccccaagcucgccgaguaccgcaacugguccaagccccagugcaagaucaccggcuucgcccccuucuccaaggacaacuccauccgccucuccgccggcggcgacaucugggucacccgcgagcccuacgucuccugcgaccccggcaagugcuaccaguucgcccucggccagggcaccacccucaacaaccgccacuccaacgacaccguccacgaccgcacccccuaccgcacccuccucaugaacgagcucggcguccccuuccaccucggcaccaagcaggucugcaucgccugguccuccuccuccugccacgacggcaaggccuggcuccacgucugcgucaccggccacgacgagaacgccaccgccuccuucaucuacgacggccgccucgucgacuccaucggcuccugguccaagaacauccuccgcacccaggaguccgagugcgucugcaucaacggcaccugcaccgucgucaugaccgacggcuccgccuccgagcgcgccgacaccaagauccucuucaucgaggagggcaagaucguccacaucuccccccucuccggcuccgccaagcacgucgaggagugcuccugcuacccccgcuaccccggcguccgcugcgucugccgcgacaacuggaagggcuccaaccgccccaucgucgacaucaacgucaaggacuacuccaucgucuccuccuacgucugcuccggccucgucggcgacaccccccgcaagaacgacuccuccuccuccuccuacugccgcaaccccaacaacgagaagggcucccacggcgucaagggcugggccuucgacgacggcaacgacgucuggaugggccgcaccaucuccgaggagcuccgcuccggcuacgagaccuucaaggucaucggcggcugguccaagcccaacuccaagcuccagaucaaccgccaggucaucgucgaccgcggcaaccgcuccggcuacuccggcaucuucuccgucgagggcaaguccugcaucaaccgcugcuucuacgucgagcucauccgcggccgcaagcaggagaccgaggucugguggaccuccaacuccaucgucgucuucugcggcaccuccggcaccuacggcaccggcuccuggcccgacggcgccgacaucaaccucaugcccaucuga

SEQ ID NO: 118126 - RNA, 1410 nt, Artificial Sequence; identical to SEQ ID NO: 111221
  derived and/or modified CDS sequence (opt2) from neuraminidase__InfluenzaA__AFH00255

SEQ ID NO: 118127 - RNA, 1410 nt, Artificial Sequence; identical to SEQ ID NO: 111221
  derived and/or modified CDS sequence (opt2) from neuraminidase__InfluenzaA__AFH00266

SEQ ID NO: 118128 - RNA, 1410 nt, Artificial Sequence
  derived and/or modified CDS sequence (opt2) from neuraminidase__InfluenzaA__AFH00277
augaaccccaaccagaagaucaucaccaucggcuccgucucccucaccaucgccaccaucugcuuccucaugcagaucgccauccucgucaccaccgucacccuccacuucaagcaguacgagugcaacuccccccccuccaaccaggucaugcucugcgagcccaccaucaucgagcgcaacaucaccgagaucgucuaccucaccaacaccaccaucgagaaggagaucugccccaagcucgccgaguaccgcaacugguccaagccccagugcaagaucaccggcuucgcccccuucuccaaggacaacuccauccgccucuccgccggcggcgacaucugggucacccgcgagcccuacgucuccugcgaccccggcaagugcuaccaguucgcccucggccagggcaccacccucaacaaccgccacuccaacgacaccguccacgaccgcacccccuaccgcacccuccucaugaacgagcucggcguccccuuccaccucggcaccaagcaggucugcaucgccugguccuccuccuccugccacgacggcaaggccuggcuccacgucugcgucaccggccacgacgagaacgccaccgccuccuucaucuacgacggccgccucgucgacuccaucggcuccugguccaagaacauccuccgcacccaggaguccgagugcgucugcaucaacggcaccugcaccgucgucaugaccgacggcuccgccuccgagcgcgccgacaccaagauccucuucaucgaggagggcaagaucguccacaucuccccccucuccggcuccgcccagcacgucgaggagugcuccugcuacccccgcuaccccggcguccgcugcgucugccgcgacaacuggaagggcuccaaccgccccaucgucgacaucaacgucaaggacuacuccaucgucuccuccuacgucugcuccggccucgucggcgacaccccccgcaagaacgacuccuccuccuccuccuacugccgcaagcccaacaacgagaagggcucccacggccucaagggcugggccuucgacgacggcaacgacgucuggaugggccgcaccaucuccgaggagcuccgcuccggcuacgagaccuucaaggucaucggcggcugguccaagcccaacuccaagcuccagaucaaccgccaggucaucgucgaccgcggcaaccgcuccggcuacuccggcaucuucuccgucgagggcaaguccugcaucaaccgcugcuucuacgucgagcucauccgcggccgcaagcaggagaccgaggucugguggaccuccaacuccaucgucgucuucugcggcaccuccggcaccuacggcaccggcuccuggcccgacggcgccgacaucaaccucaugcccaucuga

SEQ ID NO: 118129 - RNA, 1410 nt, Artificial Sequence; identical to SEQ ID NO: 111221
  derived and/or modified CDS sequence (opt2) from neuraminidase__InfluenzaA__AFH00288

SEQ ID NO: 118130 - RNA, 1410 nt, Artificial Sequence; identical to SEQ ID NO: 118053
  derived and/or modified CDS sequence (opt2) from neuraminidase__InfluenzaA__AFH00299

SEQ ID NO: 118131 - RNA, 1410 nt, Artificial Sequence
  derived and/or modified CDS sequence (opt2) from neuraminidase__InfluenzaA__AFH00310
augaaccccaaccagaagaucaucaccaucggcuccgucucccucaccaucgccaccaucugcuuccucaugcagaucgccauccucgucaccaccgucacccuccacuucaagcaguacgagugcuccuccucccccaacaaccaggucauccccugccagcccaccaucaucgagcgcaacaucaccgagaucgucuaccucaccaacaccaccaucgagaaggagaucugccccaagcucgucgaguaccgcaacugguccaagccccagugcaagaucaccggcuucgcccccuucuccaaggacaacuccauccgccucuccgccggcggcgacaucugggucacccgcgagcccuacgucuccugcgaccccggcaagugcuaccaguucgcccucggccagggcaccacccucaacaaccgccacuccaacgacaccguccacgaccgcacccccuaccgcacccuccucaugaacgagcucggcguccccuuccaccucggcaccaagcaggucugcaucgccugguccuccuccuccugccacgacggcaaggccuggcuccacgucugcgucaccggccacgacgagaacgccaccgccuccuucaucuacgacggccgccucgucgacuccaucggcuccugguccaagaacauccuccgcacccaggaguccgagugcgucugcaucaacggcaccugcaccgucgucaugaccgacggcuccgccuccgagaaggccgacaccaagauccucuucaucgaggagggcaaggucguccacaucuccccccucuccggcuccgcccagcacgucgaggagugcuccugcuacccccgcuaccccggcguccgcugcgucugccgcgacaacuggaagggcuccaaccgccccaucgucgacaucaacgucaagaacuacuccaucgucuccuccuacgucugcuccggccucgucggcgacaccccccgcaagaacgacuccuccuccuccuccuacugccgcaaccccaacaacgagaagggcucccacggcgucaagggcugggccuucgacgacggcaacgacgucuggaugggccgcaccaucuccgaggagcuccgcuccggcuacgagaccuucaaggucaucggcggcugguccacccccaacuccaagcuccagaucaaccgccaggucaucgucgacuccggcaaccgcuccggcuacuccggcaucuucuccgucgagggcaaguccugcaucaaccgcugcuucuacgucgagcucauccgcggccgcaagcaggagaccaaggucugguggaccuccaacucccucgucgucuucugcggcaccuccggcaccuacggcaccggcuccuggcccgacggcgccgacaucaaccucaugcccaucuga

SEQ ID NO: 118132 - RNA, 1410 nt, Artificial Sequence; identical to SEQ ID NO: 118131
  derived and/or modified CDS sequence (opt2) from neuraminidase__InfluenzaA__AFH00321

SEQ ID NO: 118133 - RNA, 1410 nt, Artificial Sequence
  derived and/or modified CDS sequence (opt2) from neuraminidase__InfluenzaA__AFH00332
augaaccccaaccagaagaucaucaccaucggcuccgucucccucaccaucgccaccaucugcuuccucaugcagaucgccauccucgucaccaccgucacccuccacuucaagcaguacgagugcaacuccccccccaacaaccaggucaugcucugcgagcccaccaucaucgagcgcaacaucaccgagaucgucuaccucaccaacaccaccaucgagaaggagaucugccccaagcucgccgaguaccgcaacugguccaagccccagugcaagaucaccggcuucgcccccuucuccaaggacaacuccauccgccucuccgccggcggcgacaucugggucacccgcgagcccuacgucuccugcgaccccggcaagugcuaccaguucgcccucggccagggcaccacccucaacaaccgccacuccaacgacaccguccacgaccgcacccccuaccgcacccuccucaugaacgagcucggcguccccuuccaccucggcaccaagcaggucugcaucgccugguccuccuccuccugccacgacggcaaggccuggcuccacgucugcgucaccggccacgacgagaacgccaccgccuccuucaucuacgacggccgccucgucgacuccaucggcuccugguccaagaacauccuccgcacccaggaguccgagugcgucugcaucaacggcaccugcaccgucgucaugaccgacggcuccgccuccgagcgcgccgacaccaagauccucuucaucgaggagggcaagaucguccacaucuccccccucuccggcuccgcccagcacgucgaggagugcuccugcuacccccgcuaccccggcguccgcugcgucugccgcgacaacuggaagggcuccaaccgccccaucgucgacaucaacgucaaggacuacuccaucgucuccuccuacgucugcuccggccucgucggcgacaccccccgcaagaacgacuccuccuccuccucccacugccucaaccccaacaacgaggagggcggccacggcgucaagggcugggccuucgacgacggcaacgacgucuggaugggccgcaccaucuccgagaagcuccgcuccggcuacgagaccuucaaggucaucggcggcugguccaagcccaacuccaagcuccagaucaaccgccaggucaucgucgaccgcggcaaccgcuccggcuacuccggcaucuucuccgucgagggcaagggcugcaucaaccgcugcuucuacgucgagcucauccgcggccgcaagcaggagaccgaggucugguggaccuccaacuccaucgucgucuucugcggcaccuccggcaccuacggcaccggcuccuggcccgacggcgccgacaucaaccucaugcccaucuga

SEQ ID NO: 118134 - RNA, 1410 nt, Artificial Sequence
  derived and/or modified CDS sequence (opt2) from neuraminidase__InfluenzaA__AFH00343
augaaccccaaccagaagaucaucaccaucggcuccgucucccucaccaucgccaccaucugcuuccucaugcagaucgccauccucgucaccaccgucacccuccacuucaagcaguacgagugcaacuccccccccuccaaccaggccaugcucugcgagcccaccaucaucgagcgcaacaucaccgagaucgucuaccucaccaacaccaccaucgagaaggagaucugccccaagcucgccgaguaccgcaacugguccaagccccagugcaagaucaccggcuucgcccccuucuccaaggacaacuccauccgccucuccgccggcggcgacaucugggucacccgcgagcccuacgucuccugcgaccccggcaagugcuaccaguucgcccucggccagggcaccacccucaacaaccgccacuccaacgacaccguccacgaccgcacccccuaccgcacccuccucaugaacgagcucggcguccccuuccaccucggcaccaagcaggucugcaucgccugguccuccuccuccugccacgacggcaaggccuggcuccacgucugcgucaccggccacgacgagaacgccaccgccuccuucaucuacgacggccgccucgucgacuccaucggcuccugguccaagaacauccuccgcacccaggaguccgagugcgucugcaucaacggcaccugcaccgucgucaugaccgacggcuccgccuccgagcgcgccgacaccaagauccucuucaucgaggagggcaagaucguccacaucuccccccucuccggcuccgcccagcacgucgaggagugcuccugcuacccccgcuaccccggcguccgcugcgucugccgcgacaacuggaagggcuccaaccgccccaucgucgacaucaacgucaaggacuacuccaucgucuccuccuacgucugcuccggccucgucggcgacaccccccgcaagaacgacuccuccuccuccuccuacugccgcaaccccaacaacgagaagggcucccacggcgucaagggcugggccuucgacgacggcaacgacgucuggaugggccgcaccaucuccgaggagcuccgcuccggcuacgagaccuucaaggucaucggcggcugguccaagcccaacuccaagcuccagaucaaccgccaggucaucgucgaccgcggcaaccgcuccggcuacuccggcaucuucuccgucgagggcaaguccugcaucaaccgcugcuucuacgucgagcucauccgcggccgcaagcaggagaccgaggucugguggaccuccaacuccaucgucgucuucugcggcaccuccggcaccuacggcaccggcuccuggcccgacggcgccgacaucaaccucaugcccaucuga

SEQ ID NO: 118135 - RNA, 1410 nt, Artificial Sequence
  derived and/or modified CDS sequence (opt2) from neuraminidase__InfluenzaA__AFH00354
augaaccccaaccagaagaucaucaccaucggcuccgucucccucaccaucgccaccaucugcuuccucaugcagaucgccauccucgucaccaccgucacccuccacuucaagcaguacgagugcaacuccccccccaacaaccaggucaugcucugcgagcccaccaucaucgagcgcaacaucaccaagaucgucuaccucaccaacaccaccaucgagaaggagaucugccccaagcucgccgaguaccgcaacugguccaagccccagugcaagaucaccggcuucgcccccuucuccaaggacaacuccauccgccucuccgccggcggcgacaucugggucacccgcgagcccuacgucuccugcgaccccggcaagugcuaccaguucgcccucggccagggcaccacccucaacaaccgccacuccaacgacaccguccacgaccgcacccccuaccgcacccuccucaugaacgagcucggcguccccuuccaccucggcaccaagcaggucugcaucgccugguccuccuccuccugccacgacggcaaggccuggcuccacgucugcgucaccggccacgacgagaacgccaccgccuccuucaucuacgacggccgccucgucgacuccaucggcuccugguccaagaacauccuccgcacccaggaguccgagugcgucugcaucaacggcaccugcaccgucgucaugaccgacggcuccgccuccgagcgcgccgacaccaagauccucuucaucgaggagggcaagaucguccacaucuccccccucuccggcuccgcccagcacgucgaggagugcuccugcuacccccgcuaccccggcguccgcugcgucugccgcgacaacuggaagggcuccaaccgccccaucgucgacaucaacgucaaggacuacuccaucgucuccuccuacgucugcuccggccucgucggcgacaccccccgcaagaacgacuccuccuccuccuccuacugccucaaccccaacaacgaggagggcggccacggcgucaagggcugggccuucgacgacggcaacgacgucuggaugggccgcaccaucuccgagaagcuccgcuccggcuacgagaccuucaaggucaucggcggcugguccaagcccaacuccaagcuccagaucaaccgccaggucaucgucgaccgcggcaaccgcuccggcuacuccggcaucuucuccgucgagggcaaguccugcgucaaccgcugcuucuacgucgagcucauccgcggccgcaagcaggagaccgaggucugguggaccuccaacuccaucgucgucuucugcggcaccuccggcaccuacggcaccggcuccuggcccgacggcgccgacaucaaccucaugcccaucuga

SEQ ID NO: 118136 - RNA, 1410 nt, Artificial Sequence; identical to SEQ ID NO: 111016
  derived and/or modified CDS sequence (opt2) from neuraminidase__InfluenzaA__AFH00365

SEQ ID NO: 118137 - RNA, 1410 nt, Artificial Sequence
  derived and/or modified CDS sequence (opt2) from neuraminidase__InfluenzaA__AFH00376
augaaccccaaccagaagaucaucaccaucggcuccgucucccucaccaucgccaccaucugcuuccucaugcagaucgccauccucgucaccaccgucacccuccacuucaagcagugcgagugcaacuccccccccaacaaccaggucaugcucugcgagcccaccaucaucgagcgcaacaucaccgagaucgucuaccucaccaacaccaccaucgagaaggagaucugccccaagcucgccgaguaccgcaacugguccaagccccagugcaagaucaccggcuucgcccccuucuccaaggacaacuccauccgccucuccgccggcggcgacaucugggucacccgcgagcccuacgucuccugcgaccccggcaagugcuaccaguucgcccucggccagggcaccacccucaacaaccgccacuccaacgacaccguccacgaccgcacccccuaccgcacccuccucaugaacgagcucggcguccccuuccaccucggcaccaagcaggucugcaucgccugguccuccuccuccugccacgacggcaaggccuggcuccacgucugcgucaccggccacgacgagaacgccaccgccuccuucaucuacgacggccgccucgucgacuccaucggcuccugguccaagaacauccuccgcacccaggaguccgagugcgucugcaucaacggcaccugcaccgucgucaugaccgacggcuccgccuccggccgcgccgacaccaagauccucuucaucgaggagggcaagaucguccacaucuccccccucuccggcuccgcccagcacgucgaggagugcuccugcuacccccgcuaccccggcguccgcugcgucugccgcgacaacuggaagggcuccaaccgccccaucgucgacaucaacgucaaggacuacuccaucgucuccuccuacgucugcuccggccucgucggcgacaccccccgcaagaacgacuccuccuccuccuccuacugccucaaccccaacaacgaggagggcggccacggcgucaagggcugggccuucgacgacggcaacgacgucuggaugggccgcaccaucuccgagaagcuccgcuccggcuacgagaccuucaaggucaucggcggcugguccaagcccaacuccaagcuccagaucaaccgccaggucaucgucgaccgcggcaaccgcuccggcuacuccggcaucuucuccgucgagggcaaguccugcaucaaccgcugcuucuacgucgagcucauccgcggccgcaagcaggagaccgaggucugguggaccuccaacuccaucgucgucuucugcggcaccuccggcaccuacggcaccggcuccuggcccgacggcgccgacaucaaccucaugcccaucuga

SEQ ID NO: 118138 - RNA, 1410 nt, Artificial Sequence
  derived and/or modified CDS sequence (opt2) from neuraminidase__InfluenzaA__AFH00387
augaaccccaaccagaagaucaucaccaucggcuccgucucccucaccaucgccaccaucugcuuccucaugcagaucgccauccucgucaccaccgucacccuccacuucaagcaguacgagugcaacuccccccccaacaaccaggucaugcucugcgagcccaccaucaucgagcgcaacaucaccgagaucgucuaccucaccaacaccaccaucgagaaggagaucugccccaagcucgccgaguaccgcaacugguccaagccccagugcaagaucaccggcuucgcccccuucuccaaggacaacuccauccgccucuccgccggcggcgacaucugggucacccgcgagcccuacgucuccugcgaccccgacaagugcuaccaguucgcccucggccagggcaccacccucaacaaccgccacuccaacgacaccguccacgaccgcacccccuaccgcacccuccucaugaacgagcucggcguccccuuccaccucggcaccaagcaggucugcaucgccugguccuccuccuccugccacgacggcaaggccuggcuccacgucugcgucaccggccacgacgagaacgccaccgccuccuucaucuacgacggccgccucgucgacuccaucuccuccugguccaagaacauccuccgcacccaggaguccgagugcgucugcaucaacggcaccugcaccgucgucaugaccgacggcuccgccuccgagcgcgccgacaccaagauccucuucaucgaggagggcaagaucguccacaucuccccccucuccggcuccgcccagcacgucgaggagugcuccugcuacccccgcuaccccggcguccgcugcgucugccgcgacaacuggaagggcuccaaccgccccaucgucgacaucaacgucaaggacuacuccaucgucuccuccuacgucugcuccggccucgucggcgacaccccccgcaagaacgacuccuccuccuccuccuacugccucaaccccaacaacgaggagggcggccacggcgucaagggcugggccuucgacgacggcaacgacgucuggaugggccgcaccaucuccgagaagcuccgcuccggcuacgagaccuucaaggucaucggcggcugguccaagcccaacuccaagcuccagaucaaccgccaggucaucgucgaccgcggcaaccgcuccggcuacuccggcaucuucuccgucgagggcaaguccugcgucaaccgcugcuucuacgucgagcucauccgcggccgcaagcaggagaccgaggucugguggaccuccaacuccaucgucgucuucugcggcaccuccggcaccuacggcaccggcuccuggcccgacggcgccgacaucaaccucaugcccaucuga

SEQ ID NO: 118139 - RNA, 1410 nt, Artificial Sequence
  derived and/or modified CDS sequence (opt2) from neuraminidase__InfluenzaA__AFH00398
augaaccccaaccagaagaucaucaccaucggcuccgucucccucaccaucgccaccaucugcuuccucaugcagaucgccauccucgucaccaccgucacccuccacuucaagcaguacgagugcaacuccccccccaacaaccaggucaugcucugcgagcccaccaucaucgagcgcaacaucaccgagaucgucuaccucaccaacaccaccaucgagaaggagaucugccccaagcucgccgaguaccgcaacugguccaagccccagugcaagaucaccggcuucgcccccuucuccaaggacaacuccauccgccucuccgccggcggcgacaucugggucacccgcgagcccuacgucuccugcgaccccggcaagugcuaccaguucgcccucggccagggcaccacccucaacaaccgccacuccaacgacaccguccacgaccgcacccccuaccgcacccuccucaugaacgagcucggcguccccuuccaccucggcaccaagcaggucugcaucgccugguccuccuccuccugccacgacggcaaggccuggcuccacgucugcgucaccggccacgacgagaacgccaccgccuccuucaucuacgacggccgccucgucgacuccaucggcuccugguccaagaacauccuccgcacccaggaguccgagugcgucugcaucaacggcaccugcaccgucgucaugaccgacggcuccgccuccgagcgcgccgacaccaagauccucuucaucgaggagggcaagaucguccacaucuccccccucuccggcuccgcccagcacgucgaggagugcuccugcuacccccgcuaccccggcguccgcugcgucugccgcgacaacuggaagggcuccaaccgccccaucgucgacaucaacgucaaggacuacuccaucgucuccuccuacgucugcuccggccucgucggcgacaccccccgcaagaacgacuccuccuccuccuccuacugccucaaccccaacaacgaggagggcggccacggcgucaagggcugggccuucgacgacggcaacgacgucuggaugggccgcaccaucuccgagaagcuccgcuccggcuacgagaccuucaaggucaucggcggcugguccaagcccaacuccaagcuccagaucaaccgccaggucaucgucgaccgcggcaaccgcuccggcuacuccggcaucuucuccgucgagggcaaguccugcgucaaccgcugcuucuacgucgagcucauccgcggccgcaagcaggagaccgaggucugguggaccuccaacuccaucgucgucuucugcggcaccuccggcaccuacggcgccggcuccuggcccgacggcgccgacaucaaccucaugcccaucuga

SEQ ID NO: 118140 - RNA, 1410 nt, Artificial Sequence
  derived and/or modified CDS sequence (opt2) from neuraminidase__InfluenzaA__AFH00409
augaaccccaaccagaagaucaucaccaucggcuccgucucccucaccaucgccaccaucugcuuccucaugcagaucgccauccucgucaccaccgucacccuccacuucaagcaguacgagugcaacuccccccccaacaaccaggucaugcucugcgagcccaccaucaucgagcgcaacaucaccgagaucgucuaccucaccaacaccaccaucgagaaggagaucugccccaagcucgccgaguaccgcaacugguccaagccccagugcaagaucaccggcuucgcccccuucuccaaggacaacuccauccgccucuccgccggcggcgacaucugggucacccgcgagcccuacgucuccugcgaccccggcaagugcuaccaguucgcccucggccagggcaccacccucaacaaccgccacuccaacgacaccguccacgaccgcacccccuaccgcacccuccucaugaacgagcucggcguccccuuccaccucggcaccaagcaggucugcaucgccugguccuccuccuccugccacgacggcaaggccuggcuccacgucugcgucaccggccacaacgagaacgccaccgccuccuucaucuacgacggccgccucgucgacuccaucggcuccugguccaagaacauccuccgcacccaggaguccgagugcgucugcaucaacggcaccugcaccgucgucaugaccgacggcuccgccuccggccgcgccgacaccaagauccucuucaucgaggagggcaagaucguccacaucuccccccucuccggcuccgcccagcacgucgaggagugcuccugcuacccccgcuaccccggcguccgcugcgucugccgcgacaacuggaagggcuccaaccgccccaucgucgacaucaacgucaaggacuacuccaucgucuccuccuacgucugcuccggccucgucggcgacaccccccgcaagaacgacuccuccuccuccuccuacugccucaaccccaacaacgaggagggcggccacggcgucaagggcugggccuucgacgacggcaacgacgucuggaugggccgcaccaucuccgagaagcuccgcuccggcuacgagaccuucaaggucaucggcggcugguccaagcccaacuccaagcuccagaucaaccgccaggucaucgucgaccgcggcaaccgcuccggcuacuccggcaucuucuccgucgagggcaaguccugcaucaaccgcugcuucuacgucgagcucauccgcggccgcaagcaggagaccgaggucugguggaccuccaacuccaucgucgucuucugcggcaccuccggcaccuacggcaccggcuccuggcccgacggcgccgacaucaaccucaugcccaucuga

SEQ ID NO: 118141 - RNA, 1410 nt, Artificial Sequence; identical to SEQ ID NO: 111016
  derived and/or modified CDS sequence (opt2) from neuraminidase__InfluenzaA__AFH00420

SEQ ID NO: 118142 - RNA, 1410 nt, Artificial Sequence; identical to SEQ ID NO: 111149
  derived and/or modified CDS sequence (opt2) from neuraminidase__InfluenzaA__AFH00431

SEQ ID NO: 118143 - RNA, 1410 nt, Artificial Sequence
  derived and/or modified CDS sequence (opt2) from neuraminidase__InfluenzaA__AFH00442
augaaccccaaccagaagaucaucaccaucggcuccgucucccucaccaucgccaccaucugcuuccucaugcagaucgccauccucgucaucaccgucacccuccacuucaagcaguacgagugcaacuccccccccaacaaccaggucaugcucugcgagcccaccaucaucgagcgcaacaucaccgagaucgucuaccucaccaacaccaccaucgagaaggagaucugccccaagcucgccgaguaccgcaacugguccaagccccagugcaagaucaccggcuucgcccccuucuccaaggacaacuccauccgccucuccgccggcggcgacaucugggucacccgcgagcccuacgucuccugcgaccccggcaagugcuaccaguucgcccucggccagggcaccacccucaacaaccgccacuccaacgacaccguccacgaccgcacccccuaccgcacccuccucaugaacgagcucggcguccccuuccaccucggcaccaagcaggucugcaucgccugguccuccuccuccugccacgacggcaaggccuggcuccacgucugcgucaccggccacaacgagaacgccaccgccuccuucaucuacgacggccgccucgucgacuccaucggcuccugguccaagaacauccuccgcacccaggaguccgagugcgucugcaucaacggcaccugcaccgucgucaugaccgacggcuccgccuccggccgcgccgacaccaagauccucuucaucgaggagggcaagaucguccacaucuccccccucuccggcuccgcccagcacgucgaggagugcuccugcuacccccgcuaccccggcguccgcugcgucugccgcgacaacuggaagggcuccaaccgccccaucgucgacaucaacgucaaggacuacuccaucgucuccuccuacgucugcuccggccucgucggcgacaccccccgcaagaacgacuccuccuccuccucccacugccucaaccccaacaacgaggagggcggccacggcgucaagggcugggccuucgacgacggcaacgacgucuggaugggccgcaccaucuccgagaagcuccgcuccggcuacgagaccuucaaggucaucggcggcugguccaagcccaacuccaagcuccagaucaaccgccaggucaucgucgaccgcggcaaccgcuccggcuacuccggcaucuucuccgucgagggcaaguccugcaucaaccgcugcuucuacgucgagcucauccgcggccgcaagcaggagaccgaggucugguggaccuccaacuccaucgucgucuucugcggcaccuccggcaccuacggcaccggcuccuggcccgacggcgccgacaucaaccucaugcccaucuga

SEQ ID NO: 118144 - RNA, 1410 nt, Artificial Sequence
  derived and/or modified CDS sequence (opt2) from neuraminidase__InfluenzaA__AFH00453
augaaccccaaccagaagaucaucaccaucggcuccgucucccucaccaucgccaccaucugcuuccucaugcagaucgccauccucgucaccaccgucacccuccacuucaagcaguacgagugcaacuccccccccaacaaccaggucaugcucugcgagcccaccaucaucgagcgcaacaucaccgaggucgucuaccucaccaacaccaccaucgagaaggagaucugccccaagcucgccgaguaccgcaacugguccaagccccagugcaagaucaccggcuucgcccccuucuccaaggacaacuccauccgccucuccgccggcggcgacaucugggucacccgcgagcccuacgucuccugcgaccccgacaagugcuaccaguucgcccucggccagggcaccacccucaacaaccgccacuccaacgacaucguccacgaccgcacccccuaccgcacccuccucaugaacgagcucggcguccccuuccaccucggcaccaagcaggucugcaucgccugguccuccuccuccugccacgacggcaaggccuggcuccacgucugcgucaccggccacgacgagaacgccaccgccuccuucaucuacgacggccgccucgucgacuccaucggcuccugguccaagaagauccuccgcacccaggaguccgagugcgucugcaucaacggcaccugcaccgucgucaugaccgacggcuccgccuccggccgcgccgacaccaagauccucuucaucgaggagggcaagaucguccacaucuccccccucuccggcuccgcccagcacgucgaggagugcuccugcuacccccgcuaccccggcguccgcugcgucugccgcgacaacuggaagggcuccaaccgccccaucgucgacaucaacgucaaggacuacuccaucgucuccuccuacgucugcuccggccucgucggcgacaccccccgcaagaacgacuccuccuccuccucccacugccucaaccccaacaacgaggagggcggccacggcgucaagggcugggccuucgacgacggcaacgacgucuggaugggccgcaccaucuccgagaagcuccgcuccggcuacgagaccuucaaggucaucggcggcugguccaagcccaacuccaagcuccagaucaaccgccaggucaucgucgaccgcggcaaccgcuccggcuacuccggcaucuucuccgucgagggcaaguccugcaucaaccgcugcuucuacgucgagcucauccgcggccgcaagcaggagaccgaggucugguggaccuccaacuccaucgucgucuucugcggcaccuccggcaccuacggcaccggcuccuggcccgacggcgccgacaucaaccucaugcccaucuga

SEQ ID NO: 118145 - RNA, 1410 nt, Artificial Sequence
  derived and/or modified CDS sequence (opt2) from neuraminidase__InfluenzaA__AFH00464
augaaccccaaccagaagaucaucaccaucggcuccgucucccucaccaucgccaccaucugcuuccucaugcagaucgccauccucgucaccaccgucacccuccacuucaagcaguacgagugcaacuccccccccaacaaccaggucaugcucugcgagcccaccaucaucgagcgcaacaucaccgagaucgucuaccucaccaacaccaccaucgagaaggagaucugccccaagcucgccgaguaccgcaacugguccaagccccagugcaagaucaccggcuucgcccccuucuccaaggacaacuccauccgccucuccgccggcggcgacaucugggucacccgcgagcccuacgucuccugcgaccccggcaagugcuaccaguucgcccucggccagggcaccacccucaagaaccgccacuccaacgacaccguccacgaccgcacccccuaccgcacccuccucaugaacgagcucggcguccccuuccaccucggcaccaagcaggucugcaucgccugguccuccuccuccugccacgacggcaaggccuggcuccacgucugcgucaccggccacgacgagaacgccaccgccuccuucaucuacggcggccgccucgucgacuccaucggcuccugguccaagaagauccuccgcacccaggaguccgagugcgucugcaucaacggcaccugcaccgucgucaugaccgacggcuccgccuccggccgcgccgacaccaagauccucuucaucgaggagggcaagaucguccacaucuccccccucuccggcuccgcccagcacgucgaggagugcuccugcuacccccgcuaccccggcguccgcugcgucugccgcgacaacuggaagggcuccaaccgccccaucgucgacaucaacgucaaggacuacuccaucgucuccuccuacgucugcuccggccucgucggcgacaccccccgcaagaacgacuccuccuccuccuccuacugccucaaccccaacaacgaggagggcggccacggcgucaagggcugggccuucgacgacggcaacgacgucuggaugggccgcaccaucuccgagaagcuccgcuccggcuacgagaccuucaaggucaucggcggcugguccaagcccaacuccaagcuccagaucaaccgccaggucaucgucgaccgcggcaaccgcuccggcuacuccggcaucuucuccgucgagggcaaguccugcaucaaccgcugcuucuacgucgagcucauccgcggccgcaagcaggagaccgaggucugguggaccuccaacuccaucgucgucuucugcggcaccuccggcaccuacggcaccggcuccuggcccgacggcgccgacaucaaccucaugcccaucuga

SEQ ID NO: 118146 - RNA, 1410 nt, Artificial Sequence
  derived and/or modified CDS sequence (opt2) from neuraminidase__InfluenzaA__AFH00475
augaaccccaaccagaagaucaucaccaucggcuccgucucccucaccaucgccaccaucugcuuccucaugcagaucgccauccucgucaccaccgucacccuccacuucaagcaguacgagugcaacuccccccccaacaaccaggucaugcucugcgagcccaccaucaucgagcgcaacaucaccgagaucgucuaccucaccaacaccaccaucgagaaggagaucugccccaagcucgccgaguaccgcaacugguccaagccccagugcaagaucaccggcuucgcccccuucuccaaggacaacuccauccgccucuccgccggcggcgacaucugggucacccgcgagcccuacgucuccugcaaccccgacaagugcuaccaguucgcccucggccagggcaccacccucaacaaccgccacuccaacgacaccguccacgaccgcacccccuaccgcacccuccucaugaacgagcucggcguccccuuccaccucggcaccaagcaggucugcaucgccugguccuccuccuccugccacgacggcaaggccuggcuccacgucugcgucaccggccacgacgagaacgccaccgccuccuucaucuacgacggccgccucgucgacuccaucggcuccugguccaagaagauccuccgcacccaggaguccgagugcgucugcaucaacggcaccugcaccgucgucaugaccgacggcuccgccuccggccgcgccgacaccaagauccucuucaucgaggagggcaagaucguccacaucuccccccucuccggcuccgcccagcacgucgaggagugcuccugcuacccccgcuaccccggcguccgcugcgucugccgcgacaacuggaagggcuccaaccgccccaucgucgacaucaacgucaaggacuacuccaucgucuccuccuacgucugcuccggccucgucggcgacaccccccgcaagaacgacuccuccuccuccucccacugccucaaccccaacaacgaggagggcggccacggcgucaagggcugggccuucgacgacggcaacgacgucuggaugggccgcaccaucuccgagaagcuccgcuccggcuacgagaccuucaaggucaucgagggcugguccaagcccaacuccaagcuccagaucaaccgccaggucaucgucgaccgcggcaaccgcuccggcuacuccggcaucuucuccgucgagggcaaguccugcaucaaccgcugcuucuacgucgagcucauccgcggccgcaagcaggagaccgaggucugguggaccuccaacuccaucgucgucuucugcggcaccuccggcaccuacggcaccggcuccuggcccgacggcgccgacaucaaccucaugcccaucuga

SEQ ID NO: 118147 - RNA, 1410 nt, Artificial Sequence
  derived and/or modified CDS sequence (opt2) from neuraminidase__InfluenzaA__AFH00486
augaaccccaaccagaagaucaucaccaucggcuccgucucccucaccaucgccaccaucugcuuccucaugcagaucgccauccucgucaccaccgucacccuccacuucaagcaguacgagugcaacuccccccccaacaaccaggucaugcucugcgagcccaccaucaucgagcgcaacaucaccgagaucgucuaccucaccaacaccaccaucgagaaggagaucugccccaagcucgccgaguaccgcaacugguccaagccccagugcaagaucaccggcuucgcccccuucuccaaggacaacuccauccgccucuccgccggcggcgacaucugggucacccgcgagcccuacgucuccugcgaccccgacaagugcuaccaguucgcccucggccagggcaccacccucaacaaccgccacuccaacgacaccguccacgaccgcacccccuaccgcacccuccucaugaacgagcucggcguccccuuccaccucggcaccaagcaggucugcaucgccugguccuccuccuccugccacgacggcaaggccuggcuccacgucugcgucaccggccacgacgagaacgccaccgccuccuucaucuacgacggccgccucgucgacuccaucggcuccugguccaagaagauccuccgcacccaggaguccgagugcgucugcaucaacggcaccugcaccgucgucaugaccgacggcuccgccuccggccgcgccgacaccaagauccucuucaucgaggagggcaagaucguccacaucuccccccuccucggcuccgcccagcacgucgaggagugcuccugcuacccccgcuaccccggcguccgcugcgucugccgcgacaacuggaagggcuccaaccgccccaucgucgacaucaacgucaaggacuacuccaucgucuccuccuacgucugcuccggccucgucggcgacaccccccgcaagaacgacuccuccuccuccucccacugccucaaccccaacaacgaggagggcggccacggcgucaagggcugggccuucgacgacggcaacgacgucuggaugggccgcaccaucuccgagaagcuccgcuccggcuacgagaccuucaaggucaucgagggcugguccaagcccaacuccaagcuccagaucaaccgccaggucaucgucgaccgcggcaaccgcuccggcuacuccggcaucuucuccgucgagggcaaguccugcaucaaccgcugcuucuacgucgagcucauccgcggccgcaagcaggagaccgaggucugguggaccuccaacuccaucgucgucuucugcggcaccuccggcaccuacggcaccggcuccuggcccgacggcgccgacaucaaccucaugcccaucuga

SEQ ID NO: 118148 - RNA, 1410 nt, Artificial Sequence
  derived and/or modified CDS sequence (opt2) from neuraminidase__InfluenzaA__AFH00497
augaaccccaaccagaagaucaucaccaucggcuccgucucccucaccaucgccaccaucugcuuccucaugcagaucgccauccucgucaccaccgucacccuccacuucaagcaguacgagugcaacuccccccccaacaaccaggucaugcucugcgagcccaccaucaucgagcgcaacaucaccgagaucgucuaccucaccaacaccaccaucaagaaggagaucugccccaagcucgccgaguaccgcaacugguccaagccccagugcaagaucaccggcuucgcccccuucuccaaggacaacuccauccgccucuccgccggcggcgacaucugggucacccgcgagcccuacgucuccugcgaccccggcaagugcuaccaguucgcccucggccagggcaccacccucaacaaccgccacuccaacgacaccguccacgaccgcacccccuaccgcacccuccucaugaacgagcucggcguccccuuccaccucggcaccaagcaggucugcaucgccugguccuccuccuccugccacgacggcaaggccuggcuccacgucugcgucaccggccacgacgagaacgccaccgccuccuucaucuacgacggccgccucgucgacuccaucggcuccugguccaagaacauccuccgcacccaggaguccgagugcgucugcaucaacggcaccugcaccgucgucaugaccgacggcuccgccuccgagcgcgccgacaccaagauccucuucaucgaggagggcaagaucguccacaucuccccccucuccggcuccgcccagcacgucgaggagugcuccugcuacccccgcuaccccggcguccgcugcgucugccgcgacaacuggaagggcuccaaccgccccaucgucgacaucaacgucaaggacuacuccaucgucuccuccuacgucugcuccggccucgucggcgacaccccccgcaagaacgacuccuccuccuccuccuacugcuggaaccccaacaacgagaagggcggccacggcgucaagggcugggccuucgacgacggcaacgacgucuggaugggccgcaccaucuccgaggagcuccgcuccggcuacgagaccuucaaggucaucggcggcugguccaagcccaacuccaagcuccagaucaaccgccaggucaucgucgaccgcggcaaccgcuccggcuacuccggcaucuucuccgucgagggcaaguccugcaucaaccgcugcuucuacgucgagcucauccgcggccgcaagcaggagaccgaggucugguggaccuccaacuccaucgucgucuucugcggcaccuccggcaccuacggcaccggcuccuggcccgacggcgccgacaucaaccucaugcccaucuga

SEQ ID NO: 118149 - RNA, 1410 nt, Artificial Sequence
  derived and/or modified CDS sequence (opt2) from neuraminidase__InfluenzaA__AFH00508
augaaccccaaccagaagaucaucaccaucggcuccgucucccucaccaucgccaccaucugcuuccucaugcagaucgccauccucgucaucaccgucacccuccacuucaagcaguacgagugcaacuccccccccaacaaccaggucaugcucugcgagcccaccaucaucgagcgcaacaucaccgagaucgucuaccucaccaacaccaccaucgagaaggagaucugccccaagcucgccgaguaccgcaacugguccaagccccagugcaagaucaccggcuucgcccccuucuccaaggacaacuccauccgccucuccgccggcggcgacaucugggucacccgcgagcccuacgucuccugcgaccccggcaagugcuaccaguucgcccucggccagggcaccacccucaacaaccgccacuccaacgacaccguccacgaccgcacccccuaccgcacccuccucaugaacgagcucggcguccccuuccaccucggcaccaagcaggucugcaucgccugguccuccuccuccugccacgacggcaaggccuggcuccacgucugcgucaccggccacaacgagaacgccaccgccuccuucaucuacgacggccgccucgucgacuccaucggcuccugguccaagaacauccuccgcacccaggaguccgagugcgucugcaucaacggcaccugcaccgucgucaugaccgacggcuccgccuccggccgcgccgacaccaagauccucuucaucgaggagggcaagaucguccacaucuccccccucuccggcuccgcccagcacgucgaggagugcuccugcuacccccgcuaccccggcguccgcugcgucugccgcgacaacuggaagggcuccaaccgccccaucgucgacaucaacgucaaggacuacuccaucgucuccuccuacgucugcuccggccucgucggcgacaccccccgcaagaacgacuccuccuccuccucccacugccucaaccccaacaacgaggagggcggccacggcgucaagggcugggccuucgacgacggcaacgacgucuggaugggccgcaccaucuccgagaagcuccgcuccggcuacgagaccuuccgcgucaucggcggcugguccaagcccaacuccaagcuccagaucaaccgccaggucaucgucgaccgcggcaaccgcuccggcuacuccggcaucuucuccgucgagggcaaguccugcaucaaccgcugcuucuacgucgagcucauccgcggccgcaagcaggagaccgaggucugguggaccuccaacuccaucgucgucuucugcggcaccuccggcaccuacggcaccggcuccuggcccgacggcgccgacaucaaccucaugcccaucuga

SEQ ID NO: 118150 - RNA, 1410 nt, Artificial Sequence
  derived and/or modified CDS sequence (opt2) from neuraminidase__InfluenzaA__AFH00519
augaaccccaaccagaagaucaucaccaucggcuccgucucccucaccaucgccaccaugugcuuccucaugcagaucgccauccucgucaccaccgucacccuccacuucaagcaguacgagugcaacuccccccccaacaaccaggucaugcucugcgagcccaccaucaucgagcgcaacaucaccgagaucgucuaccucaccaacaccaccaucgagaaggagaucugccccaagcucgccgaguaccgcaacugguccaagccccagugcaagaucaccggcuucgcccccuucuccaaggacaacuccauccgccucuccgccggcggcgacaucugggucacccgcgagcccuacgucuccugcgaccccggcaagugcuaccaguucgcccucggccagggcaccacccucaacaacggccacuccaacgacaccguccacgaccgcacccccuaccgcacccuccucaugaacgagcucggcguccccuuccaccucggcaccaagcaggucugcaucgccugguccuccuccuccugccacgacggcaaggccuggcuccacgucugcgucaccggccacgacgagaacgccaccgccuccuucaucuacgacggccgccucgucgacuccaucggcuccugguccaagaacauccuccgcacccaggaguccgagugcgucugcaucaacggcaccugcaccgucgucaugaccgacggcuccgccuccggccgcgccgacaccaagauccucuucaucgaggagggcaagaucguccacaucuccccccucuccggcuccgcccagcacgucgaggagugcuccugcuacccccgcuaccccggcguccgcugcgucugccgcgacaacuggaagggcuccaaccgccccaucgucgacaucaacgucaaggacuacuccaucgucuccuccuacgucugcuccggccucgucggcgacaccccccgcaagaacgacuccuccuccuccucccacugccucaaccccaacaacgaggagggcggccacggcgucaagggcugggccuucgacgacggcaacgacgucuggaugggccgcaccaucuccgagaagcuccgcuccggcuacgagaccuucaaggucaucggcggcugguccaagcccaacuccaagcuccagaucaaccgccaggucaucgucgaccgcggcaaccgcuccggcuacuccggcaucuucuccgucgagggcaaguccugcaucaaccgcugcuucuacgucgagcucauccgcggccgcaagcaggagaccgaggucugguggaccuccaacuccaucgucgucuucugcggcaccuccggcaccuacggcaccggcuccuggcccgacggcgccgacaucaaccucaugcccaucuga

SEQ ID NO: 118151 - RNA, 1410 nt, Artificial Sequence; identical to SEQ ID NO: 110609
  derived and/or modified CDS sequence (opt2) from neuraminidase__InfluenzaA__AFH00530

SEQ ID NO: 118152 - RNA, 1410 nt, Artificial Sequence; identical to SEQ ID NO: 110609
  derived and/or modified CDS sequence (opt2) from neuraminidase__InfluenzaA__AFH00541

SEQ ID NO: 118153 - RNA, 1410 nt, Artificial Sequence
  derived and/or modified CDS sequence (opt2) from neuraminidase__InfluenzaA__AFH00552
augaaccccaaccagaagaucaucaccaucggcuccgucucccucaccaucgccaccaucugcuuccucaugcagaucgccauccucgucaccaccgucacccuccacuucaagcaguacgagugcaacucccuccccaacaaccaggucaugcucugcgagcccaccaucaucgagcgcaacaucaccgagaucgucuaccucaccaacaccaccaucgagaaggagaucugccccaagcucgccgaguaccgcaacugguccaagccccagugcaagaucaccggcuucgcccccuucuccaaggacaacuccauccgccucuccgccggcggcgacaucugggucacccgcgagcccuacgucuccugcgaccccgacaagugcuaccaguucgcccucggccagggcaccacccucaacaaccgccacuccaacgacaccguccacgaccgcacccccuaccgcacccuccucaugaacgagcucggcguccccuuccaccucggcaccaagcaggucugcaucgccugguccuccuccuccugccacgacggcaaggccuggcuccacgucugcgucaccggccacgacgagaacgccaccgccuccuucaucuacgacggccgccucgucgacuccaucggcuccugguccaagaagauccuccgcacccaggaguccgagugcgucugcaucaacggcaccugcaccgucgucaugaccgacggcuccgccuccggccgcgccgacaccaagauccucuucaucgaggagggcaagaucauccacaucucccagcucuccggcuccacccagcacgucgaggagugcuccugcuacccccgcuaccccggcguccgcugcgucugccgcgacaacuggaagggcuccaaccgccccaucgucgacaucaacgucaaggacuacuccaucgucuccuccuacgucugcuccggccucgucggcgacaccccccgcaagaacgacuccuccuccuccucccacugccucaaccccaacaacgaggagggcggccacggcgucaagggcugggccuucgacgacggcaacgacgucuggaugggccgcaccaucuccgagaaguuccgcuccggcuacgagaccuucaaggucaucgagggcugguccaagcccaacuccaagcuccagaucaaccgccaggucaucgucgaccgcgacaaccgcuccggcuacuccggcaucuucuccgucgagggcaaguccugcaucaaccgcugcuucuacgucgagcucauccgcggccgcaagcaggagaccgaggucugguggaccuccaacuccaucgucgucuucugcggcaccuccggcaccuacggcaccggcuccuggcccgacggcgccgacaucaaccucaugcccaucuga

SEQ ID NO: 118154 - RNA, 1410 nt, Artificial Sequence
  derived and/or modified CDS sequence (opt2) from neuraminidase__InfluenzaA__AFH00563
augaaccccaaccagaagaucaucaccaucggcuccgucucccucaccaucgccaccaucugcuuccucaugcagaucgccauccucgucaccaccgucacccuccacuucaagcaguacgagugcaacuccccccccaacaaccaggucaugcucugcgagcccaccaucaucgagcgcaacaucaccgagaucgucuaccucaccaacaccaccaucgagaaggagaucugccccaagcucgccgaguaccgcaacugguccaagccccagugcaacaucaccggcuucgcccccuucuccaaggacaacuccauccgccucuccgccggcggcgacaucugggucacccgcgagcccuacgucuccugcgaccccgacaagugcuaccaguucgcccucggccagggcaccacccucaacaacggccacuccaacgacaccguccacgagcgcacccccuaccgcacccuccucaugaacgagcucggcguccccuuccaccucggcaccaagcaggucugcaucgccugguccuccuccuccugccacgacggcaaggccuggcuccacgucugcgucaccggcgacgacgagaacgccaccgccuccuucaucuacaacggccgccucgucgacuccaucggcuccugguccaagaagauccuccgcacccaggaguccgagugcgucugcaucaacggcaccugcaccgucgucaugaccgacggcuccgccuccggcaaggccgacaccaagauccucuucaucgaggagggcaagaucguccacaccuccccccucuccggcuccgcccagcacgucgaggagugcuccugcuacccccgcuaccccggcguccgcugcgucugccgcgacaacuggaagggcuccaaccgccccaucgucgacaucaacgucaaggacuacuccaucgucuccuccuacgucugcuccggccucgucggcgacaccccccgcaagaacgacuccuccuccuccucccacugccucgaccccaacaacgaggagggcggccacggcgucaagggcugggccuucgacgacggcaacgacgucuggaugggccgcaccaucuccgagaagcuccgcuccggcuacgagaccuucaaggucaucgagggcugguccaagcccaacuccaagcuccagaucaaccgccaggucaucgucgaccgcggcaaccgcuccggcuacuccggcaucuucuccgucgagggcaaguccugcaucaaccgcugcuucuacgucgagcucauccgcggccgcaagcaggagaccgagguccucuggaccuccaacuccaucgucgucuucugcggcaccuccggcaccuacggcaccggcuccuggcccgacggcgccgacaucaaccucaugcccaucuga

SEQ ID NO: 118155 - RNA, 1410 nt, Artificial Sequence
  derived and/or modified CDS sequence (opt2) from neuraminidase__InfluenzaA__AFH00574
augaaccccaaccagaagaucaucaccaucggcuccgucucccucaccaucgccaccaucugcuuccucaugcagaucgccauccucgucaccaccgucacccuccacuucaagcaguacgagugcaacuccccccccaacaaccaggucaugcucugcgagcccaagaucaucgagcgcaacaucaccgagaucgucuaccucaacaacaccaccaucgagaaggagaucugccccaagcucgccgaguaccgcaacugguccaagccccagugcaacaucaccggcuucgcccccuucuccaaggacaacuccauccgccucuccgccggcggcgacaucugggucacccgcgagcccuacgucuccugcgaccccgacaagugcuaccaguucgcccucggccagggcaccacccucaacaacggccacuccaacgacaccguccacgaccgcacccccuaccgcacccuccucaugaacgagcucggcguccccuuccaccucggcaccaagcaggucugcaucgccugguccuccuccuccugccacgacggcaaggccuggcuccacgucugcgucaccggcgacgacgagaacgccaccgccuccuucaucuacaacggccgccucgucgacuccaucggcuccugguccaagaagauccuccgcacccaggaguccgagugcgucugcaucaacggcaccugcaccgucgucaugaccgacggcuccgccuccggcaaggccgacaccaagauccucuucaucgaggagggcaagaucguccacaccucccuccucuccggcuccgcccagcacgucgaggagugcuccugcuacccccgcuaccccggcguccgcugcgucugccgcgacaacuggaagggcuccaaccgccccaucgucgacaucaacgucaaggacuacuccaucgucuccuccuacgucugcuccggccucgucggcgacaccccccgcaagaacgacuccuccuccuccucccacugccucgaccccaacaacgaggagggcggccacggcgucaagggcugggccuucgacgacggcaacgacgucuggaugggccgcaccaucuccgagaagcuccgcuccggcuacgagaccuucaaggucaucgagggcugguccaagcccaacuccaagcuccagaucaaccgccaggucaucgucgaccgcggcaaccgcuccggcuacuccggcaucuucuccgucgagggcaaguccugcaucaaccgcugcuucuacgucgagcucauccgcggccgcaagcaggagaccgagguccucuggaccuccaacuccaucgucgucuucugcggcaccuccggcaccuacggcaccggcuccuggcccgacggcgccgacaucaaccucaugcccaucuga

SEQ ID NO: 118156 - RNA, 1410 nt, Artificial Sequence
  derived and/or modified CDS sequence (opt2) from neuraminidase__InfluenzaA__AFH00585
augaaccccaaccagaagaucaucaccaucggcuccgucucccucaccaucgccaccaucugcuuccucaugcagaucgccauccucgucaccaccgucacccuccacuucaagcaguacgagugcaacuccccccccaacaaccaggucaugcucugcgagcccaccaucaucgagcgcaacaucaccgagaucgucuaccucaccaacaccaccaucaagaaggagaucugccccaagcucgccgaguaccgcaacugguccaagccccagugcaacaucaccggcuucgcccccuucuccaaggacaacuccauccgccucuccgccggcggcgacaucugggucacccgcgagcccuacgucuccugcgaccccgacaagugcuaccaguucgcccucggccagggcaccacccucaacaaccgccacuccaacgacaagguccacgaccgcacccccuaccgcacccuccucaugaacgagcucggcguccccuuccaccucggcaccaagcaggucugcaucgccugguccuccuccuccugccacgacggcaaggccuggcuccacgucugcgucaccggcgacgacgagaacgccaccgccuccuucaucuacaacggccgccucgucgacuccaucggcuccugguccaagaagauccuccgcacccaggaguccgagugcgucugcaucaacggcaccugcaccgucgucaugaccgacggcuccgccuccggcaaggccgacaccaagauccucuucaucaaggagggcaagaucguccacaccuccucccucuccggcuccgcccagcacgucgaggagugcuccugcuacccccgcuaccccggcguccgcugcgucugccgcgacaacuggaagggcuccaaccgccccaucgucgacaucaacgucaaggacuacuccaucgucuccuccuacgucugcuccggccucgucggcgacaccccccgcaagaacgacuccuccuccuccucccacugccucgaccccaacaacgaggagggcggccacggcgucaagggcugggccuucgacgacggcaacgacgucuggaugggccgcaccaucuccgagaagcuccgcuccggcuacgagaccuucaaggucaucgagggcugguccaaggccaacuccaagcuccagaucaaccgccaggucaucgucgaccgcggcaaccgcuccggcuacuccggcaucuucuccgucgaguccaaguccugcaucaaccgcugcuucuacgucgagcucauccgcggccgcaagcaggagaccgagguccucuggaccuccaacuccaucgucgucuucugcggcaccuccggcaccuacggcaccggcuccuggcccgacggcgccgacaucaaccucaugcccaucuga

SEQ ID NO: 118157 - RNA, 1410 nt, Artificial Sequence; identical to SEQ ID NO: 110744
  derived and/or modified CDS sequence (opt2) from neuraminidase__InfluenzaA__AFH00596

SEQ ID NO: 118158 - RNA, 1410 nt, Artificial Sequence
  derived and/or modified CDS sequence (opt2) from neuraminidase__InfluenzaA__AFH00607
augaaccccaaccagaagaucaucaccaucggcuucgucuucuucaccaucgccaccaucugcuuccucaugcagaucgccauccucgucaccaccgucacccuccacuucaagcaguacgagugcaaccccccccccaacaaccaggucaugcucugcgagcccaccaucaucgagcgcaacaucaccgagaucgucuaccucaccaacaccaccaucgagaaggagaucugccccaagcucgccgaguaccgcaacugguccaagccccagugcaacaucaccggcuucgcccccuucuccaaggacaacuccauccgccucuccgccggcggcgacaucugggucacccgcgagcccuacgucuccugcgaccccgacaagugcuaccaguucgcccucggccagggcaccacccucaacaacggccacuccaacgacaccguccacgaccgcacccccuaccgcacccuccucaugaacgagcucggcguccccuuccaccucggcacccgccaggucugcaucgccugguccuccuccuccugccacgacggcaaggccuggcuccacgucugcgucaccggcgacgacgagaacgccaccgccuccuucaucuacaacggccgccucgucgacuccaucggcuccugguccaagaagauccuccgcacccaggaguccgagugcgucugcaucaacggcaccugcaccgucgucaugaccgacggcuccgccuccggcaaggccgacaccaagauccucuucaucgaggagggcaagaucguccacaucuccacccucuccggcuccgcccagcacgucgaggagugcuccugcuacccccgcuaccccggcguccgcugcgucugccgcgacaacuggaagggcuccaaccgccccaucgucgacaucaacgucaaggacuacuccaucgucuccuccuacgucugcuccggccucgucggcgacaccccccgcaagaacgacuccuucuccuccucccacugccucgaccccaacaacgaggagggcggccacggcgucaagggcugggccuucgacgacggcaacgacgucuggaugggccgcaccaucuccgagaagcuccgcuccggcuacgagaccuucaaggucaucgagggcugguccaagcccaacuccaagcuccagaccaaccgccaggucaucgucgagcgcggcaaccgcuccggcuacuccggcaucuucuccgucgagggcaaguccugcaucaaccgcugcuucuacgucgagcucauccgcggccgcaaggaggagaccgaggucugguggaccuccaacuccaucgucgucuucugcggcaccuccggcaccuacggcaccggcuccuggcccgacggcgccgacaucaaccucaugcccaucuga

SEQ ID NO: 118159 - RNA, 1410 nt, Artificial Sequence; identical to SEQ ID NO: 111965
  derived and/or modified CDS sequence (opt2) from neuraminidase__InfluenzaA__AFH00618

SEQ ID NO: 118160 - RNA, 1410 nt, Artificial Sequence
  derived and/or modified CDS sequence (opt2) from neuraminidase__InfluenzaA__AFH00629
augaaccccaaccagaagaucaucaccaucggcuccgucucccucaccaucgccaccaucugcuuccucaugcagaucaccauccucgucaccaccgucacccuccacuucaagcaguacgagugcaacuccccccccaacaaccaggucaugcucugcgagcccaccaucaucgagcgcaacaucaccgagaucgucuaccucaccaacaccaccaucgagaagggcaucugccccaagcucgccgaguaccgcaacugguccaagccccagugcaacaucaccggcuucgcccccuucuccaaggacaacuccauccgccucuccgccggcggcgacaucugggucacccgcgagcccuacgucuccugcgaccccgacaagugcuaccaguucgcccucggccagggcaccacccucaacaacggccacuccaacgacaccguccacgaccgcacccccuaccgcacccuccucaugaacgagcucggcguccccuuccaccucggcacccgccaggucugcaucgccugguccuccuccuccugccacgacggcaaggccuggcuccacgucugcgucaccggcgacgacaagaacgccaccgccuccuucaucuacaacggccgccucgucgacuccaucggcuccugguccaagaagauccuccgcacccaggaguccgagugcgucugcaucaacggcaccugcaccgucgucaugaccgacggcuccgccuccggcaaggccgacaccaagauccucuucaucgaggagggcaagaucauccacaucuccacccuccucggcuccgcccagcacgucgaggagugcuccugcuacccccgcuaccccggcguccgcugcgucugccgcgacaacuggaagggcuccaaccgccccaucgucgacaucaacgucaaggacuacuccaucgucuccuccuacgucugcuccggccucgucggcgacaccccccgcaagaacgacuccuccuccuccucccacugccucgaccccaacaacgaggagggcggccacggcgucaagggcugggccuucgacgacggcaacgacgucuggaugggccgcaccaucuccgagaagcuccgcuccggcuacgagaccuucaaggucaucgagggcugguccaagcccaacuccaagcuccagaucaaccgccaggucaucgucgagcgcggcaaccgcuccggcuacuccggcaucuucuccgucgagggcaaguccugcaucaaccgcugcuucuacgucgagcucauccgcggccgcaaggaggagaccgaggucugguggaccuccaacuccaucgucgucuucugcggcaccuccggcaccuacggcaccggcuccuggcccgacggcgccgacaucaaccucaugcccaucuga

SEQ ID NO: 118161 - RNA, 1410 nt, Artificial Sequence; identical to SEQ ID NO: 110363
  derived and/or modified CDS sequence (opt2) from neuraminidase__InfluenzaA__AFH00640

SEQ ID NO: 118162 - RNA, 1410 nt, Artificial Sequence; identical to SEQ ID NO: 112492
  derived and/or modified CDS sequence (opt2) from neuraminidase__InfluenzaA__AFH00651

SEQ ID NO: 118163 - RNA, 1410 nt, Artificial Sequence; identical to SEQ ID NO: 110363
  derived and/or modified CDS sequence (opt2) from neuraminidase__InfluenzaA__AFH00662

SEQ ID NO: 118164 - RNA, 1410 nt, Artificial Sequence
  derived and/or modified CDS sequence (opt2) from neuraminidase__InfluenzaA__AFH00673
augaaccccaaccagaagaucaucaccaucggcuccgucucccucaccaucuccaccaucugcuucuucaugcagaucgccauccucaucaccaccgucacccuccacuucaagcaguacgaguucuccuccccccccaacaaccaggucaugcucugcgagcccaccaucaucgagcgcaacaucaccgagaucgucuaccucaccaacaccaccaucgagaaggagaccugccccaagcucgccgaguaccgcaacugguccaagccccagugcgacaucaccggcuucgcccccuucuccaaggacaacuccauccgccucuccgccggcggcgacaucugggucacccgcgagcccuacgucuccugcgaccccgacaagugcuaccaguucgcccucggccagggcaccacccucaacaacguccacuccaacgacaccguccacgaccgcacccccuaccgcacccuccucaugaacgagcucggcguccccuuccaccucggcaccaagcaggucugcaucgccugguccuccuccuccugccacgacggcaaggccuggcuccacgucugcgucaccggcgacgacaagaacgccaccgccuccuucaucuacaacggccgccucgucgacuccaucgucuccugguccaaggagauccuccgcacccaggaguccgagugcgucugcaucaacggcaccugcaccgucgucaugaccgacggcuccgccuccggcaaggccgacaccaagauccucuucaucgaggagggcaagaucguccacaccuccacccucuccggcuccgcccagcacgucgaggagugcuccugcuacccccgcuaccccggcguccgcugcgucugccgcgacaacuggaagggcuccaaccgccccaucgucgacaucaacaucaaggacuacuccaucgucucccgcuacgucugcuccggccucgucggcgacaccccccgcaagaacgacuccuccuccuccucccacugccucgaccccaacaacgaggagggcggccacggcgucaagggcugggccuucgacgacggcaacgacgucuggaugggccgcaccaucuccgucaagucccgcuccggcuacgagaccuucaaggucaucgagggcugguccaaccccaacuccaagcuccagaucaaccgccaggucaucgucgaccgcggcaaccgcuccggcuacuccggcaucuucuccgucgagggcaaguccugcaucaaccgcugcuucuacgucgagcucauccgcggccgcaaggaggagaccgagguccucuggaccuccaacuccaucgucgucuucugcggcaccuccggcaccuacggcaccggcuccuggcccgacggcgccgacaucaaccucaugcccaucuga

SEQ ID NO: 118165 - RNA, 1410 nt, Artificial Sequence
  derived and/or modified CDS sequence (opt2) from neuraminidase__InfluenzaA__AFH00684
augaaccccaaccagaagaucaucaccaucggcuccgucucccucaccaucuccaccaucugcuucuucaugcagaucgccauccucaucaccaccgucacccuccacuucaagcaguacgaguucaacuccccccccaacaaccaggucaugcucugcgagcccaccaucaucgagcgcaacaucaccgagaucgucuaccucaccaacaccaccaucgagaaggagaucugccccaagcucgccgaguaccgcaacugguccaagccccagugcgacaucaccggcuucgcccccuucuccaaggacaacuccauccgccucuccgccggcggcgacaucugggucacccgcgagcccuacgucuccugcgaccccgacaagugcuaccaguucgcccucggccagggcaccacccucaacaacguccacuccaacaacaccguccgcgagcgcacccccuaccgcacccuccucaugaacgagcucggcguccccuuccaccucggcaccaagcaggucugcaucgccugguccuccuccuccugccacgacggcaaggccuggcuccacgucugcaucaccggcgacgacaagaacgccaccgccuccuucaucuacaacggccgccucgucgacuccaucgucuccugguccaaggagauccuccgcacccaggaguccgagugcgucugcaucaacggcaccugcaccgucgucaugaccgacggcuccgccuccggcaaggccgacaccaagauccucuucaucgaggagggcaagaucguccacaccuccacccucuccggcuccgcccagcacgucgaggagugcuccugcuacccccgcuaccccggcguccgcugcgucugccgcgacaacuggaagggcuccaaccgccccaucgucgacaucaacaucaaggaccacuccaucgucuccuccuacgucugcuccggccucgucggcgacaccccccgcaagaacgacuccuccuccuccucccacugccucgaccccaacaacgaggagggcggccacggcgucaagggcugggccuucgacgacggcaacgacgucuggaugggccgcaccaucuccgagaagucccgccucggcuacgagaccuucaaggucaucgagggcugguccaaccccaaguccaagcuccagaucaaccgccaggucaucgucgaccgcggcaaccgcuccggcuacuccggcaucuucuccgucgagggcaaguccugcaucaaccgcugcuucuacgucgagcucauccgcggccgcaaggaggagaccgagguccucuggaccuccaacuccaucgucgucuucugcggcaccuccggcaccuacggcaccggcuccuggcccgacggcgccgacaucaaccucaugcccaucuga

SEQ ID NO: 118166 - RNA, 1410 nt, Artificial Sequence
  derived and/or modified CDS sequence (opt2) from neuraminidase__InfluenzaA__AFH00695
augaaccccaaccagaagaucaucaccaucggcuccgucucccucaccaucuccaccaucugcuucuucaugcagaucgccauccucaucaccaccgucacccuccacuucaagcaguacgaguucaacuccccccccaacaaccaggucaugcucugcgagcccaccaucaucgagcgcaacaucaccgagaucgucuaccucaccaacaccaccaucgagaaggagaucugccccaagcucgccgaguaccgcaacugguccaagccccagugcgacaucaccggcuucgcccccuucuccaaggacaacuccauccgccucuccgccggcggcgacaucugggucacccgcgagcccuacgucuccugcgaccccgacaagugcuaccaguucgcccucggccagggcaccacccucaacaacguccacuccaacgacaccguccgcgagcgcacccccuaccgcacccuccucaugaacgagcucggcguccccuuccaccucggcaccaagcaggucugcaucgccugguccuccuccuccugccacgacggcaaggccuggcuccacgucugcaucaccggcgacgacaagaacgccaccgccuccuucaucuacaacggccgccucgucgacuccaucgucuccugguccaaggagauccuccgcacccaggaguccgagugcgucugcaucaacggcaccugcaccgucgucaugaccgacggcuccgccuccggcaaggccgacaccaagauccucuucaucgaggagggcaagaucguccacaccuccacccucuccggcuccgcccagcacgucgaggagugcuccugcuacccccgcuaccccggcguccgcugcgucugccgcgacaacuggaagggcuccaaccgccccaucgucgacaucaacaucaaggaccacuccaucgucuccuccuacgucugcuccggccucgucggcgacaccccccgcaagaacgacuccuccuccuccucccacugccucgaccccaacaacgaggagggcggccacggcgucaagggcugggccuucgacgacggcaacgacgucuggaugggccgcaccaucuccgagaagucccgccucggcuacgagaccuucaaggucaucgagggcugguccaaccccaaguccaagcuccagaucaaccgccaggucaucgucgaccgcggcaaccgcuccggcuacuccggcaucuucuccgucgagggcaaguccugcaucaaccgcugcuucuacgucgagcucauccgcggccgcaaggaggagaccgagguccucuggaccuccaacuccaucgucgucuucugcggcaccuccggcaccuacggcaccggcuccuggcccgacggcgccgacaucaaccucaugcccaucuga

SEQ ID NO: 118167 - RNA, 1410 nt, Artificial Sequence
  derived and/or modified CDS sequence (opt2) from neuraminidase__InfluenzaA__AFH00706
augaaccccaaccagaagaucaucaccaucggcuccgucucccucaccaucuccaccaucugcuucuucaugcagaucgccauccucaucaccaccgucacccuccacuucaagcaguacgaguucaacuccccccccaacaaccaggucaugcucugcgagcccaccaucaucgagcgcaacaucaccgagaucgucuaccucaccaacaccaccaucgagaaggagaucugccccaagcucgccgaguaccgcaacugguccaagccccagugcgacaucaccggcuucgcccccuucuccaaggacaacuccauccgccucuccgccggcggcgacaucugggucacccgcgagcccuacgucuccugcgaccccaacaagugcuaccaguucgcccucggccagggcaccacccucaacaacguccacuccaacaacaccguccgcgaccgcacccccuaccgcacccuccucaugaacgagcucggcguccccuuccaccucggcaccaagcaggucugcaucgccugguccuccuccuccugccacgacggcaaggccuggcuccacgucugcaucaccggcgacgacaagaacgccaccgccuccuucaucuacaacggccgccucgucgacuccgucgucuccugguccaaggagauccuccgcacccaggaguccgagugcgucugcaucaacggcaccugcaccgucgucaugaccgacggcuccgccuccggcaaggccgacaccaagauccucuucaucgaggagggcaagaucguccacaccuccacccucuccggcuccgcccagcacgucgaggagugcuccugcuacccccgcuaccccggcguccgcugcgucugccgcgacaacuggaagggcuccaaccgccccaucgucgacaucaacaugaaggaccacuccaucgucuccuccuacgucugcuccggccucgucggcgacaccccccgcaagaacgacuccuccuccuccucccacugcuucgaccccaacaacgaggagggcggccacggcgucaagggcugggccuucgacgacggcaacgacgucuggaugggccgcaccaucuccgagaagucccgccucggcuacgagaccuucaaggucaucgagggcugguccaaccccaaguccaagcuccagaucaaccgccaggucaucgucgaccgcggcgaccgcuccggcuacuccggcaucuucuccgucgagggcaaguccugcaucaaccgcugcuucuacgucgagcucauccgcggcuccaaggaggagaccgagguccucuggaccuccaacuccaucgucgucuucugcggcaccuccggcaccuacggcaccggcuccuggcccgacggcgccgacaucaaccucaugcccaucuga

SEQ ID NO: 118168 - RNA, 1410 nt, Artificial Sequence
  derived and/or modified CDS sequence (opt2) from neuraminidase__InfluenzaA__AFH00728
augaaccccaaccagaagaucaucaccaucggcuccgucucccucaccaucgccaccaucugcuuccucaugcagaucgccauccucgucaccaccgucacccuccacuucaagcaguacgagugcuccuccccccccaacaaccaggucaugcccugcgagcccaucaucaucgagcgcaacaucaccgagaucgucuaccucaccaacaccaccaucgagaaggagaucugccccaagcucgucgaguaccgcaacugguccaagccccagugcaagaucaccggcuucgcccccuucuccaaggacaacuccauccgccucuccgccggcggcgacaucugggucacccgcgagcccuacgucuccugcgaccccggcaagugcuaccaguucgcccucggccagggcaccacccucaacaacaagcacuccaacgacaccauccacgaccgcacccccuaccgcacccuccucaugaacgagcucggcguccccuuccaccucggcacccgccaggucugcaucgccugguccuccuccuccugccacgacggcaaggccuggcuccacgucugcgucaccggccacgacaagaacgccaccgccuccuucaucuacaacggccgccucgucgacuccaucggcuccugguccaagaacauccuccgcacccaggaguccgagugcgucugcaucaacggcaccugcaccgucgucaugaccgacggcuccgccuccgagcgcgccgacaccaagauccucuucaucgaggagggcaagaucguccacaucuccccccucuccggcuccgcccagcacgucgaggagugcuccugcuacccccgcuaccccggcguccgcugcgucugccgcgacaacuggaagggcuccaaccgccccaucgucgacaucaacgucaaggacuacuccaucgucuccuccuacgucugcuccggccucgucggcgacaccccccgcaagaacgaccgcuccuccuccuccuacugccgcaaccccaacaacgagaagggcaaccacggcgucaagggcugggccuucgacgacggcaacgacgucuggaugggccgcaccaucggcgaggagcuccgcuccggcuacgagaccuucaaggucaucggcggcugguccacccccaacuccaagcuccagaucaaccgccaggucaucgucgacuccgacaaccgcuccggcuacuccggcaucuucuccgucgagggcaaguccugcaucaaccgcugcuucuacgucgagcucauccgcggccgcgagcaggagacccgcguccucuggaccuccaacuccaucgucgucuucugcggcaccuccggcaccuacggcaccggcuccuggcccgacggcgccgacaucaaccucaugcccaucuga

SEQ ID NO: 118169 - RNA, 1410 nt, Artificial Sequence
  derived and/or modified CDS sequence (opt2) from neuraminidase__InfluenzaA__AFH00739
augaaccccaaccagaagaucaucaccaucggcuccgucucccucaccaucgccaccaucugcuuccucaugcagaucgccauccucgucaccaccgucacccuccacuucaagcaguacgagugcuccuccccccccaacaaccaggucaugcccugcgagcccaccaucaucgagcgcaacaucaccgagaucgucuaccucaccaacaccaccaucgagaaggagaucugccccaagcucgucgaguaccgcaacugguccaagccccagugcaagaucaccggcuucgcccccuucuccaaggacaacuccauccgccucuccgccggcggcgacaucugggucacccgcgagcccuacgucuccugcgaccccggcaagugcuaccaguucgcccucggccagggcaccacccucaacaaccgccacuccaacgacaccguccacgaccgcacccccuaccgcacccuccucaugaacgagcucggcguccccuuccaccucggcaccaagcaggucugcaucgccugguccuccuccuccugccacgacggcaaggccuggcuccacgucugcgucaccggccacgacaagaacgccaccgccuccuucaucuacgacggccgccucgucgacuccaucggcuccugguccaagaacauccuccgcacccaggaguccgagugcgucugcaucaacggcaccugcaccgucgucaugaccgacggcuccgccuccgagcgcgccgacaccaagauccucuucaucgaggagggcaagaucguccacaucuccccccucuccggcuccgcccagcacgucgaggagugcuccugcuacccccgcuaccccggcguccgcugcgucugccgcgacaacuggaagggcuccaaccgccccaucgucgacaucaacgucaaggacuacuccaucgucuccuccuacgucugcuccggccucgucggcgacaccccccgcaagaacgaccgcuccuccuccuccuacugccgcaaccccaacaacgagaagggcucccacggcgucaagggcugggccuucgacgacggcaacgacgucuggaugggccgcaccaucggcgaggagcuccgcuccggcuacgagaccuucaaggucaucggcggcugguccacccccaacuccaagcuccagaucaaccgccaggucaucgucgacuccggcaaccgcuccggcuacuccggcaucuucuccgucgagggcaaguccugcaucaaccgcugcuucuacgucgagcucauccgcggccgcggccaggagacccgcgucugguggaccuccaacuccaucgucgucuucugcggcaccuccggcaccuacggcaccggcuccuggcccgacggcgccgacaucaaccucaugcccaucuga

SEQ ID NO: 118170 - RNA, 1410 nt, Artificial Sequence
  derived and/or modified CDS sequence (opt2) from neuraminidase__InfluenzaA__AFH00750
augaaccccaaccagaagaucaucaccaucggcuccgucucccucaccaucgccaccaucugcuuccucaugcagaucgccauccucgucaccaccgucacccuccacuucaagcaguacgagugcuccuccccccccaacaaccaggucaugcccugcgagcccaccaucaucgagcgcaacaucaccgagaucgucuaccucaccaacaccaccaucgagaaggagaucugccccaagcucgucgaguaccgcaacugguccaagccccagugcaagaucaccggcuucgcccccuucuccaaggacaacuccauccgccucuccgccggcggcgacaucugggucacccgcgagcccuacgucuccugcgaccccggcaagugcuaccaguucgcccucggccagggcaccacccucaacaaccgccacuccaacgacaccguccacgaccgcacccccuaccgcacccuccucaugaacgagcucggcguccccuuccaccucggcaccaagcaggucugcaucgccugguccuccuccuccugccacgacggcaaggccuggcuccacgucugcgucaccggccacgacaagaacgccaccgccuccuucaucuacgacggccgccucgucgacuccaucggcuccugguccaagaacauccuccgcacccaggaguccgagugcgucugcaucaacggcaccugcaccgucgucaugaccgacggcuccgccuccgagcgcgccuacaccaagauccucuucaucaaggagggcaagaucguccacaucuccccccucuccggcuccgcccagcacgucgaggagugcuccugcuacccccgcuaccccggcguccgcugcgucugccgcgacaacuggaagggcuccaaccgccccaucgucgacaucaacgucaaggacuacuccaucgucuccuccuacgucugcuccggccucgucggcgacaccccccgcaagaacgaccgcuccuccuccuccuacugccgcaaccccaacaacgagaagggcucccacggcgucaagggcugggccuucgacgacggcaacgacgucuggaugggccgcaccaucggcgaggagcuccgcuccggcuacgagaccuucaaggucaucggcggcugguccacccccaacuccaagcuccagaucaaccgccaggucaucgucgaguccggcaaccgcuccggcuacuccggcaucuucuccgucgagggcaaguccugcaucaaccgcugcuucuacgucgagcucauccgcggccgcgagcaggagacccgcgucugguggaccuccaacuccaucgucgucuucugcggcaccuccggcaccuacggcaccggcuccuggcccgacggcgccgacaucaaccucaugcccaucuga

SEQ ID NO: 118171 - RNA, 1410 nt, Artificial Sequence
  derived and/or modified CDS sequence (opt2) from neuraminidase__InfluenzaA__AFH00761
augaaccccaaccagaagaucaucaccaucggcuccgucucccucaccaucgccaccaucugcuuccucaugcagaucgccauccucgucaccaccgucacccuccacuucaagcaguacgagugcaacuccccccccaacaaccaggucaugcccugcgagcccaccaucaucgagcgcaacaucaccgagaucgucuaccucaccaacaccaccaucgagaaggagaucugccccaagcucgucgaguaccgcaacugguccaagccccagugcaagaucaccggcuucgcccccuucuccaaggacaacuccauccgccucuccgccggcggcgacaucugggucacccgcgagcccuacgucuccugcgaccccggcaagugcuaccaguucgcccucggccagggcaccacccucaacaaccgccacuccaacgacaccguccacgaccgcacccccuaccgcacccuccucaugaacgagcucggcguccccuuccaccucggcaccaagcaggucugcaucgccugguccuccuccuccugccacgacggcaaggccuggcuccacgucugcgucaccggccacgacgagaacgccaccgccuccuucaucuacgacggccgccucgucgacuccaucggcuccugguccaagaacauccuccgcacccaggaguccgagugcgucugcaucaacggcaccugcaccgucgucaugaccgacggcuccgccuccgagcgcgccgacaccaagauccucuucaucgaggagggcaagaucguccacaucuccccccucuccggcuccgcccagcacgucgaggagugcuccugcuacccccgcuaccccggcguccgcugcgucugccgcgacaacuggaagggcuccaaccgccccaucgucgacaucaacgucaaggacuacuccaucgucuccuccuacgucugcuccggccucgucggcgacaccccccgcaagaacgacuccuccuccuccuccuacugccgcaaccccaacaacgagaagggcucccacggcgucaagggcugggccuucgacgacggcgacgacgucuggaugggccgcaccaucggcgaggagcuccgcuccggcuacgagaccuucaaggucaucggcggcugguccacccccaacuccaagcuccagaucaaccgccaggucaucgucgaccgcggcaaccgcuccggcuacuccggcaucuucuccgucgagggcaaguccugcaucaaccgcugcuucuacgucgagcucauccgcggccgcaagcaggagaccaaggucugguggaccuccaacuccaucgucgucuucugcggcaccuccggcaccuacggcaccggcuccuggcccgacggcgccgacaucaaccucaugcccaucuga

SEQ ID NO: 118172 - RNA, 1410 nt, Artificial Sequence
  derived and/or modified CDS sequence (opt2) from neuraminidase__InfluenzaA__AFH00783
augaaccccaaccagaagaucaucaccaucggcuccgucucccucaccaucgccaccaucugcuuccucaugcagaucgccauccucgucaccaccgucacccuccacuucaagcaguacgagugcaacuccccccccaacaaccaggucaugcucugcgagcccaccaucaucgagcgcaacaucaccgagaucgucuaccucaccaacaccaccaucgagaaggagaucugccccaagcucgccgaguaccgcaacugguccaagccccagugcaagaucaccggcuucgcccccuucuccaaggacaacuccauccgccucuccgccggcggcgacaucugggucacccgcgagcccuacgucuccugcgaccccgacaagugcuaccaguucgcccucggccgcggcaccacccucaacaaccgccacuccaacgacaccguccacgaccgcacccccuaccgcacccuccucaugaacgagcucggcguccccuuccaccucggcaccaagcaggucugcaucgccugguccuccuccuccugccacgacggcaaggccuggcuccacgucugcgucaccggccacgacgagaacgccaccgccuccuucaucuacgacggccgccucgucgacuccaucggcuccugguccaagaagauccuccgcacccaggaguccgagugcgucugcaucaacggcaccugcaccgucgucaugaccgacggcuccgccuccggccgcgccgacaccaagauccucuucaucgaggagggcaagaucguccacaucuccccccucuccggcuccgcccagcacgucgaggagugcuccugcuacccccgcuacuccggcguccgcugcgucugccgcgacaacuggaagggcuccaaccgccccaucgucgacaucaacgucaaggacuacuccaucgucuccuccuacgucugcuccggccucgucggcgacaccccccgcaagaacgacuccuccuccuccucccacugccucaaccccaacaacgaggagggcggccacggcgucaagggcugggccuucgacgacggcaacgacgucuggaugggccgcaccaucuccgagaaguuccgcuccggcuacgagaccuucaaggucaucggcggcugguccaagcccaacuccaagcuccagaucaaccgccaggucaucgucgaccgcggcaaccgcuccggcuacuccggcaucuucuccgucgagggcaaguccugcaucaaccgcugcuucuacgucgagcucauccgcggccgcaagcaggagaccgaggucugguggaccuccaacuccaucgucgucuucugcggcaccuccggcaccuacggcaccggcuccuggcccgacggcgccgacaucaaccucaugcccaucuga

SEQ ID NO: 118173 - RNA, 1410 nt, Artificial Sequence
  derived and/or modified CDS sequence (opt2) from neuraminidase__InfluenzaA__AFH00794
augaaccccaaccagaagaucaucaccaucggcuccgucucccucaccaucgccaccaucugcuuccucaugcagaucgccauccucgucaccaccgucacccuccacuucaagcaguacgagugcaacuccccccccaacaaccaggucaugcucugcgagcccaccaucaucgagcgcaacaucaccgagaucgucuaccucaccaacaccaccaucgagaaggagaucugccccaagcucgccgaguaccgcaacugguccaagccccagugcaagaucaccggcuucgcccccuucuccaaggacaacuccauccgccucgccgccggcggcgacaucugggucacccgcgagcccuacgucuccugcgaccccgacaagugcuaccaguucgcccucggccagggcaccacccucaacaaccgccacuccaacgacaccguccacgaccgcacccccuaccgcacccuccucaugaacgagcucggcguccccuuccaccucggcaccaagcaggucugcaucgccugguccuccuccuccugccacgacggcaaggccuggcuccacgucugcgucaccggccacgacgagaacgccaccgccuccuucaucuacgacggccgccucgucgacuccaucggcuccugguccaagaagauccuccgcacccaggaguccgagugcgucugcaucaacggcaccugcaccgucgucaugaccgacggcuccgccuccgagcgcgccgacaccaagauccucuucaucgaggagggcaagaucguccacaucucccagcucuccggcuccgcccagcacgucgaggagugcuccugcuacccccgcuaccccggcguccgcugcgucugccgcgacaacuggaagggcuccaaccgccccaucgucgacaucaacgucaaggacuacuccaucgucuccuccuacgucugcuccggccucgucggcgacaccccccgcaagaacgacuccuccuccuccucccacugccucaaccccaacaacgaggagggcggccacggcgucaagggcugggccuucgacgacggcgacgacgucuggaugggccgcaccaucuccgagaagcuccgcuccggcuacgagaccuucaaggucaucgagggcugguccaagcccaacuccaagcuccagaccaaccgccaggucaucgucgaccgcggcaaccgcuccggcuacuccggcaucuucuccgucgagggcaaguccugcaucaaccgcugcuucuacgucgagcucauccgcggccgcaagcaggagaccgaggucugguggaccuccaacuccaucgucgucuucugcggcaccuccggcaccuacggcaccggcuccuggcccgacggcgccgacaucaaccucaugcccaucuga

SEQ ID NO: 118174 - RNA, 1410 nt, Artificial Sequence; identical to SEQ ID NO: 111524
  derived and/or modified CDS sequence (opt2) from neuraminidase__InfluenzaA__AFH00805

SEQ ID NO: 118175 - RNA, 1410 nt, Artificial Sequence; identical to SEQ ID NO: 115554
  derived and/or modified CDS sequence (opt2) from neuraminidase__InfluenzaA__AFH00816

SEQ ID NO: 118176 - RNA, 1410 nt, Artificial Sequence
  derived and/or modified CDS sequence (opt2) from neuraminidase__InfluenzaA__AFH00827
augaaccccaaccagaagaucaucaccaucggcuccgucucccucaccaucuccaccaccugcuucuucaugcagaucgccauccucaucaccaccgucacccuccacuucaagcaguacgaguucaacuccccccccaacaaccaggucaugcucugcgagcccaccaucaucgagcgcaacaugaccgagaucgucuaccucaccaacaccaccaucgagaaggagaucugccccaagcccgccgaguaccgcaacugguccaagccccagugcgacaucaccggcuucgcccccuucuccaaggacaacuccauccgccucuccgccggcggcgacaucugggucacccgcgagcccuacgucuccugcgaccccgacaagugcuaccaguucgcccucggccagggcaccacccucaacaacguccacuccaacaacaccguccgcgaccgcacccccuaccgcacccuccucaugaacgagcucggcguccccuuccaccucggcaccaagcaggucugcaucgccugguccuccuccuccugccacgacggcaaggccuggcuccacgucugcaucaccggcgacgacaagaacgccaccgccuccuucaucuacaacggccgccucgucgacuccgucgucuccugguccaaggagauccuccgcacccaggaguccgagugcgucugcaucaacggcaccugcaccgucgucaugaccgacggcuccgccuccggcaaggccgacaccaagauccucuucaucgaggagggcaagaucguccacaccuccacccucuccggcuccgcccagcacgucgaggagugcuccugcuacccccgcuaccccggcguccgcugcgucugccgcgacaacuggaagggcuccaaccgccccaucgucgacaucaacaucaaggaccacuccaucgucuccuccuacgucugcuccggccucgucggcgacaccccccgcaagaacgacuccuccuccuccucccacugccucgaccccaacaacgaggagggcggccacggcgucaagggcugggccuucgacgacggcaacgacgucuggaugggccgcaccaucaacgagaccucccgccucggcuacgagaccuucaaggucaucgagggcugguccaaccccaaguccaagcuccagaucaaccgccaggucaucgucgaccgcggcgaccgcuccggcuacuccggcaucuucuccgucgagggcaaguccugcaucaaccgcugcuucuacgucgagcucauccgcggccgcaaggaggagaccgagguccucuggaccuccaacuccaucgucgucuucugcggcaccuccggcaccuacggcaccggcuccuggcccgacggcgccgaccucaaccucaugccccucuga

SEQ ID NO: 118177 - RNA, 1410 nt, Artificial Sequence; identical to SEQ ID NO: 111965
  derived and/or modified CDS sequence (opt2) from neuraminidase__InfluenzaA__AFH01410

SEQ ID NO: 118178 - RNA, 1410 nt, Artificial Sequence
  derived and/or modified CDS sequence (opt2) from neuraminidase__InfluenzaA__AFH34942
augaaccccaaccagaagaucaucaccaucggcuccgucucccucaccaucuccaccaucugcuucuucaugcagaucgccauccucaucaccaccgucacccuccacuucaagcaguacgaguucaacuccccccccaacaaccaggucaugcucugcgagcccaagaucaucgagcgcaacaucaccgagaucgucuaccucaccaacaccaccaucgagaaggagaucugccccaagcccgccgaguaccgcaacugguccaagccccagugcgacaucaccggcuucgcccccuucuccaaggacaacuccauccgccucuccgccggcggcgacaucugggucacccgcgagcccuacgucuccugcgaccccgacaagugcuaccaguucgcccucggccagggcaccacccucaacaacguccacuccaacaacaccguccgcaaccgcacccccuaccgcacccuccucaugaacgagcucggcguccccuuccaccucggcaccaagcaggucugcaucgccugguccuccuccuccugccacgacggcaaggccuggcuccacgucugcaucaccggcgacgacaagaacgccaccgccuccuucaucuacaacggcaagcucgucgacuccgucgucuccugguccaaggagauccuccgcacccaggaguccgagugcgucugcaucaacggcaccugcaccgucgucaugaccgacggcuccgccuccggcaaggccgacaccaagauccucuucaucgaggagggcaagaucguccacaccuccacccucuccggcuccgcccagcacgucgaggagugcuccugcuacccccgcuaccccggcguccgcugcgucugccgcgacaacuggaagggcuccaaccgccccaucgucgacaucaacaucaaggaccacuccaucgucuccuccuacgucugcuccggccucgucggcgacaccccccgcaagaacgacuccuccuccuccucccacugccucgaccccaacaacgaggagggcggccacggcgucaagggcugggccuucgacgacggcaacgacgucuggaugggccgcaccaucaacgagaccucccgccucggcuacgagaccuucaaggucaucgagggcugguccaaccccaaguccaagcuccagaucaaccgccaggucaucgucgaccgcggcgaccgcuccggcuacuccggcaucuucuccgucgagggcaaguccugcaucaaccgcugcuucuacgucgagcucauccgcggccgcaaggaggagaccgagguccucuggaccuccaacuccaucgucgucuucugcggcaccuccggcaccuacggcaccggcuccuggcccgacggcgccgaccucaaccucaugcccaucuga

SEQ ID NO: 118179 - RNA, 1410 nt, Artificial Sequence
  derived and/or modified CDS sequence (opt2) from neuraminidase__InfluenzaA__AFH34956
augaaccccaaccagaagaucaucaccaucggcuccgucucccucaccaucuccaccaucugcuucuucaugcagaucgccauccucaucaccaccgucacccuccacuucaagcaguacgaguucaacuccccccccaacaaccaggucaugcucugcgagcccaccaucaucgagcgcaacaucaccgagaucgucuaccucaccaacaccaccaucgagaaggagaucugccccaagcccgccgaguaccgcaacugguccaagccccagugcgacaucaccggcuucgcccccuucuccaaggacaacuccauccgccucuccgccggcggcgacaucugggucacccgcgagcccuacgucuccugcgaccccgacaagugcuaccaguucgcccucggccagggcaccacccucaacaacguccacuccaacaacaccguccgcggccgcacccccuaccgcacccuccucaugaacgagcucggcguccccuuccaccucggcaccaagcaggucugcaucgccugguccuccuccuccugccacgacggcaaggccuggcuccacgucugcaucaccggcgacgacaagaacgccaccgccuccuucaucuacaacggccgccucgucgacuccgucgucuccugguccaaggagauccuccgcacccaggaguccgagugcgucugcaucaacggcaccugcaccgucgucaugaccgacggcuccgccuccggcaaggccgacaccaagauccucuucaucgaggagggcaagaucguccacaccuccacccucuccggcuccgcccagcacgucgaggagugcuccugcuacccccgcuaccccggcguccgcugcgucugccgcgacaacuggaagggcuccaaccgccccaucgucgacaucaacaucaaggaccacuccaucgucuccuccuacgucugcuccggccucgucggcgacaccccccgcaagaacgacuccuccuccuccucccacugccucgaccccaacaacgaggagggcggccacggcgucaagggcugggccuucgacgacggcaacgacgucuggaugggccgcaccaucaacgagaccucccgccucggcuacgagaccuucaaggucaucgagggcugguccaaccccaaguccaagcuccagaucaaccgccaggucaucgucgaccgcggcgaccgcuccggcuacuccggcaucuucuccgucgagggcaaguccugcaucaaccgcugcuucuacgucgagcucauccgcggccgcaaggaggagaacgagguccucuggaccuccaacuccaucgucgucuucugcggcaccuccggcaccuacggcaccggcuccuggcccgacggcgccgaccucaaccucaugcccaucuga

SEQ ID NO: 118180 - RNA, 1410 nt, Artificial Sequence
  derived and/or modified CDS sequence (opt2) from neuraminidase__InfluenzaA__AFH34963
augaaccccaaccagaagaucaucaccaucggcuccgucucccucaccaucuccaccaucugcuucuucaugcagaucgccauccucaucaccaccgucacccuccacuucaagcaguacgaguucaacuccccccccaacaaccaggucaugcucugcgagcccaccaucaucgagcgcaacaucaccgagaucgucuaccucaccaacaccaccaucgagaaggagaucugccccaagcccgccgaguaccgcaacugguccaagccccagugcgacaucaccggcuucgcccccuucuccaaggacaacuccauccgccucuccgccggcggcgacaucugggucacccgcgagcccuacgucuccugcgaccccgacaagugcuaccaguucgcccucggccagggcaccacccucaacaacguccacuccaacaacaucguccgcgaccgcacccccuaccgcacccuccucaugaacgagcucggcguccccuuccaccucggcaccaagcaggucugcaucgccugguccuccuccuccugccacgacggcaaggccuggcuccacgucugcaucaccggcgacgacaagaacgccaccgccuccuucaucuacaacggccgccucgucgacuccgucgucuccugguccaaggagauccuccgcacccaggaguccgagugcgucugcaucaacggcaccugcaccgucgucaugaccgacggcuccgccuccggcaaggccgacaccaagauccucuucaucgaggagggcaagaucguccacaccuccacccucuccggcuccgcccagcacgucgaggagugcuccugcuacccccgcuaccccggcguccgcugcgucugccgcgacaacuggaagggcuccaaccgccccaucgucgacaucaacaucaaggaccacuccaucgucuccuccuacgucugcuccggccucgucggcgacaccccccgcaagaacgacuccuccuccuccucccacugccucgaccccaacaacgaggagggcggccacggcgucaagggcugggccuucgacgacggcaacgacgucuggaugggccgcaccaucaacgagaccucccgccucggcuacgagaccuucaaggucaucgagggcugguccaaccccaaguccaagcuccagaucaaccgccaggucaucgucgaccgcggcgaccgcuccggcuacuccggcaucuucuccgucgagggcaaguccugcaucaaccgcugcuucuacgucgagcucauccgcggccgcaaggaggagaacgagguccucuggaccuccaacuccaucgucgucuucugcggcaccuccggcaccuacggcaccggcuccuggcccgacggcgccgaccucaaccucaugcccaucuga

SEQ ID NO: 118181 - RNA, 1410 nt, Artificial Sequence
  derived and/or modified CDS sequence (opt2) from neuraminidase__InfluenzaA__AFH34970
augaaccccaaccagaagaucaucaccaucggcuccgucucccucaccaucuccaccaucugcuucuucaugcagaucgccauccucaucaccaccgucacccuccacuucaagcaguacgaguucaacuccccccccaacaaccaggucaugcucuacgagcccaccaucaucgagcgcaacaucaccgagaucgucuaccucaccaacaccaccaucgagaaggagaucugccccaagcccgccgaguaccgcaacugguccaagccccagugcgacaucaccggcuucgcccccuucuccaaggacaacuccauccgccucuccgccggcggcgacaucugggucacccgcgagcccuacgucuccugcgaccccgacaagugcuaccaguucgcccucggccagggcaccacccucaacaacguccacuccaacaacaccguccgcgaccgcacccccuaccgcacccuccucaugaacgagcucggcguccccuuccaccucggcaccaagcaggucugcaucgccugguccuccuccuccugccacgacggcaaggccuggcuccacgucugcaucaccggcgacgacaagaacgccaccgccuccuucaucuacaacggccgccucgucgacuccgucgucuccugguccaaggagauccuccgcacccaggaguccgagugcgucugcaucaacggcaccugcaccgucgucaugaccgacggcuccgccuccggcaaggccgacaccaagauccucuucaucgaggagggcaagaucguccacaccuccacccucuccggcuccgcccagcacgucgaggagugcuccugcuacccccgcuaccccggcguccgcugcgucugccgcgacaacuggaagggcuccaaccgccccaucgucgacaucaacaucaaggaccacuccaucgucuccuccuacgucugcuccggccucgucggcgacaccccccgcaagaacgacuccuccuccuccucccacugccucgaccccaacaacgaggagggcggccacggcgucaagggcugggccuucgacgacggcaacgacgucuggaugggccgcaccaucaacgagaccucccgccucggcuacgagaccuucaaggucaucgagggcugguccaaccccaaguccaagcuccagaucaaccgccaggucaucgucgaccgcggcgaccgcuccggcuacuccggcaucuucuccgucgagggcaaguccugcaucaaccgcugcuucuacgucgagcucauccgcggccgcaaggaggagaacgagguccucuggaccuccaacuccaucgucgucuucugcggcaccuccggcaccuacggcaccggcuccuggcccgacggcgccgaccucaaccucaugcccaucuga

SEQ ID NO: 118182 - RNA, 1410 nt, Artificial Sequence
  derived and/or modified CDS sequence (opt2) from neuraminidase__InfluenzaA__AFH34977
augaaccccaaccagaagaucaucaccaucggcuccgucucccucaccaucuccaccaucugcuucuucaugcagaucgccauccucaucaccaccgucacccuccacuucaagcaguacgaguucaacuccccccccaacaaccaggucaugcucugcgagcccaccaucaucgagcgcaacaucaccgagaucgucuaccucaccaacaccaccaucgagaaggagaucugccccaagcccgccgaguaccgcaacugguccaagccccagugcggcaucaccggcuucgcccccuucuccaaggacaacuccauccgccucuccgccggcggcgacaucugggucacccgcgagcccuacgucuccugcgaccccgacaagugcuaccaguucgcccucggccagggcaccacccucaacaacguccacuccaacaacaccguccgcgaccgcacccccuaccgcacccuccucaugaacgagcucggcguccccuuccaccucggcaccaagcaggucugcaucgccugguccuccuccuccugccacgacggcaaggccuggcuccacgucugcaucaccggcgacgacaagaacgccaccgccuccuucaucuacaacggccgccucgucgacuccgucgucuccugguccaaggagauccuccgcacccaggaguccgagugcgucugcaucaacggcaccugcaccgucgucaugaccgacggcuccgccuccggcaaggccgacaccaagauccucuucaucgaggagggcaagaucguccacaccuccacccucuccggcuccgcccagcacgucgaggagugcuccugcuacccccgcuaccccggcguccgcugcgucugccgcgacaacuggaagggcuccaaccgccccaucgucgacaucaacaucaaggaccacuccaucgucuccuccuacgucugcuccggccucgucggcgacaccccccgcaagaacgacuccuccuccuccucccacugccucgaccccaacaacgaggagggcggccacggcgucaagggcugggccuucgacgacggcaacgacgucuggaugggccgcaccaucaacgagaccucccgccucggcuacgagaccuucaaggucaucgagggcugguccaaccccaaguccaagcuccagaucaaccgccaggucaucgucgaccgcggcgaccgcuccggcuacuccggcaucuucuccgucgagggcaaguccugcaucaaccgcugcuucuacgucgagcucauccgcggccgcaaggaggagaccgagguccucuggaccuccaacuccaucgucgucuucugcggcaccuccggcaccuacggcaccggcuccuggcccgacggcgccgaccucaaccucaugcccaucuga

SEQ ID NO: 118183 - RNA, 1410 nt, Artificial Sequence
  derived and/or modified CDS sequence (opt2) from neuraminidase__InfluenzaA__AFH74468
augaaccccaaccagaagaucaucaccaucggcuccgucucccucaccaucuccaccaucugcuucuucaugcagaccgccauccucaucaccaccgucacccuccacuucaagcagugcgaguucaacuccccccccaacaaccaggucaugcucugcgagcccaccaucaucgagcgcaacaucaccgagaucgucuaccucaccaacaccaccaucgagaaggagaucugccccaagcucgccgaguaccgcaacugguccaagccccagugcgacaucaccggcuucgcccccuucuccaaggacaacuccauccgccucuccgccggcggcgacaucugggucacccgcgagcccuacgucuccugcgaccccgacaagugcuaccaguucgcccucggccagggcaccacccucaacaacguccacuccaacaacaccguccgcgaccgcacccccuaccgcacccuccucaugaacgagcucggcguccccuuccaccucggcaccaagcaggucugcaucgccugguccuccuccuccugccacgacggcaaggccuggcuccacgucugcaucaccggcgacgacaagaacgccaccgccuccuucaucuacaacggccgccucgucgacuccgucgucuccugguccaaggagauccuccgcacccaggaguccgagugcgucugcaucaacggcaccugcaccgucgucaugaccgacggcuccgccuccggcaaggccgacaccaagauccucuucaucgaggagggccgcaucguccacaccuccacccucuccggcuccgcccagcacgucgaggagugcuccugcuacccccgcuaccccggcguccgcugcgucugccgcgacaacuggaagggcuccaaccgccccaucgucgacaucaacaucaaggaccacuccaucgucuccuccuacgucugcuccggccucgucggcgacaccccccgcaagaacgacuccuccuccuccucccacugccucgaccccaacaacgaggagggcgacaacggcgucaagggcugggccuucgacgacggcaacgacgucuggaugggccgcaccaucuccgagaagucccgccucggcuacgagaccuucaaggucaucgagggcugguccaaccccaaguccaagcuccagaucaaccgccaggucaucgucgaccgcggcaaccgcuccggcuacuccggcaucuucuccgucgagggcaaguccugcaucaaccgcugcuucuacgucgagcucauccgcggccgcaaggaggagaccgagguccucuggaccuccaacuccaucgucgucuucugcggcaccuccggcaccuacggcaccggcuccuggcccgacggcgccgacaucaaccucaugcccaucuga

SEQ ID NO: 118184 - RNA, 1410 nt, Artificial Sequence; identical to SEQ ID NO: 114687
  derived and/or modified CDS sequence (opt2) from neuraminidase__InfluenzaA__AFH74469

SEQ ID NO: 118185 - RNA, 1410 nt, Artificial Sequence; identical to SEQ ID NO: 112635
  derived and/or modified CDS sequence (opt2) from neuraminidase__InfluenzaA__AFH74480

SEQ ID NO: 118186 - RNA, 1410 nt, Artificial Sequence; identical to SEQ ID NO: 112635
  derived and/or modified CDS sequence (opt2) from neuraminidase__InfluenzaA__AFH74491

SEQ ID NO: 118187 - RNA, 1410 nt, Artificial Sequence; identical to SEQ ID NO: 117678
  derived and/or modified CDS sequence (opt2) from neuraminidase__InfluenzaA__AFH74502

SEQ ID NO: 118188 - RNA, 1410 nt, Artificial Sequence
  derived and/or modified CDS sequence (opt2) from neuraminidase__InfluenzaA__AFH74513
augaaccccaaccagaagaucaucaccaucggcuccgucucccucaccaucuccaccaucugcuucuucaugcagaucgccauccucaucaccaccgucacccuccacuucaagcaguacgaguucaacuccccccccaacaaccaggucaugcucugcgagcccaccaucaucgagcgcaacaucaccgagaucgucuaccucaccaacaccaccaucgagaaggagaccugccccaagcucgccgaguaccgcaacugguccaagccccagugcgacaucaccggcuucgcccccuucuccaaggacaacuccauccgccucuccgccggcggcgacaucugggucacccgcgagcccuacgucuccugcgaccccgacaagugcuaccaguucgcccucggccagggcaccacccucaacaacguccacuccaacaacaccguccgcgaccgcacccccuaccgcacccuccucaugaacgagcucggcguccccuuccaccucggcaccaagcaggucugcaucgccugguccuccuccuccugccacgacggcaaggccuggcuccacgucugcaucaccggcgacgacaagaacgccaccgccuccuucaucuacaacggccgccucgucgacuccgucgucuccugguccaaggagauccuccgcacccaggaguccgagugcgucugcaucaacggcaccugcaccgucgucaugaccgacggcuccgccuccggcaaggccgacaccaagauccucuucaucgaggagggcaagaucguccacaccuccacccucuccggcuccgcccagcacgucgaggagugcuccugcuacccccgcuaccccggcguccgcugcgucugccgcgacaacuggaagggcuccaaccgccccaucgucgacaucaacaucaaggaccacuccaucgucuccuccuacgucugcuccggccucgucggcgacaccccccgcaagaacgacuccuccuccuccucccacugccucgaccccaacaacgaggagggcggccacggcgucaagggcugggccuucgacgacggcaacgacgucuggaugggccgcaccaucuccgagaagucccgccucggcuacgagaccuucaaggucaucgagggcugguccaaccccaaguccaagcuccagaucaaccgccaggucaucgucgaccgcggcaaccgcuccggcuacuccggcaucuucuccgucgagggcaaguccugcaucaaccgcugcuucuacgucgagcucauccgcggccgcaaggaggagaccgagguccucuggaccuccaacuccaucgucgucuucugcggcaccuccggcaccuacggcaccggcuccuggcccgacggcgccgacaucaaccucaugcccgucuga

SEQ ID NO: 118189 - RNA, 1410 nt, Artificial Sequence
  derived and/or modified CDS sequence (opt2) from neuraminidase__InfluenzaA__AFH74524
augaaccccaaccagaagaucaucaccaucggcuccgucucccucaccaucuccaccaucugcuucuucaugcagaucgccauccucaucaccaccgucacccuccacuucaagcaguacgaguucaacuccccccccaacaaccaggucaugcucugcgagcccaccaucaucgagcgcaacaucaccgagaucgucuaccucaccaacaccaccaucgagaaggagaucugccccaagcucgccgaguaccgcaacugguccaagccccagugcgacaucaccggcuucgcccccuucuccaaggacaacuccauccgccucuccgccggcggcgacaucugggucacccgcgagcccuacgucuccugcgaccccgacaagugcuaccaguucgcccucggccagggcaccaccaucaacaacguccacuccaacaacaccguccgcgaccgcacccccuaccgcacccuccucaugaacgagcucggcguccccuuccaccucggcaccaagcaggucugcaucgccugguccuccuccuccugccacgacggcaaggccuggcuccacgucugcaucaccggcgacgacaagaacgccaccgccuccuucaucuacaacggccgccucgucgacuccgucgucuccugguccaaggagauccuccgcacccaggaguccgagugcgucugcaucaacggcaccugcaccgucgucaugaccgacggcuccgccuccggcaaggccgacaccaagauccucuucaucgaggagggcaagaucguccacaccuccacccucuccggcuccgcccagcacgucgaggagugcuccugcuacccccgcuaccccggcguccgcugcgucugccgcgacaacuggaagggcuccaaccgccccaucgucgacaucaacaugaaggaccacuccaucgucuccuccuacgucugcuccggccucgucggcgacaccccccgcaagaacgacuccuccuccuccucccacugccucgaccccaacaacgaggagggcggccacggcgucaagggcugggccuucgacgacggcaacgacgucuggaugggccgcaccaucuccgagaagucccgccucggcuacgagaccuucaaggucaucgagggcugguccaaccccaaguccaagcuccagaucaaccgccaggucaucgucgaccgcggcaaccgcuccggcuacuccggcaucuucuccgucgagggcaaguccugcaucaaccgcugcuucuacgucgagcucauccgcggccgcaaggaggagaccgagguccucuggaccuccaacuccgucgucgucuucugcggcaccuccggcaccuacggcaccggcuccuggcccgacggcgccgacaucaaccucaugcccaucuga

SEQ ID NO: 118190 - RNA, 1410 nt, Artificial Sequence; identical to SEQ ID NO: 112635
  derived and/or modified CDS sequence (opt2) from neuraminidase__InfluenzaA__AFH74535

SEQ ID NO: 118191 - RNA, 1410 nt, Artificial Sequence; identical to SEQ ID NO: 117671
  derived and/or modified CDS sequence (opt2) from neuraminidase__InfluenzaA__AFH74546

SEQ ID NO: 118192 - RNA, 1410 nt, Artificial Sequence; identical to SEQ ID NO: 117671
  derived and/or modified CDS sequence (opt2) from neuraminidase__InfluenzaA__AFH74557

SEQ ID NO: 118193 - RNA, 1410 nt, Artificial Sequence; identical to SEQ ID NO: 117671
  derived and/or modified CDS sequence (opt2) from neuraminidase__InfluenzaA__AFH74568

SEQ ID NO: 118194 - RNA, 1410 nt, Artificial Sequence; identical to SEQ ID NO: 117674
  derived and/or modified CDS sequence (opt2) from neuraminidase__InfluenzaA__AFH74579

SEQ ID NO: 118195 - RNA, 1410 nt, Artificial Sequence
  derived and/or modified CDS sequence (opt2) from neuraminidase__InfluenzaA__AFH74590
augaaccccaaccagaagaucaucaccaucggcuccgucucccucaccaucuccaccaucugcuucuucaugcagaucgccauccucaucaccaccgucacccuccacuucaagcaguacgaguucaacuccccccccaacaaccaggucaugcucugcgagcccaccaucaucgagcgcaacaucaccgagaucgucuaccucaccaacaccaccaucgagaaggagaucugccccaagcucgccgaguaccgcaacugguccaagccccagugcgacaucaccggcuucgcccccuucuccaaggacaacuccauccgccucuccgccggcggcgacaucugggucacccgcgagcccuacgucuccugcgaccccgacaagugcuaccaguucgcccucggccagggcaccacccucaacaacguccacuccaacaacaccguccgcgaccgcacccccuaccgcacccuccucaugaacgagcucggcguccccuuccaccucggcaccaagcaggucugcaucgccugguccuccuccuccugccacgacggcaaggccuggcuccacgucugcaucaccggcgacgacaagaacgccaccgccuccuucaucuacaacggccgccucgucgacuccgucgucuccugguccaaggagauccuccgcacccaggaguccgagugcgucugcaucaacggcaccugcaccgucgucaugaccgacggcuccgccuccggcaaggccgacaccaagauccucuucaucgaggagggcaagaucguccacaccuccacccucuccggcuccgcccagcacgucgaggagugcuccugcuacccccgcuaccccggcguccgcugcgucugccgcgacaacuggaagggcuccaaccgccccaucgucgacaucaacaucaaggaccacuccaucgucuccuccuacgucugcuccggccucgucggcgacaccccccgcaagaacgacuccuccuccuccucccacugccucgaccccaacaacgaggagggcggccacggcgucaagggcugggccuucgacgacggcaacgacgucuggaugggccgcaccaucuccgagaagucccgccucggcuacgagaccuucaaggucaucgagggcugguccaaccccaaguccaagcuccagaucaaccgccaggucaucgucgaccgcggcaaccgcuccggcuacuccggcaucuucuccgucgagggcaaguccugcaucaaccgcugcuucuacgucgagcucauccgcggccgcaaggaggagaccgagguccucuggaccuccaacuccaucgucgucuucugcggcaccuccggcaccuacggcaccggcuccuggcccgacggcgccgacaucaaccucauguccgucuga

SEQ ID NO: 118196 - RNA, 1410 nt, Artificial Sequence; identical to SEQ ID NO: 117671
  derived and/or modified CDS sequence (opt2) from neuraminidase__InfluenzaA__AFH74601

SEQ ID NO: 118197 - RNA, 1410 nt, Artificial Sequence
  derived and/or modified CDS sequence (opt2) from neuraminidase__InfluenzaA__AFH74612
augaaccccaaccagaagaucaucaccaucggcuccgucucccucaccaucuccaccaucugcuucuucaugcagaccgccauccucaucaccaccgucacccuccacuucaagcagugcgaguucaacuccccccccaacaaccaggucaugcucugcgagcccaccaucaucgagcgcaacaucaccgagaucgucuaccucaccaacaccaccaucgagaaggagaucugccccaagcucgccgaguaccgcaacugguccaagccccagugcgacaucaccggcuucgcccccuucuccaaggacaacuccauccgccucuccgccggcggcgacaucugggucacccgcgagcccuacgucuccugcgaccccgacaagugcuaccaguucgcccucggccagggcaccacccucuccaacguccacuccaacaacaccguccgcgaccgcacccccuaccgcacccuccucaugaacgagcucggcguccccuuccaccucggcaccaagcaggucugcaucgccugguccuccuccuccugccacgacggcaaggccuggcuccacgucugcaucaccggcgacgacaagaacgccaccgccuccuucaucuacaacggccgccucgucgacuccgucgucuccugguccaaggagauccuccgcacccaggaguccgagugcgucugcaucaacggcaccugcaccgucgucaugaccgacggcuccgccuccggcaaggccgacaccaagauccucuucaucgaggagggcaagaucguccacaccuccacccucuccggcuccgcccagcacgucgaggagugcuccugcuacccccgcuaccccggcguccgcugcgucugccgcgacaacuggaagggcuccaaccgccccaucgucgacaucaacaucaaggaccacuccaucgucuccuccuacgucugcuccggccucgucggcgacaccccccgcaagaacgacuccuccuccuccucccacugccucgaccccaacaacgaggagggcggccacggcgucaagggcugggccuucgacgacggcaacgacgucuggaugggccgcaccaucuccgagaagucccgccucggcuacgagaccuucaaggucaucgagggcugguccaaccccaaguccaagcuccagaucaaccgccaggucaucgucgaccgcggcaaccgcuccggcuacuccggcaucuucuccgucgagggcaaguccugcaucaaccgcugcuucuacgucgagcucauccgcggccgcaaggaggagaccgagguccucuggaccuccaacuccaucgucgucuucugcggcaccuccggcaccuacggcaccggcuccuggcccgacggcgccgacaucaaccucaugcccaucuga

SEQ ID NO: 118198 - RNA, 1410 nt, Artificial Sequence; identical to SEQ ID NO: 117671
  derived and/or modified CDS sequence (opt2) from neuraminidase__InfluenzaA__AFH74623

SEQ ID NO: 118199 - RNA, 1410 nt, Artificial Sequence; identical to SEQ ID NO: 117671
  derived and/or modified CDS sequence (opt2) from neuraminidase__InfluenzaA__AFH74634

SEQ ID NO: 118200 - RNA, 1410 nt, Artificial Sequence; identical to SEQ ID NO: 117678
  derived and/or modified CDS sequence (opt2) from neuraminidase__InfluenzaA__AFH74645

SEQ ID NO: 118201 - RNA, 1410 nt, Artificial Sequence; identical to SEQ ID NO: 117678
  derived and/or modified CDS sequence (opt2) from neuraminidase__InfluenzaA__AFH74656

SEQ ID NO: 118202 - RNA, 1410 nt, Artificial Sequence; identical to SEQ ID NO: 117678
  derived and/or modified CDS sequence (opt2) from neuraminidase__InfluenzaA__AFH74667

SEQ ID NO: 118203 - RNA, 1410 nt, Artificial Sequence; identical to SEQ ID NO: 117678
  derived and/or modified CDS sequence (opt2) from neuraminidase__InfluenzaA__AFH74678

SEQ ID NO: 118204 - RNA, 1410 nt, Artificial Sequence; identical to SEQ ID NO: 112635
  derived and/or modified CDS sequence (opt2) from neuraminidase__InfluenzaA__AFH74689

SEQ ID NO: 118205 - RNA, 1410 nt, Artificial Sequence; identical to SEQ ID NO: 112635
  derived and/or modified CDS sequence (opt2) from neuraminidase__InfluenzaA__AFH74700

SEQ ID NO: 118206 - RNA, 1410 nt, Artificial Sequence
  derived and/or modified CDS sequence (opt2) from neuraminidase__InfluenzaA__AFH74711
augaaccccaaccagaagaucaucaccaucggcuccgucucccucaccaucuccaccaucugcuucuucaugcagaucgccauccucaucaccaccgucacccuccacuucaagcaguacgaguucaacuccccccccaacaaccaggucaugcucugcgagcccaccaucaucgagcgcaacaucaccgagaucgucuaccucaccaacaccaccaucgagaaggagaucugccccaagcucgccgaguaccgcaacugguccaagccccagugcgacaucaccggcuucgcccccuucuccaaggacaacuccauccgccucuccgccggcggcgacaucugggucacccgcgagcccuacgucuccugcgaccccgacaagugcuaccaguucgcccucggccagggcaccacccucaacaacguccacuccaacaacaccguccgcgaccgcacccccuaccgcacccuccucaugaacgagcucggcguccccuuccaccucggcaccaagcaggucugcaucgccugguccuccuccuccugccacgacggcaaggccuggcuccacgucugcaucaccggcgacgacaagaacgccaccgccuccuucaucuacaacggccgccucgucgacuccgucgucuccugguccaaggagauccuccgcacccaggaguccgagugcgucugcaucaacggcaccugcaccgucgucaugaccgacggcuccgccuccggcaaggccgacaccaagauccucuucaucgaggagggcaagaucguccacaccuccacccucuccggcuccgcccagcacgucgaggagugcuccugcuacccccgcuaccccugcguccgcugcgucugccgcgacaacuggaagggcuccaaccgccccaucgucgacaucaacaucaaggaccacuccaucgucuccuccuacgucugcuccggccucgucggcgacaccccccgcaagaacgacuccuccuccuccucccacugccucgaccccaacaacgaggagggcggccacggcgucaagggcugggccuucgacgacggcaacgacgucuggaugggccgcaccaucuccgagaagucccgccucggcuacgagaccuucaaggucaucgagggcugguccaaccccaaguccaagcuccagaucaaccgccaggucaucgucgaccgcggcaaccgcuccggcuacuccggcaucuucuccgucgagggcaaguccugcaucaaccgcugcuucuacgucgagcucauccgcggccgcaaggaggagaccgagguccucuggaccuccaacuccaucgucgucuucugcggcaccuccggcaccuacggcaccggcuccuggcccgacggcgccgacaucaaccucaugcccgucuga

SEQ ID NO: 118207 - RNA, 1410 nt, Artificial Sequence; identical to SEQ ID NO: 117671
  derived and/or modified CDS sequence (opt2) from neuraminidase__InfluenzaA__AFH74722

SEQ ID NO: 118208 - RNA, 1410 nt, Artificial Sequence; identical to SEQ ID NO: 117671
  derived and/or modified CDS sequence (opt2) from neuraminidase__InfluenzaA__AFH74733

SEQ ID NO: 118209 - RNA, 1410 nt, Artificial Sequence
  derived and/or modified CDS sequence (opt2) from neuraminidase__InfluenzaA__AFH74744
augaaccccaaccagaagaucaucaccaucggcuccgucucccucaccaucuccaccaucugcuucuucaugcagaucgccauccucaucaccaccgucacccuccacuucaagcaguacgaguucaacuccccccccaacaaccaggucaugcucugcgagcccaccaucaucgagcgcaacaucaccgagaucgucuaccucaccaacaccaccaucgagaaggagaucugccccaagcucgccgaguaccgcaacugguccaagccccagugcgacaucaccggcuucgcccccuucuccaaggacaacuccauccgccucuccgccggcggcgacaucugggucacccgcgagcccuacgucuccugcgaccccgacaagugcuaccaguucgcccucggccagggcaccacccucaacaacguccacuccaacaacaccguccgcgaccgcacccccuaccgcacccuccucaugaacgagcucggcguccccuuccaccucggcaccaagcaggucugcaucgccugguccuccuccuccugccacgacggcaaggccuggcuccacgucugcaucaccggcgacgacaagaacgccaccgccuccuucaucuacaacggccgccucgucgacuccgucgucuccugguccaaggagauccuccgcacccaggaguccgagugcgucugcaucaacggcaccugcaccgucgucaugaccgacggcuccgccuccggcaaggccgacaccaagauccucuucaucgaggagggcaagaucguccacaccuccacccucuccggcuccgcccagcacgucgaggagugcuccugcuacccccgcuaccccggcguccgcugcgucugccgcgacaacuggaagggcuccaaccgccccaucgucgacaucaacaucaaggaccacuccaucgucuccaacuacgucugcuccggccucgucggcgacaccccccgcaagaacgacuccuccuccuccucccacugccucgaccccaacaacgaggagggcggccacggcgucaagggcugggccuucgacgacggcaacgacgucuggaugggccgcaccaucuccgagaagucccgccucggcuacgagaccuucaaggucaucgagggcugguccaaccccaaguccaagcuccagaucaaccgccaggucaucgucgaccgcggcaaccgcuccggcuacuccggcaucuucuccgucgagggcaaguccugcaucaaccgcugcuucuacgucgagcucauccgcggccgcaaggaggagaccgagguccucuggaccuccaacuccaucgucgucuucugcggcaccuccggcaccuacggcaccggcuccuggcccgacggcgccgacaucaaccucaugcccgucuga

SEQ ID NO: 118210 - RNA, 1410 nt, Artificial Sequence; identical to SEQ ID NO: 117671
  derived and/or modified CDS sequence (opt2) from neuraminidase__InfluenzaA__AFH74755

SEQ ID NO: 118211 - RNA, 1410 nt, Artificial Sequence; identical to SEQ ID NO: 117671
  derived and/or modified CDS sequence (opt2) from neuraminidase__InfluenzaA__AFH74766

SEQ ID NO: 118212 - RNA, 1410 nt, Artificial Sequence; identical to SEQ ID NO: 117671
  derived and/or modified CDS sequence (opt2) from neuraminidase__InfluenzaA__AFH74777

SEQ ID NO: 118213 - RNA, 1410 nt, Artificial Sequence; identical to SEQ ID NO: 112635
  derived and/or modified CDS sequence (opt2) from neuraminidase__InfluenzaA__AFH74788

SEQ ID NO: 118214 - RNA, 1410 nt, Artificial Sequence
  derived and/or modified CDS sequence (opt2) from neuraminidase__InfluenzaA__AFH74799
augaaccccaaccagaagaucaucaccaucggcuccgucucccucaccaucuccaccaucugcuucuucaugcagaucgccauccucaucaccaccgucacccuccacuucaagcaguacgaguucaacuccccccccaacaaccaggucaugcucugcgagcccaccaucaucgagcgcaacaucaccgagaucgucuaccucaccaacaccaccaucgagaaggagaucugccccaagcucgccgaguaccgcaacugguccaagccccagugcgacaucaccggcuucgcccccuucuccaaggacaacuccauccgccucuccgccggcggcgacaucugggucacccgcgagcccuacgucuccugcggccccgacaagugcuaccaguucgcccucggccagggcaccacccucaacaacguccacuccaacaacaccguccgcgaccgcacccccuaccgcacccuccucaugaacgagcucggcguccccuuccaccucggcaccaagcaggucugcaucgccugguccuccuccuccugccacgacggcaaggccuggcuccacgucugcaucaccggcgacgacaagaacgccaccgccuccuucaucuacaacggccgccucgucgacuccgucgucuccugguccaaggagauccuccgcacccaggaguccgagugcgucugcaucaacggcaccugcaccgucgucaugaccgacggcuccgccuccggcaaggccgacaccaagauccucuucaucgaggagggcaagaucguccacaccuccacccucuccggcuccgcccagcacgucgaggagugcuccugcuacccccgcuaccccggcguccgcugcgucugccgcgacaacuggaagggcuccaaccgccccaucgucgacaucaacaucaaggaccacuccaucgucuccuccuacgucugcuccggccucgucggcgacaccccccgcaagaacgacuccuccuccuccucccacugccucgaccccaacaacgaggagggcggccacggcgucaagggcugggccuucgacgacggcaacgacgucuggaugggccgcaccaucuccgagaagucccgccucggcuacgagaccuucaaggucaucgagggcugguccaaccccaaguccaagcuccagaucaaccgccaggucaucgucgaccgcggcaaccgcuccggcuacuccggcaucuucuccgucgagggcaaguccugcaucaaccgcugcuucuacgucgagcucauccgcggccgcaaggaggagaccgagguccucuggaccuccaacuccaucgucgucuucugcggcaccuccggcaccuacggcaccggcuccuggcccgacggcgccgacaucaaccucaugcccgucuga

SEQ ID NO: 118215 - RNA, 1410 nt, Artificial Sequence; identical to SEQ ID NO: 117691
  derived and/or modified CDS sequence (opt2) from neuraminidase__InfluenzaA__AFH74810

SEQ ID NO: 118216 - RNA, 1410 nt, Artificial Sequence; identical to SEQ ID NO: 117691
  derived and/or modified CDS sequence (opt2) from neuraminidase__InfluenzaA__AFH74821

SEQ ID NO: 118217 - RNA, 1410 nt, Artificial Sequence; identical to SEQ ID NO: 117691
  derived and/or modified CDS sequence (opt2) from neuraminidase__InfluenzaA__AFH74832

SEQ ID NO: 118218 - RNA, 1410 nt, Artificial Sequence; identical to SEQ ID NO: 117691
  derived and/or modified CDS sequence (opt2) from neuraminidase__InfluenzaA__AFH74843

SEQ ID NO: 118219 - RNA, 1410 nt, Artificial Sequence; identical to SEQ ID NO: 117671
  derived and/or modified CDS sequence (opt2) from neuraminidase__InfluenzaA__AFH74854

SEQ ID NO: 118220 - RNA, 1410 nt, Artificial Sequence; identical to SEQ ID NO: 117671
  derived and/or modified CDS sequence (opt2) from neuraminidase__InfluenzaA__AFH74865

SEQ ID NO: 118221 - RNA, 1410 nt, Artificial Sequence; identical to SEQ ID NO: 117671
  derived and/or modified CDS sequence (opt2) from neuraminidase__InfluenzaA__AFH74876

SEQ ID NO: 118222 - RNA, 1410 nt, Artificial Sequence; identical to SEQ ID NO: 117671
  derived and/or modified CDS sequence (opt2) from neuraminidase__InfluenzaA__AFH74887

SEQ ID NO: 118223 - RNA, 1410 nt, Artificial Sequence; identical to SEQ ID NO: 117671
  derived and/or modified CDS sequence (opt2) from neuraminidase__InfluenzaA__AFH74898

SEQ ID NO: 118224 - RNA, 1410 nt, Artificial Sequence; identical to SEQ ID NO: 117671
  derived and/or modified CDS sequence (opt2) from neuraminidase__InfluenzaA__AFH74909

SEQ ID NO: 118225 - RNA, 1410 nt, Artificial Sequence
  derived and/or modified CDS sequence (opt2) from neuraminidase__InfluenzaA__AFH74920
augaaccccaaccagaagaucaucaccaucggcuccgucucccucaccaucuccaccaucugcuucuucaugcagaccgccauccucaucaccaccgucacccuccacuucaagcagugcgaguucaacuccccccccaacaaccaggucaugcucugcgagcccaccaucaucgagcgcaacaucaccgagaucgucuaccucaccaacaccaccaucgagaaggagaucugccccaagcucgccgaguaccgcaacugguccaagccccagugcgacaucaccggcuucgcccccuucuccaaggacaacuccauccgccucuccgccggcggcgacaucugggucacccgcgagcccuacgucuccugcgaccccgacaagugcuaccaguucgcccucggccagggcaccacccucaacaacguccacuccaacaacaccguccgcgaccgcacccccuaccgcacccuccucaugaacgagcucggcguccccuuccaccucggcaccaagcaggucugcaucgccugguccuccuccuccugccacgacggcaaggccuggcuccacgucugcaucaccggcgacgacaagaacgccaccgccuccuucaucuacaacggccgccucgucgacuccgucgucuccugguccaaggagauccuccgcacccaggaguccgagugcgucugcaucaacggcaccugcaccgucgucaugaccgacggcuccgccuccggcaaggccgacaccaagauccucuucaucgaggagggcaagaucguccacaccuccacccucuccggcuccgcccagcacgucgaggagugcuccugcuacccccgcuaccccggcguccgcugcgucugccgcgacaacuggaagggcuccaaccgccccaucgucgacaucaacaucaaggaccacuccaucgucuccuccuacgucugcuccggccucgucggcgacaccccccgcaagaacgacuccuccuccuccucccacugccucgaccccaacaacgaggagggcgaccacggcgucaagggcugggccuucgacgacggcaacgacgucuggaugggccgcaccaucuccgagaagucccgccucggcuacgagaccuucaaggucaucgagggcugguccaaccccaaguccaagcuccagaucaaccgccaggucaucgucgaccgcggcaaccgcuccggcuacuccggcaucuucuccgucgagggcaaguccugcaucaaccgcugcuucuacgucgagcucauccgcggccgcaaggaggagaccgagguccucuggaccuccaacuccaucgucgucuucugcggcaccuccggcaccuacggcaccggcuccuggcccgacggcgccgacaucaaccucaugcccaucuga

SEQ ID NO: 118226 - RNA, 1410 nt, Artificial Sequence; identical to SEQ ID NO: 112635
  derived and/or modified CDS sequence (opt2) from neuraminidase__InfluenzaA__AFH74931

SEQ ID NO: 118227 - RNA, 1410 nt, Artificial Sequence; identical to SEQ ID NO: 112635
  derived and/or modified CDS sequence (opt2) from neuraminidase__InfluenzaA__AFH74942

SEQ ID NO: 118228 - RNA, 1410 nt, Artificial Sequence; identical to SEQ ID NO: 117671
  derived and/or modified CDS sequence (opt2) from neuraminidase__InfluenzaA__AFH74953

SEQ ID NO: 118229 - RNA, 1410 nt, Artificial Sequence
  derived and/or modified CDS sequence (opt2) from neuraminidase__InfluenzaA__AFH74964
augaaccccaaccagaagaucaucaccaucggcuccgucucccucaccaucuccaccaucugcuucuucaugcagaucgccauccucaucaccaccgucacccuccacuucaagcaguacgaguucaacuccccccccaacaaccaggucaugcucugcgagcccaccaucaucgagcgcaacaucaccgagaucgucuaccucaccaacaccaccaucgagaaggagaucugccccaagcucgccgaguaccgcaacugguccaagccccagugcgacaucaccggcuucgcccccuucuccaaggacaacuccauccgccucuccgccggcggcgacaucugggucacccgcgagcccuacgucuccugcgaccccgacaagugcuaccaguucgcccucggccagggcaccacccucaacaacguccacuccaacaacaccguccgcgaccgcacccccuaccgcacccuccucaugaacgagcucggcguccccuuccaccucggcaccaagcaggucugcaucgccugguccuccuccuccugccacgacggcaaggccuggcuccacgucugcaucaccggcgacgacaagaacgccaccgccuccuucaucuacaacggccgccucgucgacuccgucgucuccugguccaaggagauccuccgcacccaggaguccgagugcgucugcaucaacggcaccugcaccgucgucaugaccgacggcuccgccuccggcaaggccgacaccaagauccucuucaucgaggagggcaagaucguccacaccuccauccucuccggcuccgcccagcacgucgaggagugcuccugcuacccccgcuaccccggcguccgcugcgucugccgcgacaacuggaagggcuccaaccgccccaucgucgacaucaacaucaaggaccacuccaucgucuccuccuacgucugcuccggccucgucggcgacaccccccgcaagaacgacuccuccuccuccucccacugccucgaccccaacaacgaggagggcggccacggcgucaagggcugggccuucgacgacggcaacgacgucuggaugggccgcaccaucuccgagaagucccgccucggcuacgagaccuucaaggucaucgagggcugguccaaccccaaguccaagcuccagaucaaccgccaggucaucgucgaccgcggcaaccgcuccggcuacuccggcaucuucuccgucgagggcaaguccugcaucaaccgcugcuucuacgucgagcucauccgcggccgcaaggaggagaccgagguccucuggaccuccaacuccaucgucgucuucugcggcaccuccggcaccuacggcaccggcuccuggcccgacggcgccgacaucaaccucaugcccgucuga

SEQ ID NO: 118230 - RNA, 1410 nt, Artificial Sequence; identical to SEQ ID NO: 117671
  derived and/or modified CDS sequence (opt2) from neuraminidase__InfluenzaA__AFH75391

SEQ ID NO: 118231 - RNA, 1410 nt, Artificial Sequence; identical to SEQ ID NO: 112774
  derived and/or modified CDS sequence (opt2) from neuraminidase__InfluenzaA__AFH97143

SEQ ID NO: 118232 - RNA, 1410 nt, Artificial Sequence
  derived and/or modified CDS sequence (opt2) from neuraminidase__InfluenzaA__AFI56407
augaaccccaaccagaagaucaucaccaucggcuccgucugcaugaccaucggcauggccaaccucauccuccagaucggcaacaucaucuccaucuggaucucccacuccauccagcucggcaaccagaaccagaucgagaccugcaaccaguccgucaucaccuacgagaacaacaccugggucaaccagaccuacgucaacaucuccaacaccaacuucgccgccggccaguccgucgucuccgucaagcucgccggcaacuccucccucugccccgucuccggcugggccaucuacuccaaggacaacuccauccgcaucggcuccaagggcaacgucuucgucauccgcgagcccuucaucuccugcuccccccucgagugccgcaccuucuuccucacccagggcgcccuccucaacgacaagcacuccaacggcaccaucaaggaccgcucccccuaccgcacccucauguccugccccaucggcgagguccccucccccuacaacucccgcuucgaguccgucgccugguccgccuccgccugccacgacggcaucaacuggcucaccaucggcaucuccggccccgacaacggcgccgucgccguccucaaguacaacggcaucaucaccgacaccaucaaguccuggcgcaacaacauccuccgcacccaggaguccgagugcgccugcgucaacggcuccugcuucaccaucaugaccgacggccccuccgacggccaggccuccuacaagaucuuccgcaucgagaagggcaagaucgucaaguccgucgagaugaacgcccccaacuaccacuacgaggagugcuccugcuaccccgacuccuccgagaucaccugcgucugccgcgacaacuggcacggcuccaaccgccccugggucuccuucaaccagaaccucgaguaccagaucggcuacaucugcuccggcaucuucggcgacaacccccgccccaacgacaagaccggcuccugcggccccgucuccuccaacggcgccaacggcgucaagggcuucuccuucaaguacggcaacggcgucuggaucggccgcaccaaguccaucuccucccgcaagggcuucgagaugaucugggaccccaacggcuggaccggcaccgacaacuccuucuccaucaagcaggacaucgucggcaucaacgagugguccggcuacuccggcuccuucguccagcaccccgagcucaccggccucgacugcauccgccccugcuucugggucgagcucauccgcggccgccccaaggagaacaccaucuggaccuccggcuccuccaucuccuucugcggcgucaacuccggcaccgucggcugguccuggcccgacggcgccgagcuccccuucaccaucgacaaguga

SEQ ID NO: 118233 - RNA, 1410 nt, Artificial Sequence
  derived and/or modified CDS sequence (opt2) from neuraminidase__InfluenzaA__AFJ05141
augaaccccaaccagaagaucaucaccaucggcuccgucucccucaccaucuccaccaucugcuucuucaugcagaucgccauccucaucaccaccgucacccuccacuucaagcaguacgaguucaacuccccccccaacaaccaggucaugcucugcgagcccaccaucaucgagcgcaacaucaccgagaucgucuaccucaccaacaccaccaucgagaaggagaucugccccaagcccgccgaguaccgcaacugguccaagccccagugcgacaucaccggcuucgcccccuucuccaaggacaacuccauccgccucuccgccggcggcgacaucugggucacccgcgagcccuacgucuccugcgaccccgacaagugcuaccaguucgcccucggccagggcaccacccucaacaacguccacuccaacaacaccguccgcgaccgcacccccuaccgcucccuccucaugaacgagcucggcguccccuuccaccucggcaccaagcaggucugcaucgccugguccuccuccuccugccacgacggcaaggccuggcuccacgucugcaucaccggcgacgacaagaacgccaccgccuccuucaucuacaacggccgccucgucgacuccgucgucuccugguccaaggagauccuccgcacccaggaguccgagugcgucugcaucaacggcaccugcaccgucgucaugaccgacggcuccgccuccggcaaggccgacaccaagauccucuucaucgaggagggcaagaucguccacaccuccacccucuccggcuccgcccagcacgucgaggagugcuccugcuacccccgcuaccccggcguccgcugcgucugccgcgacaacuggaagggcuccaaccgccccaucgucgacaucaacaucaaggaccacuccaucgucuccuccuacgucugcuccggccucgucggcgacaccccccgcaagaacgacuccuccuccuccucccacugccucgaccccaacaacgaggagggcggccacggcgucaagggcugggccuucgacgacggcaacgacgucuggaugggccgcaccaucaacgagaccucccgccucggcuacgagaccuucaaggucaucgagggcugguccaaccccaaguccaagcuccagaucaaccgccaggucaucgucgaccgcggcgaccgcuccggcuacuccggcaucuucuccgucgagggcaaguccugcaucaaccgcugcuucuacgucgagcucauccgcggccgcaaggaggagaccgagguccucuggaccuccaacuccaucgucgucuucugcggcaccuccggcaccuacggcaccggcuccuggcccgacggcgccgaccucaaccucaugcccaucuga

SEQ ID NO: 118234 - RNA, 1410 nt, Artificial Sequence
  derived and/or modified CDS sequence (opt2) from neuraminidase__InfluenzaA__AFJ05145
augaaccccaaccagaagaucaucaccaucggcuccgucucccucaccauguccaccaucugcuucuucaugcagaucgccauccucaucaccaccgucacccuccacuucaagcaguacgaguucaacuccccccccaacaaccaggucaugcucugcgagcccaccaucaucgagcgcaacaucaccgagaucgucuaccucaccaacaccaccaucgagaaggagaucugccccaagcccgccgaguaccgcaacugguccaagccccagugcgacaucaccggcuucgcccccuucuccaaggacaacuccauccgccucuccgccggcggcgacaucugggucacccgcgagcccuacgucuccugcgaccccgacaagugcuaccaguucgcccucggccagggcaccacccucaacaacguccacuccaacaacaccguccgcgaccgcacccccuaccgcacccuccucaugaacgagcucggcguccccuuccaccucggcaccaagcaggucugcaucgccugguccuccuccuccugccacgacggcaaggccuggcuccacgucugcaucaccggcgacgacaagaacgccaccgccuccuucaucuacaacggccgccucgucgacuccgucgucuccugguccaaggagauccuccgcacccaggaguccgagugcgucugcaucaacggcaccugcaccgucgucaugaccgacggcuccgccuccggcaaggccgacaccaagauccucuucaucgaggagggcaagaucguccacaccuccacccucuccggcuccgcccagcacgucgaggagugcuccugcuacccccgcuaccccggcguccgcugcgucugccgcgacaacuggaagggcuccaaccgccccaucgucgacaucaacaucaaggaccacuccaucgucuccuccuacgucugcuccggccucgucggcgacaccccccgcaagaacgacuccuccuccuccucccacugccucgaccccaacaacgaggagggcggccacggcgucaagggcugggccuucgacgacggcaacgacgucuggaugggccgcaccaucaacgagaccucccgccucggcuacgagaccuucaaggucaucgagggcugguccaaccccaaguccaagcuccagaucaaccgccaggucaucgucgaccgcggcgaccgcuccggcuacuccggcaucuucuccgucgagggcaaguccugcaucaaccgcugcuucuacgucgagcucauccgcggccgcaaggaggagaccgagguccucuggaccuccaacuccaucgucgucuucugcggcaccuccggcaccuacggcaccggcuccuggcccgacggcgccgaccucaaccucaugcccaucuga

SEQ ID NO: 118235 - RNA, 1410 nt, Artificial Sequence
  derived and/or modified CDS sequence (opt2) from neuraminidase__InfluenzaA__AFJ05635
augaaccccaaccagaagaucaucaccaucggcuccgucugcaugaccaucggcauggccaaccucauccuccagaucggcaacaucaucuccaucuggaucucccacuccauccagcuccgcaaccagucccagaucgagaccugcaaccaguccgucaucaccuacgagaacaacaccugggucaaccagaccuacgucaacaucuccaacaccaacuucgccgccggccaguccgucgucuccaugaagcucgccggcaacuccucccucugccccgucuccggcugggccaucuacuccaaggacaacuccauccgcaucggcuccaagggcgacgucuucgucauccgcgagcccuucaucuccugcuccccccucgagugccgcaccuucuuccucacccagggcgcccuccucaacgacaagcacuccaacggcaccaucaaggaccgcucccccuaccgcacccucauguccugccccaucggcgagguccccucccccuacaacucccgcuucgaguccgucgccugguccgccuccgccugccacgacggcaucaacuggcucaccaucggcaucuccggccccgacaacggcgccgucgccguccucaaguacaacggcaucaucaccgacaccaucaaguccuggcgcaacaacauccuccgcacccaggaguccgagugcgccugcgucaacggcuccugcuucaccaucaugaccgacggccccuccgacggccaggccuccuacaagaucuuccgcaucgagaagggcaagaucgucaaguccgucgagaugaacgcccccaacuaccacuacgaggagugcuccugcuaccccgacuccuccgagaucaccugcgucugccgcgacaacuggcacggcuccaaccgccccugggucuccuucaaccagaaccucgaguaccagaucggcuacaucugcuccggcaucuucggcgacaacccccgccccaacgacaagaccggcuccugcggccccgucuccuccaacggcgccaacggcgucaagggcuucuccuucaaguacggcaacggcgucuggaucggccgcaccaaguccaucuccucccgcaagggcuucgagaugaucugggaccccaacggcuggaccggcaccgacaacaacuucuccaucaagcaggacaucgucggcaucaacgagugguccggcuacuccggcuccuucguccagcaccccgagcucaccggccucgacugcauccgccccugcuucugggucgagcucauccgcggccgccccaaggagaacaccaucuggaccuccggcuccuccaucuccuucugcggcgucaacuccgacaccgucggcugguccuggcccgacggcgccgagcuccccuucaccaucgacaaguga

SEQ ID NO: 118236 - RNA, 1410 nt, Artificial Sequence
  derived and/or modified CDS sequence (opt2) from neuraminidase__InfluenzaA__AFJ11709
augaaccccaaccagaagaucaucaccaucggcuccgucucccucaccaucuccaccaucugcuucuucaugcagaucgccauccucaucaccaccgucacccuccacuucaagcaguacgaguucaacuccccccccaacaaccaggucaugcucugcgagcccaccaucaucgagcgcaacaucaccgagaucgucuaccucaccaacaccaccaucgagaaggagaucugccccaagcucgccgaguaccgcaacugguccaagccccagugcgacaucaccggcuucgcccccuucuccaaggacaacuccauccgccucuccgccggcggcgacaucugggucacccgcgagcccuacgucuccugcgaccccgacaagugcuaccaguucgcccucggccagggcaccacccucaacaacguccacuccaacaacaccguccgcgaccgcacccccuaccgcacccuccucaugaacgagcucggcguccccuuccaccucggcaccaagcaggucugcaucgccugguccuccuccuccugccacgacggcaaggccuggcuccacgucugcaucaccggcgacgacaagaacgccaccgccuccuucaucuacaacggccgccucgucgacuccgucgucuccugguccaaggagauccuccgcacccaggaguccgagugcgucugcaucaacggcaccugcaccgucgucaugaccgacggcuccgccuccggcaaggccgacaccaagauccucuucaucgaggagggcaagaucguccacaccuccacccucuccggcuccgcccagcacgucgaggagugcuccugcuacccccgcuaccccggcguccgcugcgucugccgcgacaacuggaagggcuccaaccgccccaucgucgacaucaacaucaaggaccacuccaucgucuccuccuacgucugcuccggccucgucggcgacaccccccgcaagaacgacuccuccuccuccucccacugccucgaccccaacaacgaggagggcggccacggcgucaagggcugggccuucgacgacggcaacgacgucuggaugggccgcaccaucaacgagaccucccgccucggcuacgagaccuucaaggucaucgagggcugguccaaccccaaguccaagcuccagaucaaccgccaggucaucgucgaccgcggcaaccgcuccggcuacuccggcaucuucuccgucgagggcaaguccugcaucaaccgcugcuucuacgucgagcucauccgcggccgcaaggaggagaccgagguccucuggaccuccaacuccaucgucgucuucugcggcaccuccggcaccuacggcaccggcuccuggcccgacggcgccgaccucaaccucaugcucaucuga

SEQ ID NO: 118237 - RNA, 1410 nt, Artificial Sequence
  derived and/or modified CDS sequence (opt2) from neuraminidase__InfluenzaA__AFJ11720
augaaccccaaccagaagaucaucaccaucggcuccgucucccucaccaucuccaccaucugcuucuucaugcagaucgccauccucaucaccaccgucacccuccacuucaagcaguacgaguucaacuccccccccaacaaccaggucaugcucugcgagcccaccaucaucgagcgcaacaucaccgagaucgucuaccucaccaacaccaccaucgagaaggagaucugccccaagcucgccgaguaccgcaacugguccaagccccagugcgacaucaccggcuucgcccccuucuccaaggacaacuccauccgccucuccgccggcggcgacaucugggucacccgcgagcccuacgucuccugcgaccccgacaagugcuaccaguucgcccucggccagggcaccacccucaacaacguccacuccaacaacaccguccgcgaccgcacccccuaccgcacccuccucaugaacgagcucggcguccccuuccaccucggcaccaagcaggucugcaucgccugguccuccuccuccugccacgacggcaaggccuggcuccacgucugcaucaccggcgacgacaagaacgccaccgccuccuucaucuacaacggccgccucaucgacuccgucgucuccugguccaaggagauccuccgcacccaggaguccgagugcgucugcaucaacggcaccugcaccgucgucaugaccgacggcuccgccuccggcaaggccgacaccaagauccucuucaucgaggagggcaagaucguccacaccuccacccucuccggcuccgcccagcacgucgaggagugcuccugcuacccccgcuaccccggcguccgcugcgucugccgcgacaacuggaagggcuccaaccgccccaucgucgacaucaacaucaaggaccacuccaucgucuccuccuacgucugcuccggccucgucggcgacaccccccgcaagaacgacuccuccuccuccucccacugccucgaccccaacaacgaggagggcggccacggcgucaagggcugggccuucgacgacggcaacgacgucuggaugggccgcaccaucaacgagaccucccgccucggcuacgagaccuucaaggucaucgagggcugguccaaccccaaguccaagcuccagaucaaccgccaggucaucgucgacaagggcaaccgcuccggcuacuccggcaucuucuccgucgagggcaaguccugcaucaaccgcugcuucuacgucgagcucauccgcggccgcaaggaggagaccgagguccucuggaccuccaacuccaucgucgucuucugcggcaccuccggcaccuacggcaccggcuccuggcccgacggcgccgaccucaaccucaugcccaucuga

SEQ ID NO: 118238 - RNA, 1410 nt, Artificial Sequence; identical to SEQ ID NO: 117179
  derived and/or modified CDS sequence (opt2) from neuraminidase__InfluenzaA__AFJ11731

SEQ ID NO: 118239 - RNA, 1410 nt, Artificial Sequence
  derived and/or modified CDS sequence (opt2) from neuraminidase__InfluenzaA__AFJ19845
augaaccccaaccagaagaucaucaccaucggcuccgucucccucaccaucuccaccaucugcuucuucaugcagaucgccauccucaucaccaccgucacccuccacuucaagcaguacgaguucaacuccccccccaacaaccaggucaugcucugcgagcccaccaucaucgagcgcaacaucaccgagaucgucuaccucaccaacaccaccaucgagaaggagaucugccccaagcucgccgaguaccgcaacugguccaagccccagugcgacaucaccggcuucgcccccuucuccaaggacaacuccauccgccucuccgccggcggcgacaucugggucacccgcgagcccuacgucuccugcgaccccgacaagugcuaccaguucgcccucggccagggcaccacccucaacaacguccacuccaacaacaccguccgcgaccgcacccccuaccgcacccuccucaugaacgagcucggcguccccuuccaccucggcaccaagcaggucugcaucgccugguccuccuccuccugccacgacggcaaggccuggcuccacgucugcaucaccggcgacgacaagaacgccaccgccuccuucaucuacaacggccgccucgucgacuccgucgucuccugguccaaggagauccuccgcacccaggaguccgagugcgucugcaucaacggcaccugcaccgucgucaugaccgacggcuccgccuccggcaaggccgacaccaagauccucuucaucgaggagggcaagaucguccacaccuccacccucuccggcuccgcccagcacgucgaggagugcuccugcuacccccgcuaccccgacguccgcugcgucugccgcgacaacuggaagggcuccaaccgccccaucgucgacaucaacaucaaggaccacuccaucgucuccuccuacgucugcuccggccucgucggcgacaccccccgcaagaacgacuccuccuccuccucccacugccucgaccccaacaacgaggagggcggccacggcgucaagggcugggccuucgacgacggcaacgacgucuggaugggccgcaccaucaacgagaccucccgccucggcuacgagaccuucaaggucaucgagggcugguccaaccccaaguccaagcuccagaucaaccgccaggucaucgucgacaagggcaaccgcuccggcuacuccggcaucuucuccgucgagggcaaguccugcaucaaccgcugcuucuacgucgagcucauccgcggccgcaaggaggagaccgagguccucuggaccuccaacuccaucgucgucuucugcggcaccuccggcaccuacggcaccggcuccuggcccgacggcgccgaccucaaccucaugcccaucuga

SEQ ID NO: 118240 - RNA, 1410 nt, Artificial Sequence; identical to SEQ ID NO: 112774
  derived and/or modified CDS sequence (opt2) from neuraminidase__InfluenzaA__AFJ44697

SEQ ID NO: 118241 - RNA, 1410 nt, Artificial Sequence; identical to SEQ ID NO: 116293
  derived and/or modified CDS sequence (opt2) from neuraminidase__InfluenzaA__AFJ69989

SEQ ID NO: 118242 - RNA, 1410 nt, Artificial Sequence
  derived and/or modified CDS sequence (opt2) from neuraminidase__InfluenzaA__AFJ69990
augaaccccaaccagaagaucaucaccaucggcuccgucugcaugaccaucggcauggccaaccucauccuccagaucggcaacaucaccuccaucuggaucucccacuccauccagcucggcaaccagaaccagaucgagaccugcaaccaguccgucaucaccuacgagaacaacaccugggucaaccagaccuacgucaacaucuccaacaccaacuucgccgccggccaguccgucgucuccgucaagcucgccggcaacuccucccucugccccgucuccggcugggccaucuacuccaaggacaacuccauccgcaucggcuccaagggcgacgucuucgucauccgcgagcccuucaucuccugcuccccccucgagugccgcaccuucuuccucacccagggcgcccuccucaacgacaagcacuccaacggcaccaucaaggaccgcucccccuaccgcacccucauguccugccccaucggcgagguccccucccccuacaacucccgcuucgaguccgucgccugguccgccuccgccugccacgacggcaucaacuggcucaccaucggcaucuccggccccgacaacggcgccgucgccguccucaaguacaacggcaucaucaccgacaccaucaaguccuggcgcaacaacauccuccgcacccaggaguccgagugcgccugcgucaacggcuccugcuucaccgucaugaccgacggccccuccgacggccaggccuccuacaagaucuuccgcaucgagaagggcaagaucgucaaguccgucgagaugaacgcccccaacuaccacuacgaggagugcuccugcuaccccgacuccuccgagaucaccugcgucugccgcgacaacuggcacggcuccaaccgccccugggucuccuucaaccagaaccucgaguaccgcaucggcuacaucugcuccggcaucuucggcgacaacccccgccccaacgacaagaccggcuccugcggccccgucuccuccaacggcgccaacggcgucaagggcuucuccuucaaguacggcaacggcgucuggaucggccgcaccaaguccaucuccucccgcaacggcuucgagaugaucugggaccccaacggcuggaccggcaccgacaacaacuucuccaucaagcaggacaucaucggcaucaacgagugguccggcuacuccggcuccuucguccagcaccccgagcucaccggccucgacugcauccgccccugcuucugggucgagcucauccgcggccgccccaaggagaacaccaucuggaccuccggcuccuccaucuccuucugcggcgucaacuccgacaccgucggcugguccuggcccgacggcgccgagcuccccuucaccaucgacaaguga

SEQ ID NO: 118243 - RNA, 1410 nt, Artificial Sequence
  derived and/or modified CDS sequence (opt2) from neuraminidase__InfluenzaA__AFJ69991
augaaccccaaccagaagaucaucaccaucggcuccgucugcaugaccaucggcauggccaaccucauccuccagaucggcaacaucaucuccaucuggaucucccacuccauccagcucggcaaccagucccagaucgagaccugcaaccaguccgucaucaccuacgagaacaacaccugggucaaccagaccuacgucaacaucuccaacaccaacuucgccgccggccaguccgucgucuccgucaagcucgccggcaacuccucccucugccccgucuccggcugggccaucuacuccaaggacaacuccauccgcaucggcuccaagggcgacgucuucgucauccgcgagcccuucaucuccugcuccccccucgagugccgcaccuucuuccucacccagggcgcccuccucaacgacaagcacuccaacggcaccaucaaggaccgcucccccuaccgcacccucauguccugccccaucggcgagguccccucccccuacaaccaggaccucucccacuccgccugguccgccuccgccugccacgacggcaucaacuggcucaccaucggcaucuccggccccgacaacggcgccgucgccguccucaaguacaacggcaucaucaccgacaccaucaaguccuggcgcaacaacauccuccgcacccaggaguccgagugcgccugcgucaacggcuccugcuucaccaucaugaccgacggccccuccgacggccaggccuccuacaagaucuuccgcaucgagaagggcaagaucgucaaguccgucgagaugaacgcccccaacuaccacuacgaggagugcuccugcuaccccgacuccuccgagaucaccugcgucugccgcgacaacuggcacggcuccaaccgccccugggucuccuucaaccagaaccucgaguaccagaucggcuacaucugcuccggcaucuucggcgacaacccccgccccaacgacaagaccggcuccugcggccccgucuccuccaacggcgccaacggcgucaagggcuucuccuucaaguacggcaacggcgucuggaucggccgcaccaaguccaucuccucccgcaagggcuucgagaugaucugggaccccaacggcuggaccggcaccgacaacaacuucuccaucaagcaggacaucgucggcaucaacgagugguccggcuacuccggcuccuucguccagcaccccgagcucaccggccucgacugcauccgccccugcuucugggucgagcucauccgcggccgccccaaggagaacaccaucuggaccuccggcuccuccaucuccuucugcggcgucaacuccgacaccgucggcugguccuggcccgacggcgccgagcuccccuucaccaucgacaaguga

SEQ ID NO: 118244 - RNA, 1410 nt, Artificial Sequence; identical to SEQ ID NO: 113600
  derived and/or modified CDS sequence (opt2) from neuraminidase__InfluenzaA__AFJ69992

SEQ ID NO: 118245 - RNA, 1410 nt, Artificial Sequence
  derived and/or modified CDS sequence (opt2) from neuraminidase__InfluenzaA__AFJ69993
augaaccccaaccagaagaucaucaccaucggcuccgucucccucaccaucuccaccaucugcuucuucaugcagaucgccauccucaucaccaccgucacccuccacuucaagcaguacgaguucaacuccccccccaacaaccaggucaugcucugcgagcccaccaucaucgagcgcaacaucaccgagaucgucuaccucaccaacaccaccaucgagaaggagaucugccccaagcucgccgaguaccgcaacugguccaagccccagugcgacaucaccggcuucgcccccuucuccaaggacaacuccauccgccucuccgccggcggcgacaucugggucacccgcgagcccuacgucuccugcgaccccgacaagugcuaccaguucgcccucggccagggcaccacccucaacaacguccacuccaacaacaccguccgcgaccgcacccccuaccgcacccuccucaugaacgagcucggcguccccuuccaccucggcaccaagcaggucugcaucgccugguccuccuccuccugccacgacggcaaggccuggcuccacgucugcaucaccggcgacgacaagaacgccaccgccuccuucaucuacaacggccgccucgucgacuccgucgucuccugguccaaggagauccuccgcacccaggaguccgagugcgucugcaucaacggcaccugcaccgucgucaugaccgacggcuccgccuccggcaaggccgacaccaagauccucuucaucgaggagggcaagaucguccacaccuccacccucuccggcuccgcccagcacgucgaggagugcuccugcuacccccgcuaccccggcguccgcugcgucugccgcgacaacuggaagggcuccaaccgccccaucgucgacaucaacaucaaggaccacuccaucgucuccuccuacgucugcuccggccucgucggcgacaccccccgcaagaacgacuccuccuccuccucccacugccucgaccccaacaacgaggagggcggccacggcgucaagggcugggccuucgacgacggcaacgacgucuggaugggccgcaccaucaacgagaccucccgccucggcuacgagaccuucaaggucaucgagggcugguccaaccccaaguccaagcuccagaucaaccgccaggucaucgucggccgcggcaaccgcuccggcuacuccggcaucuucuccgucgagggcaaguccugcaucaaccgcugcuucuacgucgagcucauccgcggccgcaaggaggagaccgagguccucuggaccuccaacuccaucgucgucuucugcggcaccuccggcaccuacggcaccggcuccuggcccgacggcgccaaccucaaccucaugcccaucuga

SEQ ID NO: 118246 - RNA, 1410 nt, Artificial Sequence; identical to SEQ ID NO: 115554
  derived and/or modified CDS sequence (opt2) from neuraminidase__InfluenzaA__AFJ69994

SEQ ID NO: 118247 - RNA, 1413 nt, Artificial Sequence
  derived and/or modified CDS sequence (opt2) from neuraminidase__InfluenzaA__AFJ74389
augaaccccaaccagaagaucaucaccaucggcuccaucuccaucgccaucggcaucaucucccucauccuccagaucggcaacaucaucuccaucugggccucccacuccauccagaccggcucccagaaccacaccggcgucugcaaccagcgcaucaucaccuacgagaacuccaccugggucaaccagaccuacgucaacaucaacaacaccaacgucgucgccggcaaggacaagaccuccaugacccucgccggcaacuccucccucugccccauccgcggcugggccaucuacaccaaggacaacuccauccgcaucggcuccaagggcgacgucuucgucauccgcgagcccuucaucuccugcucccaccucgagugccgcaccuucuuccucacccagggcgcccuccucaacgacaagcacuccaacggcaccgucaaggaccgcucccccuaccgcgcccucauguccugcccccucggcgaggcccccucccccuacaacucccgcuucgaguccgucgccugguccgccuccgccugccacgacggccucggcuggcucaccaucggcaucuccggccccgacaacggcgccgucgccguccucaaguacaacggcaucaucaccgagaccaucaaguccuggaagaagcgcauccuccgcacccaggaguccgagugcgucugcaugaacggcuccugcuucaccaucaugaccgacggccccuccaacggcgccgccuccuaccgcaucuucaagaucgagaagggccgcgucaccaaguccaucgagcucgacgcccccaacuaccacuacgaggagugcuccugcuaccccgacaccggcaccgucaugugcgucugccgcgacaacuggcacggcuccaaccgccccugggucuccuucaaccagaaccucgacuaccagaucggcuacaucugcuccggcgucuucggcgacaacccccgccccaaggacggcgagggcuccugcaaccccgucaccgucgacggcgccgacggcgucaagggcuucuccuaccgcuacggcaacggcgucuggaucggccgcaccaaguccaaccgccuccgcaagggcuucgagaugaucugggaccccaacggcuggaccgacaccgacuccgacuucuccaugaagcaggacaucgucgccaugaccgacugguccggcuacuccggcuccuucguccagcaccccgagcucaccggccucgacugcaugcgccccugcuucugggucgagcucguccgcggccucccccgcgagaacaccaccaucuggaccuccggcuccuccaucuccuucugcggcgucaacuccgacaccgccaacugguccuggcccgacggcgccgagcuccccuucaccaucgacaaguga

SEQ ID NO: 118248 - RNA, 1410 nt, Artificial Sequence
  derived and/or modified CDS sequence (opt2) from neuraminidase__InfluenzaA__AFJ74399
augaaccccaaccagaagaucaucaccaucggcuccgucucccucaccaucgccaccaucugcuuccucaugcagaucgccauccucgucaucacccucacccuccacuucaagcaguacgagugcaacuccccccccaacaaccaggucaugcucugcgagcccaccaucaucgagcgcaacaucaccgagaucgucuaccucaccaacaccaccaucgagaaggagaucugccccaagcucgccgaguaccgcaacugguccaagccccagugcaagaucaccggcuucgcccccuucuccaaggacaacuccauccgccucuccgccggcggcgacaucugggucacccgcgagcccuacgucuccugcgaccccggcaagugcuaccaguucgcccucggccagggcaccacccucaacaaccgccacuccaacgacaccguccacgaccgcacccccuaccgcacccuccucaugaacgagcucggcguccccuuccaccucggcaccaagcaggucugcaucgccugguccuccuccuccugccacgacggcaaggccuggcuccacgucugcgucaccggccacaacgagaacgccaccgccuccuucaucuacgacggccgccucgucgacuccaucggcuccugguccaagaacauccuccgcacccaggaguccgagugcgucugcaucaacggcaccugcaccgucgucaugaccgacggcuccgccuccggccgcgccgacaccaagauccucuucaucgaggagggcaagaucguccacaucuccccccucuccggcuccgcccagcacgucgaggagugcuccugcuacccccgcuaccccggcguccgcugcgucugccgcgacaacuggaagggcuccaaccgccccaucgucgacaucaacgucaaggacuucuccaucgucuccuccuacgucugcuccggccucgucggcgacaccccccgcaagaacgacuccuccuccuccucccacugccucaaccccaacaacgaggagggcggccacggcgucaagggcugggccuucgacgacggcaacgacgucuggaugggccgcaccaucuccgagaagcuccgcuccggcuacgagaccuucaaggucaucggcggcugguccaagcccaacuccaagcuccagaucaaccgccaggucaucgucgaccgcggcaaccgcuccggcuacuccggcaucuucuccgucgagggcaaguccugcaucaaccgcugcuucuacgucgagcucauccgcggccgcaagcaggagaccgaggucugguggaccuccaacuccaucgucgucuucugcggcaccuccggcaccuacggcaccggcuccuggcccgacggcgccgacaucaaccucaugcccaucuga

SEQ ID NO: 118249 - RNA, 1410 nt, Artificial Sequence
  derived and/or modified CDS sequence (opt2) from neuraminidase__InfluenzaA__AFJ74410
augaaccccaaccagaagaucaucaccaucggcuccgucucccucaccaucgccaccaucugcuuccucaugcagaucgccauccucgucaugaccgucacccuccacuucaagcaguacgagugcaacuccccccccaacaaccaggucaugcucugcgagcccaccaucaucgagcgcaacaucaccgagaucgucuaccucaccaacaccaccaucgagaaggagaucugccccaagcucgccgaguaccgcaacugguccaagccccagugcaagaucaccggcuucgcccccuucuccaaggacaacuccauccgccucuccgccggcggcgacaucugggucacccgcgagcccuacgucuccugcgaccccggcaagugcuaccaguucgcccucggccagggcaccacccucaacaaccgccacuccaacgacaccguccacgaccgcacccccuaccgcacccuccucaugaacgagcucggcguccccuuccaccucggcaccaagcaggucugcaucgccugguccuccuccuccugccacgacggcaaggccuggcuccacgucugcgucaccggccacaacgagaacgccaccgccuccuucaucuacgacggccgccucgucgacuccaucggcuccugguccaagaacauccuccgcacccaggaguccgagugcgucugcaucaacggcaccugcaccgucgucaugaccgacggcuccgccuccggccgcgccgacaccaagauccucuucaucgaggagggcaagaucguccacaucuccccccucuccggcuccgcccagcacgucgaggagugcuccugcuacccccgcuaccccggcguccgcugcgucugccgcgacaacuggaagggcuccaaccgccccaucgucgacaucaacgucaaggacuacuccaucaucuccuccuacgucugcuccggccucgucggcgacaccccccgcaagaacgacuccuccuccuccucccacugccucaaccccaacaacgaggagggcggccacggcgucaagggcugggccuucgacgacggcaacgacgucuggaugggccgcaccaucuccgagaagcuccgcuccggcuacgagaccuucaaggucaucggcggcugguccaagcccaacuccaagcuccagaucaaccgccaggucaucgucgaccgcggcaaccgcuccggcuacuccggcaucuucuccgucgagggcaaguccugcaucaaccgcugcuucuacgucgagcucauccgcggccgcaagcaggagaccgaggucugguggaccuccaacuccaucgucgucuucugcggcaccuccggcaccuacggcaccggcuccuggcccgacggcgccgacaucaaccucaugcccaucuga

SEQ ID NO: 118250 - RNA, 1410 nt, Artificial Sequence; identical to SEQ ID NO: 110351
  derived and/or modified CDS sequence (opt2) from neuraminidase__InfluenzaA__AFJ74451

SEQ ID NO: 118251 - RNA, 1413 nt, Artificial Sequence
  derived and/or modified CDS sequence (opt2) from neuraminidase__InfluenzaA__AFJ74462
augaaccccaaccagaagaucaucaccaucggcuccaucuccgucgccaucggcaucaucucccucauccuccagaucggcaacaucaucuccaucugggccucccacuccauccagaccggcucccagaacuacaccggcaucugcaaccagcgcaucaucaccuacgagaacuccaccugggucaaccagaccuacgucaacaucaacaacaccaacgucgucgccggcaaggacaagaccuccaugacccucgccggcaacuccucccucugccccauccgcggcugggccaucuacaccaaggacaacuccauccgcaucggcuccaagggcgacgucuucgucauccgcgagcccuucaucuccugcucccaccucgagugccgcaccuucuuccucacccagggcgcccuccucaacgacaagcacuccaacggcaccgucaaggaccgcucccccuaccgcgcccucauguccugcccccucggcgaggcccccucccccuacaacucccgcuucgaguccgucgccugguccgccuccgccugccacgacggccucggcuggcucaccaucggcaucuccggccccgacaacggcgccgucgccguccucaaguacaacggcaucaucaccgagaccaucaaguccuggaagaagcagauccuccgcacccaggaguccgagugcgucugcgucaacggcuccugcuucaccaucaugaccgacggccccuccaaccgcgccgccuccuaccgcaucuucaagaucgagaagggccgcgucaccaaguccaucgagcucgacgcccccaacuaccacuacgaggagugcuccugcuaccccgacaccggcaccgucaugugcgucugccgcgacaacuggcacggcuccaaccgccccugggucuccuucaaccagaaccucgacuaccagaucggcuacaucugcuccggcgucuucggcgacaacccccgccccaaggacggcgagggcuccugcaaccccgucaccgucgacggcgccgacggcgucaagggcuucuccuaccgcuacggcaacggcgucuggaucggccgcaccaaguccaaccgccuccgcaagggcuucgagaugaucugggaccccaacggcuggaccgacaccgacuccgacuucuccaugaagcaggacgucgucgccaugaccgacugguccggcuacuccggcuccuucguccagcaccccgagcucaccggccucgacugcaugcgccccugcuucugggucgagcucguccgcggccucccccgcgagaacaccaccaucuggaccuccggcuccuccaucuccuucugcggcgucaacuccgagaccgccaacugguccuggcccgacggcgccgagcuccccuucaccaucgacaaguga

SEQ ID NO: 118252 - RNA, 1410 nt, Artificial Sequence
  derived and/or modified CDS sequence (opt2) from neuraminidase__InfluenzaA__AFJ74517
augaaccccaaccagaagaucaucaccaucggcuccgucucccucaccaucgccaccaucugcuuccucaugcagaucgccauccucgucaccaccgucacccuccacuucaagcaguacgagugcaacuccccccccaacaaccaggucaugcucugcgagcccaccaucaucgagcgcaacaucaccgagaucgucuacaugaccaacaccaccaucgagaaggagaucugccccaagcucgccgaguaccgcaacugguccaagccccagugcaagaucaccggcuucgcccccuucuccaaggacaacuccauccgccucuccgccggcggcgacaucugggucacccgcgagcccuacgucuccugcgaccccgacaagugcuaccaguucgcccucggccagggcaccacccucaacaaccgccacuccaacgacaccguccacgaccgcacccccuaccgcacccuccucaugaacgagcucggcguccccuuccaccucggcaccaagcaggucugcaucgccugguccuccuccuccugccacgacggcaaggccuggcuccacgucugcgucaccggccacgacgagaacgccaccgccuccuucaucuacgacggccgccucgucgacuccaucggcuccugguccaagaagauccuccgcacccaggaguccgagugcgucugcaucaacggcaccugcaccgucgucaugaccgacggcuccgccuccggccgcgccgacaccaagauccucuucaucgaggagggcaagaucguccacaucucccagcucuccggcuccgcccagcacgucgaggagugcuccugcuacccccgcuaccccggcguccgcugcgucugccgcgacaacuggaagggcuccaaccgccccaucgucgacaucaacgucaaggacuacuccaucgucuccuccuacgucugcuccggccucgucggcgacaccccccgcaagaacgacuccuccuccuccucccacugccucaaccccaacaacgaggagggcggccacggcgucaagggcugggccuucgacgacggcaacgacgucuggaugggccgcaccaucuccgagaagcuccgcuccggcuacgagaccuucaaggucaucgagggcugguccaagcccaacuccaagcuccagaucaaccgccaggucaucgucgaccgcggcaaccgcuccggcuacuccggcaucuucuccgucgagggcaaguccugcaucaaccgcugcuucuacgucgagcucauccgcggccgcaagcaggagaacgaggucugguggaccuccaacuccaucgucgucuucugcggcaccuccggcaccuacggcaccggcuccuggcccgacggcgccgacaucaaccucaugcccaucuga

SEQ ID NO: 118253 - RNA, 1410 nt, Artificial Sequence
  derived and/or modified CDS sequence (opt2) from neuraminidase__InfluenzaA__AFJ74564
augaaccccaaccagaagaucaucaccaucggcuccgucucccucaccaucgccaccaucugcuuccucaugcagaucgccauccucgucaccaccgucacccuccacuucaagcaguacgagugcaacuccccccccaacaaccaggucaugcucugcgagcccaccaucaucgagcgcaacaucaccgagaucgucuaccucaccaacaccaccaccgagaaggagaucugccccaagcucgccgaguaccgcaacugguccaagccccagugcaacaucaccggcuucgcccccuucuccaaggacaacuccauccgccucuccgccggcggcgacaucugggucacccgcgagcccuacgucuccugcgaccccgacaagugcuaccaguucgcccucggccagggcaccacccucaacaacggccacuccaacgacaccguccacgaccgcacccccuaccgcacccuccucaugaacgagcucggcguccccuuccaccucggcacccgccaggucugcaucgccugguccuccuccuccugccacgacggcaaggccuggcuccacgucugcgucaccggcgacgacgagaacgccaccgccuccuucaucuacaacggccgccucgucgacuccaucggcuccugguccaagaagauccuccgcacccaggaguccgagugcgucugcaucaacggcaccugcaccgucgucaugaccgacggcuccgccuccggcaaggccgacaccaagauccucuucaucgaggagggcaagaucguccacaucuccacccucuccggcuccgcccagcacgucgaggagugcuccugcuacccccgcuaccccggcguccgcugcgucugccgcgacaacuggaagggcuccaaccgccccaucgucgacaucaacgucaaggacuacuccaucgucuccuccuacgucugcuccggccucgucggcgacaccccccgcaagaacgacuccuucuccuccucccacugccucgaccccaacaacgaggagggcggccacggcgucaagggcugggccuucgacgacggcaacgacgucuggaugggccgcaccaucuccgagacccuccgcuccggcuacgagaccuucaaggucaucgagggcugguccaagcccaacuccaagcuccagaucaaccgccaggucaucgucgagcgcggcaaccgcuccggcuacuccggcaucuucuccgucgagggcaaguccugcaucaaccgcugcuucuacgucgagcucauccgcggccgcaaggaggagaccgaggucugguggaccuccaacuccaucgucgucuucugcggcaccuccggcaccuacggcaccggcuccuggcccgacggcgccgacaucaaccucaugcccaucuga

SEQ ID NO: 118254 - RNA, 1413 nt, Artificial Sequence
  derived and/or modified CDS sequence (opt2) from neuraminidase__InfluenzaA__AFJ74639
augaaccccaaccagaagaucaucaccaucggcuccaucuccaucgccaucggcaucaucucccucaugcuccagaucggcaacaucaucuccaucugggccucccacuccauccagaccggcucccagaaccacaccggcaucugcaaccagcgcaucaucaccuacgagaacaacaccugggucaaccacaccuacgucaacaucaacaacaccaacgucgucgccggcaaggacaagaccuccgucacccucgccggcaacuccucccucugcuccaucuccggcugggccaucuacaccaaggacaacuccauccgcaucggcuccaagggcgacgucuucgucauccgcgagcccuucaucuccugcucccaccucgagugccgcaccuucuuccucacccagggcgcccuccucaacgacaagcacuccaacggcaccgucaaggaccgcucccccuaccgcgcccucauguccugcccccucggcgaggcccccucccccuacaacuccaaguucgaguccgucgccugguccgccuccgccugccacgacggcaugggcuggcucaccaucggcaucuccggccccgacaacggcgccgucgccguccucaaguacaacggcaucaucaccgagaccaucaaguccuggaagaagcgcauccuccgcacccaggaguccgagugcgucugcaugaacggcuccugcuucaccaucaugaccgacggccccuccaacggcgccgccuccuacaagaucuucaagaucgagaagggcaaggucaccaaguccaucgagcucaacgcccccuccuuccacuacgaggagugcuccugcuaccccgacaccggcaccgucaugugcgucugccgcgacaacuggcacggcuccaaccgccccugggucuccuucaaccagaaccucgacuaccagaucggcuacaucugcuccggcgucuucggcgacaacccccgccccaaggacggcgagggcuccugcaaccccgucaccgucgacggcgccgacggcgucaagggcuucuccuacaaguacggcaacggcgucuggaucggccgcaccaaguccaaccgccuccgcaagggcuucgagaugaucugggaccccaacggcuggaccaacaccgacuccgacuucuccgucaagcaggacgucgucgccaucaccgacugguccggcuacuccggcuccuucguccagcaccccgagcucaccggccucgacugcauccgccccugcuucugggucgagcucguccgcggccucccccgcgagaacaccaccaucuggaccuccggcuccuccaucuccuucugcggcgucaacuccgacaccgccaacugguccuggcccgacggcgccgagcuccccuucaccaucgacaaguga

SEQ ID NO: 118255 - RNA, 1410 nt, Artificial Sequence
  derived and/or modified CDS sequence (opt2) from neuraminidase__InfluenzaA__AFJ74640
augaaccccaaccagaagaucaucaccaucggcuccgucucccucaccaucuccaccaucugcuucuucaugcagaucgccauccucaucaccaccgucacccuccacuucaagcaguacgaguucaacuccccccccaacaaccaggucaugcucugcgagcccaccaucaucgagcgcaacaucaccgagaucgucuaccucaccaacaccaccaucgagaaggagaucugccccaagcucgccggcuaccgcaacugguccaagccccagugcaacaucaccggcuucgcccccuucuccaaggacaacuccauccgccucuccgccggcggcgacaucugggucacccgcgagcccuacgucuccugcgaccccgacaagugcuaccaguucgcccucggccagggcaccacccucaacaacguccacuccaacgacaccguccacgaccgcacccccuaccgcacccuccucaugaacgagcucggcguccccuuccaccucggcaccaagcaggucugcaucgccugguccuccuccuccugccacgacggcaaggccuggcuccacgucugcgucaccggcgacgacgagaacgccaccgccuccuucaucuacaacggccgccucgucgacuccaucgucuccugguccaagaagauccuccgcacccaggaguccgagugcgucugcaucaacggcaccugcaccgucgucaugaccgacggcuccgccuccggcaaggccgacaccaagauccucuucaucgaggagggcaagaucguccacaccuccacccucuccggcuccgcccagcacgucgaggagugcuccugcuacccccgcuaccccggcguccgcugcgucugccgcgacaacuggaagggcuccaaccgccccaucgucgacaucaacaucaaggacuacuccaucgucuccuccuacgucugcuccggccucgucggcgacaccccccgcaagaacgacuccuccuccuccucccacugccucgaccccaacaacgaggagggcggccacggcgucaagggcugggccuucgacgacggcaacgacgucuggaugggccgcaccaucuccgagaagcuccgcuccggcuacgagaccuucaaggucaucgagggcugguccaaccccaacuccaagcuccagaucaaccgccaggucaucgucgacaagggcaaccgcuccggcuacuccggcaucuucuccgucgagggcaaguccugcaucaaccgcugcuucuacgucgagcucauccgcggccgcaagcaggagaccgagguccucuggaccuccaacuccaucgucgucuucugcggcaccuccggcaccuacggcaccggcuccuggcccgacggcgccgacaucaaccucaugcccaucuga

SEQ ID NO: 118256 - RNA, 1413 nt, Artificial Sequence; identical to SEQ ID NO: 118254
  derived and/or modified CDS sequence (opt2) from neuraminidase__InfluenzaA__AFJ74659

SEQ ID NO: 118257 - RNA, 1413 nt, Artificial Sequence
  derived and/or modified CDS sequence (opt2) from neuraminidase__InfluenzaA__AFJ74679
augaaccccaaccagaagaucaucaccaucggcuccaucuccaucgccaucggcaucaucucccucaugcuccagaucggcaacaucaucuccaucugggccucccacuccauccagaccggcucccagaaccacaccggcaucugcaaccagcgcaucaucaccuacgagaacaacaccugggucaaccacaccuacgucaacaucaacaacaccaacgucgucgccggcaaggacaagaccuccgucacccucgccggcaacuccucccucugcuccaucuccggcugggccaucuacaccaaggacaacuccauccgcaucggcuccaagggcgacgucuucgucauccgcgagcccuucaucuccugcucccaccucgagugccgcaccuucuuccucacccagggcgcccuccucaacgacaagcacuccaacggcaccgucaaggaccgcucccccuaccgcgcccucauguccugcccccucggcgaggcccccucccccuacaacuccaaguucgaguccgucgccugguccgccuccgccugccacgacggcaugggcuggcucaccaucggcaucuccggccccgacaacggcgccgucgccguccucaaguacaacggcaucaucaccgagaccaucaaguccuggaagaagcgcauccuccgcacccaggaguccgagugcgucugcaugaacggcuccugcuucaccaucaugaccgacggccccuccaacggcgccgccuccuacaagaucuucaagaucgagaagggcaaggucaccaaguccaucgagcucaacgcccccuccuuccacuacgaggagugcuccugcuaccccgacaccggcaccgucaugugcgucugccgcgacaacuggcacggcuccaaccgccccugggucuccuucaaccagaaccucgacuaccagaucggcuacaucugcuccggcgucuucggcgacaacccccgccccaaggacggcgagggcuccugcaaccccgucaccgucgacggcgccgacggcgucaagggcuucuccuacaaguacgacaacggcgucuggaucggccgcaccaaguccaaccgccuccgcaagggcuucgagaugaucugggaccccaacggcuggaccaacaccgacuccgacuucuccgucaagcaggacgucgucgccaucaccgacugguccggcuacuccggcuccuucguccagcaccccgagcucaccggccucgacugcauccgccccugcuucugggucgagcucguccgcggccucccccgcgagaacaccaccaucuggaccuccggcuccuccaucuccuucugcggcgucaacuccgacaccgccaacugguccuggcccgacggcgccgagcuccccuucaccaucgacaaguga

SEQ ID NO: 118258 - RNA, 1410 nt, Artificial Sequence
  derived and/or modified CDS sequence (opt2) from neuraminidase__InfluenzaA__AFJ74680
augaaccccaaccagaagaucaucaccaucggcuccgucucccucaccaucuccaccaucugcuucuucaugcagaucgccauccucaucaccaccgucacccuccacuucaagcaguacgaguucaacuccccccccaacaaccaggucauccucugcgagcccaccaucaucgagcgcaacaucaccgagaucgucuaccucaccaacaccaccaucgagaaggagaucugccccaagcucgccgaguaccgcaacugguccaagccccagugcaacaucaccggcuucgcccccuucuccaaggacaacuccauccgccucuccgccggcggcgacaucugggucacccgcgagcccuacgucuccugcgaccccgacaagugcuaccaguucgcccucggccagggcaccacccucaacaacguccacuccaacgacaccguccacgaccgcacccccuaccgcacccuccucaugaacgagcucggcguccccuuccaccucggcaccaagcaggucugcaucgccugguccuccuccuccugccacgacggcaaggccuggcuccacgucugcgucaccggcgacgacgagaacgccaccgccuccuucaucuacaacggccgccucgucgacuccaucgucuccugguccaagaagauccuccgcacccaggaguccgagugcgucugcaucaacggcaccugcaccgucgucaugaccgacggcuccgccuccggcaaggccgacaccaagauccucuucaucaaggagggcaagaucguccacaccuccacccucuccggcuccgcccagcacgucgaggagugcuccugcuacccccgcuaccccggcguccgcugcgucugccgcgacaacuggaagggcuccaaccgccccaucgucgacaucaacaucaaggacuacuccaucgucuccuccuacgucugcuccggccucgucggcgacaccccccgcaagaacgacuccuccuccuccucccacugccucgaccccaacaacgaggagggcggccacggcgucaagggcugggccuucgacgacggcaacgacgucuggaugggccgcaccaucuccgagaagcuccgcuccggcuacgagaccuucaaggucaucgagggcugguccaaccccaacuccaagcuccagaucaaccgccaggucaucgucgaccgcggcaaccgcuccggcuacuccggcaucuucuccgucgagggcaaguccugcaucaaccgcugcuucuacgucgagcucauccgcggccgcaagcaggagaccgagguccucuggaccuccaacuccaucgucgucuucugcggcaccuccggcaccuacggcaccggcuccuggcccgacggcgccgacaucaaccucaugcccaucuga

SEQ ID NO: 118259 - RNA, 1410 nt, Artificial Sequence
  derived and/or modified CDS sequence (opt2) from neuraminidase__InfluenzaA__AFJ74701
augaaccccaaccagaagaucaucaccaucggcuccgucucccucaccaucgccaccaucugcuuccucaugcagaucgccauccucgucaccaccgucacccuccacuucaaccaguacgagugcaacuccccccccaacaaccaggucaugcucugcgagcccaccaucaucgagcgcaacaucaccgagaucgucuaccucaccaacaccaccaucgagaaggagaucugccccaagcucgccgaguaccgcaucugguccaagccccagugcaacaucaccggcuucgcccccuucuccaaggacaacuccauccgccucuccgccggcggcgacaucugggucacccgcgagcccuacgucuccugcgaccccgacaagugcuaccaguucgcccucggccagggcaccacccucaacaacggccacuccaacgacaccguccacgaccgcacccccuaccgcacccuccucaugaacgagcucggcguccccuuccaccucggcacccgccaggucugcauggccugguccuccuccuccugccacgacggcaaggccuggcuccacgucugcgucaccggcgacgacgagaacgccaccgccuccuucaucuacaacggccgccucgucgacuccaucggcuccugguccaagaagauccuccgcacccaggaguccgagugcgucugcaucaacggcaccugcaccgucgucaugaccgacggcuccgccuccggcaaggccgacaccaagauccucuucaucgaggagggcaagaucguccacaucuccacccucuccggcuccgcccagcacgucgaggagugcuccugcuacccccgcuaccccggcguccgcugcgucugccgcgacaacuggaagggcuccaaccgccccaucgucgacaucaacgucaaggacuacuccaucgucuccuccuacgucugcuccggccucgucggcgacaccccccgcaagaacgacuccuucuccuccucccacugccucgaccccaacaacgaggagggcggccacggcgucaagggcugggccuucgacgacggcaacgacgucuggaugggccgcaccaucuccgagaagcuccgcuccggcuacgagaccuucaaggucaucgagggcugguccaagcccaacuccaagcuccaggucaaccgccaggucaucgucgagcgcggcaaccgcuccggcuacuccggcaucuucuccgucgagggcaaguccugcaucaaccgcugcuucuacgucgagcucauccgcggccgcaaggaggagaccgaggucugguggaccuccaacuccaucgucgucuucugcggcaccuccggcaccuacggcaccggcuccuggcccgacggcgccgacaucaaccucaugcccaucuga

SEQ ID NO: 118260 - RNA, 1410 nt, Artificial Sequence
  derived and/or modified CDS sequence (opt2) from neuraminidase__InfluenzaA__AFJ74731
augaaccccaaccagaagaucaucaccaucggcuccgucucccucaccaucuccaccaucugcuucuucaugcagaucgccauccucaucaccaccgucacccuccacuucaagcaguacgaguucaacuccccccccaacaaccaggucaugcucugcgagcccaccaucaucgagcgcaacaucaccgagaucgucuaccucaccaacaccaccaucgagaaggagaucugccccaagcucgccgaguaccgcaacugguccaagccccagugcaacaucaccggcuucgcccccuucuccaaggacaacuccauccgccucuccgccggcggcgacaucugggucacccgcgagcccuacgucuccugcgaccccgacaagugcuaccaguucgcccucggccagggcaccacccucaacaacguccacuccaacgacaccguccacgaccgcacccccuaccgcacccuccucaugaacgagcucggcguccccuuccaccucggcaccaagcaggucugcaucgccugguccuccuccuccugccacgacggcaaggccuggcuccacgucugcgucaccggcgacgacgagaacgccaccgccuccuucaucuacaacggccgccucgucgacuccaucgucuccugguccaagaagauccuccgcacccaggaguccgagugcgucugcaucaacggcaccugcaccgucgucaugaccgacggcuccgccuccggcaaggccgacaccaagauccucuucaucgaggagggcaagaucguccacaccuccacccucuccggcuccgcccagcacgucgaggagugcuccugcuacccccgcuaccccggcguccgcugcgucugccgcgacaacuggaagggcuccaaccgccccaucgucgacaucaacaucaaggacuacuccaucgucuccuccuacgucugcuccggccucgucggcgacaccccccgcaagaccgacuccuccuccuccucccacugccucgaccccaacaacgaggagggcggccacggcgucaagggcugggccuucgacgacggcaacgacgucuggaugggccgcaccaucuccgagaagcuccgcuccggcuacgagaccuucaaggucaucgagggcugguccaaccccaacuccaagcuccagaucaaccgccaggucaucgucgaccgcggcaaccgcuccggcuacuccggcaucuucuccgucgagggcaaguccugcaucaaccgcugcuucuacgucgagcucauccgcggccgcaaccaggagaccgagguccucuggaccuccaacuccaucgucgucuucugcggcaccuccggcaccuacggcaccggcuccuggcccgacggcgccgagaucaaccucaugcccaucuga

SEQ ID NO: 118261 - RNA, 1413 nt, Artificial Sequence; identical to SEQ ID NO: 118254
  derived and/or modified CDS sequence (opt2) from neuraminidase__InfluenzaA__AFJ74766

SEQ ID NO: 118262 - RNA, 1410 nt, Artificial Sequence
  derived and/or modified CDS sequence (opt2) from neuraminidase__InfluenzaA__AFJ74767
augaaccccaaccagaagaucaucaccaucggcuccgucucccucaccaucuccaccaucugcuucuucaugcagaucgccauccucaucaccaccgucacccuccacuucaagcaguacgaguucaacuccccccccaacaaccaggucaugcucugcgagcccaccaucaucgagcgcaacaucaccgagaucgucuaccucaccaacaccaccaucgagaaggagaucugccccaagcucgccgaguaccgcaacugguccaagccccagugcaacaucaccggcuucgcccccuucuccaaggacaacuccauccgccucuccgccggcggcgacaucugggucacccgcgagcccuacgucuccugcgaccccgacaagugcuaccaguucgcccucggccagggcaccacccucaacaacguccacuccaacgacaccguccacgaccgcacccccuaccgcacccuccucaugaacgagcucggcguccccuuccaccucggcaccaagcaggucugcaucgccugguccuccuccuccugccacgacggcaaggccuggcuccacgucugcgucaccggcgacgacgagaacgccaccgccuccuucaucuacaacggccgccucgucgacuccaucgucuccugguccaagaagauccuccgcacccaggaguccgagugcgucugcaucaacggcaccugcaccgucgucaugaccgacggcuccgccuccggcaaggccgacaccaagauccucuucaucgaggagggcaagaucguccacaccuccacccucuccggcuccgcccagcacgucgaggagugcuccugcuacccccgcuaccccggcguccgcugcgucugccgcgacaacuggaagggcuccaaccgccccaucgucgacaucaacaucaaggacuacuccaucgucuccuccuacgucugcuccggccucgucggcgacaccccccgcaagaacgacuccuccuccuccucccacugccucgaccccaacaacgaggagggcggccacggcgucaagggcugggccuucgacgacggcaacgacgucuggaugggccgcaccaucuccgagaagcuccgcuccggcuacgagaccuucaaggucaucgagggcugguccaaccccaacuccaagcuccagaucaaccgccaggucaucgucgaccgcggcaaccgcuccggcuacuccggcaucuucuccgucgagggcaaguccugcaucaaccgcugcuucuacgucgagcucauccgcggccgcaaccaggagaccgagguccucuggaccuccaacuccaucgucgucuucugcggcaccuccggcaccuacggcaccggcuccuggcccgacggcgccgacaucaaccucaugcccaucuga

SEQ ID NO: 118263 - RNA, 1410 nt, Artificial Sequence; identical to SEQ ID NO: 118262
  derived and/or modified CDS sequence (opt2) from neuraminidase__InfluenzaA__AFJ74783

SEQ ID NO: 118264 - RNA, 1410 nt, Artificial Sequence; identical to SEQ ID NO: 110181
  derived and/or modified CDS sequence (opt2) from neuraminidase__InfluenzaA__AFJ74807

SEQ ID NO: 118265 - RNA, 1410 nt, Artificial Sequence; identical to SEQ ID NO: 110181
  derived and/or modified CDS sequence (opt2) from neuraminidase__InfluenzaA__AFJ74822

SEQ ID NO: 118266 - RNA, 1410 nt, Artificial Sequence; identical to SEQ ID NO: 110750
  derived and/or modified CDS sequence (opt2) from neuraminidase__InfluenzaA__AFJ74834

SEQ ID NO: 118267 - RNA, 1410 nt, Artificial Sequence; identical to SEQ ID NO: 110181
  derived and/or modified CDS sequence (opt2) from neuraminidase__InfluenzaA__AFJ74845

SEQ ID NO: 118268 - RNA, 1413 nt, Artificial Sequence
  derived and/or modified CDS sequence (opt2) from neuraminidase__InfluenzaA__AFJ75039
augaaccccaaccagaagaucaucaccaucggcuccaucuccaucgccaucggcaucaucucccucaugcuccagaucggcaacaucaucuccaucugggccucccacuccauccagaccggcucccagaaccacaccggcaucugcaaccagcgcaucaucaccuacgagaacuccaccugggucaacaacaccuacgucaacaucaacaacaccuccgucgucgccgagaaggacaagaccuccgucacccucgccggcaacuccucccucugcuccaucuccggcugggccaucuacaccaaggacaacuccauccgcaucggcuccaagggcgacgucuucgucauccgcgagcccuucaucuccugcucccaccucgagugccgcaccuucuuccucacccagggcgcccuccucaacgacaagcacuccaacggcaccgucaaggaccgcucccccuaccgcgcccucauguccugcccccucggcgaggcccccucccccuacaacuccaaguucgaguccgucgccugguccgccuccgccugccacgacggcaugggcuggcucaccaucggcaucuccggccccgacaacggcgccgucgccguccucaaguacaacggcaucaucaccgagaccaucaaguccuggaagaagcgcauccuccgcacccaggaguccgagugcgucugcaugaacggcuccugcuucaccaucaugaccgacggccccuccaacggcggcgccuccuacaagaucuucaagaucgagaagggcaaggucaccaaguccaucgagcucaacgcccccaacuuccacuacgaggagugcuccugcuaccccgacaccggcaccgucaugugcgucugccgcgacaacuggcacggcuccaaccgccccugggucuccuucaaccagaaccucgacuaccagaucggcuacaucugcuccggcgucuucggcgacaacccccgccccaaggacggcgagggcuccugcaaccccgucaccaucgacggcgccgacggcgucaagggcuucuccuacaaguacggcaacggcgucuggaucggccgcaccaaguccaaccgccuccgcaagggcuucgagaugaucugggaccccaacggcuggaccaacaccgacuccgacuucuccgucaagcaggacgucgucgccaucaccgacugguccggcuacuccggcuccuucguccagcaccccgagcucaccggccucgacugcauccgccccugcuucugggucgagcucguccgcggccucccccgcgagaacaccaccaucuggaccuccggcuccuccaucuccuucugcggcgucaacuccgacaccgccaacugguccuggcccgacggcgccgagcuccccuucaccaucgacaaguga

SEQ ID NO: 118269 - RNA, 1410 nt, Artificial Sequence
  derived and/or modified CDS sequence (opt2) from neuraminidase__InfluenzaA__AFJ75050
augaaccccaaccagaagaucaucaccaucggcuccgucucccucaccaucuccaccaucugcuucuucaugcagaucgccauccucaucaccaccgucacccuccacuucaagcaguacgaguucaacuccccccccaacaaccaggucaugcucugcgagcccaccaucaucgagcgcaacaucaccgagaucgucuaccucaccaacaccaccaucgagaaggagaucugccccaagcucgccgaguaccgcaacugguccaagccccagugcaacaucaccggcuucgcccccuucuccaaggacaacuccguccgccucuccgccggcggcgacaucugggucacccgcgagcccuacgucuccugcgaccccgacaagugcuaccaguucgcccucggccagggcaccacccucaacaacguccacuccaacgacaccguccacgaccgcacccccuaccgcacccuccucaugaacgagcucggcguccccuuccaccucggcaccaagcaggucugcaucgccugguccuccuccuccugccacgacggcaaggccuggcuccacgucugcgucaccggcgacgacaagaacgccaccgccuccuucaucuacaacggccgccucgucgacuccaucgucuccugguccaaggagauccuccgcacccaggaguccgagugcgucugcaucaacggcaccugcaccgucgucaugaccgacggcuccgccuccggcaaggccgacaccaagauccucuucaucgucgagggcaagaucguccacaccuccgcccucuccggcuccgcccagcacgucgaggagugcuccugcuacccccgcuaccccggcguccgcugcgucugccgcgacaacuggaagggcuccaaccgccccaucgucgacaucaacaucaaggacuacuccaucgucuccuccuacgucugcuccggccucgucggcgacaccccccgcaagaacgacuccuccuccuccucccacugccucgaccccaacaacgaggagggcggccacggcgucaagggcugggccuucgacgacggcaacgacgucuggaugggccgcaccaucuccgagaagcuccgcuccggcuacgagaccuucaaggucaucgagggcugguccaaccccaacuccaagcuccagaucaaccgccaggucaucgucgaccgcggcaaccgcuccggcuacuccggcaucuucuccgucgagggcaaguccugcaucaaccgcugcuucuacgucgagcucauccgcggccgcaaggaggagaccgagguccucuggaccuccaacuccaucgucgucuucugcggcaccuccggcaccuacggcaccggcuccuggcccgacggcgccgacaucaaccucaugcccaucuga

SEQ ID NO: 118270 - RNA, 1410 nt, Artificial Sequence
  derived and/or modified CDS sequence (opt2) from neuraminidase__InfluenzaA__AFJ75094
augaaccccaaccagaagaucaucaccaucggcuccgucucccucaccaucuccaccaucugcuucuucaugcagaucgccauccucaucaccaccgucacccuccacuucaagcaguacgaguucaacuccccccccaacaaccaggucaugcucugcgagcccaccaucaucgagaagaacaucaccgagaucgucuaccucaccaacaccaccaucgagaaggagaucugccccaagcucgccgaguaccgcaacugguccaagccccagugcgacaucaccggcuucgcccccuucuccaaggacaacuccauccgccucuccgccggcggcgacaucugggucacccgcgagcccuacgucuccugcgaccccgacaagugcuaccaguucgcccucggccagggcaccacccucaacaacguccacuccaacgacaccguccgcgaccgcacccccuaccgcacccuccucaugaacgagcucggcguccccuuccaccucggcaccaagcaggucugcaucgccugguccuccuccuccugccacgacggcaaggccuggcuccacgucugcaucaccggcgacgacaagaacgccaccgccuccuucaucuacaacggccgccucgucgacuccaucgucuccugguccaaggagauccuccgcacccaggaguccgagugcgucugcaucaacggcaccugcaccgucgucaugaccgacggcuccgccuccggcaaggccgacaccaagauccucuucaucgaggagggcaagaucguccacaccuccacccucuccggcuccgcccagcacgucgaggagugcuccugcuacccccgcuaccccggcguccgcugcgucugccgcgacaacuggaagggcuccaaccgccccaucgucgacaucaacaucaaggaccacuccaucgucuccuccuacgucugcuccggccucgucggcgacaccccccgcaagaacgacuccuccuccuccuccaacugccucgaccccaacaacgaggagggcggccacggcgucaagggcugggccuucgacgacggcaacgacgucuggaugggccgcaccaucuccgagaagucccgccucggcuacgagaccuucaaggucaucgagggcugguccaaccccaacuccaagcuccagaucaaccgccaggucaucgucgaccgcggcaaccgcuccggcuacuccggcaucuucuccgucgagggcaaguccugcaucaaccgcugcuucuacgucgagcucauccgcggccgcaaggaggagaucgagguccucuggaccuccaacuccaucgucgucuucugcggcaccuccggcaccuacggcaccggcuccuggcccgacggcgccgacaucaacaucaugcccaucuga

SEQ ID NO: 118271 - RNA, 1413 nt, Artificial Sequence
  derived and/or modified CDS sequence (opt2) from neuraminidase__InfluenzaA__AFJ75104
augaaccccaaccagaagaucaucaccaucggcuccaucuccaucgccaucggcaucaucucccucaugcuccagaucggcaacaucaucuccaucugggccucccacuccauccagaccggcucccagaaccacaccggcaucugcaaccagcgcaucaucaccuacgagaacuccaccugggucaaccacaccuacgucaacaucaacaacaccaacgucgucgccggcaaggacaagacccccgucacccucgccggcaacuccucccucugcuccaucuccggcugggccauccacaccaaggacaacuccauccgcaucggcuccaagggcgacgucuucgucauccgcgagcccuucaucuccugcucccaccucgagugcaagaccuucuuccucacccagggcgcccuccucaacgacaagcacuccaacggcaccgucaaggaccgcucccccuaccgcgcccucauguccugcccccucggcgaggcccccucccccuacaacuccaaguucgaguccgucgccugguccgccuccgccugccacgacggcaucggcuggcucaccaucggcaucuccggccccgacaacggcgccgucgccguccucaaguacaacggcaucaucaccggcaccaucaaguccuggaagaagcagauccuccgcacccaggaguccgagugcgucugcaugaacggcuccugcuucaccaucaugaccgacggccccuccaacggcgccgccuccuacaagaucuucaagaucgagaagggcaaggucaccaaguccauggagcucaacgcccccaacuuccacuacgaggagugcuccugcuaccccgacaccggcaccgucaugugcgucugccgcgacaacuggcacggcuccaaccgccccugggucuccuucaaccagaaccucgacuaccagaucggcuacaucugcuccggcgucuucggcgacaacccccgccccgaggacggcgagggcuccugcaaccccgucaccgucgacggcgccaacggcgucaagggcuucuccuacaaguacggcaacggcgucuggaucggccgcaccaaguccaaccgcauccgcaagggcuucgagaugaucugggaccccaacggcuggaccaacaccgacuccgacuucuccgucaagcaggacaucgucgccaucaccgacugguccggcuacuccggcuccuucguccagcaccccgagcucaccggccucgacugcauccgccccugcuucugggucgagcucguccgcggccucccccgcgagaacaccaccaucuggaccuccggcuccuccaucuccuucugcggcgucaacuccgacaucgccaacugguccuggcccgacggcgccgagcuccccuucaccaucgacaaguga

SEQ ID NO: 118272 - RNA, 1410 nt, Artificial Sequence; identical to SEQ ID NO: 111920
  derived and/or modified CDS sequence (opt2) from neuraminidase__InfluenzaA__AFJ75114

SEQ ID NO: 118273 - RNA, 1410 nt, Artificial Sequence; identical to SEQ ID NO: 111920
  derived and/or modified CDS sequence (opt2) from neuraminidase__InfluenzaA__AFJ75452

SEQ ID NO: 118274 - RNA, 1410 nt, Artificial Sequence; identical to SEQ ID NO: 111920
  derived and/or modified CDS sequence (opt2) from neuraminidase__InfluenzaA__AFJ75463

SEQ ID NO: 118275 - RNA, 1413 nt, Artificial Sequence; identical to SEQ ID NO: 118271
  derived and/or modified CDS sequence (opt2) from neuraminidase__InfluenzaA__AFJ75552

SEQ ID NO: 118276 - RNA, 1413 nt, Artificial Sequence
  derived and/or modified CDS sequence (opt2) from neuraminidase__InfluenzaA__AFJ75574
augaaccccaaccagaagaucaucaccaucggcuccaucuccaucgccaucggcaucaucucccucaugcuccagaucggcaacaucaucuccaucugggccucccacuccauccagaccggcucccagaaccacaccggcaucugcaaccagcgcaucaucaccuacgagaacuccaccugggucaaccacaccuacgucaacaucaacaacaccaacgucgucgccggcaaggacaagacccccgucacccucgccggcaacuccucccucugcuccaucuccggcugggccauccacaccaaggacaacuccauccgcaucggcuccaagggcgacgucuucgucauccgcgagcccuucaucuccugcucccaccucgagugcaagaccuucuuccucacccagggcgcccuccucaacgacaagcacuccaacggcaccgucaaggaccgcucccccuaccgcgcccucauguccugcccccucggcgaggcccccucccccuacaacuccaaguucgaguccgucgccugguccgccuccgccugccacgacggcaucggcuggcucaccaucggcaucuccggccccgacaacggcgccgucgccguccucaaguacaacggcaucaucaccggcaccaucaaguccuggaagggccagauccuccgcacccaggaguccgagugcgucugcaugaacggcuccugcuucaccaucaugaccgacggccccuccaacggcgccgccuccuacaagaucuucaagaucgagaagggcaaggucaccaaguccauggagcucaacgcccccaacuuccacuacgaggagugcuccugcuaccccgacaccggcaccgucaugugcgucugccgcgacaacuggcacggcuccaaccgccccugggucuccuucaaccagaaccucgacuaccagaucggcuacaucugcuccggcgucuucggcgacaacccccgccccgaggacggcgagggcuccugcaaccccgucaccgucgacggcgccaacggcgucaagggcuucuccuacaaguacggcaacggcgucuggaucggccgcaccaaguccaaccgcauccgcaagggcuucgagaugaucugggaccccaacggcuggaccaacaccgacuccgacuucuccgucaagcaggacaucgucgccaucaccgacugguccggcuacuccggcuccuucguccagcaccccgagcucaccggccucgacugcauccgccccugcuucugggucgagcucguccgcggccucccccgcgagaacaccaccaucuggaccuccggcuccuccaucuccuucugcggcgucaacuccgacaucgccaacugguccuggcccgacggcgccgagcuccccuucaccaucgacaaguga

SEQ ID NO: 118277 - RNA, 1410 nt, Artificial Sequence; identical to SEQ ID NO: 111920
  derived and/or modified CDS sequence (opt2) from neuraminidase__InfluenzaA__AFJ75585

SEQ ID NO: 118278 - RNA, 1410 nt, Artificial Sequence
  derived and/or modified CDS sequence (opt2) from neuraminidase__InfluenzaA__AFJ75596
augaaccccaaccagaagaucaucaccaucggcuccgucucccucaccaucuccaccaucugcuucuucaugcagaccgccauccucaucaccaccgucacccuccacuucaagcaguacgaguucaacuccccccccaacaaccaggucaugcucugcgagcccaccaucaucgagcgcaacaucaccgagaucgucuaccucaccaacaccaccaucgagaaggagaucugccccaagcucgccgaguaccgcaacugguccaagccccagugcggcaucaccggcuucgcccccuucuccaaggacaacuccauccgccucuccgccggcggcgacaucugggucacccgcgagcccuacgucuccugcgaccccgacaagugcuaccaguucgcccucggccagggcaccacccucaacaacguccacuccaacaacaccguccgcgaccgcacccccuaccgcacccuccucaugaacgagcucggcguccccuuccaccucggcaccaagcaggucugcaucgccugguccuccuccuccugccacgacggcaaggccuggcuccacgucugcaucaccggcgacgacaagaacgccaccgccuccuucaucuacaacggccgccucgucgacuccaucgucuccugguccaaggagauccuccgcacccaggaguccgagugcgucugcaucaacggcaccugcaccgucgucaugaccgacggcuccgccuccggcaaggccgacaccaagauccucuucaucgaggagggcaagaucguccacaccuccacccucuccggcuccgcccagcacgucgaggagugcuccugcuacccccgcuaccccggcguccgcugcgucugccgcgacaacuggaagggcuccaaccgccccaucgucgacaucaacaucaaggaccacuccaucgucuccuccuacgucugcuccggccucgucggcgacaccccccgcaagaacgacuccuccuccuccucccacugccucgaccccaacaacgaggagggcggccacggcgucaagggcugggccuucgacgacggcaacgacgucuggaugggccgcaccaucuccgagaagucccgccucggcuacgagaccuucaaggucaucgagggcugguccaaccccaaguccaagcuccagaucaaccgccaggucaucgucgaccgcggcaaccgcuccggcuacuccggcaucuucuccgucgagggcaaguccugcaucaaccgcugcuucuacgucgagcucauccgcggccgcaaggaggagaccgagguccucuggaccuccaacuccaucgucgucuucugcggcaccuccggcaccuacggcaccggcuccuggcccgacggcgccgacaucaaccucaugcccaucuga

SEQ ID NO: 118279 - RNA, 1410 nt, Artificial Sequence
  derived and/or modified CDS sequence (opt2) from neuraminidase__InfluenzaA__AFJ75607
augaaccccacccagaagaucaucaccaucggcuccgucucccucaccaucuccaccaucugcuucuucaugcagaccgccauccucaucaccaccgucacccuccacuucaagcaguacgaguucaacuccccccccaacaaccaggucaugcucugcgagcccaccaucaucgagcgcaacaucaccgagaucgucuaccucaccaacaccaccaucgagaaggagaucugccccaagcucgccgaguaccgcaacugguccaagccccagugcgacaucaccggcuucgcccccuucuccaaggacaacuccauccgccucuccgccggcggcgacaucugggucacccgcgagcccuacgucuccugcgaccccgagaagugcuaccaguucgcccucggccagggcaccacccucaacaacguccacuccaacaacaccguccgcgaccgcacccccuaccgcacccuccucaugaacgagcucggcguccccuuccaccucggcaccaagcaggucugcaucgccugguccuccuccuccugccacgacggcaaggccuggcuccacgucugcaucaccggcgacgacaagaacgccaccgccuccuucaucuacaacggccgccucgucgacuccaucgucuccugguccaaggagauccuccgcacccaggaguccgagugcgucugcaucaacggcaccugcaccgucgucaugaccgacggcuccgccuccggcaaggccgacaccaagauccucuucaucgaggagggcaagaucguccacaccuccaagcucuccggcuccgcccagcacgucgaggagugcuccugcuacccccgcuaccccggcguccgcugcgucugccgcgacaacuggaagggcuccaaccgccccaucgucgacaucaacaucaaggaccacuccaucgucuccuccuacgucugcuccggccucgucggcgacaccccccgcaagaacgacuccuccggcuccucccacugccucgaccccaacaacgaggagggcggccacggcgucaagggcugggccuucgacgacggcaacgacgucuggaugggccgcaccaucuccgagaagucccgccucggcuacgagaccuucaaggucaucgagggcugguccaaccccaaguccaagcuccagaucaaccgccaggucaucgucgaccgcggcaaccgcuccggcuacuccggcaucuucuccgucgagggcaaguccugcaucaaccgcugcuucuacgucgagcucauccgcggccgcaaggaggagaccgagguccucuggaccuccaacuccaucgucgucuucugcggcaccuccggcaccuacggcaccggcuccuggcccgacggcgccgacaucaaccucaugcccaucuga

SEQ ID NO: 118280 - RNA, 1410 nt, Artificial Sequence
  derived and/or modified CDS sequence (opt2) from neuraminidase__InfluenzaA__AFJ75633
augaaccccaaccagaagaucaucaccaucggcuccgucucccucaccaucuccaccaucugcuucuucaugcagaucgccauccucaucaccaccgucacccuccacuucaagcaguacgaguucaacuccccccccaacaaccaggucaugcucugcgagcccaccaucaucgagcgcaacaucaccgagaucgucuaccucaccaacaccaccaucgagaaggagaucugccccaagcucgccgaguaccgcaacugguccaagccccagugcgacaucaccggcuucgcccccuucuccaaggacaacuccauccgccucuccgccggcggcgacaucugggucacccgcgagcccuacgucuccugcgaccccgacaagugcuaccaguucgcccucggccagggcaccacccucaacaacguccacuccaacgacaccguccgcgaccgcacccccuaccgcacccuccucaugaacgagcucggcguccccuuccaccucggcaccaagcaggucugcaucgccugguccuccuccuccugccacgacggcaaggccuggcuccacgucugcaucaccggcgacgacaagaacgccaccgccuccuucaucuacaacggccgccucgucgacuccgucgucuccugguccaaggacauccuccgcacccaggaguccgagugcgucugcaucaacggcaccugcaccgucgucaugaccgacggcuccgccuccggcaaggccgacaccaagauccucuucaucgaggagggcaagaucguccacaccuccacccucuccggcuccgcccagcacgucgaggagugcuccugcuacccccgcuaccccggcguccgcugcgucugccgcgacaacuggaagggcuccaaccgccccaucgucgacaucaacaucaagaaccacuccaucgucuccuccuacgucugcuccggccucgucggcgacaccccccgcaagaacgacuccuccuccuccucccacugccucgaccccaacaacgaggagggcggccacggcgucaagggcugggccuucgacgacggcaacgacgucuggaugggccgcaccaucuccgagaagucccgccucggcuacgagaccuucaaggucaucgagggcugguccaaccccaaguccaagcuccagaucaaccgccaggucaucgucgaccgcggcaaccgcuccggcuacuccggcaucuucuccgucgagggcaaguccugcaucaaccgcugcuucuacgucgagcucauccgcggccgcaaggaggagaccgagguccucuggaccuccaacuccaucgucgucuucugcggcaccuccggcaccuacggcaccggcuccuggcccgacggcgccgacaucaaccucaugcccaucuga

SEQ ID NO: 118281 - RNA, 1413 nt, Artificial Sequence; identical to SEQ ID NO: 113497
  derived and/or modified CDS sequence (opt2) from neuraminidase__InfluenzaA__AFJ75654

SEQ ID NO: 118282 - RNA, 1410 nt, Artificial Sequence; identical to SEQ ID NO: 111920
  derived and/or modified CDS sequence (opt2) from neuraminidase__InfluenzaA__AFJ75665

SEQ ID NO: 118283 - RNA, 1413 nt, Artificial Sequence
  derived and/or modified CDS sequence (opt2) from neuraminidase__InfluenzaA__AFJ75676
augaaccccaaccagaagaucaucaccaucggcuccaucuccaucgccaucggcaucaucucccucaugcuccagaucggcaacaucaucuccaucugggccucccacuccauccagaccggcucccagaaccacaccggcaucugcaaccagcgcaucaucaccuacgagaacuccaccugggucaaccacaccuacgucaacaucaacaacaccaacgucgucgccggcaaggacaagacccccgucacccucgccggcaacuccucccucugcuccaucuccggcugggccauccacaccaaggacaacuccauccgcaucggcuccaagggcgacgucuucgucauccgcgagcccuucaucuccugcucccaccucgagugcaagaccuucuuccucacccagggcgcccuccucaacgacaagcacuccaacggcaccgucaaggaccgcucccccuaccgcgcccucauguccugcccccucggcgaggcccccucccccuacaacuccaaguucgaguccgucgccugguccgccuccgccugccacgacggcaucggcuggcucaccaucggcaucuccggccccgacaacggcgccgucgccguccucaaguacaacggcaucaucaccggcaccaucaaguccuggaagaagcagauccuccgcacccaggaguccgagugcgucugcaugaacggcuccugcuucaccaucaugaccgacggccccuccaacggcgccgccuccuacaagaucuucaagaucgagaagggcaaggucaccaaguccauggagcucaacgcccccaacuuccacuacgaggagugcuccugcuaccccgacaccggcaccgucaugugcgucugccgcgacaacuggcacggcuccaaccgccccugggucuccuucaaccagaaccucgacuaccagaucggcuacaucugcuccggcgucuucggcgacaacccccgccccaaggacggcgagggcuccugcaaccccgucaccgucgacggcgccaacggcgucaagggcuucuccuacaaguacggcaacggcgucuggaucggccgcaccaaguccaaccgcauccgcaagggcuucgagaugaucugggaccccaacggcuggaccaacaccgacuccgacuucuccgucaagcaggacaucgucgccaucaccgacugguccggcuacuccggcuccuucguccagcaccccgagcucaccggccucgacugcauccgccccugcuucugggucgagcucguccgcggccucccccgcgagaacaccaccaucuggaccuccggcuccuccaucuccuucugcggcgucaacuccgacaucgccaacugguccuggcccgacggcgccgagcuccccuucaccaucgacaaguga

SEQ ID NO: 118284 - RNA, 1413 nt, Artificial Sequence; identical to SEQ ID NO: 113497
  derived and/or modified CDS sequence (opt2) from neuraminidase__InfluenzaA__AFJ75687

SEQ ID NO: 118285 - RNA, 1410 nt, Artificial Sequence; identical to SEQ ID NO: 112774
  derived and/or modified CDS sequence (opt2) from neuraminidase__InfluenzaA__AFJ76122

SEQ ID NO: 118286 - RNA, 1410 nt, Artificial Sequence; identical to SEQ ID NO: 117352
  derived and/or modified CDS sequence (opt2) from neuraminidase__InfluenzaA__AFJ76134

SEQ ID NO: 118287 - RNA, 1410 nt, Artificial Sequence; identical to SEQ ID NO: 112774
  derived and/or modified CDS sequence (opt2) from neuraminidase__InfluenzaA__AFJ76146

SEQ ID NO: 118288 - RNA, 1410 nt, Artificial Sequence; identical to SEQ ID NO: 112774
  derived and/or modified CDS sequence (opt2) from neuraminidase__InfluenzaA__AFJ76159

SEQ ID NO: 118289 - RNA, 1410 nt, Artificial Sequence; identical to SEQ ID NO: 112774
  derived and/or modified CDS sequence (opt2) from neuraminidase__InfluenzaA__AFJ76173

SEQ ID NO: 118290 - RNA, 1410 nt, Artificial Sequence; identical to SEQ ID NO: 112774
  derived and/or modified CDS sequence (opt2) from neuraminidase__InfluenzaA__AFJ76191

SEQ ID NO: 118291 - RNA, 1413 nt, Artificial Sequence
  derived and/or modified CDS sequence (opt2) from neuraminidase__InfluenzaA__AFJ76192
augaaccccaaccagaagaucaucaccaucggcuccaucuccaucgccaucggcaucaucucccucaugguccagaucggcaacaucaucuccaucugggccucccacuccauccagaccggcauccagaacaacaccggcaucugcaaccagcgcaucaucaccuacgagaacuccaccugggucaaccacaccuacgucaacaucaacaacaccaacgucgucgccggcgaggacaagaccuccgucacccucgccggcaacuccucccucugcuccaucuccggcugggccaucuacaccaaggacaacuccauccgcaucggcuccaagggcgacgucuucgucauccgcgagcccuucaucuccugcucccaccucgagugccgcaccuucuuccucacccagggcgcccuccucaacgacaagcacuccaacggcaccgucaaggaccgcucccccuaccgcgcccucauguccugcccccucggcgaggcccccucccccuacaacuccaaguucgaguccgucgccugguccgccuccgccugccacgacggcaugggcuggcucaccaucggcaucuccggccccgacaacggcgccgucgccguccucaaguacaacggcaucaucaccggcaccaucaaguccuggaagaagcagauccuccgcacccaggaguccgagugcgucugcaugaacggcuccugcuucaccaucaugaccgacggccccuccaacaaggccgccuccuacaagaucuucaagaucgagaagggcaaggucaccaaguccaucgagcucaacgcccccaacuucuacuacgaggagugcuccugcuaccccgacaccggcaucgucaugugcgucugccgcgacaacuggcacggcuccaaccgccccugggucuccuucaaccagaaccucgacuaccagaucggcuacaucugcuccggcgucuucggcgacaacccccgccccgaggacggcgagggcuccugcaaccccgucaccgucgacggcgccaacggcgucaagggcuucuccuacaaguacggcaacggcgucuggaucggccgcaccaaguccaaccgccuccgcaagggcuucgagaugaucugggaccccaacggcuggaccaacaccgacuccgacuucuccgucaagcaggacgucgucgccaucaccgacugguccggcuacuccggcuccuucguccagcaccccgagcucaccggccucgacugcauccgccccugcuucugggucgagcucguccgcggccucccccgcgagaacaccaccaucuggaccuccggcuccuccaucuccuucugcggcgucaacuccgacaccgccaacugguccuggcccgacggcgccgagcuccccuucaccaucgacaaguga

SEQ ID NO: 118292 - RNA, 1410 nt, Artificial Sequence; identical to SEQ ID NO: 112774
  derived and/or modified CDS sequence (opt2) from neuraminidase__InfluenzaA__AFJ76206

SEQ ID NO: 118293 - RNA, 1410 nt, Artificial Sequence
  derived and/or modified CDS sequence (opt2) from neuraminidase__InfluenzaA__AFJ76216
augaaccccaaccagaagaucaucaccaucggcuccgucucccucaccaucgccaccaucugcuuccucaugcagaucgccauccucgucaccaccgucacccuccacuucaagcagcacgagugcaacuccccccccaacaaccaggucaugcucugcgagcccaccaucaucaagcgcaacaucaccgagaucgucuaccucaccaacaccaccaucgagaaggagaucugccccaagcucgccgaguaccgcaacugguccaagccccagugcaacaucaccggcuucgcccccuucuccaaggacaacuccauccgccucuccgccggcggcgacaucugggucacccgcgagcccuacgucuccugcgaccccgacaagugcuaccaguucgcccucggccagggcaccacccucaacaacggccacuccaacgacaccguccacgaccgcacccccuaccgcacccuccucaugaacgagcucggcguccccuuccaccucggcacccgccaggucugcaucgccugguccuccuccuccugccacgacggcaaggccuggcuccacgucugcgucaccggcgacgacaagaacgccaccgccuccuucaucuacaacggccgccucgucgacuccaucggcuccugguccaagaagauccuccgcacccaggaguccgagugcgucugcaucaacggcaccugcaccgucgucaugaccgacggcuccgccuccggcaaggccgacaccaagauccucuucaucgaggagggcaagaucguccacaucuccacccucuccggcuccgcccagcacgucgaggagugcuccugcuacccccgcuaccccggcguccgcugcgucugccgcgacaacuggaagggcuccaaccgccccaucgucgacaucaacgucaaggacuacuccaucgucuccuccuacgucugcuccggccucgucggcgacaccccccgcaagaacgacuccuucuccuccucccacugccucgaccccaacaacgaggagggcggccacggcgucaagggcugggccuucgacgacggcaacgacgucuggaugggccgcaccaucuccgagaagcuccgcuccggcuacgagaccuucaaggucaucgagggcugguccaagcccaacuccaagcuccagaucaaccgccaggucaucgucgagcgcggcaaccgcuccggcuacuccggcaucuucuccgucgagggcaaguccugcaucaaccgcugcuucuacgucgagcucauccgcggccgcaaggaggagaccgaggucugguggaccuccaacuccaucgucgucuucugcggcaccuccggcaccuacggcaccggcuccuggcccgacggcgccgacaucaaccucaugcccaucuga

SEQ ID NO: 118294 - RNA, 1410 nt, Artificial Sequence
  derived and/or modified CDS sequence (opt2) from neuraminidase__InfluenzaA__AFJ77411
augaaccccaaccagaagaucaucaccaucggcuccgucucccucaccaucgccaccaucugcuuccucaugcagaucgucauccucgucaccaccgucacccuccacuucaagcaguacgagugcaacuccccccccaacaaccaggucaugcucugcgagcccaccaucaucgagcgcaacaucaccgagaucgucuaccucaccaacaccaccaucgagaaggagaucugccccaagcucgccgaguaccgcaacugguccaagccccagugcaagaucaccggcuucgcccccuucuccaaggacaacuccauccgccucuccgccggcggcgacaucugggucacccgcgagcccuacgucuccugcgaccccggcaagugcuaccaguucgcccucggccagggcaccacccucaacaaccgccacuccaacgacaccguccacgaccgcacccccuaccgcacccuccucaugaacgagcucggcguccccuuccaccucggcaccaagcaggucugcaucgccugguccuccuccuccugccacgacggcaaggccuggcuccacgucugcgucaccggccacgacgagaacgccaccgccuccuucaucuacgacggccgccucgucgacuccaucggcuccugguccaagaacauccuccgcacccaggaguccgagugcgucugcaucaacggcaccugcaccgucgucaugaccgacggcuccgccuccgagcgcgccgacaccaagauccucuucaucgaggagggcaagaucguccacaucuccccccucuccggcuccgcccagcacgucgaggagugcuccugcuacccccgcuaccccggcguccgcugcgucugccgcgacaacuggaagggcuccaaccgccccaucgucgacaucaacgucaaggacuacuccaucgucuccuccuacgucugcuccggccucgucggcgacaccccccgcaagaacgacuccuccuccuccuccuacugccucaaccccaacaacgaggagggcggccacggcgucaagggcugggccuucgacgacggcaacgacgucuggaugggccgcaccaucuccgagaagcuccgcuccggcuacgagaccuucaaggucaucggcggcugguccaagcccaacuccaagcuccagaucaaccgccaggucaucgucgaccgcggcaaccgcuccggcuacuccggcaucuucuccgucgagggcaaguccugcgucaaccgcugcuucuacgucgagcucauccgcggccgcaagcaggagaccgaggucugguggaccuccaacuccaucgucgucuucugcggcaccuccggcaccuacggcaccggcuccuggcccgacggcgccgacaucaaccucaugcccaucuga

SEQ ID NO: 118295 - RNA, 1410 nt, Artificial Sequence
  derived and/or modified CDS sequence (opt2) from neuraminidase__InfluenzaA__AFJ77422
augaaccccaaccagaagaucaucaccaucggcuccgucucccucaccaucgccaccaucugcuuccucaugcagaucgccauccucgucaucaccgucacccuccacuucaagcaguacgagugcaacuccccccccaacaaccaggucaugcucugcgagcccaccaucaucgagcgcaacaucaccgagaucgucuaccucaccaacaccaccaucgagaaggagaucugccccaagcucgccgaguaccgcaacugguccaagccccagugcaagaucaccggcuucgcccccuucuccaaggacaacuccauccgccucuccgccggcggcgacaucugggucacccgcgagcccuacgucuccugcgaccccgacaagugcuaccaguucgcccucggccagggcaccacccucaacaaccgccacuccaacgacaccguccacgaccgcacccccuaccgcacccuccucaugaacgagcucggcguccccuuccaccucggcaccaagcaggucugcaucgccugguccuccuccuccugccacgacggcaaggccuggcuccacgucugcgucaccggccacgacgagaacgccaccgccuccuucaucuacgacggccgccucgucgacuccaucggcuccugguccaagaagauccuccgcacccaggaguccgagugcgucugcaucaacggcaccugcaccgucgucaugaccgacggcuccgccuccggccgcgccgacaccaagauccucuucaucgaggagggcaagaucguccacaucuccccccucuccggcuccgcccagcacgucgaggagugcuccugcuacccccgcuacuccggcguccgcugcgucugccgcgacaacuggaagggcuccaaccgccccaucgucgacaucaacgucaaggacuacuccaucgucuccuccuucgucugcuccggccucgucggcgacaccccccgcaagaacgacuccuccuccuccucccacugccucaaccccaacaacgaggagggcggccacggcgucaagggcugggccuucgacgacggcaacgacgucuggaugggccgcaccaucuccgagaagcuccgcuccggcuacgagaccuucaaggucaucggcggcugguccaagcccaacuccaagcuccagaucaaccgccaggucaucgucgaccgcggcaaccgcuccggcuacuccggcaucuucuccgucgagggcaaguccugcaucaaccgcugcuucuacgucgagcucauccgcggccgcaagcaggagaccgaggucugguggaccuccaacuccaucgucgucuucugcggcaccuccggcaccuacggcaccggcuccuggcccgacggcgccgacaucaaccucaugcccaucuga

SEQ ID NO: 118296 - RNA, 1410 nt, Artificial Sequence
  derived and/or modified CDS sequence (opt2) from neuraminidase__InfluenzaA__AFJ77433
augaaccccaaccagaagaucaucaccaucggcuccgucucccucaccaucgccaccaucugcuuccucaugcagaucgucauccucgucaccaccgucacccuccacuucaagcaguacgagugcaacuccccccccaacaaccaggucaugcucugcgagcccaccaucaucgagcgcaacaucaccgagaucgucuaccucaccaacaccaccaucgagaaggagaucugccccaagcucgccgaguaccgcaacugguccaagccccagugcaagaucaccggcuucgcccccuucuccaaggacaacuccauccgccucuccgccggcggcgacaucugggucacccgcgagcccuacgucuccugcgaccccggcaagugcuaccaguucgcccucggccagggcaccacccucaacaaccgccacuccaacgacaccguccacgaccgcacccccuaccgcacccuccucaugaacgagcucggcguccccuuccaccucggcaccaagcaggucugcaucgccugguccuccuccuccugccacgacggcaaggccuggcuccacgucugcgucaccggccacgacgagaacgccaccgccuccuucaucuacgacggccgccucgucgacuccaucggcuccugguccaagaacauccuccgcacccaggaguccgagugcgucugcaucaacggcaccugcaccgucgucaugaccgacggcuccgccuccgagcgcgccgacaccaagauccucuucaucgaggagggcaagaucguccacaucuccccccucuccggcuccgcccagcacgucgaggagugcuccugcuacccccgcuaccccggcguccgcugcgucugccgcgacaacuggaagggcuccaaccgccccaucgucgacaucaacgucaaggacuacuccaucgucuccuccuacgucugcuccggccucgucggcgacaccccccgcaagaccgacuccuccuccuccuccgacugccucaaccccaacaacgaggagggcggccacggcgucaagggcugggccuucgacgacggcaacgacgucuggaugggccgcaccaucuccgagaagcuccgcuccggcuacgagaccuucaaggucaucggcggcugguccaagcccaacuccaagcuccagaucaaccgccaggucaucgucgaccgcggcaaccgcuccggcuacuccggcaucuucuccgucgagggcaaguccugcgucaaccgcugcuucuacgucgagcucauccgcggccgcaagcaggagaccgaggucugguggaccuccaacuccaucgucgucuucugcggcaccuccggcaccuacggcaccggcuccuggcccgacggcgccgacaucaaccucaugcccaucuga

SEQ ID NO: 118297 - RNA, 1410 nt, Artificial Sequence
  derived and/or modified CDS sequence (opt2) from neuraminidase__InfluenzaA__AFJ77443
augaaccccaaccagaagaucaucaccaucggcuccgucucccucaccaucgccaccaucugcuuccucaugcagaucgccauccucgucaucacccucacccuccacuucaagcaguacgagugcaacuccccccccaacaaccaggucaugcucugcgagcccaccaucaucgagcgcaacaucaccgagaucgucuaccucaccaacaccaccaucgagaaggagaucugccccaagcucgccgaguaccgcaacugguccaagccccagugcaagaucaccggcuucgcccccuucuccaaggacaacuccauccgccucuccgccggcggcgacaucugggucacccgcgagcccuacgucuccugcgaccccggcaagugcuaccaguucgcccucggccagggcaccacccucaacaaccgccacuccaacgacaccguccacgaccgcacccccuaccgcacccuccucaugaacgagcucggcguccccuuccaccucggcaccaagcaggucugcaucgccugguccuccuccuccugccacgacggcaaggccuggcuccacgucugcgucaccggccacaacgagaacgccaccgccuccuucaucuacgacggccgccucgucgacuccaucggcuccugguccaagaacauccuccgcacccaggaguccgagugcgucugcaucaacggcaccugcaccgucgucaugaccgacggcuccgccuccggccgcgccgacaccaagauccucuucaucgaggagggcaagaucguccacaucuccccccucuccggcuccgcccagcacgucgaggagugcuccugcuacccccgcuaccccggcguccgcugcgucugccgcgacaacuggaagggcuccaaccgccccaucgucgacaucaacgucaaggacuucuccaucgucuccuccuacgucugcuccggccucgucggcgacaccccccgcaagaacgacuccuccuccuccucccacugccucaaccccaacaacgaggagggcggcaacggcgucaagggcugggccuucgacgacggcaacgacgucuggaugggccgcaccaucuccgagaagcuccgcuccggcuacgagaccuucaaggucaucggcggcugguccaagcccaacuccaagcuccagaucaaccgccaggucaucgucgaccgcggcaaccgcuccggcuacuccggcaucuucuccgucgagggcaaguccugcaucaaccgcugcuucuacgucgagcucauccgcggccgcaagcaggagaccgaggucugguggaccuccaacuccaucgucgucuucugcggcaccuccggcaccuacggcaccggcuccuggcccgacggcgccgacaucaaccucaugcccaucuga

SEQ ID NO: 118298 - RNA, 1410 nt, Artificial Sequence
  derived and/or modified CDS sequence (opt2) from neuraminidase__InfluenzaA__AFJ77465
augaaccccaaccagaagaucaucaccaucggcuccgucucccucaccaucgccaccaucugcuuccucaugcagaucgccauccucgucaccaccgucacccuccacuucaagcaguacgagugcaaccccccccccaacaaccaggucaugcucugcgagcccaccaucaucgagcgcaacaucaccgagaucgucuaccucaccaacaccaccaucgagaaggagaucugccccaagcucgccgaguaccgcaacugguccaagccccagugcaagaucaccggcuucgcccccuucuccaaggacaacuccauccgccucuccgccggcggcgacaucugggucacccgcgagcccuacgucuccugcgaccccgacaagugcuaccaguucgcccucggccagggcaccacccucaacaaccgccacuccaacgacaccguccacgaccgcacccccuaccgcacccuccucaugaacgagcucggcguccccuuccaccucggcaccaagcaggucugcaucgccugguccuccuccuccugccacgacggcaaggccuggcuccacgucugcgucaccggccacgacgagaacgccaccgccuccuucaucuacgacggccgccucgucgacuccaucggcuccugguccaagaagauccuccgcacccaggaguccgagugcgucugcaucaacggcaccugcaccgucgucaugaccgacggcuccgccuccggccgcgccgacaccaagauccucuucaucgaggagggcaagaucguccacaucuccccccucuccggcuccgcccagcacgucgaggagugcuccugcuacccccgcuaccccggcguccgcugcgucugccgcgacaacuggaagggcuccaaccgccccaucgucgacaucaacgucaagaacuacuccaucgucuccuccuacgucugcuccggccucgucggcgacaccccccgcaagaacgacuccuccuccuccucccacugccucaaccccaacaacgaggagggcggccacggcgucaagggcugggccuucgacgacggcaacgacgucuggaugggccgcaccaucuccgagaagcuccgcuccggcuacgagaccuucaaggucaucgagggcugguccaagcccaacuccaagcuccagaucaaccgccaggucaucgucgaccgcggcaaccgcuccggcuacuccggcaucuucuccgucgagggcaaguccugcaucaaccgcugcuucuacgucgagcucauccgcggccgcaagcaggagaccgaggucugguggaccuccaacuccaucgucgucuucugcggcaccuccggcaccuacggcaccggcuccuggcccgacggcgccgacaucaaccucaugcccaucuga

SEQ ID NO: 118299 - RNA, 1410 nt, Artificial Sequence
  derived and/or modified CDS sequence (opt2) from neuraminidase__InfluenzaA__AFJ77476
augaaccccaaccagaagaucaucaccaucggcuccgucucccucaccaucgccaccaucugcuuccucaugcagaucgccauccucgucaccaccgucacccuccacuucaagcaguacgagugcaacucccuccccaacaaccaggucaugcucugcgagcccaccaucaucgagcgcaacaucaccgagaucgucuaccucaccaacaccaccaucgagaaggagaucugccccaagcucgccgaguaccgcaacugguccaagccccagugcaagaucaccggcuucgcccccuucuccaaggacaacuccauccgccucuccgccggcggcgacaucugggucacccgcgagcccuacgucuccugcgaccccgacaagugcuaccaguucgcccucggccagggcaccacccucaacaaccgccacuccaacgacaccguccacgaccgcacccccuaccgcacccuccucaugaacgagcucggcguccccuuccaccucggcaccaagcaggucugcaucgccugguccuccuccuccugccacgacggcaaggccuggcuccacgucugcgucaccggccacgacgagaacgccaccgccuccuucaucuacggcggccgccucgucgacuccaucggcuccugguccaagaagauccuccgcacccaggaguccgagugcgucugcaucaacggcaccugcaccgucgucaugaccgacggcuccgccuccggccgcgccgacaccaagauccucuucaucgaggagggcaagaucauccacaucucccagcucuccggcuccgcccagcacgucgaggagugcuccugcuacccccgcuaccccggcguccgcugcgucugccgcgacaacuggaagggcuccaaccgccccaucgucgacaucaacgucaaggacuacuccaucgucuccuccuacgucugcuccggccucgucggcgacaccccccgcaagaacgacuccuccuccuccucccacugccucgaccccaacaacgaggagggcggccacggcgucaagggcugggccuucgacgacggcaacgacgucuggaugggccgcaccaucuccgagaaguuccgcuccggcuacgagaccuucaaggucaucgagggcugguccaagcccaacuccaagcuccagaucaaccgccagaucaucgucgaccgcgacaaccgcuccggcuacuccggcaucuucuccgucgagggcaaguccugcaucaaccgcugcuucuacgucgagcucauccgcggccgcaagcaggagaccgaggucugguggaccuccaacuccaucgucgucuucugcggcaccuccggcaccuacggcaccggcuccuggcccgacggcgccgacaucaaccucaugcccaucuga

SEQ ID NO: 118300 - RNA, 1410 nt, Artificial Sequence; identical to SEQ ID NO: 110351
  derived and/or modified CDS sequence (opt2) from neuraminidase__InfluenzaA__AFJ77487

SEQ ID NO: 118301 - RNA, 1410 nt, Artificial Sequence
  derived and/or modified CDS sequence (opt2) from neuraminidase__InfluenzaA__AFJ77498
augaaccccaaccagaagaucaucaccaucggcuccgucucccucaccaucgccaccaucugcuuccucaugcagaucgccauccucgucaccaccgucacccuccacuucaagcaguacgagugcaacuccccccccaacaaccaggucaugcucugcgagcccaccaucaucgagcgcaacaucaccgagaucgucuaccucaccaacaccaccaucgagaaggagaucugccccaagcucgccgaguaccgcaacugguccaagccccagugcaagaucaccggcuucgcccccuucuccaaggacaacuccauccgccucuccgccggcggcgacaucugggucacccgcgagcccuacgucuccugcgaccccgacaagugcuaccaguucgcccucggccagggcaccacccucaacaaccgccacuccaacgacaccguccacgaccgcacccccuaccgcacccuccucaugaacgagcucggcguccccuuccaccucggcaccaagcaggucugcaucgccugguccuccuccuccugccacgacggcaaggccuggcuccacgucugcgucaccggccacgacgagaacgccaccgccuccuucaucuacgacggccgccucgucgacuccaucggcuccugguccaagaagauccuccgcacccaggaguccgagugcgucugcaucaacggcaccugcaccgucgucaugaccgacggcuccgccuccggccgcgccgacaccaagauccucuucaucgaggagggcaagaucguccacaccuccaagcucuccggcuccgcccagcacgucgaggagugcuccugcuacccccgcuaccccggcguccgcugcgucugccgcgacaacuggaagggcuccaaccgccccaucgucgacaucaacgucaaggacuacuccaucaucuccuccuacgucugcuccggccucgucggcgacaccccccgcaagaacgacuccuccuccuccucccacugccucgaccccaacaacgaggagggcggccacggcgucaagggcugggccuucgacgacggcaacgacgucuggaugggccgcaccaucuccgagaagucccgcuccggcuacgagaccuucaaggucaucgagggcugguccaagcccaacuccaagcuccagaucaaccgccaggucaucgucgagcgcggcaacauguccggcuacuccggcaucuucuccgucgagggcaaguccugcaucaaccgcugcuucuacgucgagcucauccgcggccgcaagcaggagaccgaggucugguggaccuccaacuccaucgucgucuucugcggcaccuccggcaccuacggcaccggcuccuggcccgacggcgccgacaucaaccucaugcccaucuga

SEQ ID NO: 118302 - RNA, 1410 nt, Artificial Sequence; identical to SEQ ID NO: 110351
  derived and/or modified CDS sequence (opt2) from neuraminidase__InfluenzaA__AFJ77509

SEQ ID NO: 118303 - RNA, 1410 nt, Artificial Sequence
  derived and/or modified CDS sequence (opt2) from neuraminidase__InfluenzaA__AFJ77520
augaaccccaaccagaagaucaucaccaucggcuccgucucccucaccaucgccaccaucugcuuccucaugcagaucgccauccucgucaccaccgucacccuccacuucaagcaguacgagugcaacuccccccccaacaaccaggucaugcucugcgagcccaccaucaucgagcgcaacaucaccgagaucgucuaccucaccaacaccaccaucgagaaggagaucugccccaagcucgccgaguaccgcaacugguccaagccccagugcaacaucaccggcuucgcccccuucuccaaggacaacuccauccgccucuccgccggcggcgacaucugggucacccgcgagcccuacgucuccugcgaccccgacaagugcuaccaguucgcccucggccagggcaccacccucaacaacggccacuccaacgacaccguccacgaccgcacccccuaccgcacccuccucaugaacgagcucggcguccccuuccaccucggcaccaagcaggucugcaucgccugguccuccuccuccugccacgacggcaaggccuggcuccacgucugcgucaccggcgacgacgagaacgccaccgccuccuucaucuacaacggccgccucgucgacuccaucggcuccugguccaagaagauccuccgcacccaggaguccgagugcgucugcaucaacggcaccugcaccgucgucaugaccgacggcuccgccuccggcaaggccgacaccaagauccucuucaucgaggagggcaagaucguccacaccuccucccucuccggcuccgcccagcacgucgaggagugcuccugcuacccccgcuaccccggcguccgcugcgucugccgcgacaacuggaagggcuccaaccgccccaucgucgacaucaacgucaaggacuacuccaucgucuccuccuacgucugcuccggccucgucggcgacaccccccgcaagaacgacuccuccuccuccucccacugccucgaccccaacaacgaggagggcggccacggcgucaagggcugggccuucgacgacggcaacgacgucuggaugggccgcaccaucuccgagaagcuccgcuccggcuacgagaccuucaaggucaucgagggcugguccaagcccaacuccaagcuccagaucaaccgccaggucaucgucgaccgcggcaaccgcuccggcuacuccggcaucuucuccgucgagggcaaguccugcaucaaccgcugcuucuacgucgagcucauccgcggccgcaagcaggagaucgagguccucuggaccuccaacuccaucgucgucuucugcggcaccuccggcaccuacggcaccggcuccuggcccgacggcgccgacaucaaccucaugcccaucuga

SEQ ID NO: 118304 - RNA, 1410 nt, Artificial Sequence
  derived and/or modified CDS sequence (opt2) from neuraminidase__InfluenzaA__AFJ77531
augaaccccaaccagaagaucaucaccaucggcuccgucucccucaccaucaccaccaucugcuuccucaugcagaucgccauccucgucaucaccgucacccuccacuucaagcagugcgagugcaacuccccccccaacaaccaggucaugcucugcgagcccaccaucaucgagcgcaacaucaccgagaucgucuaccucaccaacaccaccaucgagaaggagaucugccccaagcucgccgaguaccgcaacugguccaagccccagugcaaggucaccggcuucgcccccuucuccaaggacaacuccauccgccucuccgccggcggcgacaucugggucacccgcgagcccuacgucuccugcgaccccggcaagugcuaccaguucgcccucggccagggcaccacccucaacaaccgccacuccaacgacaccguccacgaccgcacccccuaccgcacccuccucaugaacgagcucggcguccccuuccaccucggcaccaagcaggucugcaucgccugguccuccuccuccugccacgacggcaaggccuggcuccacgucugcgucaccggccacaacgagaacgccaccgccuccuucaucuacgacggccgccucgucgacuccaucggcuccugguccaagaacauccuccgcacccaggaguccgagugcgucugcaucaacggcaccugcaccgucgucaugaccgacggcuccgccuccggccgcgccgacaccaagauccucuucaucgaggagggcaagaucguccacaucuccccccucuccggcuccgcccagcacgucgaggagugcuccugcuacccccgcuaccccggcguccgcugcgucugccgcgacaacuggaagggcuccaaccgccccaucgucgacaucaacgucaaggacuacuccaucgucuccuccuacgucugcuccggccucgucggcgacaccccccgcaagaacgacuccuccuccuccuccuacugccucgaccccaacaacgaggagggcggccacggcgucaagggcugggccuucgacgacggcaacgacgucuggaugggccgcaccaucuccgagaagcuccgcuccggcuacgagaccuucaaggucaucggcggcugguccaagcccaacuccaagcuccagaucaaccgccaggucaucgucgaccgcggcaaccgcuccggcuacuccggcaucuucuccgucgagggcaaguccugcaucaaccgcugcuucuacgucgagcucauccgcggccgcaagcaggagaccgaggucugguggaccuccaacuccaucgucgucuucugcggcaccuccggcaccuacggcaccggcuccuggcccgacggcgccgacaucaaccucaugcccaucuga

SEQ ID NO: 118305 - RNA, 1410 nt, Artificial Sequence
  derived and/or modified CDS sequence (opt2) from neuraminidase__InfluenzaA__AFJ77542
augaaccccaaccagaagaucaucaccaucggcuccgucucccucaccaucuccaccaucugcuuccucaugcagaucgccauccucgucaccaccgucacccuccacuucaagcaguacgagugcaacuccccccccaacaaccaggucaugcucugcgagcccaccaucaucgagcgcaacaucaccgagaucgucuaccucaccaacaccaccaucgagaaggagaucugccccaagcucgccgaguaccgcaacugguccaagccccagugcaacaucaccggcuucgcccccuucuccaaggacaacuccauccgccucuccgccggcggcgacaucugggucacccgcgagcccuacgucuccugcgaccccgacaagugcuaccaguucgcccucggccagggcaccacccucaacaacggccacuccaacgacaccguccacgaccgcacccccuaccgcacccuccucaugaacgagcucggcguccccuuccaccucggcaccaagcaggucugcaucgccugguccuccuccuccugccacgacggcaaggccuggcuccacgucugcgucaccggcgacgacgagaacgccaccgccuccuucaucuacaacggccgccucgucgacuccaucggcuccugguccaagaagauccuccgcacccaggaguccgagugcgucugcaucaacggcaccugcaccgucgucaugaccgacggcuccgccuccggcaaggccgacaccaagauccucuucaucgaggagggcaagaucguccacaccuccacccucuccggcuccgcccagcacgucgaggagugcuccugcuacccccgcuaccccggcguccgcugcgucugccgcgacaacuggaagggcuccaaccgccccaucgucgacaucaacaucaaggacuacuccaucgucuccuccuacgucugcuccggccucgucggcgacaccccccgcaagaacgacuccuccuccuccucccacugccucgaccccaacaacgaggagggcggccacggcgucaagggcugggccuucgacgacggcaacgacgucuggaugggccgcaccaucuccgagaagcuccgcuccggcuacgagaccuucaaggucaucgagggcugguccaagcccaacuccaagcuccagaucaaccgccaggucaucgucgaccgcggcaaccgcuccggcuacuccggcaucuucuccgucgagggcaaguccugcaucaaccgcugcuucuacgucgagcucauccgcggccgcaagcaggagaccgagguccucuggaccuccaacuccaucgucgucuucugcggcaccuccggcaccuacggcaccggcuccuggcccgacggcgccgacaucaaccucaugcccaucuga

SEQ ID NO: 118306 - RNA, 1410 nt, Artificial Sequence; identical to SEQ ID NO: 110289
  derived and/or modified CDS sequence (opt2) from neuraminidase__InfluenzaA__AFJ77553

SEQ ID NO: 118307 - RNA, 1410 nt, Artificial Sequence
  derived and/or modified CDS sequence (opt2) from neuraminidase__InfluenzaA__AFJ77564
augaaccccaaccagaagaucaucaccaucggcuccgucucccucaccaucgccaccaucugcuuccucaugcagaucgccauccucgucaccaccgucacccuccacuucaagcaguacgagugcaacuccccccccaacaaccaggucaugcucugcgagcccaccaucaucgagcgcaacaucaccgagaucgucuaccucaccaacaccaccaucgagaaggagaucugccccaagcucgccgaguaccgcaacugguccaagccccagugcaagaucaccggcuucgcccccuucuccaaggacaacuccauccgccucuccgccggcggcgacaucugggucacccgcgagcccuacgucuccugcgaccccgacaagugcuaccaguucgcccucggccagggcaccacccucaacaaccgccacuccaacgacaccguccacgaccgcacccccuaccgcacccuccucaugaacgagcucggcguccccuuccaccucggcaccaagcaggucugcaucgccugguccuccuccuccugccacgacggcaaggccuggcuccacgucugcgucaccggccacgacgagaacgccaccgccuccuucaucuacgacggccgccucgucgacuccaucggcuccugguccaagaagauccuccgcacccaggaguccgagugcgucugcaucaacggcaccugcaccgucgucaugaccgacggcuccgccuccggccgcgccgacaccaagauccucuucaucgaggagggcaagaucguccacaucucccagcucuccggcuccgcccagcacgucgaggagugcuccugcuacccccgcuaccccggcguccgcugcgucugccgcgacaacuggaagggcuccaaccgccccaucgucgacaucaacgucaaggacuacuccaucgucuccuccuacgucugcuccggccucgucggcgacaccccccgcaagaacgacuccuccuccuccucccacugccucaaccccaacaacgaggagggcggccacggcgucaagggcugggccuucgacgacggcaacgacgucuggaugggccgcaccaucuccgagaagcuccgcuccggcuacgagaccuucaaggucaucgagggcugguccaagcccaacuccaagcuccagaucaaccgccaggucaucgucgaccgcggcaaccgcuccggcuacuccggcaucuucuccgucgagggcaaguccugcaucaaccgcugcuucuacgucgagcucauccgcggccgcaagcaggagaacgaggucugguggaccuccaacuccaucgucgucuucugcggcaccuccggcaccuacggcaccggcuccuggcccgacggcgccgacaucaaccucaugcccaucuga

SEQ ID NO: 118308 - RNA, 1329 nt, Artificial Sequence
  derived and/or modified CDS sequence (opt2) from neuraminidase__InfluenzaA__AFJ77575
augaaccccaaccagaagaucaucaccaucggcuccgucucccucaccaucgccaccaucugcuuccucaugcagaucgccauccucgucaucgagcgcaacaucaccgagaucgucuaccucaccaacaccaccaucgagaaggagaucugccccaagcucgccgaguaccgcaacugguccaagccccagugcaacaucaccggcuucgcccccuucuccaaggacaacuccauccgccucuccgccggcggcgacaucugggucacccgcgagcccuacgucuccugcgaccccgacaagugcuaccaguucgcccucggccagggcaccacccucaacaacggccacuccaacgacaccguccacgaccgcacccccuaccgcacccuccucaugaacgagcucggcguccccuuccaccucggcaccaagcaggucugcaucgccugguccuccuccuccugccacgacggcaaggccuggcuccacgucugcgucaccggcgacgacgagaacgccaccgccuccuucaucuacaacggccgccucgucgacuccaucggcuccugguccaagaagauccuccgcacccaggaguccgagugcgucugcaucaacggcaccugcaccgucgucaugaccgacggcuccgccuccggcaaggccgacaccaagauccucuucaucgaggagggcaagaucguccacaccuccucccucuccggcuccgcccagcacgucgaggagugcuccugcuacccccgcuaccccggcguccgcugcgucugccgcgacaacuggaagggcuccaaccgccccaucgucgacaucaacgucaaggacuacuccaucgucuccuccuacgucugcuccggccucgucggcgacaccccccgcaagaacgacuccuccuccuccucccacugccucgaccccaacaacgaggagggcggccacggcgucaagggcugggccuucgacgacggcaacgacgucuggaugggccgcaccaucuccgagaagcuccgcuccggcuacgagaccuucaaggucaucgagggcugguccaagcccaacuccaagcuccagaucaaccgccaggucaucgucgaccgcggcaaccgcuccggcuacuccggcaucuucuccgucgagggcaaguccugcaucaaccgcugcuucuacgucgagcucauccgcggccgcaagcaggagaccgagguccucuggaccuccaacuccaucgucgucuucugcggcaccuccggcaccuacggcaccggcuccuggcccgacggcgccgacaucaaccucaugcccaucuga

SEQ ID NO: 118309 - RNA, 1410 nt, Artificial Sequence
  derived and/or modified CDS sequence (opt2) from neuraminidase__InfluenzaA__AFJ77597
augaaccccaaccagaagaucaucaccaucggcuccgucucccucaccaucgccaccaucugcuuccucaugcagaucgccauccucgucaccaccgucacccuccacuucaagcaguacgagugcaacuccccccccaacaaccaggucaugcucugcgagcccaccaucaucgagcgcaacaucaccgagaucgucuaccucaccaacaccaccaucgagaaggagaucugccccaagcucgccgaguaccgcaacugguccaagccccagugcaacaucaccggcuucgcccccuucuccaaggacaacuccauccgccucuccgccggcggcgacaucugggucacccgcgagcccuacgucuccugcgaccccgacaagugcuaccaguucgcccucggccagggcaccacccucaacaacggccacuccaacgacaccguccacgaccgcacccccuaccgcacccuccucaugaacgagcucggcguccccuuccaccucggcaccaagcaggucugcaucgccugguccuccuccuccugccacgacggcaaggccuggcuccacgucugcgucaccggcgacgacgagaacgccaccgccuccuucaucuacaacggccgccucgucgacuccaucggcuccugguccaagaagauccuccgcacccaggaguccgagugcgucugcaucaacggcaccugcaccgucgucaugaccgacggcuccgccuccggcaaggccgacaccaagauccucuucaucgaggagggcaagaucguccacacccgcccccucuccggcuccgcccagcacgucgaggagugcuccugcuacccccgcuaccccggcguccgcugcgucugccgcgacaacuggaagggcuccaaccgccccaucgucgacaucaacgucaaggacuacuccaucgucuccuccuacgucugcuccggccucgucggcgacaccccccgcaagaacgacuccuccuccuccucccacugccucgaccccaacaacgaggagggcggccacggcgucaagggcugggccuucgacgacggcaacgacgucuggaugggccgcaccaucuccgagaagcuccgcuccggcuacgagaccuucaaggucaucgagggcugguccaagcccaacuccaagcuccagaucaaccgccaggucaucgucgaccgcggcaaccgcuccggcuacuccggcaucuucuccgucgagggcaaguccugcaucaaccgcugcuucuacgucgagcucauccgcggccgcaagcaggagaccgagguccucuggaccuccaacuccaucgucgucuucugcggcaccuccggcaccuacggcaccggcuccuggcccgacggcgccgacaucaaccucaugcccaucuga

SEQ ID NO: 118310 - RNA, 1410 nt, Artificial Sequence
  derived and/or modified CDS sequence (opt2) from neuraminidase__InfluenzaA__AFJ77608
augaaccccaaccagaagaucaucaccaucggcuccgucucccucaccaucgccaccaucugcuuccucaugcagaccgccauccucgucaccaccgucacccuccacuucaagcaguacgagugcaacuccccccccaacaaccaggucaugcucugcgagcccaccaucaucgagcgcaacaugaccgagaucgucuaccucaccaacaccaccaucgagaaggagaucugccccaagcucgccgaguaccgcaacugguccaagccccagugcaacaucaccggcuucgcccccuucuccaaggacaacuccauccgccucuccgccggcggcgaccucugggucacccgcgagcccuacgucuccugcgaccccgacaagugcuaccaguucgcccucggccagggcaccacccucaacaacggccacuccaacgacaccguccacgaccgcacccccuaccgcacccuccucaugaacgagcucggcguccccuuccaccucggcaccaagcaggucugcaucgccugguccuccuccuccugccacgacggcaaggccuggcuccacgucugcgucaccggcgacgacgagaacgccaccgccuccuucaucuacaacggccgccucgucgacuccaucggcuccugguccaagaagauccuccgcacccaggaguccgagugcgucugcaucaacggcaccugcaccgucgucaugaccgacggcuccgccuccggcaaggccgacaccaagauccucuucaucgaggagggcaagaucguccacaccuccucccucuccggcuccgcccagcacgucgaggagugcuccugcuacccccgcuaccccggcguccgcugcgucugccgcgacaacuggaagggcuccaaccgccccaucgucgacaucaacgucaaggacuacuccaucgucuccuccuacgucugcuccggccucgucggcgacaccccccgcaagaacgacuccuccuccuccucccacugccucgaccccaacaacgaggagggcggccacggcgucaagggcugggccuucgacgacggcaacgacgucuggaugggccgcaccaucuccgagaagcuccgcuccggcuacgagaccuucaaggucaucgagggcugguccaagcccaacuccaagcuccagaucaaccgccaggucaucgucgaccgcggcaaccgcuccggcuacuccggcaucuucuccgucgagggcaaguccugcaucaaccgcugcuucuacgucgagcucauccgcggccgcaagcaggagaccgagguccucuggaccuccaacuccaucgucgucuucugcggcaccuccggcaccuacggcaccggcuccuggcccgacggcgccgacaucaaccucaugcccaucuga

SEQ ID NO: 118311 - RNA, 1410 nt, Artificial Sequence; identical to SEQ ID NO: 118309
  derived and/or modified CDS sequence (opt2) from neuraminidase__InfluenzaA__AFJ77619

SEQ ID NO: 118312 - RNA, 1410 nt, Artificial Sequence; identical to SEQ ID NO: 118309
  derived and/or modified CDS sequence (opt2) from neuraminidase__InfluenzaA__AFJ77630

SEQ ID NO: 118313 - RNA, 1410 nt, Artificial Sequence; identical to SEQ ID NO: 118305
  derived and/or modified CDS sequence (opt2) from neuraminidase__InfluenzaA__AFJ77641

SEQ ID NO: 118314 - RNA, 1410 nt, Artificial Sequence; identical to SEQ ID NO: 118305
  derived and/or modified CDS sequence (opt2) from neuraminidase__InfluenzaA__AFJ77652

SEQ ID NO: 118315 - RNA, 1410 nt, Artificial Sequence; identical to SEQ ID NO: 110076
  derived and/or modified CDS sequence (opt2) from neuraminidase__InfluenzaA__AFJ77663

SEQ ID NO: 118316 - RNA, 1410 nt, Artificial Sequence; identical to SEQ ID NO: 110076
  derived and/or modified CDS sequence (opt2) from neuraminidase__InfluenzaA__AFJ77674

SEQ ID NO: 118317 - RNA, 1410 nt, Artificial Sequence; identical to SEQ ID NO: 110076
  derived and/or modified CDS sequence (opt2) from neuraminidase__InfluenzaA__AFJ77685

SEQ ID NO: 118318 - RNA, 1410 nt, Artificial Sequence
  derived and/or modified CDS sequence (opt2) from neuraminidase__InfluenzaA__AFJ77696
augaaccccaaccagaagaucaucaccaucggcuccgucucccucaccaucgccaccaucugcuuccucaugcagaucgccauccucgucaccaccgucacccuccacuucaagcaguacgagugcaacuccccccccaacaaccaggucaugcucugcgagcccaccaucaucgagcgcaacaucaccgagaucgucuaccucaccaacaccaccaucgagaaggagaucugccccaagcucgccgaguaccgcaacugguccaagccccagugcaacaucaccggcuucgcccccuucuccaaggacaacuccauccgccucuccgccggcggcgacaucugggucacccgcgagcccuacgucuccugcgaccccgacaagugcuaccaguucgcccucggccagggcaccacccucaacaacggccacuccaacgacaccguccacgaccgcacccccuaccgcacccuccucaugaacgagcucggcguccccuuccaccucggcaccaagcaggucugcaucgccugguccuccuccuccugccacgacggcaaggccuggcuccacgucugcgucaccggcgacgacgagaacgccaccgccuccuucaucuacaacggccgccucgucgacuccaucggcuccugguccaagaagauccuccgcacccaggaguccgagugcgucugcaucaacggcaccugcaccgucgucaugaccgacggcuccgccuccgagaaggccgacaccaagauccucuucaucgaggagggcaagaucguccacaccucccuccucuccggcuccgcccagcacgucgaggagugcuccugcuacccccgcuaccccggcguccgcugcgucugccgcgacaacuggaagggcuccaaccgccccaucgucgacaucaacgucaaggacuacuccaucgucuccuccuacgucugcuccggccucgucggcgacaccccccgcaagaacgacuccuccuccuccucccacugccucgaccccaacaacgaggagggcggccacggcgucaagggcugggccuucgacgacggcaacgacgucuggaugggccgcaccaucuccgagaagcuccgcuccggcuacgagaccuucaaggucaucgagggcugguccaagcccaacuccaagcuccagaucaaccgccaggucaucgucgaccgcggcaaccgcuccggcuacuccggcaucuucuccgucgagggcaaguccugcaucaaccgcugcuucuacgucgagcucauccgcggccgcaagcaggagaccgagguccucuggaccuccaacuccaucgucgucuucugcggcaccuccggcaccuacggcaccggcuccuggcccgacggcgccgacaucaaccucaugcccaucuga

SEQ ID NO: 118319 - RNA, 1410 nt, Artificial Sequence; identical to SEQ ID NO: 110076
  derived and/or modified CDS sequence (opt2) from neuraminidase__InfluenzaA__AFJ77707

SEQ ID NO: 118320 - RNA, 1410 nt, Artificial Sequence; identical to SEQ ID NO: 110097
  derived and/or modified CDS sequence (opt2) from neuraminidase__InfluenzaA__AFJ77718

SEQ ID NO: 118321 - RNA, 1410 nt, Artificial Sequence; identical to SEQ ID NO: 110097
  derived and/or modified CDS sequence (opt2) from neuraminidase__InfluenzaA__AFJ77729

SEQ ID NO: 118322 - RNA, 1410 nt, Artificial Sequence
  derived and/or modified CDS sequence (opt2) from neuraminidase__InfluenzaA__AFJ77740
augaaccccaaccagaagaucaucaccaucggcuccgucucccucaccaucuccaccaucugcuucuucaugcagaucgccauccucaucaccaccgucacccuccacuucaagcaguacgaguucaacuccccccccaacaaccaggucaugcucugcgagcccaccaucaucgagcgcaacaucaccgagaucgucuaccucaccaacaccaccaucgagaaggagaucugccccaagcucgccgaguaccgcaacugguccaagccccagugcaacaucaccggcuucgcccccuucuccaaggacaacuccauccgccucuccgccggcggcgacaucugggucacccgcgagcccuacgucuccugcgaccccgacaagugcuaccaguucgcccucggccagggcaccacccucaacaacguccacuccaacgacaccguccacgaccgcacccccuaccgcacccuccucaugaacgagcucggcguccccuuccaccucggcaccaagcaggucugcaucgccugguccuccuccuccugccacgacggcaaggccuggcuccacgucugcgucaccggcgacgacgagaacgccaccgccuccuucaucuacaacggccgccucgucgacuccaucgucuccugguccaagaagauccuccgcacccaggaguccgagugcgucugcaucaacggcaccugcaucgucgucaugaccgacggcuccgccuccggcaaggccgacaccaagauccucuucaucgaggagggcaagaucguccacaccuccacccucuccggcuccgcccagcacgucgaggagugcuccugcuacccccgcuaccccggcguccgcugcgucugccgcgacaacuggaagggcuccaaccgccccaucgucgacaucaacaucaaggacuacuccaucgucuccuccuacgucugcuccggccucgucggcgacaccccccgcaagaacgacuccuccuccuccucccacugccucgaccccaacaacgaggagggcggccacggcgucaagggcugggccuucgacgacggcaacgacgucuggaugggccgcaccaucuccgagaagcuccgcuccggcuacgagaccuucaaggucaucgagggcugguccaaccccaacuccaagcuccagaucaaccgccaggucaucgucgaccgcggcaaccgcuccggcuacuccggcaucuucuccgucgagggcaaguccugcaucaaccgcugcuucuacgucgagcucauccgcggccgcaagcaggagaccgagguccucuggaccuccaacuccaucgucgucuucugcggcaccuccggcaccuacggcaccggcuccuggcccgacggcgccgacaucaaccucaugcccaucuga

SEQ ID NO: 118323 - RNA, 1410 nt, Artificial Sequence
  derived and/or modified CDS sequence (opt2) from neuraminidase__InfluenzaA__AFJ77751
augaaccccaaccagaagaucaucaccaucggcuccgucucccucaccaucgccaccaucugcuuccucaugcagaucgccauccucgucaccaccgucacccuccacuucaagcagcacgagugcaacuccccccccaacaaccaggucaugcucugcgagcccaccaucaucgagcgcaacaucaccgagaucgucuaccucaccaacaccaccaucgagaaggagaucugccccaagcucgccgaguaccgcaacugguccaagccccagugcaacaucaccggcuucgcccccuucuccaaggacaacuccauccgccucuccgccggcggcgacaucugggucacccgcgagcccuacgucuccugcgaccccgacaagugcuaccaguucgcccucggccagggcaccacccucaacaacggccacuccaacgacaccguccgcgaccgcacccccuaccgcacccuccucaugaacgagcucggcguccccuuccaccucggcacccgccaggucugcaucgccugguccuccuccuccugccacgacggcaaggccuggcuccacgucugcgucaccggcgacgacaagaacgccaccgccuccuucaucuacaacggccgccucgucgacuccaucggcuccugguccaagaagauccuccgcacccaggaguccgagugcgucugcaucaacggcaccugcaccgucgucaugaccgacggcuccgccuccggcaaggccgacaccaagauccucuucaucgaggagggcaagaucguccacaucuccacccucuccggcuccgcccagcacgucgaggagugcuccugcuacccccgcuaccccggcguccgcugcgucugccgcgacaacuggaagggcuccaaccgccccaucgucgacaucaacgucaaggacuacuccaucuucuccuccuacgucugcuccggccucgucggcgacaccccccgcaagaacgacuccuucuccuccucccacugccucgaccccaacaacgaggagggcggccacggcgucaagggcugggccuucgacgacggcaacgacgucuggaugggccgcaccaucuccgagaagcuccgcuccggcuacgagaccuucaaggucaucgagggcugguccaagcccaacuccaagcuccagaucaaccgccaggucaucgucgagcgcggcaaccgcuccggcuacuccggcaucuucuccgucgagggcaaguccugcaucaaccgcugcuucuacgucgagcucauccgcggccgcaaggaggagaccgaggucugguggaccuccaacuccaucgucgucuucugcggcaccuccggcaccuacggcaccggcuccuggcccgacggcgccgacaucaaccucaugcccaucuga

SEQ ID NO: 118324 - RNA, 1410 nt, Artificial Sequence; identical to SEQ ID NO: 110181
  derived and/or modified CDS sequence (opt2) from neuraminidase__InfluenzaA__AFJ77762

SEQ ID NO: 118325 - RNA, 1410 nt, Artificial Sequence; identical to SEQ ID NO: 110181
  derived and/or modified CDS sequence (opt2) from neuraminidase__InfluenzaA__AFJ77773

SEQ ID NO: 118326 - RNA, 1410 nt, Artificial Sequence; identical to SEQ ID NO: 110181
  derived and/or modified CDS sequence (opt2) from neuraminidase__InfluenzaA__AFJ77784

SEQ ID NO: 118327 - RNA, 1410 nt, Artificial Sequence; identical to SEQ ID NO: 110750
  derived and/or modified CDS sequence (opt2) from neuraminidase__InfluenzaA__AFJ77795

SEQ ID NO: 118328 - RNA, 1410 nt, Artificial Sequence; identical to SEQ ID NO: 110750
  derived and/or modified CDS sequence (opt2) from neuraminidase__InfluenzaA__AFJ77806

SEQ ID NO: 118329 - RNA, 1410 nt, Artificial Sequence; identical to SEQ ID NO: 110750
  derived and/or modified CDS sequence (opt2) from neuraminidase__InfluenzaA__AFJ77817

SEQ ID NO: 118330 - RNA, 1410 nt, Artificial Sequence; identical to SEQ ID NO: 110750
  derived and/or modified CDS sequence (opt2) from neuraminidase__InfluenzaA__AFJ77828

SEQ ID NO: 118331 - RNA, 1410 nt, Artificial Sequence
  derived and/or modified CDS sequence (opt2) from neuraminidase__InfluenzaA__AFJ77839
augaaccccaaccagaagaucaucaccaucggcuccgucucccucaccaucuccaccaucugcuucuucaugcagaucgccauccucaucaccaccgucacccuccacuucaagcaguacgaguucaacuccccccccaacaaccaggucaugcucugcgagcccaccaucaucgagcgcaacaucaccgagaucgucuaccucaccaacaccaccaucgagaaggagaucugccccaagcucgccgaguaccgcaacugguccaagccccagugcgacaucaccggcuucgcccccuucuccaaggacaacuccauccgccucuccgccggcggcgacaucugggucacccgcgagcccuacgucuccugcgaccccgacaagugcuaccaguucgcccucggccagggcaccacccucaacaacguccacuccaacgacaccguccacgaccgcacccccuaccgcacccuccucaugaacgagcucggcguccccuuccaccucggcaccaagcaggucugcaucgccugguccuccuccuccugccacgacggcaaggccuggcuccacgucugcgucaccggcgacgacaagaacgccaccgccuccuucaucuacaacggccgccucgucgacuccaucgucuccugguccaagaagauccuccgcacccaggaguccgagugcgucugcaucaacggcaccugcaccgucgucaugaccgacggcuccgccuccggcaaggccgacaccaagauccucuucaucgaggagggcaagaucauccacaccuccacccucuccggcuccgcccagcacgucgaggagugcuccugcuacccccgcuaccccggcguccgcugcgucugccgcgacaacuggaagggcuccaaccgccccaucgucgacaucaacaucaaggacuacuccaucgucuccuccuacgucugcuccggccucgucggcgacaccccccgcaagaacgacuccuccuccuccucccacugccucgaccccaacaacgaggagggcggccacggcgucaagggcugggccuucgacgacggcaacgacgucuggaugggccgcaccaucuccgagaagcuccgcuccggcuacgagaccuucaaggucaucgagggcugguccaaccccaacuccaagcuccagaucaaccgccaggucaucgucgaccgcggcaaccgcuccggcuacuccggcaucuucuccgucgagggcaaguccugcaucaaccgcugcuucuacgucgagcucauccgcggccgcaaggaggagaccgagguccucuggaccuccaacuccaucgucgucuucugcggcaccuccggcaccuacggcaccggcuccuggcccgacggcgccgacaucaaccucaugcccaucuga

SEQ ID NO: 118332 - RNA, 1410 nt, Artificial Sequence
  derived and/or modified CDS sequence (opt2) from neuraminidase__InfluenzaA__AFJ77850
augaaccccaaccagaagaucaucaccaucggcuccgucucccucaccaucuccaccaucugcuucuucaugcagaucgccauccucaucaccaccgucacccuccacuucaagcaguacgaguucaacuccccccccaacaaccaggucaugcucugcgagcccaccaucaucgagcgcaacaucaccgagaucgucuaccucaccaacaccaccaucgagaaggagaucugccccaagcucgccaaguaccgcaacugguccaagccccagugcgacaucaccggcuucgcccccuucuccaaggacaacuccauccgccucuccgccggcggcgacaucugggucacccgcgagcccuacgucuccugcgaccccgacaagugcuaccaguucgcccucggccagggcaccacccucaacaacguccacuccaacgacaccguccacgaccgcacccccuaccgcacccuccucaugaacgagcucggcguccccuuccaccucggcaccaagcaggucugcaucgccugguccuccuccuccugccacgacggcaaggccuggcuccacgucugcgucaccggcgacgacaagaacgccaccgccuccuucaucuacaacggccgccucgucgacuccaucgucuccugguccaagaagauccuccgcacccaggaguccgagugcgucugcaucaacggcaccugcaccgucgucaugaccgacggcuccgccuccggcaaggccgacaccaagauccucuucaucgaggagggcaagaucguccacaccuccacccucuccggcuccgcccagcacgucgaggagugcuccugcuacccccgcuaccccggcguccgcugcgucugccgcgacaacuggaagggcuccaaccgccccaucgucgacaucaacaucaaggacuacuccaucgucuccuccuacgucugcuccggccucgucggcgacaccccccgcaagaacgacuccuccuccuccucccacugccucgaccccaacaacgaggagggcggccacggcgucaagggcugggccuucgacgacggcaacgacgucuggaugggccgcaccaucuccgagaagcuccgcuccggcuacgagaccuucaaggucaucgagggcugguccaaccccaacuccaagcuccagaucaaccgccaggucaucgucgaccgcggcaaccgcuccggcuacuccggcaucuucuccgucgagggcaaguccugcaucaaccgcugcuucuacgucgagcucauccgcggccgcaaggaggagaccgagguccucuggaccuccaacuccaucgucgucuucugcggcaccuccggcaccuacggcaccggcuccuggcccgacggcgccgacaucaaccucaugcccaucuga

SEQ ID NO: 118333 - RNA, 1410 nt, Artificial Sequence; identical to SEQ ID NO: 110750
  derived and/or modified CDS sequence (opt2) from neuraminidase__InfluenzaA__AFJ77861

SEQ ID NO: 118334 - RNA, 1410 nt, Artificial Sequence; identical to SEQ ID NO: 110750
  derived and/or modified CDS sequence (opt2) from neuraminidase__InfluenzaA__AFJ77872

SEQ ID NO: 118335 - RNA, 1410 nt, Artificial Sequence; identical to SEQ ID NO: 111216
  derived and/or modified CDS sequence (opt2) from neuraminidase__InfluenzaA__AFJ77883

SEQ ID NO: 118336 - RNA, 1410 nt, Artificial Sequence; identical to SEQ ID NO: 110750
  derived and/or modified CDS sequence (opt2) from neuraminidase__InfluenzaA__AFJ77894

SEQ ID NO: 118337 - RNA, 1410 nt, Artificial Sequence; identical to SEQ ID NO: 110750
  derived and/or modified CDS sequence (opt2) from neuraminidase__InfluenzaA__AFJ77905

SEQ ID NO: 118338 - RNA, 1410 nt, Artificial Sequence
  derived and/or modified CDS sequence (opt2) from neuraminidase__InfluenzaA__AFJ77916
augaaccccaaccagaagaucaucaccaucggcuccgucucccucaccaucuccaccaucugcuucuucaugcagaucgccauccucaucaccaccgucacccuccacuucaagcaguacgaguucaacuccccccccaacaaccaggucaugcucugcgagcccaccaucaucgagcgcaacaucaccgagaucgucuaccucaccaacaccaccaucgagaaggagaucugccccaagcucgccgaguaccgcaacugguccaagccccagugcgacaucaccggcuucgcccccuucuccaaggacaacuccauccgccucuccgccggcggcgacaucugggucacccgcgagcccuacgucuccugcgaccccgacaagugcuaccaguucgcccucggccagggcaccacccucaacaacguccacuccaacgacaccguccacgaccgcacccccuaccgcacccuccucaugaacgagcucggcguccccuuccaccucggcaccaagcaggucugcaucgccugguccuccuccuccugccacgacggcaaggccuggcuccacgucugcgucaccggcgacgacaagaacgccaccgccuccuucaucuacaacggccgccucgucgacuccaucgucuccugguccaagaagauccuccgcacccaggaguccgagugcgucugcaucaacggcaccugcaccgucgucaugaccgacggcuccgccuccggcaaggccgacaccaagauccucuucaucgaggagggcaagaucguccacaccuccacccucuccggcuccgcccagcacgucgaggagugcuccugcuacccccgcuaccccggcguccgcugcgucugccgcgacaacuggaagggcuccaaccgccccaucgucgacaucaacaucaaggacuacuccaucgucuccuccuacgucugcuccggccucgucggcgacaccccccgcaagaacgacuccuccuccuccucccacugccucgaccccaacaacgaggagggcggccacggcgucaagggcugggccuucgacgacggcaacgacgucuggaugggccgcaccaucuccgagaagcuccgcuccggcuacgagaccuucaaggucaucgagggcugguccaaccccaacuccaagcuccagaucaaccgccaggucaucgucgaccgcggcaaccgcuccggcuacuccggcaucuucuccgucgagggcaaguccugcaucaaccgcugcuucuacgucgagcucauccgcggccgcaaggaggagaccgagguccucuggaccuccaacuccaucaucgucuucugcggcaccuccggcaccuacggcaccggcuccuggcccgacggcgccgacaucaaccucaugcccaucuga

SEQ ID NO: 118339 - RNA, 1410 nt, Artificial Sequence; identical to SEQ ID NO: 110772
  derived and/or modified CDS sequence (opt2) from neuraminidase__InfluenzaA__AFJ77927

SEQ ID NO: 118340 - RNA, 1410 nt, Artificial Sequence; identical to SEQ ID NO: 110772
  derived and/or modified CDS sequence (opt2) from neuraminidase__InfluenzaA__AFJ77938

SEQ ID NO: 118341 - RNA, 1410 nt, Artificial Sequence; identical to SEQ ID NO: 110750
  derived and/or modified CDS sequence (opt2) from neuraminidase__InfluenzaA__AFJ77949

SEQ ID NO: 118342 - RNA, 1410 nt, Artificial Sequence; identical to SEQ ID NO: 110750
  derived and/or modified CDS sequence (opt2) from neuraminidase__InfluenzaA__AFJ77960

SEQ ID NO: 118343 - RNA, 1410 nt, Artificial Sequence
  derived and/or modified CDS sequence (opt2) from neuraminidase__InfluenzaA__AFJ77971
augaaccccaaccagaagaucaucaccaucggcuccgucucccucaccaucuccaccaucugcuucuucaugcagaucgccauccucaucaccaccgucacccuccacuucaagcaguacgaguucaacuccccccccaacaaccaggucaugcucugcgagcccaccaucaucgagcgcaacaucaccgagaucgucuaccucaccaacaccaccaucgagaaggagaucugccccaagcucgccgaguaccgcaacugguccaagccccagugcaacaucaccggcuucgcccccuucuccaaggacaacuccauccgccucuccgccggcggcgacaucugggucacccgcgagcccuacgucuccugcgaccccgacaagugcuaccaguucgcccucggccagggcaccacccucaacaacguccacuccaacgacaccguccacgaccgcacccccuaccgcacccuccucaugaacgagcucggcguccccuuccaccucggcaccaagcaggucugcaucgccugguccuccuccuccugccacgacggcaaggccuggcuccacgucugcgucaccggcgacgacaagaacgccaccgccuccuucaucuacaacggccgccucgucgacuccaucgucuccugguccaaggagauccuccgcacccaggaguccgagugcgucugcaucaacggcaccugcaccgucgucaugaccgacggcuccgccuccggcaaggccgacaccaagauccucuucaucgaggagggcaagaucguccacaccuccacccucuccggcuccgcccagcacgucgaggagugcuccugcuacccccgcuaccccggcguccgcugcgucugccgcgacaacuggaagggcuccaaccgccccaucgucgacaucaacaucaaggacuacuccaucgucuccuccuacgucugcuccggccucgucggcgacaccccccgcaagaacgacuccuccuccuccucccacugccucgaccccaacaacgaggagggcggccacggcgucaagggcugggccuucgacgacggcaacgacgucuggaugggccgcaccaucuccgagaagcuccgcuccggcuacgagaccuucaaggucaucgagggcugguccaaccccaacuccaagcuccagaucaaccgccaggucaucgucgaccgcggcaaccgcuccggcuacuccggcaucuucuccgucgagggcaaguccugcaucaaccgcugcuucuacgucgagcucauccgcggccgcaaggacgagaccgagguccucuggaccuccaacuccaucgucgucuucugcggcaccuccggcaccuacggcaccggcuccuggcccgacggcgccgacaucaaccucaugcccaucuga

SEQ ID NO: 118344 - RNA, 1410 nt, Artificial Sequence
  derived and/or modified CDS sequence (opt2) from neuraminidase__InfluenzaA__AFJ77982
augaaccccaaccagaagaucaucaccaucggcuucgucucccucaccaucuccaccaucugcuucuucaugcagaucgccauccucaucaccaccgucccccuccacuucaagcaguacgaguucaacuccccccccaacaaccaggucaugcucugcgagcccaccaucaucgagcgcaacaucaccgagaucgucuaccucaccaacaccaccaucgagaaggagaucugccccaagcucgccgaguaccgcaacugguccaagccccagugcaacaucaccggcuucgcccccuucuccaaggacaacuccauccgccucuccgccggcggcgacaucugggucacccgcgagcccuacgucuccugcgaccccgacaagugcuaccaguucgcccucggccagggcaccacccucaacaacguccacuccaacgacaccguccacgaccgcacccccuaccgcacccuccucaugaacgagcucggcguccccuuccaccucggcaccaagcaggucugcaucgccugguccuccuccuccugccacgacggcaaggccuggcuccacgucugcgucaccggcgacgacaagaacgccaccgccuccuucaucuacaacggccgccucgucgacuccaucgucuccugguccaaggagauccuccgcacccaggaguccgagugcgucugcaucaacggcaccugcaccgucgucaugaccgacggcuccgccuccggcaaggccgacaccaagauccucuucaucgaggagggcaagaucguccacaccuccacccucuccggcuccgcccagcacgucgaggagugcuccugcuacccccgcuaccccggcguccgcugcgucugccgcgacaacuggaagggcuccaaccgccccaucgucgacaucaacaucaaggacuacuccaucgucuccuccuacgucugcuccggcaucgucggcgacaccccccgcaagaacgacuccuccuccuccucccacugccucgaccccaacaacgaggagggcggccacggcgucaagggcugggccuucgacgacggcaacgacgucuggaugggccgcaccaucuccgagaagcuccgcuccggcuacgagaccuucaaggucaucgagggcugguccaaccccaacuccaagcuccagaucaaccgccaggucaucgucgaccgcggcaaccgcuccggcuacuccggcaucuucuccgucgagggcaaguccugcaucaaccgcugcuucuacgucgagcucauccgcggccgcaaggaggagaccgagguccucuggaccuccaacuccaucgucgucuucugcggcaccuccggcaccuacggcaccggcuccuggcccgacggcgccgacaucaaccucaugcccaucuga

SEQ ID NO: 118345 - RNA, 1410 nt, Artificial Sequence; identical to SEQ ID NO: 110748
  derived and/or modified CDS sequence (opt2) from neuraminidase__InfluenzaA__AFJ77993

SEQ ID NO: 118346 - RNA, 1410 nt, Artificial Sequence
  derived and/or modified CDS sequence (opt2) from neuraminidase__InfluenzaA__AFJ78004
augaaccccaaccagaagaucaucaccaucggcuccgucucccucaccaucuccaccaucugcuucuucaugcagaucgccauccucaucaccaccgucacccuccacuucaagcaguacgaguucaacuccccccccaacaaccaggucaugcucugcgagcccaccaucaucgagaagaacaucaccgagaucgucuaccucaccaacaccaccaucgagaaggagaucugccccaagcucgccgaguaccgcaacugguccaagccccagugcaacaucaccggcuucgcccccuucuccaaggacaacuccauccgccucuccgccggcggcgacaucugggucacccgcgagcccuacgucuccugcgaccccgacaagugcuaccaguucgcccucggccagggcaccacccucaacaacguccacuccaacgacaccguccacgaccgcacccccuaccgcacccuccucaugaacgagcucggcguccccuuccaccucggcaccaagcaggucugcaucgccugguccuccuccuccugccacgacggcaaggccuggcuccacgucugcgucaccggcgacgacaagaacgccaccgccuccuucaucuacaacggccgccucgucgacuccaucgucuccugguccaaggagauccuccgcacccaggaguccgagugcgucugcaucaacggcaccugcaccgucgucaugaccgacggcuccgccuccggcaaggccgacaccaagauccucuucaucgaggagggcaagaucguccacaccuccacccucuccggcuccgcccagcacgucgaggagugcuccugcuacccccgcuaccccggcguccgcugcgucugccgcgacaacuggaagggcuccaaccgccccaucgucgacaucaacaucaaggacuacuccaucgucuccuccuacgucugcuccggccucgucggcgacaccccccgcaagaacgacuccuccuccuccucccacugccucgaccccaacaacgaggagggcggccacggcgucaagggcugggccuucgacgacggcaacgacgucuggaugggccgcaccaucuccgagaagcuccgcuccggcuacgagaccuucaaggucaucgagggcugguccaaccccaacuccaagcuccagaucaaccgccaggucaucgucgaccgcggcaaccgcuccggcuacuccggcaucuucuccgucgagggcaaguccugcaucaaccgcugcuucuacgucgagcucauccgcggccgcaaggaggagaccgagguccucuggaccuccaacuccaucgucgucuucugcggcaccuccggcaccuacggcaccggcuccuggcccgacggcgccgacaucaaccucaugcccaucuga

SEQ ID NO: 118347 - RNA, 1410 nt, Artificial Sequence; identical to SEQ ID NO: 110748
  derived and/or modified CDS sequence (opt2) from neuraminidase__InfluenzaA__AFJ78015

SEQ ID NO: 118348 - RNA, 1410 nt, Artificial Sequence; identical to SEQ ID NO: 117605
  derived and/or modified CDS sequence (opt2) from neuraminidase__InfluenzaA__AFJ78026

SEQ ID NO: 118349 - RNA, 1410 nt, Artificial Sequence; identical to SEQ ID NO: 117605
  derived and/or modified CDS sequence (opt2) from neuraminidase__InfluenzaA__AFJ78037

SEQ ID NO: 118350 - RNA, 1410 nt, Artificial Sequence
  derived and/or modified CDS sequence (opt2) from neuraminidase__InfluenzaA__AFJ78048
augaaccccaaccagaagaucaucaccaucggcuccgucucccucaccaucuccaccaucugcuucuucaugcagaucgccauccucaucaccaccgucacccuccacuucaagcaguacgaguucaacuccccccccaacaaccaggucaugcucugcgagcccaccaucaucgagcgcaacaucaccgagaucgucuaccucaccaacaccaccaucgagaaggagaucugccccaagcucgccgaguaccgcaacugguccaagccccagugcaacaucaccggcuucgcccccuucuccaaggacaacuccauccgccucuccgccggcggcgacaucugggucacccgcgagcccuacgucuccugcgaccccgacaagugcuaccaguucgcccucggccagggcaccacccucaacaacguccacuccaacgacaccguccacgaccgcacccccuaccgcacccuccucaugaacgagcucggcguccccuuccaccucggcaccaagcaggucugcaucgccugguccuccuccuccugccacgacggcaaggccuggcuccacgucugcgucaccggcgacgacaagaacgccaccgccuccuucaucuacaacggccgccucgucgacuccaucgucuccugguccaaggagauccuccgcacccaggaguccgagugcgucugcaucaacggcaccugcaccgucgucaugaccgacggcaacgccuccggcaaggccgacaccaagauccucuucaucgaggagggcaagaucguccacaccuccacccucuccggcuccgcccagcacgucgaggagugcuccugcuacccccgcuaccccggcguccgcugcgucugccgcgacaacuggaagggcuccaaccgccccaucgucgacaucaacaucaaggacuacuccaucgucuccuccuacgucugcuccggccucgucggcgacaccccccgcaagaacgacuccuccuccuccucccacugccucgaccccaacaacgaggagggcggccacggcgucaagggcugggccuucgacgacggcaacgacgucuggaugggccgcaccaucuccgagaagcuccgcuccggcuacgagaccuucaaggucaucgagggcugguccaaccccaacuccaagcuccagaucaaccgccaggucaucgucgaccgcggcaaccgcuccggcuacuccggcaucuucuccgucgagggcaaguccugcaucaaccgcugcuucuacgucgagcucauccgcggccgcaaggaggagaccgagguccucuggaccuccaacuccaucgucgucuucugcggcaccuccggcaccuacggcaccggcuccuggcccgacggcgccgacaucaaccucaugcccaucuga

SEQ ID NO: 118351 - RNA, 1410 nt, Artificial Sequence
  derived and/or modified CDS sequence (opt2) from neuraminidase__InfluenzaA__AFJ78059
augaaccccaaccagaagaucaucaccaucggcuccgucucccucaccaucuccaccaucugcuucuucaugcagaucgccauccucaucaccaccgucacccuccacuucaagcaguacgaguucaaccccccccccaacaaccaggucaugcucugcgagcccaccaucaucgagcgcaacaucaccgagaucgucuaccucaccaacaccaccaucgagaaggagaucugccccaagcucgccgaguaccgcaacugguccaagccccagugcaacaucaccggcuucgcccccuucuccaaggacaacuccauccgccucuccgccggcggcgacaucugggucacccgcgagcccuacgucuccugcgaccccgacaagugcuaccaguucgcccucggccagggcaccacccucaacaacguccacuccaacgacaccguccacgaccgcacccccuaccgcacccuccucaugaacgagcucggcguccccuuccaccucggcaccaagcaggucugcaucgccugguccuccuccuccugccacgacggcaaggccuggcuccacgucugcgucaccggcgacgacaagaacgccaccgccuccuucaucuacaacggccgccucgucgacuccaucgucuccugguccaaggagauccuccgcacccaggaguccgagugcgucugcaucaacggcaccugcaccgucgucaugaccgacggcuccgccuccggcaaggccgacaccaagauccucuucaucgaggagggcaagaucguccacaccuccacccucuccggcuccgcccagcacgucgaggagugcuccugcuacccccgcuaccccggcguccgcugcgucugccgcgacaacuggaagggcuccaaccgccccaucgucgacaucaacaucaaggacuacuccaucgucuccuccuacgucugcuccggccucgucggcgacaccccccgcaagaacgacuccuccuccuccucccacugccucgaccccaacaacgaggagggcggccacggcgucaagggcugggccuucgacgacggcaacgacgucuggaugggccgcaccaucuccgagaagcuccgcuccggcuacgagaccuucaaggucaucgagggcugguccaaccccaacuccaagcuccagaucaaccgccaggucaucgucgaccgcggcaaccgcuccggcuacuccggcaucuucuccgucgagggcaaguccugcaucaaccgcugcuucuacgucgagcucauccgcggccgcaaggacgagaccgagguccucuggaccuccaacuccaucgucgucuucugcggcaccuccggcaccuacggcaccggcuccuggcccgacggcgccgacaucaaccucaugcccaucuga

SEQ ID NO: 118352 - RNA, 1410 nt, Artificial Sequence
  derived and/or modified CDS sequence (opt2) from neuraminidase__InfluenzaA__AFJ78070
augaaccccaaccagaagaucaucaccaucggcuccgucucccucaccaucuccaccaucugcuucuucaugcagaucgccauccucaucaccaccgucacccuccacuucaagcaguacgaguucaacuccccccccaacaaccaggucaugcucugcgagcccaccaucaucgagcgcaacaucaccgagaucgucuaccucaccaacaccaccaucgagaaggagaucugccccaagcucgccgaguaccgcaagugguccaagccccagugcaacaucaccggcuucgcccccuucuccaaggacaacuccauccgccucuccgccggcggcgacaucugggucacccgcgagcccuacgucuccugcgaccccgacaagugcuaccaguucgcccucggccagggcaccacccucaacaacguccacuccaacgacaccguccgcgaccgcacccccuaccgcacccuccucaugaacgagcucggcguccccuuccaccucggcaccaagcaggucugcaucgccugguccuccuccuccugccacgacggcaaggccuggcuccacgucugcgucaccggcgacgacaagaacgccaccgccuccuucaucuacaacggccgccucgucgacuccaucgucuccugguccaaggagauccuccgcacccaggaguccgagugcgucugcaucaacggcaccugcaccgucgucaugaccgacggcuccgccuccggcaaggccgacaccaagauccucuucaucgaggagggcaagaucguccacaccuccacccucuccggcuccgcccagcacgucgaggagugcuccugcuacccccgcuaccccggcguccgcugcgucugccgcgacaacuggaagggcuccaaccgccccaucgucgacaucaacaucaaggacuacuccaucgucuccuccuacgucugcuccggccucgucggcgacaccccccgcaagaacgacuccuccuccuccggccacugccucgaccccaacaacgaggagggcggccacggcgucaagggcugggccuucgacgacggcaacgacgucuggaugggccgcaccaucuccgagaagucccgcuccggcuacgagaccuucaaggucaucgagggcugguccaaccccaacuccaagcuccagaucaaccgccaggucaucgucgaccgcggcaaccgcuccggcuacuccggcaucuucuccgucgagggcaaguccugcaucaaccgcugcuucuacgucgagcucauccgcggccgcaaggaggagaccgagguccucuggaccuccaacuccaucgucgucuucugcggcaccuccggcaccuacggcaccggcuccuggcccgacggcgccgacaucaaccucaugcccaucuga

SEQ ID NO: 118353 - RNA, 1410 nt, Artificial Sequence
  derived and/or modified CDS sequence (opt2) from neuraminidase__InfluenzaA__AFJ78081
augaaccccaaccagaagaucaucaccaucggcuccgucucccucaccaucuccaccaucugcuucuucaugcagaucgccauccucaucaccaccgucacccuccacuucaagcaguacgaguucaacuccccccccaacaaccaggucaugcucugcgagcccaccaucaucgagcgcaacaucaccgagaucgucuaccucaccaacaccaccaucgagaaggagaucugccccaagcucgccgaguaccgcaacugguccaagccccagugcgacaucaccggcuucgcccccuucuccaaggacaacuccauccgccucuccgccggcggcgacaucugggucacccgcgagcccuacgucuccugcgaccccgacaagugcuaccaguucgcccucggccagggcaccacccucaacaacguccacuccaacgacaccguccgcgaccgcacccccuaccgcacccuccucaugaacgagcucggcguccccuuccaccucggcaccaagcaggucugcaucgccugguccuccuccuccugccacgacggcaaggccuggcuccacgucugcaucaccggcgacgacaagaacgccaccgccuccuucaucuacaacggccgccucgucgacuccaucgucuccugguccaaggagauccuccgcacccaggaguccgagugcgucugcaucaacggcaccugcaccgucgucaugaccgacggcuccgccuccggcaaggccgacaccaagauccucuucaucgaggagggcaagaucguccacaccuccacccucuccggcuccgcccagcacgucgaggagugcuccugcuacccccgcuaccccggcguccgcugcgucugccgcgacaacuggaagggcuccaaccgccccaucgucgacaucaacaucaaggaccacuccaucgucuccuccuacgucugcuccggccucgucggcgacaccccccgcaagaacgacaacuccuccuccucccacugccucgaccccaacaacgaggagggcggccacggcgucaagggcugggccuucgacgacggcaacgacgucuggaugggccgcaccaucuccgagaagucccgccucggcuacgagaccuucaaggucaucgagggcugguccaaccccaacuccaagcuccagaugaaccgccaggucaucgucgaccgcggcaaccgcuccggcuacuccggcaucuucuccgucgagggcaaguccugcaucaaccgcugcuucuacgucgagcucauccgcggccgcaaggaggagaccgagguccucuggaccuccaacuccaucgucgucuucugcggcaccuccggcaccuacggcaccggcuccuggcccgacggcgccgacaucaaccucaugcccaucuga

SEQ ID NO: 118354 - RNA, 1410 nt, Artificial Sequence; identical to SEQ ID NO: 118270
  derived and/or modified CDS sequence (opt2) from neuraminidase__InfluenzaA__AFJ78092

SEQ ID NO: 118355 - RNA, 1410 nt, Artificial Sequence
  derived and/or modified CDS sequence (opt2) from neuraminidase__InfluenzaA__AFJ78103
augaaccccaaccagaagaucaucaccaucggcuccgucucccucaccaucuccaccaucugcuucuucaugcagaucgccauccucaucaccaccgucacccuccacuucaagcaguacgaguucaacuccccccccaacaaccaggucaugcucugcgagcccaccaucaucgagcgcaacaucaccgagaucgucuaccucaccaacaccaccaucgagaaggagaucugccccaagcucgccgaguaccgcaacugguccaagccccagugcgacaucaccggcuucgcccccuucuccaaggacaacuccauccgccucuccgccggcggcgacaucugggucacccgcgagcccuacgucuccugcgaccccgacaagugcuaccaguucgcccucggccagggcaccacccucaacaacguccacuccaacgacaccguccgcgaccgcacccccuaccgcacccuccucaugaacgagcucggcguccccuuccaccucggcaccaagcaggucugcaucgccugguccuccuccuccugccacgacggcaaggccuggcuccacgucugcaucaccggcgacgacaagaacgccaccgccuccuucaucuacaacggccgccucgucgacuccaucgucuccugguccaaggagauccuccgcacccaggaguccgagugcgucugcaucaacggcaccugcaccgucgucaugaccgacggcuccgccuccggcaaggccgacaccaagauccucuucaucgaggagggcaagaucguccacaccuccacccuccucggcuccgcccagcacgucgaggagugcuccugcuacccccgcuaccccggcguccgcugcgucugccgcgacaacuggaagggcuccaaccgccccaucgucgacaucaacaucaaggaccacuccaucgucuccuccuacgucugcuccggccucgucggcgacaccccccgcaagaacgacuccuccuccuccggccacugccucgaccccaacaacgaggagggcggccacggcgucaagggcugggccuucgacgacggcaacgacgucuggaugggccgcaccaucuccgagaagucccgccucggcuacgagaccuucaaggucaucgagggcugguccaaccccuccuccaagcuccagaucaaccgccaggucaucgucgaccgcggcaaccgcuccggcuacuccggcaucuucuccgucgagggcaaguccugcaucaaccgcugcuucuacgucgagcucauccgcggccgcaaggaggagaccgagguccucuggaccuccaacuccaucgucgucuucugcggcaccuccggcaccuacggcaccggcuccuggcccgacggcgccgacaucaaccucaugcccaucuga

SEQ ID NO: 118356 - RNA, 1410 nt, Artificial Sequence
  derived and/or modified CDS sequence (opt2) from neuraminidase__InfluenzaA__AFJ78114
augaaccccaaccagaagaucaucaccaucggcuccgucucccucaccaucuccaccaucugcuucuucaugcagaucgccauccucaucaccaccgucacccuccacuucaagcaguacgagcucaacuccccccccaacaaccaggucaugcucugcgagcccaccaucaucgagcgcaacaucaccgagaucgucuaccucaccaacaccaccaucgagaaggagaucugccccaagcucgccgaguaccgcaacugguccaagccccagugcgacaucaccggcuucgcccccuucuccaaggacaacuccauccgccucuccgccggcggcgacaucugggucacccgcgagcccuacgucuccugcgaccccgacaagugcuaccaguucgcccucggccagggcaccacccucaacaacguccacuccaacgacaccguccgcgaccgcacccccuaccgcacccuccucaugaacgagcucggcguccccuuccaccucggcaccaagcaggucugcaucgccugguccuccuccuccugccacgacggcaaggccuggcuccacgucugcaucaccggcgacgacaagaacgccaccgccuccuucaucuacaacggccgccucgucgacuccaucgucuccugguccaaggagauccuccgcacccaggaguccgagugcgucugcaucaacggcaccugcaccgucgucaugaccgacggcuccgccuccggcaaggccgacaccaagauccucuucaucgaggagggcaagaucguccacaccuccacccucuccggcuccgcccagcacgucgaggagugcuccugcuacccccgcuaccccggcguccgcugcgucugccgcgacaacuggaagggcuccaaccgccccaucgucgacaucaacaucaaggaccacuccaucgucuccuccuacgucugcuccggccucgucggcgacaccccccgcaagaacgacuccuccuccuccucccacugccucgaccccaacaacgaggagggcggccacggcgucaagggcugggccuucgacgacggcaacgacgucuggaugggccgcaccaucuccgagaagucccgccucggcuacgagaccuucaaggucaucgagggcugguccaaccccaacuccaagcuccagaucaaccgccaggucaucgucgaccgcuccaaccgcuccggcuacuccggcaucuucuccgucgagggcaaguccugcaucaaccgcugcuucuacgucgagcucauccgcggccgcaaggaggagaccgagguccucuggaccuccaacuccaucgucgucuucugcggcaccuccggcaccuacggcaccggcuccuggcccgacggcgccgacaucaaccucaugcccaucuga

SEQ ID NO: 118357 - RNA, 1410 nt, Artificial Sequence
  derived and/or modified CDS sequence (opt2) from neuraminidase__InfluenzaA__AFJ78125
augaaccccaaccagaagaucaucaccaucggcuccgucucccucaccaucuccaccaucugcuucuucaugcagaucgccauccucaucaccaccgucacccuccacuucaagcaguacgaguucaacuccccccccaacaaccaggucaugcucugcgagcccaccaucaucgagcgcaacaucaccgagaucgucuaccucaccaacaccaccaucgagaaggagaugugccccaagcucgccgaguaccgcaacugguccaagccccagugcgacaucaccggcuucgcccccuucuccaaggacaacuccauccgccucuccgccggcggcgacaucugggucacccgcgagcccuacgucuccugcgaccccgacaagugcuaccaguucgcccucggccagggcaccacccucaacaacguccacuccaacgacaccguccgcgaccgcacccccuaccgcacccuccucaugaacgagcucggcguccccuuccaccucggcaccaagcaggucugcaucgccugguccuccuccuccugccacgacggcaaggccuggcuccacgucugcaucaccggcgacgacaagaacgccaccgccuccuucaucuacaacggccgccucgucgacuccaucgucuccugguccaaggagauccuccgcacccaggaguccgagugcgucugcaucaacggcaccugcaccgucgucaugaccgacggcuccgccuccggcaaggccgacaccaagauccucuucaucgaggagggcaagaucguccacaccuccacccucuccggcuccgcccagcacgucgaggagugcuccugcuacccccgcuaccccggcguccgcugcgucugccgcgacaacuggaagggcuccaaccgccccaucgucgacaucaacaucaaggaccacuccaucgucuccuccuacgucugcuccggccucgucggcgacaccccccgcaagaacgacuccuccuccuccucccacugccucgaccccaacaacgaggagggcggccacggcgucaagggcugggccuucgacgacggcaacgacgucuggaugggccgcaccaucuccgagaagucccgccucggcuacgagaccuucaaggucaucgagggcugguccaaccccaacuccaagcuccagaugaaccgccaggucaucgucgaccgcggcaaccgcuccggcuacuccggcaucuucuccgucgagggcaaguccugcaucaaccgcugcuucuacgucgagcucauccgcggccgcaaggaggagaccgagguccucuggaccuccaacuccaucgucgucuucugcggcaccuccggcaccuacggcaccggcuccuggcccgacggcgccgacaucaaccucaugcccaucuga

SEQ ID NO: 118358 - RNA, 1410 nt, Artificial Sequence
  derived and/or modified CDS sequence (opt2) from neuraminidase__InfluenzaA__AFJ78136
augaaccccaaccagaagaucaucaccaucggcuccgucucccucaccaucuccaccaucugcuucuucaugcagaccgccauccucaucaccaccgucacccuccacuucaagcaguacgaguucaacuccccccccaacaaccaggucaugcucugcgagcccaccaucaucgagcgcaacaucaccgagaucgucuaccucaccaacaccaccaucgagaaggagaucugccccaagcucgccgaguaccgcaacugguccaagccccagugcgacaucaccggcuucgcccccuucuccaaggacaacuccauccgccucuccgccggcggcgacaucugggucacccgcgagcccuacgucuccugcgaccccgacaagugcuaccaguucgcccucggccagggcaccacccucaacaacguccacuccaacaacaccguccgcgaccgcacccccuaccgcacccuccucaugaacgagcucggcguccccuuccaccucggcaccaagcaggucugcaucgccugguccuccuccuccugccacgacggcaaggccuggcuccacgucugcaucaccggcgacgacaagaacgccaccgccuccuucaucuacaacggccgccucgucgacuccaucgucuccugguccaaggagauccuccgcacccaggaguccgagugcgucugcaucaacggcaccugcaccgucgucaugaccgacggcuccgccuccggcaaggccgacaccaagauccucuucaucgaggagggcaagaucguccacaccuccacccucuccggcuccgcccagcacgucgaggagugcuccugcuacccccgcuaccccggcguccgcugcgucugccgcgacaacuggaagggcuccaaccgccccaucgucgacaucaacaucaaggaccacuccaucgucuccuccuacgucugcuccggccucgucggcgacaccccccgcaagaacgacuccuccuccuccucccacugccucgaccccaacaacgaggagggcggccacggcgucaagggcugggccuucgacgacggcaacgacgucuggaugggccgcaccaucuccgagaagucccgccucggcuacgagaccuucaaggucaucgagggcugguccaaccccaaguccaagcuccagaucaaccgccaggucaucgucgaccgcggcaaccgcuccggcuacuccggcaucuucuccgucgagggcaaguccugcaucaaccgcugcuucuacgucgagcucauccgcggccgcaaggaggagaccgagguccucuggaccuccaacuccaucgucgucuucugcggcaccuccggcaccuacggcaccggcuccuggcccgacggcgccgacaucaaccucaugcccaucuga

SEQ ID NO: 118359 - RNA, 1410 nt, Artificial Sequence; identical to SEQ ID NO: 118358
  derived and/or modified CDS sequence (opt2) from neuraminidase__InfluenzaA__AFJ78147

SEQ ID NO: 118360 - RNA, 1410 nt, Artificial Sequence; identical to SEQ ID NO: 118358
  derived and/or modified CDS sequence (opt2) from neuraminidase__InfluenzaA__AFJ78158

SEQ ID NO: 118361 - RNA, 1410 nt, Artificial Sequence; identical to SEQ ID NO: 111920
  derived and/or modified CDS sequence (opt2) from neuraminidase__InfluenzaA__AFJ78169

SEQ ID NO: 118362 - RNA, 1410 nt, Artificial Sequence; identical to SEQ ID NO: 112438
  derived and/or modified CDS sequence (opt2) from neuraminidase__InfluenzaA__AFJ78180

SEQ ID NO: 118363 - RNA, 1410 nt, Artificial Sequence; identical to SEQ ID NO: 111920
  derived and/or modified CDS sequence (opt2) from neuraminidase__InfluenzaA__AFJ78191

SEQ ID NO: 118364 - RNA, 1410 nt, Artificial Sequence
  derived and/or modified CDS sequence (opt2) from neuraminidase__InfluenzaA__AFJ78202
augaaccccaaccagaagaucaucaccaucggcuccgucucccucaccaucuccaccaucugcuucuucaugcagaccgccauccucaucaccaccgucacccuccacuucaagcaguacgaguucaacuccccccccaacaaccaggucaugcucugcgagcccaccaucaucgagcgcaacaucaccgagaucgucuaccucaucaacaccaccaucgagaaggagaucugccccaagcucgccgaguaccgcaacugguccaagccccagugcgacaucaccggcuucgcccccuucuccaaggacaacuccauccgccucuccgccggcggcgacaucugggucacccgcgagcccuacgucuccugcgaccccgacaagugcuaccaguucgcccucggccagggcaccacccucaacaacguccacuccaacaacaccguccgcgaccgcacccccuaccgcacccuccucaugaacgagcucggcguccccuuccaccucggcaccaagcaggucugcaucgccugguccuccuccuccugccacgacggcaaggccuggcuccacgucugcaucaccggcgacgacaagaacgccaccgccuccuucaucuacaacggccgccucgucgacuccaucgucuccugguccaaggagauccuccgcacccaggaguccgagugcgucugcaucaacggcaccugcaccgucgucaugaccgacggcuccgccuccggcaaggccgacaccaagauccucuucaucgaggagggcaagaucguccacaccuccacccucuccggcggcgcccagcacgucgaggagugcuccugcuacccccgcuaccccggcguccgcugcgucugccgcgacaacuggaagggcuccaaccgccccaucgucgacaucaacaucaaggaccacuccaucgucuccuccuacgucugcuccggccucgucggcgacaccccccgcaagaacgacuccuccuccuccucccacugccucgaccccaacaacgaggagggcggccacggcgucaagggcugggccuucgacgacggcaacgacgucuggaugggccgcaccaucuccgagaagucccgccucggcuacgagaccuucaaggucaucgagggcugguccaaccccaaguccaagcuccagaucaaccgccaggucaucgucgaccgcggcaaccgcuccggcuacuccggcaucuucuccgucgagggcaaguccugcaucaaccgcugcuucuacgucgagcucauccgcggccgcaaggaggagaccgagguccucuggaccuccaacuccaucgucgucuucugcggcaccuccggcaccuacggcaccggcuccuggcccgacggcgccgacaucucccucaugcccaucuga

SEQ ID NO: 118365 - RNA, 1410 nt, Artificial Sequence
  derived and/or modified CDS sequence (opt2) from neuraminidase__InfluenzaA__AFJ78213
augaaccccaaccagaagaucaucaccaucggcuccgucucccucaccaucuccaccaucugcuucuucaugcagaucgccauccucaucaccaccgucacccuccacuucaagcaguacgaguucaacuccccccccaacaaccaggucaugcucugcgagcccaccaucaucgagcgcaacaucaccgagaucgucuaccucaccaacaccaccaucgagaaggagaucugccccaagcucgccgaguaccgcaacugguccaagccccagugcgacaucaccggcuucgcccccuucuccaaggacaacuccauccgccucuccgccggcggcgacaucugggucacccgcgagcccuacgucuccugcgaccccgacaagugcuaccaguucgcccucggccagggcaccacccucaacaacguccacuccaacgacaccguccgcgaccgcacccccuaccgcacccuccucaugaacgagcucggcguccccuuccaccucggcaccaagcaggucugcaucgccugguccuccuccuccugccacgacggcaaggccuggcuccacgucugcaucaccggcgacgacaagaacgccaccgccuccuucaucuacaacggccgccucgucgacuccaucgucuccugguccaaggagauccuccgcacccaggaguccgagugcgucugcaucaacggcaccugcaccgucgucaugaccgacggcuccgccuccggcaaggccgacaccaagauccucuucaucgaggagggcaagaucguccacaccuccacccucuccggcuccgcccagcacgucgaggagugcuccugcuacccccgcuaccccggcguccgcugcgucugccgcgacaacuggaagggcuccaaccgccccaucgucgacaucaacaucaaggaccacuccaucgucuccuccuacgucugcuccggccucgucggcgacaccccccgcaagaacgacuccuccuccuccucccacugccucgaccccaacaacgaggagggcggccacggcgucaagggcugggccuucgacgacggcaacgacgucuggaugggccgcaccaucuccgagaagucccgccucggcuacgagaccuucaaggucaucgagggcugguccaaccccaaguccaagcuccagaucaaccgccaggucaucgucgaccgcggcaaccgcuccggcuacuccggcaucuucuccgucgagggcaaguccugcaucaaccgcugcuucuacgucgagcucauccgcggccgcaaggaggagaccgagguccucuggaccuccaacuccaucgucgucuucugcggcaccuccggcaccuacggcaccggcuccuggcccgacggcgccgacaucaaccucaugcucaucuga

SEQ ID NO: 118366 - RNA, 1410 nt, Artificial Sequence; identical to SEQ ID NO: 111920
  derived and/or modified CDS sequence (opt2) from neuraminidase__InfluenzaA__AFJ78224

SEQ ID NO: 118367 - RNA, 1410 nt, Artificial Sequence; identical to SEQ ID NO: 111920
  derived and/or modified CDS sequence (opt2) from neuraminidase__InfluenzaA__AFJ78235

SEQ ID NO: 118368 - RNA, 1410 nt, Artificial Sequence
  derived and/or modified CDS sequence (opt2) from neuraminidase__InfluenzaA__AFJ78246
augaaccccaaccagaagaucaucaccaucggcuccgucucccucaccaucuccaccaucugcuucuucaugcagaucgccauccucaucaccaccgucacccuccacuucaagcaguacgaguucaacuccccccccaacaaccaggccaugcucugcgagcccaccaucaucgagcgcaacaucaccgagaucgucuaccucaccaacaccaccaucgagaaggagaucugccccaagcucgccgaguaccgcaacugguccaagccccagugcgacaucaccggcuucgcccccuucuccaaggacaacuccauccgccucuccgccggcggcgacaucugggucacccgcgagcccuacgucuccugcgaccccgacaagugcuaccaguucgcccucggccagggcaccacccucaacaacguccacuccaacgacaccguccgcgaccgcacccccuaccgcacccuccucaugaacgagcucggcguccccuuccaccucggcaccaagcaggucugcaucgccugguccuccuccuccugccacgacggcaaggccuggcuccacgucugcaucaccggcgacgacaagaacgccaccgccuccuucaucuacaacggccgccucgucgacuccaucgucuccugguccaaggagauccuccgcacccaggaguccgagugcgucugcaucaacggcaccugcaccgucgucaugaccgacggcuccgccuccggcaaggccgacaccaagauccucuucaucgaggagggcaagaucguccacaccuccacccucuccggcuccgcccagcacgucgaggagugcuccugcuacccccgcuaccccggcguccgcugcgucugccgcgacaacuggaagggcuccaaccgccccaucgucgacaucaacaucaaggaccacuccaucgucuccuccuacgucugcuccggccucgucggcgacaccccccgcaagaacgacuccuccuccuccucccacugccucgaccccaacaacgaggagggcggccacggcgucaagggcugggccuucgacgacggcaacgacgucuggaugggccgcaccaucuccgagaagucccgccucggcuacgagaccuucaaggucaucgagggcugguccaaccccaaguccaagcuccagaucaaccgccaggucaucgucgaccgcggcaaccgcuccggcuacuccggcaucuucuccgucgagggcaaguccugcaucaaccgcugcuucuacgucgagcucauccgcggccgcaaggaggagaccgagguccucuggaccuccaacuccaucgucgucuucugcggcaccuccggcaccuacggcaccggcuccuggcccgacggcgccgacaucaaccucaugcccaucuga

SEQ ID NO: 118369 - RNA, 1410 nt, Artificial Sequence
  derived and/or modified CDS sequence (opt2) from neuraminidase__InfluenzaA__AFJ78268
augaaccccaaccagaagaucaucaccaucggcuccgucucccucaccaucuccaccaucugcuucuucaugcagaccgccauccucaucaccaccgucacccuccacuucaagcaguacgaguucaacuccccccccaacaaccaggucaugcucugcgagcccaccaucaucgagcgcaacaucaccgagaucgucuaccucaccaacaccaccaucgagaaggagaucugccccaagcucgccgaguaccgcaacugguccaagccccagugcgacaucaccggcuucgcccccuucuccaaggacaacuccauccgccucuccgccggcggcgacaucugggucacccgcgagcccuacgucuccugcgaccccgacaagugcuaccaguucgcccucggccagggcaccacccucaacaacguccacuccaacaacaccguccgcgaccgcacccccuaccgcacccuccucaugaacgagcucggcguccccuuccaccucggcaccaagcaggucugcaucgccugguccuccuccuccugccacgacggcaaggccuggcuccacgucugcaucaccggcgacgacaagaacgccaccgccuccuucaucuacaacggccgccucgucgacuccaucgucuccugguccaaggagauccuccgcacccaggaguccgagugcgucugcaucaacggcaccugcaccgucgucaugaccgacggcuccgccuccggcaaggccgacaccaagauccucuucaucgaggagggcaagaucguccacaccuccaagcucuccggcuccgcccagcacgucgaggagugcuccugcuacccccgcuaccccggcguccgcugcgucugccgcgacaacuggaagggcuccaaccgccccaucgucgacaucaacaugaaggaccacuccaucgucuccuccuacgucugcuccggccucgucggcgacaccccccgcaagaacgacuccuccuccuccucccacugccucgaccccaacaacgaggagggcggccacggcgucaagggcugggccuucgacgacggcaacgacgucuggaugggccgcaccaucuccgagaagucccgccucggcuacgagaccuucaaggucaucgagggcugguccaaccccaaguccaagcuccagaucaaccgccaggucaucgucgaccgcggcaaccgcuccggcuacuccggcaucuucuccgucgagggcaaguccugcaucaaccgcugcuucuacgucgagcucauccgcggccgcaaggaggagaccgagguccucuggaccuccaacuccaucgucgucuucugcggcaccuccggcaccuacggcaccggcuccuggcccgacggcgccgacaucaaccucaugcccaucuga

SEQ ID NO: 118370 - RNA, 1410 nt, Artificial Sequence
  derived and/or modified CDS sequence (opt2) from neuraminidase__InfluenzaA__AFJ78279
augaaccccaaccagaagaucaucaccaucggcuccgucucccucaccaucuccaccaucugcuucuucaugcagaccgccauccucaucaccaccgucacccuccacuucaagcaguacgaguucaacuccccccccaacaaccaggucaugcucugcgagcccaccaucaucgagcgcaacaucaccgagaucgucuaccucaucaacaccaccaucgagaaggagaucugccccaagcucgccgaguaccgcaacugguccaagccccagugcgacaucaccggcuucgcccccuucuccaaggacaacuccauccgccucuccgccggcggcgacaucugggucacccgcgagcccuacgucuccugcgaccccgacaagugcuaccaguucgcccucggccagggcaccacccucaacaacguccacuccaacaacaccguccgcgaccgcacccccuaccgcacccuccucaugaacgagcucggcguccccuuccaccucggcaccaagcaggucugcaucgccugguccuccuccuccugccacgacggcaaggccuggcuccacgucugcaucaccggcgacgacaagaacgccaccgccuccuucaucuacaacggccgccucgucgacuccaucgucuccugguccaaggagauccuccgcacccaggaguccgagugcgucugcaucaacggcaccugcaccgucgucaugaccgacggcuccgccuccggcaaggccgacaccaagauccucuucaucgaggagggcaagaucguccacaccuccacccucuccggcggcgcccagcacgucgaggagugcuccugcuacccccgcuaccccggcguccgcugcgucugccgcgacaacuggaagggcuccaaccgccccaucgucgacaucaacaucaaggaccacuccaucgucuccuccuacgucugcuccggccucgucggcgacaccccccgcaagaacgacuccuccuccuccucccacugccucgaccccaacaacgaggagggcggccacggcgucaagggcugggccuucgacgacggcaacgacgucuggaugggccgcaccaucuccgagaagucccgccucggcuacgagaccuucaaggucaucgagggcugguccaaccccaaguccaagcuccagaucaaccgccaggucaucgucgaccgcggcaaccgcuccggcuacuccggcaucuucuccgucgagggcaaguccugcaucaaccgcugcuucuacgucgagcucauccgcggccgcaaggaggagaccgagguccucuggaccuccaacuccaucgucgucuucugcggcaccuccggcaccuacggcaccggcuccuggcccgacggcgccgacaucaaccucaugcccaucuga

SEQ ID NO: 118371 - RNA, 1410 nt, Artificial Sequence
  derived and/or modified CDS sequence (opt2) from neuraminidase__InfluenzaA__AFJ78290
augaaccccaaccagaagaucaucaccaucggcuccgucucccucaccaucuccaccaucugcuucuucaugcagaucgccauccucaucaccaccgucacccuccacuucaagcaguacgaguucaacuccccccccaacaaccaggucaugcucugcgagcccaccaucaucgagcgcaacaucaccgagaucgucuaccucaccaacaccaccaucgagaaggagaucugccccaagcucgccgaguaccgcaacugguccaagccccagugcgacaucaccggcuucgcccccuucuccaaggacaacuccauccgccucuccgccggcggcgacaucugggucacccgcgagcccuacgucuccugcgaccccgacaagugcuaccaguucgcccucggccagggcaccacccucaacaacguccacuccaacaacaccguccgcgaccgcacccccuaccgcacccuccucaugaacgagcucggcguccccuuccaccucggcaccaagcaggucugcaucgccugguccuccuccuccugccacgacggcaaggccuggcuccacgucugcaucaccggcgacgacaagaacgccaccgccuccuucaucuacaacggccgccucgucgacuccgucgucuccugguccaaggagauccuccgcacccaggaguccgagugcgucugcaucaacggcaccugcaccgucgucaugaccgacggcuccgccuccggcaaggccgacaccaagauccucuucaucgaggagggcaagaucguccacaccuccgcccucuccggcuccgcccagcacgucgaggagugcuccugcuacccccgcuaccccggcguccgcugcgucugccgcgacaacuggaagggcuccaaccgccccaucgucgacaucaacaucaaggaccacuccaucgucuccuccuacgucugcuccggccucgucggcgacaccccccgcaagaacgacuccuccuccuccucccacugccucgaccccaacaacgaggagggcggccacggcgucaagggcugggccuucgacgacggcaacgacgucuggaugggccgcaccaucuccgagaagucccgccucggcuacgagaccuucaaggucaucgagggcugguccaaccccaaguccaagcuccagaucaaccgccaggucaucgucgaccgcggcaaccgcuccggcuacuccggcaucuucuccgucgagggcaaguccugcaucaaccgcugcuucuacgucgagcucauccgcggccgcaaggaggagaccgagguccucuggaccuccaacuccaucgucgucuucugcggcaccuccggcaccuacggcaccggcuccuggcccgacggcgccgacaucaaccucaugcccaucuga

SEQ ID NO: 118372 - RNA, 1413 nt, Artificial Sequence
  derived and/or modified CDS sequence (opt2) from neuraminidase__InfluenzaA__AFJ78312
augaaccccaaccagaagaucaucaccaucggcuccaucuccaucgccaucggcaucaucucccucaugcuccagaucggcaacaucaucuccaucugggccucccacuccauccagaccggcucccagaaccacaccggcaucugcaaccagcgcaucaucaccuacgagaacuccaccugggucaaccacaccuacgucaacaucaacaacaccaacgucgucgccggcaaggacaagaccuccgucacccucgccggcaacuccucccucugcuccaucuccggcugggccaucuacaccaaggacaacuccauccgcaucggcuccaagggcgacgucuucgucauccgcgagcccuucaucuccugcucccaccucgagugccgcaccuucuuccucacccagggcgcccuccucaacgacaagcacuccaacggcaccgucaaggaccgcucccccuaccgcgcccucauguccugcccccucggcgaggcccccucccccuacaacuccaaguucgaguccgucgccugguccgccuccgccugccacgacggcaugggcuggcucaccaucggcaucuccggccccgacaacggcgccgucgccguccucaaguacaacggcaucaucaccgagaccaucaaguccugggagaagcgcauccuccgcacccaggaguccgagugcgucugcgucaacggcuccugcuucaccaucaugaccgacggccccuccaacggcgccgccuccuacaagaucuucaagaucgagaagggcaaggucaccaaguccaucgagcucaacgcccccaacucccacuacgaggagugcuccugcuaccccgacaccggcaccgucaugugcgucugccgcgacaacuggcacggcuccaaccgccccugggucuccuucaaccagaaccucgacuaccagaucggcuacaucugcuccggcgucuucggcgacaacccccgccccaaggacggcgagggcuccugcaaccccgucaccgccgacggcgccgacggcgucaagggcuucuccuacaaguacggcaacggcgucuggaucggccgcaccaaguccaaccgccuccgcaagggcuucgagaugaucugggaccccaacggcuggaccgacaccgacuccgacuucuccgucaagcaggacgucgucgccaucaccgacugguccggcuacuccggcuccuucguccagcaccccgagcucaccggccucgacugcauccgccccugcuucugggucgagcucguccgcggccgcccccgcgagaacaccaccaucuggaccuccggcuccuccaucuccuucugcggcgucaacuccgacaccgccaacugguccuggcccgacggcgccgagcuccccuucaccaucgacaaguga

SEQ ID NO: 118373 - RNA, 1410 nt, Artificial Sequence; identical to SEQ ID NO: 118305
  derived and/or modified CDS sequence (opt2) from neuraminidase__InfluenzaA__AFJ78323

SEQ ID NO: 118374 - RNA, 1413 nt, Artificial Sequence
  derived and/or modified CDS sequence (opt2) from neuraminidase__InfluenzaA__AFJ78334
augaaccccaaccagaagaucaucaccaucggcuccaucuccaucgccaucggcaucaucucccucaugcuccagaucggcaacaucaucuccaucugggccucccacuccauccagaccggcucccagaaccacaccggcaucugcaaccagcgcaucaucaccuacgagaacuccaccugggucaaccacaccuacgucaacaucaacaacaccaacgucgucgccggcaaggacaagaccuccgucacccucgccggcaacuccucccucugcuccaucuccggcugggccaucuacaccaaggacaacuccauccgcaucggcuccaagggcgacgucuucgucauccgcgagcccuucaucuccugcucccaccucgagugccgcaccuucuuccucacccagggcgcccuccucaacgacaagcacuccaacggcaccgucaaggaccgcucccccuaccgcgcccucauguccugcccccucggcgaggcccccucccccuacaacuccaaguucgaguccgucgccugguccgccuccgccugccacgacggcaugggcuggcucaccaucggcaucuccggccccgacaacggcgccgucgccguccucaaguacaacggcaucaucaccgagaccaucaaguccuggaagaagcagauccuccgcacccaggaguccgagugcgucugcgucaacggcuccugcuucaccaucaugaccgacggccccuccaacggcgccgccuccuacaagaucuucaagaucgagaagggcaaggucaccaaguccaucgagcucaacgcccccaacuuccacuacgaggagugcuccugcuaccccgacaccggcaccgucaugugcgucugccgcgacaacuggcacggcuccaaccgccccugggucuccuucaaccagaaccucgacuaccagaucggcuacaucugcuccggcgucuucggcgacaacccccgccccaaggacggcgagggcuccugcaaccccgucaccgucgacggcgccgacggcgucaagggcuucuccuacaaguacggcaacggcgucuggaucggccgcaccaaguccaaccgccuccgcaagggcuucgagaugaucugggaccccaacggcuggaccgacaccgacuccgacuucuccgucaagcaggacgucgucgccaucaccgacugguccggcuacuccggcuccuucguccagcaccccgagcucaccggccucgacugcauccgccccugcuucugggucgagcucguccgcggccucccccgcgagaacaccaccaucuggaccuccggcuccuccaucuccuucugcggcgucaacuccgacaccgccaacugguccuggcccgacggcgccgagcuccccuucaccaucgacaaguga

SEQ ID NO: 118375 - RNA, 1413 nt, Artificial Sequence; identical to SEQ ID NO: 118374
  derived and/or modified CDS sequence (opt2) from neuraminidase__InfluenzaA__AFJ78345

SEQ ID NO: 118376 - RNA, 1413 nt, Artificial Sequence
  derived and/or modified CDS sequence (opt2) from neuraminidase__InfluenzaA__AFJ78356
augaaccccaaccagaagaucaucaccaucggcuccaucuccaucgccaucggcaucaucucccucaugcuccagaucggcaacaucaucuccaucugggccucccacuccauccagaccggcucccagaaccacaccggcaucugcaaccagcgcaucaucaccuacgagaacuccaccugggucaaccacaccuacgucaacaucaacaacaccaacgucgucgucggcaaggacaagaccuccgucacccucgccggcaacuccucccucugcuccaucuccggcugggccaucuacaccaaggacaacuccauccgcaucggcuccaagggcgacgucuucgucauccgcgagcccuucaucuccugcucccaccucgagugccgcaccuucuuccucacccagggcgcccuccucaacgacaagcacuccaacggcaccgucaaggaccgcucccccuaccgcgcccucauguccugcccccucggcgaggcccccucccccuacaacuccaaguucgaguccgucgccugguccgccuccgccugccacgacggcaugggcuggcucaccaucggcaucuccggccccgacaacggcgccgucgccguccucaaguacaacggcaucaucaccgagaccaucaaguccuggaagaagcagauccuccgcacccaggaguccgagugcgucugcgucaacggcuccugcuucaccaucaugaccgacggccccuccaacggcgccgccuccuacaagaucuucaagaucgagaagggcaaggucaccaaguccaucgagcucaacgcccccaacuuccacuacgaggagugcuccugcuaccccgacaccggcaccgucaugugcaucugccgcgacaacuggcacggcuccaaccgccccugggucuccuucaaccagaaccucgacuaccagaucggcuacaucugcuccggcgucuucggcgacaacccccgccccaaggacggcgagggcuccugcaaccccgucaccgucgacggcgccgacggcgucaagggcuucuccuacaaguacggcaacggcgucuggaucggccgcaccaaguccaaccgccuccgcaagggcuucgagaugaucugggaccccaacggcuggaccgacaccgacuccgacuucuccgucaagcaggacgucgucgccaucaccgacugguccggcuacuccggcuccuucguccagcaccccgagcucaccggccucgacugcauccgccccugcuucugggucgagcucguccgcggccucccccgcgagaacaccaccaucuggaccuccggcuccuccaucuccuucugcggcgucaacuccgacaccgccaacugguccuggcccgacggcgccgagcuccccuucaccaucgacaaguga

SEQ ID NO: 118377 - RNA, 1413 nt, Artificial Sequence
  derived and/or modified CDS sequence (opt2) from neuraminidase__InfluenzaA__AFJ78367
augaaccccaaccagaagaucaucaccaucggcuccaucuccaucgccaucggcaucaucucccucaugcuccagaucggcaacaucaucuccaucugggccucccacuccauccagaccggcucccagaaccacaccggcaucugcaaccagcgcaucaucaccuacgagaacuccaccugggucaaccacaccuacgucaacaucaacaacaccaacgucgucgccggcaaggacaagaccuccgucacccucgccggcaacuccucccucugcuccaucuccggcugggccaucuacaccaaggacaacuccauccgcaucggcuccaagggcgacgucuucgucauccgcgagcccuucaucuccugcucccaccucgagugccgcaccuucuuccucacccagggcgcccuccucaacgacaagcacuccaacggcaccgucaaggaccgcucccccuaccgcgcccucauguccugcccccucggcgaggcccccucccccuacaacuccaaguucgaguccgucgccugguccgccuccgccugccacgacggcaugggcuggcucaccaucggcaucuccggccccgacaacggcgccgucgccguccucaaguacaacggcaucaucaccgagaccaucaaguccuggaagaagcgcauccuccgcacccaggaguccgagugcgucugcgucaacggcuccugcuucaccaucaugaccgacggccccuccaacggcgccgccuccuacaagaucuucaagaucgagaagggcaaggucaccaaguccaucgagcucaacgcccccaacucccacuacgaggagugcuccugcuaccccgacaccggcaccgucaugugcgucugccgcgacaacuggcacggcuccaaccgccccugggucuccuucaaccagaaccucgacuaccagaucggcuacaucugcuccggcgucuucggcgacaacccccgccccaaggacggcgagggcuccugcaaccccgucaccgccgacggcgccgacggcgucaagggcuucuccuacaaguacggcaacggcgucuggaucggccgcaccaaguccaaccgccuccgcaagggcuucgagaugaucugggaccccaacggcuggaccgacaccgacuccgacuucuccgucaagcaggacgucgucgccaucaccgacugguccggcuacuccggcuccuucguccagcaccccgagcucaccggccucgacugcauccgccccugcuucugggucgagcucguccgcggccgcccccgcgagaacaccaccaucuggaccuccggcuccuccaucuccuucugcggcgucaacggcgacaccgccaacugguccuggcccgacggcgccgagcuccccuucaccaucgacaaguga

SEQ ID NO: 118378 - RNA, 1413 nt, Artificial Sequence
  derived and/or modified CDS sequence (opt2) from neuraminidase__InfluenzaA__AFJ78378
augaaccccaaccagaaggucaucaccaucggcuccaucuccaucgccaucggcaucaucucccucaugcuccagaucggcaacaucaucuccaucugggccucccacuccauccagaccggcucccagaaccacaccggcaucugcaaccagcgcaucaucaccuacgagaacuccaccugggucaaccacaccuacgucaacaucaacaacaccaacgucgucgccggcaaggacaagaccuccgucacccucgccggcaacuccucccucugcuccaucuccggcugggccaucuacaccaaggacaacuccauccgcaucggcuccaagggcgacgucuucgucauccgcgagcccuucaucuccugcucccacauggagugccgcaccuucuuccucacccagggcgcccuccucaacgacaagcacuccaacggcaccgucaaggaccgcucccccuaccgcgcccucauguccugcccccucggcgaggcccccucccccuacaacuccaaguucgaguccgucgccugguccgccuccgccugccacgacggcaugggcuggcucaccaucggcaucuccggccccgacaacggcgccgucgccguccucaaguacaacggcaucaucaccgagaccaucaaguccuggaagaagcgcauccuccgcacccaggaguccgagugcgucugcgucaacggcuccugcuucaccaucaugaccgacggccccuccaacggcgccgccuccuacaagaucuucaagaucgagaagggcaaggucaccaaguccaucgagcucaacgcccccaacucccacuacgaggagugcuccugcuaccccgacaccggcaccgucaugugcgucugccgcgacaacuggcacggcuccaaccgccccugggucuccuucaaccagaaccucgacuaccagaucggcuacaucugcuccggcgucuucggcgacaacccccgcccccgcgacggcgagggcuccugcaaccccgucaccgucgacggcgccgacggcgucaagggcuucuccuacaaguacggcaacggcgucuggaucggccgcaccaaguccaaccgccuccgcaagggcuucgagaugaucugggaccccaacggcuggaccgacaccgacuccgacuucgccgucaagcaggacgucgucgccaucaccgacugguccggcuacuccggcuccuucguccagcaccccgagcucaccggccucgacugcauccgccccugcuucugggucgagcucguccgcggccucccccgcgagaacaccaccaucuggaccuccggcuccuccaucuccuucugcggcgucaacuccgacaccgccaacugguccuggcccgacggcgccgagcuccccuucaccaucgacaaguga

SEQ ID NO: 118379 - RNA, 1413 nt, Artificial Sequence; identical to SEQ ID NO: 110422
  derived and/or modified CDS sequence (opt2) from neuraminidase__InfluenzaA__AFJ78389

SEQ ID NO: 118380 - RNA, 1413 nt, Artificial Sequence; identical to SEQ ID NO: 110422
  derived and/or modified CDS sequence (opt2) from neuraminidase__InfluenzaA__AFJ78400

SEQ ID NO: 118381 - RNA, 1413 nt, Artificial Sequence; identical to SEQ ID NO: 110422
  derived and/or modified CDS sequence (opt2) from neuraminidase__InfluenzaA__AFJ78411

SEQ ID NO: 118382 - RNA, 1413 nt, Artificial Sequence
  derived and/or modified CDS sequence (opt2) from neuraminidase__InfluenzaA__AFJ78422
augaaccccaaccagaagaucaucaccaucggcuccaucuccaucgccaucggcaucaucucccucaugcuccagaucggcaacaucaucuccaucugggccucccacuccauccagaccggcucccagaaccacaccggcaucugcaaccagcgcaucaucaccuacgagaacuccaccugggucaaccacaccuacgucaacaucaacaacaccaacgucgucgccggcaaggacaagaccuccgucacccucgccggcaacuccucccucugcuccaucuccggcugggccaucuacaccaaggacaacuccauccgcaucggcuccaagggcgacgucuucgucauccgcgagcccuucaucuccugcucccaccucgagugccgcaccuucuuccucacccagggcgcccuccucaacgacaagcacuccaacggcaccgucaaggaccgcucccccuaccgcgcccucauguccugcccccucggcgaggcccccucccccuacaacuccaaguucgaguccgucgccugguccgccuccgccugccacgacggcaccggcuggcucaccaucggcaucuccggccccgacaacggcgccgucgccguccucaaguacaacggcaucaucaccgagaccaucaaguccuggaagaagcgcauccuccgcacccaggaguccgagugcgucugcaugaacggcuccugcuucaccaucaugaccgacggccccuccaacggcgccgccuccuacaagaucuucaagaucgagaagggcaaggucaccaaguccaucgagcucaacgcccccuccuuccacuacgaggagugcuccugcuaccccgacaccggcaccgucaugugcgucugccgcgacaacuggcacggcuccaaccgccccugggucuccuucaaccagaaccucgacuaccagaucggcuacaucugcuccggcgucuucggcgacaacccccgcccccaggacggcgagggcuccugcaaccccgucaccgucgacggcgccgacggcgucaagggcuucuccuacaaguacggcaacggcgucuggaucggccgcaccaaguccaaccgccuccgcaagggcuucgagaugaucugggaccccaacggcuggaccaacaccgacuccgacuucuccgucaagcaggacgucgucgccaucaccgacugguccggcuacuccggcuccuucguccagcaccccgagcucaccggccucgacugcauccgccccugcuucugggucgagcucguccgcggccucccccgcgagaacaccaccaucuggaccuccggcuccuccaucuccuucugcggcgucaacuccgacaccgccaacugguccuggcccgacggcgccgagcuccccuucaccaucgacaaguga

SEQ ID NO: 118383 - RNA, 1413 nt, Artificial Sequence; identical to SEQ ID NO: 112529
  derived and/or modified CDS sequence (opt2) from neuraminidase__InfluenzaA__AFJ78433

SEQ ID NO: 118384 - RNA, 1413 nt, Artificial Sequence; identical to SEQ ID NO: 112529
  derived and/or modified CDS sequence (opt2) from neuraminidase__InfluenzaA__AFJ78444

SEQ ID NO: 118385 - RNA, 1413 nt, Artificial Sequence
  derived and/or modified CDS sequence (opt2) from neuraminidase__InfluenzaA__AFJ78466
augaaccccaaccagaagaucaucaccaucggcuccaucuccaucgccaucggcaucaucucccucaugcuccagaucggcaacaucaucuccaucugggccucccacuccauccagaccggcucccagaaccacaccggcaucugcaaccagcgcaucaucaccuacgagaacuccaccugggucaaccacaccuacgucaacaucaacaacaccaacgucgucgccggcaaggacaagaccuccgucacccucgccggcaacuccucccucugcuccaucuccggcugggccaucuacaccaaggacaacuccauccgcaucggcuccaagggcgacgucuucgucauccgcgagcccuucaucuccugcucccaccucgagugccgcaccuucuuccucacccagggcgcccuccucaacgacaagcacuccaacggcaccgucaaggaccgcucccccuaccgcgcccucauguccugcccccucggcgaggcccccucccccuacaacuccaaguucgaguccgucgccugguccgccuccgccugccacgacggcaucggcuggcucaccaucggcaucuccggccccgacaacggcgccgucgccguccucaaguacaacggcaucaucaccggcaccaucaaguccuggaagaagcagauccuccgcacccaggaguccgagugcgucugcaucaacggcuccugcuucaccaucaugaccgacggccccuccaacggcgccgccuccuacaagaucuucaagaucgagaagggcaaggucaccaaguccaucgagcucaacgcccccaacuuccacuacgaggagugcuccugcuaccccgacaccggcaccgucaugugcgucugccgcgacaacuggcacggcuccaaccgccccugggucuccuucaaccagaaccucgacuaccagaucggcuacaucugcuccggcgucuucggcgacaacccccgccccaaggacggcgagggccgcugcaaccccgucaccgucgacggcgccgacggcgucaagggcuucuccuacaaguacggcaacggcgucuggaucggccgcaccaaguccaaccgccuccgcaagggcuucgagaugaucugggaccccaacggcuggaccaacaccgacuccgacuucuccgucaagcaggacgucgucgccaucaccgacugguccggcuacuccggcuccuucguccagcaccccgagcucaccggccucgacugcauccgccccugcuucugggucgagcucguccgcggccucccccgcgagaacaccaccaucuggaccuccggcuccuccaucuccuucugcggcgucaacuccgacaccgccaacugguccuggcccgacggcgccgagcuccccuucaccaucgacaaguga

SEQ ID NO: 118386 - RNA, 1413 nt, Artificial Sequence
  derived and/or modified CDS sequence (opt2) from neuraminidase__InfluenzaA__AFJ78477
augaaccccaaccagaagaucaucaccaucggcuccaucuccaucgccaucggcaucaucggccucaugcuccagaucggcaacaucaucuccaucugggccucccacuccauccagaccggcucccagaaccacaccggcaucugcucccagcgcaucaucaccuacgagaacuccaccugggucaacaacaccuacgucaacaucaacaacaccaacgucgucgccgagaaggacaagaccuccgucacccucgccggcaacuccucccucugcuccaucuccggcugggccaucuacaccaaggacaacuccauccgcaucggcuccaagggcgacgucuucgucauccgcgagcccuucaucuccugcucccaccucgagugccgcaccuucuuccucacccagggcgcccuccucaacgacaagcacuccaacggcaccgucaaggaccgcucccccuaccgcgcccucauguccugcccccucggcgaggcccccucccccuacaacucccgcuucgaguccgucgccugguccgccuccgccugccacgacggcaugggcuggcucaccaucggcaucuccggccccgacaacggcgccgucgccguccucaaguacaacggcaucaucaccgagaccaucaaguccuggaagaagcgcauccuccgcacccaggaguccgagugcgucugcaugaacggcuccugcuucaccaucaugaccgacggccccuccaacggcgccgccuccuacaagaucuucaagaucgagaagggcaaggucaccaaguccaucgagcucaacgcccccaacuuccacuacgaggagugcuccugcuaccccgacaccggcaccgucaugugcgucugccgcgacaacuggcacggcuccaaccgccccugggucuccuucaaccagaaccucgacuaccagaucggcuacaucugcuccggcgucuucggcgacaacccccgccccaaggacggcgagggcuccugcaaccccgucaccgucgacggcgccgacggcgucaagggcuucuccuacaaguacggcaacggcgucuggaucggccgcaccaaguccaaccgccuccgcaagggcuucgagaugaucugggaccccaacggcuggaccaacaccgacuccgacuucuccgucaagcaggacgucgucgccaucaccgacugguccggcuacuccggcuccuucguccagcaccccgagcucaccggccucgacugcauccgccccugcuucugggucgagcucguccgcggccucccccgcgagaacaccaccaucuggaccuccggcuccuccaucuccuucugcggcgucaacuccggcaccgccaacugguccuggcccgacggcgccgagcuccccuucaccaucgacaaguga

SEQ ID NO: 118387 - RNA, 1413 nt, Artificial Sequence
  derived and/or modified CDS sequence (opt2) from neuraminidase__InfluenzaA__AFJ78488
augaaccccaaccagaagaucaucaccaucggcuccaucuccaucgccaucggcaucaucucccucauccuccagaucggcaacaucaucuccaucugggccucccacuccauccagaccggcucccagaaccacaccggcaucugcaaccagcgcaucaucaccuacgagaacuccaccugggucaacaacaccuacgucaacaucaacaacaccaacgucgucgccgagaaggacaagaccuccgucacccucgccggcaacuccucccucugcuccaucuccggcugggccaucuacaccaaggacaacuccauccgcaucggcuccaagggcgacgucuucgucauccgcgagcccuucaucuccugcucccaccucgagugccgcaccuucuuccucacccagggcgcccuccucaacgacaagcacuccaacggcaccgucaaggaccgcucccccuaccgcgcccucauguccugcccccucggcgaggcccccucccccuacaacucccgcuucgaguccgucgccugguccgccuccgccugccacgacggcaugggcuggcucaccaucggcaucuccggccccgacaacggcgccgucgccguccucaaguacaacggcaucaucaccgagaccaucaaguccuggaagaagcgcauccuccgcacccaggaguccgagugcgucugcaugaacggcuccugcuucaccaucaugaccgacggccccuccaacggcgccgccuccuacaagaucuucaagaucgagaagggcaaggucaccaagaccaucgagcucaacgcccccaacuuccacuacgaggagugcuccugcuaccccgacaccggcaccgucaugugcgucugccgcgacaacuggcacggcuccaaccgccccugggucuccuucaaccagaaccucgacuaccagaucggcuacaucugcuccggcgucuucggcgacaacccccgccccaaggacggcgagggcuccugcaaccccgucaccgucgacggcgccgacggcgucaagggcuucuccuacaaguacggcaacggcgucuggaucggccgcaccaaguccaaccgccuccgcaagggcuucgagaugaucugggaccccaacggcuggaccaacaccgacuccgacuucuccaugaagcaggacgucgucgccaucaccgacugguccggcuacuccggcuccuucguccagcaccccgagcucaccggccucgacugcauccgccccugcuucugggucgagcucguccgcggccucccccgcgagaacaccaccaucuggaccuccggcuccuccaucuccuucugcggcgucaacuccggcaccgccaacugguccuggcccgacggcgccgagcuccccuucaccaucgacaaguga

SEQ ID NO: 118388 - RNA, 1413 nt, Artificial Sequence
  derived and/or modified CDS sequence (opt2) from neuraminidase__InfluenzaA__AFJ78510
augaaccccaaccagaagaucaucaccaucggcuccaucuccaucgccaucggcaucaucucccucaugcuccagaucggcaacaucaucuccaucugggccucccacuccauccagaccggcucccagaaccacaccggcaucugcaaccagcgcaucaucaccuacgagaacuccaccugggucaaccacaccuacgucaacaucaacaacaccaacgucgucgccggcaaggacaagaccuccgucacccucgccggcaacuccucccucugcuccaucuccggcugggccaucuacaccaaggacaacuccauccgcaucggcuccaagggcgacgucuucgucauccgcgagcccuucaucuccugcucccaccucgagugccgcaccuucuuccucacccagggcgcccuccucaacgacaagcacuccaacggcaccgucaaggaccgcucccccuaccgcgcccucauguccugcccccucggcgaggcccccucccccuacaacuccaaguucgaguccgucgccugguccgccuccgccugccacgacggcaugggcuggcucaccaucggcaucuccggccccgacaacggcgccgucgccguccucaaguacaacggcaucaucaccggcaccaucaaguccuggaagaagcagauccuccgcacccaggaguccgagugcgucugcaugaacggcuccugcuucaccaucaugaccgacggccccuccaacggcgccgccuccuacaagaucuucaagaucgagaagggcaaggucaccaaguccaucgagcucaacgcccccaacuuccacuacgaggagugcuccugcuaccccgacaccggcaucgucaugugcgucugccgcgacaacuggcacggcuccaaccgccccugggucuccuucaaccagaaccucgacuaccagaucggcuacaucugcuccggcgucuucggcgacaacccccgccccaaggacggcgagggcuccugcaaccccgucaccgucgacggcgccgacggcgucaagggcuucuccuacaaguacgacaacggcgucuggaucggccgcaccaaguccaaccgccuccgcaagggcuucgagaugaucugggaccccaacggcuggaccaacaccgacuccgacuucuccgucaagcaggacgucgucgccaucaccgacugguccggcuacuccggcuccuucguccagcaccccgagcucaccggccucgacugcauccgccccugcuucugggucgagcucguccgcggccucccccgcgagaacaccaccaucuggaccuccggcuccuccaucuccuucugcggcgucaacuccgacaccgccaacugguccuggcccgacggcgccgagcuccccuucaccaucgacaaguga

SEQ ID NO: 118389 - RNA, 1413 nt, Artificial Sequence
  derived and/or modified CDS sequence (opt2) from neuraminidase__InfluenzaA__AFJ78521
augaaccccaaccagaagaucaucaccaucggcuccaucuccaucgccaucggcaucaucucccucauccuccagaucggcaacaucaucuccaucugggccucccacuccauccagaccggcucccagaaccacaccggcaucugcaaccagcgcaucaucaccuacgagaacuccaccugggucaacaacaccuacgucaacaucaacaacaccaacgucgucgccgagaaggacaagaccuccgucacccucgccggcaacuccucccucugcuccaucuccggcugggccaucuacaccaaggacaacuccauccgcaucggcuccaagggcgacgucuucgucauccgcgagcccuucaucuccugcucccaccucgagugccgcaccuucuuccucacccagggcgcccuccucaacgacaagcacuccaacggcaccgucaaggaccgcucccccuaccgcgcccucauguccugcccccucggcgaggcccccucccccuacaacucccgcuucgaguccgucgccugguccgccuccgccugccacgacggcaugggcuggcucaccaucggcaucuccggccccgacaacggcgccgucgccguccucaaguacaacggcaucaucaccgagaccaucaaguccuggaagaagcgcauccuccgcacccaggaguccgagugcgucugcaugaacggcuccugcuucaccaucaugaccgacggccccuccaacggcgccgccuccuacaagaucuucaagaucgagaagggcaaggucaccaagaccaucgagcucaacgcccccaacuuccacuacgaggagugcuccugcuaccccgacaccggcaccgucaugugcgucugccgcgacaacuggcacggcuccaaccgccccugggucuccuucaaccagaaccucgacuaccagaucggcuacaucugcuccggcgucuucggcgacaacccccgccccaaggacggcgagggcuccugcaaccccgucaccgucgacggcgccgacggcgucaagggcuucuccuacaaguacggcaacggcgucuggaucggccgcaccaaguccaaccgccuccgcaagggcuucgagaugaucugggaccccaacggcuggaccaacaccgacuccgacuucuccgucaagcaggacgucgucgccaucaccgacugguccggcuacuccggcuccuucguccagcaccccgagcucaccggccucgacugcauccgccccugcuucugggucgagcucguccgcggccucccccgcgagaacaccaccaucuggaccuccggcuccuccaucuccuucugcggcgucaacuccggcaccgccaacugguccuggcccgacggcgccgagcuccccuucaccaucgacaaguga

SEQ ID NO: 118390 - RNA, 1413 nt, Artificial Sequence; identical to SEQ ID NO: 118283
  derived and/or modified CDS sequence (opt2) from neuraminidase__InfluenzaA__AFJ78532

SEQ ID NO: 118391 - RNA, 1413 nt, Artificial Sequence; identical to SEQ ID NO: 118283
  derived and/or modified CDS sequence (opt2) from neuraminidase__InfluenzaA__AFJ78543

SEQ ID NO: 118392 - RNA, 1413 nt, Artificial Sequence; identical to SEQ ID NO: 118283
  derived and/or modified CDS sequence (opt2) from neuraminidase__InfluenzaA__AFJ78554

SEQ ID NO: 118393 - RNA, 1413 nt, Artificial Sequence; identical to SEQ ID NO: 118271
  derived and/or modified CDS sequence (opt2) from neuraminidase__InfluenzaA__AFJ78565

SEQ ID NO: 118394 - RNA, 1413 nt, Artificial Sequence
  derived and/or modified CDS sequence (opt2) from neuraminidase__InfluenzaA__AFJ78576
augaaccccaaccagaagaucaucaccaucggcuccaucuccaucgccaucggcaucaucucccucaugcuccagaucggcaacaucaucuccaucugggccucccacuccauccagaccggcucccagaaccacaccggcaucugcaaccagcgcaucaucaccuacgagaacuccaccugggucaaccacaccuacgucaacaucaacaacaccaacgucgucgccggcaaggacaagacccccgucacccucgccggcaacuccucccucugcuccaucuccggcugggccauccacaccaaggacaacuccauccgcaucggcuccaagggcgacgucuucgucauccgcgagcccuucaucuccugcucccaccucgagugcaagaccuucuuccucacccagggcgcccuccucaacgacaagcacuccaacggcaccgucaaggaccgcucccccuaccgcgcccucauguccugcccccucggcgaggcccccucccccuacaacuccaaguucgaguccgucgccugguccgccuccgccugccacgacggcaucggcuggcucaccaucggcaucuccggccccgacaacggcgccgucgccguccucaaguacaacggcaucaucaccggcaccaucaaguccuggaagaagcagauccuccgcacccaggaguccgagugcgucugcaugaacggcuccugcuucaccaucaugaccgacggccccuccaacggcgccgccuccuacaagaucuucaagaucgagaagggcaaggucaccaaguccauggagcucaacgcccccaacuuccacuacgaggagugcuccugcuaccccgacaccggcaccgucaugugcgucugccgcgacaacuggcacggcuccaaccgccccugggucuccuucaaccagaaccucgacuaccagaucggcuacaucugcaccggcgucuucggcgacaacccccgccccgaggacggcgagggcuccugcaaccccgucaccgucgacggcgccaacggcgucaagggcuucuccuacaaguacggcaacggcgucuggaucggccgcaccaaguccaaccgcauccgcaagggcuucgagaugaucugggaccccaacggcuggaccaacaccgacuccgacuucuccgucaagcaggacaucgucgccaucaccgacugguccggcuacuccggcuccuucguccagcaccccgagcucaccggccucgacugcauccgccccugcuucugggucgagcucguccgcggccucccccgcgagaacaccaccaucuggaccuccggcuccuccaucuccuucugcggcgucaacuccgacaucgccaacugguccuggcccgacggcgccgagcuccccuucaccaucgacaaguga

SEQ ID NO: 118395 - RNA, 1413 nt, Artificial Sequence
  derived and/or modified CDS sequence (opt2) from neuraminidase__InfluenzaA__AFJ78598
augaaccccaaccagaagaucaucaccaucggcuccaucuccaucgccaucggcaucaucucccucaugcuccagaucggcaacaucaucuccaucugggccucccacuccauccagaccggcauccagaacaacaccggcaucugcaaccagcgcaucaucaccuacgagaacuccaccugggucaaccacaccuacgucaacaucaacaacaccaacgucgucgccggcgaggacaagaccuccgucacccucgccggcaacuccucccucugcuccaucuccggcugggccaucuacaccaaggacaacuccauccgcaucggcuccaagggcgacgucuucgucauccgcgagcccuucaucuccugcucccaccucgagugccgcaccuucuuccucacccagggcgcccuccucaacgacaagcacuccaacggcaccgucaaggaccgcucccccuaccgcgcccucauguccugcccccucggcgaggcccccucccccuacaacuccaaguucgaguccgucgccugguccgccuccgccugccacgacggcaugggcuggcucaccaucggcaucuccggccccgacaacggcgccgucgccguccucaaguacaacggcaucaucaccggcaccaucaaguccuggaagaagcagauccuccgcacccaggaguccgagugcgucugcaugaacggcuccugcuucaccaucaugaccgacggccccuccaacaaggccgccuccuacaagaucuucaagaucgagaagggcaaggucaccaaguccaucgagcucaacgcccccaacuuccacuacgaggagugcuccugcuaccccgacaccggcaucgucaugugcgucugccgcgacaacuggcacggcuccaaccgccccugggucuccuucaaccagaaccucgacuaccagaucggcuacaucugcuccggcgucuucggcgacaacccccgccccgaggacggcgagggcuccugcaaccccgucaccgucgacggcgccaacggcgucaagggcuucuccuacaaguacgacaacggcgucuggaucggccgcaccaaguccaaccgccuccgcaagggcuucgagaugaucugggaccccaacggcuggaccaacaccgacuccgacuucuccgucaagcaggacgucgucgccaucaccgacugguccggcuacuccggcuccuucguccagcaccccgagcucaccggccucgacugcauccgccccugcuucugggucgagcucguccgcggccucccccgcgagaacaccaccaucuggaccuccggcuccuccaucuccuucugcggcgucaacuccgacaccgccaacugguccuggcccgacggcgccgagcuccccuucaccaucgacaaguga

SEQ ID NO: 118396 - RNA, 1413 nt, Artificial Sequence
  derived and/or modified CDS sequence (opt2) from neuraminidase__InfluenzaA__AFJ78609
augaaccccaaccagaagaucaucaccaucggcuccaucuccaucgccaucggcaucaucucccucaugcuccagaucggcaacaucaucuccaucugggccucccacuccauccagaccggcucccagaacaacaccggcaucugcaaccagcgcaucaucaccuacgagaacuccaccugggucaaccacaccuacgucaacaucaacaacaccaacgucgucgccggcgaggacaagaccuccgucauccucgccggcaacuccucccucugcuccaucuccggcugggccaucuacaccaaggacaacuccauccgcaucggcuccaagggcgacgucuucgucauccgcgagcccuucaucuccugcucccaccucgagugccgcaccuucuuccucacccagggcgcccuccucaacgacaagcacuccaacggcaccgucaaggaccgcucccccuaccgcgcccucauguccugcccccucggcgaggcccccucccccuacaacuccaaguucgaguccgucgccugguccgccuccgccugccacgacggcaugggcuggcucaccaucggcaucuccggccccgacaacggcgccgucgccguccucaaguacaacggcaucaucaccggcaccaucaaguccuggaagaagcagauccuccgcacccaggaguccgagugcgucugcaugaacggcuccugcuucaccaucaugaccgacggccccuccaacaaggccgccuccuacaagaucuucaagaucgagaagggcaaggucaccaaguccaucgagcucaacgcccccaacuucuacuacgaggagugcuccugcuaccccgacaccggcaucgucaugugcgucugccgcgacaacuggcacggcuccaaccgccccugggucuccuucaaccagaaccucgacuaccagaucggcuacaucugcuccggcgucuucggcgacaacccccgccccgaggacggcgagggcuccugcaaccccgucaccgucgacggcgccaacggcgucaagggcuucuccuacaaguacggcaacggcgucuggaucggccgcaccaaguccaaccgccuccgcaagggcuucgagaugaucugggaccccaacggcuggaccaacaccgacuccgacuucuccgucaagcaggacgucgucgccaucaccgacugguccggcuacuccggcuccuucguccagcaccccgagcucaccggccucgacugcauccgccccugcuucugggucgagcucguccgcggccucccccgcgagaacaccaccaucuggaccuccggcuccuccaucuccuucugcggcgucaacuccgacaccgccaacugguccuggcccgacggcgccgagcuccccuucaccaucgacaaguga

SEQ ID NO: 118397 - RNA, 1413 nt, Artificial Sequence; identical to SEQ ID NO: 113497
  derived and/or modified CDS sequence (opt2) from neuraminidase__InfluenzaA__AFJ78620

SEQ ID NO: 118398 - RNA, 1413 nt, Artificial Sequence; identical to SEQ ID NO: 118271
  derived and/or modified CDS sequence (opt2) from neuraminidase__InfluenzaA__AFJ78631

SEQ ID NO: 118399 - RNA, 1413 nt, Artificial Sequence; identical to SEQ ID NO: 113497
  derived and/or modified CDS sequence (opt2) from neuraminidase__InfluenzaA__AFJ78642

SEQ ID NO: 118400 - RNA, 1413 nt, Artificial Sequence; identical to SEQ ID NO: 113497
  derived and/or modified CDS sequence (opt2) from neuraminidase__InfluenzaA__AFJ78653

SEQ ID NO: 118401 - RNA, 1410 nt, Artificial Sequence; identical to SEQ ID NO: 112774
  derived and/or modified CDS sequence (opt2) from neuraminidase__InfluenzaA__AFJ78664

SEQ ID NO: 118402 - RNA, 1410 nt, Artificial Sequence; identical to SEQ ID NO: 112774
  derived and/or modified CDS sequence (opt2) from neuraminidase__InfluenzaA__AFJ78674

SEQ ID NO: 118403 - RNA, 1410 nt, Artificial Sequence; identical to SEQ ID NO: 112774
  derived and/or modified CDS sequence (opt2) from neuraminidase__InfluenzaA__AFJ78684

SEQ ID NO: 118404 - RNA, 1410 nt, Artificial Sequence; identical to SEQ ID NO: 112774
  derived and/or modified CDS sequence (opt2) from neuraminidase__InfluenzaA__AFJ78694

SEQ ID NO: 118405 - RNA, 1410 nt, Artificial Sequence; identical to SEQ ID NO: 112774
  derived and/or modified CDS sequence (opt2) from neuraminidase__InfluenzaA__AFJ78704

SEQ ID NO: 118406 - RNA, 1410 nt, Artificial Sequence; identical to SEQ ID NO: 112774
  derived and/or modified CDS sequence (opt2) from neuraminidase__InfluenzaA__AFJ78714

SEQ ID NO: 118407 - RNA, 1410 nt, Artificial Sequence
  derived and/or modified CDS sequence (opt2) from neuraminidase__InfluenzaA__AFJ78724
augaaccccaaccagaagaucaucaccaucggcuccgucugcaugaccaucggcauggccaaccucauccuccagaucggcaacaucaucuccaucuggaucucccacuccauccagcucggcaaccagaaccagaucgagaccugcaaccaguccgucaucaccuacgagaacaacaccugggucaaccagaccuacgucaacaucuccaacaccaacuucgccgccggccaguccgucgucuccgucaagcucgccggcaacuccucccucugccccgucuccggcugggccaucuacuccaaggacaacuccauccgcaucggcuccaagggcgacgucuucgucauccgcgagcccuucaucuccugcuccccccucgagugccgcaccuucuuccucacccagggcgcccuccucaacgacaagcacuccaacggcaccaucaaggaccgcucccccuaccgcacccucauguccugccccaucggcgagguccccucccccuacaacucccgcuucgaguccgucgccugguccgccuccgccugccacgacggcaucaacuggcucaccaucggcaucuccggccccgacaacggcgccgucgccguccucaaguacaacggcaucaucaccgacaccaucaaguccuggcgcaacaacauccuccgcacccaggaguccgagugcgccugcgucaacggcuccugcuucacccucaugaccgacggccccuccgacggccaggccuccuacaagaucuuccgcaucgagaagggcaagaucgucaaguccgucgagaugaacgcccccaacuaccacuacgaggagugcuccugcuaccccgacuccuccgagaucaccugcgucugccgcgacaacuggcacggcuccaaccgccccugggucuccuucaaccagaaccucgaguaccagaucggcuacaucugcuccggcaucuucggcgacaacccccgccccaacgacaagaccggcuccugcggccccgucuccuccaacggcgccaacggcgucaagggcuucuccuucaaguacggcaacggcgucuggaucggccgcaccaaguccaucuccucccgcaacggcuucgagaugaucugggaccccaacggcuggaccggcaccgacaacaacuucuccaucaagcaggacaucgucggcaucaacgagugguccggcuacuccggcuccuucguccagcaccccgagcucaccggccucgacugcauccgccccugcuucugggucgagcucauccgcggccgccccaaggagaacaccaucuggaccuccggcuccuccaucuccuucugcggcgucaacuccgacaccgucggcugguccuggcccgacggcgccgagcuccccuucaccaucgacaaguga

SEQ ID NO: 118408 - RNA, 1410 nt, Artificial Sequence; identical to SEQ ID NO: 112774
  derived and/or modified CDS sequence (opt2) from neuraminidase__InfluenzaA__AFJ78734

SEQ ID NO: 118409 - RNA, 1410 nt, Artificial Sequence; identical to SEQ ID NO: 112774
  derived and/or modified CDS sequence (opt2) from neuraminidase__InfluenzaA__AFJ78744

SEQ ID NO: 118410 - RNA, 1410 nt, Artificial Sequence; identical to SEQ ID NO: 112774
  derived and/or modified CDS sequence (opt2) from neuraminidase__InfluenzaA__AFJ78754

SEQ ID NO: 118411 - RNA, 1410 nt, Artificial Sequence; identical to SEQ ID NO: 112774
  derived and/or modified CDS sequence (opt2) from neuraminidase__InfluenzaA__AFJ78764

SEQ ID NO: 118412 - RNA, 1410 nt, Artificial Sequence; identical to SEQ ID NO: 112774
  derived and/or modified CDS sequence (opt2) from neuraminidase__InfluenzaA__AFJ78774

SEQ ID NO: 118413 - RNA, 1410 nt, Artificial Sequence; identical to SEQ ID NO: 112774
  derived and/or modified CDS sequence (opt2) from neuraminidase__InfluenzaA__AFJ78784

SEQ ID NO: 118414 - RNA, 1410 nt, Artificial Sequence
  derived and/or modified CDS sequence (opt2) from neuraminidase__InfluenzaA__AFJ78794
augaaccccaaccagaagaucaucaccaucggcuccgucugcaugaccaucggcauggccaaccucauccuccagaucggcaacaucaucuccaucuggaucucccacuccauccagcucggcaaccagaaccagaucgagaccugcaaccaguccgucaucaccuacgagaacaacaccugggucaaccagaccuacgucaacaucuccaacaccaacuucgccgccggccaguccgucgucuccgucaagcucgccggcaacuccucccucugccccgucuccggcugggccaucuacuccaaggacaacuccauccgcaucggcuccaagggcgacgucuucgucauccgcgagcccuucaucuccugcuccccccucgagugccgcaccuucuuccucacccagggcgcccuccucaacgacaagcacuccaacggcaccaucaaggaccgcucccccuaccgcacccucauguccugccccaucggcgagguccccucccccuacaacucccgcuucgaguccgucgccugguccgccuccgccugccacgacggcaucaacuggcucaccaucggcaucuccggccccgacaacggcgccgucgccguccucaaguacaacggcaucaucaccgacaccaucaaguccuggcgcaacaacauccuccgcacccaggaguccgagugcgccugcgucaacggcuccugcuucaccgucaugaccgacggccccuccgacggccaggccuccuacaagaucuuccgcaucgagaagggcaagaucgucaaguccgucgagaugaacgcccccaacuaccacuacgaggagugcuccugcuaccccgacuccggcgagaucaccugcgucugccgcgacaacuggcacggcuccaaccgccccugggucuccuucaaccagaaccucgaguaccagaucggcuacaucugcuccggcaucuucggcgacaacccccgccccaacgacaagaccggcuccugcggccccgucuccuccaacggcgccaacggcgucaagggcuucuccuucaaguacggcaacggcgucuggaucggccgcaccaaguccaucuccucccgcaacggcuucgagaugaucugggaccccaacggcuggaccggcaccgacaacaacuucuccaucaagcaggacaucgucggcaucaacgagugguccggcuacuccggcuccuucguccagcaccccgagcucaccggccucgacugcauccgccccugcuucugggucgagcucauccgcggccgccccaaggagaacaccaucuggaccuccggcuccuccaucuccuucugcggcgucaacuccgacaccgucggcugguccuggcccgacggcgccgagcuccccuucaccaucgacaaguga

SEQ ID NO: 118415 - RNA, 1410 nt, Artificial Sequence; identical to SEQ ID NO: 112774
  derived and/or modified CDS sequence (opt2) from neuraminidase__InfluenzaA__AFJ78804

SEQ ID NO: 118416 - RNA, 1410 nt, Artificial Sequence; identical to SEQ ID NO: 112774
  derived and/or modified CDS sequence (opt2) from neuraminidase__InfluenzaA__AFJ78814

SEQ ID NO: 118417 - RNA, 1410 nt, Artificial Sequence; identical to SEQ ID NO: 112774
  derived and/or modified CDS sequence (opt2) from neuraminidase__InfluenzaA__AFJ78824

SEQ ID NO: 118418 - RNA, 1410 nt, Artificial Sequence; identical to SEQ ID NO: 112774
  derived and/or modified CDS sequence (opt2) from neuraminidase__InfluenzaA__AFJ78834

SEQ ID NO: 118419 - RNA, 1410 nt, Artificial Sequence; identical to SEQ ID NO: 112774
  derived and/or modified CDS sequence (opt2) from neuraminidase__InfluenzaA__AFJ78844

SEQ ID NO: 118420 - RNA, 1410 nt, Artificial Sequence; identical to SEQ ID NO: 115023
  derived and/or modified CDS sequence (opt2) from neuraminidase__InfluenzaA__AFJ78854

SEQ ID NO: 118421 - RNA, 1410 nt, Artificial Sequence; identical to SEQ ID NO: 112774
  derived and/or modified CDS sequence (opt2) from neuraminidase__InfluenzaA__AFJ78864

SEQ ID NO: 118422 - RNA, 1410 nt, Artificial Sequence; identical to SEQ ID NO: 112774
  derived and/or modified CDS sequence (opt2) from neuraminidase__InfluenzaA__AFJ78874

SEQ ID NO: 118423 - RNA, 1410 nt, Artificial Sequence; identical to SEQ ID NO: 112774
  derived and/or modified CDS sequence (opt2) from neuraminidase__InfluenzaA__AFJ78884

SEQ ID NO: 118424 - RNA, 1410 nt, Artificial Sequence; identical to SEQ ID NO: 112774
  derived and/or modified CDS sequence (opt2) from neuraminidase__InfluenzaA__AFJ78894

SEQ ID NO: 118425 - RNA, 1410 nt, Artificial Sequence; identical to SEQ ID NO: 112774
  derived and/or modified CDS sequence (opt2) from neuraminidase__InfluenzaA__AFJ78904

SEQ ID NO: 118426 - RNA, 1410 nt, Artificial Sequence; identical to SEQ ID NO: 112774
  derived and/or modified CDS sequence (opt2) from neuraminidase__InfluenzaA__AFJ78914

SEQ ID NO: 118427 - RNA, 1410 nt, Artificial Sequence
  derived and/or modified CDS sequence (opt2) from neuraminidase__InfluenzaA__AFJ78924
augaaccccaaccagaagaucaucaccaucggcuccgucugcaugaccaucggcauggccaaccucauccuccagaucggcaacaucaucuccaucuggaucucccacuccauccagcucggcaaccagaaccagaucgagaccugcaaccaguccgucaucaccuacgagaacaacaccugggucaaccagaccuacgucgacaucuccaacaccaacuucgccgccggccaguccgucgucuccgucaagcucgccggcaacuccucccucugccccgucuccggcugggccaucuacuccaaggacaacuccauccgcaucggcuccaagggcgacgucuucgucauccgcgagcccuucaucuccugcuccccccucgagugccgcaccuucuuccucacccagggcgcccuccucaacgacaagcacuccaacggcaccaucaaggaccgcucccccuaccgcacccucauguccugccccaucggcgagauccccucccccuacaacucccgcuucgaguccgucgccugguccgccuccgccugccacgacggcaucaacuggcucaccaucggcaucuccggccccgacaacggcgccgucgccguccucaaguacaacggcaucaucaccgacaccaucaaguccuggcgcaacaacauccuccgcacccaggaguccgagugcgccugcgucaacggcuccugcuucaccgucaugaccgacggccccuccgacggccaggccuccuacaagaucuuccgcaucgagaagggcaagaucgucaaguccgucgagaugaacgcccccaacuaccacuacgaggagugcuccugcuaccccgacuccuccgagaucaccugcgucugccgcgacaacuggcacggcuccaaccgccccugggucuccuucaaccagaaccucgaguaccagaucggcuacaucugcuccggcaucuucggcgacaacccccgccccaacgacaagaccggcuccugcggccccgucuccuccaacggcgccaacggcgucaagggcuucuccuucaaguacggcaacggcgucuggaucggccgcaccaaguccaucuccucccgcaacggcuucgagaugaucugggaccccaacggcuggaccggcaccgacaacaacuucuccaucaagcaggacaucgucggcaucaacgagugguccggcuacuccggcuccuucguccagcaccccgagcucaccggccucgacugcauccgccccugcuucugggucgagcucauccgcggccgccccaaggagaacaccaucuggaccuccggcuccuccaucuccuucugcggcgucaacuccgacaccgucggcugguccuggcccgacggcgccgagcuccccuucaccaucgacaaguga

SEQ ID NO: 118428 - RNA, 1410 nt, Artificial Sequence
  derived and/or modified CDS sequence (opt2) from neuraminidase__InfluenzaA__AFJ97569
augaaccccaaccagaagaucaucaccaucggcuccgucugcaugaccaucggcauggccaaccucauccuccagaucggcaacaucaucuccaucuggaucucccacuccauccagcucggcaaccagaaccagaucgagaccugcaaccaguccgucaucaccuacgagaacaacaccugggucaaccagaccuacgucaacaucuccaacaccaacuucgccgccggccaguccgucgucuccgucaagcucgccggcaacuccucccucugccccgucuccggcugggccaucuacuccaaggacaacuccauccgcaucggcuccaagggcgacgucuucgucauccgcgagcccuucaucuccugcuccccccucgagugccgcaccuucuuccucacccagggcgcccuccucaacgacaagcacuccaacgagaccaucaaggaccgcucccccuaccgcacccucauguccugccccaucggcgagguccccucccccuacaacucccgcuucgaguccgucgccugguccgccuccgccugccacgacggcaucaacuggcucaccaucggcaucuccggccccgacaacggcgccgucgccguccucaaguacaacggcaucaucaccgacaccaucaaguccuggcgcaacaacauccuccgcacccaggaguccgagugcgccugcgucaacggcuccugcuucaccgucaugaccgacggccccuccgacggccaggccuccuacaagaucuuccgcaucgagaagggcaagaucgucaaguccgucgagaugaacgcccccaacuaccacuacgaggagugcuccugcuaccccgacuccuccgagaucaccugcgucugccgcgacaacuggcacggcuccaaccgccccugggucuccuucaaccagaaccucgaguaccagaucggcuacaucugcuccggcaucuucggcgacaacccccgccccaacgacaagaccggcuccugcggccccgucuccuccaacggcgccaacggcgucaagggcuucuccuucaaguacggcaacggcgucuggaucggccgcaccaaguccaucuccucccgcaacggcuucgagaugaucugggaccccaacggcuggaccggcaccgacaacaacuucuccaucaagcaggacaucgucggcaucaacgagugguccggcuacuccggcuccuucguccagcaccccgagcucaccggccucgacugcauccgccccugcuucugggucgagcucauccgcggccgccccaaggagaacaccaucuggaccuccggcuccuccaucuccuucugcggcgucaacuccgacaccgucuccugguccuggcccgacggcgccgagcuccccuucaccaucgacaaguga

SEQ ID NO: 118429 - RNA, 1410 nt, Artificial Sequence; identical to SEQ ID NO: 112764
  derived and/or modified CDS sequence (opt2) from neuraminidase__InfluenzaA__AFK14107

SEQ ID NO: 118430 - RNA, 1410 nt, Artificial Sequence; identical to SEQ ID NO: 112774
  derived and/or modified CDS sequence (opt2) from neuraminidase__InfluenzaA__AFK14117

SEQ ID NO: 118431 - RNA, 1410 nt, Artificial Sequence; identical to SEQ ID NO: 113541
  derived and/or modified CDS sequence (opt2) from neuraminidase__InfluenzaA__AFK14141

SEQ ID NO: 118432 - RNA, 1410 nt, Artificial Sequence
  derived and/or modified CDS sequence (opt2) from neuraminidase__InfluenzaA__AFK14150
augaaccccaaccagaagaucaucaccaucggcuccgucugcaugaccaucggcauggccaaccucauccuccagaucggcaacaucaucuccaucuggaucucccacuccauccgccucggcaaccagaaccagaucgagaccugcaaccaguccgucaucaccuacgagaacaacaccugggucaaccagaccuacgucaacaucuccaacaccaacuucgccgccggccaguccgucgucuccgucaagcucgccggcaacuccucccucugccccgucuccggcugggccaucuacuccaaggacaacuccauccgcaucggcuccaagggcgacgucuucgucauccgcgagcccuucaucuccugcuccccccucgagugccgcaccuucuuccucacccagggcgcccuccucaacgacaagcacuccaacggcaccaucaaggaccgcucccccuaccgcacccucauguccugccccaucggcgagguccccucccccuacaacucccgcuucgaguccgucgccugguccgccuccgccugccacgacggcaucaacuggcucaccaucggcaucuccggccccgacaacggcgccgucgccguccucaaguacaacggcaucaucaccgacaccaucaaguccuggcgcaacaacauccuccgcacccaggaguccgagugcgccugcgucaacggcuccugcuucaccgucaugaccgacggccccuccgacgagcaggccuccuacaagaucuuccgcaucgagaagggcaagaucgucaaguccgucgagaugaacgcccccaacuaccacuacgaggagugcuccugcuaccccgacuccuccgagaucaccugcgucugccgcgacaacuggcacggcuccaaccgccccugggucuccuucaaccagaaccucgaguaccagaucggcuacaucugcuccggcaucuucggcgacaacccccgccccaacgacaagaccggcuccugcggccccgucuccuccaacggcgccaacggcgucaagggcuucuccuucaaguacggcaacggcgucuggaucggccgcaccaaguccaucuccucccgcaacggcuucgagaugaucugggaccccaacggcuggaccggcaccgacaacaacuucuccaucaagcaggacaucgucggcaucaacgagugguccggcuacuccggcuccuucguccagcaccccgagcucaccggccucgacugcauccgccccugcuucugggucgagcucauccgcggccgccccaaggagaacaccaucuggaccuccggcuccuccaucuccuucugcggcgucaacuccgacaccgucggcugguccuggcccgacggcgccgagcuccccuucaccaucgacaaguga

SEQ ID NO: 118433 - RNA, 1410 nt, Artificial Sequence; identical to SEQ ID NO: 113357
  derived and/or modified CDS sequence (opt2) from neuraminidase__InfluenzaA__AFK14159

SEQ ID NO: 118434 - RNA, 1410 nt, Artificial Sequence; identical to SEQ ID NO: 112774
  derived and/or modified CDS sequence (opt2) from neuraminidase__InfluenzaA__AFK14168

SEQ ID NO: 118435 - RNA, 1410 nt, Artificial Sequence; identical to SEQ ID NO: 112774
  derived and/or modified CDS sequence (opt2) from neuraminidase__InfluenzaA__AFK14177

SEQ ID NO: 118436 - RNA, 1410 nt, Artificial Sequence
  derived and/or modified CDS sequence (opt2) from neuraminidase__InfluenzaA__AFK14186
augaaccccaaccagaagaucaucaccaucggcuccgucugcaugaccaucggcauggccaaccucauccuccagaucggcaacaucaucuccaucuggaucucccacuccauccagcucggcaaccagaaccagaucgagaccugcaaccaguccgucaucaccuacgagaacaacaccugggucaaccagaccuacgucaacaucuccaacaccaacuucgccgccggccaguccgucgucuccgucaagcucgccggcaacuccucccucugccccgucuccggcugggccaucuacuccaaggacaacuccauccgcaucggcuccaagggcgacgucuucgucauccgcgagcccuucaucuccugcuccccccucgagugccgcaccuucuuccucacccagggcgcccuccucaacgacaagcacuccaacggcaccaucaaggaccgcucccccuaccgcacccucauguccugccccaucggcgagguccccucccccuacaacucccgcuucgaguccgucgccugguccgccuccgccugccacgacggcaucaacuggcucaccaucggcaucuccggccccgacaacggcgccgucgccguccucaaguacaacggcaucaucaccgacaccaucaaguccuggcgcaacaacauccuccgcacccaggaguccgagugcgccugcgucaacggcuccugcuucaccgucaugaccgacggccccuccgacggccaggccuccuacaagaucuuccgcaucgagaagggcaagaucgucaaguccgucgagaugaacgcccccaacuaccacuucgaggagugcuccugcuaccccgacuccuccgagaucaccugcgucugccgcgacaacuggcacggcuccaaccgccccugggucuccuucaaccagaaccucgaguaccagaucggcuacaucugcuccggcaucuucggcgacaacccccgccccaacgacaagaccggcuccugcggccccgucuccuccaacggcgccaacggcgucaagggcuucuccuucaaguacggcaacggcgucuggaucggccgcaccaaguccaucuccucccgcaacggcuucgagaugaucugggaccccaacggcuggaccggcaccgacaacaacuucuccaucaagcaggacaucgucggcaucaacgagugguccggcuacuccggcuccuucguccagcaccccgagcucaccggccucgacugcauccgccccugcuucugggucgagcucauccgcggccgccccaaggagaacaccaucuggaccuccggcuccuccaucuccuucugcggcgucaacuccgacaccgucggcugguccuggcccgacggcgccgagcuccccuucaccaucgacaaguga

SEQ ID NO: 118437 - RNA, 1410 nt, Artificial Sequence; identical to SEQ ID NO: 114755
  derived and/or modified CDS sequence (opt2) from neuraminidase__InfluenzaA__AFK14195

SEQ ID NO: 118438 - RNA, 1410 nt, Artificial Sequence; identical to SEQ ID NO: 112774
  derived and/or modified CDS sequence (opt2) from neuraminidase__InfluenzaA__AFK14204

SEQ ID NO: 118439 - RNA, 1410 nt, Artificial Sequence; identical to SEQ ID NO: 114755
  derived and/or modified CDS sequence (opt2) from neuraminidase__InfluenzaA__AFK14213

SEQ ID NO: 118440 - RNA, 1410 nt, Artificial Sequence
  derived and/or modified CDS sequence (opt2) from neuraminidase__InfluenzaA__AFK14222
augaaccccaaccagaagaucaucaccaucggcuccgucugcaugaccaucggcauggccaaccucauccuccagaucggcaacaucaucuccaucuggaucucccacuccauccgccucggcaaccagaaccagaucgagaccugcaaccaguccgucaucaccuacgagaacaacaccugggucaaccagaccuacgucaacaucuccaacaccaacuucgccgccggccaguccgucgucuccgucaagcucgccggcaacuccucccucugccccgucuccggcugggccaucuacuccaaggacaacuccauccgcaucggcuccaagggcgacgucuucgucauccgcgagcccuucaucuccugcuccccccucgagugccgcaccuucuuccucacccagggcgcccuccucaacgacaagcacuccaacggcaccaucaaggaccgcucccccuaccgcacccucauguccugccccaucggcgagguccccucccccuacaacucccgcuucgaguccgucgccugguccgccuccgccugccacgacggcaucaacuggcucaccaucggcaucuccggccccgacaacggcgccgucgccguccucaaguacaacggcaucaucaccgacaccaucaaguccuggcgcaacaacauccuccgcacccaggaguccgagugcgccugcgucaacggcuccugcuucaccgucaugaccgacggccccuccgacggccaggccuccuacaagaucuuccgcaucgagaagggcaagaucgucaaguccgucgagaugaacgcccccaacuaccacuacgaggagugcuccugcuaccccgacuccuccgagaucaccugcgucugccgcgacaacuggcacggcuccaaccgccccugggucuccuucaaccagaaccucgaguaccagaucggcuacaucugcuccggcaucuucggcgacaacccccgccccaacgacaagaccggcuccugcggccccgucuccuccaacggcgccaacggcgucaagggcuucuccuucaaguacggcaacggcgucuggaucggccgcaccaaguccaucuccucccgcaacggcuucgagaugaucugggaccccaacggcuggaccggcaccgacaacaacuucuccaucaagcaggacaucgucggcaucaacgagugguccggcuacuccggcuccuucguccagcaccccgagcucaccggccucgacugcauccgccccugcuucugggucgagcucauccgcggccgccccaaggagaacaccaucuggaccuccggcuccuccaucuccuucugcggcgucaacuccgacaccgucggcugguccuggcccgacggcgccgagcuccccuucaccaucgacaaguga

SEQ ID NO: 118441 - RNA, 1410 nt, Artificial Sequence; identical to SEQ ID NO: 113357
  derived and/or modified CDS sequence (opt2) from neuraminidase__InfluenzaA__AFK14231

SEQ ID NO: 118442 - RNA, 1410 nt, Artificial Sequence; identical to SEQ ID NO: 112774
  derived and/or modified CDS sequence (opt2) from neuraminidase__InfluenzaA__AFK14240

SEQ ID NO: 118443 - RNA, 1410 nt, Artificial Sequence; identical to SEQ ID NO: 113541
  derived and/or modified CDS sequence (opt2) from neuraminidase__InfluenzaA__AFK14249

SEQ ID NO: 118444 - RNA, 1410 nt, Artificial Sequence; identical to SEQ ID NO: 112774
  derived and/or modified CDS sequence (opt2) from neuraminidase__InfluenzaA__AFK14257

SEQ ID NO: 118445 - RNA, 1410 nt, Artificial Sequence; identical to SEQ ID NO: 112774
  derived and/or modified CDS sequence (opt2) from neuraminidase__InfluenzaA__AFK14266

SEQ ID NO: 118446 - RNA, 1410 nt, Artificial Sequence; identical to SEQ ID NO: 112774
  derived and/or modified CDS sequence (opt2) from neuraminidase__InfluenzaA__AFK14274

SEQ ID NO: 118447 - RNA, 1410 nt, Artificial Sequence
  derived and/or modified CDS sequence (opt2) from neuraminidase__InfluenzaA__AFK14281
augaaccccaaccagaagaucaucaccaucggcuccgucugcaugaccaucggcauggccaaccucauccuccagaucggcaacaucaucuccaucuggaucucccacuccauccagcucggcaaccagaaccagaucgagaccugcaaccaguccgucaucaccuacgagaacaacaccugggucaaccagaccgacgucaacaucuccaacaccaacuucgccgccggccaguccgucgucuccgucaagcucgccggcaacuccucccucugccccgucuccggcugggccaucuacuccaaggacaacuccauccgcaucggcuccaagggcgacgucuucgucauccgcgagcccuucaucuccugcuccccccucgagugccgcaccuucuuccucacccagggcgcccuccucaacgacaagcacuccaacggcaccaucaaggaccgcucccccuaccgcacccucauguccugccccaucggcgagguccccucccccuacaacucccgcuucgaguccgucgccugguccgccuccgccugccacgacggcaucaacuggcucaccaucggcaucuccggccccgacaacggcgccgucgccguccucaaguacaacggcaucaucaccgacaccaucaaguccuggcgcaacaacauccuccgcacccaggaguccgagugcgccugcgucaacggcuccugcuucaccgucaugaccgacggccccuccgacggccaggccuccuacaagaucuuccgcaucgagaagggcaagaucgucaaguccgucgagaugaacgcccccaacuaccacuacgaggagugcuccugcuaccccgacuccuccgagaucaccugcgucugccgcgacaacuggcacggcuccaaccgccccugggucuccuucaaccagaaccucgaguaccagaucggcuacaucugcuccggcaucuucggcgacaacccccgccccaacgacaagaccggcuccugcggccccgucuccuccaacggcgccaacggcgucaagggcuucuccuucaaguacggcaacggcgucuggaucggccgcaccaaguccaucuccucccgcaacggcuucgagaugaucugggaccccaacggcuggaccggcaccgacaacaacuucuccaucaagcaggacaucgucggcaucaacgagugguccggcuacuccggcuccuucguccagcaccccgagcucaccggccucgacugcauccgccccugcuucugggucgagcucauccgcggccgccccaaggagaacaccaucuggaccuccggcuccuccaucuccuucugcggcgucaacuccgacaccgucggcugguccuggcccgacggcgccgagcuccccuucaccaucgacaaguga

SEQ ID NO: 118448 - RNA, 1410 nt, Artificial Sequence; identical to SEQ ID NO: 112774
  derived and/or modified CDS sequence (opt2) from neuraminidase__InfluenzaA__AFK14289

SEQ ID NO: 118449 - RNA, 1410 nt, Artificial Sequence; identical to SEQ ID NO: 113357
  derived and/or modified CDS sequence (opt2) from neuraminidase__InfluenzaA__AFK14298

SEQ ID NO: 118450 - RNA, 1410 nt, Artificial Sequence; identical to SEQ ID NO: 112774
  derived and/or modified CDS sequence (opt2) from neuraminidase__InfluenzaA__AFK14307

SEQ ID NO: 118451 - RNA, 1410 nt, Artificial Sequence; identical to SEQ ID NO: 114755
  derived and/or modified CDS sequence (opt2) from neuraminidase__InfluenzaA__AFK14316

SEQ ID NO: 118452 - RNA, 1410 nt, Artificial Sequence
  derived and/or modified CDS sequence (opt2) from neuraminidase__InfluenzaA__AFK14325
augaaccccaaccagaagaucaucaccaucggcuccgucugcaugaccaucggcauggccaaccucauccuccagaucggcaacaucaucuccaucuggaucucccacuccauccagcucggcaaccagaaccagaucgagaccugcaaccaguccgucaucaccuacgagaacaacaccugggucaaccagaccuacgucaacaucuccaacaccaacuucgccgccggccaguccgucgucuccgucaagcucgccggcaacuccucccucugccccgucuccggcugggccaucuacuccaaggacaacuccauccgcaucggcuccaagggcgacgucuucgucauccgcgagcccuucaucuccugcuccccccucgagugccgcaccuucuuccucacccagggcgcccuccucaacgacaagcacuccaacggcaccaucaaggaccgcucccccuaccgcacccucauguccugccccaucggcgagguccccucccccuacaacucccgcuucgaguccgucgccugguccgccuccgccugccacgacggcaucaacuggcucaccaucggcaucuccggccccgacaacggcgccgucgccguccucaaguacaacggcaucaucaccgacaccaucaaguccuggcgcaacaacauccuccgcacccaggaguccgagugcgccugcgucaacggcuccugcuucaccgucaugaccgacggccccuccgacggccaggccuccuacaagaucuuccgcaucgagcgcggcaagaucgucaaguccgucgagaugaacgcccccaacuaccacuacgaggagugcuccugcuaccccgacuccuccgagaucaccugcgucugccgcgacaacuggcacggcuccaaccgccccugggucuccuucaaccagaaccucgaguaccagaucggcuacaucugcuccggcaucuucggcgacaacccccgccccaacgacaagaccggcuccugcggccccgucuccuccaacggcgccaacggcgucaagggcuucuccuucaaguacggcaacggcgucuggaucggccgcaccaaguccaucuccucccgcaacggcuucgagaugaucugggaccccaacggcuggaccggcaccgacaacaacuucuccaucaagcaggacaucgucggcaucaacgagugguccggcuacuccggcuccuucguccagcaccccgagcucaccggccucgacugcauccgccccugcuucugggucgagcucauccgcggccgccccaaggagaacaccaucuggaccuccggcuccuccaucuccuucugcggcgucaacuccgacaccgucggcugguccuggcccgacggcgccgagcuccccuucaccaucgacaaguga

SEQ ID NO: 118453 - RNA, 1410 nt, Artificial Sequence; identical to SEQ ID NO: 112774
  derived and/or modified CDS sequence (opt2) from neuraminidase__InfluenzaA__AFK14334

SEQ ID NO: 118454 - RNA, 1410 nt, Artificial Sequence; identical to SEQ ID NO: 112774
  derived and/or modified CDS sequence (opt2) from neuraminidase__InfluenzaA__AFK14343

SEQ ID NO: 118455 - RNA, 1410 nt, Artificial Sequence; identical to SEQ ID NO: 112774
  derived and/or modified CDS sequence (opt2) from neuraminidase__InfluenzaA__AFK14352

SEQ ID NO: 118456 - RNA, 1410 nt, Artificial Sequence; identical to SEQ ID NO: 112774
  derived and/or modified CDS sequence (opt2) from neuraminidase__InfluenzaA__AFK14360

SEQ ID NO: 118457 - RNA, 1410 nt, Artificial Sequence; identical to SEQ ID NO: 112774
  derived and/or modified CDS sequence (opt2) from neuraminidase__InfluenzaA__AFK14369

SEQ ID NO: 118458 - RNA, 1410 nt, Artificial Sequence
  derived and/or modified CDS sequence (opt2) from neuraminidase__InfluenzaA__AFK14387
augaaccccaaccagaagaucaucaccaucggcuccgucugcaugaccaucggcauggccaaccucauccuccagaucggcaacaucaccuccaucuggaucucccacuccauccagcucggcaaccagaaccagaucgacaccugcaaccaguccgucaucaccuacgagaacaacaccugggucaaccagaccuacgucaacaucuccaacaccaacuucgccgccggccaguccgucgucuccgucaagcucgccggcaacuccucccucugccccgucuccggcugggccaucuacuccaaggacaacuccauccgcaucggcuccaagggcgacgucuucgucauccgcgagcccuucaucuccugcuccccccucgagugccgcaccuucuuccucacccagggcgcccuccucaacgacaagcacuccaacggcaccaucaaggaccgcucccccuaccgcacccucauguccugccccaucggcgagguccccucccccuacaacucccgcuucgaguccgucgccugguccgccuccgccugccacgacggcaucaacuggcucaccaucggcaucuccggccccgacaacggcgccgucgccguccucaaguacaacggcaucaucaccgacaccaucaaguccuggcgcaacaacauccuccgcacccaggaguccgagugcgccugcgucaacggcuccugcuucaccgucaugaccgacggccccuccgacggccaggccuccuacaagaucuuccgcaucgagaagggcaagaucgucaaguccgucgagaugaacgcccccaacuaccacuacgaggagugcuccugcuaccccgacuccuccgagaucaccugcgucugccgcgacaacuggcacggcuccaaccgccccugggucuccuucaaccagaaccucgaguaccagaucggcuacaucugcuccggcaucuucggcgacaacccccgccccaacgacaagaccggcuccugcggccccgucuccuccaacggcgccaacggcgucaagggcuucuccuucaaguacggcaacggcgucuggaucggccgcaccaaguccaucuccucccgcaacggcuucgagaugaucugggaccccaacggcuggaccggcaccgacaacaacuucuccaucaagcaggacaucgucggcaucaacgagugguccggcuacuccggcuccuucguccagcaccccgagcucaccggccucgacugcauccgccccugcuucugggucgagcucauccgcggccgccccaaggagaacaccaucuggaccuccggcuccuccaucuccuucugcggcgucaacuccgacaccgucggcugguccuggcccgacggcgccgagcuccccuucaccaucgacaaguga

SEQ ID NO: 118459 - RNA, 1410 nt, Artificial Sequence; identical to SEQ ID NO: 113357
  derived and/or modified CDS sequence (opt2) from neuraminidase__InfluenzaA__AFK14397

SEQ ID NO: 118460 - RNA, 1410 nt, Artificial Sequence; identical to SEQ ID NO: 112774
  derived and/or modified CDS sequence (opt2) from neuraminidase__InfluenzaA__AFK14406

SEQ ID NO: 118461 - RNA, 1410 nt, Artificial Sequence; identical to SEQ ID NO: 112774
  derived and/or modified CDS sequence (opt2) from neuraminidase__InfluenzaA__AFK14415

SEQ ID NO: 118462 - RNA, 1410 nt, Artificial Sequence; identical to SEQ ID NO: 112774
  derived and/or modified CDS sequence (opt2) from neuraminidase__InfluenzaA__AFK14424

SEQ ID NO: 118463 - RNA, 1410 nt, Artificial Sequence
  derived and/or modified CDS sequence (opt2) from neuraminidase__InfluenzaA__AFK14433
augaaccccaaccagaagaucaucaccaucggcuccgucugcaugaucaucggcauggccaaccucauccuccagaucggcaacaucaucuccaucuggaucucccacuccauccagcucggcaaccagaaccagaucgagaccugcaaccaguccgucaucaccuacgagaacaacaccugggucaaccagaccuacgucaacaucuccaacaccaacuucgccgccggccaguccgucgucuccgucaagcucgccggcaacuccucccucugccccgucuccggcugggccaucuacuccaaggacaacuccauccgcaucggcuccaagggcgacgucuucgucauccgcgagcccuucaucuccugcuccccccucgagugccgcaccuucuuccucacccagggcgcccuccucaacgacaagcacuccaacggcaccaucaaggaccgcucccccuaccgcacccucauguccugccccaucggcgagguccccucccccuacaacucccgcuucgaguccgucgccugguccgccuccgccugccacgacggcaucaacuggcucaccaucggcaucuccggccccgacaacggcgccgucgccguccucaaguacaacggcaucaucaccgacaccaucaaguccuggcgcaacaacauccuccgcacccaggaguccgagugcgccugcgucaacggcuccugcuucaccgucaugaccgacggccccuccgacggccaggccuccuacaagaucuuccgcaucgagaagggcaagaucgucaaguccgucgagaugaacgcccccaacuaccacuacgaggagugcuccugcuaccccgacuccuccgagaucaccugcgucugccgcgacaacuggcacggcuccaaccgccccugggucuccuucaaccagaaccucgaguaccagaucggcuacaucugcuccggcaucuucggcgacaacccccgccccaacgacaagaccggcuccugcggccccgucuccuccaacggcgccaacggcgucaagggcuucuccuucaaguacggcaacggcgucuggaucggccgcaccaaguccaucuccucccgcaacggcuucgagaugaucugggaccccaacggcuggaccggcaccgacaacaacuucuccaucaagcaggacaucgucggcaucaacgagugguccggcuacuccggcuccuucguccagcaccccgagcucaccggccucgacugcauccgccccugcuucugggucgagcucauccgcggccgccccaaggagaacaccaucuggaccuccggcuccuccaucuccuucugcggcgucaacuccgacaccgucggcugguccuggcccgacggcgccgagcuccccuucaccaucgacaaguga

SEQ ID NO: 118464 - RNA, 1410 nt, Artificial Sequence; identical to SEQ ID NO: 112774
  derived and/or modified CDS sequence (opt2) from neuraminidase__InfluenzaA__AFK14442

SEQ ID NO: 118465 - RNA, 1410 nt, Artificial Sequence
  derived and/or modified CDS sequence (opt2) from neuraminidase__InfluenzaA__AFK14451
augaaccccaaccagaagaucaucaccaucggcuccgucugcaugaccaucggcauggccaaccucauccuccagaucggcaacaucaucuccaucuggaucucccacuccauccagcucggcaaccagaaccagaucgagaccugcaaccaguccgucaucaccuacgagaacaacaccugggucaaccagaccuacgucaacaucuccaacaccaacuucgccgccggccaguccgucgccuccgccaagcucgccggcaacuccucccucugccccgucuccggcugggccaucuacuccaaggacaacuccauccgcaucggcuccaagggcgacgucuucgucauccgcgagcccuucaucuccugcuccccccucgagugccgcaccuucuuccucacccagggcgcccuccucaacgacaagcacuccaacggcaccaucaaggaccgcucccccuaccgcacccucauguccugccccaucggcgagguccccucccccuacaacucccgcuucgaguccgucgccugguccgccuccgccugccacgacggcaucaacuggcucaccaucggcaucuccggccccgacaacggcgccgucgccguccucaaguacaacggcaucaucaccgacaccaucaaguccuggcgcaacaacauccuccgcacccaggaguccgagugcgccugcgucaacggcuccugcuucaccgucaugaccgacggccccuccgacggccaggccuccuacaagaucuuccgcaucgagaagggcaagaucgucaaguccgucgagaugaacgcccccaacuaccacuacgaggagugcuccugcuaccccgacuccuccgagaucaccugcgucugccgcgacaacuggcacggcuccaaccgccccugggucuccuucaaccagaaccucgaguaccagaucggcuacaucugcuccggcaucuucggcgacaacccccgccccaacgacaagaccggcuccugcggccccgucuccuccaacggcgccaacggcgucaagggcuucuccuucaaguacggcaacggcgucuggaucggccgcaccaaguccaucuccucccgcaacggcuucgagaugaucugggaccccaacggcuggaccggcaccgacaacaacuucuccaucaagcaggacaucgucggcaucaacgagugguccggcuacuccggcuccuucguccagcaccccgagcucaccggccucgacugcauccgccccugcuucugggucgagcucauccgcggccgccccaaggagaacaccaucuggaccuccggcuccaucaucuccuucugcggcgucaacuccgacaccgucggcugguccuggcccgacggcgccgagcuccccuucaccaucgacaaguga

SEQ ID NO: 118466 - RNA, 1410 nt, Artificial Sequence; identical to SEQ ID NO: 112774
  derived and/or modified CDS sequence (opt2) from neuraminidase__InfluenzaA__AFK14458

SEQ ID NO: 118467 - RNA, 1410 nt, Artificial Sequence; identical to SEQ ID NO: 112774
  derived and/or modified CDS sequence (opt2) from neuraminidase__InfluenzaA__AFK14467

SEQ ID NO: 118468 - RNA, 1410 nt, Artificial Sequence; identical to SEQ ID NO: 112774
  derived and/or modified CDS sequence (opt2) from neuraminidase__InfluenzaA__AFK14476

SEQ ID NO: 118469 - RNA, 1410 nt, Artificial Sequence; identical to SEQ ID NO: 115833
  derived and/or modified CDS sequence (opt2) from neuraminidase__InfluenzaA__AFK14485

SEQ ID NO: 118470 - RNA, 1410 nt, Artificial Sequence; identical to SEQ ID NO: 112774
  derived and/or modified CDS sequence (opt2) from neuraminidase__InfluenzaA__AFK14504

SEQ ID NO: 118471 - RNA, 1410 nt, Artificial Sequence; identical to SEQ ID NO: 112774
  derived and/or modified CDS sequence (opt2) from neuraminidase__InfluenzaA__AFK14514

SEQ ID NO: 118472 - RNA, 1410 nt, Artificial Sequence; identical to SEQ ID NO: 112774
  derived and/or modified CDS sequence (opt2) from neuraminidase__InfluenzaA__AFK14522

SEQ ID NO: 118473 - RNA, 1410 nt, Artificial Sequence; identical to SEQ ID NO: 112774
  derived and/or modified CDS sequence (opt2) from neuraminidase__InfluenzaA__AFK14529

SEQ ID NO: 118474 - RNA, 1410 nt, Artificial Sequence; identical to SEQ ID NO: 112774
  derived and/or modified CDS sequence (opt2) from neuraminidase__InfluenzaA__AFK14538

SEQ ID NO: 118475 - RNA, 1410 nt, Artificial Sequence; identical to SEQ ID NO: 115149
  derived and/or modified CDS sequence (opt2) from neuraminidase__InfluenzaA__AFK14547

SEQ ID NO: 118476 - RNA, 1410 nt, Artificial Sequence
  derived and/or modified CDS sequence (opt2) from neuraminidase__InfluenzaA__AFK14555
augaaccccaaccagaagaucaucaccaucggcuccgucugcaugaccaucggcauggccaaccucauccuccagaucggcaacaucaucuccaucuggaucucccacuccauccagcucggcaaccagaaccagaucgagaccugcaaccaguccgucaucaccuacgagaacaacaccugggucaaccagaccuacgucaacaucuccaacaccaacuucgccgccggccaguccgucaucuccgucaagcucgccggcaacuccucccucugccccgucuccggcugggccaucuacuccaaggacaacuccauccgcaucggcuccaagggcgacgucuucgucauccgcgagcccuucaucuccugcuccccccucgagugccgcaccuucuuccucacccagggcgcccuccucaacgacaagcacuccaacggcaccaucaaggaccgcucccccuaccgcacccucauguccugccccaucggcgagguccccucccccuacaacucccgcuucgaguccgucgccugguccgccuccgccugccacgacggcaucaacuggcucaccaucggcaucuccggccccgacaacggcgccgucgccguccucaaguacaacggcaucaucaccgacaccaucaaguccuggcgcaacaacauccuccgcacccaggaguccgagugcgccugcgucaacggcuccugcuucaccgucaugaccgacggccccuccgacggccaggccuccuacaagaucuuccgcaucgagaagggcaagaucgucaaguccgucgagaugaacgcccccaacuaccacuacgaggagugcuccugcuaccccgacuccuccgagaucaccugcgucugccgcgacaacuggcacggcuccaaccgccccugggucuccuucaaccagaaccucgaguaccagaucggcuacaucugcuccggcaucuucggcgacaacccccgccccaacgacaagaccggcuccugcggccccgucuccuccaacggcgccaacggcgucaagggcuucuccuucaaguacggcaacggcgucuggaucggccgcaccaaguccaucuccucccgcaacggcuucgagaugaucugggaccccaacggcuggaccggcaccgacaacaacuucuccaucaagcaggacaucgucggcaucaacgagugguccggcuacuccggcuccuucguccagcaccccgagcucaccggccucgacugcauccgccccugcuucugggucgagcucauccgcggccgccccaaggagaacaccaucuggaccuccggcuccuccaucuccuucugcggcgucaacuccgacaccgucggcugguccuggcccgacggcgccgagcuccccuucaccaucgacaaguga

SEQ ID NO: 118477 - RNA, 1410 nt, Artificial Sequence; identical to SEQ ID NO: 112774
  derived and/or modified CDS sequence (opt2) from neuraminidase__InfluenzaA__AFK14564

SEQ ID NO: 118478 - RNA, 1410 nt, Artificial Sequence; identical to SEQ ID NO: 112774
  derived and/or modified CDS sequence (opt2) from neuraminidase__InfluenzaA__AFK14573

SEQ ID NO: 118479 - RNA, 1410 nt, Artificial Sequence
  derived and/or modified CDS sequence (opt2) from neuraminidase__InfluenzaA__AFK14579
augaaccccaaccagaagaucaucaccaucggcuccgucugcaugaccaucggcauggccaaccucauccuccagaucggcaacaucaucuccaucuggaucucccacuccauccagcucggcaaccagaaccagaucgagaccugcaaccaguccgucaucaccuacgagaacaacaccugggucaaccagaccuacgucaacaucuccaacaccaacuucgccgccggccaguccgucgucuccgucaagcucgccggcaacuccucccucugccccgucuccggcugggccaucuacuccaaggacaacuccauccgcaucggcuccaagggcgacgucuucgucauccgcgagcccuucaucuccugcuccccccucgagugccgcaccuucuuccucacccagggcgcccuccucaacgacaagcacuccaacggcaccaucaaggaccgcucccccuaccgcacccucauguccugccccaucggcgagguccccucccccuacaacucccgcuucgaguccgucgccugguccgccuccgccugccacgacggcaucaacuggcucaccaucggcaucuccggccccgacaacggcgccgucgccguccucaaguacaacggcaucaucaccgacaccaucaaguccuggcgcaacaacauccuccgcacccaggaguccgagugcgccugcgucaacggcuccugcuucaccgucaugaccgacggccccuccgacggccaggccuccuacaagaucuuccgcaucgagaagggcaagaucgucaaguccgucgagaugaacgcccccaacuaccacuacgaggagugcuccugcuaccccgacuccuccgagaucaccugcgucugccgcgacaacuggcacggcuccaaccgccccugggucuccuucaaccagaaccucgaguaccagaucggcuacaugugcuccggcaucuucggcgacaacccccgccccaacgacaagaccggcuccugcggccccgucuccuccaacggcgccaacggcgucaagggcuucuccuucaaguacggcaacggcgucuggaucggccgcaccaaguccaucuccucccgcaacggcuucgagaugaucugggaccccaacggcuggaccggcaccgacaacaacuucuccaucaagcaggacaucgucggcaucaacgagugguccggcuacuccggcuccuucguccagcaccccgagcucaccggccucgacugcauccgccccugcuucugggucgagcucauccgcggccgccccaaggagaacaccaucuggaccuccggcuccuccaucuccuucugcggcgucaacuccgacaccgucggcugguccuggcccgacggcgccgagcuccccuucaccaucgacaaguga

SEQ ID NO: 118480 - RNA, 1410 nt, Artificial Sequence; identical to SEQ ID NO: 112774
  derived and/or modified CDS sequence (opt2) from neuraminidase__InfluenzaA__AFK14588

SEQ ID NO: 118481 - RNA, 1410 nt, Artificial Sequence; identical to SEQ ID NO: 112774
  derived and/or modified CDS sequence (opt2) from neuraminidase__InfluenzaA__AFK14597

SEQ ID NO: 118482 - RNA, 1410 nt, Artificial Sequence; identical to SEQ ID NO: 112774
  derived and/or modified CDS sequence (opt2) from neuraminidase__InfluenzaA__AFK14604

SEQ ID NO: 118483 - RNA, 1410 nt, Artificial Sequence; identical to SEQ ID NO: 112774
  derived and/or modified CDS sequence (opt2) from neuraminidase__InfluenzaA__AFK14632

SEQ ID NO: 118484 - RNA, 1410 nt, Artificial Sequence; identical to SEQ ID NO: 112764
  derived and/or modified CDS sequence (opt2) from neuraminidase__InfluenzaA__AFK14641

SEQ ID NO: 118485 - RNA, 1410 nt, Artificial Sequence; identical to SEQ ID NO: 112774
  derived and/or modified CDS sequence (opt2) from neuraminidase__InfluenzaA__AFK14651

SEQ ID NO: 118486 - RNA, 1410 nt, Artificial Sequence; identical to SEQ ID NO: 112774
  derived and/or modified CDS sequence (opt2) from neuraminidase__InfluenzaA__AFK14656

SEQ ID NO: 118487 - RNA, 1410 nt, Artificial Sequence; identical to SEQ ID NO: 112774
  derived and/or modified CDS sequence (opt2) from neuraminidase__InfluenzaA__AFK14663

SEQ ID NO: 118488 - RNA, 1410 nt, Artificial Sequence; identical to SEQ ID NO: 112774
  derived and/or modified CDS sequence (opt2) from neuraminidase__InfluenzaA__AFK14672

SEQ ID NO: 118489 - RNA, 1410 nt, Artificial Sequence; identical to SEQ ID NO: 112774
  derived and/or modified CDS sequence (opt2) from neuraminidase__InfluenzaA__AFK14680

SEQ ID NO: 118490 - RNA, 1410 nt, Artificial Sequence; identical to SEQ ID NO: 112774
  derived and/or modified CDS sequence (opt2) from neuraminidase__InfluenzaA__AFK14690

SEQ ID NO: 118491 - RNA, 1410 nt, Artificial Sequence; identical to SEQ ID NO: 112774
  derived and/or modified CDS sequence (opt2) from neuraminidase__InfluenzaA__AFK14707

SEQ ID NO: 118492 - RNA, 1410 nt, Artificial Sequence; identical to SEQ ID NO: 112774
  derived and/or modified CDS sequence (opt2) from neuraminidase__InfluenzaA__AFK14715

SEQ ID NO: 118493 - RNA, 1410 nt, Artificial Sequence; identical to SEQ ID NO: 112774
  derived and/or modified CDS sequence (opt2) from neuraminidase__InfluenzaA__AFK14724

SEQ ID NO: 118494 - RNA, 1410 nt, Artificial Sequence; identical to SEQ ID NO: 112774
  derived and/or modified CDS sequence (opt2) from neuraminidase__InfluenzaA__AFK14733

SEQ ID NO: 118495 - RNA, 1410 nt, Artificial Sequence; identical to SEQ ID NO: 112774
  derived and/or modified CDS sequence (opt2) from neuraminidase__InfluenzaA__AFK14751

SEQ ID NO: 118496 - RNA, 1410 nt, Artificial Sequence; identical to SEQ ID NO: 112774
  derived and/or modified CDS sequence (opt2) from neuraminidase__InfluenzaA__AFK14757

SEQ ID NO: 118497 - RNA, 1410 nt, Artificial Sequence; identical to SEQ ID NO: 112774
  derived and/or modified CDS sequence (opt2) from neuraminidase__InfluenzaA__AFK14766

SEQ ID NO: 118498 - RNA, 1410 nt, Artificial Sequence; identical to SEQ ID NO: 113357
  derived and/or modified CDS sequence (opt2) from neuraminidase__InfluenzaA__AFK14774

SEQ ID NO: 118499 - RNA, 1410 nt, Artificial Sequence; identical to SEQ ID NO: 118476
  derived and/or modified CDS sequence (opt2) from neuraminidase__InfluenzaA__AFK14781

SEQ ID NO: 118500 - RNA, 1410 nt, Artificial Sequence; identical to SEQ ID NO: 113357
  derived and/or modified CDS sequence (opt2) from neuraminidase__InfluenzaA__AFK14790

SEQ ID NO: 118501 - RNA, 1410 nt, Artificial Sequence
  derived and/or modified CDS sequence (opt2) from neuraminidase__InfluenzaA__AFK14800
augaaccccaaccagaagaucaucaccaucggcuccgucugcaugaccaucggcauggccaaccucauccuccagaucggcaacaucaucuccaucuggaucucccacuccauccagcucggcaaccagaaccagaucgagaccugcaaccaguccgucaucaccuacgagaacaacaccugggucaaccagaccuacgucaacaucuccaacaccaacuucgccgccggccaguccgucgucuccgucaagcucgccggcaacuccucccucugccccgucuccggcugggccaucuacuccaaggacaacuccauccgcaucggcuccaagggcgacgucuucgucauccgcgagcccuucaucuccugcuccccccucgagugccgcaccuucuuccucacccagggcgcccuccucaacgacaagcacuccaacggcaccaucaaggaccgcucccccuaccgcacccucauguccugccccaucggcgagguccccucccccuacaacucccgcuucgaguccgucgccugguccgccuccgccugccacgacggcaucaacuggcucaccaucggcaucuccggccccgacaacggcgccgucgccguccucaaguacaacggcaucaucaccgacaccaucaaguccuggcgcaacaacauccuccgcacccaggaguccgagugcgccugcgucaacggcuccugcuucaccgucaugaccgacggccccuccgacggccaggccuccuacaagaucuuccgcaucgagaagggcaagaucgucaaguccgucgagaugaacgcccccaacuaccacuacgaggagugcuccugcuaccccgacuccuccgagaucaccugcgucugccgcgacaacuggcacggcuccaaccgccccugggucuccuucaaccagaaccucgaguaccagaucggcuacaucugcuccggcaucuucggcgacaacccccgccccaacgacaagaccggcuccugcggccccgucuccuccaacggcgccaacggcgucaagggcuucuccuucaaguacggcaacggcgucuggaucggccgcaccaaguccaucuccucccgcaacggcuucgagaugaucugggaccccaacggcuggaccggcaccgacaacaacuucuccaucaagcaggacaucgucggcaucaacgagugguccggcuacuccggcuccuucguccagcaccccgagcucaccggccucgacugcauccgccccugcuucugggucgagcucauccgcggccgcccccgcgagaacaccaucuggaccuccggcuccuccaucuccuucugcggcgucaacuccgacaccgucggcugguccuggcccgacggcgccgagcuccccuucaccaucgacaaguga

SEQ ID NO: 118502 - RNA, 1410 nt, Artificial Sequence; identical to SEQ ID NO: 114755
  derived and/or modified CDS sequence (opt2) from neuraminidase__InfluenzaA__AFK14809

SEQ ID NO: 118503 - RNA, 1410 nt, Artificial Sequence; identical to SEQ ID NO: 114755
  derived and/or modified CDS sequence (opt2) from neuraminidase__InfluenzaA__AFK14816

SEQ ID NO: 118504 - RNA, 1410 nt, Artificial Sequence; identical to SEQ ID NO: 112774
  derived and/or modified CDS sequence (opt2) from neuraminidase__InfluenzaA__AFK14824

SEQ ID NO: 118505 - RNA, 1410 nt, Artificial Sequence; identical to SEQ ID NO: 112774
  derived and/or modified CDS sequence (opt2) from neuraminidase__InfluenzaA__AFK14841

SEQ ID NO: 118506 - RNA, 1410 nt, Artificial Sequence; identical to SEQ ID NO: 113847
  derived and/or modified CDS sequence (opt2) from neuraminidase__InfluenzaA__AFK14849

SEQ ID NO: 118507 - RNA, 1410 nt, Artificial Sequence
  derived and/or modified CDS sequence (opt2) from neuraminidase__InfluenzaA__AFK14856
augaaccccaaccagaagaucaucaccaucggcuccgucugcaugaccaucggcauggccaaccucauccuccagaucggcaacaucaucuccaucuggaucucccacuccauccagcucggcaaccagaaccagaucgagaccugcaaccaguccgucaucaccuacgagaacaacaccugggucaaccagaccuacgucaacaucuccaacaccaacuucgccgccggccaguccgucgucuccgucaagcucgccggcaacuccucccucugccccgucuccggcugggccaucuacuccaaggacaacuccguccgcaucggcuccaagggcgacgucuucgucauccgcgagcccuucaucuccugcuccccccucgagugccgcaccuucuuccucacccagggcgcccuccucaacgacaagcacuccaacggcaccaucaaggaccgcucccccuaccgcacccucauguccugccccaucggcgagguccccucccccuacaacucccgcuucgaguccgucgccugguccgccuccgccugccacgacggcaucaacuggcucaccaucggcaucuccggccccgacaacggcgccgucgccguccucaaguacaacggcaucaucaccgacaccaucaaguccuggcgcaacaacauccuccgcacccaggaguccgagugcgccugcgucaacggcuccugcuucaccgucaugaccgacggccccuccaacggccaggccuccuacaagaucuucaagaucgagaagggcaagaucgucaaguccgucgagaugaacgcccccaacuaccacuacgaggagugcuccugcuaccccgacuccuccgagaucaccugcgucugccgcgacaacuggcacggcuccaaccgccccugggucuccuucaaccagaaccucgaguaccagaucggcuacaucugcuccggcaucuucggcgacaacccccgccccaucgacaagaccggcuccugcggccccgucuccuccaacggcgccaacggcgucaagggcuucuccuucaaguacggcaacggcgucuggaucggccgcaccaaguccaucuccucccgcaacggcuucgagaugaucugggaccccaacggcuggaccggcaccgacaacaacuucuccaucaagcaggacaucgucggcaucaacgagugguccggcuacuccggcuccuucguccagcaccccgagcucaccggccucgacugcauccgccccugcuucugggucgagcucauccgcggccgccccaaggagaacaccaucuggaccuccggcuccuccaucuccuucugcggcgucaacuccgacaccgucggcugguccuggcccgacggcgccgagcuccccuucaccaucgacaaguga

SEQ ID NO: 118508 - RNA, 1410 nt, Artificial Sequence; identical to SEQ ID NO: 112774
  derived and/or modified CDS sequence (opt2) from neuraminidase__InfluenzaA__AFK14870

SEQ ID NO: 118509 - RNA, 1410 nt, Artificial Sequence; identical to SEQ ID NO: 112774
  derived and/or modified CDS sequence (opt2) from neuraminidase__InfluenzaA__AFK14879

SEQ ID NO: 118510 - RNA, 1410 nt, Artificial Sequence; identical to SEQ ID NO: 112774
  derived and/or modified CDS sequence (opt2) from neuraminidase__InfluenzaA__AFK14885

SEQ ID NO: 118511 - RNA, 1410 nt, Artificial Sequence; identical to SEQ ID NO: 112774
  derived and/or modified CDS sequence (opt2) from neuraminidase__InfluenzaA__AFK14894

SEQ ID NO: 118512 - RNA, 1410 nt, Artificial Sequence; identical to SEQ ID NO: 112774
  derived and/or modified CDS sequence (opt2) from neuraminidase__InfluenzaA__AFK14903

SEQ ID NO: 118513 - RNA, 1410 nt, Artificial Sequence; identical to SEQ ID NO: 112774
  derived and/or modified CDS sequence (opt2) from neuraminidase__InfluenzaA__AFK14912

SEQ ID NO: 118514 - RNA, 1410 nt, Artificial Sequence; identical to SEQ ID NO: 112774
  derived and/or modified CDS sequence (opt2) from neuraminidase__InfluenzaA__AFK14921

SEQ ID NO: 118515 - RNA, 1410 nt, Artificial Sequence; identical to SEQ ID NO: 112774
  derived and/or modified CDS sequence (opt2) from neuraminidase__InfluenzaA__AFK14931

SEQ ID NO: 118516 - RNA, 1410 nt, Artificial Sequence
  derived and/or modified CDS sequence (opt2) from neuraminidase__InfluenzaA__AFK25604
augaaccccaaccagaagaucaucaccaucggcuccgucugcaugaccaucggcauggccaaccucauccuccagaucggcaacaucaucuccaucuggaucucccacuccauccagcuccgcaaccagucccagaucgagaccugcaaccaguccgucaucaccuacgagaacaacaccugggucaaccagaccuacgucaacaucuccaacaccaacuucgccgccggccaguccgucgucuccgucaagcucgccggcaacuccucccucugccccgucuccggcugggccaucuacuccaaggacaacuccauccgcaucggcuccaagggcgacgucuucgucauccgcgagcccuucaucuccugcuccccccucgagugccgcaccuucuuccucacccagggcgcccuccucaacgacaagcacuccaacggcaccaucaaggaccgcucccccuaccgcacccucauguccugccccaucggcgagguccccucccccuacaacucccgcuucgaguccgucgccugguccgccuccgccugccacgacggcaucaacuggcucaccaucggcaucuccggccccgacaacggcgccgucgccguccucaaguacaacggcaucaucaccgacaccaucaaguccuggcgcaacaacauccuccgcacccaggaguccgagugcgccugcgucaacggcuccugcuucaccaucaugaccgacggccccuccgacggccaggccuccuacaagaucuuccgcaucgagaagggcaagaucgucaaguccgucgagaugaacgcccccaacuacuacuacgaggagugcuccugcuaccccgacuccuccgagaucaccugcgucugccgcgacaacuggcacggcuccaaccgccccugggucuccuucaaccagaaccucgaguaccagaucggcuacaucugcuccggcaucuucggcgacaacccccgccccaacgacaagaccggcuccugcggccccgucuccuccaacggcgccaacggcgucaagggcuucuccuucaaguacggcaacggcgucuggaucggccgcaccaaguccaucuccucccgcaagggcuucgagaugaucugggaccccaacggcuggaccggcaccgacaacaacuucuccaucaagcaggacaucgucggcaucaacgagugguccggcuacuccggcuccuucguccagcaccccgagcucaccggccucgacugcauccgccccugcuucugggucgagcucauccgcggccgccccaaggagaacaccaucuggaccuccggcuccuccaucuccuucugcggcgucaacuccgacaccgucggcugguccuggcccgacggcgccgagcuccccuucaccaucgacaaguga

SEQ ID NO: 118517 - RNA, 1410 nt, Artificial Sequence; identical to SEQ ID NO: 118516
  derived and/or modified CDS sequence (opt2) from neuraminidase__InfluenzaA__AFK25606

SEQ ID NO: 118518 - RNA, 1410 nt, Artificial Sequence; identical to SEQ ID NO: 114125
  derived and/or modified CDS sequence (opt2) from neuraminidase__InfluenzaA__AFK74537

SEQ ID NO: 118519 - RNA, 1410 nt, Artificial Sequence; identical to SEQ ID NO: 112774
  derived and/or modified CDS sequence (opt2) from neuraminidase__InfluenzaA__AFK74547

SEQ ID NO: 118520 - RNA, 1410 nt, Artificial Sequence; identical to SEQ ID NO: 115766
  derived and/or modified CDS sequence (opt2) from neuraminidase__InfluenzaA__AFK74557

SEQ ID NO: 118521 - RNA, 1410 nt, Artificial Sequence; identical to SEQ ID NO: 112774
  derived and/or modified CDS sequence (opt2) from neuraminidase__InfluenzaA__AFK74567

SEQ ID NO: 118522 - RNA, 1410 nt, Artificial Sequence; identical to SEQ ID NO: 112774
  derived and/or modified CDS sequence (opt2) from neuraminidase__InfluenzaA__AFK74578

SEQ ID NO: 118523 - RNA, 1410 nt, Artificial Sequence; identical to SEQ ID NO: 117889
  derived and/or modified CDS sequence (opt2) from neuraminidase__InfluenzaA__AFK74588

SEQ ID NO: 118524 - RNA, 1410 nt, Artificial Sequence; identical to SEQ ID NO: 112774
  derived and/or modified CDS sequence (opt2) from neuraminidase__InfluenzaA__AFK74598

SEQ ID NO: 118525 - RNA, 1410 nt, Artificial Sequence; identical to SEQ ID NO: 112774
  derived and/or modified CDS sequence (opt2) from neuraminidase__InfluenzaA__AFK74608

SEQ ID NO: 118526 - RNA, 1410 nt, Artificial Sequence; identical to SEQ ID NO: 112774
  derived and/or modified CDS sequence (opt2) from neuraminidase__InfluenzaA__AFK74618

SEQ ID NO: 118527 - RNA, 1410 nt, Artificial Sequence; identical to SEQ ID NO: 112774
  derived and/or modified CDS sequence (opt2) from neuraminidase__InfluenzaA__AFK74628

SEQ ID NO: 118528 - RNA, 1410 nt, Artificial Sequence; identical to SEQ ID NO: 112774
  derived and/or modified CDS sequence (opt2) from neuraminidase__InfluenzaA__AFK74638

SEQ ID NO: 118529 - RNA, 1410 nt, Artificial Sequence; identical to SEQ ID NO: 112774
  derived and/or modified CDS sequence (opt2) from neuraminidase__InfluenzaA__AFK74648

SEQ ID NO: 118530 - RNA, 1410 nt, Artificial Sequence; identical to SEQ ID NO: 117898
  derived and/or modified CDS sequence (opt2) from neuraminidase__InfluenzaA__AFK74658

SEQ ID NO: 118531 - RNA, 1410 nt, Artificial Sequence; identical to SEQ ID NO: 117898
  derived and/or modified CDS sequence (opt2) from neuraminidase__InfluenzaA__AFK74668

SEQ ID NO: 118532 - RNA, 1410 nt, Artificial Sequence; identical to SEQ ID NO: 112774
  derived and/or modified CDS sequence (opt2) from neuraminidase__InfluenzaA__AFK74678

SEQ ID NO: 118533 - RNA, 1410 nt, Artificial Sequence; identical to SEQ ID NO: 112774
  derived and/or modified CDS sequence (opt2) from neuraminidase__InfluenzaA__AFK74688

SEQ ID NO: 118534 - RNA, 1410 nt, Artificial Sequence; identical to SEQ ID NO: 112774
  derived and/or modified CDS sequence (opt2) from neuraminidase__InfluenzaA__AFK74698

SEQ ID NO: 118535 - RNA, 1410 nt, Artificial Sequence; identical to SEQ ID NO: 117905
  derived and/or modified CDS sequence (opt2) from neuraminidase__InfluenzaA__AFK74708

SEQ ID NO: 118536 - RNA, 1410 nt, Artificial Sequence; identical to SEQ ID NO: 115766
  derived and/or modified CDS sequence (opt2) from neuraminidase__InfluenzaA__AFK74718

SEQ ID NO: 118537 - RNA, 1410 nt, Artificial Sequence; identical to SEQ ID NO: 112774
  derived and/or modified CDS sequence (opt2) from neuraminidase__InfluenzaA__AFK74728

SEQ ID NO: 118538 - RNA, 1410 nt, Artificial Sequence; identical to SEQ ID NO: 112774
  derived and/or modified CDS sequence (opt2) from neuraminidase__InfluenzaA__AFK74738

SEQ ID NO: 118539 - RNA, 1410 nt, Artificial Sequence; identical to SEQ ID NO: 112774
  derived and/or modified CDS sequence (opt2) from neuraminidase__InfluenzaA__AFK74748

SEQ ID NO: 118540 - RNA, 1410 nt, Artificial Sequence; identical to SEQ ID NO: 112774
  derived and/or modified CDS sequence (opt2) from neuraminidase__InfluenzaA__AFK74758

SEQ ID NO: 118541 - RNA, 1410 nt, Artificial Sequence; identical to SEQ ID NO: 112774
  derived and/or modified CDS sequence (opt2) from neuraminidase__InfluenzaA__AFK74768

SEQ ID NO: 118542 - RNA, 1410 nt, Artificial Sequence; identical to SEQ ID NO: 112774
  derived and/or modified CDS sequence (opt2) from neuraminidase__InfluenzaA__AFK74778

SEQ ID NO: 118543 - RNA, 1410 nt, Artificial Sequence; identical to SEQ ID NO: 115766
  derived and/or modified CDS sequence (opt2) from neuraminidase__InfluenzaA__AFK74788

SEQ ID NO: 118544 - RNA, 1410 nt, Artificial Sequence; identical to SEQ ID NO: 115766
  derived and/or modified CDS sequence (opt2) from neuraminidase__InfluenzaA__AFK74798

SEQ ID NO: 118545 - RNA, 1410 nt, Artificial Sequence; identical to SEQ ID NO: 115766
  derived and/or modified CDS sequence (opt2) from neuraminidase__InfluenzaA__AFK74808

SEQ ID NO: 118546 - RNA, 1410 nt, Artificial Sequence; identical to SEQ ID NO: 115766
  derived and/or modified CDS sequence (opt2) from neuraminidase__InfluenzaA__AFK74818

SEQ ID NO: 118547 - RNA, 1410 nt, Artificial Sequence; identical to SEQ ID NO: 112774
  derived and/or modified CDS sequence (opt2) from neuraminidase__InfluenzaA__AFK74828

SEQ ID NO: 118548 - RNA, 1410 nt, Artificial Sequence; identical to SEQ ID NO: 114665
  derived and/or modified CDS sequence (opt2) from neuraminidase__InfluenzaA__AFK74838

SEQ ID NO: 118549 - RNA, 1410 nt, Artificial Sequence; identical to SEQ ID NO: 112774
  derived and/or modified CDS sequence (opt2) from neuraminidase__InfluenzaA__AFK74848

SEQ ID NO: 118550 - RNA, 1410 nt, Artificial Sequence; identical to SEQ ID NO: 112774
  derived and/or modified CDS sequence (opt2) from neuraminidase__InfluenzaA__AFK74898

SEQ ID NO: 118551 - RNA, 1410 nt, Artificial Sequence; identical to SEQ ID NO: 112774
  derived and/or modified CDS sequence (opt2) from neuraminidase__InfluenzaA__AFK74908

SEQ ID NO: 118552 - RNA, 1410 nt, Artificial Sequence; identical to SEQ ID NO: 112774
  derived and/or modified CDS sequence (opt2) from neuraminidase__InfluenzaA__AFK74918

SEQ ID NO: 118553 - RNA, 1410 nt, Artificial Sequence; identical to SEQ ID NO: 112774
  derived and/or modified CDS sequence (opt2) from neuraminidase__InfluenzaA__AFK74928

SEQ ID NO: 118554 - RNA, 1410 nt, Artificial Sequence
  derived and/or modified CDS sequence (opt2) from neuraminidase__InfluenzaA__AFK74938
augaaccccaaccagaagaucaucaccaucggcuccgucugcaugaccaucggcauggccaaccucauccuccagaucggcaacaucaucuccaucuggaucucccacuccauccagcucggcaaccagaaccagaucgagaccugcaaccaguccgucaucaccuacgagaacaacaccugggucaaccagaccuacgucaacaucuccaacaccaacuucgccgccggccaguccgucgucuccgucaagcucgccggcaacuccucccucugccccgucuccggcugggccaucuacuccaaggacaacuccauccgcaucggcuccaagggcgacgucuucgucauccgcgagcccuucaucuccugcuccccccucgagugccgcaccuucuuccucacccagggcgcccuccucaacgacaagcacuccaacggcaccaucaaggaccgcucccccuaccgcacccucauguccugccccaucggcgagguccccucccccuacaacucccgcuucgaguccgucgccugguccgccuccgccugccacgacggcaucaacuggcucaccaucggcaucuccggccccgacaacggcgccgucgccguccucaaguacaacggcaucaucaccgacaccaucaaguccuggcgcaacaacauccuccgcacccaggaguccgagugcgccugcgucaacggcuccugcuucaccgucaugaccgacggccccuccgacggccaggccuccuacaagaucuuccgcaucgagaagggcaagaucgucaaguccgucgagaugaacgcccccaacuaccacuacgaggagugcuccugcuaccccgacuccuccgagaucaccugcgucugccgcgacaacuggcacggcuccaaccgccccugggucuccuucaaccagaaccucgaguaccagaucggcuacaucugcuccggcaucuucggcgacaacccccgccccaacgacaacaccggcuccugcggccccgucuccuccaacggcgccaacggcgucaagggcuucuccuucaaguacggcaacggcgucuggaucggccgcaccaaguccaucuccucccgcaacggcuucgagaugaucugggaccccaacggcuggaccggcaccgacaacaacuucuccaucaagcaggacaucgucggcaucaacgagugguccggcuacuccggcuccuucguccagcaccccgagcucaccggccucgacugcauccgccccugcuucugggucgagcucauccgcggccgccccaaggagaacaccaucuggaccuccggcuccuccaucuccuucugcggcgucaacuccgacaccgucggcugguccuggcccgacggcgccgagcuccccuucaccaucgacaaguga

SEQ ID NO: 118555 - RNA, 1410 nt, Artificial Sequence; identical to SEQ ID NO: 112774
  derived and/or modified CDS sequence (opt2) from neuraminidase__InfluenzaA__AFK74948

SEQ ID NO: 118556 - RNA, 1410 nt, Artificial Sequence; identical to SEQ ID NO: 114665
  derived and/or modified CDS sequence (opt2) from neuraminidase__InfluenzaA__AFK74958

SEQ ID NO: 118557 - RNA, 1410 nt, Artificial Sequence; identical to SEQ ID NO: 115766
  derived and/or modified CDS sequence (opt2) from neuraminidase__InfluenzaA__AFK74968

SEQ ID NO: 118558 - RNA, 1410 nt, Artificial Sequence; identical to SEQ ID NO: 112774
  derived and/or modified CDS sequence (opt2) from neuraminidase__InfluenzaA__AFK74978

SEQ ID NO: 118559 - RNA, 1410 nt, Artificial Sequence; identical to SEQ ID NO: 114665
  derived and/or modified CDS sequence (opt2) from neuraminidase__InfluenzaA__AFK74988

SEQ ID NO: 118560 - RNA, 1410 nt, Artificial Sequence; identical to SEQ ID NO: 112774
  derived and/or modified CDS sequence (opt2) from neuraminidase__InfluenzaA__AFK74998

SEQ ID NO: 118561 - RNA, 1410 nt, Artificial Sequence; identical to SEQ ID NO: 115766
  derived and/or modified CDS sequence (opt2) from neuraminidase__InfluenzaA__AFK75008

SEQ ID NO: 118562 - RNA, 1410 nt, Artificial Sequence; identical to SEQ ID NO: 112774
  derived and/or modified CDS sequence (opt2) from neuraminidase__InfluenzaA__AFK75018

SEQ ID NO: 118563 - RNA, 1410 nt, Artificial Sequence; identical to SEQ ID NO: 112774
  derived and/or modified CDS sequence (opt2) from neuraminidase__InfluenzaA__AFK75028

SEQ ID NO: 118564 - RNA, 1410 nt, Artificial Sequence; identical to SEQ ID NO: 112774
  derived and/or modified CDS sequence (opt2) from neuraminidase__InfluenzaA__AFK75038

SEQ ID NO: 118565 - RNA, 1410 nt, Artificial Sequence; identical to SEQ ID NO: 112774
  derived and/or modified CDS sequence (opt2) from neuraminidase__InfluenzaA__AFK75048

SEQ ID NO: 118566 - RNA, 1410 nt, Artificial Sequence; identical to SEQ ID NO: 112774
  derived and/or modified CDS sequence (opt2) from neuraminidase__InfluenzaA__AFK75058

SEQ ID NO: 118567 - RNA, 1410 nt, Artificial Sequence; identical to SEQ ID NO: 115766
  derived and/or modified CDS sequence (opt2) from neuraminidase__InfluenzaA__AFK75068

SEQ ID NO: 118568 - RNA, 1410 nt, Artificial Sequence; identical to SEQ ID NO: 112774
  derived and/or modified CDS sequence (opt2) from neuraminidase__InfluenzaA__AFK75078

SEQ ID NO: 118569 - RNA, 1410 nt, Artificial Sequence; identical to SEQ ID NO: 112774
  derived and/or modified CDS sequence (opt2) from neuraminidase__InfluenzaA__AFK75088

SEQ ID NO: 118570 - RNA, 1410 nt, Artificial Sequence; identical to SEQ ID NO: 112774
  derived and/or modified CDS sequence (opt2) from neuraminidase__InfluenzaA__AFK75098

SEQ ID NO: 118571 - RNA, 1410 nt, Artificial Sequence; identical to SEQ ID NO: 114687
  derived and/or modified CDS sequence (opt2) from neuraminidase__InfluenzaA__AFK75108

SEQ ID NO: 118572 - RNA, 1410 nt, Artificial Sequence; identical to SEQ ID NO: 112774
  derived and/or modified CDS sequence (opt2) from neuraminidase__InfluenzaA__AFK77860

SEQ ID NO: 118573 - RNA, 1410 nt, Artificial Sequence; identical to SEQ ID NO: 112774
  derived and/or modified CDS sequence (opt2) from neuraminidase__InfluenzaA__AFK77870

SEQ ID NO: 118574 - RNA, 1410 nt, Artificial Sequence; identical to SEQ ID NO: 112774
  derived and/or modified CDS sequence (opt2) from neuraminidase__InfluenzaA__AFK77880

SEQ ID NO: 118575 - RNA, 1410 nt, Artificial Sequence
  derived and/or modified CDS sequence (opt2) from neuraminidase__InfluenzaA__AFK77890
augaaccccaaccagaagaucaucaccaucggcuccgucugcaugaccaucggcauggccaaccucauccuccagaucggcaacaucaucuccaucuggaucucccacuccauccagcucggcaaccagaaccagaucgagaccugcaaccaguccgucaucaccuacgagaacaacaccugggucaaccagaccuacgucaacaucuccaacaccaacuucgccgccggccaguccgucgucuccgucaagcucgccggcaacuccucccucugccccgucuccggcugggccaucuacuccaaggacaacuccauccgcaucggcuccaagggcgacgucuucgucauccgcgagcccuucaucuccugcuccccccucgagugccgcaccuucuuccucacccagggcgcccuccucaacgacaagcacuccaacggcaccaucaaggaccgcucccccuaccgcacccucauguccugccccaucggcgagguccccucccccuacaacucccgcuucgaguccgucgccugguccgccuccgccugccacgacggcaucaacuggcucaccaucggcaucuccggccccgacaacggcgccgucgccguccucaaguacaacggcaucaucaccgacaccaucaaguccuggcgcaacaacauccuccgcacccaggaguccgagugcgccugcgucaacggcuccugcuucaccgucaugaccgacggccccuccgacggccaggccuccuacaagaucuuccgcaucgagaagggcaagaucgucaaguccgucgagaugaacgcccccaacuaccacuacgaggagugcuccugcuaccccgacuccuccgagaucaccugcgucugccgcgacaacuggcacggcuccaaccgccccugggucuccuucaaccagaaccucgaguaccagaucggcuacaucugcuccggcaucuucggcgacaacccccgccccaacgacaagaccggcuccugcggccccgucuccuccaacggcgccaacggcgucaagggcuucuccuucaaguacggcaacggcgucuggaucggccgcaccaagggcaucuccucccgcaacggcuucgagaugaucugggaccccaacggcuggaccggcaccgacaacaacuucuccaucaagcaggacaucgucggcaucaacgagugguccggcuacuccggcuccuucguccagcaccccgagcucaccggccucgacugcauccgccccugcuucugggucgagcucauccgcggccgccccaaggagaacaccaucuggaccuccggcuccuccaucuccuucugcggcgucaacuccgacaccgucggcugguccuggcccgacggcgccgagcuccccuucaccaucgacaaguga

SEQ ID NO: 118576 - RNA, 1410 nt, Artificial Sequence
  derived and/or modified CDS sequence (opt2) from neuraminidase__InfluenzaA__AFK77900
augaaccccaaccagaagaucaucaccaucggcuccgucugcaugaccaucggcauggccaaccucauccuccagaucggcaacaucaucuccaucuggaucucccacuccauccagaucggcaaccagaaccagaucgagaccugcaaccaguccgucaucaccuacgagaacaacaccugggucaaccagaccuacgucaacaucuccaacaccaacuucgccgccggccaguccgucgccuccgucaagcucgccggcaacuccucccucugccccgucuccggcugggccaucuacuccaaggacaacuccauccgcaucggcuccaagggcgacgucuucgucauccgcgagcccuucaucuccugcuccccccucgagugccgcaccuucuuccucacccagggcgcccuccucaacgacaagcacuccaacggcaccaucaaggaccgcucccccuaccgcgcccucauguccugccccaucggcgagguccccucccccuacaacucccgcuucgaguccgucgccugguccgccuccgccugccacgacggcaucaacuggcucaccaucggcaucuccggccccgacaacggcgccgucgccguccucaaguacaacggcaucaucaccgacaccaucaaguccuggcgcaacaacauccuccgcacccaggaguccgagugcgccugcgucaacggcuccugcuucaccaucaugaccgacggccccuccgacggccaggccuccuacaagaucuuccgcaucgagaagggcaagaucgucaaguccgucgagaugaacgcccccaacuaccacuacgaggagugcuccugcuaccccgacuccuccgagaucaccugcgucugccgcgacaacuggcacggcuccaaccgccccugggucuccuucaaccagaaccucgaguaccagaucggcuacaucugcuccggcaucuucggcgacaacccccgccccaacgacaagaccggcuccugcggccccgucuccuccaacggcgccaacggcgucaagggcuucuccuucaaguacggcaacggcgucuggaucggccgcaccaaguccaucuccucccgcaagggcuucgagaugaucugggaccccaacggcuggaccggcaccgacaacaacuucuccaucaagcaggacaucgucggcaugaacgagugguccggcuacuccggcuccuucguccagcaccccgagcucaccggccucgacugcauccgccccugcuucugggucgagcucauccgcggccgccccaaggagaacaccaucuggaccuccggcuccuccaucuccuucugcggcgucaacuccgacaccgucggcugguccuggcccgacggcgccgagcuccccuucaccaucgacaaguga

SEQ ID NO: 118577 - RNA, 1410 nt, Artificial Sequence
  derived and/or modified CDS sequence (opt2) from neuraminidase__InfluenzaA__AFK78031
augaaccccaaccagaagaucaucaccaucggcuccgucugcaugaccaucggcauggccaaccucauccuccagaucggcaacaucaucuccaucuggaucucccacuccauccagcucggcaaccagaaccagaucgagaccugcaaccaguccgucaucaccuacgagaacaacaccugggucaaccagaccuacgucaacaucuccaacaccaacuucgccgccggccaguccgucgccuccgucaagcucgccggcaacuccucccucugccccgucuccggcugggccaucuacuccaaggacaacuccauccgcaucggcuccaagggcgacgucuucgucauccgcgagcccuucaucuccugcuccccccucgagugccgcaccuucuuccucacccagggcgcccuccucaacgacaagcacuccaacggcaccaucaaggaccgcucccccuaccgcgcccucauguccugccccaucggcgagguccccucccccuacaacucccgcuucgaguccgucgccugguccgccuccgccugccacgacggcaucaacuggcucaccaucggcaucuccggccccgacaacggcgccgucgccguccucaaguacaacggcaucaucaccgacaccaucaaguccuggcgcaacaacauccuccgcacccaggaguccgagugcgccugcgucaacggcuccugcuucaccaucaugaccgacggccccuccgacggccaggccuccuacaagaucuuccgcaucgagaagggcaagaucgucaaguccgucgagaugaacgcccccaacuaccacuacgaggagugcuccugcuaccccgacuccuccgagaucaccugcgucugccgcgacaacuggcacggcuccaaccgccccugggucuccuucaaccagaaccucgaguaccagaucggcuacaucugcuccggcaucuucggcgacaacccccgccccaacgacaagaccggcuccugcggccccgucuccuccaacggcgccaacggcgucaagggcuucuccuucaaguacggcaacggcgucuggaucggccgcaccaaguccaucuccucccgcaagggcuucgagaugaucugggaccccaacggcuggaccggcaccgacaacaacuucuccaucaagcaggacaucgucggcaugaacgagugguccggcuacuccggcuccuucguccagcaccccgagcucaccggccucgacugcauccgccccugcuucugggucgagcucauccgcggccgccccaaggagaacaccaucuggaccuccggcuccuccaucuccuucugcggcgucaacuccgacaccgucggcugguccuggcccgacggcgccgagcuccccuucaccaucgacaaguga

SEQ ID NO: 118578 - RNA, 1410 nt, Artificial Sequence; identical to SEQ ID NO: 112774
  derived and/or modified CDS sequence (opt2) from neuraminidase__InfluenzaA__AFK78190

SEQ ID NO: 118579 - RNA, 1362 nt, Artificial Sequence
  derived and/or modified CDS sequence (opt2) from neuraminidase__InfluenzaA__AFM68957
augaaccccaaccagaagaucaucaccaucggcuccaucugcauggucgucggcaucaucucccucauccuccagaucggcaacaucaucuccaucuggaucucccacuccauccagaccggcaaccagaaccacaccggcaucugcaaccagggcaucaucacccacaacgucgucgccggccaggacuccaccuccgucauccucaccggcaacuccucccucugccccauccgcggcugggccauccacuccaaggacaacggcauccgcaucggcuccaagggcgacgucuucgucauccgcgagcccuucaucuccugcucccaccucgagugccgcaccuucuuccucacccagggcgcccuccucaacgacaagcacuccuacggcaccuccaaggaccgcucccccuaccgcgcccucauguccugccccgucggcgaggcccccucccccuacaacucccgcuucgaguccgucgccugguccgccuccgccugccacgacggcaugggcuggcucaccaucggcaucuccggccccgacaacggcgccgucgccguccucaaguacaacggcaucaucaccgagaccaucaaguccuggcgcaagaagauccuccgcacccaggaguccgagugcaccugcgucaacggcuccugcuucaccaucaugaccgacggccccuccgacggccucgccuccuacaagaucuucaagaucgagaagggcaaggucaccaaguccaucgagcucaacgcccccaacucccacuacgaggagugcuccugcuaccccgacaccggcaaggucaugugcgucugccgcgacaacuggcacggcuccaaccgccccugggucuccuucgaccagaaccucgacuaccagaucggcuacaucugcuccggcgucuucggcgacaacccccgccccaaggacggcaccggcuccugcggccccgucuccgccgacggcgccaacggcgucaagggcuucuccuaccgcuacggcaacggcgucuggaucggccgcaccaaguccgacuccucccgccacggcuucgagaugaucugggaccccaacggcuggaccgagaccgacucccgcuucuccguccgccaggacgucgucgccaugaccgaccgcuccggcuacuccggcuccuucguccagcaccccgagcucaccggccucgacugcaugcgccccugcuucugggucgagcucauccgcggccagcccgaggaggagaccaucuggaccuccggcuccaucaucuccuucugcggcgucaacuccgacaccgucgacugguccuggcccgacggcgccgagcuccccuucaccaucgacaaguga

SEQ ID NO: 118580 - RNA, 1410 nt, Artificial Sequence
  derived and/or modified CDS sequence (opt2) from neuraminidase__InfluenzaA__AFM68968
augaaccccaaccagaagaucaucaccaucggcuccgucucccucaccaucgccaccaucugcuuccucaugcagaucgccauccucgucaccaccgucacccuccacuucaagcaguacgagugcgacucccccgccaacaaccaggucaugcccugcgagcccaucaucaucgagcgcaacaucaccgagaucgucuaccucaccaacaccaccaucgagaaggagaucugccccaagcucgucgaguaccgcaacugguccaagccccagugcaagaucaccggcuucgcccccuucuccaaggacaacuccauccgccucuccgccggcggcgacaucugggucacccgcgagcccuacgucuccugcgaccccggcaagugcuaccaguucgcccucggccagggcaccacccucgacaacaagcacuccaacgacaccauccacgaccgcaccccccaccgcacccuccucaugaacgagcucggcguccccuuccaccucggcacccgccaggucugcaucgccugguccuccuccuccugccacgacggcaaggccuggcuccacgucugcgucaccggcuacgacaagaacgccaccgccuccuucaucuacgacggccgccucgucgacuccaucggcuccugguccaagaacauccuccgcacccaggaguccgagugcgucugcaucaacggcaccugcaccgucgucaugaccgacggcuccgccuccgagcgcgccgacaccaagauccucuucaucgaggagggcaagaucguccacaucuccccccucuccggcuccgcccagcacgucgaggagugcuccugcuacccccgcuaccccggcguccgcugcgucugccgcgacaacuggaagggcuccaaccgccccaucgucgacaucaacgucaaggacuacuccaucgccuccuccuacgucugcuccggccucgucggcgacaccccccgcaagaacgaccgcuccuccuccuccuacugccgcaaccccaacaacgagaagggcaaccacggcgucaagggcugggccuucgacgacggcaacgacgucuggaugggccgcaccaucuccgaggagucccgcuccggcuacgagaccuucaaggucaucggcggcugguccacccccaacuccaagcuccagaucaaccgccaggucaucgucgacuccgacaaccgcuccggcuacuccggcaucuucuccgucgagggcaaguccugcaucaaccgcugcuucuacgucgagcucauccgcggccgcgagcaggagacccgcgucugguggaccuccaacuccaucgucgucuucugcggcaccuccggcaccuacggcaccggcuccuggcccgacggcgccgacaucaaccucaugcccaucuga

SEQ ID NO: 118581 - RNA, 1410 nt, Artificial Sequence
  derived and/or modified CDS sequence (opt2) from neuraminidase__InfluenzaA__AFM68979
augaaccccaaccagaagaucaucaccaucggcuccgucucccucaccaucgccaccaucugcuuccucaugcagaucgccauccucgucaccaccgucacccuccacuucaagcaguacgagugcuccuccccccccaacaaccaggucaugcccugcgagcccaucaucaucgagcgcaacaucaccgagaucgucuaccucaccaacaccaccaucgagaaggagaucugccccaagcucgucgaguaccgcaacugguccaagccccagugcaagaucaccggcuucgcccccuucuccaaggacaacuccauccgccucuccgccggcggcggcaucugggucacccgcgagcccuacgucuccugcgaccccggcaagugcuaccaguucgcccucggccagggcaccacccucgacaacaagcacuccaacgacaccauccacgaccgcacccccuaccgcacccuccucaugaacgagcucggcguccccuuccaccucggcacccgccaggucugcaucgccugguccuccuccuccugccacgacggcaaggccuggcuccacgucugcgucaccggcuacgacaagaacgccaccgccuccuucaucuacgacggccgccucgucgacuccaucggcuccugguccaagaacauccuccgcacccaggaguccgagugcgucugcaucaacggcaccugcaccgucgucaugaccgacggcuccgccuccgagcgcgccgacaccaagauccucuucaucgaggagggcaagaucguccacaucuccccccucuccggcuccgcccagcacgucgaggagugcuccugcuacccccgcuaccccggcguccgcugcgucugccgcgacaacuggaagggcuccaaccgccccgucgucgacaucaacgucaaggacuacuccaucgucuccuccuacgucugcuccggccucgucggcgacaccccccgcaagaacgaccgcuccuccuccuccuacugccgcaaccccaacaacgagaagggcaaccacggcgucaagggcugggccuucgacgacggcaacgacgucuggaugggccgcaccaucuccgaggagucccgcuccggcuacgagaccuucaaggucaucggcggcugguccacccccaacuccaagcuccagaucaaccgccaggucaucgucgacuccgacaaccgcuccggcuacuccggcaucuucuccgucgagggcaaguccugcaucaaccgcugcuucuacgucgagcucauccgcggccgcgagcaggagacccgcgucugguggaccuccaacuccaucgucgucuucugcggcaccuccggcaccuacggcaccggcuccuggcccgacggcgccgacaucaaccucaugcccaucuga

SEQ ID NO: 118582 - RNA, 1410 nt, Artificial Sequence; identical to SEQ ID NO: 118581
  derived and/or modified CDS sequence (opt2) from neuraminidase__InfluenzaA__AFM68990

SEQ ID NO: 118583 - RNA, 1410 nt, Artificial Sequence; identical to SEQ ID NO: 110849
  derived and/or modified CDS sequence (opt2) from neuraminidase__InfluenzaA__AFM71723

SEQ ID NO: 118584 - RNA, 1410 nt, Artificial Sequence; identical to SEQ ID NO: 118171
  derived and/or modified CDS sequence (opt2) from neuraminidase__InfluenzaA__AFM71734

SEQ ID NO: 118585 - RNA, 1410 nt, Artificial Sequence; identical to SEQ ID NO: 117985
  derived and/or modified CDS sequence (opt2) from neuraminidase__InfluenzaA__AFM71745

SEQ ID NO: 118586 - RNA, 1410 nt, Artificial Sequence; identical to SEQ ID NO: 114645
  derived and/or modified CDS sequence (opt2) from neuraminidase__InfluenzaA__AFM71771

SEQ ID NO: 118587 - RNA, 1410 nt, Artificial Sequence; identical to SEQ ID NO: 117671
  derived and/or modified CDS sequence (opt2) from neuraminidase__InfluenzaA__AFM71782

SEQ ID NO: 118588 - RNA, 1410 nt, Artificial Sequence; identical to SEQ ID NO: 117671
  derived and/or modified CDS sequence (opt2) from neuraminidase__InfluenzaA__AFM71794

SEQ ID NO: 118589 - RNA, 1410 nt, Artificial Sequence; identical to SEQ ID NO: 112635
  derived and/or modified CDS sequence (opt2) from neuraminidase__InfluenzaA__AFM71805

SEQ ID NO: 118590 - RNA, 1410 nt, Artificial Sequence
  derived and/or modified CDS sequence (opt2) from neuraminidase__InfluenzaA__AFM71827
augaaccccaaccagaagaucaucaccaucggcuccgucucccucaccaucuccaccaucugcuucuucaugcagaucgccauccucaucaccaccgucacccuccacuucaagcaguacgaguucaacuccccccccaacaaccaggucaugcucugcgagcccaccaucaucgagcgcaacaucaccgagaucgucuaccucaccaacaccaccaucgagaaggagaucugccccaagcucgccgaguaccgcaacugguccaagccccagugcgacaucaccggcuucgcccccuucuccaaggacaacuccauccgccucuccgccggcggcgacaucugggucacccgcgagcccuacgucuccugcgaccccgacaagugcuaccaguucgcccucggccagggcaccacccucaacaacguccacuccaacaacaccguccgcgaccgcacccccuaccgcacccuccucaugaacgagcucggcguccccuuccaccucggcaccaagcaggucugcaucgccugguccuccuccuccugccacgacggcaaggccuggcuccacgucugcaucaccggcgacgacaagaacgccaccgccuccuucaucuacaacggccgccucgucgacuccgucgucuccugguccaaggagauccuccgcacccaggaguccgagugcgucugcaucaacggcaccugcaccgucgucaugaccgacggcuccgccuccggcaaggccgacaccaagauccucuucaucgaggagggcaagaucguccacaccuccacccucuccggcuccgcccagcacgucgaggagugcuccugcuacccccgcuaccccggcguccgcugcgucugccgcgacaacuggaagggcuccaaccgccccaucgucgacaucaacaucaaggaccacuccaucgucuccuccuacgucugcuccggccucgucggcgacaccccccgcaagaacgacuccuccuccuccucccacugccucgaccccaacaacgaggagggcggccacggcgucaagggcugggccuucgacgacggcaaggacgucuggaugggccgcaccaucuccgagaagucccgccucggcuacgagaccuucaaggucaucgagggcugguccaaccccaaguccaagcuccagaucaaccgccaggucaucgucgaccgcggcaaccgcuccggcuacuccggcaucuucuccgucgagggcaaguccugcaucaaccgcugcuucuacgucgagcucauccgcggccgcaaggaggagaccgagguccucuggaccuccaacuccaucgucgucuucugcggcaccuccggcaccuacggcaccggcuccuggcccgacggcgccgacaucaaccucaugcccaucuga

SEQ ID NO: 118591 - RNA, 1410 nt, Artificial Sequence; identical to SEQ ID NO: 115554
  derived and/or modified CDS sequence (opt2) from neuraminidase__InfluenzaA__AFM71838

SEQ ID NO: 118592 - RNA, 1365 nt, Artificial Sequence; identical to SEQ ID NO: 111755
  derived and/or modified CDS sequence (opt2) from neuraminidase__InfluenzaA__AFM71849

SEQ ID NO: 118593 - RNA, 1410 nt, Artificial Sequence; identical to SEQ ID NO: 110131
  derived and/or modified CDS sequence (opt2) from neuraminidase__InfluenzaA__AFM71860

SEQ ID NO: 118594 - RNA, 1410 nt, Artificial Sequence; identical to SEQ ID NO: 110363
  derived and/or modified CDS sequence (opt2) from neuraminidase__InfluenzaA__AFM71871

SEQ ID NO: 118595 - RNA, 1410 nt, Artificial Sequence; identical to SEQ ID NO: 110363
  derived and/or modified CDS sequence (opt2) from neuraminidase__InfluenzaA__AFM71882

SEQ ID NO: 118596 - RNA, 1410 nt, Artificial Sequence
  derived and/or modified CDS sequence (opt2) from neuraminidase__InfluenzaA__AFM71893
augaaccccaaccagaagaucaucaccaucggcuccgucucccucaccaucgccaccgucugcuuccucaugcagaucgccauccucgccaccaccgucacccuccacuucaagcagcacgagugcgacucccccgccuccaaccaggucaugcccugcgagcccaucaucaucgagcgcaacaucaccgagaucgucuaccucaacaacaccaccaucgagaaggagaucugccccgaggucgucgaguaccgcaacugguccaagccccagugccagaucaccggcuucgcccccuucuccaaggacaacuccauccgccucuccgccggcggcgacaucugggucacccgcgagcccuacgucuccugcgaccccggcaagugcuaccaguucgcccucggccagggcaccacccucgacaacaagcacuccaacggcaccauccacgaccgcaucccccaccgcacccuccucaugaacgagcucggcguccccuuccaccucggcaccaagcaggucugcgucgccugguccuccuccuccugccacgacggcaaggccuggcuccacgucugcgucaccggcgacgaccgcaacgccaccgccuccuucaucuacgacggccgccucgucgacuccaucggcuccuggucccagaacauccuccgcacccaggaguccgagugcgucugcaucaacggcaccugcaccgucgucaugaccgacggcuccgccuccggccgcgccgacacccgcauccucuucaucaaggagggcaagaucguccacaucuccccccucuccggcuccgcccagcacaucgaggagugcuccugcuacccccgcuaccccgacguccgcugcaucugccgcgacaacuggaagggcuccaaccgccccgucaucgacaucaacauggaggacuacuccaucgacuccuccuacgucugcuccggccucgucggcgacaccccccgcaacgacgacuccuccuccaacuccaacugccgcgaccccaacaacgagcgcggcaaccccggcgucaagggcugggccuucgacaacggcgacgacgucuggaugggccgcaccaucaacaaggagucccgcuccggcuacgagaccuucaaggucaucggcggcugguccacccccaacuccaagucccaggucaaccgccaggucaucgucgacaacaacaacugguccggcuacuccggcaucuucuccgucgagggcaaguccugcaucaaccgcugcuucuacgucgagcucauccgcggccgcccccaggagacccgcgucugguggaccuccaacuccaucgucgucuucugcggcaccuccggcaccuacggcaccggcuccuggcccgacggcgccaacaucaacuucaugcccaucuga

SEQ ID NO: 118597 - RNA, 1410 nt, Artificial Sequence
  derived and/or modified CDS sequence (opt2) from neuraminidase__InfluenzaA__AFM71904
augaaccccaaccagaagaucaucaccaucggcuccgucucccucaccaucgccaccgucugcuuccucaugcagaucgccauccucgccaccaccgucacccuccacuucaagcagcacgagugcgacucccccgccuccaaccaggucaugcccugcgagcccaucaucaucgagcgcaacaucaccgagaucgucuaccucaacaacaccaccaucgagaaggagaucugccccgaggucgucgaguaccgcaacugguccaagccccagugccagaucaccggcuucgcccccuucuccaaggacaacuccauccgccucuccgccggcggcgacaucugggucacccgcgagcccuacgucuccugcgaccccggcaagugcuaccaguucgcccucggccagggcaccacccucgacaacaagcacuccaacgucaccauccacgaccgcaucccccaccgcacccuccucaugaacgagcucggcguccccuuccaccucggcaccaagcaggucugcgucgccugguccuccuccuccugccacgacggcaaggccuggcuccacgucugcgucaccggcgacgaccgcaacgccaccgccuccuucaucuacgacggccgccucgucgacuccaucggcuccuggucccagaacauccuccgcacccaggaguccgagugcgucugcaucaacggcaccugcaccgucgucaugaccgacggcuccgccuccggccgcgccgacacccgcauccucuucaucaaggagggcaagaucguccacaucuccccccucuccggcuccgcccagcacaucgaggagugcuccugcuacccccgcuaccccgacguccgcugcaucugccgcgacaacuggaagggcuccaaccgccccgucaucgacaucaacauggaggacuacuccaucgacuccggcuacgucugcuccggccucgucggcgacaccccccgcaacgacgacuccuccuccaacuccaacugccgcgaccccaacaacgagcgcggcaaccccggcgucaagggcugggccuucgacaacggcgacgacgucuggaugggccgcaccaucaacaaggagucccgcuccggcuacgagaccuucaaggucaucggcggcugguccacccccaacuccaagucccaggucaaccgccaggucaucgucgacaacaacaacugguccggcuacuccggcaucuucuccgucgagggcaaguccugcaucaaccgcugcuucuacgucgagcucauccgcggccgcccccaggagacccgcgucugguggaccuccaacuccaucgucgucuucugcggcaccuccggcaccuacggcaccggcuccuggcccgacggcgccaacaucaacuucaugcccaucuga

SEQ ID NO: 118598 - RNA, 1410 nt, Artificial Sequence; identical to SEQ ID NO: 111008
  derived and/or modified CDS sequence (opt2) from neuraminidase__InfluenzaA__AFM71915

SEQ ID NO: 118599 - RNA, 1410 nt, Artificial Sequence; identical to SEQ ID NO: 111008
  derived and/or modified CDS sequence (opt2) from neuraminidase__InfluenzaA__AFM71926

SEQ ID NO: 118600 - RNA, 1410 nt, Artificial Sequence; identical to SEQ ID NO: 111008
  derived and/or modified CDS sequence (opt2) from neuraminidase__InfluenzaA__AFM71937

SEQ ID NO: 118601 - RNA, 1410 nt, Artificial Sequence; identical to SEQ ID NO: 118016
  derived and/or modified CDS sequence (opt2) from neuraminidase__InfluenzaA__AFM71948

SEQ ID NO: 118602 - RNA, 1410 nt, Artificial Sequence; identical to SEQ ID NO: 118016
  derived and/or modified CDS sequence (opt2) from neuraminidase__InfluenzaA__AFM71959

SEQ ID NO: 118603 - RNA, 1410 nt, Artificial Sequence
  derived and/or modified CDS sequence (opt2) from neuraminidase__InfluenzaA__AFM71970
augaaccccaaccagaagaucaucaccaucggcuccgucucccucaccaucgccaccaucugcuuccucaugcagaucgccauccucgucaccaccgucacccuccacuucaagcaguacgagugcgacucccccgccaacaaccaggucaugcccuacgagcccaucaucaucgagcgcaacaucaccgagaucgucuaccucaccaacaccaccaucgagaaggagaucugccccaagcucgucgaguaccgcaacugguccaagccccagugcaagaucaccggcuucgcccccuucuccaaggacaacuccauccgccucuccgccggcggcgacaucugggucacccgcgagcccuacgucuccugcgaccccggcaagugcuaccaguucgcccucggccagggcaccacccucgagaacaagcacuccaacgacaccauccacgaccgcaccccccaccgcacccuccucaugaacgagcucggcguccccuuccaccucggcacccgccaggucugcaucgccugguccuccuccuccugccacgacggcaaggccuggcuccacgucugcgucaccggcuacgacaagaacgccaccgccuccuucaucuacgacggccgccucgucgacuccaucggcuccuggucccagaacauccuccgcacccaggaguccgagugcgucugcaucaacggcaccugcaccgucgucaugaccgacggcuccgccuccggccgcgccgacaccaagauccucuucaucgaggagggcaagaucguccacaucuccccccucuccggcuccgcccagcacgucgaggagugcuccugcuacccccgcuaccccggcguccgcugcaucugccgcgacaacuggaagggcuccaaccgccccgucgucgacaucaacgucaaggacuacuccaucgacuccuccuacgucugcuccggccucgucggcgacaccccccgcaagaacgaccgcuccuccuccuccuacugccgcaaccccaacaacgagaagggcaaccacggcgucaagggcugggccuucgacgacggcaacgacgucuggaugggccgcaccaucuccgaggacucccgcuccggcuacgagaccuucaaggucaucggcggcugguccacccccaacuccaagcuccagaucaaccgccaggucaucgucgacuccgccaaccgcuccggcuacuccggcaucuucuccgucgagggcaaguccugcaucaaccgcugcuucuacgucgagcucauccgcggccgcgagcaggagacccgcgucugguggaccuccaacuccaucgucgucuucugcggcaccuccggcaccuacggcaccggcuccuggcccgacggcgccgacaucaaccucaugcccaucuga

SEQ ID NO: 118604 - RNA, 1410 nt, Artificial Sequence; identical to SEQ ID NO: 118024
  derived and/or modified CDS sequence (opt2) from neuraminidase__InfluenzaA__AFM71981

SEQ ID NO: 118605 - RNA, 1410 nt, Artificial Sequence
  derived and/or modified CDS sequence (opt2) from neuraminidase__InfluenzaA__AFM71992
augaaccccaaccagaagaucaucaccaucggcuccgucucccucaccaucuccaccaucugcuucuucaugcagaucgccauccucaucaccaccgucacccuccacuucaagcaguacgaguucaacuccccccccaacaaccaggucaugcucugcgagcccaccaucaucgagcgcaacaucaccgagaucgucuaccucaccaacaccaccaucgagaaggagaucugccccaagcucgccgaguaccgcaacugguccaagccccagugcgacaucaccggcuucgcccccuucuccaaggacaacuccauccgccucuccgccggcggcgacaucugggucacccgcgagcccuacgucuccugcgaccccgacaagugcuaccaguucgcccucggccagggcaccacccucaacaacguccacuccaacaacaccguccgcgaccgcacccccuaccgcacccuccucaugaacgagcucggcguccccuuccaccucggcaccaagcaggucugcaucgccugguccuccuccuccugccacgacggcaaggccuggcuccacgucugcaucaccggcgacgacaagaacgccaccgccuccuucaucuacaacggccgccucgucgacuccgucgucuccuggucccaggagauccuccgcacccaggaguccgagugcgucugcaucaacggcaccugcaccgucgucaugaccgacggcuccgccuccggcaaggccgacaccaagauccucuucaucgaggagggcaagaucguccacaccuccacccucuccggcuccgcccagcacgucgaggagugcuccugcuacccccgcuaccccggcguccgcugcgucugccgcgacaacuggaagggcuccaaccgccccaucgucgacaucaacaucaaggaccacuccaucgucuccuccuacgucugcuccggccucgucggcgacaccccccgcaagaacgacuccuccuccuccucccacugccucgaccccaacaacgaggagggcggccacggcgucaagggcugggccuucgacgacggcaacgacgucuggaugggccgcaccaucaacgagaccucccgccucggcuacgagaccuucaaggucaucgagggcugguccaaccccaaguccaagcuccagaugaaccgccaggucaucgucgaccgcggcaaccgcuccggcuacuccggcaucuucuccgucgagggcaaguccugcaucaaccgcugcuucuacgucgagcucauccgcggccgcaaggaggagaccgagguccucuggaccuccaacuccaucgucgucuucugcggcaccuccggcaccuacggcaccggcuccuggcccgacggcgccgaccucaaccucaugcccaucuga

SEQ ID NO: 118606 - RNA, 1410 nt, Artificial Sequence; identical to SEQ ID NO: 118580
  derived and/or modified CDS sequence (opt2) from neuraminidase__InfluenzaA__AFM72013

SEQ ID NO: 118607 - RNA, 1365 nt, Artificial Sequence; identical to SEQ ID NO: 111755
  derived and/or modified CDS sequence (opt2) from neuraminidase__InfluenzaA__AFM72024

SEQ ID NO: 118608 - RNA, 1410 nt, Artificial Sequence; identical to SEQ ID NO: 115031
  derived and/or modified CDS sequence (opt2) from neuraminidase__InfluenzaA__AFM72035

SEQ ID NO: 118609 - RNA, 1410 nt, Artificial Sequence; identical to SEQ ID NO: 115031
  derived and/or modified CDS sequence (opt2) from neuraminidase__InfluenzaA__AFM72046

SEQ ID NO: 118610 - RNA, 1413 nt, Artificial Sequence
  derived and/or modified CDS sequence (opt2) from neuraminidase__InfluenzaA__AFM72057
augaaccccaaccagaagaucaucaccaucggcuccaucugcaccaccaucggcaucaucucccucauccuccagaucggcaacaucaucuccaucugggucucccacuccauccagaccggcucccagaaccacaccggcaucugcaaccagcgcaucaucaccuacgagaacuccaccugggucaaccagaccuacgucaacaucaacaacaccaacgucgucgccggcaaggacaccaccuccgucacccucgccggcaacuccucccucugccccauccgcggcugggccaucuacuccaaggacaacuccauccgcaucggcuccaagggcgacgucuucgucauccgcgagcccuucaucuccugcucccaccucgagugccgcaccuucuuccucacccagggcgcccuccucaacgacaagcacuccaacggcaccgucaaggaccgcucccccuaccgcgcccucauguccugccccaucggcgaggcccccucccccuacaacucccgcuucgaguccgucgccugguccgccuccgccugccacgacggcaugggcuggcucaccaucggcaucuccggccccgacgacggcgccgucgccguccucaaguacaacggcaucaucaccgagaccaucaaguccuggcgcaagcgcauccuccgcacccaggaguccgagugcgucugcgucaacggcuccugcuucaccaucaugaccgacggccccuccaacggccccgccuccuaccgcaucuucaagaucgagaagggcaagaucaccaaguccaucgagcucgacgcccccaacucccacuacgaggagugcuccugcuaccccgacaccggcaccgucaugugcgucugccgcgacaacuggcacggcuccaaccgccccugggucuccuucaaccagaaccucgacuaccagaucggcuacaucugcuccggcgucuucggcgacaacccccgccccaaggacggcaagggcuccugcgaccccgucaccgucgacggcgccgacggcgucaagggcuucuccuaccgcuacggcaacggcgucuggaucggccgcaccaaguccaacuccucccgcaagggcuucgagaugaucugggaccccaacggcuggaccgacaccgacuccaacuuccucgucaagcaggacgucgucgccaugaccgacugguccggcuacuccggcuccuucguccagcaccccgagcucaccggccucgacugcaugcgccccugcuucugggucgagcucauccgcggccgcccccgcgagaagaccaccaucuggaccuccggcuccuccaucuccuucugcggcgucaacuccgacaccgccaacugguccuggcccgacggcgccgagcuccccuucaccaucgacaaguga

SEQ ID NO: 118611 - RNA, 1413 nt, Artificial Sequence; identical to SEQ ID NO: 111095
  derived and/or modified CDS sequence (opt2) from neuraminidase__InfluenzaA__AFM72068

SEQ ID NO: 118612 - RNA, 1410 nt, Artificial Sequence
  derived and/or modified CDS sequence (opt2) from neuraminidase__InfluenzaA__AFM72090
augaaccccaaccagaagaucaucaccaucggcuccgucucccucaccaucgccaccaucugcuuccucaugcagaucgccauccucgucaccaccgucacccuccacuucaagcaguacgagugcuccuccccccccaacaaccaggucaugcccugcgagcccaucaucaucgagcgcaacaucaccgagaucgucuaccucaccaacaccaccaucgagaaggagaucugccccaagcucgucgaguaccgcaacugguccaagccccagugcaagaucaccggcuucgcccccuucuccaaggacaacuccauccgccucuccgccggcggcgacaucugggucacccgcgagcccuacgucuccugcgaccccggcaagugcuaccaguucgcccucggccagggcaccacccucaacaacaagcacuccaacgacaccguccacgaccgcacccccuaccgcacccuccucaugaacgagcucggcguccccuuccaccucggcaccaagcaggucugcaucgccugguccuccuccuccugccacgacggcaaggccuggcuccacgucugcgucaccggccacgacaagaacgccaccgccuccuucaucuacgacggccgccucgucgacuccaucggcuccugguccaagaacauccuccgcacccaggaguccgagugcgucugcaucaacggcaccugcaccgucgucaugaccgacggcuccgccuccgagcgcgccgacaccaagauccucuucaucgaggagggcaagaucguccacaucuccccccucuccggcuccgcccagcacgucgaggagugcuccugcuacccccgcuaccccggcguccgcugcgucugccgcgacaacuggaagggcuccaaccgccccaucgucgacaucaacgucaaggacuacuccaucgucuccuccuacgucugcuccggccucgucggcgacaccccccgcaagaacgaccgcuccuccuccuccuacugccgcaaccccaacaacgagaagggcaaccacggcgucaagggcugggccuucgacgacggcaacgacgucuggaugggccgcaccaucggcgaggagcuccgccucggcuacgagaccuucaaggucaucggcggcugguccacccccaacuccaagcuccagaucaaccgccaggucaucgucgacuccaagaaccgcuccggcuacuccggcaucuucuccgucgagggcaaguccugcaucaaccgcugcuucuacgucgagcucauccgcggccgcgagcaggagacccgcgucugguggaccuccaacuccaucgucgucuucugcggcaccuccggcaccuacggcaccggcuccuggcccgacggcgccgacaucaaccucaugcccaucuga

SEQ ID NO: 118613 - RNA, 1410 nt, Artificial Sequence
  derived and/or modified CDS sequence (opt2) from neuraminidase__InfluenzaA__AFM72101
augaaccccaaccagaagaucaucaccaucggcuccgucucccucaccaucgccaccaucugcuuccucaugcagaucgccauccucgucaccaccgucacccuccacuucaagcaguacgagugcuccuccccccccaacaaccaggccaugcccugcgagcccaccaucaucgagcgcaacaucaccgagaucgucuaccucaccaacaccaccaucgagaaggagaucugccccaagcucgucgaguaccgcaacugguccaagccccagugcaagaucaccggcuucgcccccuucuccaaggacaacuccauccgccucuccgccggcggcgacaucugggucacccgcgagcccuacgucuccugcgaccccggcaagugcuaccaguucgcccucggccagggcaccacccucaacaaccgccacuccaacgacaccguccacgaccgcacccccuaccgcacccuccucaugaacgagcucggcguccccuuccaccucggcaccaagcaggucugcaucgccugguccuccuccuccugccacgacggcaaggccuggcuccacgucugcgucaccggccacgacaagaacgccaccgccuccuucaucuacgacggccgccucgucgacuccaucggcuccugguccaagaacauccuccgcacccaggaguccgagugcgucugcaucaacggcaccugcaccgucgucaugaccgacggcuccgccuccgagcgcgccgacaccaagauccucuucaucgaggagggcaagaucguccacaucuccccccucuccggcuccgcccagcacgucgaggagugcuccugcuacccccgcuaccccggcguccgcugcgucugccgcgacaacuggaagggcuccaaccgccccaucgucgacaucaacgucaaggacuacuccaucgucuccuccuacgucugcuccggccucgucggcgacaccccccgcaagaacgaccgcuccuccuccuccuacugccgcaaccccaacaacgagaagggcucccacggcgucaagggcugggccuucgacgacggcaacgacgucuggaugggccgcaccaucggcgaggagcuccgcuccggcuacgagaccuucaaggucaucggcggcugguccacccccaacuccaagcuccagaucaaccgccaggucaucgucgacuccggcaaccgcuccggcuacuccggcaucuucuccgucgagggcaaguccugcaucaaccgcugcuucuacgucgagcucauccgcggccgcgagcaggagacccgcgucugguggaccuccaacuccaucgucgucuucugcggcaccuccggcaccuacggcaccggcuccuggcccgacggcgccgacaucaaccucaugcccaucuga

SEQ ID NO: 118614 - RNA, 1410 nt, Artificial Sequence; identical to SEQ ID NO: 110849
  derived and/or modified CDS sequence (opt2) from neuraminidase__InfluenzaA__AFM72112

SEQ ID NO: 118615 - RNA, 1410 nt, Artificial Sequence
  derived and/or modified CDS sequence (opt2) from neuraminidase__InfluenzaA__AFM72123
augaaccccaaccagaagaucaucaccaucggcuccgucucccucaccaucgccaccaucugcuuccucaugcagaucgccauccucgucaccaccgucacccuccacuucaagcaguacgagugcuccuccccccccaacaaccaggucaugcccugcgagcccaccaucaucgagcgcaacaucaccgagaucgucuaccucaccaacaccaccaucgagaaggagaucugccccaagcucgucgaguaccgcaacugguccaagccccagugcaagaucaccggcuucgcccccuucuccaaggacaacuccauccgccucuccgccggcggcgacaucugggucacccgcgagcccuacgucuccugcgaccccggcaagugcuaccaguucgcccucggccagggcaccacccucaacaaccgccacuccaacgacaccguccacgaccgcacccccuaccgcacccuccucaugaacgagcucggcguccccuuccaccucggcaccaagcaggucugcaucgccugguccuccuccuccugccacgacggcaaggccuggcuccacgucugcgucaccggccacgacaagaacgccaccgccuccuucaucuacgacggccgccucgucgacuccaucggcuccugguccaagaacauccuccgcacccaggaguccgagugcgucugcaucaacggcaccugcaccgucgucaugaccgacggcuccgccuccgagcgcgccgacaccaagauccucuucaucgaggagggcaagaucguccacaucuccccccucuccggcuccgcccagcacgucgaggagugcuccugcuacccccgcuaccccggcguccgcugcgucugccgcgacaacuggaagggcuccaaccgccccaucgucgacaucaacgucaaggacuacuccaucgucuccuccuacgucugcuccggccucgucggcgacaccccccgcaagaacgaccgcuccuccuccuccuacugccgcaaccccaacaacgagaagggcucccacggcgucaagggcugggccuucgacgacggcaacgacgucuggaugggccgcaccaucggcgaggagcuccgcuccggcuacgagaccuucaaggucaucggcggcugguccacccccaacuccaagcuccagaccaaccgccaggucaucgucgacuccggcaaccgcuccggcuacuccggcaucuucuccgucgagggcaaguccugcaucaaccgcugcuucuacgucgagcucauccgcggccgcgagcaggagacccgcgucugguggaccuccaacuccaucgucgucuucugcggcaccuccggcaccuacggcaccggcuccuggcccgacggcgccgacaucaaccucaugcccaucuga

SEQ ID NO: 118616 - RNA, 1410 nt, Artificial Sequence; identical to SEQ ID NO: 118171
  derived and/or modified CDS sequence (opt2) from neuraminidase__InfluenzaA__AFM72134

SEQ ID NO: 118617 - RNA, 1410 nt, Artificial Sequence
  derived and/or modified CDS sequence (opt2) from neuraminidase__InfluenzaA__AFM72145
augaaccccaaccagaagaucaucaccaucggcuccgucucccucaccaucgccaccaucugcuuccucaugcagaucgccauccucgccaucaccgucacccuccacuucaagcaguacgagugcaacuccccccccaacaaccaggucaugcucugcgagcccaccaucaucgagcgcaacaccaccgagaucgucuaccucaccaacaccaccaucgagaaggaggucugccccaagcucgccgaguaccgcaacugguccaagccccagugcaagaucaccggcuucgcccccuucuccaaggacaacuccauccgccucuccgccggcggcgacaucugggucacccgcgagcccuacgucuccugcgaccccggcaagugcuaccaguucgcccucggccagggcaccacccucaacaaccgccacuccaacgacaccguccacgaccgcacccccuaccgcacccuccucaugaacgagcucggcguccccuuccaccucggcaccaagcaggucugcaucgccugguccuccuccuccugccacgacggcaaggccuggcuccacgucugcgucaccggccacgacgagaacgccaccgccuccuucaucuacgacggccgccucgucgacuccaucggcuccugguccaagaacauccuccgcacccaggaguccgagugcgucugcaucaacggcaccugcaccgucgucaugaccgacggcuccgccuccgagcgcgccgacaccaagauccucuucaucgaggagggcaagaucguccacaucuccccccucuccggcuccgcccagcacgucgaggagugcuccugcuacccccgcuaccccggcguccgcugcgucugccgcgacaacuggaagggcuccaaccgccccaucgucgacaucaacgucaaggacuacuccaucgucuccuccuacgucugcuccggccucgucggcgacaccccccgcaagaacgacuccuccuccuccuccuacugccgcaaccccaacaacgagaagggcucccacggcgucaagggcugggccuucgacgacggcaacgacgucuggaugggccgcaccaucuccgaggagcuccgcuccggcuacgagaccuucaaggucaucggcggcugguccaagcccaacuccaagcuccagaucaaccgccaggucaucgucgaccgcggcaaccgcuccggcuacuccggcaucuucuccgucgagggcaaguccugcaucaaccgcugcuucuacgucgagcucauccgcggccgcaagcaggagaccgaggucugguggaccuccaacuccaucgucgucuucugcggcaccuccggcaccuacggcaccggcuccuggcccgacggcgccgacaucaaccucaugcccaucuga

SEQ ID NO: 118618 - RNA, 1410 nt, Artificial Sequence; identical to SEQ ID NO: 111221
  derived and/or modified CDS sequence (opt2) from neuraminidase__InfluenzaA__AFM72156

SEQ ID NO: 118619 - RNA, 1410 nt, Artificial Sequence
  derived and/or modified CDS sequence (opt2) from neuraminidase__InfluenzaA__AFM72167
augaaccccaaccagaagaucaucaccaucggcuccaucucccucaccaucgccaccaucugcuuccucaugcagaucgccauccucgucaccaccgucacccuccacuucaagcaguacgagugcaacuccccccccaacaaccaggucaugcucugcgagcccaccaucaucgagcgcaacaucaccgagaucgucuaccucaccaacaccaccaucgagaaggagaucugccccgagcucgccgaguaccgcaacugguccaagccccagugcaagaucaccggcuucgcccccuucuccaaggacaacuccauccgccucuccgccggcggcgacaucugggucacccgcgagcccuacgucuccugcgaccccggcaagugcuaccaguucgcccucggccagggcaccacccucaacaaccgccacuccaacgacaccguccacgaccgcacccccuaccgcacccuccucaugaacgagcucggcguccccuuccaccucggcaccaagcaggucugcaucgccugguccuccuccuccugccacgacggcaaggccuggcuccacgucugcgucaccggccacgacgagaacgccaccgccuccuucaucuacgacggccgccucgucgacuccaucggcuccugguccaagaacauccuccgcacccaggaguccgagugcgucugcaucaacggcaccugcaccgucgucaugaccgacggcuccgccuccgagcgcgccgacaccaagauccucuucaucgaggagggcaagaucguccacaucuccccccucuccggcuccgcccagcacgucgaggagugcuccugcuacccccgcuaccccggcguccgcugcgucugccgcgacaacuggaagggcuccaaccgccccaucgucgacaucaacgucaaggacuacuccaucgucuccuccuacgucugcuccggccucgucggcgacaccccccgcaagaacgacuccuccuccuccuccuacugcuggaaccccaacaacgagaagggcggccacggcgucaagggcugggccuucgacgacggcaacgacgucuggaugggccgcaccaucuccgaggagcuccgcuccggcuacgagaccuucaaggucaucggcggcugguccaagcccaacuccaagcuccagaucaaccgccaggucaucgucgaccgcggcaaccgcuccggcuacuccggcaucuucuccgucgagggcaaguccugcaucaaccgcugcuucuacgucgagcucauccgcggccgcaagcaggagaccgaggucugguggaccuccaacuccaucgucgucuucugcggcaccuccggcaccuacggcaccggcuccuggcccgacggcgccgacaucaaccucaugcccaucuga

SEQ ID NO: 118620 - RNA, 1410 nt, Artificial Sequence
  derived and/or modified CDS sequence (opt2) from neuraminidase__InfluenzaA__AFM72178
augaaccccaaccagaagaucaucaccaucggcuccgucucccucaccaucgccaccaucugcuuccucaugcagaucgccauccucgucaccaccgucacccuccacuucaagcaguacgagugcaacuccccccccaacaaccaggucaugcucugcgagcccaccaucaucgagcgcaacaucaccgagaucgucuaccucaccaacaccaccaucgagaaggagaucugccccgagcucgccgaguaccgcaacugguccaagccccagugcaagaucaccggcuucgcccccuucuccaaggacaacuccauccgccucuccgccggcggcgacaucugggucacccgcgagcccuacgucuccugcgaccccggcaagugcuaccaguucgcccucggccagggcaccacccucaacaaccgccacuccaacgacaccguccacgaccgcacccccuaccgcacccuccucaugaacgagcucggcguccccuuccaccucggcaccaagcaggucugcaucgccugguccuccuccuccugccacgacggcaaggccuggcuccacgucugcgucaccggccacgacgagaacgccaccgccuccuucaucuacgacggccgccucgucgacuccaucggcuccugguccaagaacauccuccgcacccaggaguccgagugcgucugcaucaacggcaccugcaccgucgucaugaccgacggcuccgccuccgagcgcgccgacaccaagauccucuucaucgaggagggcaagaucguccacaucuccccccucuccggcuccgcccagcacgucgaggagugcuccugcuacccccgcuaccccggcguccgcugcgucugccgcgacaacuggaagggcuccaaccgccccaucgucgacaucaacgucaaggacuacuccaucgucuccuccuacgucugcuccggccucgucggcgacaccccccgcaagaacgacuccuccuccuccuccuacugcuggaaccccaacaacgagaagggcggccacggcgucaagggcugggccuucgacgacggcaacgacgucuggaugggccgcaccaucuccgaggagcuccgcuccggcuacgagaccuucaaggucaucggcggcugguccaagcccaacuccaagcuccagaucaaccgccaggucaucgucgaccgcggcaaccgcuccggcuacuccggcaucuucuccgucgagggcaaguccugcaucaaccgcugcuucuacgucgagcucauccgcggccgcaagcaggagaccgaggucugguggaccuccaacuccaucgucgucuucugcggcaccuccggcaccuacggcaccggcuccuggcccgacggcgccgacaucaaccucaugcccaucuga

SEQ ID NO: 118621 - RNA, 1410 nt, Artificial Sequence
  derived and/or modified CDS sequence (opt2) from neuraminidase__InfluenzaA__AFM72189
augaaccccaaccagaagaucaucaccaucggcuccgucucccucaccaucgccaccaucugcuuccucaugcagaucgccauccucgucaccaccgucacccuccacuucaagcaguacgagugcaacuccccccccaacaaccaggucaugcucugcgagcccaccaucaucgagcgcaacaucaccgagaucgucuaccucaccaacaccaccaucgagaaggagaucugccccaagcucgccgaguaccgcaacugguccaagccccagugcaagaucaccggcuucgcccccuucuccaaggacaacuccauccgccucuccgccggcggcgacaucugggucacccgcgagcccuacgucuccugcgaccccgacaagugcuaccaguucgcccucggccagggcaccacccucaacaaccgccacuccaacgacaccguccacgaccgcacccccuaccgcacccuccucaugaacgagcucggcguccccuuccaccucggcaccaagcaggucugcaucgccugguccuccuccuccugccacgacggcaaggccuggcuccacgucugcgucaccggccacgacgagaacgccaccgccuccuucaucuacgacggccgccucgucgacuccaucggcuccugguccaagaagauccuccgcacccaggaguccgagugcgucugcaucaacggcaccugcaccgucgucaugaccgacggcuccgccuccggccgcgccgacaccaagauccucuucaucgaggagggcaagaucguccacaucuccccccuccucggcuccgcccagcacgucgaggagugcuccugcuacccccgcuaccccggcguccgcugcgucugccgcgacaacuggaagggcuccaaccgccccaucgucgacaucaacgucaaggacuacuccaucgucuccuccuacgucugcuccggccucgucggcgacaccccccgcaagaacgacuccuccuccuccucccacugccucaaccccaacaacgaggagggcggccacggcgucaagggcugggccuucgacgacggcgacgacgucuggaugggccgcaccaucuccgagaagcuccgcuccggcuacgagaccuucaaggucaucgagggcugguccaagcccaacuccaagcuccagaucaaccgccaggucaucgucgaccgcggcaaccgcuccggcuacuccggcaucuucuccgucgagggcaaguccugcaucaaccgcugcuucuacgucgagcucauccgcggccgcaagcaggagaccgaggucugguggaccuccaacuccaucgucgucuucugcggcaccuccggcaccuacggcaccggcuccuggcccgacggcgccgacaucaaccucaugcccaucuga

SEQ ID NO: 118622 - RNA, 1410 nt, Artificial Sequence; identical to SEQ ID NO: 118621
  derived and/or modified CDS sequence (opt2) from neuraminidase__InfluenzaA__AFM72200

SEQ ID NO: 118623 - RNA, 1410 nt, Artificial Sequence; identical to SEQ ID NO: 111785
  derived and/or modified CDS sequence (opt2) from neuraminidase__InfluenzaA__AFM72211

SEQ ID NO: 118624 - RNA, 1410 nt, Artificial Sequence; identical to SEQ ID NO: 111785
  derived and/or modified CDS sequence (opt2) from neuraminidase__InfluenzaA__AFM72222

SEQ ID NO: 118625 - RNA, 1413 nt, Artificial Sequence; identical to SEQ ID NO: 112489
  derived and/or modified CDS sequence (opt2) from neuraminidase__InfluenzaA__AFM72233

SEQ ID NO: 118626 - RNA, 1410 nt, Artificial Sequence; identical to SEQ ID NO: 110609
  derived and/or modified CDS sequence (opt2) from neuraminidase__InfluenzaA__AFM72249

SEQ ID NO: 118627 - RNA, 1410 nt, Artificial Sequence; identical to SEQ ID NO: 110097
  derived and/or modified CDS sequence (opt2) from neuraminidase__InfluenzaA__AFM72260

SEQ ID NO: 118628 - RNA, 1410 nt, Artificial Sequence; identical to SEQ ID NO: 110097
  derived and/or modified CDS sequence (opt2) from neuraminidase__InfluenzaA__AFM72271

SEQ ID NO: 118629 - RNA, 1410 nt, Artificial Sequence
  derived and/or modified CDS sequence (opt2) from neuraminidase__InfluenzaA__AFM72293
augaaccccaaccagaagaucaucaccaucggcuccgucucccucaccaucgccaccaucugcuuccucaugcagaucgccauccucgucaccaccgucacccuccacuucaagcaguacgagugcaacuccccccccaacaaccaggucaugcucugcgagcccaccaucaucgagcgcaacaucaccgagaucgucuaccucaccaacaccaccaucgagaaggagaucugccccaagcucgccgaguaccgcaacugguccaagccccagugcaacaucaccggcuucgcccccuucuccaaggacaacuccauccgccucuccgccggcggcgacaucugggucacccgcgagcccuacgucuccugcgaccccgacaagugcuaccaguucgcccucggccagggcaccacccucaacaacggccacuccaacuacaccguccacgaccgcacccccuaccgcacccuccucaugaacgagcucggcguccccuuccaccucggcaccaagcaggucugcaucgccugguccuccuccuccugccacgacggcaaggccuggcuccacgucugcgucaccggcgacgacgagaacgccaccgccuccuucaucuacaacggccgccucgucgacuccaucggcuccugguccaagaagauccuccgcacccaggaguccgagugcgucugcaucaacggcaccugcaccgucgucaugaccgacggcuccgccuccggcaaggccgacaccaagauccucuucaucgaggagggcaagaucguccacaccuccucccucuccggcuccgcccagcacgucgaggagugcuccugcuacccccgcuaccccggcguccgcugcgucugccgcgacaacuggaagggcuccaaccgccccaucgucgacaucaacgucaaggacuacuccaucgucuccuccuacgucugcuccggccucgucggcgacaccccccgcaagaacgacuccuccuccuccucccacugccucgaccccaacaacgaggagggcggccacggcgucaagggcugggccuucgacgacggcaacgacgucuggaugggccgcaccaucuccgagaagcuccgcuccggcuacgagaccuucaaggucaucgagggcugguccaagcccaacuccaagcuccagaucaaccgccaggucaucgucgaccgcggcaaccgcuccggcuacuccggcaucuucuccgucgagggcaaguccugcaucaaccgcugcuucuacgucgagcucauccgcggccgcaagcaggagaccgagguccucuggaccuccaacuccaucgucgucuucugcggcaccuccggcaccuacggcaccggcuccuggcccgacggcgccgacaucaaccucaugcccaucuga

SEQ ID NO: 118630 - RNA, 1410 nt, Artificial Sequence; identical to SEQ ID NO: 111965
  derived and/or modified CDS sequence (opt2) from neuraminidase__InfluenzaA__AFM72304

SEQ ID NO: 118631 - RNA, 1410 nt, Artificial Sequence
  derived and/or modified CDS sequence (opt2) from neuraminidase__InfluenzaA__AFM72315
augaaccccaaccagaagaucaucaccaucggcuccgucucccucaccaucuccaccaucugcuucuucaugcagaucgccauccucaucaccaccgucacccuccacuucaagcaguacgaguucaacuccccccccaacaaccaggucaugcucugcgagcccaccaucaucgagcgcaacaucaccgagaucgucuaccucaccaacaccaccaucgagaaggagaucugccccaagcucgccgaguaccgcaacugguccaagccccagugcaacaucaccggcuucgcccccuucuccaaggacaacuccauccgccucuccgccggcggcgacaucugggucacccgcgagcccuacgucuccugcgaccccgacaagugcuaccaguucgcccucggccagggcaccacccucaacaacguccacuccaacgacaccguccacgaccgcacccccuaccgcacccuccucaugaacgagcucggcguccccuuccaccucggcaccaagcaggucugcaucgccugguccuccuccuccugccacgacggcaaggccuggcuccacgucugcgucaccggcgacgacgagaacgccaccgccuccuucaucuacaacggccgccucgucgacuccaucgucuccugguccaagaagauccuccgcacccaggaguccgagugcgucugcaucaacggcaccugcaccgucgucaugaccgacggcuccgccuccggcaaggccgacaccaagauccucuucaucgaggagggcaagaucguccacaccuccacccucuccggcuccgcccagcacgucgaggagugcuccugcuacccccgcuaccccggcguccgcugcgucugccgcgacaacuggaagggcuccaaccgccccaucgucgacaucaacaucaaggacuacuccaucgucuccuccuacgucugcuccggccucgucggcgacaccccccgcaagaacgacuccuccuccuccucccacugccucgaccccaacaacgagaagggcggccacggcgucaagggcugggccuucgacgacggcaacgacgucuggaugggccgcaccaucuccgagaagcuccgcuccggcuacgagaccuucaaggucaucgagggcugguccaaccccaacuccaagcuccagaucaaccgccaggucaucgucgaccgcgacaaccgcuccggcuacuccggcaucuucuccgucgagggcaaguccugcaucaaccgcugcuucuacgucgagcucauccgcggccgcaaccaggagaccgagguccucuggaccuccaacuccaucgucgucuucugcggcaccuccggcaccuacggcaccggcuccuggcccgacggcgccgacaucaaccucaugcccaucuga

SEQ ID NO: 118632 - RNA, 1410 nt, Artificial Sequence
  derived and/or modified CDS sequence (opt2) from neuraminidase__InfluenzaA__AFM72326
augaaccccaaccagaagaucaucaccaucggcuccgucucccucaccaucuccaccaucugcuucuucaugcagaucgccauccucaucaccaccgucacccuccacuucaagcaguacgaguucaacuccccccccaacaaccaggucaugcucugcgagcccaccaucaucgagcgcaacaucaccgagaucgucuaccucaccaacaccaccaucgagaaggagaucugccccaagcucgccgaguaccgcaacugguccaagccccagugcaacaucaccggcuucgcccccuucuccaaggacaacuccauccgccucuccgccggcggcgacaucugggucacccgcgagcccuacgucuccugcgaccccgacaagugcuaccaguucgcccucggccagggcaccacccucaacaacguccacuccaacgacaccguccacgaccgcacccccuaccgcacccuccucaugaacgagcucggcguccccuuccaccucggcaccaagcaggucugcaucgccugguccuccuccuccugccacgacggcaaggccuggcuccacgucugcgucaccggcgacgacgagaacgccaccgccuccuucaucuacaacggccgccucgucgacuccaucgucuccugguccaagaagauccuccgcacccaggaguccgagugcgucugcaucaacggcaccugcaccgucgucaugaccgacggcuccgccuccggcaaggccgacaccaagauccucuucaucgaggagggcaagaucguccacaccuccacccucuccggcuccgcccagcacgucgaggagugcuccugcuacccccgcuaccccggcguccgcugcgucugccgcgacaacuggaagggcuccaaccgccccaucgucgacaucaacaucaaggacuacuccaucgucuccuccuacgucugcuccggccucgucggcgacaccccccgcaagaacgacuccuccuccuccucccacugccucgaccccaacaacgaggagggcggccacggcgucaagggcugggccuucgacgacggcaacgacgucuggaugggccgcaccaucuccgagaagcuccgcuccggcuacgagaccuucaaggucaucgagggcugguccaaccccaacuccaaguuccagaucaaccgccaggucaucgucgaccgcgacaaccgcuccggcuacuccggcaucuucuccgucgagggcaaguccugcaucaaccgcugcuucuacgucgagcucauccgcggccgcaaccaggagaccgagguccucuggaccuccaacuccaucgucgucuucugcggcaccuccggcaccuacggcaccggcuccuggcccgacggcgccgacaucaaccucaugcccaucuga

SEQ ID NO: 118633 - RNA, 1410 nt, Artificial Sequence
  derived and/or modified CDS sequence (opt2) from neuraminidase__InfluenzaA__AFM72337
augaaccccaaccagaagaucaucaccaucggcuccgucucccucaccaucuccaccaucugcuucuucaugcagaucgccauccucaucaccaccgucacccuccacuucaagcaguacgaguucaacuccccccccaacaaccaggucaugcucugcgagcccaccaucaucgagcgcaacaucaccgagaucgucuaccucaccaacaccaccaucgagaaggagaucugccccaagcucgccgaguaccgcaacugguccaagccccagugcgacaucaccggcuucgcccccuucuccaaggacaacuccauccgccucuccgccggcggcgacaucugggucacccgcgagcccuacgucuccugcgaccccgacaagugcuaccaguucgcccucggccagggcaccacccucaacaacguccacuccaacgacaccguccgcgaccgcacccccuaccgcacccuccucaugaacgagcucggcguccccuuccaccucggcaccaagcaggucugcaucgccugguccuccuccuccugccacgacggcaaggccuggcuccacgucugcaucaccggcgacgacaagaacgccaccgccuccuucaucuacaacggccgccucgucgacuccgucgucuccugguccaaggagauccuccgcacccaggaguccgagugcgucugcaucaacggcaccugcaccgucgucaugaccgacggcuccgccuccggcaaggccgacaccaagauccucuucaucgaggagggcaagaucguccacaccuccacccucuccggcuccgcccagcacgucgaggagugcuccugcuacccccgcuaccccggcguccgcugcgucugccgcgacaacuggaagggcuccaaccgccccaucgucgacaucaacaucaaggaccacuccaucgucuccuccuacgucugcuccggccucgucggcgacaccccccgcaagaacgacuccuccuccuccucccacugccucgaccccaacaacgaggagggcggccacggcgucaagggcugggccuucgacgacggcaacgacgucuggaugggccgcaccaucaacgagaccucccgccucggcuacgagaccuucaaggucaucgagggcugguccaaccccaaguccaagcuccagaucaaccgccaggucaucgucgaccgcggcaaccgcuccggcuacuccggcaucuucuccgucgagggcaaguccugcaucaaccgcugcuucuacgucgagcucauccgcggccgcaaggaggagaccgagguccucuggaccuccaacuccaucgucgucuucugcggcaccuccggcaccuacggcaccggcuccuggcccgacggcgccgaccucaaccucaugcccaucuga

SEQ ID NO: 118634 - RNA, 1410 nt, Artificial Sequence
  derived and/or modified CDS sequence (opt2) from neuraminidase__InfluenzaA__AFM72348
augaaccccaaccagaagaucaucaccaucggcuccgucucccucaccaucgccaccaucugcuuccucaugcagaucgccauccucgucaccaccgucacccuccacuucaagcagcacgagugcaacuccccccccaacaaccaggucaugcucugcgagcccaccaucaucgagcgcaacaucaccgagaucgucuaccucaccaacaccaccaucgagaaggagaucugccccaagcucgccgaguaccgcaacugguccaagccccagugcaacaucaccggcuucgcccccuucuccaaggacaacuccauccgccucuccgccggcggcgacaucugggucacccgcgagcccuacgucuccugcgaccccgacaagugcuaccaguucgcccucggccagggcaccacccucaacaacggccacuccaacgacaccguccacgaccgcacccccuaccgcacccuccucaugaacgagcucggcauccccuuccaccucggcacccgccaggucugcaucgccugguccuccuccuccugccacgacggcaaggccuggcuccacgucugcgucaccggcgacgacaagaacgccaccgccuccuucaucuacaacggccgccucgucgacuccaucggcuccugguccaagaagauccuccgcacccaggaguccgagugcgucugcaucaacggcaccugcaccgucgucaugaccgacggcuccgccuccggcaaggccgacaccaagauccucuucaucgaggagggcaagaucguccacaucuccacccucuccggcuccgcccagcacgucgaggagugcuccugcuacccccgcuaccccggcguccgcugcgucugccgcgacaacuggaagggcuccaaccgccccaucgucgacaucaacgucaaggacuacuccaucgucuccuccuacgucugcuccggccucgucggcgacaccccccgcaagaacgacuccuccuccuccucccacugccucgaccccaacaacgaggagggcggccacggcgucaagggcugggccuucgacgacggcaacgacgucuggaugggccgcaccaucuccgagaagcuccgcuccggcuacgagaccuucaaggucaucgagggcugguccaagcccaacuccaagcuccagaucaaccgccaggucaucgucgagcgcggcaaccgcuccggcuacuccggcaucuucuccgucgagggcaaguccugcaucaaccgcugcuucuacgucgagcucauccgcggccgcaaggaggagaccgaggucugguggaccuccaacuccaucgucgucuucugcggcaccuccggcaccuacggcaccggcuccuggcccgacggcgccgacaucaaccucaugcccaucuga

SEQ ID NO: 118635 - RNA, 1410 nt, Artificial Sequence
  derived and/or modified CDS sequence (opt2) from neuraminidase__InfluenzaA__AFM72359
augaaccccaaccagaagaucaucaccaucggcuccgucucccucaccaucuccaccaucugcuucuucaugcagaucgccauccucaucaccaccgucacccuccacuucaagcaguacgaguucaacuccccccccaacaaccaggucaugcucugcgagcccaccaucaucgagcgcaacaucaccgagaucgucuaccucaccaacaccaccaucgagaaggagaucugccccaagcucgccgaguaccgcaacugguccaagccccagugcgacaucaccggcuucgcccccuucuccaaggacaacuccauccgccucuccgccggcggcgacaucugggucacccgcgagcccuacgucuccugcgaccccgacaagugcuaccaguucgcccucggccagggcaccacccucaacaacguccacuccaacgacaccguccacgaccgcacccccuaccgcacccuccucaugaacgagcucggcguccccuuccaccucggcaccaagcaggucugcaucgccugguccuccuccuccugccacgacggcaaggccuggcuccacgucugcgucaccggcgacgacaagaacgccaccgccuccuucaucuacaacggccgccucgucgacuccaucgucuccugguccaagaagauccuccgcacccaggaguccgagugcgucugcaucaacggcaccugcaccgucgucaugaccgacggcuccgccuccggcaaggccgacaccaagauccucuucaucgaggagggcaagaucguccacaccuccacccucuccggcuccgcccagcacgucgaggagugcuccugcuacccccgcuaccccggcguccgcugcgucugccgcgacaacuggaagggcuccaaccgccccaucgucgacaucaacaucaaggacuacuccaucgucuccuccuacgucugcuccggccucgucggcgacaccccccgcaagaacgacuccuccuccuccucccacugccucgaccccaacaacgaggagggcggccacggcgucaagggcugggccuucgacgacggcaacgacgucuggaugggccgcaccaucuccgagaagcuccgcuccggcuacgagaccuucaaggucaucgagggcugguccaaccccaacuccaagcuccagaucaaccgccaggucaucgucgaccgcggcaaccgcuccggcuacuccggcaucuucuccgucgagggcaaguccugcaucaaccgcugcuucuacgucgagcucauccgcggccgcaaggaggagaccaagguccucuggaccuccaacuccaucgucgucuucugcggcaccuccggcaccuacggcaccggcuccuggcccgacggcgccgacaucaaccucaugcccaucuga

SEQ ID NO: 118636 - RNA, 1410 nt, Artificial Sequence; identical to SEQ ID NO: 118635
  derived and/or modified CDS sequence (opt2) from neuraminidase__InfluenzaA__AFM72370

SEQ ID NO: 118637 - RNA, 1410 nt, Artificial Sequence; identical to SEQ ID NO: 115554
  derived and/or modified CDS sequence (opt2) from neuraminidase__InfluenzaA__AFM72381

SEQ ID NO: 118638 - RNA, 1410 nt, Artificial Sequence; identical to SEQ ID NO: 115554
  derived and/or modified CDS sequence (opt2) from neuraminidase__InfluenzaA__AFM72392

SEQ ID NO: 118639 - RNA, 1410 nt, Artificial Sequence; identical to SEQ ID NO: 112438
  derived and/or modified CDS sequence (opt2) from neuraminidase__InfluenzaA__AFM72403

SEQ ID NO: 118640 - RNA, 1410 nt, Artificial Sequence; identical to SEQ ID NO: 112438
  derived and/or modified CDS sequence (opt2) from neuraminidase__InfluenzaA__AFM72414

SEQ ID NO: 118641 - RNA, 1410 nt, Artificial Sequence; identical to SEQ ID NO: 112102
  derived and/or modified CDS sequence (opt2) from neuraminidase__InfluenzaA__AFM72425

SEQ ID NO: 118642 - RNA, 1410 nt, Artificial Sequence; identical to SEQ ID NO: 112102
  derived and/or modified CDS sequence (opt2) from neuraminidase__InfluenzaA__AFM72436

SEQ ID NO: 118643 - RNA, 1410 nt, Artificial Sequence; identical to SEQ ID NO: 112102
  derived and/or modified CDS sequence (opt2) from neuraminidase__InfluenzaA__AFM72447

SEQ ID NO: 118644 - RNA, 1410 nt, Artificial Sequence; identical to SEQ ID NO: 112102
  derived and/or modified CDS sequence (opt2) from neuraminidase__InfluenzaA__AFM72458

SEQ ID NO: 118645 - RNA, 1410 nt, Artificial Sequence; identical to SEQ ID NO: 112102
  derived and/or modified CDS sequence (opt2) from neuraminidase__InfluenzaA__AFM72469

SEQ ID NO: 118646 - RNA, 1410 nt, Artificial Sequence
  derived and/or modified CDS sequence (opt2) from neuraminidase__InfluenzaA__AFM72491
augaaccccaaccagaagaucaucaccaucggcuccgucucccucaccaucuccaccaucugcuucuucaugcagaucgccauccucaucaccaccgucacccuccacuucaagcaguacgaguucaacuccccccccaacaaccaggucaugaugugcgagcccaccaucaucgagcgcaacaucaccgagaucgucuaccucaccaacaccaccaucgagaaggagaucugccccaagcucgccgaguaccgcaacugguccaagccccagugcgacaucaccggcuucgcccccuucuccaaggacaacuccauccgccucuccgccggcggcgacaucugggucacccgcgagcccuacgucuccugcgaccccgacaagugcuaccaguucgcccucggccagggcaccacccucaacaacguccacuccaacgacaccguccgcgaccgcacccccuaccgcacccuccucaugaacgagcucggcguccccuuccaccucggcaccaagcaggucugcaucgccugguccuccuccuccugccacgacggcaaggccuggcuccacgucugcaucaccggcgacgacaagaacgccaccgccuccuucaucuacaacggccgccucgucgacuccaucgucuccugguccaaggagauccuccgcacccaggaguccgagugcgucugcaucaacggcaccugcaccgucgucaugaccgacggcuccgccuccggcaaggccgacaccaagauccucuucaucgaggagggcaagaucguccacaccuccacccucuccggcuccgcccagcacgucgaggagugcuccugcuacccccgcuaccccggcguccgcugcgucugccgcgacaacuggaagggcuccaaccgccccaucgucgacaucaacaucaaggaccacuccaucgucuccuccuacgucugcuccggccucgucggcgacaccccccgcaagaacgacuccuccuccuccucccacugccucgaccccaacaacgaggagggcggccacggcgucaagggcugggccuucgacgacggcaacgacgucuggaugggccgcaccaucuccgagaagucccgccucggcuacgagaccuucaaggucaucgagggcugguccaaccccaacuccaagcuccagaucaaccgccaggucaucgucgaccgcggcaaccgcuccggcuacuccggcaucuucuccgucgagggcaaguccugcaucaaccgcugcuucuacgucgagcucauccgcggccgcaaggaggagaccgagguccucuggaccuccaacuccaucgucgucuucugcggcaccuccggcaccuacggcaccggcuccuggcccgacggcgccgacaucaaccucaugcccaucuga

SEQ ID NO: 118647 - RNA, 1410 nt, Artificial Sequence; identical to SEQ ID NO: 118646
  derived and/or modified CDS sequence (opt2) from neuraminidase__InfluenzaA__AFM72502

SEQ ID NO: 118648 - RNA, 1413 nt, Artificial Sequence; identical to SEQ ID NO: 112668
  derived and/or modified CDS sequence (opt2) from neuraminidase__InfluenzaA__AFM72513

SEQ ID NO: 118649 - RNA, 1413 nt, Artificial Sequence; identical to SEQ ID NO: 112668
  derived and/or modified CDS sequence (opt2) from neuraminidase__InfluenzaA__AFM72524

SEQ ID NO: 118650 - RNA, 1413 nt, Artificial Sequence; identical to SEQ ID NO: 112668
  derived and/or modified CDS sequence (opt2) from neuraminidase__InfluenzaA__AFM72535

SEQ ID NO: 118651 - RNA, 1413 nt, Artificial Sequence; identical to SEQ ID NO: 112668
  derived and/or modified CDS sequence (opt2) from neuraminidase__InfluenzaA__AFM72546

SEQ ID NO: 118652 - RNA, 1413 nt, Artificial Sequence; identical to SEQ ID NO: 112668
  derived and/or modified CDS sequence (opt2) from neuraminidase__InfluenzaA__AFM72557

SEQ ID NO: 118653 - RNA, 1410 nt, Artificial Sequence
  derived and/or modified CDS sequence (opt2) from neuraminidase__InfluenzaA__AFM72579
augaaccccaaccagaagaucaucaccaucggcuccgucucccucaccaucuccaccaucugcuucuucaugcagaccgccauccucaucaccaccgucacccuccacuucaagcaguacgaguucaacuccccccccaacaaccaggucaugcucugcgagcccaccaucaucgagcgcaacaucaccgagaucgucuaccucaccaacaccaccaucgagaaggagaucugccccaagcucgccgaguaccgcaacugguccaagccccagugcgacaucaccggcuucgcccccuucuccaaggacaacuccauccgccucuccgccggcggcgacaucugggucacccgcgagcccuacgucuccugcgaccccgacaagugcuaccaguucgcccucggccagggcaccacccucaacaacguccacuccaacgacaccguccacgaccgcacccccuaccgcacccuccucaugaacgagcucggcguccccuuccaccucggcaccaagcaggucugcaucgccugguccuccuccuccugccacgacggcaaggccuggcuccacgucugcaucaccggcgacgacaagaacgccaccgccuccuucaucuacaacggccgccucgucgacuccaucgucuccugguccaaggagauccuccgcacccaggaguccgagugcgucugcaucaacggcaccugcaccgucgucaugaccgacggcuccgccuccggcaaggccgacaccaagauccucuucaucgaggagggcaagaucguccacaccuccauccucuccggcuccgcccagcacgucgaggagugcuccugcuacccccgcuaccccggcguccgcugcgucugccgcgacaacuggaagggcuccaaccgccccaucgucgacaucaacaucaaggaccacuccaucgucuccuccuacgucugcuccggccucgucggcgacaccccccgcaagaacgacuccuccuccuccucccacugccucgaccccaacaacgaggagggcggccacggcgucaagggcugggccuucgacgacggcaacgacgucuggaugggccgcaccaucuccgagaagucccgccucggcuacgagaccuucaaggucaucgagggcugguccaaccccaaguccaagcuccagaucaaccgccaggucaucgucgaccgcggcaaccgcuccggcuacuccggcaucuucuccgucgagggcaaguccugcaucaaccgcugcuucuacgucgagcucauccgcggccgcaaggaggagaccgagguccucuggaccuccaacuccaucgucgucuucugcggcaccuccggcaccuacggcaccggcuccuggcccgacggcgccgacaucaaccucaugcccaucuga

SEQ ID NO: 118654 - RNA, 1413 nt, Artificial Sequence
  derived and/or modified CDS sequence (opt2) from neuraminidase__InfluenzaA__AFM72802
augaaccccaaccagaagaucaucaccaucggcuccaucuccaucgccaucggcaucaucucccucaugcuccagaucggcaacaucaucuccaucugggccucccacuccauccagaccggcucccagaaccacaccggcaugugcaaccagcgcaucaucaccuacgagaacuccaccugggucaaccacaccuacgucaacaucaacaacaccaacgucgucgccggcaaggacaagacccccgucacccucgccggcaacuccucccucugcuccaucuccggcugggccauccacaccaaggacaacuccauccgcaucggcuccaagggcgacgucuucgucauccgcgagcccuucaucuccugcucccaccucgagugcaagaccuucuuccucacccagggcgcccuccucaacgacaagcacuccaacggcaccgucaaggaccgcucccccuaccgcgcccucauguccugcccccucggcgaggcccccucccccuacaacuccaaguucgaguccgucgccugguccgccuccgccugccacgacggcaucggcuggcucaccaucggcaucuccggccccgacaacggcgccgucgccguccucaaguacaacggcaucaucaccggcaccaucaaguccuggaagaagcagauccuccgcacccaggaguccgagugcgucugcaugaacggcuccugcuucaccaucaugaccgacggccccuccaacggcgccgccuccuacaagaucuucaagaucgagaagggcaaggucaucaaguccauggagcucaacgcccccaacuuccacuacgaggagugcuccugcuaccccgacaccggcaccgucaugugcgucugccgcgacaacuggcacggcuccaaccgccccugggucuccuucaaccagaaccucgacuaccagaucggcuacaucugcuccggcgucuucggcgacaacccccgccccgaggacggcgagggcuccugcaaccccgucaccgucgacggcgccaacggcgucaagggcuucuccuacaaguacggcaacggcgucuggaucggccgcaccaaguccaaccgcauccgcaagggcuucgagaugaucugggaccccaacggcuggaccaacaccgacuccgacuucuccgucaagcaggacaucgucgccaucaccgacugguccggcuacuccggcuccuucguccagcaccccgagcucaccggccucgacugcauccgccccugcuucugggucgagcucguccgcggccucccccgcgagaacaccaccaucuggaccuccggcuccuccaucuccuucugcggcgucaacuccgacaucgccaacugguccuggcccgacggcgccgagcuccccuucaccaucgacaaguga

SEQ ID NO: 118655 - RNA, 1413 nt, Artificial Sequence; identical to SEQ ID NO: 118654
  derived and/or modified CDS sequence (opt2) from neuraminidase__InfluenzaA__AFM72813

SEQ ID NO: 118656 - RNA, 1413 nt, Artificial Sequence; identical to SEQ ID NO: 118654
  derived and/or modified CDS sequence (opt2) from neuraminidase__InfluenzaA__AFM72824

SEQ ID NO: 118657 - RNA, 1410 nt, Artificial Sequence; identical to SEQ ID NO: 112764
  derived and/or modified CDS sequence (opt2) from neuraminidase__InfluenzaA__AFM72835

SEQ ID NO: 118658 - RNA, 1410 nt, Artificial Sequence; identical to SEQ ID NO: 112764
  derived and/or modified CDS sequence (opt2) from neuraminidase__InfluenzaA__AFM72845

SEQ ID NO: 118659 - RNA, 1410 nt, Artificial Sequence; identical to SEQ ID NO: 112764
  derived and/or modified CDS sequence (opt2) from neuraminidase__InfluenzaA__AFM72855

SEQ ID NO: 118660 - RNA, 1410 nt, Artificial Sequence; identical to SEQ ID NO: 112764
  derived and/or modified CDS sequence (opt2) from neuraminidase__InfluenzaA__AFM72865

SEQ ID NO: 118661 - RNA, 1410 nt, Artificial Sequence
  derived and/or modified CDS sequence (opt2) from neuraminidase__InfluenzaA__AFM72875
augaaccccaaccagaagaucaucaccaucggcuccgucucccucaccaucuccaccaucugcuucuucaugcagaucgccauccucaucaccaccgucacccuccacuucaagcaguacgaguucaacuccccccccaacaaccaggucaugcucugcgagcccaccaucaucgagcgcaacaucaccgagaucgucuaccucaccaacaccaccaucgagaaggagaucugccccaagcucgccgaguaccgcaacugguccaagccccagugcgacaucaccggcuucgcccccuucuccaaggacaacuccauccgccucuccgccggcggcgacaucugggucacccgcgagcccuacgucuccugcgaccccgacaagugcuaccaguucgcccucggccagggcaccacccucaacaacguccacuccaacaacaccguccgcgaccgcacccccuaccgcacccuccucaugaacgagcucggcguccccuuccaccucggcaccaagcaggucugcaucgccugguccuccuccuccugccacgacggcaaggccuggcuccacgucugcaucaccggcgacgacaagaacgccaccgccuccuucaucuacaacggccgccucgucgacuccgucgucuccugguccaaggagauccuccgcacccaggaguccgagugcgucugcaucaacggcaccugcaccgucgucaugaccgacggcuccgccuccggcaaggccgacaccaagauccucuucaucgaggagggcaagaucguccacaccuccacccucuccggcuccgcccagcacgucgaggagugcuccugcuacccccgcuaccccggcguccgcugcgucugccgcgacaacuggaagggcuccaaccgccccaucgucgacaucaacaucaaggaccacuccaucgucuccuccuacgucugcuccggccucgucggcgacaccccccgcaaguccgacuccuccuccuccucccacugccucgaccccaacaacgaggagggcggccacggcgucaagggcugggccuucgacgacggcaacgacgucuggaugggccgcaccaucuccgagaagucccgccucggcuacgagaccuucaaggucaucgagggcugguccaaccccaaguccaagcuccagaucaaccgccaggucaucgucgaccgcggcaaccgcuccggcuacuccggcaucuucuccgucgagggcaaguccugcaucaaccgcugcuucuacgucgagcucauccgcggccgcaaggaggagaccgagguccucuggaccuccaacuccaucgucgucuucugcggcaccuccggcaccuacggcaccggcuccuggcccgacggcgccgacaucaaccucaugcccgucuga

SEQ ID NO: 118662 - RNA, 1410 nt, Artificial Sequence; identical to SEQ ID NO: 112635
  derived and/or modified CDS sequence (opt2) from neuraminidase__InfluenzaA__AFM72886

SEQ ID NO: 118663 - RNA, 1410 nt, Artificial Sequence; identical to SEQ ID NO: 112635
  derived and/or modified CDS sequence (opt2) from neuraminidase__InfluenzaA__AFM72897

SEQ ID NO: 118664 - RNA, 1410 nt, Artificial Sequence
  derived and/or modified CDS sequence (opt2) from neuraminidase__InfluenzaA__AFM72908
augaaccccaaccagaagaucaucaccaucggcuccgucucccucaccaucuccaccaucugcuucuucaugcagaucgccauccucaucaccaccgucacccuccacuucaagcaguacgaguucaacuccccccccaacaaccaggucaugcucugcgagcccaccaucaucgagcgcaacaucaccgagaucgucuaccucaccaacaccaccaucgagaaggagaucugccccaagcucgccgaguaccgcaacugguccaagccccagugcgacaucaccggcuucgcccccuucuccaaggacaacuccauccgccucuccgccggcggcgacaucugggucacccgcgagcccuacgucuccugcgaccccgacaagugcuaccaguucgcccucggccagggcaccacccucaacaacguccacuccaacaacaccguccgcgaccgcacccccuaccgcacccuccucaugaacgagcucggcguccccuuccaccucggcaccaagcaggucugcaucgccugguccuccuccuccugccacgacggcaaggccuggcuccacgucugcaucaccggcgacgacaagaacgccaccgccuccuucaucuacaacggccgccucgucgacuccgucgucuccugguccaaggagauccuccgcacccaggaguccgagugcgucugcaucaacggcaccugcaccgucgucaugaccgacggcuccgccuccggcaaggccgacaccaagauccucuucaucgaggagggcaagaucguccacaccuccacccucuccggcuccgcccagcacgucgaggagugcuccugcuacccccgcuaccccggcguccgcugcgucugccgcgacaacuggaagggcuccaaccgccccaucgucgacaucaacaccaaggaccacuccaucgucuccuccuacgucugcuccggccucgucggcgacaccccccgcaagaacgacuccuccuccuccucccacugccucgaccccaacaacgaggagggcggccacggcgucaagggcugggccuucgacgacggcaacgacgucuggaugggccgcaccaucuccgagaagucccgccucggcuacgagaccuucaaggucaucgagggcugguccaaccccaaguccaagcuccagaucaaccgccaggucaucgucgaccgcggcaaccgcuccggcuacuccggcaucuucuccgucgagggcaaguccugcaucaaccgcugcuucuacgucgagcucauccgcggccgcaaggaggagaccgagguccucuggaccuccaacuccaucgucgucuucugcggcaccuccggcaccuacggcaccggcuccuggcccgacggcgccgacaucaaccucaugcccgucuga

SEQ ID NO: 118665 - RNA, 1410 nt, Artificial Sequence
  derived and/or modified CDS sequence (opt2) from neuraminidase__InfluenzaA__AFM72919
augaaccccaaccagaagaucaucaccaucggcuccgucucccucaccaucuccaccaucugcuucuucaugcagaucgccauccucaucaccaccgucacccuccacuucaagcagcacgaguucaacuccccccccaacaaccaggucaugcucugcgagcccaccaucaucgagcgcaacaucaccgagaucgucuaccucaccaacaccaccaucgagaaggagaucugccccaagcucgccgaguaccgcaacugguccaagccccagugcgacaucaccggcuucgcccccuucuccaaggacaacuccauccgccucuccgccggcggcgacaucugggucacccgcgagcccuacgucuccugcgaccccgacaagugcuaccaguucgcccucggccagggcaccacccucaacaacguccacuccaacaacaccguccgcgaccgcacccccuaccgcacccuccucaugaacgagcucggcguccccuuccaccucggcaccaagcaggucugcaucgccugguccuccuccuccugccacgacggcaaggccuggcuccacgucugcaucaccggcgacgacaagaacgccaccgccuccuucaucuacaacggccgccucgucgacuccgucgucuccugguccaaggagauccuccgcacccaggaguccgagugcgucugcaucaacggcaccugcaccgucgucaugaccgacggcuccgccuccggcaaggccgacaccaagauccucuucaucgaggagggcaagaucguccacaccuccacccucuccggcuccgcccagcacgucgaggagugcuccugcuacccccgcuaccccggcguccgcugcgucugccgcgacaacuggaagggcuccaaccgccccaucgucgacaucaacaccaaggaccacuccaucgucuccuccuacgucugcuccggccucgucggcgacaccccccgcaagaacgacuccuccuccuccucccacugccucgaccccaacaacgaggagggcggccacggcgucaagggcugggccuucgacgacggcaacgacgucuggaugggccgcaccaucuccgagaagucccgccucggcuacgagaccuucaaggucaucgagggcugguccaaccccaaguccaagcuccagaucaaccgccaggucaucgucgaccgcggcaaccgcuccggcuacuccggcaucuucuccgucgagggcaaguccugcaucaaccgcugcuucuacgucgagcucauccgcggccgcaaggaggagaccgagguccucuggaccuccaacuccaucgucgucuucugcggcaccuccggcaccuacggcaccggcuccuggcccgacggcgccgacaucaaccucaugcccgucuga

SEQ ID NO: 118666 - RNA, 1410 nt, Artificial Sequence; identical to SEQ ID NO: 113941
  derived and/or modified CDS sequence (opt2) from neuraminidase__InfluenzaA__AFM72930

SEQ ID NO: 118667 - RNA, 1410 nt, Artificial Sequence; identical to SEQ ID NO: 113941
  derived and/or modified CDS sequence (opt2) from neuraminidase__InfluenzaA__AFM72941

SEQ ID NO: 118668 - RNA, 1410 nt, Artificial Sequence; identical to SEQ ID NO: 113941
  derived and/or modified CDS sequence (opt2) from neuraminidase__InfluenzaA__AFM72952

SEQ ID NO: 118669 - RNA, 1410 nt, Artificial Sequence; identical to SEQ ID NO: 113941
  derived and/or modified CDS sequence (opt2) from neuraminidase__InfluenzaA__AFM72963

SEQ ID NO: 118670 - RNA, 1410 nt, Artificial Sequence; identical to SEQ ID NO: 113941
  derived and/or modified CDS sequence (opt2) from neuraminidase__InfluenzaA__AFM72974

SEQ ID NO: 118671 - RNA, 1410 nt, Artificial Sequence; identical to SEQ ID NO: 115554
  derived and/or modified CDS sequence (opt2) from neuraminidase__InfluenzaA__AFM72985

SEQ ID NO: 118672 - RNA, 1410 nt, Artificial Sequence; identical to SEQ ID NO: 115554
  derived and/or modified CDS sequence (opt2) from neuraminidase__InfluenzaA__AFM72996

SEQ ID NO: 118673 - RNA, 1410 nt, Artificial Sequence; identical to SEQ ID NO: 115554
  derived and/or modified CDS sequence (opt2) from neuraminidase__InfluenzaA__AFM73007

SEQ ID NO: 118674 - RNA, 1410 nt, Artificial Sequence
  derived and/or modified CDS sequence (opt2) from neuraminidase__InfluenzaA__AFM73018
augaaccccaaccagaagaucaucaccaucggcuccgucugcaugaccaucggcauggccaaccucauccuccagaucggcaacaucaucuccaucuggaucucccacuccauccagcucggcaaccagucccagaucgagaccugcaaccaguccgucaucaccuacgagaacaacaccugggucaaccagaccuacgucaacaucuccaacaccaacuucgccgccggccaguccgucgucuccgucaagcucgccggcaacuccucccucugccccgucuccggcugggccaucuacuccaaggacaacuccauccgcaucggcuccaagggcgacgucuucgucauccgcgagcccuucaucuccugcuccccccucgagugccgcaccuucuuccucacccagggcgcccuccucaacgacaagcacuccaacggcaccaucaaggaccgcucccccuaccgcacccucauguccugccccaucggcgagguccccucccccuacaacucccgcuucgaguccgucgccugguccgccuccgccugccacgacggcaucaacuggcucaccaucggcaucuccggccccgacaacggcgccgucgccguccucaaguacaacggcaucaucaccgacaccaucaaguccuggcgcaacaacauccuccgcacccaggaguccgagugcgccugcgucaacggcuccugcuucaccaucaugaccgacggccccuccgacggccaggccuccuacaagaucuuccgcaucgagaagggcaagaucgucaaguccgucgagaugaacgcccccaacuaccacuacgaggagugcuccugcuaccccgacuccuccgagaucaccugcgucugccgcgacaacuggcacggcuccaaccgccccugggucuccuucaaccagaaccucgaguaccagaucggcuacaucugcuccggcaucuucggcgacaacccccgccccaacgacaagaccggcuccugcggccccgucuccuccaacggcgccaacggcgucaagggcuucuccuucaaguacggcaacggcaucuggaucggccgcaccaaguccaucuccucccgcaagggcuucgagaugaucugggaccccaacggcuggaccggcaccgacaacaacuucuccaucaagcaggacaucgucggcaucaacgagugguccggcuacuccggcuccuucguccagcaccccgagcucaccggccucgacugcauccgccccugcuucugggucgagcucauccgcggccgccccaaggagaacaccaucuggaccuccggcuccuccaucuccuucugcggcgucaacuccgacaccgucggcugguccuggcccgacggcgccgagcuccccuucaccaucgacaaguga

SEQ ID NO: 118675 - RNA, 1410 nt, Artificial Sequence; identical to SEQ ID NO: 118674
  derived and/or modified CDS sequence (opt2) from neuraminidase__InfluenzaA__AFM73028

SEQ ID NO: 118676 - RNA, 1410 nt, Artificial Sequence; identical to SEQ ID NO: 118674
  derived and/or modified CDS sequence (opt2) from neuraminidase__InfluenzaA__AFM73038

SEQ ID NO: 118677 - RNA, 1410 nt, Artificial Sequence; identical to SEQ ID NO: 114509
  derived and/or modified CDS sequence (opt2) from neuraminidase__InfluenzaA__AFM73048

SEQ ID NO: 118678 - RNA, 1410 nt, Artificial Sequence
  derived and/or modified CDS sequence (opt2) from neuraminidase__InfluenzaA__AFM73058
augaaccccaaccagaagaucaucaccaucggcuccuucugcaugaccaucggccucgccaaccucauccuccagaucggcaacaucaucuccaucuggaucucccacuccauccagcucggcaaccagaaccagaucgagaccugcaaccaguccgucaucaccuacgagaacaacaccugggucaaccagaccuacgucaacaucuccaacaccaacuucgccgccggccaguccgucgucuccgucaagcucgccggcaacuccucccucugccccgucuccggcugggccaucuacuccaaggacaacuccguccgcaucggcuccaagggcgacgucuucgucauccgcgagcccuucaucuccugcuccccccucgagugccgcaccuucuuccucacccagggcgcccuccucaacgacaagcacuccaacggcaccaucaaggaccgcucccccuaccgcacccucauguccugccccaucggcgagguccccucccccuacaacucccgcuucgaguccgucgccugguccgccuccgccugccacgacggcaucaacuggcucaccaucggcaucuccggccccgacaacggcgccgucgccguccucaaguacaacggcaucaucaccgacaccaucaaguccuggcgcaacaacauccuccgcacccaggaguccgagugcgccugcgucaacggcuccugcuucaccgucaugaccgacggccccuccgacggccaggccuccuacaagaucuuccgcaucgagaagggcaagaucgucaaguccgucgagaugaacgcccccaacuaccacuacgaggagugcuccugcuaccccgacuccuccgagaucaccugcgucugccgcgacaacuggcacggcuccaaccgccccugggucuccuucaaccagaaccucgaguaccgcaucggcuacaucugcuccggcaucuucggcgacaacccccgccccaacgacaagaccggcuccugcggccccgucuccuccaacggcgccaacggcgucaagggcuucuccuucaaguacggcaacggcgucuggaucggccgcaccaaguccaucuccucccgcaacggcuucgagaugaucugggaccccaacggcuggaccggcaccgacaagaacuucuccaucaagcaggacaucgucggcaucaacgagugguccggcuacuccggcuccuucguccagcaccccgagcucaccggccucgacugcauccgccccugcuucugggucgagcucauccgcggccgccccaaggagaacaccaucuggaccuccggcuccuccaucuccuucugcggcgucaacuccgacaccgucggcugguccuggcccgacggcgccgagcuccccuucaccaucgacaaguga

SEQ ID NO: 118679 - RNA, 1410 nt, Artificial Sequence; identical to SEQ ID NO: 114509
  derived and/or modified CDS sequence (opt2) from neuraminidase__InfluenzaA__AFM73068

SEQ ID NO: 118680 - RNA, 1413 nt, Artificial Sequence; identical to SEQ ID NO: 110987
  derived and/or modified CDS sequence (opt2) from neuraminidase__InfluenzaA__AFM73480

SEQ ID NO: 118681 - RNA, 1350 nt, Artificial Sequence
  derived and/or modified CDS sequence (opt2) from neuraminidase__InfluenzaA__AFM78569
augaaccccaaccagaagaucaucaccaucggcuccaucugcauggucaucggcaucgucucccucaugcuccagaucggcaacaugaucuccaucugggucauccacuccauccagaccggcaaccagcaccaggccgaguccaucuccaacaccaacccccucaccgagaaggccgucgccuccgucacccucgccggcaacuccucccucugccccauccgcggcugggccguccacuccaaggacaacaacauccgcaucggcuccaagggcgacgucuucgucauccgcgagcccuucaucuccugcucccaccucgagugccgcaccuucuuccucacccagggcgcccuccucaacgacaagcacuccaacggcaccgucaaggaccgcuccccccaccgcacccucauguccugccccgucggcgaggcccccucccccuacaacucccgcuucgaguccgucgccugguccgccuccgccugccacgacggcaccuccuggcucaccaucggcaucuccggccccgacaacgaggccgucgccguccucaaguacaacggcaucaucaccgacaccaucaaguccuggcgcaacgacauccuccgcacccaggaguccgagugcgccugcgucaacggcuccugcuucaccgucaugaccgacggccccuccaacggccaggccuccuacaagaucuucaagauggagaagggcaaggucgucaaguccgucgagcucgacgcccccaacuaccacuacgaggagugcuccugcuaccccgacgccggcgagaucaccugcgucugccgcgacaacuggcacggcuccaaccgccccugggucuccuucaaccagaaccucgaguaccagaucggcuacaucugcuccggcgucuucggcgacaacccccgccccaacgacggcaccggcuccugcggccccaugucccccaacggcgccuacggcgucaagggcuucuccuucaaguacggcaacggcgucuggaucggccgcaccaaguccaccaacucccgcuccggcuucgagaugaucugggaccccaacggcuggaccggcaccgacuccuccuucuccgucaagcaggacaucgucgccaucaccgacugguccggcuacuccggcuccuucguccagcaccccgagcucaccggccucgacugcauccgccccugcuucugggucgagcucauccgcggccgccccaaggaguccaccaucuggaccuccggcuccuccaucuccuucugcggcgucaacuccgacaccgucuccugguccuggcccgacggcgccgagcuccccuucaccaucgacaaguga

SEQ ID NO: 118682 - RNA, 1410 nt, Artificial Sequence
  derived and/or modified CDS sequence (opt2) from neuraminidase__InfluenzaA__AFM85180
augaaccccaaccagaagaucaucaccaucggcuccgucucccucaccaucgccaccaucugcuuccucacccagaucgccauccucgucaccaccgucacccuccacuucaagcaguacgagugcaacuccucccccaacaaccaggucaugcucugcgagcccaccaucaucgagcgcaacaucaccgagaucgucuaccucaccaacaccaccaucgagaaggagaucugccccaagcucgccgaguaccgcaacugguccaagccccagugcaacaucaccggcuucgcccccuucuccaaggacaacuccauccgccucuccgccggcggcgacaucugggucacccgcgagcccuacgucuccugcggccccgacaagugcuaccaguucgcccucggccagggcaccacccucaacaacggccacuccaacgacaccguccacgaccgcacccccuaccgcacccuccucaugaacgagcucggcguccccuuccaccucggcaccaagcaggucugcaucgccugguccuccuccuccugccacgacggcaaggccuggcuccacgucugcgucaccggcgacgacaagaacgccaccgccuccuucaucuacaacggccgccucgucgacuccaucggcuccugguccaagaagauccuccgcacccaggaguccgagugcgucugcaucaacggcaccugcaccgucgucaugaccgacggcuccgccuccggcaaggccgacaccaagauccucuucaucgaggagggcaagaucguccacaccucccuccucuccggcuccgcccagcacgucgaggagugcuccugcuacccccgcuaccccggcguccgcugcgucugccgcgacaacuggaagggcuccaaccgccccaucgucgacaucaacgucaaggacuacuccaucgucuccuccuacgucugcuccggccucgucggcgacaccccccgcaagaacgacuccuccuccuccucccacugccucgaccccaacaacgaggagggcggccacggcgucaagggcugggccuucgacgacggcaacgacgucuggaugggccgcaccaucuccgagaagcuccgcuccggcuacgagaccuucaaggucaucgagggcugguccaagcccaacuccaagcuccagaucaaccgccaggucaucgucgaccgcggcaaccgcuccggcuacuccggcaucuucuccgucgagggcaaguccugcaucaaccgcugcuucuacgucgagcucauccgcggccgcaaccaggagaccgagguccucuggaccuccaacuccaucgucgucuucugcggcaccuccggcaccuacggcaccggcuccuggcccgacggcgccgacaucaaccucaugcccaucuga

SEQ ID NO: 118683 - RNA, 1410 nt, Artificial Sequence; identical to SEQ ID NO: 110139
  derived and/or modified CDS sequence (opt2) from neuraminidase__InfluenzaA__AFN11830

SEQ ID NO: 118684 - RNA, 1410 nt, Artificial Sequence
  derived and/or modified CDS sequence (opt2) from neuraminidase__InfluenzaA__AFN11831
augaaccccaaccagaagaucaucaccaucggcuccgucucccucaccaucgccaccaucugcuuccucaugcagaucgccauccucgucaccaccgucacccuccacuucaagcaguacgagugcgacucccccgccaacaaccaggucaugcccugcgagcccaucaucaucgagcgcaacaucaccgagaucgucuaccucaccaacaccaccaucgagaaggagaucugccccaagcucgucgaguaccgcaacugguccaagccccagugcaagaucaccggcuucgcccccuucuccaaggacaacuccauccgccucuccgccggcggcgacaucugggucacccgcgagcccuacgucuccugcgaccccggcaagugcuaccaguucgcccucggccagggcaccacccucgacaacaagcacuccaacgacaccauccacgaccgcaccccccaccgcacccuccucaugaacgagcucggcguccccuuccaccucggcacccgccaggucugcaucgccugguccuccuccuccugccacgacggcaaggccuggcuccacgucugcgucaccggcuacgacaagaacgccaccgccuccuucaucuacgacggccgccucgucgacuccaucggcuccugguccaagaacauccuccgcacccaggaguccgagugcgucugcaucaacggcaccugcaccgucgucaugaccgacggcuccgccuccggccgcgccgacaccaagauccucuucaucgaggagggcaagaucguccacaucuccccccucuccggcuccgcccagcacgucgaggagugcuccugcuacccccgcuaccccggcguccgcugcgucugccgcgacaacuggaagggcuccaaccgccccgucgucgacaucaacgucaaggacuacuccaucgucuccuccuacgucugcuccggccucgucggcgacaccccccgcaacaacgaccgcuccuccuccuccuacugccgcaaccccaacaacgagaagggcaaccacggcgucaagggcugggccuucgacgacggcaacgacgucuggaugggccgcaccaucuccgaggagucccgcuccggcuacgagaccuucaaggucaucggcggcugguccacccccaacuccaagcuccagaucaaccgccaggucaucgucgacuccgacaaccgcuccggcuacuccggcaucuucuccgucgagggcaaguccugcaucaaccgcugcuucuacgucgagcucauccgcggccgcgagcaggagacccgcgucugguggaccuccaacuccaucgucgucuucugcggcaccuccggcaccuacggcaccggcuccuggcccgacggcgccgacaucaaccucaugcccaucuga

SEQ ID NO: 118685 - RNA, 1410 nt, Artificial Sequence; identical to SEQ ID NO: 110612
  derived and/or modified CDS sequence (opt2) from neuraminidase__InfluenzaA__AFN11833

SEQ ID NO: 118686 - RNA, 1410 nt, Artificial Sequence; identical to SEQ ID NO: 112547
  derived and/or modified CDS sequence (opt2) from neuraminidase__InfluenzaA__AFN11835

SEQ ID NO: 118687 - RNA, 1410 nt, Artificial Sequence
  derived and/or modified CDS sequence (opt2) from neuraminidase__InfluenzaA__AFN11836
augaaccccaaccagaagaucaucaccaucggcuccgucucccucaccaucgccaccaugugcuuccucaugcagaucgccauccucgucaccaccgucacccuccacuucaagcaguacgagugcuccuccccccccaacaaccaggucaugcccugcgagcccaccaucaucgagcgcaacaucaccgagaucgucuaccucaccaacaccaccaucgagaaggagaucugccccaagcucgucgaguaccgcaacugguccaagccccagugcaagaucaccggcuucgcccccuucuccaaggacaacuccauccgccucuccgccggcggcgacaucugggucacccgcgagcccuacgucuccugcgaccccggcaagugcuaccaguucgcccucggccagggcaccacccucaacaaccgccacuccaacgacaccguccacgaccgcacccccuaccgcacccuccucaugaacgagcucggcguccccuuccaccucggcaccaagcaggucugcaucgccugguccuccuccuccugccacgacggcaaggccuggcuccacgucugcgucaccggccacgacaagaacgccaccgccuccuucaucuacgacggccgccucgucgacuccaucggcuccugguccaagaacauccuccgcacccaggaguccgagugcgucugcaucaacggcaccugcaccgucgucaugaccgacggcuccgccuccgagcgcgccgacaccaagauccucuucaucgaggagggcaagaucauccacaucuccccccucuccggcuccgcccagcacgucgaggagugcuccugcuacccccgcuaccccggcguccgcugcgucugccgcgacaacuggaagggcuccaaccgccccaucgucgacaucaacgucaaggacuacuccaucgucuccuccuacgucugcuccggccucgucggcgacaccccccgcaagaacgaccgcuccuccuccuccuacugccgcaaccccaacaacgagaagggcucccacggcgucaagggcugggccuucgacgacggcaacgacgucuggaugggccgcaccaucggcgaggagcuccgcuccggcuacgagaccuucaaggucaucggcggcugguccacccccaacuccaagcuccagaucaaccgccaggucaucgucgacuccggcaaccgcuccggcuacuccggcaucuucuccgucgagggcaaguccugcaucaaccgcugcuucuacgucgagcucauccgcggccgcgagcaggagacccgcgucugguggaccuccaacuccaucgucgucuucugcggcaccuccggcaccuacggcaccggcuccuggcccgacggcgccgacaucaaccucaugcccaucuga

SEQ ID NO: 118688 - RNA, 1410 nt, Artificial Sequence
  derived and/or modified CDS sequence (opt2) from neuraminidase__InfluenzaA__AFN11839
augaaccccaaccagaagaucaucaccaucggcuccgucucccucaccaucgccaccaucugcuuccucaugcagaucgccauccucgucaccaccgucacccuccacuucaagcaguacgagugcuccuccccccccaacaaccaggucaugcccugccagcccaccaucaucgagcgcaacaucaccgagaucgucuaccucaccaacaccaccaucgagaaggagaucugccccaagcucgucgaguaccgcaacugguccaagccccagugcaagaucaccggcuucgcccccuucuccaaggacaacuccauccgccucuccgccggcggcgacaucugggucacccgcgagcccuacgucuccugcgaccccggcaagugcuaccaguucgcccucggccagggcaccacccucaacaaccgccacuccaacgacaccguccacgaccgcacccccuaccgcacccuccucaugaacgagcucggcguccccuuccaccucggcaccaagcaggucugcaucgccugguccuccuccuccugccacgacggcaaggccuggcuccacgucugcgucaccggccacgacgagaacgccaccgccuccuucaucuacgacggccgccucgucgacuccaucggcuccugguccaagaacauccuccgcacccaggaguccgagugcgucugcaucaacggcaccugcaccgucgucaugaccgacggcuccgccuccgagcgcgccgacaccaagauccucuucaucgaggagggcaagaucguccacaucuccccccucuccggcuccgcccagcacgucgaggagugcuccugcuacccccgcuaccccggcguccgcugcgucugccgcgacaacuggaagggcuccaaccgccccaucgucgacaucaacaugaaggacuacuccaucgucuccuccuacgucugcuccggccucgucggcgacaccccccgcaagaacgacuccuccuccuccuccuacugccgcaaccccaacaacgagaagggcucccacggcgucaagggcugggccuucgacgacggcaacgacgucuggaugggccgcaccaucuccgaggagcuccgcuccggcuacgagaccuucaaggucaucggcggcugguccacccccaacuccaagcuccagaucaaccgccaggucaucgucgacuccggcaaccgcuccggcuacuccggcaucuucuccgucgagggcaaguccugcaucaaccgcugcuucuacgucgagcucauccgcggccgcaagcaggagaccaaggucugguggaccuccaacuccaucgucgucuucugcggcaccuccggcaccuacggcaccggcuccuggcccgacggcgccgacaucaaccucaugcccaucuga

SEQ ID NO: 118689 - RNA, 1410 nt, Artificial Sequence
  derived and/or modified CDS sequence (opt2) from neuraminidase__InfluenzaA__AFN11840
augaaccccaaccagaagaucaucaccaucggcuccgucucccucaccaucgccaccaucugcuuccucaugcagaucgccauccucgucaccaccgucacccuccacuucaagcaguacgagugcaacuccccccccaacaaccaggucaugcucugcgagcccaccaucaucgagcgcaacaucaccgagaucgucuaccucaccaacaccaccaucgagaaggagaucugccccaagcucgccgaguaccgcaacugguccaagccccagugcaagaucaccggcuucgcccccuucuccaaggacaacuccauccgccucuccgccggcggcgacaucugggucacccgcgagcccuacgucuccugcgaccccggcaagugcuaccaguucgcccucggccagggcaccacccucaacaaccgccacuccaacgacaccguccacgaccgcacccccuaccgcacccuccucaugaacgagcucggcguccccuuccaccucggcaccaagcaggucugcaucgccugguccuccuccuccugccacgacggcaaggccuggcuccacgucugcgucaccggccacgacgagaacgccaccgccuccuucaucuacgacggccgccucgucgacuccaucggcuccugguccaagaacauccuccgcacccaggaguccgagugcgucugcaucaacggcaccugcaccgucgucaugaccgacggcuccgccuccgagcgcgccgacaccaagauccucuucaucgaggagggcaagaucguccacaucuccccccucuccggcuccgcccagcacgucgaggagugcuccugcuacccccgcuaccccggcguccgcugcgucugccgcgacaacuggaagggcuccaaccgccccaucgucgacaucaacgucaaggacuacuccaucgucuccuccuacgucugcuccggccucgucggcgacaccccccgcaagaacgacuccuccuccuccuccuacugccgcaaccccaacaacgagaagggcucccacggcgucaagggcugggccuucgacgacggcaacgacgucuggaugggccgcaccaucggcgaggagcuccgcuccggcuacgagaccuucaaggucaucggcggcugguccacccccaacuccaagcuccagaucaaccgccaggucaucgucgaccgcggcaaccgcuccggcuacuccggcaucuucuccgucgagggcaaguccugcaucaaccgcugcuucuacgucgagcucguccgcggccgcaagcaggagaccgaggucugguggaccuccaacuccaucgucgucuucugcggcaccuccggcaccuacggcaccggcuccuggcccgacggcgccgacaucaaccucaugcccaucuga

SEQ ID NO: 118690 - RNA, 1410 nt, Artificial Sequence; identical to SEQ ID NO: 111965
  derived and/or modified CDS sequence (opt2) from neuraminidase__InfluenzaA__AFN11841

SEQ ID NO: 118691 - RNA, 1410 nt, Artificial Sequence; identical to SEQ ID NO: 118053
  derived and/or modified CDS sequence (opt2) from neuraminidase__InfluenzaA__AFN11842

SEQ ID NO: 118692 - RNA, 1410 nt, Artificial Sequence
  derived and/or modified CDS sequence (opt2) from neuraminidase__InfluenzaA__AFN11844
augaaccccaaccagaagaucaucaccaucggcuccgucucccucaccaucuccaccaucugcuucuucaugcagaucgccauccucaucaccaccgucacccuccacuucaagcaguacgaguucaacuccccccccaacaaccaggucaugcucugcgagcccaccaucaucgagcgcaacaucaccgagaucgucuaccucaccaacaccaccaucgagaaggagaucugccccaagcucgccgaguaccgcaacugguccaagccccagugcaacaucaccggcuucgcccccuucuccaaggacaacuccauccgccucuccgccggcggcgacaucugggucacccgcgagcccuacgucuccugcgaccccgacaagugcuaccaguucgcccucggccagggcaccacccucaacaacguccacuccaacgacaccguccgcgaccgcacccccuaccgcacccuccucaugaacgagcucggcguccccuuccaccucggcaccaagcaggucugcaucgccugguccuccuccuccugccacgacggcaaggccuggcuccacgucugcgucaccggcgacgacaagaacgccaccgccuccuucaucuacaacggccgccucgucgacuccaucgucuccugguccaaggagauccuccgcacccaggaguccgagugcgucugcaucaacggcaccugcaccgucgucaugaccgacggcuccgccuccggcaaggccgacaccaagauccucuucaucgaggagggcaagaucguccacaccuccacccucuccggcuccgcccagcacgucgaggagugcuccugcuacccccgcuaccccggcguccgcugcgucugccgcgacaacuggaagggcuccaaccgccccaucgucgacaucaacaucaaggacuacuccaucgucuccuccuacgucugcuccggccucgucggcgacaccccccgcaagaacgacuccuccuccuccucccacugccucgaccccaacaacgaggagggcggccacggcgucaagggcugggccuucgacgacggcaacgacgucuggaugggccgcaccaucuccgagaagcuccgcuccggcuacgagaccuucaaggucaucgagggcugguccaaccccaacuccaagcuccagaucaaccgccaggucaucgucgaccgcggcaaccgcuccggcuacuccggcaucuucuccgucgagggcaaguccugcaucaaccgcugcuucuacgucgagcucauccgcggccgcaaggaggagaccgagguccucuggaccuccaacuccaucgucgucuucugcggcaccuccggcaccuacggcaccggcuccuggcccgacggcgccgacaucggccucaugcccauguga

SEQ ID NO: 118693 - RNA, 1410 nt, Artificial Sequence; identical to SEQ ID NO: 118612
  derived and/or modified CDS sequence (opt2) from neuraminidase__InfluenzaA__AFN11845

SEQ ID NO: 118694 - RNA, 1410 nt, Artificial Sequence; identical to SEQ ID NO: 118140
  derived and/or modified CDS sequence (opt2) from neuraminidase__InfluenzaA__AFN11847

SEQ ID NO: 118695 - RNA, 1410 nt, Artificial Sequence
  derived and/or modified CDS sequence (opt2) from neuraminidase__InfluenzaA__AFN11848
augaaccccaaccagaagaucaucaccaucggcuccgucucccucaccaucuccaccaucugcuucuucaugcagaucgccauccucaucaccaccgucacccuccacuucaagcaguacgaguucaacuccccccccaacaaccaggucaugcucugcgagcccaccaucaucgagcgcaacaucaccgagaucgucuaccucaccaacaccaccaucgagaaggagaucugccccaagcucgccgaguaccgcaacugguccaagccccagugcaacaucaccggcuucgcccccuucuccaaggacaacuccauccgccucuccgccggcggcgacaucugggucacccgcgagcccuacgucuccugcgaccccgacaagugcuaccaguucgcccucggccagggcaccacccucaacaacguccacuccaacgacaccguccacgaccgcacccccuaccgcacccuccucaugaacgagcucggcguccccuuccaccucggcaccaagcaggucugcaucgccugguccuccuccuccugccacgacggcaaggccuggcuccacgucugcgucaccggcgacgacgagaacgccaccgccuccuucaucuacaacggccgccucgucgacuccaucgucuccugguccaagaagauccuccgcacccaggaguccgagugcgucugcaucaacggcaccugcaccgucgucaugaccgacggcuccgccuccggcaaggccgacaccaagauccucuucaucgaggagggcaagaucguccacaccuccacccucuccggcuccgcccagcacgucgaggagugcuccugcuacccccgcuaccccggcguccgcugcgucugccgcgacaacuggaagggcuccaaccgccccaucgucgacaucaacaucaaggacuacuccaucgucuccuccuacgucugcuccggccucgucggcgacaccccccgcaagaacgacuccuccuccuccucccacugccucggccccaacaacgaggagggcggccacggcgucaagggcugggccuucgacgacggcaacgacgucuggaugggccgcaccaucuccgagaagcuccgcuccggcuacgagaccuucaaggucaucgagggcugguccaaccccaacuccaagcuccagaucaaccgccaggucaucgucgaccgcggcaaccgcuccggcuacuccggcaucuucuccgucgagggcaaguccugcaucaaccgcugcuucuacgucgagcucauccgcggccgcaagcaggagaccgagguccucuggaccuccaacuccaucgucgucuucugcggcaccuccggcaccuacggcaccggcuccuggcccgacggcgccgacaucaaccucaugcccaucuga

SEQ ID NO: 118696 - RNA, 1410 nt, Artificial Sequence
  derived and/or modified CDS sequence (opt2) from neuraminidase__InfluenzaA__AFN11850
augaaccccaaccagaagaucaucaccaucggcuccgucucccucaccaucuccaccaucugcuucuucaugcagaucgccauccucaucaccaccgucacccuccacuucaagcaguacgaguucaacuccccccccaacaaccaggucaugcucugcgagcccaccaucaucgagcgcaacaucaccgagaucgucuaccucaccaacaccaccaucgagaaggagaucugccccaagcucgccgaguaccgcaacugguccaagccccagugcgacaucaccggcuucgcccccuucuccaaggacaacuccauccgccucuccgccggcggcgacaucugggucacccgcgagcccuacgucuccugcgaccccgacaagugcuaccaguucgcccucggccagggcaccacccucaacaacguccacuccaacaacaccguccgcggccgcacccccuaccgcacccuccucaugaacgagcucggcguccccuuccaccucggcaccaagcaggucugcaucgccugguccuccuccuccugccacgacggcaaggccuggcuccacgucugcaucaccggcgacgacaagaacgccaccgccuccuucaucuacaacggccgccucgucgacuccgucgucuccugguccaaggagauccuccgcacccaggaguccgagugcgucugcaucaacggcaccugcaccgucgucaugaccgacggcuccgccuccggcaaggccgacaccaagauccucuucaucgaggagggcaagaucguccacaccuccacccucuccggcuccgcccagcacgucgaggagugcuccugcuacccccgcuaccccggcguccgcugcgucugccgcgacaacuggaagggcuccaaccgccccaucgucgacaucaacaucaaggaccacuccaucgucuccuccuacgucugcuccggccucgucggcgacaccccccgcaagaacgacuccuccuccuccucccacugccucgaccccaacaacgaggagggcggccacggcgucaagggcugggccuucgacgacggcaacgacgucuggaugggccgcaccaucuccgagaagucccgccucggcuacgagaccuucaaggucaucgagggcugguccaaccacaaguccaagcuccagaucaaccgccaggucaucgucgaccgcggcaaccgcuccggcuacuccggcaucuucuccgucgagggcaaguccugcaucaaccgcugcuucuacgucgagcucauccgcggccgcaaggaggagaccgagguccucuggaccuccaacuccaucgucgucuucugcggcaccuccggcaccuacggcaccggcuccuggcccgacggcgccgaccucaaccucaugcccaucuga

SEQ ID NO: 118697 - RNA, 1410 nt, Artificial Sequence
  derived and/or modified CDS sequence (opt2) from neuraminidase__InfluenzaA__AFN11851
augaaccccaaccagaagaucaucaccaucggcuccgucucccucaccaucgccaccaucugccuccucaugcagaucgccauccucgucaccaccgucacccuccacuucaagcaguacgagugcaacuccccccccaacaaccaggucaugcucugcgagcccaccaucaucgagcgcaacaucaccaagaucgucuaccucaccaacaccaccaucgagaaggagaucugccccaagcucgccgaguaccgcaacugguccaagccccagugcaagaucaccggcuucgcccccuucuccaaggacaacuccauccgccucuccgccggcggcgacaucugggucacccgcgagcccuacgucuccugcgaccccggcaagugcuaccaguucgcccucggccagggcaccacccucaacaaccgccacuccaacgacaccguccacgaccgcacccccuaccgcacccuccucaugaacgagcucggcguccccuuccaccucggcaccaagcaggucugcaucgccugguccuccuccuccugccacgacggcaaggccuggcuccacgucugcgucaccggccacgacgagaacgccaccgccuccuucaucuacgacggccgccucgucgacuccaucggcuccugguccaagaacauccuccgcacccaggaguccgagugcgucugcaucaacggcaccugcaccgucgucaugaccgacggcuccgccuccgagcgcgccgacaccaagauccucuucaucgaggagggcaagaucguccacaucuccccccucuccggcuccgcccagcacgucgaggagugcuccugcuacccccgcuaccccggcguccgcugcgucugccgcgacaacuggaagggcuccaaccgccccaucgucgacaucaacgucaaggacuacuccaucgucuccuccuacgucugcuccggccucgucggcgacaccccccgcaagaacgacuccuccuccuccuccuacugccgcaaccccaacaacgagaagggcucccacggcgucaagggcugggccuucgacgacggcaacgacgucuggaugggccgcaccaucuccgaggagcuccgcuccggcuacgagaccuucaaggucaucggcggcugguccaagcccaacuccaagcuccagaucaaccgccaggucaucgucgaccgcggcaaccgcuccggcuacuccggcaucuucuccgucgagggcaaguccugcaucaaccgcugcuucuacgucgagcucauccgcggccgcaagcaggagaccgaggucugguggaccuccaacuccaucgucgucuucugcggcaccuccggcaccuacggcaccggcuccuggcccgacggcgccgacaucaaccucaugcccaucuga

SEQ ID NO: 118698 - RNA, 1410 nt, Artificial Sequence; identical to SEQ ID NO: 110363
  derived and/or modified CDS sequence (opt2) from neuraminidase__InfluenzaA__AFN11853

SEQ ID NO: 118699 - RNA, 1410 nt, Artificial Sequence
  derived and/or modified CDS sequence (opt2) from neuraminidase__InfluenzaA__AFN11855
augaaccccaaccagaagaucaucaccaucggcuccgucucccucaccaucuccaccaucugcuucuucaugcagaccgccauccucaucaccaucgucacccuccacuucaagcaguacgaguucaacuccccccccaacaaccaggucaugcucugcgagcccaccaucaucgagcgcaacaucaccgagaucgucuaccucaccaacaccaccaucgagaaggagaucugccccaagcucgccgaguaccgcaacugguccaagccccagugcgacaucaccggcuucgcccccuucuccaaggacaacuccauccgccucuccgccggcggcgacaucugggucacccgcgagcccuacgucuccugcgaccccgacaagugcuaccaguucgcccucggccagggcaccacccucaacaacguccacuccaacgacaccguccacgaccgcacccccuaccgcacccuccucaugaacgagcucggcguccccuuccaccucggcaccaagcaggucugcaucgccugguccuccuccuccugccacgacggcaaggccuggcuccacgucugcaucaccggcgacgacaagaacgccaccgccuccuucaucuacaacggccgccucgucgacuccaucgucuccugguccaaggagauccuccgcacccaggaguccgagugcgucugcaucaacggcaccugcaccgucgucaugaccgacggcuccgccuccggcaaggccgacaccaagauccucuucaucgaggagggcaagaucguccacaccuccauccucuccggcuccgcccagcacgucgaggagugcuccugcuacccccgcuaccccggcguccgcugcgucugccgcgacaacuggaagggcuccaaccgccccaucgucgacaucaacaucaaggaccacuccaucgucuccuccuacgucugcuccggccucgucggcgacaccccccgcaagaacgacuccuccuccuccucccacugccucgaccccaacaacgaggagggcggccacggcgucaagggcugggccuucgacgacggcaacgacgucuggaugggccgcaccaucuccgagaagucccgccucggcuacgagaccuucaaggucaucgagggcugguccaaccccaaguccaagcuccagaucaaccgccaggucaucgucgaccgcggcaaccgcuccggcuacuccggcaucuucuccgucgagggcaaguccugcaucaaccgcugcuucuacgucgagcucauccgcggccgcaaggaggagaccgagguccucuggaccuccaacuccaucgucgucuucugcggcaccuccggcaccuacggcaccggcuccuggcccgacggcgccgacaucaaccucaugcccaucuga

SEQ ID NO: 118700 - RNA, 1410 nt, Artificial Sequence; identical to SEQ ID NO: 111965
  derived and/or modified CDS sequence (opt2) from neuraminidase__InfluenzaA__AFN11857

SEQ ID NO: 118701 - RNA, 1410 nt, Artificial Sequence; identical to SEQ ID NO: 112774
  derived and/or modified CDS sequence (opt2) from neuraminidase__InfluenzaA__AFN17373

SEQ ID NO: 118702 - RNA, 1410 nt, Artificial Sequence; identical to SEQ ID NO: 118407
  derived and/or modified CDS sequence (opt2) from neuraminidase__InfluenzaA__AFN17383

SEQ ID NO: 118703 - RNA, 1410 nt, Artificial Sequence; identical to SEQ ID NO: 112774
  derived and/or modified CDS sequence (opt2) from neuraminidase__InfluenzaA__AFN17393

SEQ ID NO: 118704 - RNA, 1410 nt, Artificial Sequence; identical to SEQ ID NO: 112774
  derived and/or modified CDS sequence (opt2) from neuraminidase__InfluenzaA__AFN17403

SEQ ID NO: 118705 - RNA, 1410 nt, Artificial Sequence; identical to SEQ ID NO: 112774
  derived and/or modified CDS sequence (opt2) from neuraminidase__InfluenzaA__AFN17413

SEQ ID NO: 118706 - RNA, 1410 nt, Artificial Sequence; identical to SEQ ID NO: 112774
  derived and/or modified CDS sequence (opt2) from neuraminidase__InfluenzaA__AFN17423

SEQ ID NO: 118707 - RNA, 1410 nt, Artificial Sequence; identical to SEQ ID NO: 112774
  derived and/or modified CDS sequence (opt2) from neuraminidase__InfluenzaA__AFN17433

SEQ ID NO: 118708 - RNA, 1410 nt, Artificial Sequence; identical to SEQ ID NO: 112774
  derived and/or modified CDS sequence (opt2) from neuraminidase__InfluenzaA__AFN17443

SEQ ID NO: 118709 - RNA, 1410 nt, Artificial Sequence; identical to SEQ ID NO: 112774
  derived and/or modified CDS sequence (opt2) from neuraminidase__InfluenzaA__AFN17453

SEQ ID NO: 118710 - RNA, 1410 nt, Artificial Sequence; identical to SEQ ID NO: 112774
  derived and/or modified CDS sequence (opt2) from neuraminidase__InfluenzaA__AFN17459

SEQ ID NO: 118711 - RNA, 1410 nt, Artificial Sequence; identical to SEQ ID NO: 112774
  derived and/or modified CDS sequence (opt2) from neuraminidase__InfluenzaA__AFN17469

SEQ ID NO: 118712 - RNA, 1410 nt, Artificial Sequence; identical to SEQ ID NO: 112774
  derived and/or modified CDS sequence (opt2) from neuraminidase__InfluenzaA__AFN17479

SEQ ID NO: 118713 - RNA, 1410 nt, Artificial Sequence; identical to SEQ ID NO: 112774
  derived and/or modified CDS sequence (opt2) from neuraminidase__InfluenzaA__AFN17489

SEQ ID NO: 118714 - RNA, 1410 nt, Artificial Sequence; identical to SEQ ID NO: 112774
  derived and/or modified CDS sequence (opt2) from neuraminidase__InfluenzaA__AFN17499

SEQ ID NO: 118715 - RNA, 1410 nt, Artificial Sequence; identical to SEQ ID NO: 112774
  derived and/or modified CDS sequence (opt2) from neuraminidase__InfluenzaA__AFN17509

SEQ ID NO: 118716 - RNA, 1410 nt, Artificial Sequence; identical to SEQ ID NO: 112774
  derived and/or modified CDS sequence (opt2) from neuraminidase__InfluenzaA__AFN17519

SEQ ID NO: 118717 - RNA, 1410 nt, Artificial Sequence; identical to SEQ ID NO: 112774
  derived and/or modified CDS sequence (opt2) from neuraminidase__InfluenzaA__AFN17529

SEQ ID NO: 118718 - RNA, 1410 nt, Artificial Sequence; identical to SEQ ID NO: 112774
  derived and/or modified CDS sequence (opt2) from neuraminidase__InfluenzaA__AFN17539

SEQ ID NO: 118719 - RNA, 1410 nt, Artificial Sequence; identical to SEQ ID NO: 112774
  derived and/or modified CDS sequence (opt2) from neuraminidase__InfluenzaA__AFN17549

SEQ ID NO: 118720 - RNA, 1410 nt, Artificial Sequence; identical to SEQ ID NO: 112774
  derived and/or modified CDS sequence (opt2) from neuraminidase__InfluenzaA__AFN17559

SEQ ID NO: 118721 - RNA, 1410 nt, Artificial Sequence; identical to SEQ ID NO: 112774
  derived and/or modified CDS sequence (opt2) from neuraminidase__InfluenzaA__AFN17569

SEQ ID NO: 118722 - RNA, 1410 nt, Artificial Sequence; identical to SEQ ID NO: 112774
  derived and/or modified CDS sequence (opt2) from neuraminidase__InfluenzaA__AFN17575

SEQ ID NO: 118723 - RNA, 1410 nt, Artificial Sequence; identical to SEQ ID NO: 112774
  derived and/or modified CDS sequence (opt2) from neuraminidase__InfluenzaA__AFN17581

SEQ ID NO: 118724 - RNA, 1410 nt, Artificial Sequence; identical to SEQ ID NO: 112774
  derived and/or modified CDS sequence (opt2) from neuraminidase__InfluenzaA__AFN17587

SEQ ID NO: 118725 - RNA, 1410 nt, Artificial Sequence; identical to SEQ ID NO: 112774
  derived and/or modified CDS sequence (opt2) from neuraminidase__InfluenzaA__AFN17597

SEQ ID NO: 118726 - RNA, 1410 nt, Artificial Sequence; identical to SEQ ID NO: 118407
  derived and/or modified CDS sequence (opt2) from neuraminidase__InfluenzaA__AFN17607

SEQ ID NO: 118727 - RNA, 1410 nt, Artificial Sequence; identical to SEQ ID NO: 112774
  derived and/or modified CDS sequence (opt2) from neuraminidase__InfluenzaA__AFN17617

SEQ ID NO: 118728 - RNA, 1410 nt, Artificial Sequence; identical to SEQ ID NO: 112774
  derived and/or modified CDS sequence (opt2) from neuraminidase__InfluenzaA__AFN17627

SEQ ID NO: 118729 - RNA, 1410 nt, Artificial Sequence; identical to SEQ ID NO: 112774
  derived and/or modified CDS sequence (opt2) from neuraminidase__InfluenzaA__AFN17637

SEQ ID NO: 118730 - RNA, 1410 nt, Artificial Sequence; identical to SEQ ID NO: 112774
  derived and/or modified CDS sequence (opt2) from neuraminidase__InfluenzaA__AFN17647

SEQ ID NO: 118731 - RNA, 1410 nt, Artificial Sequence; identical to SEQ ID NO: 112774
  derived and/or modified CDS sequence (opt2) from neuraminidase__InfluenzaA__AFN17657

SEQ ID NO: 118732 - RNA, 1410 nt, Artificial Sequence; identical to SEQ ID NO: 112774
  derived and/or modified CDS sequence (opt2) from neuraminidase__InfluenzaA__AFN17667

SEQ ID NO: 118733 - RNA, 1410 nt, Artificial Sequence; identical to SEQ ID NO: 112774
  derived and/or modified CDS sequence (opt2) from neuraminidase__InfluenzaA__AFN17677

SEQ ID NO: 118734 - RNA, 1410 nt, Artificial Sequence; identical to SEQ ID NO: 118407
  derived and/or modified CDS sequence (opt2) from neuraminidase__InfluenzaA__AFN17687

SEQ ID NO: 118735 - RNA, 1410 nt, Artificial Sequence; identical to SEQ ID NO: 112774
  derived and/or modified CDS sequence (opt2) from neuraminidase__InfluenzaA__AFN17697

SEQ ID NO: 118736 - RNA, 1410 nt, Artificial Sequence; identical to SEQ ID NO: 118407
  derived and/or modified CDS sequence (opt2) from neuraminidase__InfluenzaA__AFN17707

SEQ ID NO: 118737 - RNA, 1410 nt, Artificial Sequence; identical to SEQ ID NO: 112774
  derived and/or modified CDS sequence (opt2) from neuraminidase__InfluenzaA__AFN17717

SEQ ID NO: 118738 - RNA, 1410 nt, Artificial Sequence; identical to SEQ ID NO: 118407
  derived and/or modified CDS sequence (opt2) from neuraminidase__InfluenzaA__AFN17727

SEQ ID NO: 118739 - RNA, 1410 nt, Artificial Sequence; identical to SEQ ID NO: 112774
  derived and/or modified CDS sequence (opt2) from neuraminidase__InfluenzaA__AFN17737

SEQ ID NO: 118740 - RNA, 1410 nt, Artificial Sequence; identical to SEQ ID NO: 112774
  derived and/or modified CDS sequence (opt2) from neuraminidase__InfluenzaA__AFN17743

SEQ ID NO: 118741 - RNA, 1410 nt, Artificial Sequence; identical to SEQ ID NO: 118407
  derived and/or modified CDS sequence (opt2) from neuraminidase__InfluenzaA__AFN17749

SEQ ID NO: 118742 - RNA, 1410 nt, Artificial Sequence; identical to SEQ ID NO: 112774
  derived and/or modified CDS sequence (opt2) from neuraminidase__InfluenzaA__AFN17759

SEQ ID NO: 118743 - RNA, 1410 nt, Artificial Sequence; identical to SEQ ID NO: 112774
  derived and/or modified CDS sequence (opt2) from neuraminidase__InfluenzaA__AFN17769

SEQ ID NO: 118744 - RNA, 1410 nt, Artificial Sequence; identical to SEQ ID NO: 112774
  derived and/or modified CDS sequence (opt2) from neuraminidase__InfluenzaA__AFN17775

SEQ ID NO: 118745 - RNA, 1410 nt, Artificial Sequence
  derived and/or modified CDS sequence (opt2) from neuraminidase__InfluenzaA__AFN17785
augaaccccaaccagaagaucaucaccaucggcuccgucugcaugaccaucggcauggccaaccucauccuccagaucggcaacaucaucuccaucuggaucucccacuccauccagcucggcaaccagaaccagaucgagaccugcaaccaguccgucaucaccuacgagaacaacaccugggucaaccagaccuacgucaacaucuccaacaccaacuucgccgccggccaguccgucgucuccgucaagcucgccggcaacuccucccucugccccgucuccggcugggccaucuacuccaaggacaacuccauccgcaucggcuccaagggcgacgucuucgucauccgcgagcccuucaucuccugcuccccccucgagugccgcaccuucuuccucacccagggcgcccuccucaacgacaagcacuccaacggcaccaucaaggaccgcucccccuaccgcacccucauguccugccccaucggcgagguccccucccccuacaacucccgcuucgaguccgucgccugguccgccuccgccugccacgacggcaucaacuggcucaccaucggcaucuccggccccgacaacggcgccgucgccguccucaaguacaacggcaucaucaccgacaccaucaaguccuggcgcaacaacauccuccgcacccaggaguccgagugcgccugcgucaacggcuccugcuucacccucaugaccgacggccccuccgacggccaggccuccuacaagaucuuccgcaucgagaagggcaagaucgucaaguccgucgagaugaacgcccccaacuaccacuacgaggagugcuccugcuaccccgacuccuccgagaucaccugcgucugccgcgacaacuggcacggcuccaaccgccccugggucuccuucaaccagaaccucgaguaccagaucggcuacaucugcuccggcaucuucggcgacaacccccgccccaacgacaagaccggcuccugcggccccgucuccuccaacggcgccaacggcgucaagggcuucuccuucaaguacggcaacggcgucuggaucggccgcaccaaguccaucuccucccgcaacggcuucgagaugaucugggaccccaacggcuggaccggcaccgacaacaccuucuccaucaagcaggacaucgucggcaucaacgagugguccggcuacuccggcuccuucguccagcaccccgagcucaccggccucgacugcauccgccccugcuucugggucgagcucauccgcggccgccccaaggagaacaccaucuggaccuccggcuccuccaucuccuucugcggcgucaacuccgacaccgucggcugguccuggcccgacggcgccgagcuccccuucaccaucgacaaguga

SEQ ID NO: 118746 - RNA, 1410 nt, Artificial Sequence
  derived and/or modified CDS sequence (opt2) from neuraminidase__InfluenzaA__AFN17795
augaaccccaaccagaagaucaucaccaucggcuccgucugcaugaccaucggcauggccaaccucauccuccagaucggcaacaucaucuccaucuggaucucccacuccauccagcucggcaaccagaaccagaucgagaccugcaaccaguccgucaucaccuacgagaacaacaccugggucaaccagaccuacgucaacaucuccaacaccaacuucgccgccggccaguccgucgucuccgucaagcucgccggcaacuccucccucugccccgucggcggcugggccaucuacuccaaggacaacuccauccgcaucggcuccaagggcgacgucuucgucauccgcgagcccuucaucuccugcuccccccucgagugccgcaccuucuuccucacccagggcgcccuccucaacgacaagcacuccaacggcaccaucaaggaccgcucccccuaccgcacccucauguccugccccaucggcgagguccccucccccuacaacucccgcuucgaguccgucgccugguccgccuccgccugccacgacggcaucaacuggcucaccaucggcaucuccggccccgacaacggcgccgucgccguccucaaguacaacggcaucaucaccgacaccaucaaguccuggcgcaacaacauccuccgcacccaggaguccgagugcgccugcgucaacggcuccugcuucaccgucaugaccgacggccccuccgacggccaggccuccuacaagaucuuccgcaucgagaagggcaagaucgucaaguccgucgagaugaacgcccccaacuaccacuacgaggagugcuccugcuaccccgacuccuccgagaucaccugcgucugccgcgacaacuggcacggcuccaaccgccccugggucuccuucaaccagaaccucgaguaccagaucggcuacaucugcuccggcaucuucggcgacaacccccgccccaacgacaagaccggcuccugcggccccgucuccuccaacggcgccaacggcgucaagggcuucuccuucaaguacggcaacggcgucuggaucggccgcaccaaguccaucuccucccgcaacggcuucgagaugaucugggaccccaacggcuggaccggcaccgacaacaacuucuccaucaagcaggacaucgucggcaucaacgagugguccggcuacuccggcuccuucguccagcaccccgagcucaccggccucgacugcauccgccccugcuucugggucgagcucauccgcggccgccccaaggagaacaccaucuggaccuccggcuccuccaucuccuucugcggcgucaacuccgacaccgucggcugguccuggcccgacggcgccgagcuccccuucaccaucgacaaguga

SEQ ID NO: 118747 - RNA, 1410 nt, Artificial Sequence; identical to SEQ ID NO: 112774
  derived and/or modified CDS sequence (opt2) from neuraminidase__InfluenzaA__AFN17805

SEQ ID NO: 118748 - RNA, 1410 nt, Artificial Sequence
  derived and/or modified CDS sequence (opt2) from neuraminidase__InfluenzaA__AFN17815
augaaccccaaccagaagaucaucaccaucggcuccgucuccaugaccaucggcauggccaaccucauccuccagaucggcaacaucaucuccaucuggaucucccacuccauccagcucggcaaccagaaccagaucgagaccugcaaccaguccgucaucaccuacgagaacaacaccugggucaaccagaccuacgucaacaucuccaacaccaacuucgccgccggccaguccgucgucuccgucaagcucgccggcaacuccucccucugccccgucuccggcugggccaucuacuccaaggacaacuccauccgcaucggcuccaagggcgacgucuucgucauccgcgagcccuucaucuccugcuccccccucgagugccgcaccuucuuccucacccagggcgcccuccucaacgacaagcacuccaacggcaccaucaaggaccgcucccccuaccgcacccucauguccugccccaucggcgagguccccucccccuacaacucccgcuucgaguccgucgccugguccgccuccgccugccacgacggcaucaacuggcucaccaucggcaucuccggccccgacaacggcgccgucgccguccucaaguacaacggcaucaucaccgacaccaucaaguccuggcgcaacaacauccuccgcacccaggaguccgagugcgccugcgucaacggcuccugcuucaccgucaugaccgacggccccuccgacggccaggccuccuacaagaucuuccgcaucgagaagggcaagaucgucaaguccgucgagaugaacgcccccaacuaccacuacgaggagugcuccugcuaccccgacuccuccgagaucaccugcgucugccgcgacaacuggcacggcuccaaccgccccugggucuccuucaaccagaaccucgaguaccagaucggcuacaucugcuccggcaucuucggcgacaacccccgccccaacgacaagaccggcuccugcggccccgucuccuccaacggcgccaacggcgucaagggcuucuccuucaaguacggcaacggcgucuggaucggccgcaccaaguccaucuccucccgcaacggcuucgagaugaucugggaccccaacggcuggaccggcaccgacaacaacuucuccaucaagcaggacaucgucggcaucaacgagugguccggcuacuccggcuccuucguccagcaccccgagcucaccggccucgacugcauccgccccugcuucugggucgagcucauccgcggccgccccaaggagaacaccaucuggaccuccggcuccuccaucuccuucugcggcgucaacuccgacaccgucggcugguccuggcccgacggcgccgagcuccccuucaccaucgacaaguga

SEQ ID NO: 118749 - RNA, 1410 nt, Artificial Sequence; identical to SEQ ID NO: 112774
  derived and/or modified CDS sequence (opt2) from neuraminidase__InfluenzaA__AFN17825

SEQ ID NO: 118750 - RNA, 1410 nt, Artificial Sequence; identical to SEQ ID NO: 118407
  derived and/or modified CDS sequence (opt2) from neuraminidase__InfluenzaA__AFN17835

SEQ ID NO: 118751 - RNA, 1410 nt, Artificial Sequence; identical to SEQ ID NO: 112774
  derived and/or modified CDS sequence (opt2) from neuraminidase__InfluenzaA__AFN17845

SEQ ID NO: 118752 - RNA, 1410 nt, Artificial Sequence; identical to SEQ ID NO: 112774
  derived and/or modified CDS sequence (opt2) from neuraminidase__InfluenzaA__AFN17855

SEQ ID NO: 118753 - RNA, 1410 nt, Artificial Sequence; identical to SEQ ID NO: 114588
  derived and/or modified CDS sequence (opt2) from neuraminidase__InfluenzaA__AFN17865

SEQ ID NO: 118754 - RNA, 1410 nt, Artificial Sequence; identical to SEQ ID NO: 118407
  derived and/or modified CDS sequence (opt2) from neuraminidase__InfluenzaA__AFN17875

SEQ ID NO: 118755 - RNA, 1410 nt, Artificial Sequence; identical to SEQ ID NO: 118407
  derived and/or modified CDS sequence (opt2) from neuraminidase__InfluenzaA__AFN17885

SEQ ID NO: 118756 - RNA, 1410 nt, Artificial Sequence; identical to SEQ ID NO: 112774
  derived and/or modified CDS sequence (opt2) from neuraminidase__InfluenzaA__AFN17895

SEQ ID NO: 118757 - RNA, 1410 nt, Artificial Sequence; identical to SEQ ID NO: 118407
  derived and/or modified CDS sequence (opt2) from neuraminidase__InfluenzaA__AFN17905

SEQ ID NO: 118758 - RNA, 1410 nt, Artificial Sequence; identical to SEQ ID NO: 112774
  derived and/or modified CDS sequence (opt2) from neuraminidase__InfluenzaA__AFN17911

SEQ ID NO: 118759 - RNA, 1410 nt, Artificial Sequence; identical to SEQ ID NO: 118407
  derived and/or modified CDS sequence (opt2) from neuraminidase__InfluenzaA__AFN17921

SEQ ID NO: 118760 - RNA, 1410 nt, Artificial Sequence
  derived and/or modified CDS sequence (opt2) from neuraminidase__InfluenzaA__AFN17931
augaaccccaaccagaagaucaucaccaucggcuccgucugcaugaccaucggcauggccaaccucauccuccagaucggcaacaucaucuccaucuggaucucccacuccauccagcucggcaaccagaaccagaucgagaccugcaaccaguccgucaucaccuacgagaacaacaccugggucaaccagaccuacgucaacaucuccaacaccaacuucgccgccggccaguccgucgucuccgucaagcucgccggcaacuccucccucugccccgucuccggcugggccaucuacuccaaggacaacuccauccgcaucggcucccgcggcgacgucuucgucauccgcgagcccuucaucuccugcuccccccucgagugccgcaccuucuuccucacccagggcgcccuccucaacgacaagcacuccaacggcaccaucaaggaccgcucccccuaccgcacccucauguccugccccaucggcgagguccccucccccuacaacucccgcuucgaguccgucgccugguccgccuccgccugccacgacggcaucaacuggcucaccaucggcaucuccggccccgacaacggcgccgucgccguccucaaguacaacggcaucaucaccgacaccaucaaguccuggcgcaacaacauccuccgcacccaggaguccgagugcgccugcgucaacggcuccugcuucaccgucaugaccgacggccccuccgacggccaggccuccuacaagaucuuccgcaucgagaagggcaagaucgucaaguccgucgagaugaacgcccccaacuaccacuacgaggagugcuccugcuaccccgacuccuccgagaucaccugcgucugccgcgacaacuggcacggcuccaaccgccccugggucuccuucaaccagaaccucgaguaccgcaucggcuacaucugcuccggcaucuucggcgacaacccccgccccaacgacaagaccggcuccugcggccccgucuccuccaacggcgccaacggcgucaagggcuucuccuucaaguacggcaacggcgucuggaucggccgcaccaaguccaucuccucccgcaacggcuucgagaugaucugggaccccaacggcuggaccggcaccgacaacaacuucuccaucaagcaggacaucgucggcaucaacgagugguccggcuacuccggcuccuucguccagcaccccgagcucaccggccucgacugcauccgccccugcuucugggucgagcucauccgcggccgccccaaggagaacaccaucuggaccuccggcuccuccaucuccuucugcggcgucaacuccgacaccgucggcugguccuggcccgacggcgccgagcuccccuucaccaucgacaaguga

SEQ ID NO: 118761 - RNA, 1410 nt, Artificial Sequence; identical to SEQ ID NO: 112774
  derived and/or modified CDS sequence (opt2) from neuraminidase__InfluenzaA__AFN17941

SEQ ID NO: 118762 - RNA, 1410 nt, Artificial Sequence; identical to SEQ ID NO: 112774
  derived and/or modified CDS sequence (opt2) from neuraminidase__InfluenzaA__AFN17951

SEQ ID NO: 118763 - RNA, 1410 nt, Artificial Sequence
  derived and/or modified CDS sequence (opt2) from neuraminidase__InfluenzaA__AFN17961
augaaccccaaccagaagaucaucaccaucggcuccgucugcaugaccaucggcauggccaaccucauccuccagaucggcaacaucaucuccaucuggaucucccacuccauccagcucggcaaccagaaccagaucgagaccugcaaccaguccgucaucaccuacgagaacaacaccugggucaaccagaccuacgucaacaucuccaacaccaacuucgccgccggccaguccgucgucuccgucaagcucgccggcaacuccucccucugccccgucuccggcugggccaucuacuccaaggacaacuccauccgcaucggcuccaagggcgacgucuucgucauccgcgagcccuucaucuccugcuccccccucgagugccgcaccuucuuccucacccagggcgcccuccucaacgacaagcacuccaacggcaccaucaaggaccgcucccccuaccgcacccucauguccugccccaucggcgagguccccucccccuacaacucccgcuucgaguccgucgccugguccgccuccgccugccacgacggcaucaacuggcucaccaucggcaucuccggccccgacaacggcgccgucgccguccucaaguacaacggcaucaucaccgacaccaucaaguccuggcgcaacaacauccuccgcacccaggaguccgagugcgccugcgucaacggcuccugcuucaccgucaugaccgacggccccuccgacggccaggccuccuacaagaucuuccgcaucgagaagggcaagaucgucaacuccgucgagaugaacgcccccaacuaccacuacgaggagugcuccugcuaccccgacuccuccgagaucaccugcgucugccgcgacaacuggcacggcuccaaccgccccugggucuccuucaaccagaaccucgaguaccagaucggcuacaucugcuccggcaucuucggcgacaacccccgccccaacgacaagaccggcuccugcggccccgucuccuccaacggcgccaacggcgucaagggcuucuccuucaaguacggcaacggcgucuggaucggccgcaccaaguccaucuccucccgcaacggcuucgagaugaucugggaccccaacggcuggaccggcaccgacaacaacuucuccaucaagcaggacaucgucggcaucaacgagugguccggcuacuccggcuccuucguccagcaccccgagcucaccggccucgacugcauccgccccugcuucugggucgagcucauccgcggccgccccaaggagaacaccaucuggaccuccggcuccuccaucuccuucugcggcgucaacuccgacaccgucggcugguccuggcccgacggcgccgagcuccccuucaccaucgacaaguga

SEQ ID NO: 118764 - RNA, 1410 nt, Artificial Sequence; identical to SEQ ID NO: 112774
  derived and/or modified CDS sequence (opt2) from neuraminidase__InfluenzaA__AFN17971

SEQ ID NO: 118765 - RNA, 1410 nt, Artificial Sequence; identical to SEQ ID NO: 112774
  derived and/or modified CDS sequence (opt2) from neuraminidase__InfluenzaA__AFN17981

SEQ ID NO: 118766 - RNA, 1410 nt, Artificial Sequence; identical to SEQ ID NO: 112774
  derived and/or modified CDS sequence (opt2) from neuraminidase__InfluenzaA__AFN17991

SEQ ID NO: 118767 - RNA, 1410 nt, Artificial Sequence
  derived and/or modified CDS sequence (opt2) from neuraminidase__InfluenzaA__AFN18001
augaaccccaaccagaagaucaucaccaucuccuccgucugcaugaccaucggcauggccaaccucauccuccagaucggcaacaucaucuccaucuggaucucccacuccauccagcucggcaaccagaaccagaucgagaccugcaaccaguccgucaucaccuacgagaacaacaccugggucaaccagaccuacgucaacaucuccaacaccaacuucgccgccggccaguccgucgucuccgucaagcucgccggcaacuccucccucugccccgucuccggcugggccaucuacuccaaggacaacuccauccgcaucggcuccaagggcgacgucuucgucauccgcgagcccuucaucuccugcuccccccucgagugccgcaccuucuuccucacccagggcgcccuccucaacgacaagcacuccaacggcaccaucaaggaccgcucccccuaccgcacccucauguccugccccaucggcgagguccccucccccuacaacucccgcuucgaguccgucgccugguccgccuccgccugccacgacggcaucaacuggcucaccaucggcaucuccggccccgacaacggcgccgucgccguccucaaguacaacggcaucaucaccgacaccaucaaguccuggcgcaacaacauccuccgcacccaggaguccgagugcgccugcgucaacggcuccugcuucacccucaugaccgacggccccuccgacggccaggccuccuacaagaucuuccgcaucgagaagggcaagaucgucaaguccgucgagaugaacgcccccaacuaccacuacgaggagugcuccugcuaccccgacuccuccgagaucaccugcgucugccgcgacaacuggcacggcuccaaccgccccugggucuccuucaaccagaaccucgaguaccagaucggcuacaucugcuccggcaucuucggcgacaacccccgccccaacgacaagaccggcuccugcggccccgucuccuccaacggcgccaacggcgucaagggcuucuccuucaaguacggcaacggcgucuggaucggccgcaccaaguccaucuccucccgcaacggcuucgagaugaucugggaccccaacggcuggaccggcaccgacaacaacuucuccaucaagcaggacaucgucggcaucaacgagugguccggcuacuccggcuccuucguccagcaccccgagcucaccggccucgacugcauccgccccugcuucugggucgagcucauccgcggccgccccaaggagaacaccaucuggaccuccggcuccuccaucuccuucugcggcgucaacuccgacaccgucggcugguccuggcccgacggcgccgagcuccccuucaccaucgacaaguga

SEQ ID NO: 118768 - RNA, 1410 nt, Artificial Sequence; identical to SEQ ID NO: 112774
  derived and/or modified CDS sequence (opt2) from neuraminidase__InfluenzaA__AFN18011

SEQ ID NO: 118769 - RNA, 1410 nt, Artificial Sequence; identical to SEQ ID NO: 112774
  derived and/or modified CDS sequence (opt2) from neuraminidase__InfluenzaA__AFN18021

SEQ ID NO: 118770 - RNA, 1410 nt, Artificial Sequence
  derived and/or modified CDS sequence (opt2) from neuraminidase__InfluenzaA__AFN18031
augaaccccaaccagaagaucaucaccaucggcuccaucugcaugaccaucggcauggccaaccucauccuccagaucggcaacaucaucuccaucuggaucucccacuccauccagcucggcaaccagaaccagaucgagaccugcaaccaguccgucaucaccuacgagaacaacaccugggucaaccagaccuacgucaacaucuccaacaccaacuucgccgccggccaguccgucgucuccgucaagcucgccggcaacuccucccucugccccgucuccggcugggccaucuacuccaaggacaacuccauccgcaucggcuccaagggcgacgucuucgucauccgcgagcccuucaucuccugcuccccccucgagugccgcaccuucuuccucacccagggcgcccuccucaacgacaagcacuccaacggcaccaucaaggaccgcucccccuaccgcacccucauguccugccccaucggcgagguccccucccccuacaacucccgcuucgaguccgucgccugguccgccuccgccugccacgacggcaucaacuggcucaccaucggcaucuccggccccgacaacggcgccgucgccguccucaaguacaacggcaucaucaccgacaccaucaaguccuggcgcaacaacauccuccgcacccaggaguccgagugcgccugcgucaacggcuccugcuucacccucaugaccgacggccccuccgacggccaggccuccuacaagaucuuccgcaucgagaagggcaagaucgucaaguccgucgagaugaacgcccccaacuaccacuacgaggagugcuccugcuaccccgacuccuccgagaucaccugcgucugccgcgacaacuggcacggcuccaaccgccccugggucuccuucaaccagaaccucgaguaccagaucggcuacaucugcuccggcaucuucggcgacaacccccgccccaacgacaagaccggcuccugcggccccgucuccuccaacggcgccaacggcgucaagggcuucuccuucaaguacggcaacggcgucuggaucggccgcaccaaguccaucuccucccgcaacggcuucgagaugaucugggaccccaacggcuggaccggcaccgacaacaacuucuccaucaagcaggacaucgucggcaucaacgagugguccggcuacuccggcuccuucguccagcaccccgagcucaccggccucgacugcauccgccccugcuucugggucgagcucauccgcggccgccccaaggagaacaccaucuggaccuccggcuccuccaucuccuucugcggcgucaacuccgacaccgucggcugguccuggcccgacggcgccgagcuccccuucaccaucgacaaguga

SEQ ID NO: 118771 - RNA, 1410 nt, Artificial Sequence; identical to SEQ ID NO: 112774
  derived and/or modified CDS sequence (opt2) from neuraminidase__InfluenzaA__AFN18041

SEQ ID NO: 118772 - RNA, 1410 nt, Artificial Sequence; identical to SEQ ID NO: 118407
  derived and/or modified CDS sequence (opt2) from neuraminidase__InfluenzaA__AFN18051

SEQ ID NO: 118773 - RNA, 1410 nt, Artificial Sequence; identical to SEQ ID NO: 118407
  derived and/or modified CDS sequence (opt2) from neuraminidase__InfluenzaA__AFN18061

SEQ ID NO: 118774 - RNA, 1410 nt, Artificial Sequence; identical to SEQ ID NO: 112774
  derived and/or modified CDS sequence (opt2) from neuraminidase__InfluenzaA__AFN18070

SEQ ID NO: 118775 - RNA, 1410 nt, Artificial Sequence; identical to SEQ ID NO: 112774
  derived and/or modified CDS sequence (opt2) from neuraminidase__InfluenzaA__AFN18080

SEQ ID NO: 118776 - RNA, 1410 nt, Artificial Sequence; identical to SEQ ID NO: 112774
  derived and/or modified CDS sequence (opt2) from neuraminidase__InfluenzaA__AFN18090

SEQ ID NO: 118777 - RNA, 1410 nt, Artificial Sequence; identical to SEQ ID NO: 112774
  derived and/or modified CDS sequence (opt2) from neuraminidase__InfluenzaA__AFN18100

SEQ ID NO: 118778 - RNA, 1410 nt, Artificial Sequence; identical to SEQ ID NO: 112774
  derived and/or modified CDS sequence (opt2) from neuraminidase__InfluenzaA__AFN18106

SEQ ID NO: 118779 - RNA, 1410 nt, Artificial Sequence
  derived and/or modified CDS sequence (opt2) from neuraminidase__InfluenzaA__AFN18108
augaaccccaaccagaagaucaucaccaucggcuccgucugcaugaccaucggcauggccaaccucauccuccagaucggcaacaucaucuccaucuggaucucccacuccauccagcucggcaaccagaaccagaucgagaccugcaaccaguccgucaucaccuacgagaacaacaccugggucaaccagaccuacgucaacaucuccaacaccaacuucgccgccggccaguccgucgucuccgucaagcucgccggcaacuccucccucugccccgucuccggcugggccaucuacuccaaggacaacuccauccgcaucggcuccaagggcgacgucuucgucauccgcgagcccuucaucuccugcuccccccucgagugccgcaccuucuuccucacccagggcgcccuccucaacgacaagcacuccaacggcaccaucaaggaccgcucccccuaccgcacccucauguccugccccaucggcgagguccccucccccuacaacucccgcuucgaguccgucgccugguccgccuccgccugccacgacggcaucaacuggcucaccaucggcaucuccggccccgacaacggcgccgucgccguccucaaguacaacggcaucaucaccgacaccaucaaguccuggcgcaacaacauccuccgcacccaggaguccgagugcgccugcgucaacggcuccugcuucaccgucaugaccgacggccccuccgacggccaggccuccuacaagaucuuccgcaucgagaagggcaagaucgucaaguccgucgagaugaacgcccccaacuaccacuacgaggagugcuccugcuaccccgacuccuccgagaucaccugcgucugccgcgacaacuggcacggcuccaaccgccccugggucuccuucaaccagaaccucgaguaccgcaucggcuacaucugcuccggcaucuucggcgacaacccccgccccaacgacaagaccggcuccugcggccccguccucuccaacggcgccaacggcgucaagggcuucuccuucaaguacggcaacggcgucuggaucggccgcaccaaguccaucuccucccgcaacggcuucgagaugaucugggaccccaacggcuggaccggcaccgacaacaacuucuccaucaagcaggacaucgucggcaucaacgagugguccggcuacuccggcuccuucguccagcaccccgagcucaccggccucgacugcauccgccccugcuucugggucgagcucauccgcggccgccccaaggagaacaccaucuggaccuccggcuccuccaucuccuucugcggcgucaacuccgacaccgucggcugguccuggcccgacggcgccgagcuccccuucaccaucgacaaguga

SEQ ID NO: 118780 - RNA, 1410 nt, Artificial Sequence
  derived and/or modified CDS sequence (opt2) from neuraminidase__InfluenzaA__AFN18118
augaaccccaaccagaagaucaucaccaucggcuccgucugcaugaccaucggcauggccaaccucauccuccagaucggcaacaugaucuccaucuggaucucccacuccauccagcucggcaaccagaaccagaucgagaccugcaaccaguccgucaucaccuacgagaacaacaccugggucaaccagaccuacgucaagaucuccaacaccaacuucgccgccggccaguccgucgucuccgucaagcucgccggcaacuccucccucugccccgucuccggcugggccaucuacuccaaggacaacuccauccgcaucggcuccaagggcgacgucuucgucauccgcgagcccuucaucuccugcuccccccucgagugccgcaccuucuuccucacccagggcgcccuccucaacgacaagcacuccaacggcaccaucaaggaccgcucccccuaccgcacccucauguccugccccaucggcgagguccccucccccuacaacucccgcuucgaguccgucgccugguccgccuccgccugccacgacggcaucaacuggcucaccaucggcaucuccggccccgacaacggcgccgucgccguccucaaguacaacggcaucaucaccgacaccaucaaguccuggcgcaacaacauccuccgcacccaggaguccgagugcgccugcgucaacggcuccugcuucacccucaugaccgacggccccuccgacggccaggccuccuacaagaucuuccgcaucgagaagggcaagaucgucaaguccgucgagaugaacgcccccaacuaccacuacgaggagugcuccugcuaccccgacuccuccgagaucaccugcgucugccgcgacaacuggcacggcuccaaccgccccugggucuccuucaaccagaaccucgaguaccagaucggcuacaucugcuccggcaucuucggcgacaacccccgccccaacgacaagaccggcuccugcggccccgucuccuccaacggcgccaacggcgucaagggcuucuccuucaaguacggcaacggcgucuggaucggccgcaccaaguccaucuccucccgcaacggcuucgagaugaucugggaccccaacggcuggaccggcaccgacaacaacuucuccaucaagcaggacaucgucggcaucaacgagugguccggcuacuccggcuccuucguccagcaccccgagcucaccggccucgacugcauccgccccugcuucugggucgagcucauccgcggccgccccaaggagaacaccaucuggaccuccggcuccuccaucuccuucugcggcgucaacuccgacaccgucggcugguccuggcccgacggcgccgagcuccccuucaccaucgacaaguga

SEQ ID NO: 118781 - RNA, 1410 nt, Artificial Sequence; identical to SEQ ID NO: 112774
  derived and/or modified CDS sequence (opt2) from neuraminidase__InfluenzaA__AFN18120

SEQ ID NO: 118782 - RNA, 1410 nt, Artificial Sequence; identical to SEQ ID NO: 112774
  derived and/or modified CDS sequence (opt2) from neuraminidase__InfluenzaA__AFN18122

SEQ ID NO: 118783 - RNA, 1410 nt, Artificial Sequence; identical to SEQ ID NO: 118407
  derived and/or modified CDS sequence (opt2) from neuraminidase__InfluenzaA__AFN18128

SEQ ID NO: 118784 - RNA, 1410 nt, Artificial Sequence; identical to SEQ ID NO: 118407
  derived and/or modified CDS sequence (opt2) from neuraminidase__InfluenzaA__AFN18134

SEQ ID NO: 118785 - RNA, 1410 nt, Artificial Sequence; identical to SEQ ID NO: 112774
  derived and/or modified CDS sequence (opt2) from neuraminidase__InfluenzaA__AFN18136

SEQ ID NO: 118786 - RNA, 1410 nt, Artificial Sequence; identical to SEQ ID NO: 112774
  derived and/or modified CDS sequence (opt2) from neuraminidase__InfluenzaA__AFN18138

SEQ ID NO: 118787 - RNA, 1410 nt, Artificial Sequence
  derived and/or modified CDS sequence (opt2) from neuraminidase__InfluenzaA__AFN18140
augaaccccaaccagaagaucaucaccaucggcuccgucugcaugaccaucggcauggccaaccucauccuccagaucggcaacaucaucuccaucuggaucucccacuccauccagcucggcaaccagaaccagaucgagaccugcaaccaguccgucaucaccuacgagaacaacaccugggucaaccagaccuacgucaacaucuccaacaccaacuucgccgccggccaguccgucgucuccgucaagcucgccggcaacuccucccucugccccgucuccggcugggccaucuacuccaaggacaacuccauccgcaucggcuccaagggcgacgucuucgucauccgcgagcccuucaucuccugcuccccccucgagugccgcaccuucuuccucacccagggcgcccuccucaacgacaagcacuccaacggcaccaucaaggaccgcucccccuaccgcacccucauguccugccccaucggcgagguccccucccccuacaacucccgcuucgaguccgucgccugguccgccuccgccugccacgacggcaucaacuggcucaccaucggcaucuccggccccgacaacggcgccgucgccguccucaaguacaacggcaucaucaccgacaccaucaaguccuggcgcaacaacauccuccgcacccaggaguccgagugcgccugcgucaacggcuccugcuucaccgucaugaccgacggccccuccgacggccaggccuccuacaagaucuuccgcaucgagaagggcaagaucgucaaguccgucgagaugaacgcccccaacuaccacuacgaggagugcuccugcuaccccgacuccuccgagaucaccugcgucugccgcgacaacuggcacggcuccaaccgccccugggucuccuucaaccagaaccucgaguaccgcaucggcuacaucugcuccggcaucuucggcgacaacccccgccccaacgacaagaccggcuccugcggccccgucuccuccaacggcgccaacggcgucaagggcuucuccuucaaguacggcaacggcaucuggaucggccgcaccaaguccaucuccucccgcaacggcuucgagaugaucugggaccccaacggcuggaccggcaccgacaacaacuucuccaucaagcaggacaucgucggcaucaacgagugguccggcuacuccggcuccuucguccagcaccccgagcucaccggccucgacugcauccgccccugcuucugggucgagcucauccgcggccgccccaaggagaacaccaucuggaccuccggcuccuccaucuccuucugcggcgucaacuccgacaccgucggcugguccuggcccgacggcgccgagcuccccuucaccaucgacaaguga

SEQ ID NO: 118788 - RNA, 1410 nt, Artificial Sequence; identical to SEQ ID NO: 112774
  derived and/or modified CDS sequence (opt2) from neuraminidase__InfluenzaA__AFN18144

SEQ ID NO: 118789 - RNA, 1410 nt, Artificial Sequence; identical to SEQ ID NO: 112774
  derived and/or modified CDS sequence (opt2) from neuraminidase__InfluenzaA__AFN18150

SEQ ID NO: 118790 - RNA, 1410 nt, Artificial Sequence; identical to SEQ ID NO: 112774
  derived and/or modified CDS sequence (opt2) from neuraminidase__InfluenzaA__AFN18156

SEQ ID NO: 118791 - RNA, 1410 nt, Artificial Sequence; identical to SEQ ID NO: 112774
  derived and/or modified CDS sequence (opt2) from neuraminidase__InfluenzaA__AFN18158

SEQ ID NO: 118792 - RNA, 1410 nt, Artificial Sequence; identical to SEQ ID NO: 114588
  derived and/or modified CDS sequence (opt2) from neuraminidase__InfluenzaA__AFN18160

SEQ ID NO: 118793 - RNA, 1410 nt, Artificial Sequence
  derived and/or modified CDS sequence (opt2) from neuraminidase__InfluenzaA__AFN18166
augaaccccaaccagaagaucaucaccaucggcuccgucugcaugaccaucggcauggccaaccucauccuccagaucggcaacaucaucuccaucuggaucucccacuccauccagcucggcaaccagaaccagaucgagaccugcaaccaguccgucaucaccuacgagaacaagaccugggucaaccagaccuacgucaacaucuccaacgccaacuucgccgccggccaguccgucgucuccgucaagcucgccggcaacuccucccucugccccgucuccggcugggccaucuacuccaaggacaacuccauccgcaucggcuccaagggcgacgucuucgucauccgcgagcccuucaucuccugcuccccccucgagugccgcaccuucuuccucacccagggcgcccuccucaacgacaagcacuccaacggcaccaucaaggaccgcucccccuaccgcacccucauguccugccccaucggcgagguccccucccccuacaacuccaaguucgaguccgucgccugguccgccuccgccugccacgacggcaucaacuggcucaccaucggcaucuccggccccgacaacggcgccgucgccguccucaaguacaacggcaucaucaccgacaccaucaaguccuggcgcaacaacauccuccgcacccaggaguccgagugcgccugcgucaacggcuccugcuucaccgucaugaccgacggccccuccgacggccaggccuccuacaagaucuuccgcaucgagaagggcaagaucgucaaguccgucgagaugaacgcccccaacuaccacuacgaggagugcuccugcuaccccgacuccuccgagaucaccugcgucugccgcgacaacuggcacggcuccaaccgccccugggucuccuucaaccagaaccucgaguaccagaucggcuacaucugcuccggcaucuucggcgacaacccccgccccaacgacaagaccggcuccugcggccccgucuccuccaacggcgccaacggcgucaagggcuucuccuucaaguacggcaacggcgucuggaucggccgcaccaaguccaucuccucccgcaacggcuucgagaugaucugggaccccaacggcuggaccggcaccgacaacaacuucuccaucaagcaggacaucgucggcaucaacgagugguccggcuacuccggcuccuucguccagcaccccgagcucaccggccucgacugcauccgccccugcuucugggucgagcucauccgcggccgccccaaggagaacaccaucuggaccuccggcuccuccaucuccuucugcggcgucaacuccgacaccgucggcugguccuggcccgacggcgccgagcuccccuucaccaucgacaaguga

SEQ ID NO: 118794 - RNA, 1410 nt, Artificial Sequence; identical to SEQ ID NO: 112774
  derived and/or modified CDS sequence (opt2) from neuraminidase__InfluenzaA__AFN18172

SEQ ID NO: 118795 - RNA, 1410 nt, Artificial Sequence; identical to SEQ ID NO: 113792
  derived and/or modified CDS sequence (opt2) from neuraminidase__InfluenzaA__AFN18178

SEQ ID NO: 118796 - RNA, 1410 nt, Artificial Sequence
  derived and/or modified CDS sequence (opt2) from neuraminidase__InfluenzaA__AFN18184
augaaccccaaccagaagaucaucaccaucggcuccgucugcaugaccaucggcauggccaaccucauccuccagaucggcaacaucaucuccaucuggaucucccacuccauccagcucggcaaccagaaccagaucgagaccugcaaccaguccgucaucaccuacgagaacaacaccugggucaaccagaccuacgucaacaucuccaacaccaacuucgccgccggccaguccauggucuccgucaagcucgccggcaacuccucccucugccccgucuccggcugggccaucuacuccaaggacaacuccauccgcaucggcuccaagggcgacgucuucgucauccgcgagcccuucaucuccugcuccccccucgagugccgcaccuucuuccucacccagggcgcccuccucaacgacaagcacuccaacggcaccaucaaggaccgcucccccuaccgcacccucauguccugccccaucggcgagguccccucccccuacaacucccgcuucgaguccgucgccugguccgccuccgccugccacgacggcaucaacuggcucaccaucggcaucuccggccccgacaacggcgccgucgccguccucaaguacaacggcaucaucaccgacaccaucaaguccuggcgcaacaacauccuccgcacccaggaguccgagugcgccugcgucaacggcuccugcuucaccgucaugaccgacggccccuccgacggccaggccuccuacaagaucuuccgcaucgagaagggcaagaucgucaaguccgucgagaugaacgcccccaacuaccacuacgaggagugcuccugcuaccccgacuccuccgagaucaccugcgucugccgcgacaacuggcacggcuccaaccgccccugggucuccuucaaccagaaccucgaguaccagaucggcuacaucugcuccggcaucuucggcgacaacccccgccccaacgacaagaccggcuccugcggccccgucuccuccaacggcgccaacggcgucaagggcuucuccuucaaguacggcaacggcgucuggaucggccgcaccaaguccaucuccucccgcaacggcuucgagaugaucugggaccccaacggcuggaccggcaccgacaacaacuucuccaucaagcaggacaucgucggcaucaacgagugguccggcuacuccggcuccuucguccagcaccccgagcucaccggccucgacugcauccgccccugcuucugggucgagcucauccgcggccgccccaaggagaacaccaucuggaccuccggcuccuccaucuccuucugcggcgucaacuccgacaccgucggcugguccuggcccgacggcgccgagcuccccuucaccaucgacaaguga

SEQ ID NO: 118797 - RNA, 1410 nt, Artificial Sequence; identical to SEQ ID NO: 115766
  derived and/or modified CDS sequence (opt2) from neuraminidase__InfluenzaA__AFN18190

SEQ ID NO: 118798 - RNA, 1410 nt, Artificial Sequence; identical to SEQ ID NO: 116787
  derived and/or modified CDS sequence (opt2) from neuraminidase__InfluenzaA__AFN18196

SEQ ID NO: 118799 - RNA, 1410 nt, Artificial Sequence
  derived and/or modified CDS sequence (opt2) from neuraminidase__InfluenzaA__AFN18202
augaaccccaaccagaagaucaucaccaucggcuccgucugcaugaccaucggcauggccaaccucauccuccagaucggcaacaucaucuccaucuggaucucccacuccauccagcucggcaaccagaaccagaucgagaccugcaaccaguccgucaucaccuacgagaacaacaccugggucaaccagaccuacgucaacaucuccaacaccaacuucgccgccggccgcuccgucgucuccgucaagcucgccggcaacuccucccucugccccgucuccggcugggccaucuacuccaaggacaacuccauccgcaucggcuccaagggcgacgucuucgucauccgcgagcccuucaucuccugcuccccccucgagugccgcaccuucuuccucacccagggcgcccuccucaacgacaagcacuccaacggcaccaucaaggaccgcucccccuaccgcacccucauguccugccccaucggcgagguccccucccccuacaacucccgcuucgaguccgucgccugguccgccuccgccugccacgacggcaucaacuggcucaccaucggcaucuccggccccgacaacggcgccgucgccguccucaaguacaacggcaucaucaccgacaccaucaaguccuggcgcaacaacauccuccgcacccaggaguccgagugcgccugcgucaacggcuccugcuucaccgucaugaccgacggccccuccgacggccaggccuccuacaagaucuuccgcaucgagaagggcaagaucgucaaguccgucgagaugaacgcccccaacuaccacuacgaggagugcuccugcuaccccgacuccuccgagaucaccugcgucugccgcgacaacuggcacggcuccaaccgccccugggucuccuucaaccagaaccucgaguaccagaucggcuacaucugcuccggcaucuucggcgacaacccccgccccaacgacaagaccggcuccugcggccccgucuccuccaacggcgccaacggcgucaagggcuucuccuucaaguacggcaacggcgucuggaucggccgcaccaaguccaucuccucccgcaacggcuucgagaugaucugggaccccaacggcuggaccggcaccgacaacaacuucuccaucaagcaggacaucgucggcaucaacgagugguccggcuacuccggcuccuucguccagcaccccgagcucaccggccucgacugcauccgccccugcuucugggucgagcucauccgcggccgccccaaggagaacaccaucuggaccuccggcuccuccaucuccuucugcggcgucaacuccgacaccgucggcugguccuggcccgacggcgccgagcuccccuucaccaucgacaaguga

SEQ ID NO: 118800 - RNA, 1410 nt, Artificial Sequence; identical to SEQ ID NO: 112774
  derived and/or modified CDS sequence (opt2) from neuraminidase__InfluenzaA__AFN18208

SEQ ID NO: 118801 - RNA, 1410 nt, Artificial Sequence
  derived and/or modified CDS sequence (opt2) from neuraminidase__InfluenzaA__AFN18210
augaaccccaaccagaagaucaucaccaucggcuccgucugcaugaccaucggcauggccaaccucauccuccagaucggcaacaucaucuccaucuggaucucccacuccauccagcucggcaaccagaaccagaucgagaccugcaaccaguccgucaucaccuacgagaacaacaccugggucaaccagaccuacgucaacaucuccaacaccaacuucgccgccggccaguccgucgucuccgucaagcucgccggcaacuccucccucugccccgucuccggcugggccaucuacuccaaggacaacuccauccgcaucggcuccaagggcgacgucuucgucauccgcgagcccuucaucuccugcuccccccucgagugccgcgccuucuuccucacccagggcgcccuccucaacgacaagcacuccaacggcaccaucaaggaccgcucccccuaccgcacccucauguccugccccaucggcgagguccccucccccuacaacucccgcuucgaguccgucgccugguccgccuccgccugccacgacggcaucaacuggcucaccaucggcaucuccggccccgacaacggcgccgucgccguccucaaguacaacggcaucaucaccgacaccaucaaguccuggcgcaacaacauccuccgcacccaggaguccgagugcgccugcgucaacggcuccugcuucaccgucaugaccgacggccccuccgacggccaggccuccuacaagaucuuccgcaucgagaagggcaagaucgucaaguccgucgagaugaacgcccccaacuaccacuacgaggagugcuccugcuaccccgacuccuccgagaucaccugcgucugccgcgacaacuggcacggcuccaaccgccccugggucuccuucaaccagaaccucgaguaccgcaucggcuacaucugcuccggcaucuucggcgacaacccccgccccaacgacaagaccggcuccugcggccccgucuccuccaacggcgccaacggcgucaagggcuucuccuucaaguacggcaacggcgucuggaucggccgcaccaaguccaucuccucccgcaacggcuucgagaugaucugggaccccaacggcuggaccggcaccgacaacaacuucuccaucaagcaggacaucgucggcaucaacgagugguccggcuacuccggcuccuucguccagcaccccgagcucaccggccucgacugcauccgccccugcuucugggucgagcucauccgcggccgccucaaggagaacaccaucuggaccuccggcuccuccaucuccuucugcggcgucaacuccgacaccgucggcugguccuggcccgacggcgccgagcuccccuucaccaucgacaaguga

SEQ ID NO: 118802 - RNA, 1410 nt, Artificial Sequence; identical to SEQ ID NO: 113357
  derived and/or modified CDS sequence (opt2) from neuraminidase__InfluenzaA__AFN18216

SEQ ID NO: 118803 - RNA, 1410 nt, Artificial Sequence; identical to SEQ ID NO: 115103
  derived and/or modified CDS sequence (opt2) from neuraminidase__InfluenzaA__AFN18226

SEQ ID NO: 118804 - RNA, 1410 nt, Artificial Sequence; identical to SEQ ID NO: 112774
  derived and/or modified CDS sequence (opt2) from neuraminidase__InfluenzaA__AFN18232

SEQ ID NO: 118805 - RNA, 1410 nt, Artificial Sequence; identical to SEQ ID NO: 112774
  derived and/or modified CDS sequence (opt2) from neuraminidase__InfluenzaA__AFN18234

SEQ ID NO: 118806 - RNA, 1410 nt, Artificial Sequence; identical to SEQ ID NO: 112774
  derived and/or modified CDS sequence (opt2) from neuraminidase__InfluenzaA__AFN18244

SEQ ID NO: 118807 - RNA, 1410 nt, Artificial Sequence; identical to SEQ ID NO: 112774
  derived and/or modified CDS sequence (opt2) from neuraminidase__InfluenzaA__AFN18246

SEQ ID NO: 118808 - RNA, 1410 nt, Artificial Sequence; identical to SEQ ID NO: 115103
  derived and/or modified CDS sequence (opt2) from neuraminidase__InfluenzaA__AFN18256

SEQ ID NO: 118809 - RNA, 1410 nt, Artificial Sequence; identical to SEQ ID NO: 112774
  derived and/or modified CDS sequence (opt2) from neuraminidase__InfluenzaA__AFN18262

SEQ ID NO: 118810 - RNA, 1410 nt, Artificial Sequence; identical to SEQ ID NO: 112774
  derived and/or modified CDS sequence (opt2) from neuraminidase__InfluenzaA__AFN18268

SEQ ID NO: 118811 - RNA, 1410 nt, Artificial Sequence; identical to SEQ ID NO: 112774
  derived and/or modified CDS sequence (opt2) from neuraminidase__InfluenzaA__AFN18270

SEQ ID NO: 118812 - RNA, 1410 nt, Artificial Sequence; identical to SEQ ID NO: 115763
  derived and/or modified CDS sequence (opt2) from neuraminidase__InfluenzaA__AFN18272

SEQ ID NO: 118813 - RNA, 1410 nt, Artificial Sequence; identical to SEQ ID NO: 112774
  derived and/or modified CDS sequence (opt2) from neuraminidase__InfluenzaA__AFN18274

SEQ ID NO: 118814 - RNA, 1410 nt, Artificial Sequence; identical to SEQ ID NO: 112774
  derived and/or modified CDS sequence (opt2) from neuraminidase__InfluenzaA__AFN18282

SEQ ID NO: 118815 - RNA, 1410 nt, Artificial Sequence; identical to SEQ ID NO: 112774
  derived and/or modified CDS sequence (opt2) from neuraminidase__InfluenzaA__AFN18304

SEQ ID NO: 118816 - RNA, 1410 nt, Artificial Sequence
  derived and/or modified CDS sequence (opt2) from neuraminidase__InfluenzaA__AFN18306
augaaccccaaccagaagaucaucaccaucggcuccgucugcaugaccaucggcaucgccaaccucauccuccagaucggcaacaucaucuccaucuggaucucccacuccauccagcucggcaaccagaaccagaucgagaccugcaaccaguccgucaucaccuacgagaacaacaccugggucaaccagaccuacgucaacaucuccaacaccaacuucgccgccggccaguccgucgucuccgucaagcucgccggcaacuccucccucugccccgucuccggcugggccaucuacuccaaggacaacuccauccgcaucggcuccaagggcgacgucuucgucauccgcgagcccuucaucuccugcuccccccucgagugccgcaccuucuuccucacccagggcgcccuccucaacgacaagcacuccaacggcaccaucaaggaccgcucccccuaccgcacccucauguccugccccaucggcgagguccccucccccuacaacucccgcuucgaguccgucgccugguccgccuccgccugccacgacggcaucaacuggcucaccaucggcaucuccggccccgacaacggcgccgucgccguccucaaguacaacggcaucaucaccgacaccaucaaguccuggcgcaacaacauccuccgcacccaggaguccgagugcgccugcgucaacggcuccugcuucaccgucaugaccgacggccccuccgacggccaggccuccuacaagaucuuccgcaucgagaagggcaagaucgucaaguccgucgagaugaacgcccccaacuaccacuacgaggagugcuccugcuaccccgacuccuccgagaucaccugcgucugccgcgacaacuggcacggcuccaaccgccccugggucuccuucaaccagaaccucgaguaccagaucggcuacaucugcuccggcaucuucggcgacaacccccgccccaacgacaagaccggcuccugcggccccgucuccuccaacggcgccaacggcgucaagggcuucuccuucaaguacggcaacggcgucuggaucggccgcaccaaguccaucuccucccgcaacggcuucgagaugaucugggaccccaacggcuggaccggcaccgacaacaacuucuccaucaagcaggacaucgucggcaucaacgagugguccggcuacuccggcuccuucguccagcaccccgagcucaccggccucgacugcauccgccccugcuucugggucgagcucauccgcggccgccccaaggagaacaccaucuggaccuccggcuccuccaucuccuucugcggcgucaacuccgacaccgucggcugguccuggcccgacggcgccgagcuccccuucaccaucgacaaguga

SEQ ID NO: 118817 - RNA, 1410 nt, Artificial Sequence
  derived and/or modified CDS sequence (opt2) from neuraminidase__InfluenzaA__AFN18308
augaaccccaaccagaagaucaucaccaucggcuccgucugcaugaccaucggcauggccaaccucauccuccagaucggcaacaucaucuccaucuggaucucccacuccauccagcucggcaaccagaaccagaucgagaccugcaaccaguccgucaucaccuacgagaacaacaccugggucaaccagaccuacgucaacaucuccaacaccaacuucgccgccggccaguccgucgucuccgucaagcucgccggcaacuccucccucugccccgucuccggcugggccaucuacuccaaggacaacuccauccgcaucggcuccaagggcgacgucuucgucauccgcgagcccuucaucuccugcuccccccucgagugccgcaccuucuuccucacccagggcgcccuccucaacgacaagcacuccaacggcaccaucaaggaccgcucccccuaccgcacccucauguccugccccaucggcgagguccccucccccuacaacucccgcuucgaguccgucgccugguccgccuccgccugccacgacggcaucaacuggcucaccaucggcaucuccggccccgacaacggcgccgucgccguccucaaguacaacggcaucaucaccgacaccaucaaguccuggcgcaacaacauccuccgcacccaggaguccgagugcgccugcgucaacggcuccugcuucaccgucaugaccgacggccccuccgacggccaggccuccuacaagaucuuccgcaucgagaagggcaagaucgucaaguccgucgagaugaacgcccccaacuaccacuacgaggagugcuccugcuaccccgacuccuccgagaucaccugcgucugccgcgacaacuggcacggcuccaaccgccccugggucuccuucaaccagaaccucgaguaccagaucggcuacaucugcuccggcaucuucggcgacaacccccgccccaacgacaagaccggcuccugcggccccgucuccuccaagggcgccaacggcgucaagggcuucuccuucaaguacggcaacggcgucuggaucggccgcaccaaguccaucuccucccgcaacggcuucgagaugaucugggaccccaacggcuggaccggcaccgacaacaacuucuccaucaagcaggacaucgucggcaucaacgagugguccggcuacuccggcuccuucguccagcaccccgagcucaccggccucgacugcauccgccccugcuucugggucgagcucauccgcggccgccccaaggagaacaccaucuggaccuccggcuccuccaucuccuucugcggcgucaacuccgacaccgucggcugguccuggcccgacggcgccgagcuccccuucaccaucgacaaguga

SEQ ID NO: 118818 - RNA, 1410 nt, Artificial Sequence
  derived and/or modified CDS sequence (opt2) from neuraminidase__InfluenzaA__AFN18314
augaaccccaaccagaagaucaucaccaucggcuccgucugcaugaccaucggcauggccaaccucauccuccagaucggcaacaucaucuccaucuggaucucccacuccauccagcucggcaaccagaaccagaucgagaccugcaaccaguccgucaucaccuacgagaacaacaccugggucaaccagaccuacgucaacaucuccaacaccaacuucgccgccggccaguccgucgucuccgucaagcucgccggcaacuccucccucugccccgucuccggcugggccaucuacuccaaggacaacuccauccgcaucggcuccaagggcgacgucuucgucauccgcgagcccuucaucuccugcuccccccucgagugccgcaccuucuuccucacccagggcgcccuccucaacgacaagcacuccaacggcaccaucaaggaccgcucccccuaccgcacccucauguccugccccaucggcgagguccccucccccuacaacucccgcuucgaguccgucgccugguccgccuccgccugccacgacggcaucaacuggcucaccaucggcaucuccggccccgacaacggcgccgucgccguccucaaguacaacggcaucaucaccgacaccaucaaguccuggcgcaacaacauccuccgcacccaggaguccgagugcgccugcgucaacggcuccugcuucaccgucaugaccgacggccccuccgacggccaggccuccuacaagaucuuccgcaucgagaagggcaagaucgucaaguccgucgagaugaacgcccccaacuaccacuacgaggagugcuccugcuaccccgacuccuccgagaucaccugcgucugccgcgacaacuggcacggcuccaaccgccccugggucuccuucaaccagaaccucgaguaccagaucggcuacaucugcuccggcaucuucggcgacaacccccgccccaacgacaagaccggcuccugcggccccgucuccuccaacggcgccaacggcgucaagggcuucuccuucaaguacggcaacggcgucuggaucggccgcaccaaguccaucuccucccgcaacggcuucgagaugaucugggaccccaacggcuggaccggcaccgacaacaacuucuccaucaagcaggacaucgucggcaucaacgagugguccggcuacuccggcuccuucguccagcaccccgagcucaccggccucgacugcauccgccccugcuucugggucgagcucauccgcggccgccccaaggagaagaccaucuggaccuccggcuccuccaucuccuucugcggcgucaacuccgacaccgucggcugguccuggcccgacggcgccgagcuccccuucaccaucgacaaguga

SEQ ID NO: 118819 - RNA, 1410 nt, Artificial Sequence; identical to SEQ ID NO: 112774
  derived and/or modified CDS sequence (opt2) from neuraminidase__InfluenzaA__AFN18320

SEQ ID NO: 118820 - RNA, 1410 nt, Artificial Sequence
  derived and/or modified CDS sequence (opt2) from neuraminidase__InfluenzaA__AFN18326
augaaccccaaccagaagaucaucaccaucggcuccgucugcaugaccaucggcauggccaaccuccuccuccagaucggcaacaucaucuccaucuggaucucccacuccauccagcucggcaaccagaaccagaucgagaccugcaaccaguccgucaucaccuacgagaacaacaccugggucaaccagaccuacgucaacaucuccaacaccaacuucgccgccggccaguccgucgucuccgucaagcucgccggcaacuccucccucugccccgucuccggcugggccaucuacuccaaggacaacuccauccgcaucggcuccaagggcgacgucuucgucauccgcgagcccuucaucuccugcuccccccucgagugccgcaccuucuuccucacccagggcgcccuccucaacgacaagcacuccaacggcaccaucaaggaccgcucccccuaccgcacccucauguccugccccaucggcgagguccccucccccuacaacucccgcuucgaguccgucgccugguccgccuccgccugccacgacggcaucaacuggcucaccaucggcaucuccggccccgacaacggcgccgucgccguccucaaguacaacggcaucaucaccgacaccaucaaguccuggcgcaacaacauccuccgcacccaggaguccgagugcgccugcgucaacggcuccugcuucaccgucaugaccgacggccccuccgacggccaggccuccuacaagaucuuccgcaucgagaagggcaagaucgucaaguccgucgagaugaacgcccccaacuaccacuacgaggagugcuccugcuaccccgacuccuccgagaucaccugcgucugccgcgacaacuggcacggcuccaaccgccccugggucuccuucaaccagaaccucgaguaccagaucggcuacaucugcuccggcaucuucggcgacaacccccgccccaacgacaagaccggcuccugcggccccgucuccuccaacggcgccaacggcgucaagggcuucuccuucaaguacggcaacggcgucuggaucggccgcaccaaguccaucuccucccgcaacggcuucgagaugaucugggaccccaacggcuggaccggcaccgacaacaacuucuccaucaagcaggacaucgucggcaucaacgagugguccggcuacuccggcuccuucguccagcaccccgagcucaccggccucgacugcauccgccccugcuucugggucgagcucauccgcggccgccccaaggagaacaccaucuggaccuccggcuccuccaucuccuucugcggcgucaacuccgacaccgucggcugguccuggcccgacggcgccgagcuccccuucaccaucgacaaguga

SEQ ID NO: 118821 - RNA, 1410 nt, Artificial Sequence; identical to SEQ ID NO: 112774
  derived and/or modified CDS sequence (opt2) from neuraminidase__InfluenzaA__AFN18336

SEQ ID NO: 118822 - RNA, 1410 nt, Artificial Sequence; identical to SEQ ID NO: 112774
  derived and/or modified CDS sequence (opt2) from neuraminidase__InfluenzaA__AFN18346

SEQ ID NO: 118823 - RNA, 1410 nt, Artificial Sequence; identical to SEQ ID NO: 118407
  derived and/or modified CDS sequence (opt2) from neuraminidase__InfluenzaA__AFN18356

SEQ ID NO: 118824 - RNA, 1410 nt, Artificial Sequence
  derived and/or modified CDS sequence (opt2) from neuraminidase__InfluenzaA__AFN18366
augaaccccaaccagaagaucaucaccaucggcuccgucugcaugaccaucggcauggccaaccucauccuccagaucggcaacaucaucuccaucuggaucucccacuccauccagcucggcaaccagaaccagaucgagaccugcaaccaguccgucaucaccuacgagaacaacaccugggucaaccagaccuacgucaacaucuccaacaccaacuucgccgccgagcaguccgucgucuccgucaagcucgccggcaacuccucccucugccccgucuccggcugggccaucuacuccaaggacaacuccauccgcaucggcuccaagggcgacgucuucgucauccgcgagcccuucaucuccugcuccccccucgagugccgcaccuucuuccucacccagggcgcccuccucaacgacaagcacuccaacggcaccaucaaggaccgcucccccuaccgcacccucauguccugccccaucggcgagguccccucccccuacaacucccgcuucgaguccgucgccugguccgccuccgccugccacgacggcaucaacuggcucaccaucggcaucuccggccccgacaacggcgccgucgccguccucaaguacaacggcaucaucaccgacaccaucaaguccuggcgcaacaacauccuccgcacccaggaguccgagugcgccugcgucaacggcuccugcuucaccgucaugaccgacggccccuccgacggccaggccuccuacaagaucuuccgcaucgagaagggcaagaucgucaaguccgucgagaugaacgcccccaacuaccacuacgaggagugcuccugcuaccccgacuccuccgaggucaccugcgucugccgcgacaacuggcacggcuccaaccgccccugggucuccuucaaccagaaccucgaguaccagaucggcuacaucugcuccggcaucuucggcgacaacccccgccccaacgacaagaccggcuccugcggccccgucuccuccaacggcgccaacggcgucaagggcuucuccuucaaguacggcaacggcgucuggaucggccgcaccaaguccaucuccucccgcaacggcuucgagaugaucugggaccccaacggcuggaccggcaccgacaacaacuucuccaucaagcaggacaucgucggcaucaacgagugguccggcuacuccggcuccuucguccagcaccccgagcucaccggccucgacugcauccgccccugcuucugggucgagcucauccgcggccgccccaaggagaacaccaucuggaccuccggcuccuccaucuccuucugcggcgucaacuccgacaccgucggcugguccuggcccgacggcgccgagcuccccuucaccaucgacaaguga

SEQ ID NO: 118825 - RNA, 1410 nt, Artificial Sequence; identical to SEQ ID NO: 118407
  derived and/or modified CDS sequence (opt2) from neuraminidase__InfluenzaA__AFN18376

SEQ ID NO: 118826 - RNA, 1410 nt, Artificial Sequence; identical to SEQ ID NO: 112774
  derived and/or modified CDS sequence (opt2) from neuraminidase__InfluenzaA__AFN18382

SEQ ID NO: 118827 - RNA, 1410 nt, Artificial Sequence; identical to SEQ ID NO: 112774
  derived and/or modified CDS sequence (opt2) from neuraminidase__InfluenzaA__AFN18392

SEQ ID NO: 118828 - RNA, 1410 nt, Artificial Sequence; identical to SEQ ID NO: 112774
  derived and/or modified CDS sequence (opt2) from neuraminidase__InfluenzaA__AFN18402

SEQ ID NO: 118829 - RNA, 1410 nt, Artificial Sequence; identical to SEQ ID NO: 112774
  derived and/or modified CDS sequence (opt2) from neuraminidase__InfluenzaA__AFN18412

SEQ ID NO: 118830 - RNA, 1410 nt, Artificial Sequence; identical to SEQ ID NO: 112774
  derived and/or modified CDS sequence (opt2) from neuraminidase__InfluenzaA__AFN18422

SEQ ID NO: 118831 - RNA, 1410 nt, Artificial Sequence; identical to SEQ ID NO: 112774
  derived and/or modified CDS sequence (opt2) from neuraminidase__InfluenzaA__AFN18432

SEQ ID NO: 118832 - RNA, 1410 nt, Artificial Sequence; identical to SEQ ID NO: 112774
  derived and/or modified CDS sequence (opt2) from neuraminidase__InfluenzaA__AFN18442

SEQ ID NO: 118833 - RNA, 1410 nt, Artificial Sequence; identical to SEQ ID NO: 112774
  derived and/or modified CDS sequence (opt2) from neuraminidase__InfluenzaA__AFN18452

SEQ ID NO: 118834 - RNA, 1410 nt, Artificial Sequence; identical to SEQ ID NO: 112774
  derived and/or modified CDS sequence (opt2) from neuraminidase__InfluenzaA__AFN18462

SEQ ID NO: 118835 - RNA, 1410 nt, Artificial Sequence
  derived and/or modified CDS sequence (opt2) from neuraminidase__InfluenzaA__AFN18472
augaaccccaaccagaagaucaucaccaucggcuccgucugcaugaccaucggcauggccaaccucauccuccagaucggcaacaucaucuccaucuggaucucccacuccauccagcucggcaaccagaaccagaucgagaccugcaaccaguccgucaucaccuacgagaacaacaccugggucaaccagaccuacgucaacaucuccaacaccaacuucgccgccggccaguccgucgucuccgucaagcucgccggcaacuccucccucugccccgucuccggcugggccaucuacuccaaggacaacuccauccgcaucggcuccaagggcgacgucuucgucauccgcgagcccuucaucuccugcuccccccucgagugccgcaccuucuuccucacccagggcgcccuccucaacgacaagcacuccaacggcaccaucaaggaccgcucccccuaccgcacccucauguccugccccaucggcgagguccccucccccuacaacucccgcuucgaguccgucgccugguccgccuccgccugccacgacggcaucaacuggcucaccaucggcaucuccggccccgacaacggcgccgucgccguccucaaguacaacggcaucaucaccgacaccaucaaguccuggcgcaacaacauccuccgcacccaggaguccgagugcgccugcgucaacggcuccugcuucaccgucaugaccgacggccccuccgacggccaggccuccuacaagaucuuccgcaucgagaagggcaagaucgucaaguccgucgagaugaacgcccccaacuaccacuacgaggagugcuccugcuaccccgacuccuccgagaucaccugcgucugccgcgacaacuggcacggcuccaaccgccccugggucuccuucaaccagaaccucgaguaccagaucggcuacaucugcuccggcaucuucggcgacaacccccgccccaacgacaagaccggcuccugcggccccgucuccuccaacggcgccaagggcgucaagggcuucuccuucaaguacggcaacggcgucuggaucggccgcaccaaguccaucuccucccgcaacggcuucgagaugaucugggaccccaacggcuggaccggcaccgacaacaacuucuccaucaagcaggacaucgucggcaucaacgagugguccggcuacuccggcuccuucguccagcaccccgagcucaccggccucgacugcauccgccccugcuucugggucgagcucauccgcggccgccccaaggagaacaccaucuggaccuccggcuccuccaucuccuucugcggcgucaacuccgacaccgucggcugguccuggcccgacggcgccgagcuccccuucaccaucgacaaguga

SEQ ID NO: 118836 - RNA, 1410 nt, Artificial Sequence; identical to SEQ ID NO: 112774
  derived and/or modified CDS sequence (opt2) from neuraminidase__InfluenzaA__AFN18482

SEQ ID NO: 118837 - RNA, 1410 nt, Artificial Sequence; identical to SEQ ID NO: 112774
  derived and/or modified CDS sequence (opt2) from neuraminidase__InfluenzaA__AFN18492

SEQ ID NO: 118838 - RNA, 1410 nt, Artificial Sequence
  derived and/or modified CDS sequence (opt2) from neuraminidase__InfluenzaA__AFN18514
augaaccccaaccagaagaucaucaccaucggcuccgucugcaugaccaucggcauggccaaccucauccuccagaucggcaacaucaucuccaucuggaucucccacuccauccagcucggcaaccagaaccagaucgagaccugcaaccaguccgucaucaccuacgagaacaacaccugggucaaccagaccuacgucaacaucuccaacaccaacuucgccgccggccaguccgucgucuccgucaagcucgucggcaacuccucccucugccccgucuccggcugggccaucuacuccaaggacaacuccauccgcaucggcuccaagggcgacgucuucgucauccgcgagcccuucaucuccugcuccccccucgagugccgcaccuucuuccucacccagggcgcccuccucaacgacaagcacuccaacggcaccaucaaggaccgcucccccuaccgcacccucauguccugccccaucggcgagguccccucccccuacaacucccgcuucgaguccgucgccugguccgccuccgccugccacgacggcaucaacuggcucaccaucggcaucuccggccccgacaacggcgccgucgccguccucaaguacaacggcaucaucaccgacaccaucaaguccuggcgcaacaacauccuccgcacccaggaguccgagugcgccugcgucaacggcuccugcuucaccgucaugaccgacggccccuccgacggccaggccuccuacaagaucuuccgcaucgagaagggcaagaucgucaaguccgucgagaugaacgcccccaacuaccacuacgaggagugcuccugcuaccccgacuccuccgagaucaccugcgucugccgcgacaacuggcacggcuccaaccgccccugggucuccuucaaccagaaccucgaguaccagaucggcuacaucugcuccggcaucuucggcgacaacccccgccccaacgacaagaccggcuccugcggccccgucuccuccaacggcgccaacggcgucaagggcuucuccuucaaguacggcaacggcgucuggaucggccgcaccaaguccaucuccucccgcaacggcuucgagaugaucugggaccccaacggcuggaccggcaccgacaacaacuucuccaucaagcaggacaucgucggcaucaacgagugguccggcuacuccggcuccuucguccagcaccccgagcucaccggccucgacugcauccgccccugcuucugggucgagcucauccgcggccgccccaaggagaacaccaucuggaccuccggcuccuccaucuccuucugcggcgucaacuccgacaccgucggcugguccuggcccgacggcgccgagcuccccuucaccaucgacaaguga

SEQ ID NO: 118839 - RNA, 1410 nt, Artificial Sequence
  derived and/or modified CDS sequence (opt2) from neuraminidase__InfluenzaA__AFN18520
augaaccccaaccagaagaucaucaccaucggcuccgucugcaugaccaucggcauggccaaccucauccuccagaucggcaacaucaucuccaucuggaucucccacuccauccagcucggcaaccagaaccagaucgagaccugcaaccaguccgucaucaccuacgagaacaacaccugggucaaccagaccuacgucaacaucuccaacaccaacuucgccgccggccaguccgucgucuccgucaagcucgccggcaacuccucccucugccccgucuccggcugggccaucuacuccaaggacaacuccauccgcaucggcuccaagggcgacgucuucgucauccgcgagcccuucaucuccugcuccccccucgagugccgcaccuucuuccucacccagggcgcccuccucaacgacaagcacuccaacggcaccaucaaggaccgcucccccuaccgcacccucauguccugccccaucggcgagguccccucccccuacaacucccgcuucgaguccgucgccugguccgccuccgccugccacgacggcaucaacuggcucaccaucggcaucuccggccccgacaacggcgccgucgccguccucaaguacaacggcgucaucaccgacaccaucaaguccuggcgcaacaacauccuccgcacccaggaguccgagugcgccugcgucaacggcuccugcuucacccucaugaccgacggccccuccgacggccaggccuccuacaagaucuuccgcaucgagaagggcaagaucgucaaguccgucgagaugaacgcccccaacuaccacuacgaggagugcuccugcuaccccgacuccuccgagaucaccugcgucugccgcgacaacuggcacggcuccaaccgccccugggucuccuucaaccagaaccucgaguaccagaucggcuacaucugcuccggcaucuucggcgacaacccccgccccaacgacaagaccggcuccugcggccccgucuccuccaacggcgccaacggcgucaagggcuucuccuucaaguacggcaacggcgucuggaucggccgcaccaaguccaucuccucccgcaacggcuucgagaugaucugggaccccaacggcuggaccggcaccgacaacaacuucuccaucaagcaggacaucgucggcaucaacgagugguccggcuacuccggcuccuucguccagcaccccgagcucaccggccucgacugcauccgccccugcuucugggucgagcucauccgcggccgccccaaggagaacaccaucuggaccuccggcuccuccaucuccuucugcggcgucaacuccgacaccgucggcugguccuggcccgacggcgccgagcuccccuucaccaucgacaaguga

SEQ ID NO: 118840 - RNA, 1410 nt, Artificial Sequence; identical to SEQ ID NO: 112774
  derived and/or modified CDS sequence (opt2) from neuraminidase__InfluenzaA__AFN18522

SEQ ID NO: 118841 - RNA, 1410 nt, Artificial Sequence; identical to SEQ ID NO: 112774
  derived and/or modified CDS sequence (opt2) from neuraminidase__InfluenzaA__AFN18524

SEQ ID NO: 118842 - RNA, 1410 nt, Artificial Sequence; identical to SEQ ID NO: 118407
  derived and/or modified CDS sequence (opt2) from neuraminidase__InfluenzaA__AFN18530

SEQ ID NO: 118843 - RNA, 1410 nt, Artificial Sequence; identical to SEQ ID NO: 112774
  derived and/or modified CDS sequence (opt2) from neuraminidase__InfluenzaA__AFN18532

SEQ ID NO: 118844 - RNA, 1410 nt, Artificial Sequence; identical to SEQ ID NO: 112774
  derived and/or modified CDS sequence (opt2) from neuraminidase__InfluenzaA__AFN18538

SEQ ID NO: 118845 - RNA, 1410 nt, Artificial Sequence; identical to SEQ ID NO: 112774
  derived and/or modified CDS sequence (opt2) from neuraminidase__InfluenzaA__AFN18544

SEQ ID NO: 118846 - RNA, 1410 nt, Artificial Sequence; identical to SEQ ID NO: 112774
  derived and/or modified CDS sequence (opt2) from neuraminidase__InfluenzaA__AFN18546

SEQ ID NO: 118847 - RNA, 1410 nt, Artificial Sequence; identical to SEQ ID NO: 112774
  derived and/or modified CDS sequence (opt2) from neuraminidase__InfluenzaA__AFN18552

SEQ ID NO: 118848 - RNA, 1410 nt, Artificial Sequence; identical to SEQ ID NO: 112774
  derived and/or modified CDS sequence (opt2) from neuraminidase__InfluenzaA__AFN18558

SEQ ID NO: 118849 - RNA, 1410 nt, Artificial Sequence; identical to SEQ ID NO: 112774
  derived and/or modified CDS sequence (opt2) from neuraminidase__InfluenzaA__AFN18560

SEQ ID NO: 118850 - RNA, 1410 nt, Artificial Sequence; identical to SEQ ID NO: 112774
  derived and/or modified CDS sequence (opt2) from neuraminidase__InfluenzaA__AFN18562

SEQ ID NO: 118851 - RNA, 1410 nt, Artificial Sequence; identical to SEQ ID NO: 112774
  derived and/or modified CDS sequence (opt2) from neuraminidase__InfluenzaA__AFN18564

SEQ ID NO: 118852 - RNA, 1410 nt, Artificial Sequence; identical to SEQ ID NO: 112774
  derived and/or modified CDS sequence (opt2) from neuraminidase__InfluenzaA__AFN18566

SEQ ID NO: 118853 - RNA, 1410 nt, Artificial Sequence; identical to SEQ ID NO: 112774
  derived and/or modified CDS sequence (opt2) from neuraminidase__InfluenzaA__AFN18572

SEQ ID NO: 118854 - RNA, 1410 nt, Artificial Sequence; identical to SEQ ID NO: 112774
  derived and/or modified CDS sequence (opt2) from neuraminidase__InfluenzaA__AFN18582

SEQ ID NO: 118855 - RNA, 1410 nt, Artificial Sequence; identical to SEQ ID NO: 112774
  derived and/or modified CDS sequence (opt2) from neuraminidase__InfluenzaA__AFN18592

SEQ ID NO: 118856 - RNA, 1410 nt, Artificial Sequence; identical to SEQ ID NO: 118407
  derived and/or modified CDS sequence (opt2) from neuraminidase__InfluenzaA__AFN18602

SEQ ID NO: 118857 - RNA, 1410 nt, Artificial Sequence
  derived and/or modified CDS sequence (opt2) from neuraminidase__InfluenzaA__AFN18612
augaaccccaaccagaagaucaucaccaucggcuccgucugcaugaccaucggcauggccaaccucauccuccagaucggcaacaucaucuccaucuggaucucccacuccauccagcucggcaaccagaaccagaucgagaccugcaaccaguccgucaucaccuacgagaacaacaccugggucaaccagaccuacgucaacaucuccaacaccaacuucgccgccggccaguccgucgucuccgucaagcucgccggcaacuccucccucugccccgucuccggcugggccaucuacuccaaggacaacuccauccgcaucggcuccaagggcgacgucuucgucauccgcgagcccuucaucuccugcuccccccucgagugccgcaccuucuuccucacccagggcgcccuccucaacgacaagcacuccaacggcaccaucaaggaccgcucccccuaccgcacccucauguccugccccaucggcgagguccccucccccuacaacucccgcuucgaguccgucgccugguccgccuccgccugccacgacggcaucaacuggcucaccaucggcaucuccggccccgacaacggcgccgucgccguccucaaguacaacggcaucaucaccgacaccaucaaguccuggcgcaacaacauccuccgcacccaggaguccgagugcgccugcgucaacggcuccugcuucaccgucaugaccgacggccccuccgacggccaggccuccuacaagaucuuccgcaucgagaagggcaagaucaucaaguccgucgagaugaacgcccccaacuaccacuacgaggagugcuccugcuaccccgacuccuccgagaucaccugcgucugccgcgacaacuggcacggcuccaaccgccccugggucuccuucaaccagaaccucgaguaccagaucggcuacaucugcuccggcaucuucggcgacaacccccgccccaacgacaagaccggcuccugcggccccgucuccuccaacggcgccaacggcgucaagggcuucuccuucaaguacggcaacggcgucuggaucggccgcaccaaguccaucuccucccgcaacggcuucgagaugaucugggaccccaacggcuggaccggcaccgacaacaacuucuccaucaagcaggacaucgucggcaucaacgagugguccggcuacuccggcuccuucguccagcaccccgagcucaccggccucgacugcauccgccccugcuucugggucgagcucauccgcggccgccccaaggagaacaccaucuggaccuccggcuccuccaucuccuucugcggcgucaacuccgacaccgucggcugguccuggcccgacggcgccgagcuccccuucaccaucgacaaguga

SEQ ID NO: 118858 - RNA, 1410 nt, Artificial Sequence; identical to SEQ ID NO: 112774
  derived and/or modified CDS sequence (opt2) from neuraminidase__InfluenzaA__AFN18618

SEQ ID NO: 118859 - RNA, 1410 nt, Artificial Sequence; identical to SEQ ID NO: 113600
  derived and/or modified CDS sequence (opt2) from neuraminidase__InfluenzaA__AFN18624

SEQ ID NO: 118860 - RNA, 1410 nt, Artificial Sequence
  derived and/or modified CDS sequence (opt2) from neuraminidase__InfluenzaA__AFN18630
augaaccccaaccagaagaucaucaccaucggcuccgucugcaugaccaucggcauggccaaccucauccuccagaucggcaacaucaucuccaucuggaucucccacuccauccagcucggcaaccagaaccagaucgagaccugcaaccaguccgucaucaccuacgagaacaacaccugggucaaccagaccuacgucaacaucuccaacaccaacuucgccgccggccaguccgucgucuccgucaagcucgccggcaacuccucccucugccccgucuccggcugggccaucuacuccaaggacaacuccauccgcaucggcuccaagggcgacgucuucgucauccgcgagcccuucaucuccugcuccccccucgagugccgcaccuucuuccucacccagggcgcccuccucaacgacaagcacuccaacggcaccaucaaggaccgcucccccuaccgcacccucauguccugccccaucggcgagguccccucccccuacaacucccgcuucgaguccgucgccugguccgccuccgccugccacgacggcaucaacuggcucaccaucggcaucuccggccccgacaacggcgccgucgccguccucaaguacaacggcaucaucaccgacaccaucaaguccuggcgcaacaacauccuccgcacccaggaguccgagugcgccugcgucaacggcuccugcuucaccgucaugaccgacggccccuccgacggccaggccuccuacaagaucuuccgcaucgagaagggcaagaucgucaaguccgucgagaugaacgcccccaacuaccacuacgaggagugcuccugcuaccccgacuccuccgagaucaccugcgucugccgcgacaacuggcacggcuccaaccgccccugggucuccuucaaccagaaccucgaguaccagaucggcuacaucugcuccggcaucuucggcgacaacccccgccccaacgacaagaccggcuccugcggccccgucuccuccaacggcgccaacggcgucaagggcuucuccuucaaguacggcaacggcgucuggaucggccgcaccaaguccaucuccucccgcaacggcuucgagaugaucugggaccccaacggcuggaccggcaccgacaacaacuucuccaucaagcaggacaucgucggcaucaacgagugguccggcuacuccggcuccuucguccagcaccccgagcucaccggccucggcugcauccgccccugcuucugggucgagcucauccgcggccgccccaaggagaacaccaucuggaccuccggcuccuccaucuccuucugcggcgucaacuccgacaccgucggcugguccuggcccgacggcgccgagcuccccuucaccaucgacaaguga

SEQ ID NO: 118861 - RNA, 1410 nt, Artificial Sequence
  derived and/or modified CDS sequence (opt2) from neuraminidase__InfluenzaA__AFN18636
augaaccccaaccagaagaucaucaccaucggcuccgucugcaugaccaucggcauggccaaccucauccuccagaucggcaacaucaucuccaucuggaucucccacuccauccagcucggcaaccagaaccagaucgagaccugcaaccaguccgucaucaccuacgagaacaacaccugggucaaccagaccuacgucaacaucuccaacaccaacuucgccgccggccaguccgucgucuccgucaagcucgccggcaacuccucccucugccccgucuccggcugggccaucuacuccaaggacaacuccauccgcaucggcuccaagggcgacgucuucgucauccgcgagcccuucaucuccugcuccccccucgagugccgcaccuucuuccucacccagggcgcccuccucaacgacaagcacuccaacggcaccaucaaggaccgcucccccuaccgcacccucauguccugccccaucggcgagguccccucccccuacaacucccgcuucgaguccgucgccugguccgccuccgccugccacgacggcaucaacuggcucaccaucggcaucuccggccccgacaacggcgccgucgccguccucaaguacaacggcaucaucaccgacaccaucaaguccuggcgcaacaacauccuccgcacccaggaguccgagugcgccugcgucaacggcuccugcuucaccgucaugaccgacggccccuccgacggccaggccuccuacaagaucuuccgcaucgagaagggcaagaucgucaaguccgucgagaugaacgcccccaacuaccacuacgaggagugcuccugcuaccccgacuccuccgagaucaccugcgucugccgcgacaacuggcacggcuccaaccgccccugggucuccuucaaccagaaccucgaguaccgcaucggcuacaucugcuccggcaucuucggcgacaacccccgccccaacgacaagaccggcuccugcggccccgucuccuccaacggcgccaacggcgucaagggcuucuccuucaaguacggcaacggcgucuggaucggccgcaccaaguccaucuccucccgcaacggcuucgagaugaucugggaccccaacggcuggaccggcaccgacaacaacuucuccaucaagcaggacaucgucggcaucaacgagugguccggcuacuccggcuccuucguccagcaccccgagcucaccggccucgacugcauccgccccugcuucugggucgagcucauccgcggccgcuccaaggagaacaccaucuggaccuccggcuccuccaucuccuucugcggcgucaacuccgacaccgucggcugguccuggcccgacggcgccgagcuccccuucaccaucgacaaguga

SEQ ID NO: 118862 - RNA, 1410 nt, Artificial Sequence; identical to SEQ ID NO: 112774
  derived and/or modified CDS sequence (opt2) from neuraminidase__InfluenzaA__AFN18646

SEQ ID NO: 118863 - RNA, 1410 nt, Artificial Sequence; identical to SEQ ID NO: 112774
  derived and/or modified CDS sequence (opt2) from neuraminidase__InfluenzaA__AFN18656

SEQ ID NO: 118864 - RNA, 1410 nt, Artificial Sequence
  derived and/or modified CDS sequence (opt2) from neuraminidase__InfluenzaA__AFN18666
augaaccccaaccagaagaucaucaccaucggcuccgucugcaugaccaucggcauggccaaccucauccuccagaucggcaacaucaucuccaucuggaucucccacuccauccagcucggcaaccagaaccagaucgagaccugcaaccaguccgucaucaccuacgagaacaacaccugggucaaccagaccuacgucaacaucuccaacaccaacuucgccgccggccaguccgucgucuccgucaagcucgccggcaacuccucccucugccccgucuccggcugggccaucuacuccaaggacaacuccauccgcaucggcuccaagggcgacgucuucgucauccgcgagcccuucaucuccugcuccccccucgagugccgcaccuucuuccucacccagggcgcccuccucaacgacaagcacuccaacggcaccaucaaggaccgcucccccuaccgcacccucauguccugccccaucggcgagguccccucccccuacaacucccgcuucgaguccgucgccugguccgccuccgccugccacgacggcaucaacuggcucaccaucggcaucuccggccccgacaacggcgccgucgccguccucaaguacaacggcaucaucaccgacaccaucaaguccuggcgcaacaacauccuccgcacccaggaguccgagugcgccugcgucaacggcuccugcuucaccgucaugaccgacggccccuccgacggccaggccuccuacaagaucuuccgcaucgagaagggcaagaucgucaaguccgucgagaugaacgcccccaacuaccacuacgaggagugcuccugcuaccccgacuccuccgagaucaccugcgucugccgcgacaacuggcacggcuccaaccgccccugggucuccuucaaccagaaccucgaguaccagaucggcuacaucugcuccggcaucuucggcgacaacccccgccccaacgacaagaccggcuccugcggccccgucuccuccaacggcgccaacggcgucaagggcuucuccuucaaguacggcaacggcgucuggaucggccgcaccaaguccaucuccucccgcaacggcuucgagaugaucugggaccccaacggcuggaccggcaccgacaacaacuucuccaucaagcaggacaucgucggcaucaacgagugguccggcuacuccggcuccuucguccagcaccccgagcucaccggccucgacugcauccgccccugcuucugggucgagcucauccgcggccgccccaaggagaacaccaucuggaccuccggcuccuccaucuccuucugcggcgucaacuccgacaccgucggcugguccuggcccgacggcgccgagcuccccuucaucaucgacaaguga

SEQ ID NO: 118865 - RNA, 1410 nt, Artificial Sequence
  derived and/or modified CDS sequence (opt2) from neuraminidase__InfluenzaA__AFN18676
augaaccccaaccagaagaucaucaccaucggcuccgucugcaugaccaucggcauggccaaccucauccuccagaucggcaacaucaucuccaucuggaucucccacuccauccagcucggcaaccagaaccagaucgagaccugcaaccaguccgucaucaccuacgagaacaacaccugggucaaccagaccuacgucaacaucuccaacaccaacuucgccgccggccaguccgucgucuccgucaagcucgccggcaacuccucccucugccccgucuccggcugggccaucuacuccaaggacaacuccauccgcaucggcuccaagggcgacgucuucgucauccgcgagcccuucaucuccugcuccccccucgagugccgcaccuucuuccucacccagggcgcccuccucaacgacaagcacuccaacggcaccaucaaggaccgcucccccuaccgcacccucauguccugccccaucggcgagguccccucccccuacaacucccgcuucgaguccgucgccugguccgccuccgccugccacgacggcaucaacuggcucaccaucggcaucuccggccccgacaacggcgccgucgccguccucaaguacaacggcaucaucaccgacaccaucaaguccuggcgcaacaacauccuccgcacccaggaguccgagugcgccugcgucaacggcuccugcuucaccgucaugaccgacggccccuccgacggccaggccuccuacaagaucuuccgcaucgagaagggcaagaucgucaaguccgucgagaugaacgcccccaacuaccacuacgaggagugcuccugcuaccccgacuccuccgagaucaccugcgucugccgcgacaacuggcacggcuccaaccgccccugggucuccuucaaccagaaccucgaguaccgcaucggcuacaucugcuccggcaucuucggcgacaacccccgccccaacgacaagaccggcuccugcggccccgucuccuccaacggcgccaacggcgucaagggcuucuccuucaaguacggcaacggcgucuggaucggccgcaccaaguccaucuccucccgcaacggcuucgagaugaucugggaccccaacggcuggaccgagaccgacaacaacuucuccaucaagcaggacaucgucggcaucaacgagugguccggcuacuccggcuccuucguccagcaccccgagcucaccggccucgacugcauccgccccugcuucugggucgagcucauccgcggccgccccaaggagaacaccaucuggaccuccggcuccuccaucuccuucugcggcgucaacuccgacaccgucggcugguccuggcccgacggcgccgagcuccccuucaccaucgacaaguga

SEQ ID NO: 118866 - RNA, 1410 nt, Artificial Sequence
  derived and/or modified CDS sequence (opt2) from neuraminidase__InfluenzaA__AFN18686
augaaccccaaccagaagaucaucaccaucggcuccgucugcaugaccaucggcauggccaaccucauccuccagaucggcaacaucaucuccaucuggaucucccacuccauccagcucggcaaccagaaccagaucgagaccugcaaccaguccgucaucaccuacgagaacaacaccugggucaaccagaccuacgucaacaucuccuccaccaacuucgccgccggccaguccgucgucuccgucaagcucgccggcaacuccucccucugccccgucuccggcugggccaucuacuccaaggacaacuccauccgcaucggcuccaagggcgacgucuucgucauccgcgagcccuucaucuccugcuccccccucgagugccgcaccuucuuccucacccagggcgcccuccucaacgacaagcacuccaacggcaccaucaaggaccgcucccccuaccgcacccucauguccugccccaucggcgagguccccucccccuacaacucccgcuucgaguccgucgccugguccgccuccgccugccacgacggcaucaacuggcucaccaucggcaucuccggccccgacaacggcgccgucgccguccucaaguacaacggcaucaucaccgacaccaucaaguccuggcgcaacaacauccuccgcacccaggaguccgagugcgccugcgucaacggcuccugcuucacccucaugaccgacggccccuccgacggccaggccuccuacaagaucuuccgcaucgagaagggcaagaucgucaaguccgucgagaugaacgcccccaacuaccacuacgaggagugcuccugcuaccccgacuccuccgagaucaccugcgucugccgcgacaacuggcacggcuccaaccgccccugggucuccuucaaccagaaccucgaguaccagaucggcuacaucugcuccggcaucuucggcgacaacccccgccccaacgacaagaccggcuccugcggccccgucuccuccaacggcgccaacggcgucaagggcuucuccuucaaguacggcaacggcgucuggaucggccgcaccaaguccaucuccucccgcaacggcuucgagaugaucugggaccccaacggcuggaccggcaccgacaacaacuucuccaucaagcaggacaucgucggcaucaacgagugguccggcuacuccggcuccuucguccagcaccccgagcucaccggccucgacugcauccgccccugcuucugggucgagcucauccgcggccgccccaaggagaacaccaucuggaccuccggcuccuccaucuccuucugcggcgucaacuccgacaccgucggcugguccuggcccgacggcgccgagcuccccuucaccaucgacaaguga

SEQ ID NO: 118867 - RNA, 1410 nt, Artificial Sequence; identical to SEQ ID NO: 112774
  derived and/or modified CDS sequence (opt2) from neuraminidase__InfluenzaA__AFN18696

SEQ ID NO: 118868 - RNA, 1410 nt, Artificial Sequence; identical to SEQ ID NO: 115361
  derived and/or modified CDS sequence (opt2) from neuraminidase__InfluenzaA__AFN18706

SEQ ID NO: 118869 - RNA, 1410 nt, Artificial Sequence; identical to SEQ ID NO: 112774
  derived and/or modified CDS sequence (opt2) from neuraminidase__InfluenzaA__AFN18716

SEQ ID NO: 118870 - RNA, 1410 nt, Artificial Sequence; identical to SEQ ID NO: 112774
  derived and/or modified CDS sequence (opt2) from neuraminidase__InfluenzaA__AFN18727

SEQ ID NO: 118871 - RNA, 1410 nt, Artificial Sequence
  derived and/or modified CDS sequence (opt2) from neuraminidase__InfluenzaA__AFN18737
augaaccccaaccagaagaucaucaccaucggcuccgucugcaugaccaucggcauggccaaccucauccuccagaucggcaacaucaucuccaucuggaucucccacuccauccagcucggcaaccagaaccagaucgagaccugcaaccaguccgucaucaccuacgagaacaacaccugggucaaccagaccuacgucaacaucuccaacaccaacuucgccgccggccaguccgucgucuccgucaagcucgccggcaacuccucccucugccccgucuccggcugggccaucuacuccaaggacaacuccauccgcaucggcuccaagggcgacgucuucgucauccgcgagcccuucaucuccugcuccccccucgagugccgcaccuucuuccucacccagggcgcccuccucaacgacaagcacuccaacggcaccaucaaggaccgcucccccuaccgcacccucauguccugccccaucggcgagguccccucccccuacaacucccgcuucgaguccgucgccugguccgccuccgccugccacgacggcaucaacuggcucaccaucggcaucuccggccccgacaacggcgccgucgccguccucaaguacaacggcaucaucaccgacaccaucaaguccuggcgcaacaacauccuccgcacccaggaguccgagugcgccugcgucaacggcuccugcuucaccgucaugaccgacggccccuccgacggccaggccuccuacaagaucuuccgcaucgagaagggcaagaucgucaaguccgucgagaugaacgcccccaacuaccacuacgaggagugcuccugcuaccccgacuccuccgagaucaccugcgucugccgcgacaacuggcacggcuccaaccgccccugggucuccuucaaccagaaccucgaguaccagaucggcuacaucugcuccggcaucuucggcgacaacccccgccccaacgacaagaccggcuccugcggccccgucuccuccaacggcgccaacggcgucaagggcuucuccuucaaguacggcaacggcgucuggaucggccgcaccaaguccaucuccucccgcaacggcuucgagauggucugggaccccaacggcuggaccggcaccgacaacaacuucuccaucaagcaggacaucgucggcaucaacgagugguccggcuacuccggcuccuucguccagcaccccgagcucaccggccucgacugcauccgccccugcuucugggucgagcucauccgcggccgccccaaggagaacaccaucuggaccuccggcuccuccaucuccuucugcggcgucaacuccgacaccgucggcugguccuggcccgacggcgccgagcuccccuucaccaucgacaaguga

SEQ ID NO: 118872 - RNA, 1410 nt, Artificial Sequence; identical to SEQ ID NO: 112774
  derived and/or modified CDS sequence (opt2) from neuraminidase__InfluenzaA__AFN18743

SEQ ID NO: 118873 - RNA, 1410 nt, Artificial Sequence; identical to SEQ ID NO: 112774
  derived and/or modified CDS sequence (opt2) from neuraminidase__InfluenzaA__AFN18749

SEQ ID NO: 118874 - RNA, 1410 nt, Artificial Sequence; identical to SEQ ID NO: 112774
  derived and/or modified CDS sequence (opt2) from neuraminidase__InfluenzaA__AFN18759

SEQ ID NO: 118875 - RNA, 1410 nt, Artificial Sequence
  derived and/or modified CDS sequence (opt2) from neuraminidase__InfluenzaA__AFN18769
augaaccccaaccagaagaucaucaccaucggcuccgucugcaugaccaucggcauggccaaccucauccuccagaucggcaacaucaucuccaucuggaucucccacuccauccagcucggcaaccagaaccagaucgagaccugcaaccaguccgucaucaccuacgagaacaacaccugggucaaccagaccuacgucaacaucuccaacaccaacuucgccgccggccaguccgucgucuccgucaagcucgccggcaacuccucccucugccccgucuccggcugggccaucuacuccaaggacaacuccauccgcaucggcuccaagggcgacgucuucgucauccgcgagcccuucaucuccugcuccccccucgagugccgcaccuucuuccucacccagggcgcccuccucaacgacaagcacuccaacggcaccaucaaggaccgcucccccuaccgcacccucauguccugccccaucggcgagguccccucccccuacaacucccgcuucgaguccgucgccugguccgccuccgccugccacgacggcaucaacuggcucaccaucggcaucuccggccccgacaacggcgccgucgccguccucaaguacaacggcaucaucaccgacaccaucaaguccuggcgcaacaacauccuccgcacccaggaguccgagugcgccugcgucaacggcuccugcuucacccucaugaccgacggccccuccgacggccaggccuccuacaagaucuuccgcaucgagaagggcaagaucgucaaguccgucgagaugaacgcccccaacuaccacuacgaggagugcuccugcuaccccgacuccaacgagaucaccugcgucugccgcgacaacuggcacggcuccaaccgccccugggucuccuucaaccagaaccucgaguaccagaucggcuacaucugcuccggcaucuucggcgacaacccccgccccaacgacaagaccggcuccugcggccccgucuccuccaacggcgccaacggcgucaagggcuucuccuucaaguacggcaacggcgucuggaucggccgcaccaaguccaucuccucccgcaacggcuucgagaugaucugggaccccaacggcuggaccggcaccgacaacaacuucuccaucaagcaggacaucgucggcaucaacgagugguccggcuacuccggcuccuucguccagcaccccgagcucaccggccucgacugcauccgccccugcuucugggucgagcucauccgcggccgccccaaggagaacaccaucuggaccuccggcuccuccaucuccuucugcggcgucaacuccgacaccgucggcugguccuggcccgacggcgccgagcuccccuucaccaucgacaaguga

SEQ ID NO: 118876 - RNA, 1410 nt, Artificial Sequence; identical to SEQ ID NO: 114676
  derived and/or modified CDS sequence (opt2) from neuraminidase__InfluenzaA__AFN18775

SEQ ID NO: 118877 - RNA, 1410 nt, Artificial Sequence; identical to SEQ ID NO: 112774
  derived and/or modified CDS sequence (opt2) from neuraminidase__InfluenzaA__AFN18777

SEQ ID NO: 118878 - RNA, 1410 nt, Artificial Sequence; identical to SEQ ID NO: 112774
  derived and/or modified CDS sequence (opt2) from neuraminidase__InfluenzaA__AFN18779

SEQ ID NO: 118879 - RNA, 1410 nt, Artificial Sequence
  derived and/or modified CDS sequence (opt2) from neuraminidase__InfluenzaA__AFN18785
augaaccccaaccagaagaucaucaccaucggcuccgucugcaugaccaucggcauggccaaccucauccuccagaucggcaacaucaucuccaucuggaucucccacuccauccagcucggcaaccagaaccagaucgagaccugcaaccaguccgucaucaccuacgagaacaacaccugggucaaccagaccuacgucaacaucuccaacaccaacuucgccgccggccaguccgucgucuccgucaagcucgccggcaacuccucccucugccccgucuccggcugggccaucuacuccaaggacaacuccauccgcaucggcuccaagggcgacgucuucgucauccgcgagcccuucaucuccugcuccccccucgagugccgcaccuucuuccucacccagggcgcccuccucaacgacaagcacuccaacggcaccaucaaggaccgcucccccuaccgcacccucauguccugccccaucggcgagguccccucccccuacaacucccgcuucgaguccgucgccugguccgccuccgccugccacgacggcaucaacuggcucaccaucggcaucuccggccccgacaacggcgccgucgccguccucaaguacaacggcaucaucaccgacaccaucaaguccuggcgcaacaacauccuccgcacccaggaguccgagugcgccugcgucaacggcuccugcuucaccgucaugaccgacggccccuccgacggccaggccuccuacaagaucuuccgcaucgagaagggcaagaucgucaaguccgucgagaugaacgcccccaacuaccacuacgaggagugcuccugcuaccccgacuccuccgagaucaccugcgucugccgcgacaacuggcacggcuccaaccgccccugggucuccuucaaccagaaccucgaguaccagaucggcuacaucugcuccggcaucuucggcgacaacccccgccccaacgacaagaccggcuccugcggccccgucuccuccaacggcgccaacggcgucaagggcuucuccuucaaguacggcaacggcgucuggaucggccgcaccaaguccaucuccucccgcaacggcuucgagaugaucugggaccccaacggcuggaccggcaccgacaacaacuucuccauccgccaggacaucgucggcaucaacgagugguccggcuacuccggcuccuucguccagcaccccgagcucaccggccucgacugcauccgccccugcuucugggucgagcucauccgcggccgccccaaggagaacaccaucuggaccuccggcuccuccaucuccuucugcggcgucaacuccgacaccgucggcugguccuggcccgacggcgccgagcuccccuucaccaucgacaaguga

SEQ ID NO: 118880 - RNA, 1410 nt, Artificial Sequence
  derived and/or modified CDS sequence (opt2) from neuraminidase__InfluenzaA__AFN18791
augaaccccaaccagaagaucaucaccaucggcuccgucugcaugaccaucggcauggccaaccucauccuccagaucggcaacaucaucuccaucuggaucucccacuccauccagcucggcaaccagaaccagaucgagaccugcaaccaguccgucaucaccuacgagaacaacaccugggucaaccagaccuacgucaacaucuccaacaccaacuucgccgccggccaguccgucgucuccgucaagcucgccggcaacuccucccucugccccgucuccggcugggccaucuacuccaaggacaacuccauccgcaucggcuccaagggcgacgucuucgucauccgcgagcccuucaucuccugcuccccccucgagugccgcaccuucuuccucacccagggcgcccuccucaacgacaagcacuccaacggcaccaucaaggaccgcucccccuaccgcacccucauguccugccccaucggcgagguccccucccccuacaacucccgcuucgaguccgucgccugguccgccuccgccugccacgacggcaucaacuggcucaccaucggcaucuccggccccgacaacggcgccgucgccguccucaaguacaacggcaucaucaccgacaccaucaaguccuggcgcaacaacauccuccgcacccaggaguccgagugcgccugcgucaacggcuccugcuucaccgucaugaccgacggccccuccgacggccaggccuccuacaagaucuuccgcaucgagaagggcaagaucgucaaguccgucgagaugaacgcccccaacuaccacuacgaggagugcuccugcuaccccgaguccuccgagaucaccugcgucugccgcgacaacuggcacggcuccaaccgccccugggucuccuucaaccagaaccucgaguaccagaucggcuacaucugcuccggcaucuucggcgacaacccccgccccaacgacaagaccggcuccugcggccccgucuccuccaacggcgccaacggcgucaagggcuucuccuucaaguacggcaacggcgucuggaucggccgcaccaaguccaucuccucccgcaacggcuucgagaugaucugggaccccaacggcuggaccggcaccgacaacaacuucuccaucaagcaggacaucgucggcaucaacgagugguccggcuacuccggcuccuucguccagcaccccgagcucaccggccucgacugcauccgccccugcuucugggucgagcucauccgcggccgccccaaggagaacaccaucuggaccuccggcuccuccaucuccuucugcggcgucaacuccgacaccgucggcugguccuggcccgacggcgccgagcuccccuucaccaucgacaaguga

SEQ ID NO: 118881 - RNA, 1410 nt, Artificial Sequence; identical to SEQ ID NO: 112774
  derived and/or modified CDS sequence (opt2) from neuraminidase__InfluenzaA__AFN18801

SEQ ID NO: 118882 - RNA, 1410 nt, Artificial Sequence; identical to SEQ ID NO: 115193
  derived and/or modified CDS sequence (opt2) from neuraminidase__InfluenzaA__AFN18811

SEQ ID NO: 118883 - RNA, 1410 nt, Artificial Sequence; identical to SEQ ID NO: 112774
  derived and/or modified CDS sequence (opt2) from neuraminidase__InfluenzaA__AFN18817

SEQ ID NO: 118884 - RNA, 1410 nt, Artificial Sequence; identical to SEQ ID NO: 112774
  derived and/or modified CDS sequence (opt2) from neuraminidase__InfluenzaA__AFN18819

SEQ ID NO: 118885 - RNA, 1410 nt, Artificial Sequence; identical to SEQ ID NO: 115766
  derived and/or modified CDS sequence (opt2) from neuraminidase__InfluenzaA__AFN18821

SEQ ID NO: 118886 - RNA, 1410 nt, Artificial Sequence; identical to SEQ ID NO: 112774
  derived and/or modified CDS sequence (opt2) from neuraminidase__InfluenzaA__AFN18823

SEQ ID NO: 118887 - RNA, 1410 nt, Artificial Sequence; identical to SEQ ID NO: 112774
  derived and/or modified CDS sequence (opt2) from neuraminidase__InfluenzaA__AFN18825

SEQ ID NO: 118888 - RNA, 1410 nt, Artificial Sequence; identical to SEQ ID NO: 112774
  derived and/or modified CDS sequence (opt2) from neuraminidase__InfluenzaA__AFN18827

SEQ ID NO: 118889 - RNA, 1410 nt, Artificial Sequence; identical to SEQ ID NO: 112774
  derived and/or modified CDS sequence (opt2) from neuraminidase__InfluenzaA__AFN18829

SEQ ID NO: 118890 - RNA, 1410 nt, Artificial Sequence; identical to SEQ ID NO: 112774
  derived and/or modified CDS sequence (opt2) from neuraminidase__InfluenzaA__AFN18831

SEQ ID NO: 118891 - RNA, 1410 nt, Artificial Sequence; identical to SEQ ID NO: 113911
  derived and/or modified CDS sequence (opt2) from neuraminidase__InfluenzaA__AFN18833

SEQ ID NO: 118892 - RNA, 1410 nt, Artificial Sequence; identical to SEQ ID NO: 113949
  derived and/or modified CDS sequence (opt2) from neuraminidase__InfluenzaA__AFN18835

SEQ ID NO: 118893 - RNA, 1410 nt, Artificial Sequence; identical to SEQ ID NO: 112774
  derived and/or modified CDS sequence (opt2) from neuraminidase__InfluenzaA__AFN18841

SEQ ID NO: 118894 - RNA, 1410 nt, Artificial Sequence
  derived and/or modified CDS sequence (opt2) from neuraminidase__InfluenzaA__AFN18851
augaaccccaaccagaagaucaucaccaucggcuccgucugcaugaccaucggcauggccaaccucauccuccagaucggcaacaugaucuccaucuggaucucccacuccauccagcucggcaaccagaaccagaucgagaccugcaaccaguccgucaucaccuacgagaacaacaccugggucaaccagaccuacgucaacaucuccaacaccaacuucgccgccggccaguccgucgucuccgucaagcucgccggcaacuccucccucugccccgucuccggcugggccaucuacuccaaggacaacuccauccgcaucggcuccaagggcgacgucuucgucauccgcgagcccuucaucuccugcuccccccucgagugccgcaccuucuuccucacccagggcgcccuccucaacgacaagcacuccaacggcaccaucaaggaccgcucccccuaccgcacccucauguccugccccaucggcgagguccccucccccuacaacucccgcuucgaguccgucgccugguccgccuccgccugccacgacggcaucaacuggcucaccaucggcaucuccggccccgacaacggcgccgucgccguccucaaguacaacggcaucaucaccgacaccaucaaguccuggcgcaacaacauccuccgcacccaggaguccgagugcgccugcgucaacggcuccugcuucaccgucaugaccgacggccccuccgacggccaggccuccuacaagaucuuccgcaucgagaagggcaagaucgucaaguccgucgagaugaacgcccccaacuaccacuacgaggagugcuccugcuaccccgacuccuccgagaucaccugcgucugccgcgacaacuggcacggcuccaaccgccccugggucuccuucaaccagaaccucgaguaccagaucggcuacaucugcuccggcaucuucggcgacaacccccgccccaacgacaagaccggcuccugcggccccgucuccuccaacggcgccaacggcgucaagggcuucuccuucaaguacggcaacggcgucuggaucggccgcaccaaguccaucuccucccgcaacggcuucgagaugaucugggaccccaacggcuggaccggcaccgacaacaacuucuccaucaagcaggacaucgucggcaucaacgagugguccggcuacuccggcuccuucguccagcaccccgagcucaccggccucgacugcauccgccccugcuucugggucgagcucauccgcggccgccccaaggagaacaccaucuggaccuccggcuccuccaucuccuucugcggcgucaacuccgacaccgucggcugguccuggcccgacggcgccgagcuccccuucaccaucgacaaguga

SEQ ID NO: 118895 - RNA, 1410 nt, Artificial Sequence; identical to SEQ ID NO: 112774
  derived and/or modified CDS sequence (opt2) from neuraminidase__InfluenzaA__AFN18857

SEQ ID NO: 118896 - RNA, 1410 nt, Artificial Sequence
  derived and/or modified CDS sequence (opt2) from neuraminidase__InfluenzaA__AFN18859
augaaccccaaccagaagaucaucaccaucggcuccgucugcaugaccaucggccucgccaaccucauccuccagaucggcaacaucaucuccaucuggaucucccacuccauccagcucggcaaccagaaccagaucgagaccugcaaccaguccgucaucaccuacgagaacaacaccugggucaaccagaccuacgucaacaucuccaacaccaacuucgccgccggccaguccgucgucuccgucaagcucgccggcaacuccucccucugccccgucuccggcugggccaucuacuccaaggacaacuccauccgcaucggcuccaagggcgacgucuucgucauccgcgagcccuucaucuccugcuccccccucgagugccgcaccuucuuccucacccagggcgcccuccucaacgacaagcacuccaacggcaccaucaaggaccgcucccccuaccgcacccucauguccugccccaucggcgagguccccucccccuacaacucccgcuucgaguccgucgccugguccgccuccgccugccacgacggcaucaacuggcucaccaucggcaucuccggccccgacaacggcgccgucgccguccucaaguacaacggcaucaucaccgacaccaucaaguccuggcgcaacaacauccuccgcacccaggaguccgagugcgccugcgucaacggcuccugcuucaccgucaugaccgacggccccuccgacggccaggccuccuacaagaucuuccgcaucgagaagggcaagaucgucaaguccgucgagaugaacgcccccaacuaccacuacgaggagugcuccugcuaccccgacuccuccgagaucaccugcgucugccgcgacaacuggcacggcuccaaccgccccugggucuccuucaaccagaaccucgaguaccagaucggcuacaucugcuccggcaucuucggcgacaacccccgccccaacgacaagaccggcuccugcggccccgucuccuccaacggcgccaacggcgucaagggcuucuccuucaaguacggcaacggcgucuggaucggccgcaccaaguccaucuccucccgcaacggcuucgagaugaucugggaccccaacggcuggaccggcaccgacaacaacuucuccaucaagcaggacaucgucggcaucaacgagugguccggcuacuccggcuccuucguccagcaccccgagcucaccggccucgacugcauccgccccugcuucugggucgagcucauccgcggccgccccaaggagaacaccaucuggaccuccggcuccuccaucuccuucugcggcgucaacuccgacaccgucggcugguccuggcccgacggcgccgagcuccccuucaccaucgacaaguga

SEQ ID NO: 118897 - RNA, 1410 nt, Artificial Sequence
  derived and/or modified CDS sequence (opt2) from neuraminidase__InfluenzaA__AFN18861
augaaccccaaccagaagaucaucaccaucggcuccgucugcaugaccaucggcauggccaaccucauccuccagaucggcaacaucaucuccaucuggaucucccacuccauccagcucggcaaccagaaccagaucgagaccugcaaccaguccgucaucaccuacgagaacaacaccugggucaaccagaccuacgucaacaucuccaacaccaacuucgccgccggccaguccgucgucuccgucaagcucgccggcaacuccucccucugcuccgucuccggcugggccaucuacuccaaggacaacuccauccgcaucggcuccaagggcgacgucuucgucauccgcgagcccuucaucuccugcuccccccucgagugccgcaccuucuuccucacccagggcgcccuccucaacgacaagcacuccaacggcaccaucaaggaccgcucccccuaccgcacccucauguccugccccaucggcgagguccccucccccuacaacucccgcuucgaguccgucgccugguccgccuccgccugccacgacggcaucaacuggcucaccaucggcaucuccggccccgacaacggcgccgucgccguccucaaguacaacggcaucaucaccgacaccaucaaguccuggcgcaacaacauccuccgcacccaggaguccgagugcgccugcgucaacggcuccugcuucaccgucaugaccgacggccccuccgacggccaggccuccuacaagaucuuccgcaucgagaagggcaagaucgucaaguccgucgagaugaacgcccccaacuaccacuacgaggagugcuccugcuaccccgacuccuccgagaucaccugcgucugccgcgacaacuggcacggcuccaaccgccccugggucuccuucaaccagaaccucgaguaccagaucggcuacaucugcuccggcaucuucggcgacaacccccgccccaacgacaagaccggcuccugcggccccgucuccuccaacggcgccaacggcgucaagggcuucuccuucaaguacggcaacggcgucuggaucggccgcaccaaguccaucuccucccgcaacggcuucgagaugaucugggaccccaacggcuggaccggcaccgacaacaacuucuccaucaagcaggacaucgucggcaucaacgagugguccggcuacuccggcuccuucguccagcaccccgagcucaccggccucgacugcauccgccccugcuucugggucgagcucauccgcggccgccccaaggagaacaccaucuggaccuccggcuccuccaucuccuucugcggcgucaacuccgacaccgucggcugguccuggcccgacggcgccgagcuccccuucaccaucgacaaguga

SEQ ID NO: 118898 - RNA, 1410 nt, Artificial Sequence; identical to SEQ ID NO: 112774
  derived and/or modified CDS sequence (opt2) from neuraminidase__InfluenzaA__AFN18867

SEQ ID NO: 118899 - RNA, 1410 nt, Artificial Sequence; identical to SEQ ID NO: 114588
  derived and/or modified CDS sequence (opt2) from neuraminidase__InfluenzaA__AFN18877

SEQ ID NO: 118900 - RNA, 1410 nt, Artificial Sequence; identical to SEQ ID NO: 112774
  derived and/or modified CDS sequence (opt2) from neuraminidase__InfluenzaA__AFN18887

SEQ ID NO: 118901 - RNA, 1410 nt, Artificial Sequence; identical to SEQ ID NO: 113792
  derived and/or modified CDS sequence (opt2) from neuraminidase__InfluenzaA__AFN18893

SEQ ID NO: 118902 - RNA, 1410 nt, Artificial Sequence
  derived and/or modified CDS sequence (opt2) from neuraminidase__InfluenzaA__AFN18895
augaaccccaaccagaagaucaucaccaucggcuccgucugcaugaccaucggcauggccaaccucauccuccagaucggcaacaucaucuccaucuggaucucccacuccauccagcucggcaaccagaaccagaucgagaccugcaaccaguccgucaucaccuacgagaacaacaccugggucaaccagaccuacgucaacaucuccaacaccaacuucgccgccggccaguccgucgucuccgucaagcucgccggcaacuccucccucugccccgucuccggcugggccaucuacuccaaggacaacuccauccgcaucggcuccaagggcgacgucuucgucauccgcgagcccuucaucuccugcuccccccucgagugccgcaccuucuuccucacccagggcgcccuccucaacgacaagcacuccaacggcaccaucaaggaccgcucccccuaccgcacccucauguccugccccaucggcgagguccccucccccuacaacucccgcuucgaguccgucgccugguccgccuccgccugccacgacggcaucaacuggcucaccaucggcaucuccggccccgacaacggcgccgucgccguccucaaguacaacggcaucaucaccgacaccaucaaguccuggcgcaacaacauccuccgcacccaggaguccgagugcgccugcgucaacggcuccugcuucaccgucaugaccgacggccccuccgacggccaggccuccuacaagaucuuccgcaucgagaagggcaagaucgucaaguccgucgagaugaacgcccccaacuaccacuacgaggagugcuccugcuaccccgacuccuccgagaucaccugcgucugccgcgacaacuggcacggcuccaaccgccccugggucuccuucaaccagaaccucgaguaccgcaucggcuacaucugcuccggcaucuucggcgacaacccccgccccaacgacaagaccggcuccugcggccccgucuccuccaacggcgccaacggcgucaagggcuucuccuucaaguacggcaacggcgucuggaucggccgcaccaaguccaucuccucccgcaacggcuucgagaugaucugggaccccaacggcuggaccggcaccgacaacaacuucuccaucaagcaggacaucgucggcaucaacgagugguccggcuacuccggcuccuucguccagcaccccgagcucaccggccucgacugcauccgccccugcuucugggucgagcucaucaagggccgccccaaggagaacaccaucuggaccuccggcuccuccaucuccuucugcggcgucaacuccgacaccgucggcugguccuggcccgacggcgccgagcuccccuucaccaucgacaaguga

SEQ ID NO: 118903 - RNA, 1410 nt, Artificial Sequence; identical to SEQ ID NO: 114676
  derived and/or modified CDS sequence (opt2) from neuraminidase__InfluenzaA__AFN18905

SEQ ID NO: 118904 - RNA, 1410 nt, Artificial Sequence; identical to SEQ ID NO: 114588
  derived and/or modified CDS sequence (opt2) from neuraminidase__InfluenzaA__AFN18913

SEQ ID NO: 118905 - RNA, 1410 nt, Artificial Sequence
  derived and/or modified CDS sequence (opt2) from neuraminidase__InfluenzaA__AFN18919
augaaccccaaccagaagaucaucaccaucggcuccgucugcaugaccaucggcauggccaaccucauccuccagaucggcaacaucaucuccaucuggaucucccacuccauccagcucggcaaccagaaccagaucgagaccugcaaccaguccgucaucaccuacgagaacaacaccugggucaaccagaccuacgucaacaucuccaacaccaacuucgccgccggccaguccgucgucuccgucaagcucgccggcaacuccucccucugccccgucuccggcugggccaucuacuccaaggacaacuccauccgcaucggcuccaagggcgacgucuucgucauccgcgagcccuucaucuccugcuccccccucgagugccgcaccuucuuccucacccagggcgcccuccucaacgacaagcacuccaacggcaccaucaaggaccgcucccccuaccgcacccucauguccugccccaucggcgagguccccucccccuacaacucccgcuucgaguccgucgccugguccgccuccgccugccacgacggcaucaacuggcucaccaucggcaucuccggccccgacaacggcgccgucgccguccucaaguacaacggcaucaucaccgacaccaucaaguccuggcgcaacaacauccuccgcacccaggaguccgagugcgccugcgucaacggcuccugcuucaccgucaugaccgacggccccuccgacggccaggccuccuacaagaucuuccgcaucgagaagggcaagaucgucaaguccgucgagaugaacgcccccaacuaccacuacgaggagugcuccugcuaccccgacuccuccgagaucaccugcgucugccgcgacaacuggcacggcuccaaccgccccugggucuccuucaaccagaaccucgaguaccagaucggcuacaucugcuccggcaucuucggcgacaacccccgccccaacgacaagaccggcuccugcggccccgucuccuccaacggcgagaacggcgucaagggcuucuccuucaaguacggcaacggcgucuggaucggccgcaccaaguccaucuccucccgcaacggcuucgagaugaucugggaccccaacggcuggaccggcaccgacaacaacuucuccaucaagcaggacaucgucggcaucaacgagugguccggcuacuccggcuccuucguccagcaccccgagcucaccggccucgacugcauccgccccugcuucugggucgagcucauccgcggccgccccaaggagaacaccaucuggaccuccggcuccuccaucuccuucugcggcgucaacuccgacaccgucggcugguccuggcccgacggcgccgagcuccccuucaccaucgacaaguga

SEQ ID NO: 118906 - RNA, 1410 nt, Artificial Sequence
  derived and/or modified CDS sequence (opt2) from neuraminidase__InfluenzaA__AFN18929
augaaccccaaccagaagaucaucaccaucggcuccgucugcaugaccaucggcauggccaaccucauccuccagaucggcaacaucaucuccaucuggaucucccacuccauccagcucggcaaccagaaccagaucgagaccugcaaccaguccgucaucaccuacgagaacaacaccugggucaaccagaccuacgucaacaucuccaacaccaacuucgccgccggccaguccgucgucuccgucaagcucgccggcaacuccucccucugccccgucuccggcugggccaucuacuccaaggacaacuccauccgcaucggcuccaagggcgacgucuucgucauccgcgagcccuucaucuccugcuccccccucgagugccgcaccuucuuccucacccagggcgcccuccucaacgacaagcacuccaacggcaccaucaaggaccgcucccccuaccgcacccucauguccugccccaucggcgagguccccucccccuacaacucccgcuucgaguccgucgccugguccgccuccgccugccacgacggcaucaacuggcucaccaucggcaucuccggccccgacaacggcgccgucgccguccucaaguacaacggcaucaucaccgacaccaucaaguccuggcgcaacaacauccuccgcacccaggaguccgagugcgccugcgucaacggcuccugcuucacccucaugaccgacggccccuccgacggccaggccuccuacaagaucuuccgcaucgagaagggcaagaucgucaaguccgucgagaugaacgcccccaacuaccacuacgaggagugcuccugcuaccccgacuccuccgagaucaccugcgucugccgcgacaacuggcacggcuccaaccgccccugggucuccuucaaccagaaccucgaguaccagaucggcuacaucugcuccggcaucuucggcgacaacccccgccccaacgacaagaccggcuccugcggccccgucuccuccaacggcgccaacggcgucaagggcuucuccuucaaguacggcaacggcgucuggaucggccgcaccaaguccaucuccucccgcaacggcuucgagaugaucugggaccccaacggcuggaccggcaccgacaacaacuucuccaucaagcaggacaucgucggcaucaacgagugguccggcuacuccggcuccuucguccagcaccccgagcucaccggccucgacugcauccgccccugcuucugggucgagcucauccgcggccgccccaaggagaacaccaucuggaccuccggcuccuccaucuccuucugcggcgucaacuccgacaccgucggcugguccugguccgacggcgccgagcuccccuucaccaucgacaaguga

SEQ ID NO: 118907 - RNA, 1410 nt, Artificial Sequence; identical to SEQ ID NO: 112774
  derived and/or modified CDS sequence (opt2) from neuraminidase__InfluenzaA__AFN18939

SEQ ID NO: 118908 - RNA, 1410 nt, Artificial Sequence; identical to SEQ ID NO: 112774
  derived and/or modified CDS sequence (opt2) from neuraminidase__InfluenzaA__AFN18953

SEQ ID NO: 118909 - RNA, 1410 nt, Artificial Sequence; identical to SEQ ID NO: 112774
  derived and/or modified CDS sequence (opt2) from neuraminidase__InfluenzaA__AFN18959

SEQ ID NO: 118910 - RNA, 1410 nt, Artificial Sequence; identical to SEQ ID NO: 112774
  derived and/or modified CDS sequence (opt2) from neuraminidase__InfluenzaA__AFN18965

SEQ ID NO: 118911 - RNA, 1410 nt, Artificial Sequence; identical to SEQ ID NO: 116844
  derived and/or modified CDS sequence (opt2) from neuraminidase__InfluenzaA__AFN18975

SEQ ID NO: 118912 - RNA, 1410 nt, Artificial Sequence; identical to SEQ ID NO: 112774
  derived and/or modified CDS sequence (opt2) from neuraminidase__InfluenzaA__AFN18981

SEQ ID NO: 118913 - RNA, 1410 nt, Artificial Sequence
  derived and/or modified CDS sequence (opt2) from neuraminidase__InfluenzaA__AFN18983
augaaccccaaccagaagaucaucaccaucggcuccgucugcaugaccaucggcauggccaaccucauccuccagaucggcaacaucaucuccaucuggaucucccacuccauccagcucggcaaccagaaccagaucgagaccugcaaccaguccgucaucaccuacgagaacaacaccugggucaaccagaccuacgucaacaucuccaacaccaacuucgccgccggccaguccgucgucuccgucaagcucgccggcaacuccucccucugccccgucuccggcugggccaucuacuccaaggacaacuccauccgcaucggcuccaagggcgacgucuucgucauccgcgagcccuucaucuccugcuccccccucgagugccgcaccuucuuccucacccagggcgcccuccucaacgacaagcacuccaacggcaccaucaaggaccgcucccccuaccgcacccucauguccugccccaucggcgagguccccucccccuacaacucccgcuucgaguccgucgccugguccgccuccgccugccacgacggcaucaacuggcucaccaucggcaucuccggccccgacaacggcgccgucgccguccucaaguacaacggcaucaucaccgacaccaucaaguccuggcgcaacaacauccuccgcacccaggaguccgagugcgccugcgucaacggcuccugcuucaccgucaugaccgacggccccuccgacggccaggccuccuacaagaucuuccgcaucgagaagggcaagaucgucaaguccgucgagaugaacgccuccaacuaccacuacgaggagugcuccugcuaccccgacuccuccgagaucaccugcgucugccgcgacaacuggcacggcuccaaccgccccugggucuccuucaaccagaaccucgaguaccagaucggcuacaucugcuccggcaucuucggcgacaacccccgccccaacgacaagaccggcuccugcggccccgucuccuccaacggcgccaacggcgucaagggcuucuccuucaaguacggcaacggcgucuggaucggccgcaccaaguccaucuccucccgcaacggcuucgagaugaucugggaccccaacggcuggaccggcaccgacaacaacuucuccaucaagcaggacaucgucggcaucaacgagugguccggcuacuccggcuccuucguccagcaccccgagcucaccggccucgacugcauccgccccugcuucugggucgagcucauccgcggccgccccaaggagaacaccaucuggaccuccggcuccaucaucuccuucugcggcgucaacuccgacaccgucggcugguccuggcccgacggcgccgagcuccccuucaccaucgacaaguga

SEQ ID NO: 118914 - RNA, 1410 nt, Artificial Sequence; identical to SEQ ID NO: 112774
  derived and/or modified CDS sequence (opt2) from neuraminidase__InfluenzaA__AFN18985

SEQ ID NO: 118915 - RNA, 1410 nt, Artificial Sequence
  derived and/or modified CDS sequence (opt2) from neuraminidase__InfluenzaA__AFN18987
augaaccccaaccagaagaucaucaccaucggcuccgucugcaugaccaucggcauggccaaccucauccuccagaucggcaacaucaucuccaucuggaucucccacuccauccagcucggcaaccagaaccagaucgagaccugcaaccaguccgucaucaccuacgagaacaacaccugggucaaccagaccuacgucaacaucuccaacaccaacuucgccgccggccaguccgucgucuccgucaagcucgccggcaacuccucccucugccccgucuccggcugggccaucuacuccaaggacaacuccauccgcaucggcuccaagggcgacgucuucgucauccgcgagcccuucaucuccugcuccccccucgagugccgcaccuucuuccucacccagggcgcccuccucaacgacaagcacuccaacggcaccaucaaggaccgcucccccuaccgcacccucauguccugccccaucggcgagguccccucccccuacaacucccgcuucgaguccgucgccugguccgccuccgccugccacgacggcaucaacuggcucaccaucggcaucuccggccccgacaacggcgccgucgccguccucaaguacaacggcaucaucaccgacaccaucaaguccuggcgcaacaacauccuccgcacccaggaguccgagugcgccugcgucaacggcuccugcuucaccgucaugaccgacggccccuccgacggccaggccuccuacaagaucuuccgcaucgagaagggcaagaucgucaaguccgucgagaugaacgcccccaacuaccacuacgaggagugcuccugcuaccccgacuccuccgagaucaccugcgucugccgcgacaacuggcacggcuccaaccgccccugggucuccuucaaccagaaccucgaguaccagaucggcuacaucugcuccggcaucuucggcgacaacccccgccccaucgacaagaccggcuccugcggccccgucuccuccaacggcgccaacggcgucaagggcuucuccuucaaguacggcaacggcgucuggaucggccgcaccaaguccaucuccucccgcaacggcuucgagaugaucugggaccccaacggcuggaccggcaccgacaacaacuucuccaucaagcaggacaucgucggcaucaacgagugguccggcuacuccggcuccuucguccagcaccccgagcucaccggccucgacugcauccgccccugcuucugggucgagcucauccgcggccgccccaaggagaacaccaucuggaccuccggcuccuccaucuccuucugcggcgucaacuccgacaccgucggcugguccuggcccgacggcgccgagcuccccuucaccaucgacaaguga

SEQ ID NO: 118916 - RNA, 1410 nt, Artificial Sequence; identical to SEQ ID NO: 112774
  derived and/or modified CDS sequence (opt2) from neuraminidase__InfluenzaA__AFN18989

SEQ ID NO: 118917 - RNA, 1410 nt, Artificial Sequence; identical to SEQ ID NO: 112774
  derived and/or modified CDS sequence (opt2) from neuraminidase__InfluenzaA__AFN18995

SEQ ID NO: 118918 - RNA, 1410 nt, Artificial Sequence; identical to SEQ ID NO: 118896
  derived and/or modified CDS sequence (opt2) from neuraminidase__InfluenzaA__AFN19001

SEQ ID NO: 118919 - RNA, 1410 nt, Artificial Sequence; identical to SEQ ID NO: 112774
  derived and/or modified CDS sequence (opt2) from neuraminidase__InfluenzaA__AFN19007

SEQ ID NO: 118920 - RNA, 1410 nt, Artificial Sequence; identical to SEQ ID NO: 112774
  derived and/or modified CDS sequence (opt2) from neuraminidase__InfluenzaA__AFN19024

SEQ ID NO: 118921 - RNA, 1410 nt, Artificial Sequence
  derived and/or modified CDS sequence (opt2) from neuraminidase__InfluenzaA__AFN19025
augaaccccaaccagaagaucaucaccaucggcuccgucugcaugaccaucggcauggccaaccucauccuccagaucggcaacaucaucuccaucuggaucucccacuccauccagcucggcaaccagaaccagaucgagaccugcaaccaguccgucaucaccuacgagaacaacaccugggucaaccagaccuacgucaacaucuccaacaccaacuucgccgccggccaguccgucgucuccgucaagcucgccggcaacuccucccucugccccgucuccggcugggccaucuacuccaaggacaacuccauccgcaucggcuccaagggcgacgucuucgucauccgcgagcccuucaucuccugcuccccccucgagugccgcaccuucuuccucacccagggcgcccuccucaacgacaagcacuccaacggcaccaucaaggaccgcucccccuaccgcacccucauguccugccccaucggcgagguccccucccccuacaacucccgcuucgaguccgucgccugguccgccuccgccugccacgacggcaucaacuggcucaccaucggcaucuccggccccgacaacggcgccgucgccguccucaaguacaacggcaucaucaccgacaccaucaaguccuggcgcaacaagauccuccgcacccaggaguccgagugcgccugcgucaacggcuccugcuucaccgucaugaccgacggccccuccgacggccaggccuccuacaagaucuuccgcaucgagaagggcaagaucgucaaguccgucgagaugaacgcccccaacuaccacuacgaggagugcuccugcuaccccgacuccuccgagaucaccugcgucugccgcgacaacuggcacggcuccaaccgccccugggucuccuucaaccagaaccucgaguaccagaucggcuacaucugcuccggcaucuucggcgacaacccccgccccaacgacaagaccggcuccugcggccccgucuccuccaacggcgccaacggcgucaagggcuucuccuucaaguacggcaacggcgucuggaucggccgcaccaaguccaucuccucccgcaacggcuucgagaugaucugggaccccaacggcuggaccggcaccgacaacaacuucuccaucaagcaggacaucgucggcaucaacgagugguccggcuacuccggcuccuucguccagcaccccgagcucaccggccucgacugcauccgccccugcuucugggucgagcucauccgcggccgccccaaggagaacaccaucuggaccuccggcuccuccaucuccuucugcggcgucaacuccgacaccgucggcugguccuggcccgacggcgccgagcuccccuucaccaucgacaaguga

SEQ ID NO: 118922 - RNA, 1410 nt, Artificial Sequence; identical to SEQ ID NO: 112774
  derived and/or modified CDS sequence (opt2) from neuraminidase__InfluenzaA__AFN19027

SEQ ID NO: 118923 - RNA, 1410 nt, Artificial Sequence; identical to SEQ ID NO: 112774
  derived and/or modified CDS sequence (opt2) from neuraminidase__InfluenzaA__AFN19032

SEQ ID NO: 118924 - RNA, 1410 nt, Artificial Sequence; identical to SEQ ID NO: 112774
  derived and/or modified CDS sequence (opt2) from neuraminidase__InfluenzaA__AFN19038

SEQ ID NO: 118925 - RNA, 1410 nt, Artificial Sequence; identical to SEQ ID NO: 118407
  derived and/or modified CDS sequence (opt2) from neuraminidase__InfluenzaA__AFN19049

SEQ ID NO: 118926 - RNA, 1410 nt, Artificial Sequence; identical to SEQ ID NO: 112774
  derived and/or modified CDS sequence (opt2) from neuraminidase__InfluenzaA__AFN19055

SEQ ID NO: 118927 - RNA, 1410 nt, Artificial Sequence; identical to SEQ ID NO: 112774
  derived and/or modified CDS sequence (opt2) from neuraminidase__InfluenzaA__AFN19065

SEQ ID NO: 118928 - RNA, 1410 nt, Artificial Sequence; identical to SEQ ID NO: 112774
  derived and/or modified CDS sequence (opt2) from neuraminidase__InfluenzaA__AFN19071

SEQ ID NO: 118929 - RNA, 1410 nt, Artificial Sequence; identical to SEQ ID NO: 112774
  derived and/or modified CDS sequence (opt2) from neuraminidase__InfluenzaA__AFN19077

SEQ ID NO: 118930 - RNA, 1410 nt, Artificial Sequence; identical to SEQ ID NO: 112774
  derived and/or modified CDS sequence (opt2) from neuraminidase__InfluenzaA__AFN19083

SEQ ID NO: 118931 - RNA, 1410 nt, Artificial Sequence; identical to SEQ ID NO: 112774
  derived and/or modified CDS sequence (opt2) from neuraminidase__InfluenzaA__AFN19089

SEQ ID NO: 118932 - RNA, 1410 nt, Artificial Sequence; identical to SEQ ID NO: 112774
  derived and/or modified CDS sequence (opt2) from neuraminidase__InfluenzaA__AFN19099

SEQ ID NO: 118933 - RNA, 1410 nt, Artificial Sequence; identical to SEQ ID NO: 112774
  derived and/or modified CDS sequence (opt2) from neuraminidase__InfluenzaA__AFN19105

SEQ ID NO: 118934 - RNA, 1410 nt, Artificial Sequence; identical to SEQ ID NO: 112774
  derived and/or modified CDS sequence (opt2) from neuraminidase__InfluenzaA__AFN19114

SEQ ID NO: 118935 - RNA, 1410 nt, Artificial Sequence; identical to SEQ ID NO: 112774
  derived and/or modified CDS sequence (opt2) from neuraminidase__InfluenzaA__AFN19126

SEQ ID NO: 118936 - RNA, 1410 nt, Artificial Sequence; identical to SEQ ID NO: 112774
  derived and/or modified CDS sequence (opt2) from neuraminidase__InfluenzaA__AFN19136

SEQ ID NO: 118937 - RNA, 1410 nt, Artificial Sequence; identical to SEQ ID NO: 112774
  derived and/or modified CDS sequence (opt2) from neuraminidase__InfluenzaA__AFN19146

SEQ ID NO: 118938 - RNA, 1410 nt, Artificial Sequence; identical to SEQ ID NO: 112774
  derived and/or modified CDS sequence (opt2) from neuraminidase__InfluenzaA__AFN19156

SEQ ID NO: 118939 - RNA, 1410 nt, Artificial Sequence; identical to SEQ ID NO: 112774
  derived and/or modified CDS sequence (opt2) from neuraminidase__InfluenzaA__AFN19166

SEQ ID NO: 118940 - RNA, 1410 nt, Artificial Sequence; identical to SEQ ID NO: 112774
  derived and/or modified CDS sequence (opt2) from neuraminidase__InfluenzaA__AFN19186

SEQ ID NO: 118941 - RNA, 1410 nt, Artificial Sequence; identical to SEQ ID NO: 118407
  derived and/or modified CDS sequence (opt2) from neuraminidase__InfluenzaA__AFN19196

SEQ ID NO: 118942 - RNA, 1410 nt, Artificial Sequence; identical to SEQ ID NO: 112774
  derived and/or modified CDS sequence (opt2) from neuraminidase__InfluenzaA__AFN19205

SEQ ID NO: 118943 - RNA, 1410 nt, Artificial Sequence; identical to SEQ ID NO: 112774
  derived and/or modified CDS sequence (opt2) from neuraminidase__InfluenzaA__AFN19215

SEQ ID NO: 118944 - RNA, 1410 nt, Artificial Sequence; identical to SEQ ID NO: 112774
  derived and/or modified CDS sequence (opt2) from neuraminidase__InfluenzaA__AFN19225

SEQ ID NO: 118945 - RNA, 1410 nt, Artificial Sequence; identical to SEQ ID NO: 112774
  derived and/or modified CDS sequence (opt2) from neuraminidase__InfluenzaA__AFN19235

SEQ ID NO: 118946 - RNA, 1410 nt, Artificial Sequence; identical to SEQ ID NO: 112774
  derived and/or modified CDS sequence (opt2) from neuraminidase__InfluenzaA__AFN19245

SEQ ID NO: 118947 - RNA, 1410 nt, Artificial Sequence; identical to SEQ ID NO: 112774
  derived and/or modified CDS sequence (opt2) from neuraminidase__InfluenzaA__AFN19251

SEQ ID NO: 118948 - RNA, 1410 nt, Artificial Sequence; identical to SEQ ID NO: 112774
  derived and/or modified CDS sequence (opt2) from neuraminidase__InfluenzaA__AFN19261

SEQ ID NO: 118949 - RNA, 1410 nt, Artificial Sequence; identical to SEQ ID NO: 118407
  derived and/or modified CDS sequence (opt2) from neuraminidase__InfluenzaA__AFN19271

SEQ ID NO: 118950 - RNA, 1410 nt, Artificial Sequence; identical to SEQ ID NO: 114505
  derived and/or modified CDS sequence (opt2) from neuraminidase__InfluenzaA__AFN19281

SEQ ID NO: 118951 - RNA, 1410 nt, Artificial Sequence
  derived and/or modified CDS sequence (opt2) from neuraminidase__InfluenzaA__AFN19287
augaaccccaaccagaagaucaucaccaucggcuccgucugcaugaccaucggcauggccaaccucauccuccagaucggcaacaucaucuccaucuggaucucccacuccauccagcucggcaaccagaaccagaucgagaccugcaaccaguccgucaucaccuacgagaacaacaccugggucaaccagaccuacgucaacaucuccaacaccaacuucgccgccggccaguccgucgucuccgucaagcucgccggcaacuccucccucugccccgucuccggcugggccaucuacuccaaggacaacuccauccgcaucggcuccaagggcgacgucuucgucauccgcgagcccuucaucuccugcuccccccucgagugccgcaccuucuuccucacccagggcgcccuccucuccgacaagcacuccaacggcaccaucaaggaccgcucccccuaccgcacccucauguccugccccaucggcgagguccccucccccuacaacucccgcuucgaguccgucgccugguccgccuccgccugccacgacggcaucaacuggcucaccaucggcaucuccggccccgacaacggcgccgucgccguccucaaguacaacggcaucaucaccgacaccaucaaguccuggcgcaacaacauccuccgcacccaggaguccgagugcgccugcgucaacggcuccugcuucaccgucaugaccgacggccccuccgacggccaggccuccuacaagaucuuccgcaucgagaagggcaagaucgucaaguccgucgagaugaacgcccccaacuaccacuacgaggagugcuccugcuaccccgacuccuccgagaucaccugcgucugccgcgacaacuggcacggcuccaaccgccccugggucuccuucaaccagaaccucgaguaccagaucggcuacaucugcuccggcaucuucggcgacaacccccgccccaacgacaagaccggcuccugcggccccgucuccuccaacggcgccaacggcgucaagggcuucuccuucaaguacggcaacggcgucuggaucggccgcaccaaguccaucuccucccgcaacggcuucgagaugaucugggaccccaacggcuggaccggcaccgacaacaacuucuccaucaagcaggacaucgucggcaucaacgagugguccggcuacuccggcuccuucguccagcaccccgagcucaccggccucgacugcauccgccccugcuucugggucgagcucauccgcggccgccccaaggagaacaccaucuggaccuccggcuccuccaucuccuucugcggcgucaacuccgacaccgucggcugguccuggcccgacggcgccgagcuccccuucaccaucgacaaguga

SEQ ID NO: 118952 - RNA, 1410 nt, Artificial Sequence; identical to SEQ ID NO: 112774
  derived and/or modified CDS sequence (opt2) from neuraminidase__InfluenzaA__AFN19297

SEQ ID NO: 118953 - RNA, 1410 nt, Artificial Sequence; identical to SEQ ID NO: 112774
  derived and/or modified CDS sequence (opt2) from neuraminidase__InfluenzaA__AFN19307

SEQ ID NO: 118954 - RNA, 1410 nt, Artificial Sequence; identical to SEQ ID NO: 112774
  derived and/or modified CDS sequence (opt2) from neuraminidase__InfluenzaA__AFN19317

SEQ ID NO: 118955 - RNA, 1410 nt, Artificial Sequence; identical to SEQ ID NO: 118407
  derived and/or modified CDS sequence (opt2) from neuraminidase__InfluenzaA__AFN19327

SEQ ID NO: 118956 - RNA, 1410 nt, Artificial Sequence; identical to SEQ ID NO: 112774
  derived and/or modified CDS sequence (opt2) from neuraminidase__InfluenzaA__AFN19346

SEQ ID NO: 118957 - RNA, 1410 nt, Artificial Sequence
  derived and/or modified CDS sequence (opt2) from neuraminidase__InfluenzaA__AFN19352
augaaccccaaccagaagaucaucaccaucggcuccgucucccucaccaucuccaccaucugcuucuucaugcagaucgccauccucaucaccaccgucacccuccacuucaagcaguacgaguucaacuccccccccaacaaccaggucaugcucugcgagcccaccaucaucgagcgcaacaugaccgagaucgucuaccucaccaacaccaccaucgagaaggagaucugccccaagcccgccgaguaccgcaacugguccaagccccagugcgacaucaccggcuucgcccccuucuccaaggacaacuccauccgccucuccgccggcggcgacaucugggucacccgcgagcccuacgucuccugcgaccccgacaagugcuaccaguucgcccucggccagggcaccacccucaacaacguccacuccaacaacaccguccgcgaccgcacccccuaccgcacccuccucaugaacgagcucggcguccccuuccaccucggcaccaagcaggucugcaucgccugguccuccuccuccugccacgacggcaaggccuggcuccacgucugcaucaccggcgacgacaagaacgccaccgccuccuucaucuacaacggccgccucgucgacuccgucgucuccugguccaaggagauccuccgcacccaggaguccgagugcgucugcaucaacggcaccugcaccgucgucaugaccgacggcuccgccuccggcaaggccgacaccaagauccucuucaucgaggagggcaagaucguccacaccuccacccucuccggcuccgcccagcacgucgaggagugcuccugcuacccccgcuaccccggcguccgcugcgucugccgcgacaacuggaagggcuccaaccgccccaucgucgacaucaacaucaaggaccacuccaucgucuccuccuacgucugcuccggccucgucggcgacaccccccgcaagaacgacuccuccuccuccggccacugccucgaccccaacaacgaggagggcggccacggcgucaagggcugggccuucgacgacggcaacgacgucuggaugggccgcaccaucaacgagaccucccgccucggcuacgagaccuucaaggucaucgagggcugguccaaccccaaguccaagcuccagaucaaccgccaggucaucgucgaccgcuccgaccgcuccggcuacuccggcaucuucuccgucgagggcaaguccugcaucaaccgcugcuucuacgucgagcucauccgcggccgcaaggaggagaccgagguccucuggaccuccaacuccaucgucgucuucugcggcaccuccggcaccuacggcaccggcuccuggcccgacggcgccgaccucaaccucaugcccaucuga

SEQ ID NO: 118958 - RNA, 1410 nt, Artificial Sequence
  derived and/or modified CDS sequence (opt2) from neuraminidase__InfluenzaA__AFN19354
augaaccccaaccagaagaucaucaccaucggcuccgucucccucaccaucuccaccaucugcuucuucaugcagaucgccauccucaucaccaccgucacccuccacuucaagcaguacgaguucaacuccccccccaacaaccaggucaugcucugcgagcccaccaucaucgagcgcaacaucaccgagaucgucuaccucaccaacaccaccaucgagaaggagaucugccccaagcccgccgaguaccgcaacugguccaagccccagugcgacaucaccggcuucgcccccuucuccaaggacaacuccauccgccucuccgccggcggcgacaucugggucacccgcgagcccuacgucuccugcgaccccgacaagugcuaccaguucgcccucggccagggcaccacccucaacaacguccacuccaacaacaccguccgcgaccgcacccccuaccgcacccuccucaugaacgagcucggcguccccuuccaccucggcaccaagcaggucugcaucgccugguccuccuccuccugccacgacggcaaggccuggcuccacgucugcaucaccggcgacgacaagaacgccaccgccuccuucaucuacaacggccgccucgucgacuccgucgucuccugguccaaggagauccuccgcacccaggaguccgagugcgucugcaucaacggcaccugcaccgucgucaugaccgacggcuccgccuccggcaaggccgacaccaagauccucuucaucgaggagggcaagaucguccacaccuccacccucuccggcuccgcccagcacgucgaggagugcuccugcuacccccgcuaccccggcguccgcugcgucugccgcgacaacuggaagggcuccaaccgccccaucgucgacaucaacaucaaggaccacuccaucgucuccuccuacgucugcuccggccucgucggcgacaccccccgcaagaacgacuccuccuccuccucccacugccucgaccccaacaacgaggagggcggccacggcgucaagggcugggccuucgacgacggcaacgacgucuggaugggccgcaccaucaacgagaccucccgccucggcuacgagaccuucaaggucaucgagggcugguccaaccccaaguccaagcuccagaucaaccgccaggucaucgucgaccgcggcgaccgcuccggcuacuccggcaucuucuccgucgagggcaaguccugcaucaaccgcugcuucuacgucgagcucauccgcggccgcaaggaggagaccgagguccucuggaccuccaacuccaucgucgucuucugcggcaccuccggcaccuacggcaccggcuccuggcccgacggcgccgaccucaaccucaugcccaucuga

SEQ ID NO: 118959 - RNA, 1410 nt, Artificial Sequence; identical to SEQ ID NO: 118958
  derived and/or modified CDS sequence (opt2) from neuraminidase__InfluenzaA__AFN19356

SEQ ID NO: 118960 - RNA, 1410 nt, Artificial Sequence; identical to SEQ ID NO: 118958
  derived and/or modified CDS sequence (opt2) from neuraminidase__InfluenzaA__AFN19358

SEQ ID NO: 118961 - RNA, 1410 nt, Artificial Sequence; identical to SEQ ID NO: 118958
  derived and/or modified CDS sequence (opt2) from neuraminidase__InfluenzaA__AFN19360

SEQ ID NO: 118962 - RNA, 1410 nt, Artificial Sequence
  derived and/or modified CDS sequence (opt2) from neuraminidase__InfluenzaA__AFN19362
augaaccccaaccagaagaucaucaccaucggcuccgucucccucaccaucuccaccaucugcuucuucaugcagaucgccauccucaucaccaccgucacccuccacuucaagcaguacgaguucaacuccccccccaacaaccaggucaugcucugcgagcccaccaucaucgagcgcaacaucaccgagaucgucuaccucaccaacaccaccaucgagaaggagaucugccccaagcccgccgaguaccgcaacugguccaagccccagugcgacaucaccggcuucgcccccuucuccaaggacaacuccauccgccucuccgccggcggcgacaucugggucacccgcgagcccuacgucuccugcgaccccgacaagugcuaccaguucgcccucggccagggcaccacccucaacaacguccacuccaacaacaccguccgcgaccgcacccccuaccgcacccuccucaugaacgagcucggcguccccuuccaccucggcaccaagcaggucugcaucgccugguccuccuccuccugccacgacggcaaggccuggcuccacgucugcaucaccggcgacgacaagaacgccaccgccuccuucaucuacaacggccgccucgucgacuccgucgucuccugguccaaggagauccuccgcacccaggaguccgagugcgucugcaucaacggcaccugcaccgucgucaugaccgacggcuccgccuccggcaaggccgacaccaagauccucuucaucgaggagggcaagaucguccacaccuccacccucuccggcuccgcccagcacgucgaggagugcuccugcuacccccgcuaccccggcguccgcugcgucugccgcgacaacuggaagggcuccaaccgccccaucgucgacaucaacaucaaggaccacuccaucgucuccuccuacgucugcuccggccucgucggcgacaccccccgcaagaacgacuccuccuccuccucccacugccucgaccccaacaacgaggagggcggccacggcgucaagggcugggccuucgacgacggcaacgacgucuggaugggccgcaccaucaacgagaccucccgccucggcuacgagaccuucaaggucaucgagggcugguccaaccccaaguccaagcuccagaucaaccgccaggucaucgucgaccgcggcgaccgcuccggcuacuccggcaucuucuccgucgagggcaagcgcugcaucaaccgcugcuucuacgucgagcucauccgcggccgcaaggaggagaccgagguccucuggaccuccaacuccaucgucgucuucugcggcaccuccggcaccuacggcaccggcuccuggcccgacggcgccgaccucaaccucaugcccaucuga

SEQ ID NO: 118963 - RNA, 1410 nt, Artificial Sequence; identical to SEQ ID NO: 118958
  derived and/or modified CDS sequence (opt2) from neuraminidase__InfluenzaA__AFN19364

SEQ ID NO: 118964 - RNA, 1410 nt, Artificial Sequence; identical to SEQ ID NO: 115554
  derived and/or modified CDS sequence (opt2) from neuraminidase__InfluenzaA__AFN19366

SEQ ID NO: 118965 - RNA, 1410 nt, Artificial Sequence; identical to SEQ ID NO: 118958
  derived and/or modified CDS sequence (opt2) from neuraminidase__InfluenzaA__AFN19370

SEQ ID NO: 118966 - RNA, 1410 nt, Artificial Sequence
  derived and/or modified CDS sequence (opt2) from neuraminidase__InfluenzaA__AFN19374
augaaccccaaccagaagaucaucaccaucggcuccgucucccucaccaucuccaccaucugcuucuucaugcagaucgccauccucaucaccaccgucacccuccacuucaagcaguacgaguucaacuccccccccaacaaccaggucaugcucugcgagcccaccaucaucgagcgcaacaucaccgagaucgucuaccucaccaacaccaccaucgagaaggagaucugccccaagcccgccgaguaccgcaacugguccaagccccagugcggcaucaccggcuucgcccccuucuccaaggacaacuccauccgccucuccgccggcggcgacaucugggucacccgcgagcccuacgucuccugcgaccccgacaagugcuaccaguucgcccucggccagggcaccacccucaacaacguccacuccaacaacaccguccgcgaccgcacccccuaccgcacccuccucaugaacgagcucggcguccccuuccaccucggcaccaagcaggucugcaucgccugguccuccuccuccugccacgacggcaaggccuggcuccacgucugcaucaccggcgacgacaagaacgccaccgccuccuucaucuacaacggccgccucgucgacuccgucgucuccugguccaaggagauccuccgcacccaggaguccgagugcgucugcaucaacggcaccugcaccgucgucaugaccgacggcuccgccuccggcaaggccgacaccaagauccucuucaucaaggagggcaagaucguccacaccuccacccucuccggcuccgcccagcacgucgaggagugcuccugcuacccccgcuaccccggcguccgcugcgucugccgcgacaacuggaagggcuccaaccgccccaucgucgacaucaacaucaaggaccacuccaucgucuccuccuacgucugcuccggccucgucggcgacaccccccgcaagaccgacuccuccuccuccucccacugccucgaccccaacaacgaggagggcggccacggcgucaagggcugggccuucgacgacggcaacgacgucuggaugggccgcaccaucaacgagaccucccgccucggcuacgagaccuucaaggucaucgagggcugguccaaccccaaguccaagcuccagaucaaccgccaggucaucgucgaccgcggcgaccgcuccggcuacuccggcaucuucuccgucgagggcaaguccugcaucaaccgcugcuucuacgucgagcucauccgcggccgcaaggaggagaccgagguccucuggaccuccaacuccaucgucgucuucugcggcaccuccggcaccuacggcaccggcuccuggcccgacggcgccgaccucaaccucaugcccaucuga

SEQ ID NO: 118967 - RNA, 1410 nt, Artificial Sequence; identical to SEQ ID NO: 118958
  derived and/or modified CDS sequence (opt2) from neuraminidase__InfluenzaA__AFN19376

SEQ ID NO: 118968 - RNA, 1410 nt, Artificial Sequence; identical to SEQ ID NO: 118958
  derived and/or modified CDS sequence (opt2) from neuraminidase__InfluenzaA__AFN19378

SEQ ID NO: 118969 - RNA, 1410 nt, Artificial Sequence
  derived and/or modified CDS sequence (opt2) from neuraminidase__InfluenzaA__AFN19380
augaaccccaaccagaagaucaucaccaucggcuccgucucccucaccaucuccaccaucugcuucuucaugcagaucgccauccucaucaccaccgucacccuccacuucaagcaguacgaguucaacuccccccccaacaaccaggucaugcucugcgagcccaccaucaucgagcgcaacaucaccgagaucgucuaccucaccaacaccaccaucgagaaggagaucugccccaagcccuccgaguaccgcaacugguccaagccccagugcgacaucaccggcuucgcccccuucuccaaggacaacuccauccgccucuccgccggcggcgacaucugggucacccgcgagcccuacgucuccugcgaccccgacaagugcuaccaguucgcccucggccagggcaccacccucaacaacguccacuccaacaacaccguccgcgaccgcacccccuaccgcacccuccucaugaacgagcucggcguccccuuccaccucggcaccaagcaggucugcaucgccugguccuccuccuccugccacgacggcaaggccuggcuccacgucugcaucaccggcgacgacaagaacgccaccgccuccuucaucuacaacggccgccucgucgacuccgucgucuccugguccaaggagauccuccgcacccaggaguccgagugcgucugcaucaacggcaccugcaccgucgucaugaccgacggcuccgccuccggcaaggccgacaccaagauccucuucaucgaggagggcaagaucguccacaccuccacccucuccggcuccgcccagcacgucgaggagugcuccugcuacccccgcuaccccggcguccgcugcgucugccgcgacaacuggaagggcuccaaccgccccaucgucgacaucaacaucaaggaccacuccaucgucuccuccuacgucugcuccggccucgucggcgacaccccccgcaagaacgacuccuccuccuccucccacugccucgaccccaacaacgaggagggcggccacggcgucaagggcugggccuucgacgacggcaacgacgucuggaugggccgcaccaucaacgagaccucccgccucggcuacgagaccuucaaggucaucgagggcugguccaaccccaaguccaagcuccagaucaaccgccaggucaucgucgaccgcggcgaccgcuccggcuacuccggcaucuucuccgucgagggcaaguccugcaucaaccgcugcuucuacgucgagcucauccgcggccgcaaggaggagaccgagguccucuggaccuccaacuccaucgucgucuucugcggcaccuccggcaccuacggcaccggcuccuggcccgacggcgccgaccucaaccucaugcccaucuga

SEQ ID NO: 118970 - RNA, 1410 nt, Artificial Sequence; identical to SEQ ID NO: 118966
  derived and/or modified CDS sequence (opt2) from neuraminidase__InfluenzaA__AFN19382

SEQ ID NO: 118971 - RNA, 1410 nt, Artificial Sequence; identical to SEQ ID NO: 118958
  derived and/or modified CDS sequence (opt2) from neuraminidase__InfluenzaA__AFN19384

SEQ ID NO: 118972 - RNA, 1410 nt, Artificial Sequence
  derived and/or modified CDS sequence (opt2) from neuraminidase__InfluenzaA__AFN19386
augaaccccaaccagaagaucaucaccaucggcuccgucucccucaccaucuccaccaucugcuucuucaugcagaucgccauccucaucaccaccgucacccuccacuucaagcaguacgaguucaacuccccccccaacaaccaggucaugcucugcgagcccaccaucaucgagcgcaacaucaccgagaucgucuaccucaccaacaccaccaucgagaaggagaucugccccaagcccgccgaguaccgcaacugguccaagccccagugcgacaucaccggcuucgcccccuucuccaaggacaacuccauccgccucuccgccggcggcgacaucugggucacccgcgagcccuacgucuccugcgaccccgacaagugcuaccaguucgcccucggccagggcaccacccucaacaacguccacuccaacaacaccguccgcgaccgcacccccuaccgcacccuccucaugaacgagcucggcguccccuuccaccucggcaccaagcaggucugcaucgccugguccuccuccuccugccacgacggcaaggccuggcuccacgucugcaucaccggcgacgacaagaacgccaccgccuccuucaucuacaacggccgccucgucgacuccgucgucuccugguccaaggagauccuccgcacccaggaguccgagugcgucugcaucaacggcaccugcaccgucgucaugaccgacggcuccgccuccggcaaggccgacaccaagauccucuucaucgaggagggcaagaucguccacaccuccacccucuccggcuccgcccagcacgucgaggagugcuccugcuacccccgcuaccccggcguccgcugcgucugccgcgacaacuggaagggcuccaaccgccccaucgucgacaucaacaucaaggaccacuccaucgucuccuccuacgucugcuccggccucgucggcgacaccccccgcaagaacgacuccuccuccuccucccacugccucgaccccaacaacgaggagggcggccacggcgucaagggcugggccuucgacgacggcaacgacgucuggaugggccgcaccaucaacgagaccucccgccucggcuacgagaccuucaaggucaucgagggcugguccaaccccaaguccaagcuccagaucaaccgccagaucaucgucgaccgcggcgaccgcuccggcuacuccggcaucuucuccgucgagggcaaguccugcaucaaccgcugcuucuacgucgagcucauccgcggccgcaaggaggagaccgagguccucuggaccuccaacuccaucgucgucuucugcggcaccuccggcaccuacggcaccggcuccuggcccgacggcgccgaccucaaccucaugcccaucuga

SEQ ID NO: 118973 - RNA, 1410 nt, Artificial Sequence; identical to SEQ ID NO: 118958
  derived and/or modified CDS sequence (opt2) from neuraminidase__InfluenzaA__AFN19388

SEQ ID NO: 118974 - RNA, 1410 nt, Artificial Sequence; identical to SEQ ID NO: 118958
  derived and/or modified CDS sequence (opt2) from neuraminidase__InfluenzaA__AFN19390

SEQ ID NO: 118975 - RNA, 1410 nt, Artificial Sequence
  derived and/or modified CDS sequence (opt2) from neuraminidase__InfluenzaA__AFN19392
augaaccccaaccagaagaucaucaccaucggcuccgucucccucaccaucuccaccaucugcuucuucaugcagaucgccguccucaucaccaccgucacccuccacuucaagcaguacgaguucaacuccccccccaacaaccaggucaugcucugcgagcccaccaucaucgagcgcaacaucaccgagaucgucuaccucaccaacaccaccaucgagaaggagaucugccccaagcccgccgaguaccgcaacugguccaagccccagugcgacaucaccggcuucgcccccuucuccaaggacaacuccauccgccucuccgccggcggcgacaucugggucacccgcgagcccuacgucuccugcgaccccgacaagugcuaccaguucgcccucggccagggcaccacccucaacaacguccacuccaacaacaccguccgcgaccgcacccccuaccgcacccuccucaugaacgagcucggcguccccuuccaccucggcaccaagcaggucugcaucgccugguccuccuccuccugccacgacggcaaggccuggcuccacgucugcaucaccggcgacgacaagaacgccaccgccuccuucaucuacaacggccgccucgucgacuccgucgucuccugguccaaggagauccuccgcacccaggaguccgagugcgucugcaucaacggcaccugcaccgucgucaugaccgacggcuccgccuccggcaaggccgacaccaagauccucuucaucgaggagggcaagaucguccacaccuccacccucuccggcuccgcccagcacgucgaggagugcuccugcuacccccgcuaccccggcguccgcugcgucugccgcgacaacuggaagggcuccaaccgccccaucgucgacaucaacaucaaggaccacuccaucgucuccuccuacgucugcuccggccucgucggcgacaccccccgcaagaacgacuccuccuccuccucccacugccucgaccccaacaacgaggagggcggccacggcgucaagggcugggccuucgacgacggcaacgacgucuggaugggccgcaccaucaacgagaccucccgccucggcuacgagaccuucaaggucaucgagggcugguccaaccccaaguccaagcuccagaucaaccgccaggucaucgucgaccgcggcgaccgcuccggcuacuccggcaucuucuccgucgagggcaaguccugcaucaaccgcugcuucuacgucgagcucauccgcggccgcaaggaggagaccgagguccucuggaccuccaacuccaucgucgucuucugcggcaccuccggcaccuacggcaccggcuccuggcccgacggcgccgaccucaaccucaugcccaucuga

SEQ ID NO: 118976 - RNA, 1410 nt, Artificial Sequence; identical to SEQ ID NO: 117823
  derived and/or modified CDS sequence (opt2) from neuraminidase__InfluenzaA__AFN19394

SEQ ID NO: 118977 - RNA, 1410 nt, Artificial Sequence
  derived and/or modified CDS sequence (opt2) from neuraminidase__InfluenzaA__AFN19396
augaaccccaaccagaagaucaucaccaucggcuccgucucccucaccaucuccaccaucugcuucuucaugcagaucgccauccucaucaccaccgucacccuccacuucaagcaguacgaguucaacuccccccccaacaaccaggucaugcucugcgagcccaccaucaucgagcgcaacaucaccgagaucgucuaccucaccaacaccaccaucgagaaggagaucugccccaagcucgccgaguaccgcaacugguccaagccccagugcgacaucaccggcuucgcccccuucuccaaggacaacuccauccgccucuccgccggcggcgacaucugggucacccgcgagcccuacgucuccugcgaccccgacaagugcuaccaguucgcccucggccagggcaccacccucaacaacguccacuccaacaacaccguccgcgaccgcacccccuaccgcacccuccucaugaacgagcucggcguccccuuccaccucggcaccaagcaggucugcaucgccugguccuccuccuccugccacgacggcaaggccuggcuccacgucugcaucaccggcgacgacaagaacgccaccgccuccuucaucuacaacggccgccucgucgacuccgucgucuccugguccaaggacauccuccgcacccaggaguccgagugcgucugcaucaacggcaccugcgccgucgucaugaccgacggcuccgccuccggcaaggccgacaccaagauccucuucaucgaggagggcaagaucguccacaccuccacccucuccggcuccgcccagcacgucgaggagugcuccugcuacccccgcuaccccggcguccgcugcgucugccgcgacaacuggaagggcuccaaccgccccaucgucgacaucaacaucaaggaccacuccaucgucuccuccuacgucugcuccggccucgucggcgacaccccccgcaagaacgacuccuccuccuccucccacugccucgaccccaacaacgaggagggcggccacggcgucaagggcugggccuucgacgacggcaacgacgucuggaugggccgcaccaucaacgagaccucccgccucggcuacgagaccuucaaggucaucgagggcugguccaaccccaaguccaagcuccagaucaaccgccaggucaucgucgaccgcggcaaccgcuccggcuacuccggcaucuucuccgucgagggcaagaacugcaucaaccgcugcuucuacgucgagcucauccgcggccgcaaggaggagaccgagguccucuggaccuccaacuccaucgucgucuucugcggcaccuccggcaccuacggcaccggcuccuggcccgacggcgccgaccucaaccucaugcccaucuga

SEQ ID NO: 118978 - RNA, 1410 nt, Artificial Sequence
  derived and/or modified CDS sequence (opt2) from neuraminidase__InfluenzaA__AFN19398
augaaccccaaccagaagaucaucaccaucggcuccgucucccucaccaucuccaccaucugcuucuucaugcagaucgccauccucaucaccaccgucacccuccacuucaagcaguacgaguucaacuccccccccaacaaccaggucaugcucugcgagcccaccaucaucgagcgcaacaucaccgagaucgucuaccucaccaacaccaccaucgagaaggagaucugccccaagcccgccgaguaccgcaacugguccaagccccagugcgacaucaccggcuucgcccccuucuccaaggacaacuccauccgccucuccgccggcggcgacaucugggucacccgcgagcccuacgucuccugcgaccccgacaagugcuaccaguucgcccucggccagggcaccacccucaacaacguccacuccaacaacaccguccgcgaccgcacccccuaccgcacccuccucaugaacgagcucggcguccccuuccaccucggcaccaagcaggucugcaucgccugguccuccuccuccugccacgacggcaaggccuggcuccacgucugcaucaccggcgacgacaagaacgccaccgccuccuucaucuacaacggccgccucgucgacuccgucgucuccugguccaaggagauccuccgcacccaggaguccgagugcgucugcaucaacggcaccugcaccgucgucaugaccgacggcuccgccuccggcaaggccgacaccaagauccucuucaucgaggagggcaagaucguccacaccuccacccucuccggcuccgcccagcacgucgaggagugcuccugcuacccccgcuaccccggcguccgcugcgucugccgcgacaacuggcgcggcuccaaccgccccaucgucgacaucaacaucaaggaccacuccaucgucuccuccuacgucugcuccggccucgucggcgacaccccccgcaagaacgacuccuccuccuccucccacugccucgaccccaacaacgaggagggcggccacggcgucaagggcugggccuucgacgacggcaacgacgucuggaugggccgcaccaucaacgagaccucccgccucggcuacgagaccuucaaggucaucgagggcugguccaaccccaaguccaagcuccagaucaaccgccaggucaucgucgaccgcggcgaccgcuccggcuacuccggcaucuucuccgucgagggcaaguccugcaucaaccgcugcuucuacgucgagcucauccgcggccgcaaggaggagaccgagguccucuggaccuccaacuccaucgucgucuucugcggcaccuccggcaccuacggcaccggcuccuggcccgacggcgccgaccucaaccucaugcccaucuga

SEQ ID NO: 118979 - RNA, 1410 nt, Artificial Sequence
  derived and/or modified CDS sequence (opt2) from neuraminidase__InfluenzaA__AFN19400
augaaccccaaccagaagaucaucaccaucggcuccgucucccucaccaucuccaccaucugcuucuucaugcagaucgccauccucaucaccaccgucacccuccacuucaagcaguacgaguucaacuccccccccaacaaccaggucaugcucugcgagcccaccaucaucgagcgcaacaucaccgagaucgucuaccucaccaacaccaccaucgagaaggagaucugccccaagcccuccgaguaccgcaacugguccaagccccagugcgacaucaccggcuucgcccccuucuccaaggacaacuccauccgccucuccgacggcggcgacaucugggucacccgcgagcccuacgucuccugcgaccccgacaagugcuaccaguucgcccucggccagggcaccacccucaacaacguccacuccaacaacaccguccgcgaccgcacccccuaccgcacccuccucaugaacgagcucggcguccccuuccaccucggcaccaagcaggucugcaucgccugguccuccuccuccugccacgacggcaaggccuggcuccacgucugcaucaccggcgacgacaagaacgccaccgccuccuucaucuacaacggccgccucgucgacuccgucgucuccugguccaaggagauccuccgcacccaggaguccgagugcgucugcaucaacggcaccugcaccgucgucaugaccgacggcuccgccuccggcaaggccgacaccaagauccucuucaucgaggagggcaagaucguccacaccuccacccucuccggcuccgcccagcacgucgaggagugcuccugcuacccccgcuaccccggcguccgcugcgucugccgcgacaacuggaagggcuccaaccgccccaucgucgacaucaacaucaaggaccacuccaucgucuccuccuacgucugcuccggccucgucggcgacaccccccgcaagaacgacuccuccuccuccucccacugccucgaccccaacaacgaggagggcggccacggcgucaagggcugggccuucgacgacggcaacgacgucuggaugggccgcaccaucaacgagaccucccgccucggcuacgagaccuucaaggucaucgagggcugguccaaccccaaguccaagcuccagaucaaccgccaggucaucgucgaccgcggcgaccgcuccggcuacuccggcaucuucuccgucgagggcaaguccugcaucaaccgcugcuucuacgucgagcucauccgcggccgcaaggaggagaccgagguccucuggaccuccaacuccaucgucgucuucugcggcaccuccggcaccuacggcaccggcuccuggcccgacggcgccgaccucaaccucaugcccaucuga

SEQ ID NO: 118980 - RNA, 1410 nt, Artificial Sequence; identical to SEQ ID NO: 118958
  derived and/or modified CDS sequence (opt2) from neuraminidase__InfluenzaA__AFN19402

SEQ ID NO: 118981 - RNA, 1410 nt, Artificial Sequence; identical to SEQ ID NO: 118958
  derived and/or modified CDS sequence (opt2) from neuraminidase__InfluenzaA__AFN19404

SEQ ID NO: 118982 - RNA, 1410 nt, Artificial Sequence; identical to SEQ ID NO: 118958
  derived and/or modified CDS sequence (opt2) from neuraminidase__InfluenzaA__AFN19406

SEQ ID NO: 118983 - RNA, 1410 nt, Artificial Sequence; identical to SEQ ID NO: 118958
  derived and/or modified CDS sequence (opt2) from neuraminidase__InfluenzaA__AFN19410

SEQ ID NO: 118984 - RNA, 1410 nt, Artificial Sequence; identical to SEQ ID NO: 118958
  derived and/or modified CDS sequence (opt2) from neuraminidase__InfluenzaA__AFN19412

SEQ ID NO: 118985 - RNA, 1410 nt, Artificial Sequence; identical to SEQ ID NO: 118958
  derived and/or modified CDS sequence (opt2) from neuraminidase__InfluenzaA__AFN19414

SEQ ID NO: 118986 - RNA, 1410 nt, Artificial Sequence; identical to SEQ ID NO: 118958
  derived and/or modified CDS sequence (opt2) from neuraminidase__InfluenzaA__AFN19416

SEQ ID NO: 118987 - RNA, 1410 nt, Artificial Sequence
  derived and/or modified CDS sequence (opt2) from neuraminidase__InfluenzaA__AFN19418
augaaccccaaccagaagaucaucaccaucggcuccgucucccucaccaucuccaccaucugcuucuucaugcagaucgccauccucaucaccaccgucacccuccacuucaagcaguacgaguucaacuccccccccaacaaccaggucaugcucugcgagcccaccaucaucgagcgcaacaucaccgagaucgucuaccucaccaacaccaccaucgagaaggagaucugccccaagcccgccgaguaccgcaacugguccaagccccagugcgacaucaccggcuucgcccccuucuccaaggacaacuccauccgccucuccgccggcggcgacaucugggucacccgcgagcccuacgucuccugcgaccccgacaagugcuaccaguucgcccucggccagggcaccacccucaacaacguccacuccaacaacaccguccgcgaccgcacccccuaccgcacccuccucaugaacgagcucggcguccccuuccaccucggcaccaagcaggucugcaucgccugguccuccuccuccugccacgacggcaaggccuggcuccacgucugcaucaccggcgacgacaagaacgccaccgccuccuucaucuacaacggccgccucgucgacuccgucgucuccugguccaaggagauccuccgcacccaggaguccgagugcgucugcaucaacggcaccugcaccgucgucaugaccgacggcuccgccuccggccgcgccgacaccaagauccucuucaucgaggagggcaagaucguccacaccuccacccucuccggcuccgcccagcacgucgaggagugcuccugcuacccccgcuaccccggcguccgcugcgucugccgcgacaacuggaagggcuccaaccgccccaucgucgacaucaacaucaaggaccacuccaucgucuccuccuacgucugcuccggccucgucggcgacaccccccgcaagaacgacuccuccuccuccucccacugccucgaccccaacaacgaggagggcggccacggcgucaagggcugggccuucgacgacggcaacgacgucuggaugggccgcaccaucaacgagaccucccgccucggcuacgagaccuucaaggucaucgagggcugguccaaccccaaguccaagcuccagaucaaccgccaggucaucgucgaccgcggcgaccgcuccggcuacuccggcaucuucuccgucgagggcaaguccugcaucaaccgcugcuucuacgucgagcucauccgcggccgcaaggaggagaccgagguccucuggaccuccaacuccaucgucgucuucugcggcaccuccggcaccuacggcaccggcuccuggcccgacggcgccgaccucaaccucaugcccaucuga

SEQ ID NO: 118988 - RNA, 1410 nt, Artificial Sequence
  derived and/or modified CDS sequence (opt2) from neuraminidase__InfluenzaA__AFN19420
augaaccccaaccagaagaucaucaccaucggcuccgucucccucaccaucuccaccaucugcuucuucaugcagaucgccauccucaucaccaccgucacccuccacuucaagcaguacgaguucaacuccccccccaacaaccaggucaugcucugcgagcccaccaucaucgagcgcaacaugaccgagaucgucuaccucaccaacaccaccaucgagaaggagaucugccccaagcccgccgaguaccgcaacugguccaagccccagugcgacaucaccggcuucgcccccuucuccaaggacaacuccauccgccucuccgccggcggcgacaucugggucacccgcgagcccuacgucuccugcgaccccgacaagugcuaccaguucgcccucggccagggcaccacccucaacaacguccacuccaacaacaccguccgcgaccgcacccccuaccgcacccuccucaugaacgagcucggcguccccuuccaccucggcaccaagcaggucugcaucgccugguccuccuccuccugccacgacggcaaggccuggcuccacgucugcaucaccggcgacgacaagaacgccaccgccuccuucaucuacaacggccgccucgucgacuccgucgucuccugguccaaggagauccuccgcacccaggaguccgagugcgucugcaucaacggcaccugcaccgucgucaugaccgacggcuccgccuccggcaaggccgacaccaagauccucuucaucgaggagggcaagaucguccacaccuccacccucuccggcuccgcccagcacgucgaggagugcuccugcuacccccgcuaccccggcguccgcugcgucugccgcgacaacuggaagggcuccaaccgccccaucgucgacaucaacaucaaggaccacuccaucgucuccuccuacgucugcuccggccucgucggcgacaccccccgcaagaacgacuccuccuccuccucccacugccucgaccccaacaacgaggagggcggccacggcgucaagggcugggccuucgacgacggcaacgacgucuggaugggccgcaccaucaacgagaccucccgccucggcuacgagaccuucaaggucaucgagggcugguccaaccccaaguccaagcuccagaucaaccgccaggucaucgucgaccgcggcgaccgcuccggcuacuccggcaucuucuccgucgagggcaaguccugcaucaaccgcugcuucuacgucgagcucauccgcggccgcaaggaggagaccgagguccucuggaccuccaacuccaucgucgucuucugcggcaccuccggcaccuacggcaccggcuccuggcccgacggcgccgaccucaaccucaugcccaucuga

SEQ ID NO: 118989 - RNA, 1410 nt, Artificial Sequence
  derived and/or modified CDS sequence (opt2) from neuraminidase__InfluenzaA__AFN19422
augaaccccaaccagaagaucaucaccaucggcuccgucucccucaccaucuccaccaucugcuucuucaugcagaucgccauccucaucaccaccgucacccuccacuucaagcaguacgaguucaacuccccccccaacaaccaggucaugcucugcgagcccaccaucaucgagcgcaacaucaccgagaucgucuaccucaccaacaccaccaucgagaaggagaucugccccaagcccgccgaguaccgcaacugguccaagccccagugcggcaucaccggcuucgcccccuucuccaaggacaacuccauccgccucuccgccggcggcgacaucugggucacccgcgagcccuacgucuccugcgaccccgacaagugcuaccaguucgcccucggccagggcaccacccucaacaacguccacuccaacaacaccguccgcgaccgcacccccuaccgcacccuccucaugaacgagcucggcguccccuuccaccucggcaccaagcaggucugcaucgccugguccuccuccuccugccacgacggcaaggccuggcuccacgucugcaucaccggcaacgacaagaacgccaccgccuccuucaucuacaacggccgccucgucgacuccgucgucuccugguccaaggagguccuccgcacccaggaguccgagugcgucugcaucaacggcaccugcaccgucgucaugaccgacggcuccgccuccggcaaggccgacaccaagauccucuucaucgaggagggcaagaucguccacaccuccacccucuccggcuccgcccagcacgucgaggagugcuccugcuacccccgcuaccccggcguccgcugcgucugccgcgacaacuggaagggcuccaaccgccccaucgucgacaucaacaucaaggaccacuccaucgucuccuccuacgucugcuccggccucgucggcgacaccccccgcaagaacgacuccuccuccuccucccacugccucgaccccaacaacgaggagggcggccacggcgucaagggcugggccuucgacgacggcaacgacgucuggaugggccgcaccaucaacgagaccucccgccucggcuacgagaccuucaaggucaucgagggcugguccaaccccaaguccaagcuccagaucaaccgccaggucaucgucgaccgcggcgaccgcuccggcuacuccggcaucuucuccgucgagggcaaguccugcaucaaccgcugcuucuacgucgagcucauccgcggccgcaaggaggagaccgagguccucuggaccuccaacuccaucgucgucuucugcggcaccuccggcaccuacggcaccggcuccuggcccgacggcgccgaccucaaccucaugcccaucuga

SEQ ID NO: 118990 - RNA, 1410 nt, Artificial Sequence
  derived and/or modified CDS sequence (opt2) from neuraminidase__InfluenzaA__AFN19426
augaaccccaaccagaagaucaucaccaucggcuccgucucccucaccaucuccaccaucugcuucuucaugcagaucgccauccucaucaccaccgucacccuccacuucaagcaguacgaguucaacuccccccccaacaaccaggucaugcucugcgagcccaccaucaucgagcgcaacaucaccgagaucgucuaccucaccaacaccaccaucgagaaggagaucugccccaagcccgccgaguaccgcaacugguccaagccccagugcgacaucaccggcuucgcccccuucuccaaggacaacuccauccgccucuccgccggcggcgacaucugggucacccgcgagcccuacgucuccugcgaccccgacaagugcuaccaguucgcccucggccagggcaccacccucaacaacguccacuccaacaacaccguccgcgaccgcacccccuaccgcacccuccucaugaacgagcucggcguccccuuccaccucggcaccaagcaggucugcaucgccugguccuccuccuccugccacgacggcaaggccuggcuccacgucugcaucaccggcgacgacgagaacgccaccgccuccuucaucuacaacggccgccucgucgacuccgucgucuccugguccaaggagauccuccgcacccaggaguccgagugcgucugcaucaacggcaccugcaccgucgucaugaccgacggcuccgccuccggcaaggccgacaccaagauccucuucaucgaggagggcaagaucguccacaccuccacccucuccggcuccgcccagcacgucgaggagugcuccugcuacccccgcuaccccggcguccgcugcgucugccgcgacaacuggaagggcuccaaccgccccaucgucgacaucaacaucaaggaccacuccaucgucuccuccuacgucugcuccggccucgucggcgacaccccccgcaagaacgacuccuccuccuccucccacugccucgaccccaacaacgaggagggcggccacggcgucaagggcugggccuucgacgacggcaacgacgucuggaugggccgcaccaucaacgagaccucccgccucggcuacgagaccuucaaggucaucgagggcugguccaaccccaaguccaagcuccagaucaaccgccaggucaucgucgaccgcggcgaccgcuccggcuacuccggcaucuucuccgucgagggcaaguccugcaucaaccgcugcuucuacgucgagcucauccgcggccgcaaggaggagaccgagguccucuggaccuccaacuccaucgucgucuucugcggcaccuccggcaccuacggcaccggcuccuggcccgacggcgccgaccucaaccucaugcccaucuga

SEQ ID NO: 118991 - RNA, 1410 nt, Artificial Sequence; identical to SEQ ID NO: 118958
  derived and/or modified CDS sequence (opt2) from neuraminidase__InfluenzaA__AFN19428

SEQ ID NO: 118992 - RNA, 1410 nt, Artificial Sequence
  derived and/or modified CDS sequence (opt2) from neuraminidase__InfluenzaA__AFN19430
augaaccccaaccagaagaucaucaccaucggcuccgucucccucaccaucuccaccaucugcuucuucaugcagaucgccauccucaucaucaccgucacccuccacuucaagcaguacgaguucaacuccccccccaacaaccaggucaugcucugcgagcccaccaucaucgagcgcaacaugaccgagaucgucuaccucaccaacaccaccaucgagaaggagaucugccccaagcccgccgaguaccgcaacugguccaagccccagugcgacaucaccggcuucgcccccuucuccaaggacaacuccauccgccucuccgccggcggcgacaucugggucacccgcgagcccuacgucuccugcgaccccgacaagugcuaccaguucgcccucggccagggcaccacccucaacaacguccacuccaacaacaccguccgcgaccgcacccccuaccgcacccuccucaugaacgagcucggcguccccuuccaccucggcaccaagcaggucugcaucgccugguccuccuccuccugccacgacggcaaggccuggcuccacgucugcaucaccggcgacgacaagaacgccaccgccuccuucaucuacaacggccgccucgucgacuccgucgucuccugguccaaggagauccuccgcacccaggaguccgagugcgucugcaucaacggcaccugcaccgucgucaugaccgacggcuccgccuccggcaaggccgacaccaagauccucuucaucgaggagggcaagaucguccacaccuccacccucuccggcuccgcccagcacgucgaggagugcuccugcuacccccgcuaccccggcguccgcugcgucugccgcgacaacuggaagggcuccaaccgccccaucgucgacaucaacaucaaggaccacuccaucgucuccuccuacgucugcuccggccucgucggcgacaccccccgcaagaacgacuccuccuccuccucccacugccucgaccccaacaacgaggagggcggccacggcgucaagggcugggccuucgacgacggcaacgacgucuggaugggccgcaccaucaacgagaccucccgccucggcuacgagaccuucaaggucaucgagggcugguccaaccccaaguccaagcuccagaucaaccgccaggucaucgucgaccgcuccgaccgcuccggcuacuccggcaucuucuccgucgagggcaaguccugcaucaaccgcugcuucuacgucgagcucauccgcggccgcaaggaggagaccgagguccucuggaccuccaacuccaucgucgucuucugcggcaccuccggcaccuacggcaccggcuccuggcccgacggcgccgaccucaaccucaugcccaucuga

SEQ ID NO: 118993 - RNA, 1410 nt, Artificial Sequence
  derived and/or modified CDS sequence (opt2) from neuraminidase__InfluenzaA__AFN19432
augaaccccaaccagaagaucaucaccaucggcuccgucucccucaccaucuccaccaucugcuucuucaugcagaucgccauccucaucaccaccgucacccuccacuucaagcaguacgaguucaacuccccccccaacaaccaggucaugcucugcgagcccaccaucaucgagcgcaacaucaccgagaucgucuaccucaccaacaccaccaucgagaaggagaucugccccaagcccgccgaguaccgcaacugguccaagccccagugcgacaucaccggcuucgcccccuucuccaaggacaacuccauccgccucuccgccggcggcgacaucugggucacccgcgagcccuacgucuccugcgaccccgacaagugcuaccaguucgcccucggccagggcaccacccucaacaacguccacuccaacaacaccguccgcgaccgcaccccccaccgcacccuccucaugaacgagcucggcguccccuuccaccucggcaccaagcaggucugcaucgccugguccuccuccuccugccacgacggcaaggccuggcuccacgucugcaucaccggcgacgacaagaacgccaccgccuccuucaucuacaacggccgccucgucgacuccgucgucuccugguccaaggagauccuccgcacccaggaguccgagugcgucugcaucaacggcaccugcaccgucgucaugaccgacggcuccgccuccggcaaggccgacaccaagauccucuucaucgaggagggcaagaucguccacaccuccacccucuccggcuccgcccagcacgucgaggagugcuccugcuacccccgcuaccccggcguccgcugcgucugccgcgacaacuggaagggcuccaaccgccccaucgucgacaucaacaucaaggaccacuccaucgucuccuccuacgucugcuccggccucgucggcgacaccccccgcaagaacgacuccuccuccuccucccacugccucgaccccaacaacgaggagggcggccacggcgucaagggcugggccuucgacgacggcaacgacgucuggaugggccgcaccaucaacgagaccucccgccucggcuacgagaccuucaaggucaucgagggcugguccaaccccaaguccaagcuccagaucaaccgccaggucaucgucgaccgcggcgaccgcuccggcuacuccggcaucuucuccgucgagggcaaguccugcaucaaccgcugcuucuacgucgagcucauccgcggccgcaaggaggagaccgagguccucuggaccuccaacuccaucgucgucuucugcggcaccuccggcaccuacggcaccggcuccuggcccgacggcgccgaccucaaccucaugcccaucuga

SEQ ID NO: 118994 - RNA, 1410 nt, Artificial Sequence
  derived and/or modified CDS sequence (opt2) from neuraminidase__InfluenzaA__AFN19434
augaaccccaaccagaagaucaucaccaucggcuccgucucccucaccaucuccaccaucugcuucuucaugcagaucgccauccucaucaccaccgucacccuccacuucaagcaguacgaguucaacuccccccccaacaaccaggucaugcucugcgagcccaccaucaucgagcgcaacaugaccgagaucgucuaccucaccaacaccaccaucgagaaggagaucugccccaagcccgccgaguaccgcaacugguccaagccccagugcgacaucaccggcuucgcccccuucuccaaggacaacuccauccgccucuccgccggcggcgacaucugggucacccgcgagcccuacgucuccugcgaccccgacaagugcuaccaguucgcccucggccagggcaccacccucaacaacguccacuccaacaacaccguccgcgaccgcacccccuaccgcacccuccucaugaacgagcucggcguccccuuccaccucggcaccaagcaggucugcaucgccugguccuccuccuccugccacgacggcaaggccuggcuccacgucugcaucaccggcgacgacaagaacgccaccgccuccuucaucuacaacggccgccucgucgacuccgucgucuccugguccaaggagauccuccgcacccaggaguccgagugcgucugcaucaacggcaccugcaccgucgucaugaccgacggcuccgccuccggcaaggccgacaccaagauccucuucaucgaggagggcaagaucguccacaccuccacccucuccggcuccgcccagcacgucgaggagugcuccugcuacccccgcuaccccggcguccgcugcgucugccgcgacaacuggaagggcuccaaccgccccaucgucgacaucaacaucaaggaccacuccaucgucuccuccuacgucugcuccggccucgucggcgacaccccccgcaagaacgacuccuccuccuccucccacugccucgaccccaacaacgaggagggcggccacggcgucaagggcugggccuucgacgacggcaacgacgucuggaugggccgcaccaucaacgagaccucccgccucggcuacgagaccuucaaggucaucgagggcugguccaaccccaaguccaagcuccagaucaaccgccaggucaucgucgaccgcuccgaccgcuccggcuacuccggcaucuucuccgucgagggcaaguccugcaucaaccgcugcuucuacgucgagcucauccgcggccgcaaggaggagaccgagguccucuggaccuccaacuccaucgucgucuucugcggcaccuccggcaccuacggcaccggcuccuggcccgacggcgccgaccucaaccucaugcccaucuga

SEQ ID NO: 118995 - RNA, 1410 nt, Artificial Sequence; identical to SEQ ID NO: 118182
  derived and/or modified CDS sequence (opt2) from neuraminidase__InfluenzaA__AFN19436

SEQ ID NO: 118996 - RNA, 1410 nt, Artificial Sequence
  derived and/or modified CDS sequence (opt2) from neuraminidase__InfluenzaA__AFN19438
augaaccccaaccagaagaucaucaccaucggcuccgucucccucaccaucuccaccaucugcuucuucaugcagaucgccauccucaucaccaccgucacccuccacuucaagcaguacgaguucaacuccccccccaacaaccaggucaugcucugcgagcccaccaucaucgagcgcaacaugaccgagaucgucuaccucaccaacaccaccaucgagaaggagaucugccccaagcccgccgaguaccgcaacugguccaagccccagugcgacaucaccggcuucgcccccuucuccaaggacaacuccauccgccucuccgccggcggcgacaucugggucacccgcgagcccuacgucuccugcgaccccgacaagugcuaccaguucgcccucggccagggcaccacccucaacaacguccacuccaacaacaccguccgcgaccgcacccccuaccgcacccuccucaugaacgagcucggcguccccuuccaccucggcaccaagcaggucugcaucgccugguccuccuccuccugccacgacggcaaggccuggcuccacgucugcaucaccggcgacgacaagaacgccaccgccuccuucaucuacaacggccgccucgucgacuccgucgucuccugguccaaggagauccuccgcacccaggaguccgagugcgucugcaucaacggcaccugcaccgucgucaugaccgacggcuccgccuccggcaaggccgacaccaagauccucuucaucgaggagggcaagaucguccacaccuccacccucuccggcuccgcccagcacgucgaggagugcuccugcuacccccgcuaccccggcguccgcugcgucugccgcgacaacuggaagggcuccaaccgccccaucgucgacaucaacaucaaggaccacuccaucgucuccuccuacgucugcuccggccucgucggcgacaccccccgcaagaacgacuccuccuccuccucccacugccucgaccccaacaacgaggagggcggccacggcgucaagggcugggccuucgacgacggcaacgacgucuggaugggccgcaccaucaacgagaccucccgccucggcuacgagaccuucaaggucaucgagggcugguccaaccccaaguccaagcuccagaucaaccgccaggucaucgucgaccgcuccgaccgcuccggcuacuccggcaucuucuccgucgagggcaaguccugcaucaaccgcugcuucuacgucgagcucauccgcggccgcaaggaggagaccgagguccucuggaccuccaacuccaucgucgucuucugcggcaccuccggcaccuacggcaccggcuccuggcccgacggcgccgaccucaaccucauguccaucuga

SEQ ID NO: 118997 - RNA, 1410 nt, Artificial Sequence
  derived and/or modified CDS sequence (opt2) from neuraminidase__InfluenzaA__AFN19442
augaaccccaaccagaagaucaucaccaucggcuccgucucccucaccaucuccaccaucugcuucuucaugcagaucgccauccucaucaccaccgucacccuccacuucaagcaguacgaguucaacuccccccccaacaaccaggucaugcucugcgagcccaccaucaucgagcgcaacaucaccgagaucgucuaccucaccaacaccaucaucgagaaggagaucugccccaagcccaccgaguaccgcaacugguccaagccccagugcgacaucaccggcuucgcccccuucuccaaggacaacuccauccgccucuccgccggcggcgacaucugggucacccgcgagcccuacgucuccugcgaccccgacaagugcuaccaguucgcccucggccagggcaccacccucaacaacguccacuccaacaacaccguccgcgaccgcacccccuaccgcacccuccucaugaacgagcucggcguccccuuccaccucggcaccaagcaggucugcaucgccugguccuccuccuccugccacgacggcaaggccuggcuccacgucugcaucaccggcgacgacaagaacgccaccgccuccuucaucuacaacggccgccucgucgacuccgucgucuccugguccaaggagauccuccgcacccaggaguccgagugcgucugcaucaacggcaccugcaccgucgucaugaccgacggcuccgccuccggcaaggccgacaccaagauccucuucaucgaggagggcaagaucguccacaccuccacccucuccggcuccgcccagcacgucgaggagugcuccugcuacccccgcuaccccggcguccgcugcgucugccgcgacaacuggaagggcuccaaccgccccaucgucgacaucaacaucaaggaccacuccaucgucuccuccuacgucugcuccggccucgucggcgacaccccccgcaagaacgacuccuccuccuccucccacugccucgaccccaacaacgaggagggcggccacggcgucaagggcugggccuucgacgacggcaacgacgucuggaugggccgcaccaucaacgagaccucccgccucggcuacgagaccuucaaggucaucgagggcugguccaaccccaaguccaagcuccagaucaaccgccaggucaucgucgaccgcggcgaccgcuccggcuacuccggcaucuucuccgucgagggcaaguccugcaucaaccgcugcuucuacgucgagcucauccgcggccgcaaggaggagaccgagguccucuggaccuccaacuccaucgucgucuucugcggcaccuccggcaccuacggcaccggcuccuggcccgacggcgccgaccucaaccucaugcacaucuga

SEQ ID NO: 118998 - RNA, 1410 nt, Artificial Sequence; identical to SEQ ID NO: 118182
  derived and/or modified CDS sequence (opt2) from neuraminidase__InfluenzaA__AFN19446

SEQ ID NO: 118999 - RNA, 1410 nt, Artificial Sequence; identical to SEQ ID NO: 118182
  derived and/or modified CDS sequence (opt2) from neuraminidase__InfluenzaA__AFN19448

SEQ ID NO: 119000 - RNA, 1410 nt, Artificial Sequence; identical to SEQ ID NO: 118958
  derived and/or modified CDS sequence (opt2) from neuraminidase__InfluenzaA__AFN19458

SEQ ID NO: 119001 - RNA, 1410 nt, Artificial Sequence
  derived and/or modified CDS sequence (opt2) from neuraminidase__InfluenzaA__AFN19460
augaaccccaaccagaagaucaucaccaucggcuccgucucccucaccaucuccaccaucugcuucuucaugcagaucgccauccucaucaccaccgucacccuccacuucaagcaguacgaguucaacuccccccccaacaaccaggucaugcucugcgagcccaccaucaucgagcgcaacaucaccgagaucgucuaccucaccaacaccaccaucgagaaggagaucugccccaagcccgccgaguaccgcaacugguccaagccccagugcggcaucaccggcuucgcccccuucuccaaggacaacuccauccgccucuccgccggcggcgacaucugggucacccgcgagcccuacgucuccugcgaccccgacaagugcuaccaguucgcccucggccagggcaccacccucaacaacaugcacuccaacaacaccguccgcgaccgcacccccuaccgcacccuccucaugaacgagcucggcguccccuuccaccucggcaccaagcaggucugcaucgccugguccuccuccuccugccacgacggcaaggccuggcuccacgucugcaucaccggcgacgacaagaacgccaccgccuccuucaucuacaacggccgccucgucgacuccgucgucuccugguccaacgagauccuccgcacccaggaguccgagugcgucugcaucaacggcaccugcaccgucgucaugaccgacggcuccgccuccggcaaggccgacaccaagauccucuucaucgaggagggcaagaucguccacaccuccacccucuccggcuccgcccagcacgucgaggagugcuccugcuacccccgcuaccccggcguccgcugcgucugccgcgacaacuggaagggcuccaaccgccccaucgucgacaucaacaucaaggaccacuccaucgucuccuccuacgucugcuccggccucgucggcgacaccccccgcaagaacgacuccuccuccuccucccacugccucgaccccaacaacgaggagggcggccacggcgucaagggcugggccuucgacgacggcaacgacgucuggaugggccgcaccaucaacgagaccucccgccucggcuacgagaccuucaaggucaucgagggcugguccaaccccaaguccaagcuccagaucaaccgccaggucaucgucgaccgcggcgaccgcuccggcuacuccggcaucuucuccgucgagggcaaguccugcaucaaccgcugcuucuacgucgagcucauccgcggccgcaaggaggagaacgagguccucuggaccuccaacuccaucgucgucuucugcggcaccuccggcaccuacggcaccggcuccuggcccgacggcgccgaccucaaccucaugcccaucuga

SEQ ID NO: 119002 - RNA, 1410 nt, Artificial Sequence; identical to SEQ ID NO: 118182
  derived and/or modified CDS sequence (opt2) from neuraminidase__InfluenzaA__AFN19462

SEQ ID NO: 119003 - RNA, 1410 nt, Artificial Sequence
  derived and/or modified CDS sequence (opt2) from neuraminidase__InfluenzaA__AFN19466
augaaccccaaccagaagaucaucaccaucggcuccgucucccucaccaucuccaccaucugcuucuucaugcagaucgccauccucaucaccaccgucacccuccacuucaagcaguacgaguucaacuccccccccaacaaccaggucaugcucugcgagcccaccaucaucgagcgcaacaucaccgagaucgucuaccucaccaacaccaccaucgagaaggagaucugccccaagcccgccgaguaccgcaacugguccaagccccagugcgacaucgccggcuucgcccccuucuccaaggacaacuccauccgccucuccgccggcggcgacaucugggucacccgcgagcccuacgucuccugcgaccccgacaagugcuaccaguucgcccucggccagggcaccacccucaacaacguccacuccaacaacaccguccgcgaccgcacccccuaccgcacccuccucaugaacgagcucggcguccccuuccaccucggcaccaagcaggucugcaucgccugguccuccuccuccugccacgacggcaaggccuggcuccacgucugcaucaccggcgacgacaagaacgccaccgccuccuucaucuacaacggccgccucgucgacuccgucgucuccugguccaaggagauccuccgcacccaggaguccgagugcgucugcaucaacggcaccugcaccgucgucaugaccgacggcuccgccuccggcaaggccgacaccaagauccucuucaucgaggagggcaagaucguccacaccuccacccucuccggcuccgcccagcacgucgaggagugcuccugcuacccccgcuaccccggcguccgcugcgucugccgcgacaacuggaagggcuccaaccgccccaucgucgacaucaacaucaaggaccacuccaucgucuccuccuacgucugcuccggccucgucggcgacaccccccgcaagaacgacuccuccuccuccucccacugccucgaccccaacaacgaggagggcggccacggcgucaagggcugggccuucgacgacggcaacgacgucuggaugggccgcaccaucaacgagaccucccgccucggcuacgagaccuucaaggucaucgagggcugguccaaccccaaguccaagcuccagaucaaccgccaggucaucgucgaccgcggcgaccgcuccggcuacuccggcaucuucuccgucgagggcaaguccugcaucaaccgcugcuucuacgucgagcucauccgcggccgcaaggaggagaccgagguccucuggaccuccaacuccaucgucgucuucugcggcaccuccggcaccuacggcaccggcuccuggcccgacggcgccgaccucaaccucaugcccaucuga

SEQ ID NO: 119004 - RNA, 1410 nt, Artificial Sequence; identical to SEQ ID NO: 118182
  derived and/or modified CDS sequence (opt2) from neuraminidase__InfluenzaA__AFN19468

SEQ ID NO: 119005 - RNA, 1410 nt, Artificial Sequence
  derived and/or modified CDS sequence (opt2) from neuraminidase__InfluenzaA__AFN19470
augaaccccaaccagaagaucaucaccaucggcuccgucucccucaccaucuccaccaucugcuucuucaugcagaucgccauccucaucaccaccgucacccuccacuucaagcaguacgaguucaacuccccccccaacaaccaggucaugcucugcgagcccaccaucaucgagcgcaacaugaccgagaucgucuaccucaccaacaccaccaucgagaaggagaucugccccaagcccgccgaguaccgcaacugguccaagccccagugcgacaucaccggcuucgcccccuucuccaaggacaacuccauccgccucuccgccggcggcgacaucugggucacccgcgagcccuacgucuccugcgaccccgacaagugcuaccaguucgcccucggccagggcaccacccucaacaacguccacuccaacaacaccguccgcgaccgcacccccuaccgcacccuccucaugaacgagcucggcguccccuuccaccucggcaccaagcaggucugcaucgccugguccuccuccuccugccacgacggcaaggccuggcuccacgucugcaucaccggcgacgacaagaacgccaccgccuccuucaucuacaacggccgccucgucgacuccgucgucuccugguccaaggagauccuccgcacccaggaguccgagugcgucugcaucaacggcaccugcaccgucgucaugaccgacggcuccgccuccggcaaggccgacaccaagauccucuucaucgaggagggcaagaucguccacaccuccacccucuccggcuccgcccagcacgucgaggagugcuccugcuacccccgcuaccccggcguccgcugcgucugccgcgacaacuggaagggcuccaaccgccccaucgucgacaucaacaucaaggaccacuccaucgucuccuccuacgucugcuccggccucgucggcgacaccccccgcaagaacgacuccuccuccuccucccacugccucgaccccaacaacgaggagggcggccacggcgucaagggcugggccuucgacgacggcaacgacgucuggaugggccgcaccaucaacgagaccucccgccucggcuacgagaccuucaaggucaucgagggcugguccaaccccaaguccaagcuccagaucaaccgccaggucaucgucaacaaguccgaccgcuccggcuacuccggcaucuucuccgucgagggcaaguccugcaucaaccgcugcuucuacgucgagcucauccgcggccgcaaggaggagaccgagguccucuggaccuccaacuccaucgucgucuucugcggcaccuccggcaccuacggcaccggcuccuggcccgacggcgccgaccucaaccucaugcccaucuga

SEQ ID NO: 119006 - RNA, 1410 nt, Artificial Sequence; identical to SEQ ID NO: 118958
  derived and/or modified CDS sequence (opt2) from neuraminidase__InfluenzaA__AFN19472

SEQ ID NO: 119007 - RNA, 1410 nt, Artificial Sequence
  derived and/or modified CDS sequence (opt2) from neuraminidase__InfluenzaA__AFN19476
augaaccccaaccagaagaucaucaccaucggcuccgucucccucaccaucuccaccaucugcuucuucaugcagaucgccauccucaucaccaccgucacccuccacuucaagcaguacgaguucaacuccccccccaacaaccaggucaugcucugcgagcccaccaucaucgagcgcaacaucaccgagaucgucuaccucaccaacaccaccaucgagaaggagaucugccccaagcccgccgaguaccgcaacugguccaagccccagugcggcaucaccggcuucgccccccucuccaaggacaacuccauccgccucuccgccggcggcgacaucugggucacccgcgagcccuacgucuccugcgaccccgacaagugcuaccaguucgcccucggccagggcaccacccucaacaacguccacuccaacaacaccguccgcgaccgcacccccuaccgcacccuccucaugaacgagcucggcguccccuuccaccucggcaccaagcaggucugcaucgccugguccuccuccuccugccacgacggcaaggccuggcuccacgucugcaucaccggcgacgacaagaacgccaccgccuccuucaucuacaacggccgccucgucgacuccgucgucuccugguccaaggagauccuccgcacccaggaguccgagugcgucugcaucaacggcaccugcaccgucgucaugaccgacggcuccgccuccggcaaggccgacaccaagauccucuucaucgaggagggcaagaucguccacaccuccacccucuccggcuccgcccagcacgucgaggagugcuccugcuacccccgcuaccccggcguccgcugcgucugccgcgacaacuggaagggcuccaaccgccccaucgucgacaucaacaucaaggaccacuccaucgucuccuccuacgucugcuccggccucgucggcgacaccccccgcaagaacgacuccuccuccuccucccacugccucgaccccaacaacgaggagggcggccacggcgucaagggcugggccuucgacgacggcaacgacgucuggaugggccgcaccaucaacgagaccucccgccucggcuacgagaccuucaaggucaucgagggcugguccaaccccaaguccaagcuccagaucaaccgccaggucaucgucgaccgcggcgaccgcuccggcuacuccggcaucuucuccgucgagggcaaguccugcaucaaccgcugcuucuacgucgagcucauccgcggccgcaaggaggagaccgagguccucuggaccuccaacuccaucgucgucuucugcggcaccuccggcaccuacggcaccggcuccuggcccgacggcgccgaccucaaccucaugcccaucuga

SEQ ID NO: 119008 - RNA, 1410 nt, Artificial Sequence; identical to SEQ ID NO: 118958
  derived and/or modified CDS sequence (opt2) from neuraminidase__InfluenzaA__AFN19478

SEQ ID NO: 119009 - RNA, 1410 nt, Artificial Sequence
  derived and/or modified CDS sequence (opt2) from neuraminidase__InfluenzaA__AFN19480
augaaccccaaccagaagaucaucaccaucggcuccgucucccucaccaucuccaccaucugcuucuucaugcagaucgccauccucaucaccaccgucacccuccacuucaagcaguacgaguucaacuccccccccaacaaccaggucaugcucugcgagcccaccaucaucgagcgcaacaugaccgagaucgucuaccucaccaacaccaccaucgagaaggagaucugccccaagcccgccgaguaccgcaacugguccaagccccagugcgacaucaccggcuucgcccccuucuccaaggacaacuccauccgccucuccgccggcggcgacaucugggucacccgcgagcccuacgucuccugcgaccccgacaagugcuaccaguucgcccucggccagggcaccacccucaacaacguccacuccaacaacaccgucggcgaccgcacccccuaccgcacccuccucaugaacgagcucggcguccccuuccaccucggcaccaagcaggucugcaucgccugguccuccuccuccugccacgacggcaaggccuggcuccacgucugcaucaccggcgacgacaagaacgccaccgccuccuucaucuacaacggccgccucgucgacuccgucgucuccugguccaaggagauccuccgcacccaggaguccgagugcgucugcaucaacggcaccugcaccgucgucaugaccgacggcuccgccuccggcaaggccgacaccaagauccucuucaucgaggagggcaagaucguccacaccuccacccucuccggcuccgcccagcacgucgaggagugcuccugcuacccccgcuaccccggcguccgcugcgucugccgcgacaacuggaagggcuccaaccgccccaucgucgacaucaacaucaaggaccacuccaucgucuccuccuacgucugcuccggccucgucggcgacaccccccgcaagaacgacuccuccuccuccucccacugccucgaccccaacaacgaggagggcggccacggcgucaagggcugggccuucgacgacggcaacgacgucuggaugggccgcaccaucaacgagaccucccgccucggcuacgagaccuucaaggucaucgagggcugguccaaccccaaguccaagcuccagaucaaccgccaggucaucgucgaccgcuccgaccgcuccggcuacuccggcaucuucuccgucgagggcaaguccugcaucaaccgcugcuucuacgucgagcucauccgcggccgcaaggaggagaccgagguccucuggaccuccaacuccaucgucgucuucugcggcaccuccggcaccuacggcaccggcuccuggcccgacggcgccgaccucaaccucaugcccaucuga

SEQ ID NO: 119010 - RNA, 1410 nt, Artificial Sequence
  derived and/or modified CDS sequence (opt2) from neuraminidase__InfluenzaA__AFN19482
augaaccccaaccagaagaucaucaccaucggcuccgucucccucaccaucuccaccaucugcuucuucaugcagaucgccauccucaucaccaccgucacccuccacuucaagcaguacgaguucaacuccccccccaacaaccaggucaugcucugcgagcccaccaucaucgagcgcaacaucaccgagaucgucuaccucaccaacaccaccaucgagaaggagaucugccccaagcccgccaaguaccgcaacugguccaagccccagugcgacaucaccggcuucgcccccuucuccaaggacaacuccauccgccucuccgccggcggcgacaucugggucacccgcgagcccuacgucuccugcgaccccgacaagugcuaccaguucgcccucggccagggcaccacccucaacaacguccacuccaacaacaccguccgcgaccgcacccccuaccgcacccuccucaugaacgagcucggcguccccuuccaccucggcaccaagcaggucugcaucgccugguccuccuccuccugccacgacggcaaggccuggcuccacgucugcaucaccggcgacgacaagaacgccaccgccuccuucaucuacaacggccgccucgucgacuccgucgucuccugguccaaggagauccuccgcacccaggaguccgagugcgucugcaucaacggcaccugcaccgucgucaugaccgacggcuccgccuccggcaaggccgacaccaagauccucuucaucgaggagggcaagaucguccacaccuccacccucuccggcuccgcccagcacgucgaggagugcuccugcuacccccgcuaccccggcguccgcugcgucugccgcgacaacuggaagggcuccaaccgccccaucgucgacaucaacaucaaggaccacuccaucgucuccuccuacgucugcuccggccucgucggcgacaccccccgcaagaacgacuccuccuccuccucccacugccucgaccccaacaacgaggagggcggccacggcgucaagggcugggccuucgacgacggcaacgacgucuggaugggccgcaccaucaacgagaccucccgccucggcuacgagaccuucaaggucaucgagggcugguccaaccccaaguccaagcuccagaucaaccgccaggucaucgucgaccgcuccgaccgcuccggcuacuccggcaucuucuccgucgagggcaaguccugcaucaaccgcugcuucuacgucgagcucauccgcggccgcaaggaggagaccgagguccucuggaccuccaacuccaucgucgucuucugcggcaccuccggcaccuacggcaccggcuccuggcccgacggcgccgaccucaaccucaugcccaucuga

SEQ ID NO: 119011 - RNA, 1410 nt, Artificial Sequence; identical to SEQ ID NO: 118182
  derived and/or modified CDS sequence (opt2) from neuraminidase__InfluenzaA__AFN19484

SEQ ID NO: 119012 - RNA, 1410 nt, Artificial Sequence; identical to SEQ ID NO: 118958
  derived and/or modified CDS sequence (opt2) from neuraminidase__InfluenzaA__AFN19488

SEQ ID NO: 119013 - RNA, 1410 nt, Artificial Sequence
  derived and/or modified CDS sequence (opt2) from neuraminidase__InfluenzaA__AFN19492
augaaccccaaccagaagaucaucaccaucggcuccgucucccucaccaucuccaccaucugcuucuucaugcagaucgccauccucaucaccaccgucacccuccacuucaagcaguacgaguucaacuccccccccaacaaccaggucaugcucugcgagcccaccaucaucgagcgcaacaucaccgagaucgucuaccucaccaacaccaccaucgagaaggagaucugccccaagcccgccgaguaccgcaacugguccaagccccagugcgacaucaccggcuucgcccccuucuccaaggacaacuccauccgccucuccgccggcggcgacaucugggucacccgcgagcccuacgucuccugcgaccccgacaagugcuaccaguucgcccucggccagggcaccacccucaacaacguccacuccaacaacaccguccgcgaccgcacccccuaccgcacccuccucaugaacgagcucggcguccccuuccaccucggcaccaagcaggucugcaucgccugguccuccuccuccugccacgacggcaaggccuggcuccacgucugcaucaccggcgacgacaagaacgccaccgccuccuucaucuacaacggcaagcucgucgacuccgucgucuccugguccaaggagauccuccgcacccaggaguccgagugcgucugcaucaacggcaccugcaccgucgucaugaccgacggcuccgccuccggcaaggccgacaccaagauccucuucaucgaggagggcaagaucguccacaccuccacccucuccggcuccgcccagcacgucgaggagugcuccugcuacccccgcuaccccggcguccgcugcgucugccgcgacaacuggaagggcuccaaccgccccaucgucgacaucaacaucaaggaccacuccaucgucuccuccuacgucugcuccggccucgucggcgacaccccccgcaagaacgacuccuccuccuccucccacugccucgaccccaacaacgaggagggcggccacggcgucaagggcugggccuucgacgacggcaacgacgucuggaugggccgcaccaucaacgagaccucccgccucggcuacgagaccuucaaggucaucgagggcugguccaaccccaaguccaagcuccagaucaaccgccaggucaucgucgaccgcggcgaccgcuccggcuacuccggcaucuucuccgucgagggcaaguccugcaucaaccgcugcuucuacgucgagcucauccgcggccgcaaggaggagaccgagguccucuggaccuccaacuccaucgucgucuucugcggcaccuccggcaccuacggcaccggcuccuggcccgacggcgccgaccucaaccucaugcccaucuga

SEQ ID NO: 119014 - RNA, 1410 nt, Artificial Sequence
  derived and/or modified CDS sequence (opt2) from neuraminidase__InfluenzaA__AFN19494
augaaccccaaccagaagaucaucaccaucggcuccgucucccucaccaucuccaccaucugcuucuucaugcagaucgccauccucaucaccaccgucacccuccacuucaagcaguacgaguucaacuccccccccaacaaccaggucaugcucugcgagcccaccaucaucgagcgcaacaucaccgagaucgucuaccucaccaacaccaccaucgagaaggagaucugccccaagcucgccgaguaccgcaacugguccaagccccagugcgacaucaccggcuucgcccccuucuccaaggacaacuccauccgccucuccgccggcggcgacaucugggucacccgcgagcccuacgucuccugcgaccccgacaagugcuaccaguucgcccucggccagggcaccacccucaacaacaugcacuccaacaacaccguccgcgaccgcacccccuaccgcacccuccucaugaacgagcucggcguccccuuccaccucggcaccaagcaggucugcaucgccugguccuccuccuccugccacgacggcaaggccuggcuccacgucugcaucaccggcgacgacaagaacgccaccgccuccuucaucuacaacggccgccucgucgacuccgucgucuccugguccaaggagauccuccgcacccaggaguccgagugcgucugcaucaacggcaccugcaccgucgucaugaccgacggcuccgccuccggcaaggccgacaccaagauccucuucaucgaggagggcaagaucguccacaccuccacccucuccggcuccgcccagcacgucgaggagugcuccugcuacccccgcuaccccggcguccgcugcgucugccgcgacaacuggaagggcuccaaccgccccaucgucgacaucaacaucaaggaccacuccaucgucuccuccuacgucugcuccggccucgucggcgacaccccccgcaagaacgacuccuccuccuccucccacugccucgaccccaacaacgaggagggcggccacggcgucaagggcugggccuucgacgacggcaacgacgucuggaugggccgcaccaucaacgagaccucccgccucggcuacgagaccuucaaggucaucgagggcugguccaaccccaaguccaagcuccagaucaaccgccaggucaucgucgaccgcggcaaccgcuccggcuacuccggcaucuucuccgucgagggcaaguccugcaucaaccgcugcuucuacgucgagcucauccgcggccgcaaggaggagaccgagguccucuggaccuccaacuccaucgucgucuucugcggcaccuccggcaccuacggcaccggcuccuggcccgacggcgccgaccucaaccucaugcccaucuga

SEQ ID NO: 119015 - RNA, 1410 nt, Artificial Sequence; identical to SEQ ID NO: 117823
  derived and/or modified CDS sequence (opt2) from neuraminidase__InfluenzaA__AFN19496

SEQ ID NO: 119016 - RNA, 1410 nt, Artificial Sequence
  derived and/or modified CDS sequence (opt2) from neuraminidase__InfluenzaA__AFN19498
augaaccccaaccagaagaucaucaccaucggcuccgucucccucaccaucuccaccaucugcuucuucaugcagaucgccauccucaucaccaccgucacccuccacuucaagcaguacgaguucaacuccccccccaacaaccaggucaugcucugcgagcccaccaucaucgagcgcaacaucaccgagaucgucuaccucaccaacaccaccaucgagaaggagaucugccccaagcucgccgaguaccgcaacugguccaagccccagugcgacaucaccggcuucgcccccuucuccaaggacaacuccauccgccucuccgccggcggcgacaucugggucacccgcgagcccuacgucuccugcgaccccgacaagugcuaccaguucgcccucggccagggcaccacccucaacaacguccacuccaacaacaccguccgcgaccgcacccccuaccgcacccuccucaugaacgagcucggcguccccuuccaccucggcaccaagcaggucugcaucgccugguccuccuccuccugccacgacggcaaggccuggcuccacgucugcaucaccggcgacgacaagaacgccaccgccuccuucaucuacaacggcaagcucgucgacuccgucgucuccugguccaaggagauccuccgcacccaggaguccgagugcgucugcaucaacggcaccugcaccgucgucaugaccgacggcuccgccuccggcaaggccgacaccaagauccucuucaucgaggagggcaagaucguccacaccuccacccucuccggcuccgcccagcacgucgaggagugcuccugcuacccccgcuaccccggcguccgcugcgucugccgcgacaacuggaagggcuccaaccgccccaucgucgacaucaacaucaaggaccacuccaucgucuccuccuacgucugcuccggccucgucggcgacaccccccgcaagaacgacuccuccuccuccucccacugccucgaccccaacaacgaggagggcggccacggcgucaagggcugggccuucgacgacggcaacgacgucuggaugggccgcaccaucaacgagaccucccgccucggcuacgagaccuucaaggucaucgagggcugguccaaccccaaguccaagcuccagaucaaccgccaggucaucgucgaccgcggcaaccgcuccggcuacuccggcaucuucuccgucgagggcaaguccugcaucaaccgcugcuucuacgucgagcucauccgcggccgcaccgaggagaccgagguccucuggaccuccaacuccaucgucgucuucugcggcaccuccggcaccuacggcaccggcuccuggcccgacggcgccgaccucaaccucaugcccaucuga

SEQ ID NO: 119017 - RNA, 1410 nt, Artificial Sequence; identical to SEQ ID NO: 118966
  derived and/or modified CDS sequence (opt2) from neuraminidase__InfluenzaA__AFN19500

SEQ ID NO: 119018 - RNA, 1410 nt, Artificial Sequence; identical to SEQ ID NO: 118958
  derived and/or modified CDS sequence (opt2) from neuraminidase__InfluenzaA__AFN19502

SEQ ID NO: 119019 - RNA, 1410 nt, Artificial Sequence; identical to SEQ ID NO: 115554
  derived and/or modified CDS sequence (opt2) from neuraminidase__InfluenzaA__AFN19504

SEQ ID NO: 119020 - RNA, 1410 nt, Artificial Sequence; identical to SEQ ID NO: 115554
  derived and/or modified CDS sequence (opt2) from neuraminidase__InfluenzaA__AFN19506

SEQ ID NO: 119021 - RNA, 1410 nt, Artificial Sequence; identical to SEQ ID NO: 118966
  derived and/or modified CDS sequence (opt2) from neuraminidase__InfluenzaA__AFN19508

SEQ ID NO: 119022 - RNA, 1410 nt, Artificial Sequence; identical to SEQ ID NO: 118958
  derived and/or modified CDS sequence (opt2) from neuraminidase__InfluenzaA__AFN19510

SEQ ID NO: 119023 - RNA, 1410 nt, Artificial Sequence; identical to SEQ ID NO: 118958
  derived and/or modified CDS sequence (opt2) from neuraminidase__InfluenzaA__AFN19512

SEQ ID NO: 119024 - RNA, 1410 nt, Artificial Sequence; identical to SEQ ID NO: 118958
  derived and/or modified CDS sequence (opt2) from neuraminidase__InfluenzaA__AFN19516

SEQ ID NO: 119025 - RNA, 1410 nt, Artificial Sequence; identical to SEQ ID NO: 118966
  derived and/or modified CDS sequence (opt2) from neuraminidase__InfluenzaA__AFN19518

SEQ ID NO: 119026 - RNA, 1410 nt, Artificial Sequence; identical to SEQ ID NO: 118966
  derived and/or modified CDS sequence (opt2) from neuraminidase__InfluenzaA__AFN19520

SEQ ID NO: 119027 - RNA, 1410 nt, Artificial Sequence; identical to SEQ ID NO: 118958
  derived and/or modified CDS sequence (opt2) from neuraminidase__InfluenzaA__AFN19522

SEQ ID NO: 119028 - RNA, 1410 nt, Artificial Sequence
  derived and/or modified CDS sequence (opt2) from neuraminidase__InfluenzaA__AFN19524
augaaccccaaccagaagaucaucaccaucggcuccgucucccucaccaucuccaccaucugcuucuucaugcagaucgccauccucaucaccaccgucacccuccacuucaagcaguacgaguucaacuccccccccaacaaccaggucaugcucugcgagcccaccaucaucgagcgcaacaucaccgagaucgucuaccucaccaacaccaccaucgagaaggagaucugccccaagcccgccgaguaccgcaacugguccaagccccagugcgacaucaccggcuucgcccccuucuccaaggacaacuccauccgccucuccgccggcggcgacaucugggucacccgcgagcccuacgucuccugcgaccccgacaagugcuaccaguucgcccucggccagggcaccacccucaacaacguccacuccaacaacaccguccgcgaccgcacccccuaccgcacccuccucaugaacgagcucggcguccccuuccaccucggcaccaagcaggucugcaucgccugguccuccuccuccugccacgacggcaaggccuggcuccacgucugcaucaccggcgacgacaagaacgccaccgccuccuucaucuacaacggccgccucgucgacuccgucgucuccugguccaaggagauccuccgcacccaggaguccgagugcgucugcaucaacggcaccugcaccgucgucaugaccgacggcuccgccuccggcaaggccgacaccaagauccucuucaucgaggagggcaagaucguccacaccuccacccucuccggcuccgcccagcacgucgaggagugcuccugcuacccccgcuaccccggcguccgcugcgucugccgcgacaacuggaagggcuccaaccgccccaucgucgacaucaacaucaaggaccacuccaucgucuccuccuacgucugcuccggccucgucggcgacaccccccgcaagaacgacuccuccuccuccucccacugccucgaccccaacaacgaggagggcggccacggcgucaagggcugggccuucgacgacggcaacgacgucuggaugggccgcaccaucaacgagaccucccgccucggcuacgagaccuucaaggucaucgagggcugguccaaccccaaguccaagcuccagaucaaccgccaggucaucgucgaccgcggcgaccgcuccggcuacuccggcaucuucuccgucgagggcaaguccugcaucaaccgcugcuucuacgucgagcucauccgcggccgcaaggaggagaccgagguccucuggaccuccaacuccaucgucgucuucugcggcaccuccggcaccuacggcaccggcuccuggcccgacggcgccgaccucucccucaugcccaucuga

SEQ ID NO: 119029 - RNA, 1410 nt, Artificial Sequence
  derived and/or modified CDS sequence (opt2) from neuraminidase__InfluenzaA__AFN19526
augaaccccaaccagaagaucaucaccaucggcuccgucucccucaccaucuccaccaucugcuucuucaugcagaucgccauccucaucaccaccgucacccuccacuucaagcagugcgaguucaacuccccccccaacaaccaggucaugcucugcgagcccaccaucaucgagcgcaacaucaccgagaucgucuaccucaccaacaccaccaccgagaaggagaucugccccaagcccgccgaguaccgcaacugguccaagccccagugcgacaucaccggcuucgcccccuucuccaaggacaacuccauccgccucuccgccggcggcgacaucugggucacccgcgagcccuacgucuccugcgaccccgacaagugcuaccaguucgcccucggccagggcaccacccucaacaacguccacuccaacaacaccguccgcgaccgcacccccuaccgcacccuccucaugaacgagcucggcguccccuuccaccucggcaccaagcaggucugcaucgccugguccuccuccuccugccacgacggcaaggccuggcuccacgucugcaucaccggcgacgacaagaacgccaccgccuccuucaucuacaacggccgccucgucgacuccgucgucuccugguccaaggagauccuccgcacccaggaguccgagugcgucugcaucaacggcaccugcaccgucgucaugaccgacggcuccgccuccggcaaggccgacaccaagauccucuucaucgaggagggcaagaucguccacaccuccacccucuccggcuccgcccagcacgucgaggagugcuccugcuacccccgcuaccccggcguccgcugcgucugccgcgacaacuggaagggcuccaaccgccccaucgucgacaucaacaucaaggaccacuccaucgucuccuccuacgucugcuccggccucgucggcgacaccccccgcaagaccgacuccuccuccuccucccacugccucgaccccaacaacgaggagggcggccacggcgucaagggcugggccuucgacgacggcaacgacgucuggaugggccgcaccaucaacgagaccucccgccucggcuacgagaccuucaaggucaucgagggcugguccaaccccaaguccaagcuccagaucaaccgccaggucaucgucgaccgcggcgaccgcuccggcuacuccggcaucuucuccgucgagggcaaguccugcaucaaccgcugcuucuacgucgagcucauccgcggccgcaaggaggagaccgagguccucuggaccuccaacuccaucgucgucuucugcggcaccuccggcaccuacggcaccggcuccuggcccgacggcgccgaccucaaccucaugcccaucuga

SEQ ID NO: 119030 - RNA, 1410 nt, Artificial Sequence
  derived and/or modified CDS sequence (opt2) from neuraminidase__InfluenzaA__AFN19528
augaaccccaaccagaagaucaucaccaucggcuccgucucccucaccaucuccaccaucugcuucuucaugcagaucgccauccucaucaccaccgucacccuccacuucaagcaguacgaguucaacuccccccccaacaaccaggucaugcucugcgagcccaccaucaucgagcgcaacaugaccgagaucgucuaccucaccaacaccaccaucgagaaggagaucugccccaagcccgccgaguaccgcaacugguccaagccccagugcgacaucaccggcuucgcccccuucuccaaggacaacuccauccgccucuccgccggcggcgacaucugggucacccgcgagcccuacgucuccugcgaccccgacaagugcuaccaguucgcccucggccagggcaccacccucaacaacguccacuccaacaacaccguccgcgaccgcacccccuaccgcacccuccucaugaacgagcucggcguccccuuccaccucggcaccaagcaggucugcaucgccugguccuccuccuccugccacgacggcaaggccuggcuccacgucugcaucaccggcgacgacaagaacgccaccgccuccuucaucuacaacggccgccucgucgacuccgucgucuccugguccaaggagauccuccgcacccaggaguccgagugcgucugcaucaacggcaccugcaccgucgucaugaccgacggcuccgccuccggcaaguccgacaccaagauccucuucaucgaggagggcaagaucguccacaccuccacccucuccggcuccgcccagcacgucgaggagugcuccugcuacccccgcuaccccggcguccgcugcgucugccgcgacaacuggaagggcuccaaccgccccaucgucgacaucaacaucaaggaccacuccaucgucuccuccuacgucugcuccggccucgucggcgacaccccccgcaagaacgacuccuccuccuccucccacugccucgaccccaacaacgaggagggcggccacggcgucaagggcugggccuucgacgacggcaacgacgucuggaugggccgcaccaucaacgagaccucccgccucggcuacgagaccuucaaggucaucgagggcugguccaaccccaaguccaagcuccagaucaaccgccaggucaucgucgaccgcuccgaccgcuccggcuacuccggcaucuucuccgucgagggcaaguccugcaucaaccgcugcuucuacgucgagcucauccgcggccgcaaggaggagaccgagguccucuggaccuccaacuccaucgucgucuucugcggcaccuccggcaccuacggcaccggcuccuggcccgacggcgccgaccucaaccucaugcccaucuga

SEQ ID NO: 119031 - RNA, 1410 nt, Artificial Sequence; identical to SEQ ID NO: 118994
  derived and/or modified CDS sequence (opt2) from neuraminidase__InfluenzaA__AFN19530

SEQ ID NO: 119032 - RNA, 1410 nt, Artificial Sequence; identical to SEQ ID NO: 118958
  derived and/or modified CDS sequence (opt2) from neuraminidase__InfluenzaA__AFN19532

SEQ ID NO: 119033 - RNA, 1410 nt, Artificial Sequence; identical to SEQ ID NO: 118994
  derived and/or modified CDS sequence (opt2) from neuraminidase__InfluenzaA__AFN19534

SEQ ID NO: 119034 - RNA, 1410 nt, Artificial Sequence; identical to SEQ ID NO: 118958
  derived and/or modified CDS sequence (opt2) from neuraminidase__InfluenzaA__AFN19536

SEQ ID NO: 119035 - RNA, 1410 nt, Artificial Sequence; identical to SEQ ID NO: 118958
  derived and/or modified CDS sequence (opt2) from neuraminidase__InfluenzaA__AFN19538

SEQ ID NO: 119036 - RNA, 1410 nt, Artificial Sequence; identical to SEQ ID NO: 118958
  derived and/or modified CDS sequence (opt2) from neuraminidase__InfluenzaA__AFN19544

SEQ ID NO: 119037 - RNA, 1410 nt, Artificial Sequence
  derived and/or modified CDS sequence (opt2) from neuraminidase__InfluenzaA__AFN19546
augaaccccaaccagaagaucaucaccaucggcuccgucucccucaccaucuccaccaucugcuucuucaugcagaucgccauccucaucaccaccgucacccuccacuucaagcaguacgaguucaacuccccccccaacaaccaggucaugcucugcgagcccaccaucaucgagcgcaacaucaccgagaucgucuaccucaccaacaccaccaucgagaaggagaucugccccaagcccgccgaguaccgcaacugguccaagccccagugcggcaucaccggcuucgcccccuucuccaaggacaacuccauccgccucuccgccggcggcgacaucugggucacccgcgagcccuacgucuccugcgaccccgacaagugcuaccaguucgcccucggccagggcaccacccucaacaacguccacuccaacaacaccguccgcgaccgcacccccuaccgcacccuccucauguccgagcucggcguccccuuccaccucggcaccaagcaggucugcaucgccugguccuccuccuccugccacgacggcaaggccuggcuccacgucugcaucaccggcgacgacaagaacgccaccgccuccuucaucuacaacggccgccucgucgacuccgucgucuccugguccaaggagauccuccgcacccaggaguccgagugcgucugcaucaacggcaccugcaccgucgucaugaccgacggcuccgccuccggcaaggccgacaccaagauccucuucaucgaggagggcaagaucguccacaccuccacccucuccggcuccgcccagcacgucgaggagugcuccugcuacccccgcuaccccggcguccgcugcgucugccgcgacaacuggaagggcuccaaccgccccaucgucgacaucaacaucaaggaccacuccaucgucuccuccuacgucugcuccggccucgucggcgacaccccccgcaagaacgacuccuccuccuccucccacugccucgaccccaacaacgaggagggcggccacggcgucaagggcugggccuucgacgacggcaacgacgucuggaugggccgcaccaucaacgagaccucccgccucggcuacgagaccuucaaggucaucgagggcugguccaaccccaaguccaagcuccagaucaaccgccaggucaucgucgaccgcggcgaccgcuccggcuacuccggcaucuucuccgucgagggcaaguccugcaucaaccgcugcuucuacgucgagcucauccgcggccgcaaggaggagaccgagguccucuggaccuccaacuccaucgucgucuucugcggcaccuccggcaccuacggcaccggcuccuggcccgacggcgccgaccucaaccucaugcccaucuga

SEQ ID NO: 119038 - RNA, 1410 nt, Artificial Sequence
  derived and/or modified CDS sequence (opt2) from neuraminidase__InfluenzaA__AFN19548
augaaccccaaccagaagaucaucaccaucggcuccgucucccucaccaucuccaccaucugcuucuucaugcagaucgccauccucaucaccaccgucacccuccacuucaagcaguacgaguucaacuccccccccaacaaccaggucaugcucugcgagcccaccaucaucgagcgcaacaucaccgagaucgucuaccucaccaacaccaccaucgagaaggagaucugccccaagcccgccgaguaccgcaacugguccaagccccagugcgacaucaccggcuucgcccccuucuccaaggacaacuccauccgccucuccgccggcggcgacaucugggucacccgcgagcccuacgucuccugcgaccccgacaagugcuaccaguucgcccucggccagggcaccacccucaacaacguccacuccaacaacaccguccgcgaccgcacccccuaccgcacccuccucaugaacgagcucggcguccccuuccaccucggcaccaagcaggucugcaucgccugguccuccuccuccugccacgacggcaaggccuggcuccacgucugcaucaccggcgacgacaagaacgccaccgccuccuucaucuacaacggccgccucgucgacuccgucgucuccugguccaaggagauccuccgcacccaggaguccgagugcgucugcaucaacggcaccugcaccgucgucaugaccgacggcuccgccuccggcaaggccgacaccaagauccucuucaucgaggagggcaagaucguccacaccuccacccucuccggcuccgcccagcacgucgaggagugcuccugcuacccccgcuaccccggcguccgcugcgucugccgcgacaacuggaagggcuccaaccgccccaucgucgacaucaacaucaaggaccacuccaucgucuccuccuacgucugcuccggccucgucggcgacaccccccgcaagaacgacuccuucuccuccucccacugccucgaccccaacaacgaggagggcggccacggcgucaagggcugggccuucgacgacggcaacgacgucuggaugggccgcaccaucaacgagaccucccgccucggcuacgagaccuucaaggucaucgagggcugguccaaccccaaguccaagcuccagaucaaccgccaggucaucgucgaccgcggcgaccgcuccggcuacuccggcaucuucuccgucgagggcaaguccugcaucaaccgcugcuucuacgucgagcucauccgcggccgcaaggaggagaccgagguccucuggaccuccaacuccaucgucgucuucugcggcaccuccggcaccuacggcaccggcuccuggcccgacggcgccgaccucaaccucaugcccaucuga

SEQ ID NO: 119039 - RNA, 1410 nt, Artificial Sequence
  derived and/or modified CDS sequence (opt2) from neuraminidase__InfluenzaA__AFN19550
augaaccccaaccagaagaucaucaccaucggcuccgucucccucaccaucuccaccaucugcuucuucaugcagaucgccauccucaucaccaccgucacccuccacuucaagcaguacgaguucaacuccccccccaacaaccaggucaugcucugcgagcccaccaucaucgagcgcaacaucaccgagaucgucuaccucaccaacaccaccaucgagaaggagaucugccccaagcucgccgaguaccgcaacugguccaagccccagugcgacaucaccggcuucgcccccuucuccaaggacaacuccauccgccucuccgccggcggcgacaucugggucacccgcgagcccuacgucuccugcgaccccgacaagugcuaccaguucgcccucggccagggcaccacccucaacaacguccacuccaacaacaccguccgcgaccgcacccccuaccgcacccuccucaugaacgagcucggcguccccuuccaccucggcaccaagcaggucugcaucgccugguccuccuccuccugccacgacggcaaggccuggcuccacgucugcaucaccggcgacgacaagaacgccaccgccuccuucaucuacaacggccgccucgucgacuccgucgucuccugguccaaggagauccuccgcacccaggaguccgagugcgucugcaucaacggcaccugcaccgucgucaugaccgacggcuccgccuccggcgaggccgacaccaagauccucuucaucgaggagggcaagaucauccacaccuccacccucuccggcuccgcccagcacgucgaggagugcuccugcuacccccgcuaccccggcguccgcugcgucugccgcgacaacuggaagggcuccaaccgccccaucgucgacaucaacaucaaggaccacuccaucgucuccuccuacgucugcuccggccucgucggcgacaccccccgcaagaacgacuccuccuccuccucccacugccucgaccccaacaacgaggagggcggccacggcgucaagggcugggccuucgacgacggcaacgacgucuggaugggccgcaccaucaacgagaccucccgccucggcuacgagaccuucaaggucaucgagggcugguccaaccccaaguccaagcuccagaucaaccgccaggucaucgucgaccgcggcaaccgcuccggcuacuccggcaucuucuccgucgagggcaaguccugcaucaaccgcugcuucuacgucgagcucauccgcggccgcaaggaggagaccgagguccucuggaccuccaacuccaucgucgucuucugcggcaccuccggcaccuacggcaccggcuccuggcccgacggcgccgaccucaaccucaugcccaucuga

SEQ ID NO: 119040 - RNA, 1410 nt, Artificial Sequence; identical to SEQ ID NO: 118958
  derived and/or modified CDS sequence (opt2) from neuraminidase__InfluenzaA__AFN19552

SEQ ID NO: 119041 - RNA, 1410 nt, Artificial Sequence; identical to SEQ ID NO: 118182
  derived and/or modified CDS sequence (opt2) from neuraminidase__InfluenzaA__AFN19554

SEQ ID NO: 119042 - RNA, 1410 nt, Artificial Sequence; identical to SEQ ID NO: 118182
  derived and/or modified CDS sequence (opt2) from neuraminidase__InfluenzaA__AFN19556

SEQ ID NO: 119043 - RNA, 1410 nt, Artificial Sequence
  derived and/or modified CDS sequence (opt2) from neuraminidase__InfluenzaA__AFN19558
augaaccccaaccagaagaucaucaccaucggcuccgucucccucaccaucuccaccaucugcuucuucaugcagaucgccauccucaucaccaccgucacccuccacuucaagcaguacgaguucaacuccccccccaacaaccaggucaugcucugcgagcccaccaucaucgagcgcaacaucaccgagaucgucuaccucaccaacaccaccaucgagaaggagaucugccccaagcccgccgaguaccgcaacugguccaagccccagugcgacaucaccggcuucgcccccuucuccaaggacaacuccauccgccucuccgccggcggcgacaucugggucacccgcgagcccuacgucuccugcgaccccgacaagugcuaccaguucgcccucggccagggcaccacccucaacaacguccacuccaacaacaccguccgcgaccgcacccccuaccgcacccuccucaugaacgagcucggcguccccuuccaccucggcaccaagcaggucugcaucgccugguccuccuccuccugccacgacggcaaggccuggcuccacgucugcaucaccggcgacgacaagaacgccaccgccuccuucaucuacaacggccgccucgucgacuccgucgucuccugguccaaggagauccuccgcacccaggaguccgagugcgucugcaucaacggcaccugcaccgucgucaugaccgacggcuccgccuccggcaaggccgacaccaagauccucuucaucgaggagggcaagaucguccacaccuccacccucuccggcuccgcccagcacgucgaggagugcuccugcuacccccgcuaccccggcguccgcugcgucugccgcgacaacuggaagggcuccaaccgccccaucgucgacaucaacaucaaggaccacuccaucgucuccuccuacgucugcuccggccucgucggcgacaccccccgcaagaacgacuccuccuccuccucccacugccucgaccccaacaacgaggagggcggccacggcgucaagggcugggccuucgacgacggcaacgacgucuggaugggccgcaccaucaacgagaccucccgccucggcuacgagaccuucaaggucaucgagggcugguccaaccccaaguccaagcuccagaugaaccgccaggucaucgucgaccgcggcgaccgcuccggcuacuccggcaucuucuccgucgagggcaaguccugcaucaaccgcugcuucuacgucgagcucauccgcggccgcaaggaggagaccgagguccucuggaccuccaacuccaucgucgucuucugcggcaccuccggcaccuacggcaccggcuccuggcccgacggcgccgaccucaaccucaugcccaucuga

SEQ ID NO: 119044 - RNA, 1410 nt, Artificial Sequence
  derived and/or modified CDS sequence (opt2) from neuraminidase__InfluenzaA__AFN19560
augaaccccaaccagaagaucaucaccaucggcuccgucucccucaccaucuccaccaucugcuucuucaugcagaucgccauccucaucaccaccgucacccuccacuucaagcaguacgaguucaacuccccccccaacaaccaggucaugcucugcgagcccaccaucaucgagcgcaacaucaccgagaucgucuaccucaccaacaccaccaucgagaaggagaucugccccaagcccgccgaguaccgcaacugguccaagccccagugcggcaucaccggcuucgcccccuucuccaaggacaacuccauccgccucuccgccggcggcgacaucugggucacccgcgagcccuacgucuccugcgaccccgacaagugcuaccaguucgcccucggccagggcaccacccucaacaacguccacuccaacaacaccguccgcgaccgcacccccuaccgcacccuccucaugaacgagcucggcguccccuuccaccucggcaccaagcaggucugcaucgccugguccuccuccuccugccacgacggcaaggccuggcuccacgucugcaucaccggcgacgacaagaacgccaccgccuccuucaucuacaacggccgccucgucgacuccgucgucuccugguccaaggagauccuccgcacccaggaguccgagugcgucugcaucaacggcaccugcaccgucgucaugaccgacggcuccgccuccggcaaggccgacaccaagauccucuucaucgaggagggcaagaucguccacaccuccacccucuccggcuccgcccagcacgucgaggagugcuccugcuacccccgcuaccccggcguccgcugcgucugccgcgacaacuggaagggcuccaaccgccccaucgucgacaucaacaucaaggaccacuccaucgucuccuccuacgucugcuccggccucgucggcgacaccccccgcaagaacgacuccuccuccuccucccacugccucgaccccaacaacgagggcggcggccacggcgucaagggcugggccuucgacgacggcaacgacgucuggaugggccgcaccaucaacgagaccucccgccucggcuacgagaccuucaaggucaucgagggcugguccaaccccaaguccaagcuccagaucaaccgccaggucaucgucgaccgcggcgaccgcuccggcuacuccggcaucuucuccgucgagggcaaguccugcaucaaccgcugcuucuacgucgagcucauccgcggccgcaaggaggagaccgagguccucuggaccuccaacuccaucgucgucuucugcggcaccuccggcaccuacggcaccggcuccuggcccgacggcgccgaccucaaccucaugcccaucuga

SEQ ID NO: 119045 - RNA, 1410 nt, Artificial Sequence; identical to SEQ ID NO: 119005
  derived and/or modified CDS sequence (opt2) from neuraminidase__InfluenzaA__AFN19562

SEQ ID NO: 119046 - RNA, 1410 nt, Artificial Sequence
  derived and/or modified CDS sequence (opt2) from neuraminidase__InfluenzaA__AFN19564
augaaccccaaccagaagaucaucaccaucggcuccgucucccucaccaucuccaccaucugcuucuucaugcagaucgccauccucaucaccaccgucacccuccacuucaagcaguacgaguucaacuccccccccaacaaccaggucaugcucugcgagcccaccaucaucgagcgcaacaucaccgagaucgucuaccucaccaacaccaccaucgagaaggagaucugccccaagcccgccgaguaccgcaacugguccaagccccagugcggcaucaccggcuucgcccccuucuccaaggacaacuccauccgccucuccgccggcggcgacaucugggucacccgcgagcccuacgucuccugcgaccccgacaagugcuaccaguucgcccucggccagggcaccacccucaacaacguccacuccaacaacaccguccgcgaccgcacccccuaccgcacccuccucaugaacgagcucggcguccccuuccaccucggcaccaagcaggucugcaucgccugguccuccuccuccugccacgacggcaaggccuggcuccacgucugcaucaccggcgacgacaagaacgccaccgccuccuucaucuacaacggccgccucgucgacuccgucgucuccugguccaaggagauccuccgcacccaggaguccgagugcgucugcaucaacggcaccugcaccgucgucaugaccgacggcuccgccuccggcaaggccgacaccaagauccucuucaucgaggagggcaagaucguccacaccuccacccucuccggcuccgcccagcacgucgaggagugcuccugcuacccccgcuaccccggcguccgcugcgucugccgcgacaacuggaagggcuccaaccgccccaucgucgacaucaacaucaaggaccacuccaucgucuccuccuacgucugcuccggccucgucggcgacaccccccgcaagaccgacuccuccuccuccucccacugccucgaccccaacaacgaggagggcggccacggcgucaagggcugggccuucgacgacggcaacgacgucuggaugggccgcaccaucaacgagaccucccgccucggcuacgagaccuucaaggucaucgagggcugguccaaccccaaguccaagcuccagaucaaccgccaggucaucgucgaccgcggcgaccgcuccggcuacuccggcaucuucuccgucgagggcaaguccugcaucaaccgcugcuucuacgucgagcucauccgcggccgcaaggaggagaccgagguccucuggaccuccaacuccaucgucgucuucugcggcaccuccggcaccuacggcaccggcuccuggcccgacggcgccgaccucaaccucaugcccaucuga

SEQ ID NO: 119047 - RNA, 1410 nt, Artificial Sequence
  derived and/or modified CDS sequence (opt2) from neuraminidase__InfluenzaA__AFN19566
augaaccccaaccagaagaucaucaccaucggcuccgucucccucaccaucuccaccaucugcuucuucaugcagaucgccauccucaucaccaccgucacccuccacuucaagcaguacgaguucaacuccccccccaacaaccaggucaugcucugcgagcccaccaucaucgagcgcaacaucaccgagaucgucuaccucaccaacaccaccaucgagaaggagaucugccccaagcccgccgaguaccgcaacugguccaagccccagugcggcaucaccggcuucgcccccuucuccaaggacaacuccauccgccucuccgccggcggcgacaucugggucacccgcgagcccuacgucuccugcgaccccgacaagugcuaccaguucgcccucggccagggcaccacccucaacaacguccacuccaacaacaccguccgcgaccgcacccccuaccgcacccuccucaugaacgagcucggcguccccuuccaccucggcaccaagcaggucugcaucgccugguccuccuccuccugccacgacggcaaggccuggcuccacgucugcaucaccggcgacgacaagaacgccaccgccuccuucaucuacaacggccgccucgucgacuccgucgucuccugguccaacgagauccuccgcacccaggaguccgagugcgucugcaucaacggcaccugcaccgucgucaugaccgacggcuccgccuccggcaaggccgacaccaagauccucuucaucgaggagggcaagaucguccacaccuccacccucuccggcuccgcccagcacgucgaggagugcuccugcuacccccgcuaccccggcguccgcugcgucugccgcgacaacuggaagggcuccaaccgccccaucgucgacaucaacaucaaggaccacuccaucgucuccuccuacgucugcuccggccucgucggcgacaccccccgcaagaacgacuccuccuccuccucccacugccucgaccccaacaacgaggagggcggccacggcgucaagggcugggccuucgacgacggcaacgacgucuggaugggccgcaccaucaacgagaccucccgccucggcuacgagaccuucaaggucaucgagggcugguccaaccccaaguccaagcuccagaucaaccgccaggucaucgucgaccgcggcgaccgcuccggcuacuccggcaucuucuccgucgagggcaaguccugcaucaaccgcugcuucuacgucgagcucauccgcggccgcaaggaggagaacgagguccucuggaccuccaacuccaucgucgucuucugcggcaccuccggcaccuacggcaccggcuccuggcccgacggcgccgaccucaaccucaugcccaucuga

SEQ ID NO: 119048 - RNA, 1410 nt, Artificial Sequence
  derived and/or modified CDS sequence (opt2) from neuraminidase__InfluenzaA__AFN19568
augaaccccaaccagaagaucaucaccaucggcuccgucucccucaccaucuccaccaucugcuucuucaugcagaucgccauccucaucaccaccgucacccuccacuucaagcaguacgaguucaacuccccccccaacaaccaggucaugcucugcgagcccaccaucaucgagcgcaacaucaccgagaucgucuaccucaccaacaccaccaucgagaaggagaucugccccaagcccgccgaguaccgcaacugguccaagccccagugcggcaucaccggcuucgcccccuucuccaaggacaacuccauccgccucuccgccggcggcgacaucugggucacccgcgagcccuacgucuccugcgaccccgacaagugcuaccaguucgcccucggccagggcaccacccucaacaacguccacuccaacaacaccguccgcgaccgcacccccuaccgcacccuccucaugaacgagcucggcguccccuuccaccucggcaccaagcaggucugcaucgccugguccuccuccuccugccacgacggcaaggccuggcuccacgucugcaucaccggcgacgacaagaacgccaccgccuccuucaucuacaacggccgccucgucgacuccgucgucuccugguccaaggagauccuccgcacccaggaguccgagugcgucugcaucaacggcaccugcaccgucgucaugaccgacggcuccgccuccggcaaggccgacaccaagauccucuucaucgaggagggcaagaucguccacaccuccacccucuccggcuccgcccagcacgucgaggagugcuccugcuacccccgcuaccccggcguccgcugcgucugccgcgacaacuggaagggcuccaaccgccccaucgucgacaucaacaucaaggaccacuccaucgucuccuccuacgucugcuccggccucgucggcgacaccccccgcaagaacgacuccuccuccuccucccacugccucgaccccaacaacgaggagggcggccacggcgucaagggcugggccuucgacgacggcaacgacgucuggaugggccgcaccaucaacgagaccucccgccucggcuacgagaccuucaaggucaucgagggcugguccaaccccaaguccaagcuccaggucaaccgccaggucaucgucgaccgcggcgaccgcuccggcuacuccggcaucuucuccgucgagggcaaguccugcaucaaccgcugcuucuacgucgagcucauccgcggccgcaaggaggagaucgagguccucuggaccuccaacuccaucgucgucuucugcggcaccuccggcaccuacggcaccggcuccuggcccgacggcgccgaccucaaccucaugcccaucuga

SEQ ID NO: 119049 - RNA, 1410 nt, Artificial Sequence
  derived and/or modified CDS sequence (opt2) from neuraminidase__InfluenzaA__AFN19570
augaaccccaaccagaagaucaucaccaucggcuccgucucccucaccaucuccaccaucugcuucuucaugcagaucgccauccucaucaccaccgucacccuccacuucaagcaguacgaguucaacuacccccccaacaaccaggucaugcucugcgagcccaccaucaucgagcgcaacaucaccgagaucgucuaccucaccaacaccaccaucgagaaggagaucugccccaagcccgccgaguaccgcaacugguccaagccccagugcggcaucaccggcuucgcccccuucuccaaggacaacuccauccgccucuccgccggcggcgacaucugggucacccgcgagcccuacgucuccugcgaccccgacaagugcuaccaguucgcccucggccagggcaccacccucaacaacaugcacuccaacaacaccguccgcgaccgcacccccuaccgcacccuccucaugaacgagcucggcguccccuuccaccucggcaccaagcaggucugcaucgccugguccuccuccuccugccacgacggcaaggccuggcuccacgucugcaucaccggcgacgacaagaacgccaccgccuccuucaucuacaacggccgccucgucgacuccgucgucuccugguccaacgagauccuccgcacccaggaguccgagugcgucugcaucaacggcaccugcaccgucgucaugaccgacggcuccgccuccggcaaggccgacaccaagauccucuucaucgaggagggcaagaucguccacaccuccacccucuccggcuccgcccagcacgucgaggagugcuccugcuacccccgcuaccccggcguccgcugcgucugccgcgacaacuggaagggcuccaaccgccccaucgucgacaucaacaucaaggaccacuccaucgucuccuccuacgucugcuccggccucgucggcgacaccccccgcaagaacgacuccuccuccuccucccacugccucgaccccaacaacgaggagggcggccacggcgucaagggcugggccuucgacgacggcaacgacgucuggaugggccgcaccaucaacgagaccucccgccucggcuacgagaccuucaaggucaucgagggcugguccaaccccaaguccaagcuccagaucaaccgccaggucaucgucgaccgcggcgaccgcuccggcuacuccggcaucuucuccgucgagggcaaguccugcaucaaccgcugcuucuacgucgagcucauccgcggccgcaaggaggagaacgagguccucuggaccuccaacuccaucgucgucuucugcggcaccuccggcaccuacggcaccggcuccuggcccgacggcgccgaccucaaccucaugcccaucuga

SEQ ID NO: 119050 - RNA, 1410 nt, Artificial Sequence
  derived and/or modified CDS sequence (opt2) from neuraminidase__InfluenzaA__AFN19572
augaaccccaaccagaagaucaucaccaucggcuccgucucccucaccaucuccaccaucugcuucuucaugcagaucgccauccucaucaccaccgucacccuccacuucaagcaguacgaguucaacuccccccccaacaaccaggucaugcucugcgagcccaccaucaucgagcgcaacaucaccgagaucgucuaccucaccaacaccaccaucgagaaggagaucugccccaagcccgccgaguaccgcaacugguccaagccccagugcgacaucaccggcuucgcccccuucuccaaggacaacuccauccgcaucuccgccggcggcgacaucugggucacccgcgagcccuacgucuccugcgaccccgacaagugcuaccaguucgcccucggccagggcaccacccucaacaacguccacuccaacaacaccguccgcgaccgcacccccuaccgcacccuccucaugaacgagcucggcguccccuuccaccucggcaccaagcaggucugcaucgccugguccuccuccuccugccacgacggcaaggccuggcuccacgucugcaucaccggcgacgacaagaacgccaccgccuccuucaucuacaacggcaagcucgucgacuccgucgucuccugguccaaggagauccuccgcacccaggaguccgagugcgucugcaucaacggcaccugcaccgucgucaugaccgacggcuccgccuccggcaaggccgacaccaagauccucuucaucgaggagggcaagaucguccacaccuccacccucuccggcuccgcccagcacgucgaggagugcuccugcuacccccgcuaccccggcguccgcugcgucugccgcgacaacuggaagggcuccaaccgccccaucgucgacaucaacaucaaggaccacuccaucgucuccuccuacgucugcuccggccucgucggcgacaccccccgcaagaacgacuccuccuccuccucccacugccucgaccccaacaacgaggagggcggccacggcgucaagggcugggccuucgacgacggcaacgacgucuggaugggccgcaccaucaacgagaccucccgccucggcuacgagaccuucaaggucaucgagggcugguccaaccccaaguccaagcuccagaucaaccgccaggucaucgucgaccgcggcgaccgcuccggcuacuccggcaucuucuccgucgagggcaaguccugcaucaaccgcugcuucuacgucgagcucauccgcggccgcaaggaggagaccgagguccucuggaccuccaacuccaucgucgucuucugcggcaccuccggcaccuacggcaccggcuccuggcccgacggcgccgaccucaaccucaugcccaucuga

SEQ ID NO: 119051 - RNA, 1410 nt, Artificial Sequence
  derived and/or modified CDS sequence (opt2) from neuraminidase__InfluenzaA__AFN19574
augaaccccaaccagaagaucaucaccaucggcuccgucucccucaccaucuccaccaucugcuucuucaugcagaucgccauccucaucaccaccgucacccuccacuucaagcaguacgaguucaacuccccccccaacaaccaggucaugcucugcgagcccaccaucaucgagcgcaacaucaccgagaucgucuaccucaccaacaccaccaucgagaaggagaucugccccaagcucgccgaguaccgcaacugguccaagccccagugcgacaucaccggcuucgcccccuucuccaaggacaacuccauccgccucuccgccggcggcgacaucugggucacccgcgagcccuacgucuccugcgaccccaacaagugcuaccaguucgcccucggccagggcaccacccucaacaacguccacuccaacaacaccguccgcgaccgcacccccuaccgcacccuccucaugaacgagcucggcguccccuuccaccucggcaccaagcaggucugcaucgccugguccuccuccuccugccacgacggcaaggccuggcuccacgucugcaucaccggcgacgacaagaacgccaccgccuccuucaucuacaacggccgccucgucgacuccgucgucuccugguccaagaagauccuccgcacccaggaguccgagugcgucugcaucaacggcaccugcaccgucgucaugaccgacggcuccgccuccggcaaggccgacaccaagauccucuucaucgaggagggcaagaucguccacaccuccacccucuccggcuccgcccagcacgucgaggagugcuccugcuacccccgcuaccccggcguccgcugcgucugccgcgacaacuggaagggcuccaaccgccccaucgucgacaucaacaugaaggaccacuccaucgucuccuccuacgucugcuccggccucgucggcgacaccccccgcaagaacgacuccuccuccuccucccacugcuucgaccccaacgacgaggagggcggccacggcgucaagggcugggccuucgacgacggcaacgacgucuggaugggccgcaccaucuccgagaagucccgccucggcuacgagaccuucaaggucaucgagggcugguccaaccccaaguccaagcuccagaucaaccgccaggucaucgucgaccgcggcgaccgcuccggcuacuccggcaucuucuccgucgagggcaaguccugcaucaaccgcugcuucuacgucgagcucauccgcggcuccaaggaggagaccgagguccucuggaccuccaacuccaucgucgucuucugcggcaccuccggcaccuacggcaccggcuccuggcccgacggcgccgacaucaaccucaugcccaucuga

SEQ ID NO: 119052 - RNA, 1410 nt, Artificial Sequence
  derived and/or modified CDS sequence (opt2) from neuraminidase__InfluenzaA__AFN19576
augaaccccaaccagaagaucaucaccaucggcuccgucucccucaccaucuccaccaucugcuucuucaugcagaucgccauccucaucaccaccgucacccuccacuucaagcaguacgaguucaacuccccccccaacaaccagaugaugcucugcgagcccaccaucaucgagcgcaacaucaccgagaucgucuaccucaccaacaccaccaucgagaaggagaucugccccaagcccgccgaguaccgcaacugguccaagccccagugcgacaucaccggcuucgcccccuucuccaaggacaacuccauccgccucuccgccggcggcgacaucugggucacccgcgagcccuacgucuccugcgaccccgacaagugcuaccaguucgcccucggccagggcaccacccucaacaacguccacuccaacaacaccguccgcgaccgcacccccuaccgcacccuccucaugaacgagcucggcguccccuuccaccucggcaccaagcaggucugcaucgccugguccuccuccuccugccacgacggcaaggccuggcuccacgucugcaucaccggcgacgacaagaacgccaccgccuccuucaucuacaacggccgccucgucgacuccgucgucuccugguccaaggagauccuccgcacccaggaguccgagugcgucugcaucaacggcaccugcaccgucgucaugaccgacggcuccgccuccggcaaggccgacaccaagauccucuucaucgaggagggcaagaucguccacaccuccacccucuccggcuccgcccagcacgucgaggagugcuccugcuacccccgcuaccccggcguccgcugcgucugccgcgacaacuggaagggcuccaaccgccccaucgucgacaucaacaucaaggaccacuccaucgucuccuccuacgucugcuccggccucgucggcgacaccccccgcaagaacgacuccuccuccuccucccacugccucgaccccaacaacgaggagggcggccacggcgucaagggcugggccuucgacgacggcaacgacgucuggaugggccgcaccaucaacgagaccucccgccucggcuacgagaccuucaaggucaucgagggcugguccaaccccaaguccaagcuccagaucaaccgccaggucaucgucgaccgcggcgaccgcuccggcuacuccggcaucuucuccgucgagggcaaguccugcaucaaccgcugcuucuacgucgagcucauccgcggccgcaaggaggagaccgagguccucuggaccuccaacuccaucgucgucuucugcggcaccuccggcaccuacggcaccggcuccuggcccgacggcgccgaccucaaccucaugcccaucuga

SEQ ID NO: 119053 - RNA, 1410 nt, Artificial Sequence; identical to SEQ ID NO: 118958
  derived and/or modified CDS sequence (opt2) from neuraminidase__InfluenzaA__AFN19578

SEQ ID NO: 119054 - RNA, 1410 nt, Artificial Sequence; identical to SEQ ID NO: 118958
  derived and/or modified CDS sequence (opt2) from neuraminidase__InfluenzaA__AFN19582

SEQ ID NO: 119055 - RNA, 1410 nt, Artificial Sequence; identical to SEQ ID NO: 118958
  derived and/or modified CDS sequence (opt2) from neuraminidase__InfluenzaA__AFN19584

SEQ ID NO: 119056 - RNA, 1410 nt, Artificial Sequence; identical to SEQ ID NO: 118958
  derived and/or modified CDS sequence (opt2) from neuraminidase__InfluenzaA__AFN19588

SEQ ID NO: 119057 - RNA, 1410 nt, Artificial Sequence; identical to SEQ ID NO: 118958
  derived and/or modified CDS sequence (opt2) from neuraminidase__InfluenzaA__AFN19590

SEQ ID NO: 119058 - RNA, 1410 nt, Artificial Sequence; identical to SEQ ID NO: 118994
  derived and/or modified CDS sequence (opt2) from neuraminidase__InfluenzaA__AFN19592

SEQ ID NO: 119059 - RNA, 1410 nt, Artificial Sequence; identical to SEQ ID NO: 118958
  derived and/or modified CDS sequence (opt2) from neuraminidase__InfluenzaA__AFN19594

SEQ ID NO: 119060 - RNA, 1410 nt, Artificial Sequence; identical to SEQ ID NO: 118966
  derived and/or modified CDS sequence (opt2) from neuraminidase__InfluenzaA__AFN19596

SEQ ID NO: 119061 - RNA, 1410 nt, Artificial Sequence; identical to SEQ ID NO: 118966
  derived and/or modified CDS sequence (opt2) from neuraminidase__InfluenzaA__AFN19600

SEQ ID NO: 119062 - RNA, 1410 nt, Artificial Sequence
  derived and/or modified CDS sequence (opt2) from neuraminidase__InfluenzaA__AFN19602
augaaccccaaccagaagaucaucaccaucggcuccgucucccucacccucuccaccaucugcuucuucaugcagaucgccauccucaucaccaccgucacccuccacuucaagcaguacgaguucaacuccccccccaacaaccaggucaugcucugcgagcccaccaucaucgagcgcaacaugaccgagaucgucuaccucaccaacaccaccaucgagaaggagaucugccccaagcccgccgaguaccgcaacugguccaagccccagugcgacaucaccggcuucgcccccuucuccaaggacaacuccauccgccucuccgccggcggcgacaucugggucacccgcgagcccuacgucuccugcgaccccgacaagugcuaccaguucgcccucggccagggcaccacccucaacaacguccacuccaacaacaccguccgcgaccgcacccccuaccgcacccuccucaugaacgagcucggcguccccuuccaccucggcaccaagcaggucugcaucgccugguccuccuccuccugccacgacggcaaggccuggcuccacgucugcaucaccggcgacgacaagaacgccaccgccuccuucaucuacaacggccgccucgucgacuccgucgucuccugguccaaggagauccuccgcacccaggaguccgagugcgucugcaucaacggcaccugcaccgucgucaugaccgacggcuccgccuccggcaaggccgacaccaagauccucuucaucgaggagggcaagaucguccacaccuccacccucuccggcuccgcccagcacgucgaggagugcuccugcuacccccgcuaccccggcguccgcugcgucugccgcgacaacuggaagggcuccaaccgccccaucgucgacaucaacaucaaggaccacuccaucgucuccuccuacgucugcuccggccucgucggcgacaccccccgcaagaacgacuccuccuccuccucccacugccucgaccccaacaacgaggagggcggccacggcgucaagggcugggccuucgacgacggcaacgacgucuggaugggccgcaccaucaacgagaccucccgccucggcuacgagaccuucaaggucaucgagggcugguccaaccccaaguccaagcuccagaucaaccgccaggucaucgucgaccgcuccgaccgcuccggcuacuccggcaucuucuccgucgagggcaaguccugcaucaaccgcugcuucuacgucgagcucauccgcggccgcaaggaggagaccgagguccucuggaccuccaacuccaucgucgucuucugcggcaccuccggcaccuacggcaccggcuccuggcccgacggcgccgaccucaaccucaugcccaucuga

SEQ ID NO: 119063 - RNA, 1410 nt, Artificial Sequence; identical to SEQ ID NO: 118958
  derived and/or modified CDS sequence (opt2) from neuraminidase__InfluenzaA__AFN19604

SEQ ID NO: 119064 - RNA, 1410 nt, Artificial Sequence; identical to SEQ ID NO: 118958
  derived and/or modified CDS sequence (opt2) from neuraminidase__InfluenzaA__AFN19606

SEQ ID NO: 119065 - RNA, 1410 nt, Artificial Sequence; identical to SEQ ID NO: 118958
  derived and/or modified CDS sequence (opt2) from neuraminidase__InfluenzaA__AFN19608

SEQ ID NO: 119066 - RNA, 1410 nt, Artificial Sequence; identical to SEQ ID NO: 118958
  derived and/or modified CDS sequence (opt2) from neuraminidase__InfluenzaA__AFN19610

SEQ ID NO: 119067 - RNA, 1410 nt, Artificial Sequence; identical to SEQ ID NO: 118966
  derived and/or modified CDS sequence (opt2) from neuraminidase__InfluenzaA__AFN19612

SEQ ID NO: 119068 - RNA, 1410 nt, Artificial Sequence; identical to SEQ ID NO: 118182
  derived and/or modified CDS sequence (opt2) from neuraminidase__InfluenzaA__AFN19614

SEQ ID NO: 119069 - RNA, 1410 nt, Artificial Sequence
  derived and/or modified CDS sequence (opt2) from neuraminidase__InfluenzaA__AFN19618
augaaccccaaccagaagaucaucaccaucggcuccgucucccucaccaucuccaccaucugcuucuucaugcagaucgccauccucaucaccaccgucacccuccacuucaagcaguacgaguucaacuccccccccaacaaccaggucaugcucugcgagcccaccaucaucgagcgcaacaucaccgagaucgucuaccucaccaacaccaccaucgagaaggagaucugccccaagcccgccgaguaccgcaacugguccaagccccagugcggcaucaccggcuucgcccccuucuccaaggacaacuccauccgccucuccgccggcggcgacaucugggucacccgcgagcccuacgucuccugcgaccccgacaagugcuaccaguucgcccucggccagggcaccacccucaacaacguccacuccaacaacaccguccgcgaccgcacccccuaccgcacccuccucaugaacgagcucggcguccccuuccaccucggcaccaagcaggucugcaucgccugguccuccuccuccugccacgacggcaaggccuggcuccacgucugcaucaccggcgacgacaagaacgccaccgccuccuucaucuacaacggccgccucgucgacuccgucgucuccugguccaacgagauccuccgcacccaggaguccgagugcgucugcaucaacggcaccugcaccgucgucaugaccgacggcuccgccuccggcaaggccgacaccaagauccucuucaucgaggagggcaagaucguccacaccuccacccucuccggcuccgcccagcacgucgaggagugcuccugcuacccccgcuaccccggcguccgcugcgucugccgcgacaacuggaagggcuccaaccgccccaucgucgacaucaacaucaaggaccacuccaucgucuccuccuacgucugcuccggccucgucggcgacaccccccgcaagaacgacuccuccuccuccucccacugccucgaccccaacaacgaggagggcggccacggcgucaagggcugggccuucgacgacggcaacgacgucuggaugggccgcaccaucaacgagaccucccgccucggcuacgagaccuucaaggucaucgagggcugguccaaccccaaguccaagcuccagaucaaccgccaggucaucgucgaccgcggcgaccgcuccggcuacuccggcaucuucuccgucgagggcaaguccugcaucaaccgcugcuucuacgucgagcucauccgcggccgcaaggaggagaccgagguccucuggaccuccaacuccaucgucgucuucugcggcaccuccggcaccuacggcaccggcuccuggcccgacggcgccgaccucaaccucaugcccaucuga

SEQ ID NO: 119070 - RNA, 1410 nt, Artificial Sequence; identical to SEQ ID NO: 118958
  derived and/or modified CDS sequence (opt2) from neuraminidase__InfluenzaA__AFN19620

SEQ ID NO: 119071 - RNA, 1410 nt, Artificial Sequence; identical to SEQ ID NO: 118994
  derived and/or modified CDS sequence (opt2) from neuraminidase__InfluenzaA__AFN19624

SEQ ID NO: 119072 - RNA, 1410 nt, Artificial Sequence; identical to SEQ ID NO: 118958
  derived and/or modified CDS sequence (opt2) from neuraminidase__InfluenzaA__AFN19630

SEQ ID NO: 119073 - RNA, 1410 nt, Artificial Sequence
  derived and/or modified CDS sequence (opt2) from neuraminidase__InfluenzaA__AFN19632
augaaccccaaccagaagaucaucaccaucggcuccgucucccucaccaucuccaccaucugcuucuucaugcagaucgccauccucaucaccaccgucacccuccacuucaagcaguacgaguucaacuccccccccaacaaccaggucaugcucugcgagcccaccaucaucgagcgcaacaucaccgagaucgucuaccucaccaacaccaccaucgagaaggagaucugccccaagcccaccgaguaccgcaacugguccaagccccagugcgacaucaccggcuucgcccccuucuccaaggacaacuccauccgccucuccgccggcggcgacaucugggucacccgcgagcccuacgucuccugcgaccccgacaagugcuaccaguucgcccucggccagggcaccacccucaacaacguccacuccaacaacaccguccgcgaccgcacccccuaccgcacccuccucaugaacgagcucggcguccccuuccaccucggcaccaagcaggucugcaucgccugguccuccuccuccugccacgacggcaaggccuggcuccacgucugcaucaccggcgacgacaagaacgccaccgccuccuucaucuacaacggccgccucgucgacuccgucgucuccugguccaaggagauccuccgcacccaggaguccgagugcgucugcaucaacggcaccugcaccgucgucaugaccgacggcuccgccuccggcaaggccgacaccaagauccucuucaucgaggagggcaagaucguccacaccuccacccucuccggcuccgcccagcacgucgaggagugcuccugcuacccccgcuaccccggcguccgcugcgucugccgcgacaacuggaagggcuccaaccgccccaucgucgacaucaacaucaaggaccacuccaucgucuccuccuacgucugcuccggccucgucggcgacaccccccgcaagaacgacuccuccuccuccucccacugccucgaccccaacaacgaggagggcggccacggcgucaagggcugggccuucgacgacggcaacgacgucuggaugggccgcaccaucaacgagaccucccgccucggcuacgagaccuucaaggucaucgagggcugguccaaccccaaguccaagcuccagaucaaccgccaggucaucgucgaccgcggcgaccgcuccggcuacuccggcaucuucuccgucgagggcaaguccugcaucaaccgcugcuucuacgucgagcucauccgcggccgcaaggaggagaccgagguccucuggaccuccaacuccaucgucgucuucugcggcaccuccggcaccuacggcaccggcuccuggcccgacggcgccgaccucaaccucaugcccaucuga

SEQ ID NO: 119074 - RNA, 1410 nt, Artificial Sequence
  derived and/or modified CDS sequence (opt2) from neuraminidase__InfluenzaA__AFN19634
augaaccccaaccagaagaucaucaccaucggcuccgucucccucaccaucuccaccaucugcuucuucaugcagaucgccauccucaucaccaccgucacccuccacuucaagcaguacgaguucaacuccccccccaacaaccaggucaugcucugcgagcccaccaucaucgagcgcaacaucaccgagaucgucuaccucaccaacaccaccaucgagaaggagaucugccccaagcccgccgaguaccgcaacugguccaagccccagugcgacaucaccggcuucgcccccuucuccaaggacaacuccauccgccucuccgccggcggcgacaucugggucacccgcgagcccuacgucuccugcgaccccgacaagugcuaccaguucgcccucggccagggcaccacccucaacaacguccacuccaacaacaccguccgcgaccgcaccuccuaccgcacccuccucaugaacgagcucggcguccccuuccaccucggcaccaagcaggucugcaucgccugguccuccuccuccugccacgacggcaaggccuggcuccacgucugcaucaccggcgacgacaagaacgccaccgccuccuucaucuacaacggccgccucgucgacuccgucgucuccugguccaaggagauccuccgcacccaggaguccgagugcgucugcaucaacggcaccugcaccgucgucaugaccgacggcuccgccuccggcaaggccgacaccaagauccucuucaucgaggagggcaagaucguccacaccuccacccucuccggcuccgcccagcacgucgaggagugcuccugcuacccccgcuaccccggcguccgcugcgucugccgcgacaacuggaagggcuccaaccgccccaucgucgacaucaacaucaaggaccacuccaucgucuccuccuacgucugcuccggccucgucggcgacaccccccgcaagaacgacuccuccuccuccucccacugccucgaccccaacaacgaggagggcggccacggcgucaagggcugggccuucgacgacggcaacgacgucuggaugggccgcaccaucaacgagaccucccgccucggcuacgagaccuucaaggucaucgagggcugguccaaccccaaguccaagcuccagaucaaccgccaggucaucgucgaccgcggcgaccgcuccggcuacuccggcaucuucuccgucgagggcaaguccugcaucaaccgcugcuucuacgucgagcucauccgcggccgcaaggaggagaccgagguccucuggaccuccaacuccaucgucgucuucugcggcaccuccggcaccuacggcaccggcuccuggcccgacggcgccgaccucaaccucaugcccaucuga

SEQ ID NO: 119075 - RNA, 1410 nt, Artificial Sequence
  derived and/or modified CDS sequence (opt2) from neuraminidase__InfluenzaA__AFN19636
augaaccccaaccagaagaucaucaccaucggcuccgucucccucaccaucuccaccaucugcuucuucaugcagaucgccauccucaucaccaccgucacccuccacuucaagcaguacgaguucaacuccccccccaacaaccaggucaugcucugcgagcccaccaucaucgagcgcaacaucaccgagaucgucuaccucaccaacaccaucaucgagaaggagaucugccccaagcccaccgaguaccgcaacugguccaagccccagugcgacaucaccggcuucgcccccuucuccaaggacaacuccauccgccucuccgccggcggcgacaucugggucacccgcgagcccuacgucuccugcgaccccgacaagugcuaccaguucgcccucggccagggcaccacccucaacaacguccacuccaacaacaccguccgcgaccgcacccccuaccgcacccuccucaugaacgagcucggcguccccuuccaccucggcaccaagcaggucugcaucgccugguccuccuccuccugccacgacggcaaggccuggcuccacgucugcaucaccggcgacgacaagaacgccaccgccuccuucaucuacaacggccgccucgucgacuccgucgucuccugguccaaggagauccuccgcacccaggaguccgagugcgucugcaucaacggcaccugcaccgucgucaugaccgacggcuccgccuccggcaaggccgacaccaagauccucuucaucgaggagggcaagaucguccacaccuccacccucuccggcuccgcccagcacgucgaggagugcuccugcuacccccgcuaccccggcguccgcugcgucugccgcgacaacuggaagggcuccaaccgccccaucgucgacaucaacaucaaggaccacuccaucgucuccuccuacgucugcuccggccucgucggcgacaccccccgcaagaacgacuccuccuccuccucccacugccucgaccccaacaacgaggagggcggccacggcgucaagggcugggccuucgacgacggcaacgacgucuggaugggccgcaccaucaacgagaccucccgccucggcuacgagaccuucaaggucaucgagggcugguccaaccccaaguccaagcuccagaucaaccgccaggucaucgucgaccgcggcgaccgcuccggcuacuccggcaucuucuccgucgagggcaaguccugcaucaaccgcugcuucuacgucgagcucauccgcggccgcaaggaggagaccgagguccucuggaccuccaacuccaucgucgucuucugcggcaccuccggcaccuacggcaccggcuccuggcccgacggcgccgaccucaaccucaugcccaucuga

SEQ ID NO: 119076 - RNA, 1410 nt, Artificial Sequence; identical to SEQ ID NO: 119075
  derived and/or modified CDS sequence (opt2) from neuraminidase__InfluenzaA__AFN19638

SEQ ID NO: 119077 - RNA, 1410 nt, Artificial Sequence; identical to SEQ ID NO: 118958
  derived and/or modified CDS sequence (opt2) from neuraminidase__InfluenzaA__AFN19640

SEQ ID NO: 119078 - RNA, 1410 nt, Artificial Sequence
  derived and/or modified CDS sequence (opt2) from neuraminidase__InfluenzaA__AFN19642
augaaccccaaccagaagaucaucaccaucggcuccgucucccucaccaucuccaccaucugcuucuucaugcagaucgccauccucaucaccaccgucacccuccacuucaagcaguacgaguucaacuccccccccaacaaccaggucaugcucugcgagcccaccaucaucgagcgcaacaugaccgagaucgucuaccucaccaacaccaccaucgagaaggagaucugccccaagcccgccgaguaccgcaacugguccaagccccagugcgacaucaccggcuucgcccccuucuccaaggacaacuccauccgccucuccgccggcggcgacaucugggucacccgcgagcccuacgucuccugcgaccccgacaagugcuaccaguucgcccucggccagggcaccacccucaacaacguccacuccaacaacaccgucuccgaccgcacccccuaccgcacccuccucaugaacgagcucggcguccccuuccaccucggcaccaagcaggucugcaucgccugguccuccuccuccugccacgacggcaaggccuggcuccacgucugcaucaccggcgacgacaagaacgccaccgccuccuucaucuacaacggccgccucgucgacuccgucgucuccugguccaaggagauccuccgcacccaggaguccgagugcgucugcaucaacggcaccugcaccgucgucaugaccgacggcuccgccuccggcaaggccgacaccaagauccucuucaucgaggagggcaagaucguccacaccuccacccucuccggcuccgcccagcacgucgaggagugcuccugcuacccccgcuaccccggcguccgcugcgucugccgcgacaacuggaagggcuccaaccgccccaucgucgacaucaacaucaaggaccacuccaucgucuccuccuacgucugcuccggccucgucggcgacaccccccgcaagaacgacuccuccuccuccucccacugccucgaccccaacaacgaggagggcggccacggcgucaagggcugggccuucgacgacggcaacgacgucuggaugggccgcaccaucaacgagaccucccgccucggcuacgagaccuucaaggucaucgagggcugguccaaccccaaguccaagcuccagaucaaccgccaggucaucgucgaccgcuccgaccgcuccggcuacuccggcaucuucuccgucgagggcaaguccugcaucaaccgcugcuucuacgucgagcucauccgcggccgcaaggaggagaccgagguccucuggaccuccaacuccaucgucgucuucugcggcaccuccggcaccuacggcaccggcuccuggcccgacggcgccgaccucaaccucaugcccaucuga

SEQ ID NO: 119079 - RNA, 1410 nt, Artificial Sequence; identical to SEQ ID NO: 119075
  derived and/or modified CDS sequence (opt2) from neuraminidase__InfluenzaA__AFN19644

SEQ ID NO: 119080 - RNA, 1410 nt, Artificial Sequence
  derived and/or modified CDS sequence (opt2) from neuraminidase__InfluenzaA__AFN19646
augaaccccaaccagaagaucaucaccaucggcuccgucucccucaccaucuccaccaucugcuucuucauccagaucgccauccucaucaccaccgucacccuccacuucaagcaguacgaguucaacuccccccccaacaaccaggucaugcucugcgagcccaccaucaucgagcgcaacaucaccgagaucgucuaccucaccaacaccaccaucgagaaggagaucugccccaagcccgccgaguaccgcaacugguccaagccccagugcgacaucaccggcuucgcccccuucuccaaggacaacuccauccgccucuccgccggcggcgacaucugggucacccgcgagcccuacgucuccugcgaccccgacaagugcuaccaguucgcccucggccagggcaccacccucaacaacguccacuccaacaacaccguccgcgaccgcacccccuaccgcacccuccucaugaacgagcucggcguccccuuccaccucggcaccaagcaggucugcaucgccugguccuccuccuccugccacgacggcaaggccuggcuccacgucugcaucaccggcgacgacaagaacgccaccgccuccuucaucuacaacggccgccucgucgacuccgucgucuccugguccaaggagauccuccgcacccaggaguccgagugcgucugcaucaacggcaccugcaccgucgucaugaccgacggcuccgccuccggcaaggccgacaccaagauccucuucaucgaggagggcaagaucguccacaccuccacccucuccggcuccgcccagcacgucgaggagugcuccugcuacccccgcuaccccggcguccgcugcgucugccgcgacaacuggaagggcuccaaccgccccaucgucgacaucaacaucaaggaccacuccaucgucuccuccuacgucugcuccggccucgucggcgacaccccccgcaagaacgacuccuccuccuccucccacugccucgaccccaacaacgaggagggcggccacggcgucaagggcugggccuucgacgacggcaacgacgucuggaugggccgcaccaucaacgagaccucccgccucggcuacgagaccuucaaggucaucgagggcugguccaaccccaaguccaagcuccagaucaaccgccaggucaucgucaaccgcuccgaccgcuccggcuacuccggcaucuucuccgucgagggcaaguccugcaucaaccgcugcuucuacgucgagcucauccgcggccgcaaggaggagaccgagguccucuggaccuccaacuccaucgucgucuucugcggcaccuccggcaccuacggcaccggcuccuggcccgacggcgccgaccucaaccucaugcccaucuga

SEQ ID NO: 119081 - RNA, 1410 nt, Artificial Sequence; identical to SEQ ID NO: 118958
  derived and/or modified CDS sequence (opt2) from neuraminidase__InfluenzaA__AFN19648

SEQ ID NO: 119082 - RNA, 1410 nt, Artificial Sequence; identical to SEQ ID NO: 118994
  derived and/or modified CDS sequence (opt2) from neuraminidase__InfluenzaA__AFN19650

SEQ ID NO: 119083 - RNA, 1410 nt, Artificial Sequence
  derived and/or modified CDS sequence (opt2) from neuraminidase__InfluenzaA__AFN19652
augaaccccaaccagaagaucaucaccaucggcuccgucucccucaccaucuccaccaucugcuucuucaugcagaucgccauccucaucaccaccgucacccuccacuucaagcaguacgaguucaacuccccccccaacaaccaggucaugcucugcgagcccaccaucaucgagcgcaacaucaccgaggucgucuaccucaccaacaccaccaucgagaaggagaucugccccaagcccgccgaguaccgcaacugguccaagccccagugcgacaucaccggcuucgcccccuucuccaaggacaacuccauccgccucuccgccggcggcgacaucugggucacccgcgagcccuacgucuccugcgaccccgacaagugcuaccaguucgcccucggccagggcaccacccucaacaacguccacuccaacaacaccguccgcgaccgcacccccuaccgcacccuccucaugaacgagcucggcguccccuuccaccucggcaccaagcaggucugcaucgccugguccuccuccuccugccacgacggcaaggccuggcuccacgucugcaucaccggcgacgacaagaacgccaccgccuccuucaucuacaacggccgccucgucgacuccgucgucuccugguccaaggagauccuccgcacccaggaguccgagugcgucugcaucaacggcaccugcaccgucgucaugaccgacggcuccgccuccggcaaggccgacaccaagauccucuucaucgaggagggcaagaucguccacaccuccacccucuccggcuccgcccagcacgucgaggagugcuccugcuacccccgcuaccccggcguccgcugcgucugccgcgacaacuggaagggcuccaaccgccccaucgucgacaucaacaucaaggaccacuccaucgucuccuccuacgucugcuccggccucgucggcgacaccccccgcaagaacgacuccuccuccuccucccacugccucgaccccaacaacgaggagggcggccacggcgucaagggcugggccuucgacgacggcaacgacgucuggaugggccgcaccaucaacgagaccucccgccucggcuacgagaccuucaaggucaucgagggcugguccaaccccaaguccaagcuccagaucaaccgccaggucaucgucgaccgcggcgaccgcuccggcuacuccggcaucuucuccgucgagggcaaguccugcaucaaccgcugcuucuacgucgagcucauccgcggccgcaaggaggagaccgagguccucuggaccuccaacuccaucgucgucuucugcggcaccuccggcaccuacggcaccggcuccuggcccgacggcgccgaccucaaccucaugcccaucuga

SEQ ID NO: 119084 - RNA, 1410 nt, Artificial Sequence
  derived and/or modified CDS sequence (opt2) from neuraminidase__InfluenzaA__AFN19654
augaaccccaaccagaagaucaucaccaucggcuccgucucccucaccaucuccaccaucugcuucuucaugcagaucgccauccucaucaccaccgucacccuccacuucaagcaguacgaguucaacuccccccccaacaaccaggucaugcucugcgagcccaccaucaucgagcgcaacaucaccgagaucgucuaccucaccaacaccaccaucgagaaggagaccugccccaagcccaccgaguaccgcaacugguccaagccccagugcgacaucaccggcuucgcccccuucuccaaggacaacuccauccgccucuccgccggcggcgacaucugggucacccgcgagcccuacgucuccugcgaccccgacaagugcuaccaguucgcccucggccagggcaccacccucaacaacguccacuccaacaacaccguccgcgaccgcacccccuaccgcacccuccucaugaacgagcucggcguccccuuccaccucggcaccaagcaggucugcaucgccugguccuccuccuccugccacgacggcaaggccuggcuccacgucugcaucaccggcgacgacaagaacgccaccgccuccuucaucuacaacggccgccucgucgacuccgucgucuccugguccaaggagauccuccgcacccaggaguccgagugcgucugcaucaacggcaccugcaccgucgucaugaccgacggcuccgccuccggcaaggccgacaccaagauccucuucaucgaggagggcaagaucguccacaccuccacccucuccggcuccgcccagcacgucgaggagugcuccugcuacccccgcuaccccggcguccgcugcgucugccgcgacaacuggaagggcuccaaccgccccaucgucgacaucaacaucaaggaccacuccaucgucuccuccuacgucugcuccggccucgucggcgacaccccccgcaagaacgacuccuccuccuccucccacugccucgaccccaacaacgaggagggcggccacggcgucaagggcugggccuucgacgacggcaacgacgucuggaugggccgcaccaucaacgagaccucccgccucggcuacgagaccuucaaggucaucgagggcugguccaaccccaaguccaagcuccagaucaaccgccaggucaucgucgaccgcggcgaccgcuccggcuacuccggcaucuucuccgucgagggcaaguccugcaucaaccgcugcuucuacgucgagcucauccgcggccgcaaggaggagaccgagguccucuggaccuccaacuccaucgucgucuucugcggcaccuccggcaccuacggcaccggcuccuggcccgacggcgccgaccucaaccucaugcccaucuga

SEQ ID NO: 119085 - RNA, 1410 nt, Artificial Sequence; identical to SEQ ID NO: 118958
  derived and/or modified CDS sequence (opt2) from neuraminidase__InfluenzaA__AFN19656

SEQ ID NO: 119086 - RNA, 1410 nt, Artificial Sequence; identical to SEQ ID NO: 118182
  derived and/or modified CDS sequence (opt2) from neuraminidase__InfluenzaA__AFN19658

SEQ ID NO: 119087 - RNA, 1410 nt, Artificial Sequence; identical to SEQ ID NO: 119075
  derived and/or modified CDS sequence (opt2) from neuraminidase__InfluenzaA__AFN19660

SEQ ID NO: 119088 - RNA, 1410 nt, Artificial Sequence; identical to SEQ ID NO: 118182
  derived and/or modified CDS sequence (opt2) from neuraminidase__InfluenzaA__AFN19662

SEQ ID NO: 119089 - RNA, 1410 nt, Artificial Sequence
  derived and/or modified CDS sequence (opt2) from neuraminidase__InfluenzaA__AFN19664
augaaccccaaccagaagaucaucaccaucggcuccgucucccucaccaucuccaccaucugcuucuucaugcagaucgccauccucaucaccaccgucacccuccacuucaagcaguacgaguucaacuccccccccaacaaccaggucaugcucugcgagcccaccaucaucgagcgcaacaucaccgagaucgucuaccucaccaacaacaccaucgagaaggagaucugccccaagcccgccgaguaccgcaacugguccaagccccagugcggcaucaccggcuucgcccccuucuccaaggacaacuccauccgccucuccgccggcggcgacaucugggucacccgcgagcccuacgucuccugcgaccccgacaagugcuaccaguucgcccucggccagggcaccacccucaacaacguccacuccaacaacaccguccgcgaccgcacccccuaccgcacccuccucaugaacgagcucggcguccccuuccaccucggcaccaagcaggucugcaucgccugguccuccuccuccugccacgacggcaaggccuggcuccacgucugcaucaccggcgacgacaagaacgccaccgccuccuucaucuacaacggccgccucgucgacuccgucgucuccugguccaaggagauccuccgcacccaggaguccgagugcgucugcaucaacggcaccugcaccgucgucaugaccgacggcuccgccuccggcaaggccgacaccaagauccucuucaucgaggagggcaagaucguccacaccuccacccucuccggcuccgcccagcacgucgaggagugcuccugcuacccccgcuaccccggcguccgcugcgucugccgcgacaacuggaagggcuccaaccgccccaucgucgacaucaacaucaaggaccacuccaucgucuccuccuacgucugcuccggccucgucggcgacaccccccgcaagaacgacuccuccuccuccucccacugccucgaccccaacaacgaggagggcggccacggcgucaagggcugggccuucgacgacggcaacgacgucuggaugggccgcaccaucaacgagaccucccgccucggcuacgagaccuucaaggucaucgagggcugguccaaccccaaguccaagcuccagaucaaccgccaggucaucgucgaccgcggcgaccgcuccggcuacuccggcaucuucuccgucgagggcaaguccugcaucaaccgcugcuucuacgucgagcucauccgcggccgcaaggaggagaccgagguccucuggaccuccaacuccaucgucgucuucugcggcaccuccggcaccuacggcaccggcuccuggcccgacggcgccgaccucaaccucaugcccaucuga

SEQ ID NO: 119090 - RNA, 1410 nt, Artificial Sequence
  derived and/or modified CDS sequence (opt2) from neuraminidase__InfluenzaA__AFN19666
augaaccccaaccagaagaucaucaccaucggcuccgucucccucaccaucuccaccaucugcuucuucaugcagaucgccauccucaucaccaccgucacccuccacuucaagcaguacgaguucaacuccccccccaacaaccaggucaugcucugcgagcccaccaucaucgagcgcaacaugaccgagaucgucuaccucaccaacaccaccaucgagaaggagaucugccccaagcccgccgaguaccgcaacugguccaagccccagugcgacaucaccggcuucgcccccuucuccaaggacaacuccauccgccucuccgccggcggcgacaucugggucacccgcgagcccuacgucuccugcgaccccgacaagugcuaccaguucgcccucggccagggcaccacccucaacaacguccacuccaacaacaccguccgcgaccgcacccccuaccgcacccuccucaugaacgagcucggcguccccuuccaccucggcaccaagcaggucugcaucgccugguccuccuccuccugccacgacggcaaggccuggcuccacgucugcaucaccggcgacgacaagaacgccaccgccuccuucaucuacaacggccgccucgucgacuccgucgucuccugguccaaggagauccuccgcacccaggaguccgagugcgucugcaucaacggcaccugcaccgucgucaugaccgacggcuccgccuccggcaaggccgacaccaagauccucuucaucgaggagggcaagaucguccacaccuccacccucuccggcuccgcccagcacgucgaggagugcuccugcuacccccgcuaccccggcguccgcugcgucugccgcgacaacuggaagggcuccaaccgccccaucgucgacaucaacaucaaggaccacuccaucgucuccuccuacgucugcuccggccucgucggcgacaccccccgcaagaacgacuccuccuccuccucccacugccucgaccccaacaacgaggagggcggccacggcgucaagggcugggccuucgacgacggcaacgacgucuggaugggccgcaccaucaacgagaccucccgccucggcuacgagaccuucaaggucaucgagggcugguccaaccccaaguccaagcuccagaucaaccgccaggucaucgucaaccgcuccgaccgcuccggcuacuccggcaucuucuccgucgagggcaaguccugcaucaaccgcugcuucuacgucgagcucauccgcggccgcaaggaggagaccgagguccucuggaccuccaacuccaucgucgucuucugcggcaccuccggcaccuacggcaccggcuccuggcccgacggcgccgaccucaaccucaugcccaucuga

SEQ ID NO: 119091 - RNA, 1410 nt, Artificial Sequence
  derived and/or modified CDS sequence (opt2) from neuraminidase__InfluenzaA__AFN19668
augaaccccaaccagaagaucaucaccaucggcuccgucucccucaccaucuccaccaucugcuucuucaugcagaucgccauccucaucaccaccgucacccuccacuucaagcaguacgaguucaacuccccccccaacaaccaggucaugcucugcgagcccaccaucaucgagcgcaacaugaccgagaucgucuaccucaccaacaccaccaucgagaaggagaucugccccaagcccgccgaguaccgcaacugguccaagccccagugcgacaucaccggcuucgcccccuucuccaaggacaacuccauccgccucuccgccggcggcgacaucugggucacccgcgagcccuacgucuccugcgaccccgacaagugcuaccaguucgcccucggccagggcaccacccucaacaacgagcacuccaacaacaccguccgcgaccgcacccccuaccgcacccuccucaugaacgagcucggcguccccuuccaccucggcaccaagcaggucugcaucgccugguccuccuccuccugccacgacggcaaggccuggcuccacgucugcaucaccggcgacgacaagaacgccaccgccuccuucaucuacaacggccgccucgucgacuccgucgucuccugguccaaggagauccuccgcacccaggaguccgagugcgucugcaucaacggcaccugcaccgucgucaugaccgacggcuccgccuccggcaaggccgacaccaagauccucuucaucgaggagggcaagaucguccacaccuccacccucuccggcuccgcccagcacgucgaggagugcuccugcuacccccgcuaccccggcguccgcugcgucugccgcgacaacuggaagggcuccaaccgccccaucgucgacaucaacaucaaggaccacuccaucgucuccuccuacgucugcuccggccucgucggcgacaccccccgcaagaacgacuccuccuccuccucccacugccucgaccccaacaacgaggagggcggccacggcgucaagggcugggccuucgacgacggcaacgacgucuggaugggccgcaccaucaacgagaccucccgccucggcuacgagaccuucaaggucaucgagggcugguccaaccccaaguccaagcuccagaucaaccgccaggucaucgucgaccgcuccgaccgcuccggcuacuccggcaucuucuccgucgagggcaaguccugcaucaaccgcugcuucuacgucgagcucauccgcggccgcaaggaggagaccgagguccucuggaccuccaacuccaucgucgucuucugcggcaccuccggcaccuacggcaccggcuccuggcccgacggcgccgaccucaaccucaugcccaucuga

SEQ ID NO: 119092 - RNA, 1410 nt, Artificial Sequence; identical to SEQ ID NO: 118994
  derived and/or modified CDS sequence (opt2) from neuraminidase__InfluenzaA__AFN19670

SEQ ID NO: 119093 - RNA, 1410 nt, Artificial Sequence; identical to SEQ ID NO: 118182
  derived and/or modified CDS sequence (opt2) from neuraminidase__InfluenzaA__AFN19673

SEQ ID NO: 119094 - RNA, 1410 nt, Artificial Sequence; identical to SEQ ID NO: 118958
  derived and/or modified CDS sequence (opt2) from neuraminidase__InfluenzaA__AFN19675

SEQ ID NO: 119095 - RNA, 1410 nt, Artificial Sequence
  derived and/or modified CDS sequence (opt2) from neuraminidase__InfluenzaA__AFN19677
augaaccccaaccagaagaucaucaccaucggcuccgucucccucaccaucuccaucaucugcuucuucaugcagaucgccauccucaucaccaccgucacccuccacuucaagcaguacgaguucaacuccccccccaacaaccaggucaugcucugcgagcccaccaucaucgagcgcaacaucaccgagaucgucuaccucaccaacaccaccaucgagaaggagaucugccccaagcccgccgaguaccgcaacugguccaagccccagugcgacaucaccggcuucgcccccuucuccaaggacaacuccauccgccucuccgccggcggcgacaucugggucacccgcgagcccuacgucuccugcgaccccgacaagugcuaccaguucgcccucggccagggcaccacccucaacaacguccacuccaacaacaccguccgcgaccgcacccccuaccgcacccuccucaugaacgagcucggcguccccuuccaccucggcaccaagcaggucugcaucgccugguccuccuccuccugccacgacggcaaggccuggcuccacgucugcaucaccggcgacgacaagaacgccaccgccuccuucaucuacaacggccgccucgucgacuccgucgucuccugguccaaggagauccuccgcacccaggaguccgagugcgucugcaucaacggcaccugcaccgucgucaugaccgacggcuccgccuccggcaaggccgacaccaagauccucuucaucgaggagggcaagaucguccacaccuccacccucuccggcuccgcccagcacgucgaggagugcuccugcuacccccgcuaccccggcguccgcugcgucugccgcgacaacuggaagggcuccaaccgccccaucgucgacaucaacaucaaggaccacuccaucgucuccuccuacgucugcuccggccucgucggcgacaccccccgcaagaacgacuccuccuccuccucccacugccucgaccccaacaacgaggagggcggccacggcgucaagggcugggccuucgacgacggcaacgacgucuggaugggccgcaccaucaacgagaccucccgccucggcuacgagaccuucaaggucaucgagggcugguccaaccccaaguccaagcuccagaucaaccgccaggucaucgucgaccgcggcgaccgcuccggcuacuccggcaucuucuccgucgagggcaaguccugcaucaaccgcugcuucuacgucgagcucauccgcggccgcaaggaggagaccgagguccucuggaccuccaacuccaucgucgucuucugcggcaccuccggcaccuacggcaccggcuccuggcccgacggcgccgaccucaaccucaugcccaucuga

SEQ ID NO: 119096 - RNA, 1410 nt, Artificial Sequence; identical to SEQ ID NO: 118994
  derived and/or modified CDS sequence (opt2) from neuraminidase__InfluenzaA__AFN19683

SEQ ID NO: 119097 - RNA, 1410 nt, Artificial Sequence; identical to SEQ ID NO: 118958
  derived and/or modified CDS sequence (opt2) from neuraminidase__InfluenzaA__AFN19685

SEQ ID NO: 119098 - RNA, 1410 nt, Artificial Sequence; identical to SEQ ID NO: 118958
  derived and/or modified CDS sequence (opt2) from neuraminidase__InfluenzaA__AFN19687

SEQ ID NO: 119099 - RNA, 1410 nt, Artificial Sequence; identical to SEQ ID NO: 118958
  derived and/or modified CDS sequence (opt2) from neuraminidase__InfluenzaA__AFN19689

SEQ ID NO: 119100 - RNA, 1410 nt, Artificial Sequence; identical to SEQ ID NO: 118182
  derived and/or modified CDS sequence (opt2) from neuraminidase__InfluenzaA__AFN19691

SEQ ID NO: 119101 - RNA, 1410 nt, Artificial Sequence
  derived and/or modified CDS sequence (opt2) from neuraminidase__InfluenzaA__AFN19693
augaaccccaaccagaagaucaucaccaucggcuccgucucccucaccaucuccaccaucugcuucuucaugcagaucgccauccucaucaccaccgucacccuccacuucaagcaguacgaguucaacuccccccccaacaaccaggucaugcucugcgagcccaccaucaucgagcgcaacaucaccgagaucgucuaccucaccaacaccaccaucgagaaggagaucugccccaagcucgccgaguaccgcaacugguccaagccccagugcgacaucaccggcuucgcccccuucuccaaggacaacuccauccgccucuccgccggcggcgacaucugggucacccgcgagcccuacgucuccugcgaccccgacaagugcuaccaguucgcccucggccagggcaccacccucaacaacguccacuccaacaacaccguccgcgaccgcacccccuaccgcacccuccucaugaacgagcucggcguccccuuccaccucggcaccaagcaggucugcaucgccugguccuccuccuccugccacgacggcaaggccuggcuccacgucugcaucaccggcgacgacaagaacgccaccgccuccuucaucuacaacggccgccucgucgacuccgucgucuccugguccaaggacauccuccgcacccaggaguccgagugcgucugcaucaacggcaccugcgccgucgucaugaccgacggcuccgccuccggcaaggccgacaccaagauccucuucaucgaggagggcaagaucguccacaccuccacccucuccggcuccgcccagcacgucgaggagugcuccugcuacccccgcuaccccggcguccgcugcgucugccgcgacaacuggaagggcuccaaccgccccaucgucgacaucaacaucaaggaccacuccaucgucuccuccuacgucugcuccggccucgucggcgacaccccccgcaagaacgacuccuccuccuccuccaacugccucgaccccaacaacgaggagggcggccacggcgucaagggcugggccuucgacgacggcaacgacgucuggaugggccgcaccaucaacgagaccucccgccucggcuacgagaccuucaaggucaucgagggcugguccaaccccaaguccaagcuccagaucaaccgccaggucaucgucgaccgcggcaaccgcuccggcuacuccggcaucuucuccgucgagggcaagaacugcaucaaccgcugcuucuacgucgagcucauccgcggccgcaaggaggagaccgagguccucuggaccuccaacuccaucgucgucuucugcggcaccuccggcaccuacggcaccggcuccuggcccgacggcgccgaccucaaccucaugcccaucuga

SEQ ID NO: 119102 - RNA, 1410 nt, Artificial Sequence
  derived and/or modified CDS sequence (opt2) from neuraminidase__InfluenzaA__AFN19697
augaaccccaaccagaagaucaucaccaucggcuccgucucccucaccaucuccaccaucugcuucuucaugcagaucgccauccucaucaccaccgucacccuccacuucaagcaguacgaguucaacuccccccccaacaaccaggucaugcucugcgagcccaccaucaucgagcgcaacaucaccgagaucgucuaccucaccaacaccaccaucgagaaggagaucugccccaagcccgccgaguaccgcaacugguccaagccccagugcggcaucaccggcuucgcccccuucuccaaggacaacuccauccgccucuccgccggcggcgacaucugggucacccgcgagcccuacgucuccugcgaccccgacaagugcuaccaguucgcccucggccagggcaccacccucaacaacguccacuccaacaacaccguccgcgaccgcacccccuaccgcacccuccucaugaacgagcucggcguccccuuccaccucggcaccaagcaggucugcaucgccugguccuccuccuccugccacgacggcaaggccuggcuccacgucugcaucaccggcgacgacaagaacgccaccgccuccuucaucuacaacggccgccucgucgacuccgucgucuccugguccaaggagacccuccgcacccaggaguccgagugcgucugcaucaacggcaccugcaccgucgucaugaccgacggcuccgccuccggcaaggccgacaccaagauccucuucaucgaggagggcaagaucguccacaccuccacccucuccggcuccgcccagcacgucgaggagugcuccugcuacccccgcuaccccggcguccgcugcgucugccgcgacaacuggaagggcuccaaccgccccaucgucgacaucaacaucaaggaccacuccaucgucuccuccuacgucugcuccggccucgucggcgacaccccccgcaagaacgacuccuccuccuccucccacugccucgaccccaacaacgaggagggcggccacggcgucaagggcugggccuucgacgacggcaacgacgucuggaugggccgcaccaucaacgagaccucccgccucggcuacgagaccuucaaggucaucgagggcugguccaaccccaaguccaagcuccagaucaaccgccaggucaucgucgaccgcggcgaccgcuccggcuacuccggcaucuucuccgucgagggcaaguccugcaucaaccgcugcuucuacgucgagcucauccgcggccgcaaggaggagaccgagguccucuggaccuccaacuccaucgucgucuucugcggcaccuccggcaccuacggcaccggcuccuggcccgacggcgccgaccucaaccucaugcccaucuga

SEQ ID NO: 119103 - RNA, 1410 nt, Artificial Sequence; identical to SEQ ID NO: 118958
  derived and/or modified CDS sequence (opt2) from neuraminidase__InfluenzaA__AFN19699

SEQ ID NO: 119104 - RNA, 1410 nt, Artificial Sequence; identical to SEQ ID NO: 118994
  derived and/or modified CDS sequence (opt2) from neuraminidase__InfluenzaA__AFN19701

SEQ ID NO: 119105 - RNA, 1410 nt, Artificial Sequence
  derived and/or modified CDS sequence (opt2) from neuraminidase__InfluenzaA__AFN19703
augaaccccaaccagaagaucaucaccaucggcuccgucucccucaccaucuccaccaucugcuucuucaugcagaucgccauccucaucaccaccgucacccuccacuucaagcaguacgaguucaacuccccccccaacaaccaggucaugcucugcgagcccaccaucaucgagcgcaacaucaccgagaucgucuaccucaccaacaccaccaucgagaaggagaucugccccaagcccgccgaguaccgcaacugguccaagccccagugcggcaucaccggcuucgcccccuucuccaaggacaacuccauccgccucuccgccggcggcgacaucugggucacccgcgagcccuacgucuccugcgaccccgacaagugcuaccaguucgcccucggccagggcaccacccucgacaacguccacuccaacaacaccguccgcgaccgcacccccuaccgcacccuccucaugaacgagcucggcguccccuuccaccucggcaccaagcaggucugcaucgccugguccuccuccuccugccacgacggcaaggccuggcuccacgucugcaucaccggcgacgacaagaacgccaccgccuccuucaucuacaacggccgccucgucgacuccgucgucuccugguccaaggagauccuccgcacccaggaguccgagugcgucugcaucaacggcaccugcaccgucgucaugaccgacggcuccgccuccggcaaggccgacaccaagauccucuucaucgaggagggcaagaucguccacaccuccacccucuccggcuccgcccagcacgucgaggagugcuccugcuacccccgcuaccccggcguccgcugcgucugccgcgacaacuggaagggcuccaaccgccccaucgucgacaucaacaucaaggaccacuccaucgucuccuccuacgucugcuccggccucgucggcgacaccccccgcaagaacgacuccuccuccuccucccacugccucgaccccaacaacgaggagggcggccacggcgucaagggcugggccuucgacgacggcaacgacgucuggaugggccgcaccaucaacgagaccucccgccucggcuacgagaccuucaaggucaucgagggcugguccaaccccaaguccaagcuccagaucaaccgccaggucaucgucgaccgcggcgaccgcuccggcuacuccggcaucuucuccgucgagggcaaguccugcaucaaccgcugcuucuacgucgagcucauccgcggccgcaaggaggagaccgagguccucuggaccuccaacuccaucgucgucuucugcggcaccuccggcaccuacggcaccggcuccuggcccgacggcgccgaccucaaccucaugcccaucuga

SEQ ID NO: 119106 - RNA, 1410 nt, Artificial Sequence; identical to SEQ ID NO: 116293
  derived and/or modified CDS sequence (opt2) from neuraminidase__InfluenzaA__AFN19711

SEQ ID NO: 119107 - RNA, 1410 nt, Artificial Sequence
  derived and/or modified CDS sequence (opt2) from neuraminidase__InfluenzaA__AFN19721
augaaccccaaccagaagaucaucaccaucggcuccgucugcaugaccaucggcauggccaaccucauccuccagaucggcaacaucaucuccaucuggaucucccacuccauccagcucggcaaccagucccagaucgagaccugcaaccaguccgucaucaccuacgagaacaacaccugggucaaccagaccuacgucaacaucuccaacaccaacuucgccgccggccaguccgucgucuccgucaagcucgccggcaacuccucccucugccccgucuccggcugggccaucuacuccaaggacaacuccauccgcaucggcuccaagggcgacgucuucgucauccgcgagcccuucaucuccugcucccccauggagugccgcaccuucuuccucacccagggcgcccuccucaacgacaagcacuccaacggcaccaucaaggaccgcucccccuaccgcacccucauguccugccccaucggcgagguccccucccccuacaacucccgcuucgaguccgucgccugguccgccuccgccugccacgacggcaucaacuggcucaccaucggcaucuccggccccgacaacggcgccgucgccguccucaaguacaacggcaucaucaccgacaccaucaaguccuggcgcaacaacauccuccgcacccaggaguccgagugcgccugcgucaacggcuccugcuucaccaucaugaccgacggccccuccgacggccaggccuccuacaagaucuuccgcaucgagaagggcaagaucgucaaguccgucgagaugaacgcccccaacuaccacuacgaggagugcuccugcuaccccgacuccuccgagaucaccugcgucugccgcgacaacuggcacggcuccaaccgccccugggucuccuucaaccagaaccucgaguaccagaucggcuacaucugcuccggcaucuucggcgacaacccccgccccaacgacaagaccggcuccugcggccccgucuccuccaacggcgccaacggcgucaagggcuucuccuucaaguacggcaacggcgucuggaucggccgcaccaaguccaucuccucccgcaagggcuucgagaugaucugggaccccaacggcuggaccggcaccgacaacaacuucuccaucaagcaggacaucgucggcaucaacgagugguccggcuacuccggcuccuucguccagcaccccgagcucaccggccucgacugcauccgccccugcuucugggucgagcucauccgcggccgccccaaggagaacaccaucuggaccuccggcuccuccaucuccuucugcggcgucaacuccgacaccgucggcugguccuggcccgacggcgccgagcuccccuucaccaucgacaaguga

SEQ ID NO: 119108 - RNA, 1410 nt, Artificial Sequence; identical to SEQ ID NO: 117114
  derived and/or modified CDS sequence (opt2) from neuraminidase__InfluenzaA__AFN19731

SEQ ID NO: 119109 - RNA, 1410 nt, Artificial Sequence; identical to SEQ ID NO: 116293
  derived and/or modified CDS sequence (opt2) from neuraminidase__InfluenzaA__AFN19737

SEQ ID NO: 119110 - RNA, 1410 nt, Artificial Sequence
  derived and/or modified CDS sequence (opt2) from neuraminidase__InfluenzaA__AFN19747
augaaccccaaccagaagaucaucaccaucggcuccgucugcaugaccaucggcauggccaaccucauccuccagaucggcaacaucaucuccaucuggaucucccacuccauccagcucggcaaccagaaccagaucgagaccugcaaccaguccgucaucacccacgagaacaacaccugggucaaccagaccuacgucaacaucuccaacaccaacuucgccgccggccaguccgucgucuccgucaagcucgccggcaacuccucccucugccccgucuccggcugggccaucuacuccaaggacaacuccauccgcaucggcuccaagggcgacgucuucgucauccgcgagcccuucaucuccugcuccccccucgagugccgcaccuucuuccucacccagggcgcccuccucaacgacaagcacuccaacggcaccaucaaggaccgcucccccuaccgcacccucauguccugccccaucggcgagguccccucccccuacaacucccgcuucgaguccgucgccugguccgccuccgccugccacgacggcaucaacuggcucaccaucggcaucuccggccccgacaacggcgccgucgccguccucaaguacaacggcaucaucaccgacaccaucaaguccuggcgcaacaacauccuccgcacccaggaguccgagugcgccugcgucaacggcuccugcuucaccgucaugaccgacggccccuccgacggccaggccuccuacaagaucuuccgcaucgagaagggcaagaucgucaaguccgucgagaugaacgcccccaacuaccacuacgaggagugcuccugcuaccccgacuccuccgagaucaccugcgucugccgcgacaacuggcacggcgccaaccgccccugggucuccuucaaccagaaccucgaguaccagaucggcuacaucugcuccggcaucuucggcgacaacccccgccccaacgacaagaccggcuccugcggccccgucuccuccaacggcgccaacggcgucaagggcuucuccuucaaguacggcaacggcgucuggaucggccgcaccaaguccaucuccucccgcaacggcuucgagaugaucugggaccccaacggcuggaccggcaccgacaacaacuucuccaucaagcaggacaucgucggcaucaacgagugguccggcuacuccggcuccuucguccagcaccccgagcucaccggccucgacugcauccgccccugcuucugggucgagcucauccgcggccgccccaaggagaacaccaucuggaccuccggcuccuccaucuccuucugcggcgucaacuccgacaccgucggcugguccuggcccgacggcgccgagcuccccuucaccaucgacaaguga

SEQ ID NO: 119111 - RNA, 1410 nt, Artificial Sequence; identical to SEQ ID NO: 116293
  derived and/or modified CDS sequence (opt2) from neuraminidase__InfluenzaA__AFN19749

SEQ ID NO: 119112 - RNA, 1410 nt, Artificial Sequence; identical to SEQ ID NO: 116293
  derived and/or modified CDS sequence (opt2) from neuraminidase__InfluenzaA__AFN19759

SEQ ID NO: 119113 - RNA, 1410 nt, Artificial Sequence
  derived and/or modified CDS sequence (opt2) from neuraminidase__InfluenzaA__AFN19769
augaaccccaaccagaagaucaucaccaucggcuccgucugcaugaccaucggcauggccaaccucauccuccagaucggcaacaucaucuccaucuggaucucccacuccauccagcucggcaaccagucccagaucgagaccugcaaccaguccgucaucaccuacgagaacaacaccugggucaaccagaccuacgucaacaucuccaacaccaacuucgccgccggccaguccgucgucuccgucaagcucgccggcaacuccucccucugccccgucuccggcugggccaucuacuccaaggacaacuccauccgcaucggcuccaagggcgacgucuucgucauccgcgagcccuucaucuccugcuccccccucgagugccgcaccuucuuccucacccagggcgcccuccucaacgacaagcacuccaacggcaccaucaaggaccgcucccccuaccgcacccucauguccugccccaucggcgagguccccucccccuacaacucccgcuucgaguccgucgccugguccgccuccgccugccacgacggcaucaacuggcucaccaucggcaucuccggccccgacaaccgcgccgucgccguccucaaguacaacggcaucaucaccgacaccaucaaguccuggcgcaacaacauccuccgcacccaggaguccgagugcgccugcgucaacggcuccugcuucaccaucaugaccgacggccccuccgacggccaggccuccuacaagaucuuccgcaucgagaagggcaagaucgucaaguccgucgagaugaacgcccccaacuaccacuacgaggagugcuccugcuaccccgacuccuccgagaucaccugcgucugccgcgacaacuggcacggcuccaaccgccccugggucuccuucaaccagaaccucgaguaccagaucggcuacaucugcuccggcaucuucggcgacaacccccgccccaacgacaagaccggcuccugcggccccgucuccuccaacggcgccaacggcgucaagggcuucuccuucaaguacggcaacggcgucuggaucggccgcaccaaguccaucuccucccgcaagggcuucgagaugaucugggaccccaacggcuggaccggcaccgacaacaacuucuccaucaagcaggacaucgucggcaucaacgagugguccggcuacuccggcuccuucguccagcaccccgagcucaccggccucgacugcauccgccccugcuucugggucgagcucauccgcggccgccccaaggagaacaccaucuggaccuccggcuccuccaucuccuucugcggcgucaacuccgacaccgucggcugguccuggcccgacggcgccgagcuccccuucaccaucgacaaguga

SEQ ID NO: 119114 - RNA, 1410 nt, Artificial Sequence; identical to SEQ ID NO: 116293
  derived and/or modified CDS sequence (opt2) from neuraminidase__InfluenzaA__AFN19783

SEQ ID NO: 119115 - RNA, 1410 nt, Artificial Sequence; identical to SEQ ID NO: 116994
  derived and/or modified CDS sequence (opt2) from neuraminidase__InfluenzaA__AFN19793

SEQ ID NO: 119116 - RNA, 1410 nt, Artificial Sequence; identical to SEQ ID NO: 116293
  derived and/or modified CDS sequence (opt2) from neuraminidase__InfluenzaA__AFN19807

SEQ ID NO: 119117 - RNA, 1410 nt, Artificial Sequence
  derived and/or modified CDS sequence (opt2) from neuraminidase__InfluenzaA__AFN19809
augaaccccaaccagaagaucaucaccaucggcuccgucugcaugaucaucggcauggccaaccucaugcuccagaucggcaacaucaucuccaucuggaucucccacuccauccagcucggcaaccagaaccagaucgagaccugcaaccaguccgucaucaccuacgagaacaacaccugggucaaccagaccuacgucaacaucuccaacaccaacuucgccgccggccaguccgucaucuccgucaagcucgccggcaacuccucccucugccccgucuccggcugggccaucuacuccaaggacaacuccauccgcaucggcuccaagggcgacgucuucgucauccgcgagcccuucaucuccugcuccccccucgagugccgcaccuucuuccucacccagggcgcccuccucaacgacaagcacuccaacggcaccaucaaggaccgcucccccuaccgcacccucauguccugccccaucggcgagguccccucccccuacaacucccgcuucgaguccgucgccugguccgccuccgccugccacgacggcaucaacuggcucaccaucggcaucuccggccccgacaacggcgccgucgccguccucaaguacaacggcaucaucaccgacaccaucaaguccuggcgcaacaacauccuccgcacccaggaguccgagugcgccugcgucaacggcuccugcuucaccgucaugaccgacggccccuccgacggccaggccuccuacaagaucuuccgcaucgagaagggcaagaucgucaaguccgucgagaugaacgcccccaacuaccacuacgaggagugcuccugcuaccccgacuccuccgagaucaccugcgucugccgcgacaacuggcacggcuccaaccgccccugggucuccuucaaccagaaccucgaguaccagaucggcuacaucugcuccggcaucuucggcgacaacccccgccccaacgacaagaccggcuccugcggccccgucuccaccaacggcgccaacggcgucaagggcuucuccuucaaguacggcaacggcgucuggaucggccgcaccaaguccaucuccucccgcaacggcuucgagaugaucugggaccccaacggcuggaccggcaccgacaacaaguucuccaucaagcaggacaucgucggcaucaacgagugguccggcuacuccggcuccuucguccagcaccccgagcucaccggccucgacugcauccgccccugcuucugggucgagcucauccgcggccgccccaaggagaacaccaucuggaccuccggcuccuccaucuccuucugcggcgucaacuccgacaccgucggcugguccuggcccgacggcgccgagcuccccuucaccaucgacaaguga

SEQ ID NO: 119118 - RNA, 1410 nt, Artificial Sequence; identical to SEQ ID NO: 117116
  derived and/or modified CDS sequence (opt2) from neuraminidase__InfluenzaA__AFN19815

SEQ ID NO: 119119 - RNA, 1410 nt, Artificial Sequence
  derived and/or modified CDS sequence (opt2) from neuraminidase__InfluenzaA__AFN19833
augaaccccaaccagaagaucaucaccaucggcuccgucugcaugaccaucggcauggccaaccucauccuccagaucggcaacaucaucuccaucuggaucucccacuccauccagcucggcaaccagucccagaucgagaccugcaaccaguccgucaucaccuacgagaacaacaccugggucaaccagaccuacgucaacaucuccaacaccaacuucgccgccggccaguccgucgucuccgucaagcucgccggcaacuccucccucugccccgucuccggcugggccaucuacuccaaggacaacuccauccgcaucggcuccaagggcgacgucuucgucauccgcgagcccuucaucuccugcuccccccucgagugccgcaccuucuuccucacccagggcgcccuccucaacgacaagcacuccaacggcaccaucaaggaccgcucccccuaccgcacccucauguccugccccaucggcgagguccccucccccuacaacucccgcuucgaguccgucgccugguccgccuccgccugccacgacggcaucaacuggcucaccaucggcaucuccggccccgacaacggcgccgucgccguccucaaguacaacggcaucaucaccgacaccaucaaguccuggaagaacaacauccuccgcacccaggaguccgagugcgccugcgucaacggcuccugcuucaccaucaugaccgacggccccuccgacggccaggccuccuacaagaucuuccgcaucgagaagggcaagaucgucaaguccgucgagaugaacgcccccaacuaccacuacgaggagugcuccugcuaccccgacuccuccgagaucaccugcgucugccgcgacaacuggcacggcuccaaccgccccugggucuccuucaaccagaaccucgaguaccagaucggcuacaucugcuccggcaucuucggcgacaacccccgccccaacgacaagaccggcuccugcggccccgucuccuccaacggcgccaacggcgucaagggcuucuccuucaaguacggcaacggcgucuggaucggccgcaccaaguccaucuccucccgcaagggcuucgagaugaucugggaccccaacggcuggaccggcaccgacaacaacuucuccaucaagcaggacaucgucggcaucaacgagugguccggcuacuccggcuccuucguccagcaccccgagcucaccggccucgacugcauccgccccugcuucugggucgagcucauccgcggccgccccaaggagaacaccaucuggaccuccggcuccuccaucuccuucugcggcgucaacuccgacaccgucggcugguccuggcccgacggcgccgagcuccccuucaccaucgacaaguga

SEQ ID NO: 119120 - RNA, 1410 nt, Artificial Sequence; identical to SEQ ID NO: 116752
  derived and/or modified CDS sequence (opt2) from neuraminidase__InfluenzaA__AFN19851

SEQ ID NO: 119121 - RNA, 1410 nt, Artificial Sequence; identical to SEQ ID NO: 116293
  derived and/or modified CDS sequence (opt2) from neuraminidase__InfluenzaA__AFN19857

SEQ ID NO: 119122 - RNA, 1410 nt, Artificial Sequence
  derived and/or modified CDS sequence (opt2) from neuraminidase__InfluenzaA__AFN19867
augaaccccaaccagaagaucaucaccaucggcuccgucugcaugaccaucggcauggccaaccucauccuccagaucggcaacaucaucuccaucuggaucucccacuccauccagaucggcaaccagaaccagaucgagaccugcaaccaguccgucaucaccuacgagaacaacaccugggucaaccagaccuacgucaacaucuccaacaccaacuucgccgccggccaguccgucgucuccgucaagcucgccggcaacuccucccucugccccgucuccggcugggccaucuacuccaaggacaacuccauccgcaucggcuccaagggcgacgucuucgucauccgcgagcccuucaucuccugcuccccccucgagugccgcaccuucuuccucacccagggcgcccuccucaacgacaagcacuccaacggcaccaucaaggaccgcucccccuaccgcacccucauguccugccccaucggcgagguccccucccccuacaacucccgcuucgaguccgucgccugguccgccuccgccugccacgacggcaucaacuggcucaccaucggcaucuccggccccgacaacggcgccgucgccguccucaaguacaacggcaucaucaccgacaccaucaaguccuggcgcaacaacauccuccgcacccaggaguccgagugcgccugcgucaacggcuccugcuucaccaucaucaccgacggccccuccgacggccaggccuccuacaagaucuuccgcaucgagaagggcaagaucgucaaguccgucgagaugaacgcccccaacuaccacuacgaggagugcuccugcuaccccgacuccuccgagaucaccugcgucugccgcgacaacuggcacggcuccaaccgccccugggucuccuucaaccagaaccucgaguaccagaucggcuacaucugcuccggcaucuucggcgacaacccccgccccaacgacaagaccggcuccugcggccccgucuccuccaacggcgccaacggcgucaagggcuucuccuucaaguacggcaacggcgucuggaucggccgcaccaaguccaucuccucccgcaagggcuucgagaugaucugggaccccaacggcuggaccggcaccgacaacaacuucuccaucaagcaggacaucgucggcaucaacgagugguccggcuacuccggcuccuucguccagcaccccgagcucaccggccucgacugcauccgccccugcuucugggucgagcucauccgcggccgccccaaggagaacaccaucuggaccuccggcuccuccaucuccuucugcggcgucaacuccgacaccgucggcugguccuggcccgacggcgccgagcuccccuucaccaucgacaaguga

SEQ ID NO: 119123 - RNA, 1410 nt, Artificial Sequence; identical to SEQ ID NO: 116745
  derived and/or modified CDS sequence (opt2) from neuraminidase__InfluenzaA__AFN19877

SEQ ID NO: 119124 - RNA, 1410 nt, Artificial Sequence; identical to SEQ ID NO: 116293
  derived and/or modified CDS sequence (opt2) from neuraminidase__InfluenzaA__AFN19887

SEQ ID NO: 119125 - RNA, 1410 nt, Artificial Sequence
  derived and/or modified CDS sequence (opt2) from neuraminidase__InfluenzaA__AFN19897
augaaccccaaccagaagaucaucaccaucggcuccgucugcaugaccaucggcauggccaaccucauccuccagaucggcaacaucaucuccaucuggaucucccacuccauccagcucggcaaccagucccagaucgagaccugcaaccaguccgucaucaccuacgagaacaacaccugggucaaccagaccuacgucaacaucuccaacaccaacuucgccgccggccaguccgucgucuccgucaagcucgccggcaacuccucccucugccccgucuccggcugggccaucuacuccaaggacaacuccauccgcaucggcuccaagggcgacgucuucgucauccgcgagcccuucaucuccugcuccccccucgagugccgcaccuucuuccucacccagggcgcccuccucaacgacaagcacuccaacggcaccaucaaggaccgcucccccuaccgcacccucauguccugccccaucggcgagguccccucccccugcaacucccgcuucgaguccgucgccugguccgccuccgccugccacgacggcaucaacuggcucaccaucggcaucuccggccccgacaacggcgccgucgccguccucaaguacaacggcaucaucaccgacaccaucaaguccuggcgcaacaacauccuccgcacccaggaguccgagugcgccugcgucaacggcuccugcuucaccaucaugaccgacggccccuccgacggccaggccuccuacaagaucuuccgcaucgagaagggcaagaucgucaaguccgucgagaugaacgcccccaacuaccacuacgaggagugcuccugcuaccccgacuccuccgagaucaccugcgucugccgcgacaacuggcacggcuccaaccgccccugggucuccuucaaccagaaccucgaguaccagaucggcuacaucugcuccggcaucuucggcgacaacccccgccccaacgacaagaccggcuccugcggccccgucuccuccaacggcgccaacggcgucaagggcuucuccuucaaguacggcaacggcgucuggaucggccgcaccaaguccaucuccucccgcaagggcuucgagaugaucugggaccccaacggcuggaccggcaccgacaacaacuucuccaucaagcaggacaucgucggcaucaacgagugguccggcuacuccggcuccuucguccagcaccccgagcucaccggccucgacugcauccgccccugcuucugggucgagcucauccgcggccgccccaaggagaacaccaucuggaccuccggcuccuccaucuccuucugcggcgucaacuccgacaccgucggcugguccuggcccgacggcgccgagcuccccuucaccaucgacaaguga

SEQ ID NO: 119126 - RNA, 1410 nt, Artificial Sequence; identical to SEQ ID NO: 116293
  derived and/or modified CDS sequence (opt2) from neuraminidase__InfluenzaA__AFN19907

SEQ ID NO: 119127 - RNA, 1410 nt, Artificial Sequence; identical to SEQ ID NO: 116752
  derived and/or modified CDS sequence (opt2) from neuraminidase__InfluenzaA__AFN19917

SEQ ID NO: 119128 - RNA, 1410 nt, Artificial Sequence
  derived and/or modified CDS sequence (opt2) from neuraminidase__InfluenzaA__AFN19923
augaaccccaaccagaagaucaucaccaucggcuccgucugcaugaccaucggcauggccaaccucauccuccagaucggcaacaucaucuccaucuggaucucccacuccauccagcucggcaaccagucccagaucgagaccugcaaccagaacgucaucaccuacgagaacaacaccugggucaaccagaccuacgucaacaucuccaacaccaacuucgccgccggccaguccgucgucuccgucaagcucgccggcaacuccucccucugccccgucuccggcugggccaucuacuccaaggacaacuccauccgcaucggcuccaagggcgacgucuucgucauccgcgagcccuucaucuccugcuccccccucgagugccgcaccuucuuccucacccagggcgcccuccucaacgacaagcacuccaacggcaccaucaaggaccgcucccccuaccgcacccucauguccugccccaucggcgagguccccucccccuacaacucccgcuucgaguccgucgccugguccgccuccgccugccacgacggcaucaacuggcucaccaucggcaucuccggccccgacaacggcgccgucgccguccucaaguacaacggcaucaucaccgacaccaucaaguccuggcgcaacaacauccuccgcacccaggaguccgagugcgccugcgucaacggcuccugcuucaccaucaugaccgacggccccuccgacggccaggccuccuacaagaucuuccgcaucgagaagggcaagaucgucaaguccgucgagaugaacgcccccaacuaccacuacgaggagugcuccugcuaccccgacuccuccgagaucaccugcgucugccgcgacaacuggcacggcuccaaccgccccugggucuccuucaaccagaaccucgaguaccagaucggcuacaucugcuccggcaucuucggcgacaacccccgccccaacgacaagaccggcuccugcggccccgucuccuccaacggcgccaacggcgucaagggcuucuccuucaaguacggcaacggcgucuggaucggccgcaccaaguccaucuccucccgcaagggcuucgagaugaucugggaccccaacggcuggaccggcaccgacaacaacuucuccaucaagcaggacaucgucggcaucaacgagugguccggcuacuccggcuccuucguccagcaccccgagcucaccggccucgacugcauccgccccugcuucugggucgagcucauccgcggccgccccaaggagaacaccaucuggaccuccggcuccuccaucuccuucugcggcgucaacuccgacaccgucggcugguccuggcccgacggcgccgagcuccccuucaccaucgacaaguga

SEQ ID NO: 119129 - RNA, 1410 nt, Artificial Sequence; identical to SEQ ID NO: 116293
  derived and/or modified CDS sequence (opt2) from neuraminidase__InfluenzaA__AFN19933

SEQ ID NO: 119130 - RNA, 1410 nt, Artificial Sequence; identical to SEQ ID NO: 116752
  derived and/or modified CDS sequence (opt2) from neuraminidase__InfluenzaA__AFN19943

SEQ ID NO: 119131 - RNA, 1410 nt, Artificial Sequence
  derived and/or modified CDS sequence (opt2) from neuraminidase__InfluenzaA__AFN19953
augaaccccaaccagaagaucaucaccaucggcuccgucugcaugaccaucggcauggccaaccucauccuccagaucggcaacaucaucuccaucuggaucucccacuccauccagcucggcaaccagucccagaucgagaccugcaaccagcgcgucaucaccuacgagaacaacaccugggucaaccagaccuacgucaacaucuccaacaccaacuucgccgccggccaguccgucgucuccgucaagcucgccggcaacuccucccucugccccgucuccggcugggccaucuacuccaaggacaacuccauccgcaucggcuccaagggcgacgucuucgucauccgcgagcccuucaucuccugcuccccccucgagugccgcaccuucuuccucacccagggcgcccuccucaacgacaagcacuccaacggcaccaucaaggaccgcucccccuaccgcacccucauguccugccccaucggcgagguccccucccccuacaacucccgcuucgaguccgucgccugguccgccuccgccugccacgacggcaucaacuggcucaccaucggcaucuccggccccgacaacggcgccgucgccguccucaaguacaacggcaucaucaccgacaccaucaaguccuggcgcaacaacauccuccgcacccaggaguccgagugcgccugcgucaacggcuccugcuucaccaucaugaccgacggccccuccgacggccaggccuccuacaagaucuuccgcaucgagaagggcaagaucgucaaguccgucgagaugaacgcccccaacuaccacuacgaggagugcuccugcuaccccgacuccuccgagaucaccugcgucugccgcgacaacuggcacggcuccaaccgccccugggucuccuucaaccagaaccucgaguaccagaucggcuacaucugcuccggcaucuucggcgacaacccccgccccaacgacaagaccggcuccugcggccccgucuccuccaacggcgccaacggcgucaagggcuucuccuucaaguacggcaacggcgucuggaucggccgcaccaaguccaucuccucccgcaagggcuucgagaugaucugggaccccaacggcuggaccggcaccgacaacaacuucuccaucaagcaggacaucgucgagaucaacgagugguccggcuacuccggcuccuucguccagcaccccgagcucaccggccucgacugcauccgccccugcuucugggucgagcucauccgcggccgccccaaggagaacaccaucuggaccuccggcuccuccaucuccuucugcggcgucaacuccgacaccgucggcugguccuggcccgacggcgccgagcuccccuucaccaucgacaaguga

SEQ ID NO: 119132 - RNA, 1410 nt, Artificial Sequence
  derived and/or modified CDS sequence (opt2) from neuraminidase__InfluenzaA__AFN19967
augaaccccaaccagaagaucaucaccaucggcuccgucugcaugaccaucggcauggccaaccucauccuccagaucggcaacaucaucuccaucuggaucucccacuccauccagcucggcaaccagucccagaucgagaccugcaaccaguccgucaucaccuacgagaacaacaccugggucaaccagaccuacgucaacaucuccaacaccaacuucgccgccggccaguccgucgucuccgucaagcucgccggcaacuccucccucugccccgucuccggcugggccaucuacuccaaggacaacuccauccgcaucggcuccaagggcgacgucuucgucauccgcgagcccuucaucuccugcuccccccucgagugccgcaccuucuuccucacccagggcgcccuccucaacgacaagcacuccaacggcaccaucaaggaccgcucccccuaccgcacccucauguccugccccaucggcgagguccccucccccuacaacucccgcuucgaguccgucgccugguccgccuccgccugccacgacggcaucaacuggcucaccaucggcaucuccggccccgacaacggcgccgucgccguccucaaguacaacggcaucaucaccgacaccaucaaguccuggcgcuccaacauccuccgcacccaggaguccgagugcgccugcgucaacggcuccugcuucaccaucaugaccgacggccccuccgacggccaggccuccuacaagaucuuccgcaucgagaagggcaagaucgucaaguccgucgagaugaacgcccccaacuaccacuacgaggagugcuccugcuaccccgacuccuccgagaucaccugcgucugccgcgacaacuggcacggcuccaaccgccccugggucuccuucaaccagaaccucgaguaccagaucggcuacaucugcuccggcaucuucggcgacaacccccgccccaacgacaagaccggcuccugcggccccgucuccuccaacggcgccaacggcgucaagggcuucuccuucaaguacggcaacggcgucuggaucggccgcaccaaguccaucuccucccgcaagggcuucgagaugaucugggaccccaacggcuggaccggcaccgacaacaacuucuccaucaagcaggacaucgucggcaucaacgagugguccggcuacuccggcuccuucguccagcaccccgagcucaccggccucgacugcauccgccccugcuucugggucgagcucauccgcggccgccccaaggagaacaccaucuggaccuccggcuccuccaucuccuucugcggcgucaacuccgacaccgucggcugguccuggcccgacggcgccgagcuccccuucaccaucgacaaguga

SEQ ID NO: 119133 - RNA, 1410 nt, Artificial Sequence
  derived and/or modified CDS sequence (opt2) from neuraminidase__InfluenzaA__AFN19973
augaaccccaaccagaagaucaucaccaucggcuccgucugcaugaccaucggcauggccaaccucauccuccagaucggcaacaucaucuccaucuggaucucccacuccauccagcucggcaaccagucccagaucgagaccugcaaccaguccgucaucaccuacgagaacaacaccugggucaaccagaccuacgucaacaucuccaacaccaacuucgccgccggccaguccgucgucuccgucaagcucgccggcaacuccucccucugccccgucuccggcugggccaucuacuccaaggacaacuccauccgcaucggcuccaagggcgacgucuucgucauccgcgagcccuucaucuccugcuccccccucgagugccgcaccuucuuccucacccagggcgcccuccucaacgacaagcacuccaacggcaccaucaaggaccgcucccccuaccgcacccucauguccugccccaucggcgagguccccucccccuacaacucccgcuucgaguccgucgccugguccgccuccgccugccacgacggcaucaacuggcucaccaucggcaucuccggccccgacaacggcgccgucgccguccucaaguacaacggcaucaucaccgacaccaucaaguccuggcgcaacaacauccuccgcacccaggaguccgagugcgccugcgucaacggcuccugcuucaccaucaugaccgacggcuccuccgacggccaggccuccuacaagaucuuccgcaucgagaagggcaagaucgucaaguccgucgagaugaacgcccccaacuaccacuacgaggagugcuccugcuaccccgacuccuccgagaucaccugcgucugccgcgacaacuggcacggcuccaaccgccccugggucuccuucaaccagaaccucgaguaccagaucggcuacaucugcuccggcaucuucggcgacaacccccgccccaacgacaagaccggcuccugcggccccgucuccuccaacggcgccaacggcgucaagggcuucuccuucaaguacggcaacggcgucuggaucggccgcaccaaguccaucuccucccgcaagggcuucgagaugaucugggaccccaacggcuggaccggcaccgacaacaacuucuccaucaagcaggacaucgucggcaucaacgagugguccggcuacuccggcuccuucguccagcaccccgagcucaccggccucgacugcauccgccccugcuucugggucgagcucauccgcggccgccccaaggagaacaccaucuggaccuccggcuccuccaucuccuucugcggcgucaacuccgacaccgucggcugguccuggcccgacggcgccgagcuccccuucaccaucgacaaguga

SEQ ID NO: 119134 - RNA, 1410 nt, Artificial Sequence; identical to SEQ ID NO: 116293
  derived and/or modified CDS sequence (opt2) from neuraminidase__InfluenzaA__AFN19979

SEQ ID NO: 119135 - RNA, 1410 nt, Artificial Sequence
  derived and/or modified CDS sequence (opt2) from neuraminidase__InfluenzaA__AFN19985
augaaccccaaccagaagaucaucaccaucggcuccgucugcaugaccaucggcauggccaaccucauccuccagaucggcaacaucaucuccaucuggaucucccacuccauccagcucggcaaccagucccagaucgagaccugcaaccaguccgucaucaccuacgagaacaacaccugggucaaccagaccuacgucaacaucuccaacaccaacuucgccgccggccaguccgucgucuccgucaagcucgccggcaacuccucccucugccccgucuccggcugggccaucuacuccaaggacaacuccauccgcaucggcuccaagggcgacgucuucgucauccgcgagcccuucaucuccugcuccccccucgagugccgcaccuucuuccucacccagggcgcccuccucaacgacaagcacuccaacggcaccaucaaggaccgcucccccuaccgcacccucauguccugccccaucggcgagguccccucccccuacaacucccgcuucgaguccgucgccugguccgccuccgccugccacgacggcaucaacuggcucaccaucggcaucuccggccccgacaacggcgccgucgccguccucaaguacaacggcaucaucaccgacaccaucaaguccuggcgcaacaacauccuccgcacccaggaguccgagugcgccugcgucaacggcuccugcuucaccaucaugaccgacggccccuccgacggccaggccuccuacaagaucuuccgcaucgagaagggcaagaucgucaaguccgucgagaugaacgcccccaacuaccacuacgaggagugcuccugcuaccccgacuccuccgagaucaccugcgucugccgcgacaacuggcacggcuccaaccgccccugggucuccuucaaccagaaccucgaguaccagaucggcuacaucugcuccggcaucuucggcgacaacccccgccccaacgacaagaccggcuccugcggccccgucuccuccaacggcgccaacggcgucaagggcuucuccuucaaguacggcaacggcgucuggaucggccgcaccaaguccgucuccucccgcaagggcuucgagaugaucugggaccccaacggcuggaccggcaccgacaacaacuucuccaucaagcaggacaucgucggcaucaacgagugguccggcuacuccggcuccuucguccagcaccccgagcucaccggccucgacugcauccgccccugcuucugggucgagcucauccgcggccgccccaaggagaacaccaucuggaccuccggcuccuccaucuccuucugcggcgucaacuccgacaccgucggcugguccuggcccgacggcgccgagcuccccuucaccaucgacaaguga

SEQ ID NO: 119136 - RNA, 1410 nt, Artificial Sequence
  derived and/or modified CDS sequence (opt2) from neuraminidase__InfluenzaA__AFN19995
augaaccccaaccagaagaucaucaccaucggcuccgucugcaugaccaucggcauggccaaccucauccuccagaucggcaacaucaucuccaucuggaucucccacuccauccagcucggcaaccagucccagaccgagaccugcaaccaguccgucaucaccuacgagaacaacaccugggucaaccagaccuacgucaacaucuccaacaccaacuucgccgccggccaguccgucgucuccgucaagcucgccggcaacuccucccucugccccgucuccggcugggccaucuacuccaaggacaacuccauccgcaucggcuccaagggcgacgucuucgucauccgcgagcccuucaucuccugcuccccccucgagugccgcaccuucuuccucacccagggcgcccuccucaacgacaagcacuccaacggcaccaucaaggaccgcucccccuaccgcacccucauguccugccccaucggcgagguccccucccccuacaacucccgcuucgaguccgucgccugguccgccuccgccugccacgacggcaucaacuggcucaccaucggcaucuccggccccgacaacggcgccgucgccguccucaaguacaacggcaucaucaccgacaccaucaaguccuggcgcaacaacauccuccgcacccaggaguccgagugcgccugcgucaacggcuccugcuucaccaucaugaccgacggccccuccgacggccaggccuccuacaagaucuuccgcaucgagaagggcaagaucgucaaguccgucgagaugaacgcccccaacuaccacuacgaggagugcuccugcuaccccgacuccuccgagaucaccugcgucugccgcgacaacuggcacggcuccaaccgccccugggucuccuucaaccagaaccucgaguaccagaucggcuacaucugcuccggcaucuucggcgacaacccccgccccaacgacaagaccggcuccugcggccccgucuccuccaacggcgccaacggcgucaagggcuucuccuucaaguacggcaacggcgucuggaucggccgcaccaaguccaucuccucccgcaagggcuucgagaugaucugggaccccaacggcuggaccggcaccgacaacaacuucuccaucaagcaggacaucgucggcaucaacgagugguccggcuacuccggcuccuucguccagcaccccgagcucaccggccucgacugcauccgccccugcuucugggucgagcucauccgcggccgccccaaggagaacaccaucuggaccuccggcuccuccaucuccuucugcggcgucaacuccgacaccgucggcugguccuggcccgacggcgccgagcuccccuucaccaucgacaaguga

SEQ ID NO: 119137 - RNA, 1410 nt, Artificial Sequence; identical to SEQ ID NO: 116293
  derived and/or modified CDS sequence (opt2) from neuraminidase__InfluenzaA__AFN20001

SEQ ID NO: 119138 - RNA, 1410 nt, Artificial Sequence
  derived and/or modified CDS sequence (opt2) from neuraminidase__InfluenzaA__AFN20013
augaaccccaaccagaagaucaucaccaucggcuccgucugcaugaccaucggcauggccaaccucauccuccagaucggcaacaucaucuccaucuggaucucccacuccauccagcucggcaaccagucccagaucgagaccugcaaccaguccgucaucaccuacgagaacaacaccugggucaaccagaccuacgucaacaucuccaacaccaacuucgccgccggccaguccgucgucuccgucaagcucgccggcaacuccucccucugccccgucuccggcugggccaucuacuccaaggacaacuccauccgcaucggcuccaagggcgacgucuucgucauccgcgagcccuucaucuccugcuccccccucgagugccgcaccuucuuccucacccagggcgcccuccucaacgacaagcacuccaacggcaccaucaaggaccgcucccccuaccgcacccucauguccugccccaucggcgagguccccucccccuacaacucccgcuucgaguccgucgccugguccgccuccgccugccacgacggcaucaacuggcucaccaucggcaucuccggccccgacaacggcgccgucgccguccucaaguacaacggcaucaucaccgacaccaucaaguccuggcgcaacaacauccuccgcacccaggaguccgagugcgccugcgucaacggcuccugcuucaccaucaugaccgacggccccuccgacggccaggccuccuacaagaucuuccgcaucgagaagggcaagaucgucaaguccgucgagaugaacgcccccaacuaccacuacgaggagugcuccugcuaccccgacuccuccgagaucaccugcgucugccgcgacaacuggcacggcuccaaccgccccugggucuccuucaaccagaaccucgaguaccagaucggcuacaucugcuccggcaucuucggcgacaacccccgccccaacgacaagaccggcuccugcgaccccgucuccuccaacggcgccaacggcgucaagggcuucuccuucaaguacggcaacggcgucuggaucggccgcaccaaguccaucuccucccgcaagggcuucgagaugaucugggaccccaacggcuggaccggcaccgacaacaacuucuccaucaagcaggacaucgucggcaucaacgagugguccggcuacuccggcuccuucguccagcaccccgagcucaccggccucgacugcauccgccccugcuucugggucgagcucauccgcggccgccccaaggagaacaccaucuggaccuccggcuccuccaucuccuucugcggcgucaacuccgacaccgucggcugguccuggcccgacggcgccgagcuccccuucaccaucgacaaguga

SEQ ID NO: 119139 - RNA, 1410 nt, Artificial Sequence
  derived and/or modified CDS sequence (opt2) from neuraminidase__InfluenzaA__AFN20020
augaaccccaaccagaagaucaucaccaucggcuccgucugcaugaccaucggcauggccaaccucauccuccagaucggcaacaucaucuccaucuggaucucccacuccauccagcucggcaaccagucccagaucgagaccugcaaccaguccgucaucaccuacgagaacaacaccugggucaaccagaccuacgucaacaucuccaacaccaacuucgccgccggccaguccgucgucuccgucaagcucgccggcaacuccucccucugccccgucuccggcugggccaucuacuccaaggacaacuccauccgcaucggcuccaagggcgacgucuucgucauccgcgagcccuucaucuccugcuccccccucgagugccgcaccuucuuccucacccagggcgcccuccucaacgacaagcacuccaacggcaccaucaaggaccgcucccccuaccgcacccucauguccugccccaucggcgagguccccucccccuacaacucccgcuucgaguccgucgccugguccgccuccgccugccacgacggcaucaacuggcucaccaucggcaucuccggccccgacaacggcgccgucgccguccucaaguacaacggcaucaucaccgacaccaucaaguccuggcgcaacaacauccuccgcacccaggaguccgagugcgccugcgucaacggcuccugcuucaccaucaugaccgacggccccuccgacggccaggccuccuacaagaucuuccgcaucgagaagggcaagaucgucaaguccgucgagaugaacgcccccaacuaccacuacgaggagugcuccugcuaccccgacuccuccgagaucaccugcgucugccgcgacaacuggcacggcuccaaccgccccugggucuccuucaaccagaaccucgaguaccagaucggcuacaucugcuccggcaucuucggcgacaacccccgccccaacgacaagaccggcuccugcggccccgucuccuccaacggcgccaacggcgucaagggcuucuccuucaaguacggcaacggcgucuggaucggccgcaccaaguccaucuccucccgcaagggcuucgagaugaucugggaccccaacggcuggaccggcaccgacaacaacuucuccaucaagcaggacaucgucggccucaacgagugguccggcuacuccggcuccuucguccagcaccccgagcucaccggccucgacugcauccgccccugcuucugggucgagcucauccgcggccgccccaaggagaacaccaucuggaccuccggcuccuccaucuccuucugcggcgucaacuccgacaccgucggcugguccuggcccgacggcgccgagcuccccuucaccaucgacaaguga

SEQ ID NO: 119140 - RNA, 1410 nt, Artificial Sequence; identical to SEQ ID NO: 116293
  derived and/or modified CDS sequence (opt2) from neuraminidase__InfluenzaA__AFN20022

SEQ ID NO: 119141 - RNA, 1410 nt, Artificial Sequence
  derived and/or modified CDS sequence (opt2) from neuraminidase__InfluenzaA__AFN20035
augaaccccaaccagaagaucaucaccaucggcuccgucugcaugaccaucggcaucgccaaccucauccuccagaucggcaacaucaucuccaucuggaucucccacuccauccagcucggcaaccagucccagaucgagaccugcaaccaguccgucaucaccuacgagaacaacaccugggucaaccagaccuacgucaacaucuccaacaccaacuucgccgccggccaguccgucgucuccgucaagcucgccggcaacuccucccucugccccgucuccggcugggccaucuacuccaaggacaacuccauccgcaucggcuccaagggcgacgucuucgucauccgcgagcccuucaucuccugcuccccccucgagugccgcaccuucuuccucacccagggcgcccuccucaacgacaagcacuccaacggcaccaucaaggaccgcucccccuaccgcacccucauguccugccccaucggcgagguccccucccccuacaacucccgcuucgaguccgucgccugguccgccuccgccugccacgacggcaucaacuggcucaccaucggcaucuccggccccgacaacggcgccgucgccguccucaaguacaacggcaucaucaccgacaccaucaaguccuggcgcaacaacauccuccgcacccaggaguccgagugcgccugcgucaacggcuccugcuucaccaucaugaccgacggccccuccgacggccaggccuccuacaagaucuuccgcaucgagaagggcaagaucgucaaguccgucgagaugaacgcccccaacuaccacuacgaggagugcuccugcuaccccgacuccuccgagaucaccugcgucugccgcgacaacuggcacggcuccaaccgccccugggucuccuucaaccagaaccucgaguaccagaucggcuacaucugcuccggcaucuucggcgacaacccccgccccaacgacaagaccggcuccugcggccccgucuccuccaacggcgccaacggcgucaagggcuucuccuucaaguacggcaacggcgucuggaucggccgcaccaaguccaucuccucccgcaagggcuucgagaugaucugggaccccaacggcuggaccggcaccgacaacaacuucuccaucaagcaggacaucgucggcaucaacgagugguccggcuacuccggcuccuucguccagcaccccgagcucaccggccucgacugcauccgccccugcuucugggucgagcucauccgcggccgccccaaggagaacaccaucuggaccuccggcuccuccaucuccuucugcggcgucaacuccgacaccgucggcugguccuggcccgacggcgccgagcuccccuucaccaucgacaaguga

SEQ ID NO: 119142 - RNA, 1410 nt, Artificial Sequence; identical to SEQ ID NO: 116293
  derived and/or modified CDS sequence (opt2) from neuraminidase__InfluenzaA__AFN20041

SEQ ID NO: 119143 - RNA, 1410 nt, Artificial Sequence; identical to SEQ ID NO: 116293
  derived and/or modified CDS sequence (opt2) from neuraminidase__InfluenzaA__AFN20047

SEQ ID NO: 119144 - RNA, 1410 nt, Artificial Sequence; identical to SEQ ID NO: 117116
  derived and/or modified CDS sequence (opt2) from neuraminidase__InfluenzaA__AFN20063

SEQ ID NO: 119145 - RNA, 1410 nt, Artificial Sequence
  derived and/or modified CDS sequence (opt2) from neuraminidase__InfluenzaA__AFN20077
augaaccccaaccagaagaucaucaccaucggcuccgucugcaugaccaucggcauggccaaccucauccuccagaucggcaacaucaucuccaucuggaucucccacuccauccagcucggcaaccagucccagaucgagaccugcaaccaguccgucaucaccuacgagaacaacaccugggucaaccagaccuacgucaacaucuccaacaccaacuucgccgccggccaguccgucgucuccgucaagcucgccggcaacuccucccucugccccgucuccggcugggccaucuacuccaaggacaacuccauccgcaucggcuccaagggcgacgucuucgucauccgcgagcccuucaucuccugcuccccccucgagugccgcaccuucuuccucacccagggcgcccuccucaacgacaagcacuccaacggcaccaucaaggaccgcucccccuaccgcacccucauguccugccccaucggcgagguccccucccccuacaacucccgcuucgaguccgucgccugguccgccuccgccugccacgacggcaucaacuggcucaccaucggcaucuccggccccgacaacggcgccgucgccguccucaaguacaacggcaucaucaccgacaccaucaaguccuggcgcaacaacauccuccgcacccaggaguccgagugcgccugcgucaacggcuccugcuucaccaucaugaccgacggccccuccgacggccaggccuccuacaagaucuucaagaucgagaagggcaagaucgucaaguccgucgagaugaacgcccccaacuaccacuacgaggagugcuccugcuaccccgacuccuccgagaucaccugcgucugccgcgacaacuggcacggcuccaaccgccccugggucuccuucaaccagaaccucgaguaccagaucggcuacaucugcuccggcaucuucggcgacaacccccgccccaacgacaagaccggcuccugcggccccgucuccuccaacggcgccaacggcgucaagggcuucuccuucaaguacggcaacggcgucuggaucggccgcaccaaguccaucuccucccgcaagggcuucgagaugaucugggaccccaacggcuggaccggcaccgacaacaacuucuccaucaagcaggacaucgucggcaucaacgagugguccggcuacuccggcuccuucguccagcaccccgagcucaccggccucgacugcauccgccccugcuucugggucgagcucauccgcggccgccccaaggagaacaccaucuggaccuccggcuccuccaucuccuucugcggcgucaacuccgacaccgucggcugguccuggcccgacggcgccgagcuccccuucaccaucgacaaguga

SEQ ID NO: 119146 - RNA, 1410 nt, Artificial Sequence; identical to SEQ ID NO: 116293
  derived and/or modified CDS sequence (opt2) from neuraminidase__InfluenzaA__AFN20083

SEQ ID NO: 119147 - RNA, 1410 nt, Artificial Sequence
  derived and/or modified CDS sequence (opt2) from neuraminidase__InfluenzaA__AFN20094
augaaccccaaccagaagaucaucaccaucggcuccgucugcaugaccaucggcauggccaaccucauccuccagaucggcaacaucaucuccaucuggaucucccacuccauccagcucggcaaccagucccagaucgagaccugcaaccaguccgucaucaucuacgagaacaacaccugggucaaccagaccuacgucaacaucuccaacaccaacuucgccgccggccaguccgucgucuccgucaagcucgccggcaacuccucccucugccccgucuccggcugggccaucuacuccaaggacaacuccauccgcaucggcuccaagggcgacgucuucgucauccgcgagcccuucaucuccugcuccccccucgagugccgcaccuucuuccucacccagggcgcccuccucaacgacaagcacuccaacggcaccaucaaggaccgcucccccuaccgcacccucauguccugccccaucggcgagguccccucccccuacaacucccgcuucgaguccgucgccugguccgccuccgccugccacgacggcaucaacuggcucaccaucggcaucuccggccccgacaacggcgccgucgccguccucaaguacaacggcaucaucaccgacaccaucaaguccuggcgcaacaacauccuccgcacccaggaguccgagugcgccugcgucaacggcuccugcuucaccaucaugaccgacggccccuccgacggccaggccuccuacaagaucuuccgcaucgagaagggcaagaucgucaaguccgucgagaugaacgcccccaacuaccacuacgaggagugcuccugcuaccccgacuccuccgagaucaccugcgucugccgcgacaacuggcacggcuccaaccgccccugggucuccuucaaccagaaccucgaguaccagaucggcuacaucugcuccggcaucuucggcgacaacccccgccccaacgacaaggccggcuccugcggccccgucuccuccaacggcgccaacggcgucaagggcuucuccuucaaguacggcaacggcgucuggaucggccgcaccaaguccaucuccucccgcaagggcuucgagaugaucugggaccccaacggcuggaccggcaccgacaacaacuucuccaucaagcaggacaucgucggcaucaacgagugguccggcuacuccggcuccuucguccagcaccccgagcucaccggccucgacugcauccgccccugcuucugggucgagcucauccgcggccgccccaaggagaacaccaucuggaccuccggcuccuccaucuccuucugcggcgucaacuccgacaccaugggcugguccuggcccgacggcgccgagcuccccuucaccaucgacaaguga

SEQ ID NO: 119148 - RNA, 1410 nt, Artificial Sequence; identical to SEQ ID NO: 116752
  derived and/or modified CDS sequence (opt2) from neuraminidase__InfluenzaA__AFN20100

SEQ ID NO: 119149 - RNA, 1410 nt, Artificial Sequence
  derived and/or modified CDS sequence (opt2) from neuraminidase__InfluenzaA__AFN20114
augaaccccaaccagaagaucaucaccaucggcuccgucugcaugaccaucggcauggccaaccucauccuccagaucggcaacaucaucuccaucuggaucucccacuccauccagcucggcaaccagaaccagaucgagaccugcaaccaguccgucaucaccuacgagaacaacaccugggucaaccagaccuacgucaacaucuccaacaccaacuucgccgccggccaguccgucgucuccgucaagcucgccggcaacuccucccucugccccgucuccggcugggccaucuacuccaaggacaacuccauccgcaucggcuccaagggcgacgucuucgucauccgcgagcccuucaucuccugcuccccccucgagugccgcaccuucuuccucacccagggcgcccuccucaacgacaagcacuccaacggcaccaucaaggaccgcucccccuaccgcacccucauguccugccccaucggcgagguccccucccccuacaacucccgcuucgaguccgucgccugguccgccuccgccugccacgacggcaucaacuggcucaccaucggcaucuccggccccgacaacggcgccgucgccguccucaaguacaacggcaucaucaccgacaccaucaaguccuggcgcaacaacauccuccgcacccaggaguccgagugcgccugcgucaacggcuccugcuucaccgucaugaccgacggccccuccgacggccaggccuccuacaagaucuucaagaucgagaagggcaagaucgucaaguccgucgagaugaacgcccccaacuaccacuacgaggagugcuccugcuaccccgacuccuccgagaucaccugcgucugccgcgacaacuggcacggcuccaaccgccccugggucuccuucaaccagaaccucgaguaccagaucggcuacaucugcuccggcaucuucggcgacaacccccgccccaacgacaagaccggcuccugcucccccgucuccuccaacggcgccaacggcgucaagggcuucuccuucaaguacggcaacggcgucuggaucggccgcaccaaguccaccuccucccgcaacggcuucgagaugaucugggaccccaacggcuggaccggcaccgacaacuccuucuccaugaagcaggacaucgucggcaucaacgagugguccggcuacuccggcuccuucguccagcaccccgagcucaccggccucgacugcauccgccccugcuucugggucgagcucauccgcggccgccccaaggagaacaccgucuggaccuccggcuccuccaucuccuucugcggcgucaacuccgacaccgucggcugguccuggcccgacggcgccgagcuccccuucaccaucgacaaguga

SEQ ID NO: 119150 - RNA, 1410 nt, Artificial Sequence
  derived and/or modified CDS sequence (opt2) from neuraminidase__InfluenzaA__AFN20128
augaaccccaaccagaagaucaucaccaucggcuccgucugcaugaccaucggcauggccaaccucauccuccagaucggcaacaucaucuccaucuggaucucccacuccauccagcucggcaaccagucccagaucgagaccugcaaccaguccgucaucaccuacgagaacaacaccugggucaaccagaccuacgucaacaucuccaacaccaacuucgccgccggccaguccgucgucuccgucaagcucgccggcaacuccucccucugccccgucuccggcugggccaucuacuccaaggacaacuccauccgcaucggcuccaagggcgacgucuucgucauccgcgagcccuucaucuccugcuccccccucgagugccgcaccuucuuccucacccagggcgcccuccucaacgacaagcacuccaacggcaccaucaaggaccgcucccccuaccgcacccucauguccugccccaucggcgagguccccucccccuacaacucccgcuucgaguccgucgccugguccgccuccgccugccacgacggcaucaacuggcucaccaucggcaucuccggccccgacaacggcgccgucgccguccucaaguacaacggcaucaucaccgacaccauccgcuccuggcgcaacaacauccuccgcacccaggaguccgagugcgccugcgucaacggcuccugcuucaccaucaugaccgacggccccuccgacggccaggccuccuacaagaucuuccgcaucgagaagggcaagaucaucaaguccgucgagaugaacgcccccaacuaccacuacgaggagugcuccugcuaccccgacuccuccgagaucaccugcgucugccgcgacaacuggcacggcuccaaccgccccugggucuccuucaaccagaaccucgaguaccagaucggcuacaucugcuccggcaucuucggcgacaacccccgcuccaacgacaagaccggcuccugcggccccgucuccuccaacggcgccaacggcgucaagggcuucuccuucaaguacggcaacggcgucuggaucggccgcaccaaguccaucuccucccgcaagggcuucgagaugaucugggaccccaacggcuggaccggcaccgacaacaacuucuccaucaagcaggacaucgucggcaucaacgagugguccggcuacuccggcuccuucguccagcaccccgagcucaccggccucgacugcauccgccccugcuucugggucgagcucauccgcggccgccccaaggagaacaccaucuggaccuccggcuccuccaucuccuucugcggcgucaacuccgacaccgucggcugguccuggcccgacggcgccgagcuccccuucaccaucgacaaguga

SEQ ID NO: 119151 - RNA, 1410 nt, Artificial Sequence; identical to SEQ ID NO: 116293
  derived and/or modified CDS sequence (opt2) from neuraminidase__InfluenzaA__AFN87935

SEQ ID NO: 119152 - RNA, 1410 nt, Artificial Sequence
  derived and/or modified CDS sequence (opt2) from neuraminidase__InfluenzaA__AFN87937
augaaccccaaccagaagaucaucaccaucggcuccgucugcaugaccaucggcauggccaaccucauccuccagaucggcaacaucaucuccaucuggaucucccacuccauccagcucggcaaccagaaccagaucgagaccugcaaccaguccgucaucaccuacgagaacaacaccugggucaaccagaccuacgucaacaucuccaacaccaacuucgccgccggccaguccgucgucuccgucaagcucgccggcaacuccucccucugccccgucuccggcugggccaucuacuccaaggacaacuccauccgcaucggcuccaagggcgacgucuucgucauccgcgagcccuucaucuccugcuccccccucgagugccgcaccuucuuccucacccagggcgcccuccucaacgacaagcacuccaacggcaccaucaaggaccgcucccccuaccgcacccucauguccugccccaucggcgagguccccucccccuacaacucccgcuucgaguccgucgccugguccgccuccgccugccacgacggcaucaacuggcucaccaucggcaucuccggccccgacaacggcgccgucgccguccucaaguacaacggcaucaucaccgacaccaucaaguccuggcgcaacaacauccuccgcacccaggaguccgagugcgccugcgucaacggcuccugcuucaccgucaugaccgacggccccuccgacggccaggccuccuacaagaucuucaagaucgagaagggcaagaucgucaaguccgucgagaugaacgcccccaacuaccacuacgaggagugcuccugcuaccccgacuccuccgagaucaccugcgucugccgcgacaacuggcacggcuccaaccgccccugggucuccuucaaccagaaccucgaguaccagaucggcuacaucugcuccggcaucuucggcgacaacccccgccccaacgacaagaccggcuccugcggccccgucuccuccaacggcgccaacggcgucaagggcuucuccuucaaguacggcaacggcgucuggaucggccgcaccaaguccaccuccucccgcaacggcuucgagaugaucugggaccccaacggcuggaccggcaccgacaacuccuucuccaugaagcaggacaucgucggcaucaacgagugguccggcuacuccggcuccuucguccagcaccccgagcucaccggccucgacugcauccgccccugcuucugggucgagcucauccgcggccgccccaaggagaacaccgucuggaccuccggcuccuccaucuccuucugcggcgucaacuccgacaccgucggcugguccuggcccgacggcgccgagcuccccuucaccaucgacaaguga

SEQ ID NO: 119153 - RNA, 1410 nt, Artificial Sequence
  derived and/or modified CDS sequence (opt2) from neuraminidase__InfluenzaA__AFN87940
augaaccccaaccagaagaucaucaccaucggcuccgucugcaugaccaucggcauggccaaccucauccuccagaucggcaacaucaucuccaucuggaucucccacuccauccagcucggcaaccagaaccagaucgagaccugcaaccaguccgucaucaccuacgagaacaacaccugggucaaccagaccuacgucaacaucuccaacaccaacuucgccgccggccaguccgucgucuccgucaagcucgccggcaacuccucccucugccccgucuccggcugggccaucuacuccaaggacaacuccauccgcaucggcuccaagggcgacgucuucgucauccgcgagcccuucaucuccugcuccccccucgagugccgcaccuucuuccucacccagggcgcccuccucaacgacaagcacuccaacggcaccaucaaggaccgcucccccuaccgcacccucauguccugccccaucggcgagguccccucccccuacaacucccgcuucgaguccgucgccugguccgccuccgccugccacgacggcaucaacuggcucaccaucggcaucuccggccccgacaacggcgccgucgccguccucaaguacaacggcaucaucaccgacaccaucaaguccuggcgcaacaacauccuccgcacccaggaguccgagugcgccugcgucaacggcuccugcuucaccgucaugaccgacggccccuccgacggccaggccuccuacaagaucuucaagaucgagaagggcaagaucgucaaguccgucgagaugaacgcccccaacuaccacuacgaggagugcuccugcuaccccgacuccuccgagaucaccugcgucugccgcgacaacuggcacggcuccaaccgccccugggucuccuucaaccagaaccucgaguaccagaucggcuacaucugcuccggcaucuucggcgacaacccccgccccaacgacaagaccggcuccugcggccccgucuccuccaacggcgccaacggcgucaagggcuucuccuucaaguacggcaacggcgucuggaucggccgcaccaaguccaccuccucccgcaacggcuucgagaugaucugggaccccaacggcuggaccggcaccgacaacuccuucuccaucaagcaggacaucgucggcaucaacgagugguccggcuacuccggcuccuucguccagcaccccgagcucaccggccucgacugcauccgccccugcuucugggucgagcucauccgcggccgccccaaggagaacaccaucuggaccuccggcuccuccaucuccuucugcggcgucaacuccgacaccgucggcugguccuggcccgacggcgccgagcuccccuucaccaucgacaaguga

SEQ ID NO: 119154 - RNA, 1410 nt, Artificial Sequence; identical to SEQ ID NO: 112774
  derived and/or modified CDS sequence (opt2) from neuraminidase__InfluenzaA__AFN87942

SEQ ID NO: 119155 - RNA, 1410 nt, Artificial Sequence; identical to SEQ ID NO: 119152
  derived and/or modified CDS sequence (opt2) from neuraminidase__InfluenzaA__AFN87944

SEQ ID NO: 119156 - RNA, 1410 nt, Artificial Sequence
  derived and/or modified CDS sequence (opt2) from neuraminidase__InfluenzaA__AFN87946
augaaccccaaccagaagaucaucaccaucggcuccgucugcaugaccaucggcauggccaaccucacccuccagaucggcaacaucaucuccaucuggaucucccacuccauccagcucggcaaccagaaccagaucgagaccugcaaccaguccgucaucaacuacgagaacaacaccugggucaaccagaccuacgucaacaucuccaacaccaacuucgccgccggccaguccgucgucuccgucaagcucgccggcaacuccucccucugccccgucuccggcugggccaucuacuccaaggacaacuccauccgcaucggcuccaagggcgacgucuucgucauccgcgagcccuucgucuccugcuccccccucgagugccgcaccuucuuccucacccagggcgcccuccucaacgacaagcacuccaacggcaccaucaaggaccgcucccccuaccgcacccucauguccugccccaucggcgagguccccucccccuacaacucccgcuucgaguccgucgccugguccgccuccgccugccacgacggcaucaacuggcucaccaucggcaucuccggccccgacaacggcgccgucgccguccucaaguacaacggcaucaucaccgacaccaucaaguccuggcgcaacaacauccuccgcacccaggaguccgagugcgccugcgucaacggcuccugcuucaccgucaugaccgacggccccuccgacggccaggccuccuacaagaucuuccgcaucgagaagggcaagaucgucaaguccgucgagaugaacgcccccaacuaccacuacgaggagugcuccugcuaccccgacuccuccgaggucaccugcgucugccgcgacaacuggcacggcuccaaccgccccugggucuccuucaaccagaaccucgaguaccagaucggcuacaucugcuccggcaucuucggcgacaacccccgccccaacgacaagaccggcuccugcggccccgucuccuccaacggcgccaacggcgucaagggcuucuccuucaaguacggcaacggcgucuggaucggccgcaccaaguccaucuccucccgcaacggcuucgagaugaucugggaccccaacggcuggaccggcaccgacaacaacuucuccaucaagcaggacaucgucggcaucaacgagugguccggcuacuccggcuccuucguccagcaccccgagcucaccggccucgacugcauccgccccugcuucugggucgagcucauccgcggccgccccaaggagaacaccaucuggaccuccggcuccuccaucuccuucugcggcgucaacuccgacaccgucggcugguccuggcccgacggcgccgagcuccccuucaccaucgacaaguga

SEQ ID NO: 119157 - RNA, 1410 nt, Artificial Sequence
  derived and/or modified CDS sequence (opt2) from neuraminidase__InfluenzaA__AFN87948
augaaccccaaccagaagaucaucaccaucggcuccgucugcaugaccaucggcauggccaaccucauccuccagaucggcaacaucaucuccaucuggaucucccacuccauccagcucggcaaccagaaccagaucgagaccugcaaccaguccgucaucaccuacgagaacaacaccugggucaaccagaccuacgucaacaucuccaacaccaacuucgccgccggccaguccgucgucuccgucaagcucgccggcaacuccucccucugccccgucuccggcugggccaucuacuccaaggacaacuccauccgcaucggcuccaagggcgacgucuucgucauccgcgagcccuucaucuccugcuccccccucgagugccgcaccuucuuccucacccagggcgcccuccucaacgacaagcacuccaacggcaccaucaaggaccgcucccccuaccgcacccucauguccugccccaucggcgagguccccucccccuacaacucccgcuucgaguccgucgccugguccgccuccgccugccacgacggcaucaacuggcucaccaucggcaucuccggccccgacaacggcgccgucgccguccucaaguacaacggcaucaucaccgacaccaucaaguccuggcgcaacaacauccuccgcacccaggaguccgagugcgccugcgucaacggcuccugcuucaccgucaugaccgacggccccuccgacggccaggccuccuacaagaucuucaagaucgagaagggcaagaucgucaaguccgucgagaugaacgcccccaacuaccacuacgaggagugcuccugcuaccccgacuccuccgagaucaccugcgucugccgcgacaacuggcacggcuccaaccgccccugggucuccuucaaccagaaccucgaguaccagaucggcuacaucugcuccggcaucuucggcgacaacccccgccccaacgacaagaccggcuccugcggccccgucuccuccaacggcgccaacggcgucaagggcuucuccuucaaguacggcaacggcgucuggaucggccgcaccaaguccaccuccucccgcaacggcuucgagaugaucugggaccccaacggcuggaccggcaccgacaacuccuucuccaucaagcaggacaucgucggcaucaacgagugguccggcuacuccggcuccuucguccagcaccccgagcucaccggccucgacugcauccgccccugcuucugggucgagcucauccgcggccgccccaaggagaacaccaucuggaccuccggcuccuccaucuccuucugcggcgucaacuccgacaucgucggcugguccuggcccgacggcgccgagcuccccuucaccaucgacaaguga

SEQ ID NO: 119158 - RNA, 1410 nt, Artificial Sequence
  derived and/or modified CDS sequence (opt2) from neuraminidase__InfluenzaA__AFN87950
augaaccccaaccagaagaucaucaccaucggcuccgucugcaugaccaucggcauggccaaccucauccuccagaucggcaacaucaucuccaucuggaucucccacuccauccagcucggcaaccagucccagaucgagaccugcaaccaguccgucaucaccuacgagaacaacaccugggucaaccagaccuacgucaacaucuccaacaccaacuucgccgccggccaguccgucgucuccgucaagcucgccggcaacuccucccucugccccgucuccggcugggccaucuacuccaaggacaacuccauccgcaucggcuccaagggcgacgucuucgucauccgcgagcccuucaucuccugcuccccccucgagugccgcaccuucuuccucacccagggcgcccuccucaacgacaagcacuccaacggcaccaucaaggaccgcucccccuaccgcacccucauguccugccccaucggcgagguccccucccccuacaacucccgcuucgaguccgucgccugguccgccuccgccugccacgacggcaucaacuggcucaccaucggcaucuccggccccgacaacggcgccgucgccguccucaaguacaacggcaucaucaccgacaccaucaaguccuggcgcaacaacauccuccgcacccaggaguccgagugcgccugcgucaacggcuccugcuucaccgucaugaccgacggccccuccgacggccaggccuccuacaagaucuuccgcaucgagaagggcaagaucgucaaguccgucgagaugaacgcccccaacuaccacuacgaggagugcuccugcuaccccgacuccuccgagaucaccugcgucugccgcgacaacuggcacggcuccaaccgccccugggucuccuucaaccagaaccucaaguaccagaucggcuacaucugcuccggcaucuucggcgacaacccccgccccaacgacaagaccggcuccugcggccccgucuccuccaacggcgccaacggcgucaagggcuucuccuucaaguacggcaacggcgucuggaucggccgcaccaaguccaucuccucccgcaagggcuucgagaugaucugggaccccaacggcuggaccggcaccgacaacaacuucuccaucaagcaggacaucaucggcaucaacgagugguccggcuacuccggcuccuucguccagcaccccgagcucaccggccucgacugcauccgccccugcuucugggucgagcucauccgcggccgccccaaggagaacaccaucuggaccuccggcuccuccaucuccuucugcggcgucaacuccgacaccgucggcugguccuggcccgacggcgccgagcuccccuucaccaucgacaaguga

SEQ ID NO: 119159 - RNA, 1410 nt, Artificial Sequence; identical to SEQ ID NO: 116745
  derived and/or modified CDS sequence (opt2) from neuraminidase__InfluenzaA__AFN87952

SEQ ID NO: 119160 - RNA, 1410 nt, Artificial Sequence
  derived and/or modified CDS sequence (opt2) from neuraminidase__InfluenzaA__AFN87954
augaaccccaaccagaagaucaucaccaucggcuccgucugcaugaccaucggcauggccaaccucauccuccagaucggcaacaucaucuccaucuggaucucccacuccauccagcucggcaaccagaaccagaucgagaccugcaaccaguccgucaucaccuacgagaacaacaccugggucaaccagaccuacgucaacaucuccaacaccaacuucgccgccggccaguccgucgucuccgucaagcucgccggcaacuccucccucugccccgucuccggcugggccaucuacuccaaggacaacuccauccgcaucggcuccaagggcgacgucuucgucauccgcgagcccuucaucuccugcuccccccucgagugccgcaccuucuuccucacccagggcgcccuccucaacgacaagcacuccaacggcaccaucaaggaccgcucccccuaccgcacccucauguccugccccaucggcgagguccccucccccuacaacucccgcuucgaguccgucgccugguccgccuccgccugccacgacggcaucaacuggcucaccaucggcaucuccggccccgacaacggcgccgucgccguccucaaguacaacggcaucaucaccgacaccaucaaguccuggcgcaacaacauccuccgcacccaggaguccgagugcgccugcgucaacggcuccugcuucaccgucaugaccgacggccccuccgacggccaggccuccuacaagaucuuccgcaucgagaagggcaagaucgucaaguccgucgagaugaacgcccccaacuaccacuacgaggagugcuccugcuaccccgacuccuccgagaucaccugcgucugccgcgacaacuggcacggcuccaaccgccccugggucuccuucaaccagaaccucgaguaccagaucggcuacaucugcuccggcaucuucggcgacaacccccgccccaacgacaagaccggcuccugcggccccgucuccuccaacggcgccaacggcgucaagggcuucuccuucaaguacggcaacggcgucuggaucggccgcaccaaguccaucuccucccgcaagggcuucgagaugaucugggaccccaacggcuggaccggcaccgacaacaacuucuccaucaagcaggacaucgucggcaucaacgagugguccggcuacuccggcuccuucguccagcaccccgagcucaccggccucgacugcauccgccccugcuucugggucgagcucauccgcggccgccccaaggagaacaccaucuggaccuccggcuccuccaucuccuucugcggcgucaacuccgacaccaugggcugguccuggcccgacggcgccgagcuccccuucaccaucgacaaguga

SEQ ID NO: 119161 - RNA, 1410 nt, Artificial Sequence
  derived and/or modified CDS sequence (opt2) from neuraminidase__InfluenzaA__AFN87956
augaaccccaaccagaagaucaucaccaucggcuccgucugcaugaccaucggcauggccaaccucauccuccagaucggcaacaucaucuccaucuggaucucccacuccauccagcucggcaaccagucccagaucgagaccugcaaccaguccgucaucaccuacgagaacaacaccugggucaaccagaccuacgucaacaucuccaacaccaacuucgccgccggccaguccgucgucuccgucaagcucgucggcaacuccucccucugccccgucuccggcugggccaucuacuccaaggacaacuccauccgcaucggcuccaagggcgacgucuucgucauccgcgagcccuucaucuccugcuccccccucgagugccgcaccuucuuccucacccagggcgcccuccucaacgacaagcacuccaacggcaccaucaaggaccgcucccccuaccgcacccucauguccugccccaucggcgagguccccucccccuacaacucccgcuucgaguccgucgccugguccgccuccgccugccacgacggcaucaacuggcucaccaucggcaucuccggccccgacaacggcgccgucgccguccucaaguacaacggcaucaucaccgacaccaucaaguccuggcgcaacaacauccuccgcacccaggaguccgagugcgccugcgucaacggcuccugcuucaccaucaugaccgacggccccuccgacggccaggccuccuacaagaucuuccgcaucgagaagggcaagaucgucaaguccgucgagaugaacgcccccaacuaccacuacgaggagugcuccugcuaccccgacuccuccgagaucaccugcgucugccgcgacaacuggcacggcuccaaccgccccugggucuccuucaaccagaaccucgaguaccagaucggcuacaucugcuccggcaucuucggcgacaacccccgccccaacgacaagaccggcuccugcggccccgucuccuccaacggcgccaacggcgucaagggcuucuccuucaaguacggcaacggcgucuggaucggccgcaccaaguccaucuccucccgcaagggcuucgagaugaucugggaccccaacggcuggaccggcaccgacaacaacuucuccaucaagcaggacaucgucggcaccaacgagugguccggcuacuccggcuccuucguccagcaccccgagcucaccggccucgacugcauccgccccugcuucugggucgagcucauccgcggccgccccaaggagaacaccaucuggaccuccggcuccuccaucuccuucugcggcgucaacuccgacaccgucggcugguccuggcccgacggcgccgagcuccccuucaccaucgacaacuga

SEQ ID NO: 119162 - RNA, 1410 nt, Artificial Sequence
  derived and/or modified CDS sequence (opt2) from neuraminidase__InfluenzaA__AFN87958
augaaccccaaccagaagaucaucaccaucggcuccgucugcaugaccaucggcauggccaaccucauccuccagaucggcaacaucaucuccaucuggaucucccacuccauccagcucggcaaccagaaccagaucgagaccugcaaccaguccgucaucaccuacgagaacaacaccugggucaaccagaccuacgucaacaucuccaacaccaacuucgccgccggccaguccgucgucuccgucaagcucgccggcaacuccucccucugccccgucuccggcugggccaucuacuccaaggacaacuccauccgcaucggcuccaagggcgacgucuucgucauccgcgagcccuucaucuccugcuccccccucgagugccgcaccuucuuccucacccagggcgcccuccucaacgacaagcacuccaacggcaccaucaaggaccgcucccccuaccgcacccucauguccugccccaucggcgagguccccucccccuacaacucccgcuucgaguccgucgccugguccgccuccgccugccacgacggcaucaacuggcucaccaucggcaucuccggccccgacaacggcgccgucgccguccucaaguacaacggcaucaucaccgacaccaucaaguccuggcgcaacaacauccuccgcacccaggaguccgagugcgccugcgucaacggcuccugcuucaccgucaugaccgacggccccuccgacggccaggccuccuacaagaucuucaagaucgagaagggcaagaucgucaaguccgucgagaugaacgcccccaacuaccacuacgaggagugcuccugcuaccccgacuccuccgagaucaccugcgucugccgcgacaacuggcacggcuccaaccgccccugggucuccuucaaccagaaccucgaguaccagaucggcuacaucugcuccggcaucuucggcgacaacccccgccccaacgacaagaccggcuccugcggccccgccuccuccaacggcgccaacggcgucaagggcuucuccuucaaguacggcaacggcgucuggaucggccgcaccaaguccaccuccucccgcaacggcuucgagaugaucugggaccccaacggcuggaccggcaccgacaacuccuucuccaugaagcaggacaucgucggcaucaacgagugguccggcuacuccggcuccuucguccagcaccccgagcucaccggccucgacugcauccgccccugcuucugggucgagcucauccgcggccgccccaaggagaacaccgucuggaccuccggcuccuccaucuccuucugcggcgucaacuccgacaccgucggcugguccuggcccgacggcgccgagcuccccuucaccaucgacaaguga

SEQ ID NO: 119163 - RNA, 1410 nt, Artificial Sequence
  derived and/or modified CDS sequence (opt2) from neuraminidase__InfluenzaA__AFN87960
augaaccccaaccagaagaucaucaccaucggcuccgucugcaugaccaucggcauggccaaccucauccuccagaucggcaacaucaucuccaucuggaucucccacuccauccagcucggcaaccagucccagaucgagaccugcaaccaguccgucaucaccuacgagaacaacaccugggucaaccagaccuacgucaacaucuccaacaccaacuucgccgccggccaguccgucgucuccgucaagcucgccggcaacuccucccucugccccgucuccggcugggccaucuacuccaaggacaacuccauccgcaucggcuccaagggcgacgucuucgucauccgcgagcccuucaucuccugcuccccccucgagugccgcaccuucuuccucacccagggcgcccuccucaacgacaagcacuccaacggcaccaucaaggaccgcucccccuaccgcacccucauguccugccccaucggcgagguccccucccccuacaacucccgcuucgaguccgucgccugguccgccuccgccugccacgacggcaucaacuggcucaccaucggcaucuccggccccgacaacggcgccgucgccguccucaaguacaacggcaucaucaccgacaccaucaaguccuggcgcaacaacauccuccgcacccaggaguccgagugcgccugcgucaacggcuccugcuucaccaucaugaccgacggccccuccgacggccaggccuccuacaagaucuuccgcaucgagaagggcaagaucgucaaguccgucgagaugaacgcccccaacuaccacuacgaggagugcuccugcuaccccgacuccuccgagaucaccugcgucugccgcgacaacuggcacggcuccaaccgccccugggucuccuucaaccagaaccucgaguaccagaucggcuacaucugcuccggcaucuucggcgacaacccccgccccaacgacaagaccggcuccugcggccccgucuccuccaacggcgccaacggcgucaagggcuucuccuucaaguacggcaacggcgucuggaucggccgcaccaaguccaucuccucccgcaagggcuucgagaugaucugggaccccaacggcuggaccggcaccgacaacaacuucuccaucaagcaggacaucgucggcaucaacgagugguccggcuacuccggcuccuucguccagcaccccgagcucaccggccucgacugcauccgccccugcuucuggaucgagcucauccgcggccgccccaaggagaacaccaucuggaccuccggcuccuccaucuccuucugcggcgucaacuccgacaccgucggcugguccuggcccgacggcgccgagcuccccuucaccaucgacaaguga

SEQ ID NO: 119164 - RNA, 1413 nt, Artificial Sequence
  derived and/or modified CDS sequence (opt2) from neuraminidase__InfluenzaA__AFO64805
augaaccccaaccagaagaucaucaccaucggcuccaucuccaucgccaucggcaucaucucccucaugcuccagaucggcaacaucaucuccaucugggccucccacuccauccagaccggcucccagaaccacaccggcaucugcaaccagcgcaucaucaccuacgagaacuccaccugggucaaccacaccuacgucaacaucaacaacaccaacgucgucgccggcaaggacaagaccuccgucacccucgccggcaacuccucccucugcuccaucuccggcugggccaucuacaccaaggacaacuccauccgcaucggcuccaagggcgacgucuucgucauccgcgagcccuucaucuccugcucccaccucgagugccgcaccuucuuccucacccagggcgcccuccucaacgacaagcacuccaacggcaccgucaaggaccgcucccccuaccgcgcccucauguccugcccccucggcgaggcccccucccccuacaacuccaaguucgaguccgucgccugguccgccuccgccugccacgacggcaugggcuggcucaccaucggcaucuccggccccgacaacggcgccgucgccguccucaaguacaacggcaucaucaccgagaccaucaaguccuggaagaagcgcauccuccgcacccaggaguccgagugcgucugcgucaacggcuccugcuucaccaucaugaccgacggccccaacaacggcgccgccuccuacaagaucuucaagaucgagaagggcaaggucaccaaguccaucgagcucaacgcccccaacucccacuacgaggagugcuccugcuaccccgacaccggcaccgucaugugcgucugccgcgacaacuggcacggcuccaaccgccccugggucuccuucaaccagaaccucgacuaccagaucggcuacaucugcuccggcgucuucggcgacaacccccgccccaaggacggcgagggcuccugcaaccccgucaccgucgacggcgccgacggcgucaagggcuucuccuacaaguacggcaacggcgucuggaucggccgcaccaaguccaaccgccuccgcaagggcuucgagaugaucugggaccccaacggcuggaccgacaccgacuccgacuucuccgucaagcaggacgucgucgccaucaccgacugguccggcuacuccggcuccuucguccagcaccccgagcucaccggccucgacugcauccgccccugcuucugggucgagcucguccgcggccucccccgcgagaacaccaccaucuggaccuccggcuccuccaucuccuucugcggcgucaacuccgacaccgccaacugguccuggcccgacggcgccgagcuccccuucaccaucgacaaguga

SEQ ID NO: 119165 - RNA, 1413 nt, Artificial Sequence
  derived and/or modified CDS sequence (opt2) from neuraminidase__InfluenzaA__AFO64816
augaaccccaaccagaagaucaucaccaucggcuccaucugcauggccaucggcaucaucucccucauccuccagaucggcaacaucgucuccaucuggaucucccacuccauccagaccggcucccagaacuacaccggcaucugcaaccagcgcaucaucaccuacgagaacuccaccugggucaaccagaccuacgucaacaucaacaacaccaacgucgucgccggccaggacaccaccuccgucgcccucgccggcaacuccucccucugccccaucuccggcugggccaucuacuccaaggacaacuccauccgcaucggcuccaagggcgacgucuucgucauccgcgagcccuucaucuccugcucccaccucgagugccgcaccuucuuccucacccagggcgcccuccucaacgacaagcacuccaacggcaccgucaaggaccgcucccccuaccgcgcccucauguccugccccaucggcgaggcccccucccccuacaacucccgcuucgaguccgucgccugguccgccuccgccugccacgacggcaugggcuggcucaccaucggcaucuccggccccgacgacggcgccgucgccguccucaaguacaacggcaucaucaccgagaccaucaaguccuggcgccgccgcauccuccgcacccaggaguccgagugcgucugcgucaacggcuccugcuucaccaucaugaccgacggccccaacaacggccccgccuccuacaagaucuucaagaucgagaagggcaaggucaccaaguccaucgagcucgacgcccccaacucccacuacgaggagugcuccugcuaccccgacgccggcaccgucaugugcgucugccgcgacaacuggcacggcuccaaccgccccugggucuccuucaaccagaaccucgacuaccagaucggcuacaucugcuccggcgucuucggcgacaacccccgccccaaggacggcaagggcuccugcgaccccgucaccgucgacggcgccgacggcgucaagggcuucuccuaccgcuacggcaacggcgucuggaucggccgcaccaaguccaacuccucccgccgcggcuucgagaugaucugggaccccaacggcuggaccgacaccgacuccaaguuccucgucaagcaggacgucgucgccaugaccgacugguccggcuacuccggcuccuucguccagcaccccgagcucaccggccucgacugcaugcgccccugcuucugggucgagcucauccgcggccgcccccgcgagaacaccaccaucuggaccuccggcuccuccaucuccuucugcggcgucaacggcgacaccgccaacugguccuggcccgacggcgccgagcuccccuucaccaucgacaaguga

SEQ ID NO: 119166 - RNA, 1413 nt, Artificial Sequence
  derived and/or modified CDS sequence (opt2) from neuraminidase__InfluenzaA__AFO64827
augaaccccaaccagaagaucaucaccaucggcuccaucuccauggccaucggcaucaucucccucauccuccagaucggcaacaucaucuccaucugggucucccacuccauccagaccggcucccagaaccacaccggcaucugcaaccagcgcaucaucaccuacgagaacuccaccugggucaaccagaccuacgucaacaucaacaacaccaacgucaucgccggcaaggacaagaccuccgucacccucgccggcaacuccucccucugccccauccgcggcugggccaucuacaccaaggacaacuccauccgcaucggcuccaagggcgacgucuucgucauccgcgagcccuucaucuccugcucccaccucgagugccgcaccuucuuccucacccagggcgcccuccucaacgacaagcacuccaacggcaccgucaaggaccgcucccccuaccgcgcccucauguccugcccccucggcgaggcccccucccccuacaacucccgcuucgaguccgucgccugguccgccuccgccugccacgacggcaugggcuggcucaccaucggcaucuccggccccgacgacggcgccgucgccguccucaaguacaacggcaucaucaccgagaccaucaaguccuggaagaagcgcauccuccgcacccaggaguccgagugcgucugcgucaacggcuccugcuucaccaucaugaccgacggccccuccaacggcgccgccuccuaccgcaucuucaagaucgagaagggcaaggucaccaaguccaucgagcucgacgcccccaacucccacuacgaggagugcuccugcuaccccgacaccggcaccgucaugugcgucugccgcgacaacuggcacggcuccaaccgccccugggucuccuucaaccagaaccucgacuaccagaucggcuacaucugcuccggcgucuucggcgacaacccccgccccaaggacggcaagggcuccugcgaccccgucaccgucgacggcgccgacggcgucaagggcuucuccuaccgcuacggcaacggcgucuggaucggccgcaccaaguccaaccgcuuccgcaagggcuucgagaugaucugggaccccaacggcuggaccgacaccgacuccgacuuccucgucaagcaggacgucgucgccaugaccgacugguccggcuacuccggcuccuucguccagcaccccgagcucaccggccucgacugcaugcgccccugcuucugggucgagcucguccgcggccgcccccgcgagaacaccaccaucuggaccuccggcuccuccaucuccuucugcggcgucaacuccgacaccgccaacugguccuggcccgacggcgccgagcuccccuucaccaucgacaaguga

SEQ ID NO: 119167 - RNA, 1413 nt, Artificial Sequence
  derived and/or modified CDS sequence (opt2) from neuraminidase__InfluenzaA__AFO64838
augaaccccaaccagaagaucaucaccaucggcuccaucuccauggccaucggcaucaucucccucauccuccagaucggcaacaucaucuccaucugggccucccacuccauccagaccggcucccagaaccacaccggcaucugcaaccagcgcaucaucaccuacgagaacuccaccugggucaaccagaccuacgucaacaucaacaacaccaacgucgucgccggcaaggacaagaccuccgucacccucgccggcaacuccucccucugccccauccgcggcugggccaucuacaccaaggacaacuccauccgcaucggcuccaagggcgacgucuucgucauccgcgagcccuucaucuccugcucccaccucgagugccgcaccuucuuccucacccagggcgcccuccucaacgacaagcacuccaacggcaccgucaaggaccgcucccccuaccgcgcccucauguccugcccccucggcgaggcccccucccccuacaacucccgcuucgaguccgucgccugguccgccuccgccugccacgacggcaugggcuggcucaccaucggcaucuccggccccgacaacggcgccgucgccguccucaaguacaacggcaucaucaccgagaccaucaaguccuggaagaagcgcauccuccgcacccaggaguccgagugcgucugcgucaacggcuccugcuucaccaucaugaccgacggccccuccaacggcgccgccuccuaccgcaucuucaagaucgagaagggccgcgucaccaaguccaucgagcucgacgcccccaacuaccacuacgaggagugcuccugcuaccccgacaccggcaccgucaugugcgucugccgcgacaacuggcacggcuccaaccgccccugggucuccuucaaccagaaccucgacuaccagaucggcuacaucugcuccggcgucuucggcgacaacccccgccccaaggacggcgagggcuccugcaaccccgucaccgucgacggcgccgacggcgucaagggcuucuccuaccgcuacggcaacggcgucuggaucggccgcaccaaguccaaccgccuccgcaagggcuucgagaugaucugggaccccaacggcuggaccgacaccgacuccgacuucuccaugaagcaggacgucgucgccaugaccgacugguccggcuacuccggcuccuucguccagcaccccgagcucaccggccucgacugcaugcgccccugcuucugggucgagcucguccgcggccucccccgcgagaacaccaccaucuggaccuccggcuccuccaucuccuucugcggcgucaacuccgacaccgccaacugguccuggcccgacggcgccgagcuccccuucaccaucgacaaguga

SEQ ID NO: 119168 - RNA, 1413 nt, Artificial Sequence
  derived and/or modified CDS sequence (opt2) from neuraminidase__InfluenzaA__AFO64849
augaaccccaaccagaagaucaucaccaucggcuccaucuccauggccaucggcaucaucucccucauccuccagaucggcaacaucaucuccaucugggccucccacuccauccagaccggcucccagaaccacaccggcaucugcaaccagcgcaucaucaccuacgagaacuccaccugggucaaccagaccuacgucaacaucaacaacaccaacgucgucgccggcaaggacaagaccuccgucacccucgccggcaacuccucccucugccccauccgcggcugggccaucuacaccaaggacaacuccauccgcaucggcuccaagggcgacgucuucgucauccgcgagcccuucaucuccugcucccaccucgagugccgcaccuucuuccucacccagggcgcccuccucaacgacaagcacuccaacggcaccgucaaggaccgcucccccuaccgcgcccucauguccugcccccucggcgaggcccccucccccuacaacucccgcuucgaguccgucgccugguccgccuccgccugccacgacggcaugggcuggcucaccaucggcaucuccggccccgacaacggcgccgucgccguccucaaguacaacggcaucaucaccgagaccaucaaguccuggaagaagcagauccuccgcacccaggaguccgagugcgucugcgucaacggcuccugcuucaccaucaugaccgacggccccuccaacggcgccgccuccuaccgcaucuucaagaucgagaagggcaagaucaccaaguccaucgagcucgacgcccccaacucccacuacgaggagugcuccugcuaccccgacaccggcaccgucaugugcgucugccgcgacaacuggcacggcuccaaccgccccugggucuccuucaaccagaaccucgacuaccagaucggcuacaucugcuccggcgucuucggcgacaacccccgccccaaggacggcgagggcuccugcaaccccgucaccgucgacggcgccgacggcgucaagggcuucuccuaccgcuacggcaacggcgucuggaucggccgcaccaaguccaaccgccuccgcaagggcuucgagaugaucugggaccccaacggcuggaccgacaccgacuccgacuucuccgucaagcaggacgucgucgccaugaccgacugguccggcuacuccggcuccuucguccagcaccccgagcucaccggccucgacugcaugcgccccugcuucugggucgagcucguccgcggccgcccccgcgagaacgccaccaucuggaccuccggcuccuccaucuccuucugcggcgucaacuccgacaccgccaacugguccuggcccgacggcgccgagcuccccuucaccaucgacaaguga

SEQ ID NO: 119169 - RNA, 1413 nt, Artificial Sequence; identical to SEQ ID NO: 111004
  derived and/or modified CDS sequence (opt2) from neuraminidase__InfluenzaA__AFO64860

SEQ ID NO: 119170 - RNA, 1413 nt, Artificial Sequence
  derived and/or modified CDS sequence (opt2) from neuraminidase__InfluenzaA__AFO64871
augaaccccaaccagaagaucaucaccaucggcuccaucuccaucgccaucggcaucaucucccucauccuccagaucggcaacaucaucuccaucugggccucccacuccauccagaccggcucccagaaccacaccggcgucugcaaccagcgcaucaucaccuacgagaacuccaccugggucaaccagaccuacgucaacaucaacaacaccaacgucgucgccggcaaggacaagaccuccaugacccucgccggcaacuccucccucugccccauccgcggcugggccaucuacaccaaggacaacuccauccgcaucggcuccaagggcgacgucuucgucauccgcgagcccuucaucuccugcucccaccucgagugccgcaccuucuuccucacccagggcgcccuccucaacgacaagcacuccaacggcaccgucaaggaccgcucccccuaccgcgcccucauguccugcccccucggcgaggcccccucccccuacaacucccgcuucgaguccgucgccugguccgccuccgccugccacgacggccucggcuggcucaccaucggcaucuccggccccgacaacggcgccgucgccguccucaaguacaacggcaucaucaccgagaccaucaaguccuggaagaagcgcauccuccgcacccaggaguccgagugcgucugcaugaacggcuccugcuucaccaucaugaccgacggccccuccaacggcgccgccuccuaccgcaucuucaagaucgagaagggccgcgucaccaaguccaucgagcucgacgcccccaacuaccacuacgaggagugcuccugcuaccccgacaccggcaccgucaugugcgucugccgcgacaacuggcacggcuccaaccgccccugggucuccuucaaccagaaccucgacuaccagaucggcuacaucugcuccggcgucuucggcgacaacccccgccccaaggacggcgagggcuccugcaaccccgucaccgucgacggcgccgacggcgucaagggcuucuccuaccgcuacggcaacggcgucuggaucggccgcaccaaguccaaccgccuccgcaagggcuucgagaugaucugggaccccaacggcuggaccgacaccgacuccgacuucuccaugcgccaggacaucgucgccaugaccgacugguccggcuacuccggcuccuucguccagcaccccgagcucaccggccucgacugcaugcgccccugcuucugggucgagcucguccgcggccucccccgcgagaacaccaccaucuggaccuccggcuccuccaucuccuucugcggcgucaacuccgacaccgccaacugguccuggcccgacggcgccgagcuccccuucaccaucgacaaguga

SEQ ID NO: 119171 - RNA, 1413 nt, Artificial Sequence
  derived and/or modified CDS sequence (opt2) from neuraminidase__InfluenzaA__AFO64882
augaaccccaaccagaagaucaucaccaucggcuccaucuccaucgccaucggcaucaucucccucaugcuccagaucggcaacaucaucuccaucugggccucccacuccauccagaccggcucccagaaccacaccggcaucugcaaccagcgcaucaucaccuacgagaacuccaccugggucaaccacaccuacgucaacaucaacaacaccaacgucgucgccggcaaggacaagaccuccgucacccucgccggcaacuccucccucugcuccaucuccggcugggccaucuacaccaaggacaacuccauccgcaucggcuccaagggcgacgucuucgucauccgcgagcccuucaucuccugcucccaccucgagugccgcaccuucuuccucacccagggcgcccuccucaacgacaagcacuccaacggcaccgucaaggaccgcucccccuaccgcgcccucauguccugcccccucggcgaggcccccucccccuacaacuccaaguucgaguccgucgccugguccgccuccgccugccacgacggcaugggcuggcucaccaucggcaucuccggccccgacaacggcgccgucgccguccucaaguacaacggcaucaucaccgagaccaucaaguccuggaagaagcgcauccuccgcacccaggaguccgagugcgucugcgucaacggcuccugcuucaccaucaugaccgacggccccuccaacggcgccgccuccuacaagaucuucaagaucgagaagggcaaggucaccaaguccaucgagcucaacgcccccaacucccacuacgaggagugcuccugcuaccccgacaccggcaccgucaugugcgucugccgcgacaacuggcacggcuccaaccgccccugggucuccuucaaccagaaccucgacuaccagaucggcuacaucugcuccggcgucuucggcgacaacccccgccccaaggacggcgagggcuccugcaaccccgucaccgucgacggcgccgacggcgucaagggcuucuccuacaaguacggcaacggcgucuggaucggccgcaccaaguccaaccgccuccgcaagggcuucgagaugaucugggaccccaacggcuggaccgacaccgacuccgacuucuccgucaagcaggacgucgucgccaucaccgacugguccggcuacuccggcuccuucguccagcaccccgagcucaccggccucgacugcauccgccccugcuucugggucgagcucguccgcggccgcccccgcgagaacaccaccaucuggaccuccggcuccuccaucuccuucugcggcgucaacuccgacaccgccaacugguccuggcccgacggcgccgagcuccccuucaccaucgacaaguga

SEQ ID NO: 119172 - RNA, 1413 nt, Artificial Sequence
  derived and/or modified CDS sequence (opt2) from neuraminidase__InfluenzaA__AFO64893
augaaccccaaccagaagaucaucaccaucggcuccaucuccgucgccaucggcaucaucucccucaugcuccagaucggcaacaucaucuccaucugggccucccacuccauccagaccggcucccagaaccacaccggcaucugcaaccagcgcaucaucaccuacgagaacuccaccugggucaaccacaccuacgucaacaucaacaacaccaacgucgucgccggcaaggacaagaccuccgucacccucgccggcaacuccucccucugcuccaucuccggcugggccaucuacaccaaggacaacuccauccgcaucggcuccaagggcgacgucuucgucauccgcgagcccuucaucuccugcucccaccucgagugccgcaccuucuuccucacccagggcgcccuccucaacgacaagcacuccaacggcaccgucaaggaccgcucccccuaccgcgcccucauguccugcccccucggcgaggcccccucccccuacaacuccaaguucgaguccgucgccugguccgccuccgccugccacgacggcaugggcuggcucaccaucggcaucuccggccccgacaacggcgccgucgccguccucaaguacaacggcaucaucaccgagaccaucaaguccuggaagaagcgcauccuccgcacccaggaguccgagugcgucugcgucaacggcuccugcuucaccaucaugaccgacggccccuccgacggcgccgccuccuacaagaucuucaagaucgagaagggcaaggucaccaaguccaucgagcucaacgcccccaacucccacuacgaggagugcuccugcuaccccgacaccggcaccgucaugugcgucugccgcgacaacuggcacggcuccaaccgccccugggucuccuucaaccagaaccucgacuaccagaucggcuacaucugcuccggcgucuucggcgacaacccccgccccaaggacggcgagggcuccugcaaccccgucaccgucgacggcgccgacggcgucaagggcuucuccuacaaguacggcaacggcgucuggaucggccgcaccaaguccaaccgcuuccgcaagggcuucgagaugaucugggaccccaacggcuggaccgacaccgacuccgacuucuccgucaagcaggacgucgucgccaucaccgacugguccggcuacuccggcuccuucguccagcaccccgagcucaccggccucgacugcauccgccccugcuucugggucgagcucguccgcggccgcccccgcgagaacaccaccaucuggaccuccggcuccuccaucuccuucugcggcgucaacuccgacaccgccaacugguccuggcccgacggcgccgagcuccccuucaccaucgacaaguga

SEQ ID NO: 119173 - RNA, 1413 nt, Artificial Sequence
  derived and/or modified CDS sequence (opt2) from neuraminidase__InfluenzaA__AFO64904
augaaccccaaccagaagaucaucaccaucggcuccaucuccgucgccaucggcaucaucucccucauccuccagaucggcaacaucaucuccaugugggccucccacuccauccagaccggcucccagaacuacaccggcaucugcaaccagcgcaucaucaccuacgagaacaacaccugggucaaccagaccuacgucaacaucaacaacaccaacgucgucgccggcaaggacaagaucuccaugacccucgccggcaacuccucccucugccccauccgcggcugggccaucuacaccaaggacaacuccauccgcaucggcuccaagggcgacgucuucgucauccgcgagcccuucaucuccugcucccaccucgagugccgcaccuucuuccucacccagggcgcccuccucaacgacaagcacuccaacggcaccgucaaggaccgcucccccuaccgcgcccucauguccugcccccucggcgaggcccccucccccuacaacucccgcuucgaguccgucgccugguccgccuccgccugccacgacggccucggcuggcucaccaucggcaucuccggccccgacaacggcgccgucgccguccucaaguacaacggcaucaucaccgagaccaucaaguccuggaagaagcagauccuccgcacccaggaguccgagugcgucugcgucaacggcuccugcuucaccaucaugaccgacggccccuccaaccgcgccgccuccuaccgcaucuucaagaucgagaagggccgcgucaccaaguccaucgagcucgacgcccccaacuaccacuacgaggagugcuccugcuaccccgacaccggcaccgucaugugcgucugccgcgacaacuggcacggcuccaaccgccccugggucuccuucaaccagaaccucgacuaccagaucggcuacaucugcuccggcgucuucggcgacaacccccgccccaaggacggcgagggcuccugcaaccccgucaccgucgacggcgccgacggcgucaagggcuucuccuacaaguacggcaacggcgucuggaucggccgcaccaaguccaaccgccuccgcaagggcuucgagaugaucugggaccccaacggcuggaccgacaccgacuccgacuucuccaugaagcaggacgucgucgccaugaccgacugguccggcuacuccggcuccuucguccagcaccccgagcucaccggccucgacugcaugcgccccugcuucugggucgagcucguccgcggccucccccgcgagaacaccaccaucuggaccuccggcuccuccaucuccuucugcggcgucaacuccgagaccgccaacugguccuggcccgacggcgccgagcuccccuucaccaucgacaaguga

SEQ ID NO: 119174 - RNA, 1413 nt, Artificial Sequence
  derived and/or modified CDS sequence (opt2) from neuraminidase__InfluenzaA__AFO65019
augaaccccaaccagaagaucaucaccaucggcuccaucuccaucgccaucggcaucaucucccucaugcuccagaucggcaacaucaucuccaucugggccucccacuccauccagaccggcucccagaaccacaccggcaucugcaaccagcgcaucaucaccuacgagaacuccaccugggucaaccacaccuacgucaacaucaacaacaccaacgucgucgccggcaaggacaagaccuccgucacccucgccggcaacuccucccucugcuccaucuccggcugggccaucuacaccaaggacaacuccauccgcaucggcuccaagggcgacgucuucgucauccgcgagcccuucaucuccugcucccaccucgagugccgcaccuucuuccucacccagggcgcccuccucaacgacaagcacuccaacggcaccgucaaggaccgcucccccuaccgcgcccucauguccugcccccucggcgaggcccccucccccuacaacuccaaguucgaguccgucgccugguccgccuccgccugccacgacggcaugggcuggcucaccaucggcaucuccggccccgacaacggcgccgucgccguccucaaguacaacggcaucaucaccgagaccaucaaguccuggaagaagcgcauccuccgcacccaggaguccgagugcgucugcgucaacggcuccugcuucaccaucaugaccgacggccccuccaacggcgccgccuccuacaagaucuucaagaucgagaagggcaaggucaccaaguccaucgagcucaacgcccccaacucccacuacgaggagugcuccugcuaccccgacaccggcaccgucaugugcgucugccgcgacaacuggcacggcuccaaccgccccugggucuccuucaaccagaaccucgacuaccagaucggcuacaucugcuccggcgucuucggcgacaacccccgccccaaggacggcgagggcuccugcaaccccgucaccgccgacggcgccgacggcgucaagggcuucuccuacaaguacggcaacggcgucuggaucggccgcaccaaguccaaccgccuccgcaagggcuucgagaugaucugggaccccaacggcuggaccgacaccgacuccgacuucuccgucaagcaggacgucgucgccaucaccgacugguccggcuacuccggcuccuucguccagcaccccgagcucaccggccucgacugcauccgccccugcuucugggucgagcucguccgcggccgcccccgcgagaacaccaccaucuggaccuccggcuccuccaucuccuucugcggcgucaacuccgacaccgccaacugguccuggcccgacggcgccgagcuccccuucaccaucgacaaguga

SEQ ID NO: 119175 - RNA, 1413 nt, Artificial Sequence; identical to SEQ ID NO: 112489
  derived and/or modified CDS sequence (opt2) from neuraminidase__InfluenzaA__AFO65030

SEQ ID NO: 119176 - RNA, 1413 nt, Artificial Sequence
  derived and/or modified CDS sequence (opt2) from neuraminidase__InfluenzaA__AFO65041
augaaccccaaccagaagaucaucaccaucggcuccaucuccaucgccaucggcaucaucucccucaugcuccagaucggcaacaucaucuccaucugggccucccacuccauccagaccggcucccagaaccacaccggcgucugcaaccagcgcaucaucaccuacgagaacuccaccugggucaaccacaccuacgucaacaucaacaacaccaacgucgucgccggcaaggacaagaccuccgucacccucgccggcaacuccucccucugcuccaucuccggcugggccaucuacaccaaggacaacuccauccgcaucggcuccaagggcgacgucuucgucauccgcgagcccuucaucuccugcucccaccucgagugccgcaccuucuuccucacccagggcgcccuccucaacgacaagcacuccaacggcaccgucaaggaccgcucccccuaccgcgcccucauguccugcccccucggcgaggcccccucccccuacaacuccaaguucgaguccgucgccugguccgccuccgccugccacgacggcaugggcuggcucaccaucggcaucuccggccccgacaacggcgccgucgccguccucaaguacaacggcaucaucaccgagaccaucaaguccuggaagaagcagauccuccgcacccaggaguccgagugcgucugcgucaacggcuccugcuucaccaucaugaccgacggccccuccaacggcgccgccuccuacaagaucuucaagaucgagaagggcaaggucaccaaguccaucgagcucaacgcccccaacuuccacuacgaggagugcuccugcuaccccgacaccggcaccgucaugugcgucugccgcgacaacuggcacggcuccaaccgccccugggucuccuucaaccagaaccucgacuaccagaucggcuacaucugcuccggcgucuucggcgacaacccccgccccaaggacggcgagggcuccugcaaccccgucaccgucgacggcgccaacggcgucaagggcuucuccuacaaguacggcaacggcgucuggaucggccgcaccaaguccaaccgccuccgcaagggcuucgagaugaucugggaccccaacggcuggaccgacaccgacuccgacuucuccgucaagcaggacgucgucgccaucaccgacugguccggcuacuccggcuccuucguccagcaccccgagcucaccggccucgacugcauccgccccugcuucugggucgagcucguccgcggccucccccgcgagaacaccaccaucuggaccuccggcuccuccaucuccuucugcggcgucaacuccgacaccgccaacugguccuggcccgacggcgccgagcuccccuucaccaucgacaaguga

SEQ ID NO: 119177 - RNA, 1413 nt, Artificial Sequence
  derived and/or modified CDS sequence (opt2) from neuraminidase__InfluenzaA__AFO65052
augaaccccaaccagaagaucaucaccaucggcuccaucuccaucgccaucggcaucaucucccucaugcuccagaucggcaacaucaucuccaucugggccucccacuccauccagaccggcucccagaaccacaccggcgucugcaaccagcgcaucaucaccuacgagaacuccaccugggucaaccacaccuacgucaacaucaacaacaccaacgucaucgccggcaaggacaagaccuccaugacccucgccggcaacuccucccucugcuccaucuccggcugggccaucuacaccaaggacaacuccauccgcaucggcuccaagggcgacgucuucgucauccgcgagcccuucaucuccugcucccaccucgagugccgcaccuucuuccucacccagggcgcccuccucaacgacaagcacuccaacggcaccgucaaggaccgcucccccuaccgcgcccucauguccugcccccucggcgaggcccccucccccuacaacuccaaguucgaguccgucgccugguccgccuccgccugcaacgacggcaugggcuggcucaccaucggcaucuccggccccgacaacggcgccgucgccguccucaaguacaacggcaucaucaccgagaccaucaaguccuggaagaagcagauccuccgcacccaggaguccgagugcgucugcgucaacggcuccugcuucaccaucaugaccgacggccccuccaacggcgccgccuccuacaagaucuucaagaucgagaagggcaaggucaccaaguccaucgagcucaacgcccccaacuuccacuacgaggagugcuccugcuaccccgacaccggcaccgucaugugcgucugccgcgacaacuggcacggcuccaaccgccccugggucuccuucaaccagaaccucgacuaccagaucggcuacaucugcuccggcgucuucggcgacaacccccgccccaaggacggcgagggcuccugcaaccccgucaccgucgacggcgccaacggcgucaagggcuucuccuacaaguacggcaacggcgucuggaucggccgcaccaaguccaaccgccuccgcaagggcuucgagaugaucugggaccccaacggcuggaccgacaccgacuccgacuucuccgucaagcaggacgucgucgccaucaccgacugguccggcuacuccggcuccuucguccagcaccccgagcucaccggccucgacugcauccgccccugcuucugggucgagcucguccgcggccucccccgcgagaacaccaccaucuggaccuccggcuccuccaucuccuucugcggcgucaacuccgacaccgccaacugguccuggcccgacggcgccgagcuccccuucaccaucgacaaguga

SEQ ID NO: 119178 - RNA, 1413 nt, Artificial Sequence; identical to SEQ ID NO: 110864
  derived and/or modified CDS sequence (opt2) from neuraminidase__InfluenzaA__AFO66139

SEQ ID NO: 119179 - RNA, 1413 nt, Artificial Sequence
  derived and/or modified CDS sequence (opt2) from neuraminidase__InfluenzaA__AFO66150
augaaccccaaccagaagaucaucaccaucggcuccaucuccgucgccaucggcaucaucucccucauccuccagaucggcaacaucaucuccaucugggccucccacuccauccagaccggcucccagaacuacaccggcaucugcaaccagcgcaucaucaccuacgagaaccgcaccugggucaaccagaccuacgucaacaucaacaacaccaacgucgucgccggcaaggacaagaccuccaugacccucgccggcaacuccucccucugccccauccgcggcugggccaucuacaccaaggacaacuccauccgcaucggcuccaagggcgacgucuucgucauccgcgagcccuucaucuccugcucccaccucgagugccgcaccuucuuccucacccagggcgcccuccucaacgacaagcacuccaacggcaccaucaaggaccgcucccccuuccgcgcccucauguccugcccccucggcgaggcccccucccccuacaacucccgcuucgaguccgucgccugguccgccuccgccugccacgacggccucggcuggcucaccaucggcaucuccggccccgacaacggcgccgucgccguccucaaguacaacggcaucaucaccgagaccaucaaguccuggaagaagcagauccuccgcacccaggaguccgagugcgucugcgucaacggcuccugcuucaccaucaugaccgacggccccuccaaccgcgccgccuccuaccgcaucuucaagaucgagaagggccgcgucaccaaguccaucgagcucgacgcccccaacuaccacuacgaggagugcuccugcuaccccgacaccggcaccgucaugugcgucugccgcgacaacuggcacggcuccaaccgccccugggucuccuucaaccagaaccucgacuaccagaucggcuacaucugcuccggcgucuucggcgacaacccccgccccaaggacggcgagggcuccugcaaccccgucaccgucgacggcgccgacggcgucaagggcuucuccuaccgcuacggcaacggcgucuggaucggccgcaccaaguccaaccgcauccgcaagggcuucgagaugaucugggaccccaacggcuggaccgacaccgacuccgacuucuccaugaagcaggacgucgucgccaugaccgacugguccggcuacuccggcuccuucguccagcaccccgagcucaccggccucgacugcaugcgccccugcuucugggucgagcucguccgcggccucccccgcgagaacaccaccaucuggaccuccggcuccuccaucuccuucugcggcgucaacuccgagaccgccaacugguccuggcccgacggcgccgagcuccccuucaccaucgacaaguga

SEQ ID NO: 119180 - RNA, 1413 nt, Artificial Sequence
  derived and/or modified CDS sequence (opt2) from neuraminidase__InfluenzaA__AFO66161
augaaccccaaccagaagaucaucaccaucggcuccaucuccaucgccaucggcaucaucucccucaugcuccagaucggcaacaucaucuccaucugggccucccacuccauccagaccggcucccagaaccacaccggcgucugcaaccagcgcaucaucaccuacgagaacuccaccugggucaaccacaccuacgucaacaucaacaacaccaacgucaucgccggcaaggacaagaccuccgucacccucgccggcaacuccucccucugcuccaucuccggcugggccaucuacaccaaggacaacuccauccgcaucggcuccaagggcgacgucuucgucauccgcgagcccuucaucuccugcucccaccucgagugccgcaccuucuuccucacccagggcgcccuccucaacgacaagcacuccaacggcaccgucaaggaccgcucccccuaccgcgcccucauguccugcccccucggcgaggcccccucccccuacaacuccaaguucgaguccgucgccugguccgccuccgccugccacgacggcaugggcuggcucaccaucggcaucuccggccccgacaacggcgccgucgccguccucaaguacaacggcaucaucaccgagaccaucaaguccuggaagaagcagauccuccgcacccaggaguccgagugcgucugcgucaacggcuccugcuucaccaucaugaccgacggccccuccaacggcgccgccuccuacaagaucuucaagaucgagaagggcaaggucaccaaguccaucgagcucaacgcccccaacuuccacuacgaggagugcuccugcuaccccgacaccggcaccgucaucugcgucugccgcgacaacuggcacggcuccaaccgccccugggucuccuucaaccagaaccucgacuaccagaucggcuacaucugcuccggcgucuucggcgacaacccccgccccaaggacggcgagggcuccugcaaccccgucaccgucgacggcgccaacggcgucaagggcuucuccuacaaguacggcaacggcgucuggaucggccgcaccaaguccaaccgccuccgcaagggcuucgagaugaucugggaccccaacggcuggaccgacaccgacuccgacuucuccgucaagcaggacgucgucgccaucaccgacugguccggcuacuccggcuccuucguccagcaccccgagcucaccggccucgacugcauccgccccugcuucugggucgagcucguccgcggccuccccaaggagaacaccaccaucuggaccuccggcuccuccaucuccuucugcggcgucaacuccgacaccgccaacugguccuggcccgacggcgccgagcuccccuucaccaucgacaaguga

SEQ ID NO: 119181 - RNA, 1413 nt, Artificial Sequence
  derived and/or modified CDS sequence (opt2) from neuraminidase__InfluenzaA__AFO66172
augaaccccaaccagaagaucaucaccaucggcuccaucuccaucgccaucggcaucaucucccucaugcuccagaucggcaacaucaucuccaucugggccucccacuccauccagaccggcucccagaaccacaccggcaucugcaaccagcgcaucaucaccuacgagaacuccaccugggucaaccacaccuacgucaacaucaacaacaccaacgucgucgccggcaaggacaagaccuccgucacccucgccggcaacuccucccucugcuccaucuccggcugggccaucuacaccaaggacaacuccauccgcaucggcuccaagggcgacgucuucgucauccgcgagcccuucaucuccugcucccaccucgagugccgcaccuucuuccucacccagggcgcccuccucaacgacaagcacuccaacggcaccgucaaggaccgcucccccuaccgcgcccucauguccugcccccucggcgaggcccccucccccuacaacuccaaguucgaguccgucgccugguccgccuccgccugccacgacggcaugggcuggcucaccaucggcaucuccggccccgacaacggcgccgucgccguccucaaguacaacggcaucaucaccgagaccaucaaguccuggaagaagcgcauccuccgcacccaggaguccgagugcgucugcaugaacggcuccugcuucaccaucaugaccgacggccccuccaacggcgccgccuccuacaagaucuucaagaucgagaagggcaaggucaccaaguccaucgagcucaacgcccccaacuuccacuacgaggagugcuccugcuaccccgacaccggcaccgucaugugcgucugccgcgacaacuggcacggcuccaaccgccccugggucuccuucaaccagaaccucgacuaccagaucggcuacaucugcuccggcgucuucggcgacaacccccgccccaaggacggcgagggcuccugcaaccccgucaccgucgacggcgccgacggcgucaagggcuucuccuacaaguacggcaacggcgucuggaucggccgcaccaaguccaaccgccuccgcaagggcuucgagaugaucugggaccccaacggcuggaccgacaccgacuccgacuucuccgucaagcaggacgucgucgccaucaccgacugguccggcuacuccggcuccuucguccagcaccccgagcucaccggccucgacugcauccgccccugcuucugggucgagcucguccgcggccucccccgcgagaacaccaccaucuggaccuccggcuccuccaucuccuucugcggcgucaacuccgacaccgccaacugguccuggcccgacggcgccgagcuccccuucaccaucgacaaguga

SEQ ID NO: 119182 - RNA, 1413 nt, Artificial Sequence; identical to SEQ ID NO: 110966
  derived and/or modified CDS sequence (opt2) from neuraminidase__InfluenzaA__AFO66183

SEQ ID NO: 119183 - RNA, 1413 nt, Artificial Sequence
  derived and/or modified CDS sequence (opt2) from neuraminidase__InfluenzaA__AFO66194
augaaccccaaccagaagaucaucaccaucggcuccaucuccaucgccaucggcaucaucucccucaugcuccagaucggcaacaucaucuccaucugggccucccacuccauccagaccggcucccagaaccacaccggcgucugcaaccagcgcaucaucaccuacgagaacuccaccugggucaaccacaccuacgucaacaucaacaacaccaacgucaucgccggcaaggacaagaccuccgucacccucgccggcaacuccucccucugcuccaucuccggcugggccaucuacaccaaggacaacuccauccgcaucggcuccaagggcgacgucuucgucauccgcgagcccuucaucuccugcucccaccucgagugccgcaccuucuuccucacccagggcgcccuccucaacgacaagcacuccaacggcaccgucaaggaccgcucccccuaccgcgcccucauguccugcccccucggcgaggcccccucccccuacaacuccaaguucgaguccgucgccugguccgccuccgccugccacgacggcaugggcuggcucaccaucggcaucuccggccccgacaacggcgccgucgccguccucaaguacaacggcaucaucaccgagaccaucaaguccuggaagaagcagauccuccgcacccaggaguccgagugcgucugcgucaacggcuccugcuucaccaucaugaccgacggccccuccaacggcgccgccuccuacaagaucuucaagaucgagaagggcaaggucaccaaguccaucgagcucaacgcccccaacuuccacuacgaggagugcuccugcuaccccgacaccggcaccgucaugugcgucugccgcgacaacuggcacggcuccaaccgccccugggucuccuucaaccagaaccucgacuaccagaucggcuacaucugcuccggcgucuucggcgacaacccccgccccaaggacggcgagggcuccugcaaccccgucaccgucgacggcgccaacggcgucaagggcuucuccuacaaguacggcaacggcgucuggaucggccgcaccaaguccaaccgccuccgcaagggcuucgagaugaucugggaccccaacggcuggaccgacaccgacuccgacuucuccgucaagcaggacaucgucgccaucaccgacugguccggcuacuccggcuccuucguccagcaccccgagcucaccggccucgacugcauccgccccugcuucugggucgagcucguccgcggccuccccaaggagaacaccaccaucuggaccuccggcuccuccaucuccuucugcggcgucaacuccgacaccgccaacugguccuggcccgacggcgccgagcuccccuucaccaucgacaaguga

SEQ ID NO: 119184 - RNA, 1410 nt, Artificial Sequence; identical to SEQ ID NO: 112591
  derived and/or modified CDS sequence (opt2) from neuraminidase__InfluenzaA__AFO66205

SEQ ID NO: 119185 - RNA, 1413 nt, Artificial Sequence; identical to SEQ ID NO: 110451
  derived and/or modified CDS sequence (opt2) from neuraminidase__InfluenzaA__AFO66216

SEQ ID NO: 119186 - RNA, 1413 nt, Artificial Sequence; identical to SEQ ID NO: 110422
  derived and/or modified CDS sequence (opt2) from neuraminidase__InfluenzaA__AFO66227

SEQ ID NO: 119187 - RNA, 1413 nt, Artificial Sequence
  derived and/or modified CDS sequence (opt2) from neuraminidase__InfluenzaA__AFO66238
augaaccccaaccagaagaucaucaccaucggcuccaucuccaucgccaucggcaucaucucccucaugcuccagaucggcaacaucaucuccaucugggccucccacuccauccagaccggcucccagaaccacaccggcaucugcaaccagcgcaucaucaccuacgagaacuccaccugggucaaccacaccuacgucaacaucaacaacaccaacgucgucgccggcaaggacaagaccuccgucacccucgccggcaacuccucccucugcuccaucuccggcugggccaucuacaccaaggacaacuccauccgcaucggcuccaagggcgacgucuucgucauccgcgagcccuucaucuccugcucccaccucgagugccgcaccuucuuccucacccagggcgcccuccucaacgacaagcacuccaacggcaccgucaaggaccgcucccccuaccgcgcccucauguccugcccccucggcgaggcccccucccccuacaacuccaaguucgaguccgucgccugguccgccuccgccugccacgacggcaugggcuggcucaccaucggcaucuccggccccgacaacggcgccgucgccguccucaaguacaacggcaucaucaccgagaccaucaaguccuggaagaagcagauccuccgcacccaggaguccgagugcgucugcaugaacggcuccugcuucaccaucaugaccgacggccccuccaacggcgccgccuccuacaagaucuucaagaucgagaagggcaaggucaccaaguccaucgagcucaacgcccccaacuuccacuacgaggagugcuccugcuaccccgacaccggcaccgucaugugcgucugccgcgacaacuggcacggcuccaaccgccccugggucuccuucaaccagaaccucgacuaccagaucggcuacaucugcuccggcgucuucggcgacaacccccgccccaaggacggcgagggcuccugcaaccccgucaccgucgacggcgccgacggcgucaagggcuucuccuacaaguacggcaacggcgucuggaucggccgcaccaaguccaaccgccuccgcaagggcuucgagaugaucugggaccccaacggcuggaccaacaccgacuccgacuucuccgucaagcaggacgucgucgccaucaccgacugguccggcuacuccggcuccuucguccagcaccccgagcucaccggccucgacugcauccgccccugcuucugggucgagcucguccgcggccucccccgcgagaacaccaccaucuggaccuccggcuccuccaucuccuucugcggcgucaacuccgacaccgccaacugguccuggcccgacggcgccgagcuccccuucaccaucgacaaguga

SEQ ID NO: 119188 - RNA, 1413 nt, Artificial Sequence
  derived and/or modified CDS sequence (opt2) from neuraminidase__InfluenzaA__AFO66249
augaaccccaaccagaagaucaucaccaucggcuccaucuccaucgccaucggcaucaucucccucaugcuccagaucggcaacaucaucuccaucugggccucccacuccauccagaccggcucccagaaccacaccggcaucugcaaccagcgcaucaucaccuacgagaacuccaccugggucaaccacaccuacgucaacaucaacaacaccaacgucgucgccggcaaggacaagaccuccgucacccucgccggcaacuccucccucugcuccaucuccggcugggccaucuacaccaaggacaacuccauccgcaucggcuccaagggcgacgucuucgucauccgcgagcccuucaucuccugcucccaccucgagugccgcaccuucuuccucacccagggcgcccuccucaacgacaagcacuccaacggcaccgucaaggaccgcucccccuaccgcgcccucauguccugcccccucggcgaggcccccucccccuacaacuccaaguucgaguccgucgccugguccgccuccgccugccacgacggcaugggcuggcucaccaucggcaucuccggccccgacaacggcgccgucgccguccucaaguacaacggcaucaucaccggcaccaucaaguccuggaagaagcagauccuccgcacccaggaguccgagugcgucugcaugaacggcuccugcuucaccaucaugaccgacggccccuccaacggcgccgccuccuacaagaucuucaagaucgagaagggcaaggucaccaaguccaucgagcucaacgcccccaacuuccacuacgaggagugcuccugcuaccccgacaccggcaccgucaugugcgucugccgcgacaacuggcacggcuccaaccgccccugggucuccuucaaccagaaccucgacuaccagaucggcuacaucugcuccggcgucuucggcgacaacccccgccccaaggacggcgagggcuccugcaaccccgucaccgucgacggcgccgacggcgucaagggcuucuccuacaaguacggcaacggcgucuggaucggccgcaccaaguccaaccgccuccgcaagggcuucgagaugaucugggaccccaacggcuggaccaacaccgacuccgacuucuccgucaagcaggacgucgucgccaucaccgacugguccggcuacuccggcuccuucguccagcaccccgagcucaccggccucgacugcauccgccccugcuucugggucgagcucguccgcggccucccccgcgagaacaccaccaucuggaccuccggcuccuccaucuccuucugcggcgucaacuccgacaccgccaacugguccuggcccgacggcgccgagcuccccuucaccaucgacaaguga

SEQ ID NO: 119189 - RNA, 1413 nt, Artificial Sequence
  derived and/or modified CDS sequence (opt2) from neuraminidase__InfluenzaA__AFP33330
augaaccccaaccagaagaucaucaccaucggcuccaucuccgucgccaucggcaucaucucccucauccuccagaucggcaacaucaucuccaucugggccucccacuccauccaggccggcucccagaacuacaccggcaucugcaaccagaagaucaucaccuacgagaaccgcaccugggucaaccagaccuacgucaacaucaacaacaccaacgucgucgccggcaaggacaagaccuccaugacccucgccggcaacuccucccucugccccauccgcggcugggccaucuacaccaaggacaacuccauccgcaucggcuccaagggcgacgucuucgucauccgcgagcccuucaucuccugcucccaccucgagugccgcaccuucuuccucacccagggcgcccuccucaacgacaagcacuccaacggcaccaucaaggaccgcucccccuuccgcgcccucauguccugcccccucggcgaggcccccucccccuacaacucccgcuucgaguccgucgccugguccgccuccgccugccacgacggccucggcuggcucaccaucggcaucuccggccccgacaacggcgccgucgccguccucaaguacaacggcaucaucaccgagaccaucaaguccuggaagaagcagauccuccgcacccaggaguccgagugcgucugcgucaacggcuccugcuucaccaucaugaccgacggccccuccaaccgcgccgccuccuaccgcaucuucaagaucgagaagggccgcgucaccaaguccaucgagcucgacgcccccaacuaccacuacgaggagugcuccugcuaccccgacaccggcaccgucaugugcgucugccgcgacaacuggcacggcuccaaccgccccugggucuccuucaaccagaaccucgacuaccagaucggcuacaucugcuccggcgucuucggcgacaacccccgccccaaggacggcgagggcuccugcaaccccgucaccgucgacggcgccgacggcgucaagggcuucuccuaccgcuacggcaacggcgucuggaucggccgcaccaaguccaaccgccuccgcaagggcuucgagaugaucugggaccccaacggcuggaccgacaccgacuccgacuucuccaugaagcaggacgucgucgccaugaccgacugguccggcuacuccggcuccuucguccagcaccccgagcucaccggccucgacugcaugcgccccugcuucugggucgagcucguccgcggccucccccgcgagaacaccaccaucuggaccuccggcuccuccaucuccuucugcggcgucaacuccgagaccgccaacugguccuggcccgacggcgccgagcuccccuucaccaucgacaaguga

SEQ ID NO: 119190 - RNA, 1413 nt, Artificial Sequence
  derived and/or modified CDS sequence (opt2) from neuraminidase__InfluenzaA__AFP33331
augaaccccaaccagaagaucaucaccaucggcuccaucuccaucgccaucggcaucaucucccucaugcuccagaucggcaacaucaucuccaucugggccucccacuccauccagaccggcucccagaaccacaccggcaucugcaaccagcgcaucaucaccuacgagaacuccaccugggucaaccacaccuacgucaacaucaacaacaccaacgucaucgccggcaaggacaagaccuccgucacccucgccggcaacuccucccucugcuccaucuccggcugggccaucuacaccaaggacaacuccauccgcaucggcuccaagggcgacgucuucgucauccgcgagcccuucaucuccugcucccaccucgagugccgcaccuucuuccucacccagggcgcccuccucaacgacaagcacuccaacggcaccgucaaggaccgcucccccuaccgcgcccucauguccugcccccucggcgaggcccccucccccuacaacuccaaguucgaguccgucgccugguccgccuccgccugccacgacggcaugggcuggcucaccaucggcaucuccggccccgacaacggcgccgucgccguccucaaguacaacggcaucaucaccgagaccaucaaguccuggaagaagcgcauccuccgcacccaggaguccgagugcgucugcgucaacggcuccugcuucaccaucaugaccgacggccccuccaacggcgccgccuccuacaagaucuucaagaucgagaagggcaaggucaccaaguccaucgagcucaacgcccccaacuuccacuacgaggagugcuccugcuaccccgacaccggcaccgucaugugcgucugccgcgacaacuggcacggcuccaaccgccccugggucuccuucaaccagaaccucgacuaccagaucggcuacaucugcuccggcgucuucggcgacaacccccgccccaaggacggcgagggcuccugcaaccccgucaccgucgacggcgccgacggcgucaagggcuucuccuacaaguacggcaacggcgucuggaucggccgcaccaaguccaaccgccuccgcaagggcuucgagaugaucugggaccccaacggcuggaccgacaccgacuccgacuucuccgucaagcaggacgucgucgccaucaccgacugguccggcuacuccggcuccuucguccagcaccccgagcucaccggccucgacugcauccgccccugcuucugggucgagcucguccgcggccucccccgcgagaacaccaccaucuggaccuccggcuccuccaucuccuucugcggcgucaacuccgacaccgccaacugguccuggcccgacggcgccgagcuccccuucaccaucgacaaguga

SEQ ID NO: 119191 - RNA, 1410 nt, Artificial Sequence; identical to SEQ ID NO: 117179
  derived and/or modified CDS sequence (opt2) from neuraminidase__InfluenzaA__AFQ32576

SEQ ID NO: 119192 - RNA, 1410 nt, Artificial Sequence
  derived and/or modified CDS sequence (opt2) from neuraminidase__InfluenzaA__AFQ37282
augaaccccaaccagaagaucaucaccaucggcuccgucugcaugaccaucggcauggccaaccucauccuccagaucggcaacaucaucuccaucuggaucucccacuccauccagcucggcaaccagaaccagaucgagaccugcaaccaguccgucaucaccuacgagaacaacaccugggucaaccagaccuacgucaacaucuccaacaccaacuucgccgccggccaguccgucgucuccgucaagcucgccggcaacuccucccucugccccgucuccggcugggccaucuacuccaaggacaacuccauccgcaucggcuccaagggcgacgucuucgucauccgcgagcccuucaucuccugcuccccccucgagugccgcaccuucuuccucacccagggcgcccuccucaacgacaagcacuccaacggcaccaucaaggaccgcucccccuaccgcacccucauguccugccccaucggcgagguccccucccccuacaacucccgcuucgaguccgucgccugguccgccuccgccugccacgacggcaucaacuggcucaccaucggcaucuccggccccgacaacggcgccgucgccguccucaaguacaacggcaucaucaccgacaccaucaaguccuggcgcaacaacauccuccgcacccaggaguccgagugcgccugcgucaacggcuccugcuucaccgucaugaccgacggccccuccgacggccaggccuccuacaagaucuuccgcaucgagaagggcaagaucgucaaguccgucgagaugaacgcccccaacuaccacuacgaggagugcuccugcuaccccgacuccuccgagaucaccugcgucugccgcgacaacuggcacggcuccaaccgccccugggucuccuucaaccagaaccucgaguaccagaucggcuacaucugcuccggcaucuucggcgacaacccccgccccaacgacaagaccggcuccugcggccccgucuccuccaacggcgccaacggcgucaagggcuucuccuucaaguacggcaacggcgucuggaucggccgcaccaaguccaucuccucccgcaacggcuucgagaugaucugggaccccaacggcuggaccggcaccgacaacaacuucuccaucaagcaggacaucgucggcaucaacgagugguccggcuacuccggcuccuucguccagcaccccgagcucaccggccucgacugcauccgccccugcuucugggucgagcucauccgcggccgccccaaggagaacaccaucuggaccggcggcuccuccaucuccuucugcggcgucaacuccgacaccgucggcugguccuggcccgacggcgccgagcuccccuucaccaucgacaaguga

SEQ ID NO: 119193 - RNA, 1410 nt, Artificial Sequence
  derived and/or modified CDS sequence (opt2) from neuraminidase__InfluenzaA__AFQ55691
augaaccccaaccagaagaucaucaccaucggcgucgucaacaccacccucuccaccaucgcccuccucaucggcgucggcaaccucgucuucaacaccgucauccacgagaagaucggcgaccaccagaccgucacccaccccaccaccaccacccccgccauccccaacugcuccgacaccaucaucaccuacaacaacaccaucaucaacaacaucaccaccaccaucaucaccgaggccgagcgccccuucaaguccccccucccccucugccccuuccgcggcuucuuccccuuccacaaggacaacgccauccgccucggcgagaacaaggacgucaucgucacccgcgagcccuacgucuccugcgacaacgacaacugcugguccuucgcccucgcccagggcgcccuccucggcaccaagcacuccaacggcaccaucaaggaccgcacccccuaccgcucccucauccgcuuccccaucggcaccgcccccguccucggcaacuacaaggagaucugcaucgccugguccuccuccuccugcuucgacggcaaggaguggaugcacgucugcaugaccggcaacgacaacgacgccuccgcccagaucaucuacgccggcaagaugaccgacuccaucaaguccuggcgcaaggacauccuccgcacccaggaguccgagugccagugcaucgacggcaccugcgucgucgccgucaccgacggccccgccgccuccuccgccgaccaccgcaucuacuggauccgcgagggcaagaucaucaaguacgaggacguccccaagaccaagauccagcaccucgaggagugcuccugcuacgucgacgucgacgucuacugcaucugccgcgacaacuggaagggcuccaaccgccccuggaugcgcaucaacaacgagaccauccucgagaccggcuacgucugcuccaaguuccacuccgacaccccccgccccgccgaccccuccaccgucuccugcgacucccccuccaacgucaacggcggccccggcgucaagggcuucggcuucaaggccggcaacgacgucuggcucggccgcaccgucuccaccuccggccgcuccggcuucgagaucaucaaggucaccgagggcuggaucaacucccccaaccacgccaaguccaucacccagacccucauguccaacaacgacugguccggcuacuccggcuccuucaucaucaagaccaaggacugcuuccagcccugcuucuacgucgagcucauccgcggccgccccaacaagaacgacgacgucuccuggaccuccaacuccaucgucaccuucugcggccucgacaacgagcccggcuccggcaacuggcccgacggcuccaacaucggcuucaugcccaaguga

SEQ ID NO: 119194 - RNA, 1410 nt, Artificial Sequence
  derived and/or modified CDS sequence (opt2) from neuraminidase__InfluenzaA__AFR68156
augaaccccaaccagaagaucaucaccaucggcuccgucugcaugaccaucggcauggccaaccucauccuccagaucggcaacaucaucuccaucuggaucucccacuccauccagcuccgcaaccagucccagaucgagaccugcaaccaguccgucaucaccuacgagaacaacaccugggucaaccagaccuacgucaacaucuccaacaccaacuucgccgccggccaguccgucgucuccgucaagcucgccggcaacuccucccucugccccgucuccggcugggccaucuacuccaaggacaacuccauccgcaucggcuccaagggcgacgucuucgucauccgcgagcccuucaucuccugcuccccccucgagugccgcaccuucuuccucacccagggcgcccuccucaacgacaagcacuccaacggcaccaucaaggaccgcucccccuaccgcacccucauguccugccccaucggcgagguccccucccccuacaacucccgcuucgaguccgucgccugguccgccuccgccugccacgacggcaucaacuggcucaccaucggcaucuccggccccgacaacggcgccgucgccguccucaaguacaacggcaucaucaccgacaccaucaaguccuggcgcaacaacauccuccgcacccaggaguccgagugcgccugcgucaacggcuccugcuucaccaucaugaccgacggccccuccgacggccaggccuccuacaagaucuuccgcaucgagaagggcaagaucgucaaguccgucgagaugaacgcccccaacuaccacuacgaggagugcuccugcuaccccgacuccuccgagaucaccugcgucugccgcgacaacuggcacggcuccaaccgccccugggucuccuucaaccagaaccucgaguaccagaucggcuacaucugcuccggcaucuucggcgacaacccccgccccaacgacaagaccggcuccugcggccccgucuccuccaacggcgccaacggcgucaagggcuucuccuucaaguacggcaacggcgucuggaucggccgcaccaaguccaucuccucccgcaagggcuucgagaugaucugggaccccaacggcuggaccggcaccgacaacaacuucuccaucaagcaggacaucgucggcaucaacgagugguccggcuacuccggcuccuucguccagcaccccgagcucaccggccucgacugcauccgccccugcuucugggucgagcucauccgcggccgccccaaggagaacaccaucuggaccuccggcuccuccaucuccuucugcggcgucaacuccgacaccgucggcugguccuggcccgacggcgccgagcuccccuucaccaucgacaaguga

SEQ ID NO: 119195 - RNA, 1410 nt, Artificial Sequence; identical to SEQ ID NO: 119194
  derived and/or modified CDS sequence (opt2) from neuraminidase__InfluenzaA__AFR68166

SEQ ID NO: 119196 - RNA, 1410 nt, Artificial Sequence
  derived and/or modified CDS sequence (opt2) from neuraminidase__InfluenzaA__AFR68176
augaaccccaaccagaagaucaucaccaucggcuccgucucccucaccaucuccaccaucugcuucuucaugcagaucgccauccucaucaccaccgucacccuccacuucaagcaguacgaguucaacuccccccccaacaaccaggucaugcucugcgagcccaccaucaucgagcgcaacaucaccgagaucgucuaccucaccaacaccaccaucgagaaggagaucugccccaagcucgccgaguaccgcaacugguccaagccccagugcgacaucaccggcuucgcccccuucuccaaggacaacuccauccgccucuccgccggcggcgacaucugggucacccgcgagcccuacgucuccugcgaccccgacaagugcuaccaguucgcccucggccagggcaccacccucaacaacguccacuccaacaacaccguccgcgaccgcacccccuaccgcacccuccucaugaacgagcucggcguccccuuccaccucggcaccaagcaggucugcaucgccugguccuccuccuccugccacgacggcaaggccuggcuccacgucugcaucaccggcgacgacaagaacgccaccgccuccuucaucuacaacggccgccucgucgacuccgucgccuccugguccaaggacauccuccgcacccaggaguccgagugcgucugcaucaacggcaccugcgccgucgucaugaccgacggcuccgccuccggcaaggccgacaccaagauccucuucaucaaggagggcaagaucguccacaccuccacccucuccggcuccgcccagcacgucgaggagugcuccugcuacccccgcuaccccggcguccgcugcgucugccgcgacaacuggaagggcuccaaccgccccaucgucgacaucaacaucaaggaccacuccaucgucuccuccuacgucugcuccggccucgucggcgacaccccccgcaagaacgacuccuccuccuccggccacugccucgaccccaacaacgaggagggcggccacggcgucaagggcugggccuucgacgacggcaacgacgucuggaugggccgcaccaucaacgagaccucccgccucggcuacgagaccuucaaggucaucgagggcugguccaaccccaaguccaagcuccagaucaaccgccaggucaucgucgaccgcggcaaccgcuccggcuacuccggcaucuucuccgucgagggcaagaacugcaucaaccgcugcuucuacgucgagcucauccgcggccgcaaggaggagaccgagguccucuggaccuccaacuccaucgucgucuucugcggcaccuccggcaccuacggcaccggcuccuggcccgacggcgccgaccucaaccucaugcccaucuga

SEQ ID NO: 119197 - RNA, 1410 nt, Artificial Sequence; identical to SEQ ID NO: 112774
  derived and/or modified CDS sequence (opt2) from neuraminidase__InfluenzaA__AFR84677

SEQ ID NO: 119198 - RNA, 1410 nt, Artificial Sequence; identical to SEQ ID NO: 113661
  derived and/or modified CDS sequence (opt2) from neuraminidase__InfluenzaA__AFR84687

SEQ ID NO: 119199 - RNA, 1410 nt, Artificial Sequence; identical to SEQ ID NO: 112764
  derived and/or modified CDS sequence (opt2) from neuraminidase__InfluenzaA__AFR84696

SEQ ID NO: 119200 - RNA, 1410 nt, Artificial Sequence; identical to SEQ ID NO: 112774
  derived and/or modified CDS sequence (opt2) from neuraminidase__InfluenzaA__AFR84706

SEQ ID NO: 119201 - RNA, 1410 nt, Artificial Sequence; identical to SEQ ID NO: 112764
  derived and/or modified CDS sequence (opt2) from neuraminidase__InfluenzaA__AFR84716

SEQ ID NO: 119202 - RNA, 1410 nt, Artificial Sequence; identical to SEQ ID NO: 112764
  derived and/or modified CDS sequence (opt2) from neuraminidase__InfluenzaA__AFR84726

SEQ ID NO: 119203 - RNA, 1410 nt, Artificial Sequence; identical to SEQ ID NO: 112764
  derived and/or modified CDS sequence (opt2) from neuraminidase__InfluenzaA__AFR84736

SEQ ID NO: 119204 - RNA, 1410 nt, Artificial Sequence; identical to SEQ ID NO: 112764
  derived and/or modified CDS sequence (opt2) from neuraminidase__InfluenzaA__AFR84746

SEQ ID NO: 119205 - RNA, 1410 nt, Artificial Sequence; identical to SEQ ID NO: 112764
  derived and/or modified CDS sequence (opt2) from neuraminidase__InfluenzaA__AFR84756

SEQ ID NO: 119206 - RNA, 1410 nt, Artificial Sequence; identical to SEQ ID NO: 112764
  derived and/or modified CDS sequence (opt2) from neuraminidase__InfluenzaA__AFR84766

SEQ ID NO: 119207 - RNA, 1410 nt, Artificial Sequence; identical to SEQ ID NO: 112764
  derived and/or modified CDS sequence (opt2) from neuraminidase__InfluenzaA__AFR84776

SEQ ID NO: 119208 - RNA, 1410 nt, Artificial Sequence; identical to SEQ ID NO: 112764
  derived and/or modified CDS sequence (opt2) from neuraminidase__InfluenzaA__AFR84786

SEQ ID NO: 119209 - RNA, 1410 nt, Artificial Sequence; identical to SEQ ID NO: 112764
  derived and/or modified CDS sequence (opt2) from neuraminidase__InfluenzaA__AFR84796

SEQ ID NO: 119210 - RNA, 1410 nt, Artificial Sequence; identical to SEQ ID NO: 112774
  derived and/or modified CDS sequence (opt2) from neuraminidase__InfluenzaA__AFR84806

SEQ ID NO: 119211 - RNA, 1410 nt, Artificial Sequence; identical to SEQ ID NO: 112764
  derived and/or modified CDS sequence (opt2) from neuraminidase__InfluenzaA__AFR84816

SEQ ID NO: 119212 - RNA, 1410 nt, Artificial Sequence; identical to SEQ ID NO: 112774
  derived and/or modified CDS sequence (opt2) from neuraminidase__InfluenzaA__AFR84826

SEQ ID NO: 119213 - RNA, 1410 nt, Artificial Sequence
  derived and/or modified CDS sequence (opt2) from neuraminidase__InfluenzaA__AFR84836
augaaccccaaccagaagaucaucaccaucggcuccgucugcaugaccaucggcauggccaaccucauccuccagaucggcaacaucaucuccaucuggaucucccacuccauccagcucggcaaccagaaccagaucgagaccugcaaccaguccgucaucaccuacgagaacaacaccugggucaaccagaccuacgucaacaucuccaacaccaacuucgccgccggccaguccgucgucuccgucaagcucgccggcaacuccucccucugccccgucggcggcugggccaucuacuccaaggacaacuccguccgcaucggcuccaagggcgacgucuucgucauccgcgagcccuucaucuccugcuccccccucgagugccgcaccuucuuccucacccagggcgcccuccucaacgacaagcacuccaacggcaccaucaaggaccgcucccccuaccgcacccucauguccugccccaucggcgagguccccucccccuacaacucccgcuucgaguccgucgccugguccgccuccgccugccacgacggcaucaacuggcucaccaucggcaucuccggccccgacaacggcgccgucgccguccucaaguacaacggcaucaucaccgacaccaucaaguccuggcgcaacaacauccuccgcacccaggaguccgagugcgccugcgucaacggcuccugcuucaccgucaugaccgacggccccuccaacggccaggccuccuacaagaucuuccgcaucgagaagggcaagaucgucaaguccgucgagaugaacgcccccaacuaccacuacgaggagugcuccugcuaccccgacuccuccgagaucaccugcgucugccgcgacaacuggcacggcuccaaccgccccugggucuccuucaaccagaaccucgaguaccagaucggcuacaucugcuccggcaucuucggcgacaacccccgccccaacgacaagaccggcuccugcggccccgucuccuccaacggcgccaacggcgucaagggcuucuccuucaaguacggcaacggcgucuggaucggccgcaccaaguccaucuccucccgcaacggcuucgagaugaucugggaccccaacggcuggaccgagaccgacaacaacuucuccaucaagcaggacaucgucggcaucaacgagugguccggcuacuccggcuccuucguccagcaccccgagcucaccggccucgacugcauccgccccugcuucugggucgagcucauccgcggccgccccaaggagaacaccaucuggaccuccggcuccuccaucuccuucugcggcgucaacuccgacaccgucggcugguccuggcccgacggcgccgagcuccccuucaccaucgacaaguga

SEQ ID NO: 119214 - RNA, 1410 nt, Artificial Sequence; identical to SEQ ID NO: 113578
  derived and/or modified CDS sequence (opt2) from neuraminidase__InfluenzaA__AFR84846

SEQ ID NO: 119215 - RNA, 1410 nt, Artificial Sequence; identical to SEQ ID NO: 112774
  derived and/or modified CDS sequence (opt2) from neuraminidase__InfluenzaA__AFR84856

SEQ ID NO: 119216 - RNA, 1410 nt, Artificial Sequence
  derived and/or modified CDS sequence (opt2) from neuraminidase__InfluenzaA__AFR84866
augaaccccaaccagaagaucaucaccaucggcuccgucugcaugaccaucggcauggccaaccucauccuccagaucggcaacaucaucuccaucuggaucucccacuccauccagcucggcaaccagaaccagaucgagaccugcaaccaguccgucaucaccuacgagaacaacaccugggucaaccagaccuacgucaacaucuccaacaccaacuucgccgccggccaguccgucgucuccgucaagcucgccggcaacuccucccucugccccgucuccggcugggccaucuacuccaaggacaacuccauccgcaucggcuccaagggcgacgucuucgucauccgcgagcccuucaucuccugcuccccccucgagugccgcaccuucuuccucacccagggcgcccuccucaacgacaagcacuccaacggcaccaucaaggaccgcucccccuuccgcacccucauguccugccccaucggcgagguccccucccccuacaacucccgcuucgaguccgucgccugguccgccuccgccugccacgacggcaucaacuggcucaccaucggcaucuccggccccgacaacggcgccgucgccguccucaaguacaacggcaucaucaccgacaccaucaaguccuggcgcaacaacauccuccgcacccaggaguccgagugcgccugcgucaacggcuccugcuucaccgucaugaccgacggccccuccgacggccaggccuccuacaagaucuuccgcaucgagaagggcaagaucgucaaguccgucgagaugaacgcccccaacuaccacuacgaggagugcuccugcuaccccgacuccuccgagaucaccugcgucugccgcgacaacuggcacggcuccaaccgccccugggucuccuucaaccagaaccucgaguaccagaucggcuacaucugcuccggcaucuucggcgacaacccccgccccaacgacaagaccggcuccugcggccccgucuccuccaacggcgccaacggcgucaagggcuucuccuucaaguacggcaacggcgucuggaucggccgcaccaaguccaucuccucccgcaacggcuucgagaugaucugggaccccaacggcuggaccggcaccgacaacaacuucuccaucaagcaggacaucgucggcaucaacgagugguccggcuacuccggcuccuucguccagcaccccgagcucaccggccucgacugcauccgccccugcuucugggucgagcucauccgcggccgccccaaggagaacaccaucuggaccuccggcuccuccaucuccuucugcggcgucaacuccgacaccgucggcugguccuggcccgacggcgccgagcuccccuucaccaucgacaaguga

SEQ ID NO: 119217 - RNA, 1410 nt, Artificial Sequence; identical to SEQ ID NO: 113482
  derived and/or modified CDS sequence (opt2) from neuraminidase__InfluenzaA__AFR84876

SEQ ID NO: 119218 - RNA, 1410 nt, Artificial Sequence; identical to SEQ ID NO: 113578
  derived and/or modified CDS sequence (opt2) from neuraminidase__InfluenzaA__AFR84895

SEQ ID NO: 119219 - RNA, 1410 nt, Artificial Sequence; identical to SEQ ID NO: 113578
  derived and/or modified CDS sequence (opt2) from neuraminidase__InfluenzaA__AFR84905

SEQ ID NO: 119220 - RNA, 1410 nt, Artificial Sequence; identical to SEQ ID NO: 113578
  derived and/or modified CDS sequence (opt2) from neuraminidase__InfluenzaA__AFR84915

SEQ ID NO: 119221 - RNA, 1410 nt, Artificial Sequence; identical to SEQ ID NO: 113578
  derived and/or modified CDS sequence (opt2) from neuraminidase__InfluenzaA__AFR84925

SEQ ID NO: 119222 - RNA, 1353 nt, Artificial Sequence
  derived and/or modified CDS sequence (opt2) from neuraminidase__InfluenzaA__AFU83119
augaaccccaaccagaagaucaucaccaucggcuccgucucccucaccaucgccaccgucugcuuccucaugcagaucgccauccucgccaccaccgucacccuccacuucaagcagaacgagugcuccauccccuccuccaaccaggucguccccugcgagcccaucaucgucgagcgcaacgucaccgaguaccgcgacugguccaagccccagugccagaucaccggcuucgcccccuucuccaaggacaacuccauccgccucuccgccggcggcgacaucugggucacccgcgagcccuacgucuccugcucccccgacaagugcuaccaguucgcccucggccagggcaccacccucgacaacaagcacuccaacggcaccauccacgaccgcaucccccaccgcacccuccucaugaacgagcucggcguccccuuccaccucggcaccaagcaggucugcaucgccugguccuccuccuccugccacgacggccgcgccuggcuccacgucugcgucaccggcgacgaccgcaacgccaccgccuccuucaucuacgacggcguccucgucgacuccaucggcuccuggucccagaacauccuccgcacccaggaguccgagugcgucugcaucaacggcaccugcaccgucgucaugaccgacggcuccgccuccggccgcgccgacacccgcauccucuucaucaaggagggcaagaucguccacgucuccccccucuccggcuccgcccagcacaucgaggagugcuccugcuacccccgcuaccccgacguccgcugcgucugccgcgacaacuggaagggcuccaaccgccccaucaucgacaucuccauggccgacuacggcaucgacuccuccuacgucugcuccggccucgucggcgacaccccccgcaacgacgacuccuccuccaacuccaacugcaaggaccccaacaacgagcgcggcaaccccggcgucaagggcugggccuucgacuacggcaacgacgucuggaugggccgcaccaucuccaaggacucccgcuccggcuacgagaccuuccgcgucaucggcggcuggaccaucgccaacuccaagucccaggucaaccgccaggucaucgucgacaacaacaacugguccggcuacuccggcaucuucuccgucgagggcaaguccugcaucaaccgcugcuucuacgucgagcucauccgcggccgcccccaggagacccgcgucugguggaccuccaacuccaucgucgccuucugcggcaccuccggcaccuacggcaccggcuccuggcccgacggcgccaacaucaacuucaugcccaucuga

SEQ ID NO: 119223 - RNA, 1410 nt, Artificial Sequence
  derived and/or modified CDS sequence (opt2) from neuraminidase__InfluenzaA__AFV53208
augaaccccaaccagaagaucaucaccaucggcuccgucucccucaccaucgccaccgucugcuuccucauccagaucgccauccucgucaccaccgucacccuccacuucaagcagcacgagugcgacucccccgccuccaaccaggucaugcccugcgagcccaucaucaucgagcgcaacaucaccgagaucgucuaccucaacaacaccaccaucgagaaggagaucugccccaaggucgucgaguaccgcaacugguccaagccccagugccagaucaccggcuucgcccccuucuccaaggacaacuccauccgccucuccgccggcggcgacaucugggucacccgcgagcccuacgucuccugcgaccccggcaagugcuaccaguucgcccucggccagggcaccacccucgacaacaagcacuccaacgacaccauccacgaccgcaucccccaccgcacccuccucaugaacgagcucggcguccccuuccaccucggcacccgccaggucugcaucgccugguccuccuccuccugccacgacggcaaggccuggcuccacgucugcaucaccggcgacgacaagaacgccaccgccuccuucaucuacgacggccgccucauggacuccaucggcuccuggucccagaacauccuccgcacccaggaguccgagugcgucugcaucaacggcaccugcaccgucgucaugaccgacggcuccgccuccggccgcgccgacacccgcauccucuucaucgaggagggcaagaucguccacaucuccccccucuccggcuccgcccagcacgucgaggagugcuccugcuacccccgcuaccccggcguccgcugcaucugccgcgacaacuggaagggcuccaaccgccccgucaucgacaucaacauggaggacuacuccaucgacuccuccuacgucugcuccggccucgucggcgacaccccccgcaacgacgaccgcuccuccaacuccaacugccgcaaccccaacaacgagcgcggcaaccagggcgucaagggcugggccuucgacaacggcgacgacgucuggaugggccgcaccaucuccaaggaccuccgcuccggcuacgagaccuucaaggucaucggcggcugguccacccccaacuccaagucccagaucaaccgccaggucaucgucgacuccgacaaccgcuccggcuacuccggcaucuucuccgucgagggcaaguccugcaucaaccgcugcuucuacgucgagcucauccgcggccgcaagcaggagacccgcgucugguggaccuccaacuccaucgucgucuucugcggcaccuccggcaccuacggcaccggcuccuggcccgacggcgccaacaucaacuucaugcccaucuga

SEQ ID NO: 119224 - RNA, 1410 nt, Artificial Sequence
  derived and/or modified CDS sequence (opt2) from neuraminidase__InfluenzaA__AFV53219
augaaccccaaccagaagaccaucaccaucggcuccgucucccucaccaucgccaccgucugcuuccucaugcagaucgccauccucgccaccaccgucacccuccacuucaagcagcacgagugcgacucccccgccuccaaccaggucaugcccugcgagcccaucaucaucgagcgcaacaucaccgagaucgucuaccucaacaacaccaccaucgagaaggagaucugccccgaggucgucgaguaccgcaacugguccaagccccagugccagaucaccggcuucgcccccuucuccaaggacaacuccauccgccucuccgccggcggcgacaucugggucacccgcgagcccuacgucuccugcgaccccggcaagugcuaccaguucgcccucggccagggcaccacccucgacaacaagcacuccaacggcaccauccacgaccgcaucccccaccgcacccuccucaugaacgagcucggcguccccuuccaccucggcaccaagcaggucugcgucgccugguccuccuccuccugccacgacggcaaggccuggcuccacgucugcgucaccggcgacgaccgcaacgccaccgccuccuucaucuacgacggccgccucgucgacuccaucggcuccuggucccagaacauccuccgcacccaggaguccgagugcgucugcaucaacggcaccugcaccgucgucaugaccgacggcuccgccuccggccgcgccgacacccgcauccucuucaucaaggagggcaagaucguccacaucuccccccucuccggcuccgcccagcacaucgaggagugcuccugcuacccccgcuaccccgacguccgcugcaucugccgcgacaacuggaagggcuccaaccgccccgucaucgacaucaacauggaggacuacuccaucgacuccuccuacgucugcuccggccucgucggcgacaccccccgcaacgacgacuccuccuccaacuccaacugccgcgaccccaacaacgagcgcggcaaccccggcgucaagggcugggccuucgacaacggcgacgacgucuggaugggccgcaccaucaacaaggagucccgcuccggcuacgagaccuucaaggucaucggcggcugguccacccccaacuccaagucccaggucaaccgccaggucaucgucgacaacaacaacugguccggcuacuccggcaucuucuccgucgagggcaaguccugcaucaaccgcugcuucuacgucgagcucauccgcggccgcccccaggagacccgcgucugguggaccuccaacuccaucgucgucuucugcggcaccuccggcaccuacggcaccggcuccuggcccgacggcgccaacaucaacuucaugcccaucuga

SEQ ID NO: 119225 - RNA, 1410 nt, Artificial Sequence
  derived and/or modified CDS sequence (opt2) from neuraminidase__InfluenzaA__AFV53230
augaaccccaaccagaagaucaucaccaucggcuccgucucccucaccaucgccaccgucugcuuccucaugcagaucgccauccucgucaccaccgucacccuccacuucaagcagcacgagugcgacucccccgccuccaaccaggucaugcccugcgagcccaucaucaucgagcgcaacaucaccgagaucgucuaccucaacaacaccaccaucgagaaggagaucugccccaaggucgucgaguaccgcaacugguccaagccccagugcaagaucaccggcuucgcccccuucuccaaggacaacuccauccgccucuccgccggcggcgacaucugggucacccgcgagcccuacgucuccugcgaccccggcaagugcuaccaguucgcccucggccagggcaccacccucgacaacaagcacuccaacgacaccauccacgaccgcaucccccaccgcacccuccucaugaacgagcucggcguccccuuccaccucggcacccgccaggucugcaucgccugguccuccuccuccugccacgacggcaaggccuggcuccacgucugcgucaccggcgacgacaagaacgccaccgccuccuucaucuacgacggccgccucgucgacuccaucggcuccuggucccagaacauccuccgcacccaggaguccgagugcgucugcaucaacggcaccugcaccgucgucaugaccgacggcuccgccuccggccgcgccgacaccaagauccucuucaucgaggagggcaagaucguccacaucuccccccucuccggcuccgcccagcacgucgaggagugcuccugcuacccccgcuaccccgacguccgcugcaucugccgcgacaacuggaagggcuccaaccgccccgucgucgacaucuccauggaggacuacuccaucgacuccuccuacgucugcuccggccucgucggcgacaccccccgcaacgacgaccgcuccuccaacuccaacugccgcaaccccaacaacgagcgcggcaaccagggcgucaagggcugggccuucgacaacggcgacgacgucuggaugggccgcaccaucuccaaggaccuccgcuccggcuacgagaccuucaaggucaucggcggcugguccacccccaacuccaagucccagaucaaccgccaggucaucgucgacuccgacaaccgcuccggcuacuccggcaucuucuccgucgagggcaaguccugcaucaaccgcugcuucuacgucgagcucauccgcggccgcaagcaggagacccgcgucugguggaccuccaacuccaucgucgucuucugcggcaccuccggcaccuacggcaccggcuccuggcccgacggcgccaacaucaaccucaugcccaucuga

SEQ ID NO: 119226 - RNA, 1410 nt, Artificial Sequence; identical to SEQ ID NO: 112441
  derived and/or modified CDS sequence (opt2) from neuraminidase__InfluenzaA__AFV53241

SEQ ID NO: 119227 - RNA, 1410 nt, Artificial Sequence; identical to SEQ ID NO: 110127
  derived and/or modified CDS sequence (opt2) from neuraminidase__InfluenzaA__AFV53252

SEQ ID NO: 119228 - RNA, 1413 nt, Artificial Sequence
  derived and/or modified CDS sequence (opt2) from neuraminidase__InfluenzaA__AFV53263
augaaccccaaccagaagaucaucaccaucggcuccaucugcauggccaucggcaccaucucccucauccuccagaucggcaacaucaucuccaucuggaucucccacuccauccagaccggcucccagaaccacaccggcaucugcaaccagcgcaucaucaccuacgagaacaacaccugggucaaccagaccuacgucaacaucuccaacaccaacgucgucgccggcaaggacaccaccuccaugauccucgccggcaacuccucccucugccccauccgcggcugggccaucuacuccaaggacaacuccauccgcaucggcuccaagggcgacgucuucgucauccgcgagcccuucaucuccugcucccaccucgagugccgcaccuucuuccucacccagggcgcccuccucaacgacaagcacuccaacggcaccgucaaggaccgcucccccuaccgcgcccucauguccugccccaucggcgaggcccccucccccuacaacucccgcuucgaguccgucgccugguccgccuccgccugccacgacggcaugggcuggcucaccaucggcaucuccggccccgacgacggcgccgucgccguccucaaguacaacggcaucaucaccgagaucaucaaguccuggcgcaagcagauccuccgcacccaggaguccgagugcgucugcgucaacggcuccugcuucaccaucaugaccgacggccccuccaaccgccccgccuccuaccgcaucuucaagaucgagaagggcaagaucaccaaguccaucgagcucgacgcccccaacucccacuacgaggagugcuccugcuaccccgacaccggcaaggucaugugcgucugccgcgacaacuggcacggcuccaaccgccccugggucuccuucaaccagaaccucgacuaccagaucggcuacaucugcuccggcgucuucggcgacaacccccgccccaaggacggcaagggcuccugcgaccccgucaacgucgacggcgccgacggcgucaagggcuucuccuaccgcuacggcaacggcgucuggaucggccgcaccaaguccaacuccucccgcaagggcuucgagaugaucugggaccccaacggcuggaccaacaccgacggcaacuucuccgucaagcaggacgucgucgccaugaccgacugguccggcuacuccggcuccuucguccagcaccccgagcucaccggccucgacugcauccgccccugcuucugggucgagcucauccgcggccgcccccgcgaggagaccaccaucuggaccuccggcuccuccaucuccuucugcggcgucaacuccgacaccgucaacugguccuggcccgacggcgccgagcuccccuucaccaucgacaaguga

SEQ ID NO: 119229 - RNA, 1410 nt, Artificial Sequence
  derived and/or modified CDS sequence (opt2) from neuraminidase__InfluenzaA__AFV53274
augaaccccaaccagaagaucaucaccaucggcuccgucucccucaucaucgccaccgucugcuuccucaugcagaucgccauccucgucaccaccgucacccuccacuucaagcagcacgagugcgacucccccgccuccaaccaggucaugcccugcgagcccaucaucaucgagcgcaacaucaccgagaucgucuaccucaacaacaccaccaucgagaaggagaucugccccaaggucgucgaguaccgcaacugguccaagccccagugccagaucaccggcuucgcccccuucuccaaggacaacuccauccgccucuccgccggcggcgacaucugggucacccgcgagcccuacgucuccugcgaccccggcaagugcuaccaguucgcccucggccagggcaccacccucgacaacaagcacuccaacgacaccauccacgaccgcaucccccaccgcacccuccucaugaacgagcucggcguccccuuccaccucggcacccgccaggucugcgucgccugguccuccuccuccugccacgacggcaaggccuggcuccacgucugcgucaccggcgacgacaagaacgccaccgccuccuucaucuacgacggccgccucgucgacuccaucggcuccuggucccagaacauccuccgcacccaggaguccgagugcgucugcaucaacggcaccugcaccgucgucaugaccgacggcuccgccuccggccgcgccgacacccgcauccucuucaucgaggagggcaagaucguccacaucuccccccucuccggcuccgcccagcacgucgaggagugcuccugcuacccccgcuaccccgacguccgcugcaucugccgcgacaacuggaagggcuccaaccgccccgucaucgacaucaacauggaggacuacuccaucgacuccuccuacgucugcuccggccucgucggcgacaccccccgcaacgacgaccgcuccuccaacuccaacugccgcaaccccaacaacgagcgcggcaaccccggcgucaagggcugggccuucgacaacggcgacgacgucuggaugggccgcaccaucuccaaggaccuccgcuccggcuacgagaccuucaaggucaucggcggcugguccacccccaacuccaagucccagaucaaccgccaggucaucgucgacuccaacaacugguccggcuacuccggcaucuucuccgucgagggcaaguccugcaucaaccgcugcuucuacgucgagcucauccgcggccgccagcaggagacccgcgucugguggaccuccaacuccaucgucgucuucugcggcaccuccggcaccuacggcaccggcuccuggcccgacggcgccaacaucaacuucaugcccaucuga

SEQ ID NO: 119230 - RNA, 1410 nt, Artificial Sequence
  derived and/or modified CDS sequence (opt2) from neuraminidase__InfluenzaA__AFV53285
augaaccccaaccagaagaucaucaccaucggcuccgucucccucaccaucgccaccgucugcuuccucaugcagaucgccauccucgccaccaccgucacccuccacuucaagcagcacgagugcgacucccccgccuccaaccaggucaugcccugcgagcccaucaucaucgagcgcaacaucaccgagaucgucuaccucaacaacaccaccaucgagaaggagaucugccccgaggucgucgaguaccgcaacugguccaagccccagugccagaucaccggcuucgcccccuucuccaaggacaacuccauccgccucuccgccggcggcgacaucugggucacccgcgagcccuacgucuccugcgaccccggcaagugcuaccaguucgcccucggccagggcaccacccucgacaacaagcacuccaacggcaccauccacgaccgcaucccccaccgcacccuccucaugaacgagcucggcguccccuuccaccucggcaccaagcaggucugcgucgccugguccuccuccuccugccacgacggcaaggccuggcuccacgucugcgucaccggcgacgaccgcaacgccaccgccuccuucaucuacgacggccgccucgucgacuccaucggcuccuggucccagaacauccuccgcacccaggaguccgagugcgucugcaucaacggcaccugcaccgucgucaugaccgacggcuccgccuccggccgcgccgacacccgcauccucuucaucaaggagggcaagaucguccacaucuccccccucuccggcuccgcccagcacaucgaggagugcuccugcuacccccgccaccccgacguccgcugcaucugccgcgacaacuggaagggcuccaaccgccccgucaucaacaucaacauggaggacuacuccaucgacuccuccuacgucugcuccggccucgucggcgacaccccccgcaacgacgacuccuccuccaacuccaacugccgcgaccccaacaacgagcgcggcaaccccggcgucaagggcugggccuucgacaacggcgacgacgucuggaugggccgcaccaucaacaaggacucccgcuccggcuacgagaccuucaaggucaucggcggcugguccacccccaacuccaagucccaggucaaccgccaggucaucgucgacaacaacaacugguccggcuacuccggcaucuucuccgucgagggcaaguccugcaucaaccgcugcuucuacgucgagcucauccgcggccgcccccaggagacccgcgucugguggaccuccaacuccaucgucgucuucugcggcaccuccggcaccuacggcaccggcuccuggcccgacggcgccaacaucaacuucaugcccaucuga

SEQ ID NO: 119231 - RNA, 1410 nt, Artificial Sequence
  derived and/or modified CDS sequence (opt2) from neuraminidase__InfluenzaA__AFV53296
augaaccccaaccagaagaucaucaucaucggcuccgucucccucaccaucgccaccgucugcuuccucaugcagaucgccauccucgucaccaccgucacccuccacuucaagcagcacgagugcgacucccccgccuccaaccaggucaugcccugcgagcccaucaucaucgagcgcaacaucaccgagaucgucuaccucaacaacaccaccaucgagaaggagaucugccccgaggucgucgaguaccgcaacugguccaagccccagugccagaucaccggcuucgcccccuucuccaaggacaacuccauccgccucuccgccggcggcgacaucugggucacccgcgagcccuacgucuccugcgaccccuccaagugcuaccaguucgcccucggccagggcaccacccucgacaacaagcacuccaacgacaccauccacgaccgcaucccccaccgcacccuccucaugaacgagcucggcguccccuuccaccucggcacccgccaggucugcgucgccugguccuccuccuccugccacgacggcaaggccuggcuccacgucugcgucaccggcgacgacaagaacgccaccgccuccuucaucuacgacggccgccucgucgacuccaucggcuccuggucccagaacauccuccgcacccaggaguccgagugcgucugcaucaacggcaccugcaccgucgucaugaccgacggcuccgccuccggccgcgccgacacccgcauccucuucaucgaggagggcaagaucguccacaucuccccccucuccggcuccgcccagcacgucgaggagugcuccugcuacccccgcuaccccgacguccgcugcaucugccgcgacaacuggaagggcuccaaccgccccgucaucgacaucaacauggaggacuacuccaucgacuccuccuacgucugcuccggccucgucggcgacaccccccgcaacgacgaccgcuccuccaacuccaacugccgcgaccccaacaacgagcgcggcaaccccggcgucaagggcugggccuucgacaacggcgacgacgucuggaugggccgcaccaucuccaaggaccuccgcuccggcuacgagaccuucaaggucaucggcggcugguccacccccaacuccaagucccagaucaaccgccaggucaucgucgacuccaacaacugguccggcuacuccggcaucuucuccgucgagggcaaguccugcaucaaccgcugcuucuacgucgagcucauccgcggccgccagcaggagacccgcgucugguggaccuccaacuccaucgucgucuucugcggcaccuccggcaccuacggcaccggcuccuggcccgacggcgccaacaucaacuucaugcccaucuga

SEQ ID NO: 119232 - RNA, 1410 nt, Artificial Sequence
  derived and/or modified CDS sequence (opt2) from neuraminidase__InfluenzaA__AFV53307
augaaccccaaccagaagaucaucaccaucggcuccgucucccucaccaucgccaccgucugcuuccucaugcagaucgccauccucgccaccaccgucacccuccacuucaagcagcacgagugcgacucccccgccuccaaccaggucaugcccugcgagcccaucaucaucgagcgcaacaucaccgagaucgucuaccucaacaacaccaccaucgagaaggagaucugccccgaggucgucgaguaccgcaacugguccaagccccagugccagaucaccggcuucgcccccuucuccaaggacaacuccauccgccucuccgccggcggcgacaucugggucacccgcgagcccuacgucuccugcgaccccggcaagugcuaccaguucgcccucggccagggcaccacccucgacaacaagcacuccaacggcaccauccacgaccgcaucccccaccgcacccuccucaugaacgagcucggcguccccuuccaccucggcaccaagcaggucugcgucgccugguccuccuccuccugccacgacggcaaggccuggcuccacgucugcgucaccggcgacgaccgcaacgccaccgccuccuucaucuacgacggccgccucgucgacuccaucggcuccuggucccagaacauccuccgcacccaggaguccgagugcgucugcaucaacggcaccugcaccgucgucaugaccgacggcuccgccuccggccgcgccgacacccgcauccucuucaucaaggagggcaagaucguccacaucuccccccucuccggcuccgcccagcacgucgaggagugcuccugcuacccccgcuaccccgacguccgcugcaucugccgcgacaacuggaagggcuccaaccgccccgucaucgacaucaacauggaggacuacuccaucgacuccuccuacgucugcuccggccucgucggcgacaccccccgcaacgacgacuccuccuccaacuccaacugccgcgaccccaacaacgagcgcggcaaccccggcgucaagggcugggccuucgacaacggcgacgacgucuggaugggccgcaccaucaacaaggacucccgcuccggcuacgagaccuucaaggucaucggcggcugguccacccccaacuccaagucccaggucaaccgccaggucaucgucgacaacaacaacugguccggcuacuccggcaucuucuccgucgagggcaaguccugcaucaaccgcugcuucuacgucgagcucauccgcggccgcccccaggagacccgcgucugguggaccuccaacuccaucgucgucuucugcggcaccuccggcaccuacggcaccggcuccuggcccgacggcgccaacaucaacuucaugcccaucuga

SEQ ID NO: 119233 - RNA, 1410 nt, Artificial Sequence
  derived and/or modified CDS sequence (opt2) from neuraminidase__InfluenzaA__AFV53317
augaaccccaaccagaagaucaucaccaucggcuccgucucccucaccaucgccaccgucugcuuccucaugcagaucgccauccucgccaccaccgucacccuccacuucaagcagcacgagugcgacucccccgccuccaaccaggucaugcccugcgagcccaucaucaucgagcgcaacaucaccgagaucgucuaccucaacaacaccaccaucgagaaggagaucugccccgaggucgucgaguaccgcaacugguccaagccccagugccagaucaccggcuucgcccccuucuccaaggacaacuccauccgccucuccgccggcggcgacaucugggucacccgcgagcccuacgucuccugcgaccccggcaagugcuaccaguucgcccucggccagggcaccacccucgacaacaagcacuccaacggcaccauccacgaccgcuccccccaccgcacccuccucaugaacgagcucggcguccccuuccaccucggcaccaagcaggucugcgccgccugguccuccuccuccugccacgacggcaaggccuggcuccacgucugcgucaccggcgacgaccgcaacgccaccgccuccuucaucuacgacggccgccucgucgacuccaucggcuccuggucccagaacauccuccgcacccaggaguccgagugcgucugcaucaacggcaccugcaccgucgucaugaccgacggcuccgccuccggccgcgccgacacccgcauccucuucaucaaggagggcaagaucguccacaucggcccccucuccggcuccgcccagcacaucgaggagugcuccugcuacccccgcuaccccgacguccgcugcaucugccgcgacaacuggaagggcuccaaccgccccgucaucgacaucaacauggaggacuacuccaucgacuccuccuacgucugcuccggccucgucggcgacaccccccgcaacgacgacuccuccuccaacuccaacugccgcgaccccaacaacgagcgcggcaaccccggcgucaagggcugggccuucgacaacggcgacgacgucuggaugggccgcaccaucuccaaggaccuccgcuccggcuacgagaccuucaaggucaucggcggcugguccacccccaacuccaagucccaggucaaccgccaggucaucgucgacaacaacaacugguccggcuacuccggcaucuucuccgucgagggcaaguccugcaucaaccgcugcuucuacgucgagcucauccgcggccgcccccaggagacccgcgucugguggaccuccaacuccaucgucgucuucugcggcaccuccggcaccuacggcaccggcuccuggcccgacggcgccaacaucaacuucaugcccaucuga

SEQ ID NO: 119234 - RNA, 1410 nt, Artificial Sequence
  derived and/or modified CDS sequence (opt2) from neuraminidase__InfluenzaA__AFV53328
augaaccccaaccagaagaucaucaccaucggcuccgucucccucaccaucgccaccgucugcuuccucaugcacaucgccauccucgccaccaccgucacccuccacuucaagcagcacgagugcgacucccccgccuccaaccaggccaugcccugcgagcccaucaucaucgagcgcaacaucaccgagaucgucuaccucaacaacaccaccaucgagaaggagaucugccccgaggucgucgaguaccgcaacugguccaagccccagugccagaucaccggcuucgcccccuucuccaaggacaacuccauccgccucuccgccggcggcgacaucugggucacccgcgagcccuacgucuccugcgaccccggcaagugcuaccaguucgcccucggccagggcaccacccucgacaacaagcacuccaacggcaccauccacgaccgcaucccccaccgcacccuccucaugaacgagcucggcguccccuuccaccucggcaccaagcaggucugcgucgccugguccuccuccuccugccacgacggcaaggccuggcuccacgucugcaucaccggcgacgaccgcaacgccaccgccuccuucaucuacgacggccgccucgucgacuccaucggcuccuggucccagaacauccuccgcacccaggaguccgagugcgucugcaucaacggcaccugcaccgucgucaugaccgacggcuccgccuccggccgcgccgacacccgcauccucuucaucaaggagggcaagaucguccacaucuccccccucuccggcuccgcccagcacaucgaggagugcuccugcuacccccgcuaccccgacguccgcugcaucugccgcgacaacuggaagggcuccaaccgccccgucaucgacaucaacauggaggacuacuccaucgacuccuccuacgucugcuccggccucgucggcgacaccccccgcaacgacgacuccuccuccaacuccaacugccgcgaccccaacaacgagcgcggcaaccccggcgucaagggcugggccuucgacaacggcgacgacgucuggaugggccgcaccaucuccaaggaccuccgcuccggcuacgagaccuucaaggucaucggcggcugguccacccccaacuccaagucccaggucaaccgccaggucaucgucgacaacaacaacugguccggcuacuccggcaucuucuccgucgagggcaaguccugcaucaaccgcugcuucuacgucgagcucauccgcggccgcccccaggagacccgcgucugguggaccuccaacuccaucgucgucuucugcggcaccuccggcaccuacggcaccggcuccuggcccgacggcgccaacaucaacuucaugcccaucuga

SEQ ID NO: 119235 - RNA, 1410 nt, Artificial Sequence
  derived and/or modified CDS sequence (opt2) from neuraminidase__InfluenzaA__AFV53339
augaaccccaaccagaagaucaucaccaucggcuccgccucccucaccaucgccaccgucugcuuccucaugcagaucgccauccucgucaccaccgucacccuccacuucaagcagcacgagugcgacucccccgccuccaaccaggucaugcccugcgagcccaucaucaucgagcgcaacaucaccgagaucgucuaccucaacaacaccaccaucgagaaggagaucugccccaaggucgucgaguaccgcaacugguccaagccccagugcaagaucaccggcuucgcccccuucuccaaggacaacuccauccgccucuccgccggcggcgacaucugggucacccgcgagcccuacgucuccugcgaccccggcaagugcuaccaguucgcccucggccagggcaccacccucgacaacaagcacuccaacgacaccauccacgaccgcaucccccaccgcacccuccucaugaacgagcucggcguccccuuccaccucggcacccgccaggucugcaucgccugguccuccuccuccugccacgacggcaaggccuggcuccacgucugcgucaccggcgacgacaagaacgccaccgccuccuucaucuacgacggccgccucgucgacuccaucggcuccuggucccagaacauccuccgcacccaggaguccgagugcgucugcaucaacggcaccugcaccgucgucaugaccgacggcuccgccuccggccgcgccgacacccgcauccucuucaucgaggagggcaagaucguccacauguccccccucuccggcuccgcccagcacgucgaggagugcuccugcuacccccgcuaccccgacguccgcugcaucugccgcgacaacuggaagggcuccaaccgccccgucgucgacaucaacauggaggacuacuccaucgacuccuccuacgucugcuccggccucgucggcgacaccccccgcaacgacgaccgcuccuccaacuccaacugccgcaaccccaacaacgagaagggcaaccagggcgucaagggcugggccuucgacaacggcgacgacgucuggaugggccgcaccaucuccaaggaccuccgcuccggcuacgagaccuucaaggucaucggcggcugguccacccccaacuccaagucccagaucaaccgccaggucaucgucgacuccgacaaccgcuccggcuacuccggcaucuucuccgucgagggcaaguccugcaucaaccgcugcuucuacgucgagcucauccgcggccgcaagcaggagacccgcgucugguggaccuccaacuccaucgucgucuucugcggcaccuccggcaccuacggcaccggcuccuggcccgacggcgccaacaucaaccucaugcccaucuga

SEQ ID NO: 119236 - RNA, 1410 nt, Artificial Sequence; identical to SEQ ID NO: 112774
  derived and/or modified CDS sequence (opt2) from neuraminidase__InfluenzaA__AFX96367

SEQ ID NO: 119237 - RNA, 1410 nt, Artificial Sequence; identical to SEQ ID NO: 112774
  derived and/or modified CDS sequence (opt2) from neuraminidase__InfluenzaA__AFX96386

SEQ ID NO: 119238 - RNA, 1410 nt, Artificial Sequence; identical to SEQ ID NO: 113128
  derived and/or modified CDS sequence (opt2) from neuraminidase__InfluenzaA__AFX96401

SEQ ID NO: 119239 - RNA, 1410 nt, Artificial Sequence; identical to SEQ ID NO: 113128
  derived and/or modified CDS sequence (opt2) from neuraminidase__InfluenzaA__AFX96411

SEQ ID NO: 119240 - RNA, 1410 nt, Artificial Sequence; identical to SEQ ID NO: 113128
  derived and/or modified CDS sequence (opt2) from neuraminidase__InfluenzaA__AFX96421

SEQ ID NO: 119241 - RNA, 1410 nt, Artificial Sequence; identical to SEQ ID NO: 113128
  derived and/or modified CDS sequence (opt2) from neuraminidase__InfluenzaA__AFX96431

SEQ ID NO: 119242 - RNA, 1410 nt, Artificial Sequence; identical to SEQ ID NO: 113128
  derived and/or modified CDS sequence (opt2) from neuraminidase__InfluenzaA__AFX96441

SEQ ID NO: 119243 - RNA, 1410 nt, Artificial Sequence; identical to SEQ ID NO: 113128
  derived and/or modified CDS sequence (opt2) from neuraminidase__InfluenzaA__AFX96451

SEQ ID NO: 119244 - RNA, 1410 nt, Artificial Sequence; identical to SEQ ID NO: 113128
  derived and/or modified CDS sequence (opt2) from neuraminidase__InfluenzaA__AFX96461

SEQ ID NO: 119245 - RNA, 1410 nt, Artificial Sequence; identical to SEQ ID NO: 112774
  derived and/or modified CDS sequence (opt2) from neuraminidase__InfluenzaA__AFX96471

SEQ ID NO: 119246 - RNA, 1410 nt, Artificial Sequence; identical to SEQ ID NO: 112774
  derived and/or modified CDS sequence (opt2) from neuraminidase__InfluenzaA__AFX96481

SEQ ID NO: 119247 - RNA, 1410 nt, Artificial Sequence; identical to SEQ ID NO: 112774
  derived and/or modified CDS sequence (opt2) from neuraminidase__InfluenzaA__AFX96491

SEQ ID NO: 119248 - RNA, 1410 nt, Artificial Sequence; identical to SEQ ID NO: 112774
  derived and/or modified CDS sequence (opt2) from neuraminidase__InfluenzaA__AFX96501

SEQ ID NO: 119249 - RNA, 1410 nt, Artificial Sequence; identical to SEQ ID NO: 112774
  derived and/or modified CDS sequence (opt2) from neuraminidase__InfluenzaA__AFX96511

SEQ ID NO: 119250 - RNA, 1410 nt, Artificial Sequence
  derived and/or modified CDS sequence (opt2) from neuraminidase__InfluenzaA__AFX96521
augaaccccaaccagaagaucaucaccaucggcuccgucugcaugaccaucggcauggccaaccucauccuccagaucggcaacaucaucuccaucuggaucucccacuccauccagcucggcaaccagaaccagaucgagaccugcaaccaguccgucaucaccuacgagaacaacaccugggucaaccagaccuacgucaacaucuccaacaccaacuucgccgcccgccaguccgucgucuccgucaagcucgccggcaacuccucccucugccccgucuccggcugggccaucuacuccaaggacaacuccauccgcaucggcuccaagggcgacgucuucgucauccgcgagcccuucaucuccugcuccccccucgagugccgcaccuucuuccucacccagggcgcccuccucaacgacaagcacuccaacggcaccaucaaggaccgcucccccuaccgcacccucauguccugccccaucggcgagguccccucccccuacaacucccgcuucgaguccgucgccugguccgccuccgccugccacgacggcaucaacuggcucaccaucggcaucuccggccccgacaacggcgccgucgccguccucaaguacaacggcaucaucaccgacaccaucaaguccuggcgcaacaacauccuccgcacccaggaguccgagugcgccugcgucaacggcuccugcuucaccgucaugaccgacggccccuccgacggccaggccuccuacaagaucuuccgcaucgagaagggcaagaucgucaaguccgucgagaugaacgcccccaacuaccacuacgaggagugcuccugcuaccccgacuccuccgagaucaccugcgucugccgcgacaacuggcacggcuccaaccgccccugggucuccuucaaccagaaccucgaguaccagaucggcuacaucugcuccggcaucuucggcgacaacccccgccccaacgacaagaccggcuccugcggccccgucuccuccaacggcgccaacggcgucaagggcuucuccuucaaguacggcaacggcgucuggaucggccgcaccaaguccaucuccucccgcaacggcuucgagaugaucugggaccccaacggcuggaccggcaccgacaacaacuucuccaucaagcaggacaucgucggcaucaacgagugguccggcuacuccggcuccuucguccagcaccccgagcucaccggccucgacugcauccgccccugcuucugggucgagcucauccgcggccgccccaaggagaacaccaucuggaccuccggcuccuccaucuccuucugcggcgucaacuccgacaccgucggcugguccuggcccgacggcgccgagcuccccuucaccaucgacaaguga

SEQ ID NO: 119251 - RNA, 1410 nt, Artificial Sequence; identical to SEQ ID NO: 112774
  derived and/or modified CDS sequence (opt2) from neuraminidase__InfluenzaA__AFX96531

SEQ ID NO: 119252 - RNA, 1410 nt, Artificial Sequence; identical to SEQ ID NO: 112774
  derived and/or modified CDS sequence (opt2) from neuraminidase__InfluenzaA__AFX96541

SEQ ID NO: 119253 - RNA, 1410 nt, Artificial Sequence; identical to SEQ ID NO: 112774
  derived and/or modified CDS sequence (opt2) from neuraminidase__InfluenzaA__AFX96551

SEQ ID NO: 119254 - RNA, 1410 nt, Artificial Sequence; identical to SEQ ID NO: 117298
  derived and/or modified CDS sequence (opt2) from neuraminidase__InfluenzaA__AFX96561

SEQ ID NO: 119255 - RNA, 1410 nt, Artificial Sequence; identical to SEQ ID NO: 112774
  derived and/or modified CDS sequence (opt2) from neuraminidase__InfluenzaA__AFX96571

SEQ ID NO: 119256 - RNA, 1410 nt, Artificial Sequence; identical to SEQ ID NO: 112774
  derived and/or modified CDS sequence (opt2) from neuraminidase__InfluenzaA__AFX96581

SEQ ID NO: 119257 - RNA, 1410 nt, Artificial Sequence; identical to SEQ ID NO: 112774
  derived and/or modified CDS sequence (opt2) from neuraminidase__InfluenzaA__AFX96591

SEQ ID NO: 119258 - RNA, 1410 nt, Artificial Sequence; identical to SEQ ID NO: 112774
  derived and/or modified CDS sequence (opt2) from neuraminidase__InfluenzaA__AFX96601

SEQ ID NO: 119259 - RNA, 1410 nt, Artificial Sequence; identical to SEQ ID NO: 112774
  derived and/or modified CDS sequence (opt2) from neuraminidase__InfluenzaA__AFX96611

SEQ ID NO: 119260 - RNA, 1410 nt, Artificial Sequence; identical to SEQ ID NO: 112774
  derived and/or modified CDS sequence (opt2) from neuraminidase__InfluenzaA__AFX96621

SEQ ID NO: 119261 - RNA, 1410 nt, Artificial Sequence; identical to SEQ ID NO: 112774
  derived and/or modified CDS sequence (opt2) from neuraminidase__InfluenzaA__AFX96631

SEQ ID NO: 119262 - RNA, 1410 nt, Artificial Sequence
  derived and/or modified CDS sequence (opt2) from neuraminidase__InfluenzaA__AFX96641
augaaccccaaccagaagaucaucaccaucggcuccgucugcaugaccaucggcauggccaaccucauccuccagaucggcaacaucaucuccaucuggaucucccacuccauccagcucggcaaccagaaccagaucgagaccugcaaccaguccgucaucaccuacgagaacaacaccugggucaaccagaccuacgucaacaucuccaacaccaacuucgccgccggccaguccgucgucuccgucaagcucgccggcaacuccucccucugccccgucuccggcugggccaucuacuccaaggacaacuccauccgcaucggcuccaagggcgacgucuucgucauccgcgagcccuucaucuccugcuccccccucgagugccgcaccuucuuccucacccagggcgcccuccucaacgacaagcacuccaacggcaccaucaaggaccgcucccccuaccgcacccucauguccugccccaucggcgagguccccucccccuacaacuccaaguucgaguccgucgccugguccgccuccgccugccacgacggcaucaacuggcucaccaucggcaucuccggccccgacaacggcgccgucgccguccucaaguacaacggcaucaucaccgacaccaucaaguccuggcgcaacaacauccuccgcacccaggaguccgagugcgccugcgucaacggcuccugcuucaccgucaugaccgacggccccuccgacggccaggccuccuacaagaucuuccgcaucgagaagggcaagaucgucaaguccgucgagaugaacgcccccaacuaccacuacgaggagugcuccugcuaccccgacuccuccgagaucaccugcgucugccgcgacaacuggcacggcuccaaccgccccugggucuccuucaaccagaaccucgaguaccagaucggcuacaucugcuccggcaucuucggcgacaacccccgccccaacgacaagaccggcuccugcggccccgucuccuccaacggcgccaacggcgucaagggcuucuccuucaaguacggcaacggcgucuggaucggccgcaccaaguccaucuccucccgcaacggcuucgagaugaucugggaccccaacggcuggaccggcaccgacaacaacuucuccaucaagcaggacaucgucggcaucaacgagugguccggcuacuccggcuccuucguccagcaccccgagcucaccggccucgacugcauccgccccugcuucugggucgagcucauccgcggccgccccaaggagaacaccaucuggaccuccggcuccuccaucuccuucugcggcgucaacuccgacaccgucggcugguccuggcccgacggcgccgagcuccccuucaccaucgacaaguga

SEQ ID NO: 119263 - RNA, 1410 nt, Artificial Sequence; identical to SEQ ID NO: 112774
  derived and/or modified CDS sequence (opt2) from neuraminidase__InfluenzaA__AFX96651

SEQ ID NO: 119264 - RNA, 1410 nt, Artificial Sequence; identical to SEQ ID NO: 112774
  derived and/or modified CDS sequence (opt2) from neuraminidase__InfluenzaA__AFX96661

SEQ ID NO: 119265 - RNA, 1410 nt, Artificial Sequence; identical to SEQ ID NO: 112774
  derived and/or modified CDS sequence (opt2) from neuraminidase__InfluenzaA__AFX96671

SEQ ID NO: 119266 - RNA, 1410 nt, Artificial Sequence; identical to SEQ ID NO: 112774
  derived and/or modified CDS sequence (opt2) from neuraminidase__InfluenzaA__AFX96681

SEQ ID NO: 119267 - RNA, 1410 nt, Artificial Sequence; identical to SEQ ID NO: 112774
  derived and/or modified CDS sequence (opt2) from neuraminidase__InfluenzaA__AFX96691

SEQ ID NO: 119268 - RNA, 1410 nt, Artificial Sequence
  derived and/or modified CDS sequence (opt2) from neuraminidase__InfluenzaA__AFX96701
augaaccccaaccagaagaucaucaccaucggcuccgucugcaugaccaucggcauggccaaccucauccuccagaucggcaacaucaucuccaucuggaucucccacuccauccagcucggcaaccagaaccagaucgagaccugcaaccaguccaucaucaccuacgagaacaacaccugggucaaccagaccuacgucaacaucuccaacaccaacuucgccgccggccaguccgucgucuccgucaagcucgccggcaacuccucccucugccccgucuccggcugggccaucuacuccaaggacaacuccauccgcaucggcuccaagggcgacgucuucgucauccgcgagcccuucaucuccugcuccccccucgagugccgcaccuucuuccucacccagggcgcccuccucaacgacaagcacuccaacggcaccaucaaggaccgcucccccuaccgcacccucauguccugccccaucggcgagguccccucccccuacaacucccgcuucgaguccgucgccugguccgccuccgccugccacgacggcaucaacuggcucaccaucggcaucuccggccccgacaacggcgccgucgccguccucaaguacaacggcaucaucaccgacaccaucaaguccuggcgcaacaacauccuccgcacccaggaguccgagugcgccugcgucaacggcuccugcuucaccgucaugaccgacggccccuccgacggccaggccuccuacaagaucuuccgcaucgagaagggcaagaucgucaaguccgucgagaugaacgcccccaacuaccacuacgaggagugcuccugcuaccccgacuccuccgagaucaccugcgucugccgcgacaacuggcacggcuccaaccgccccugggucuccuucaaccagaaccucgaguaccagaucggcuacaucugcuccggcaucuucggcgacaacccccgccccaacgacaagaccggcuccugcggccccgucuccuucaacggcgccaacggcgucaagggcuucuccuucaaguacggcaacggcgucuggaucggccgcaccaaguccaucuccucccgcaacggcuucgagaugaucugggaccccaacggcuggaccggcaccgacaacaacuucuccaucaagcaggacaucgucggcaucaacgagugguccggcuacuccggcuccuucguccagcaccccgagcucaccggccucgacugcauccgccccugcuucugggucgagcucauccgcggccgccccaaggagaacaccaucuggaccuccggcuccaucaucuccuucugcggcgucaacuccgacaccgucggcugguccuggcccgacggcgccgagcuccccuucaccaucgacaaguga

SEQ ID NO: 119269 - RNA, 1410 nt, Artificial Sequence; identical to SEQ ID NO: 112774
  derived and/or modified CDS sequence (opt2) from neuraminidase__InfluenzaA__AFX96711

SEQ ID NO: 119270 - RNA, 1410 nt, Artificial Sequence
  derived and/or modified CDS sequence (opt2) from neuraminidase__InfluenzaA__AFX96721
augaaccccaaccagaagaucaucaccaucggcuccgucugcaugaccaucggcauggccaaccucauccuccagaucggcaacaucaucuccaucuggaucucccacuccauccagcucggcaaccagaaccagaucgagaccugcaaccaguccgucaucaccuacgagaacaacaccugggucaaccagaccuacgucaacaucuccaacaccaacuucgccgccggccaguccgucgucuccgucaagcucgccggcaacuccucccucugccccgucuccggcugggccaucuacuccaaggacaacuccauccgcaucggcuccaagggcgacgucuucgucauccgcgagcccuucaucuccugcuccccccucgagugccgcaccuucuuccucacccagggcgcccuccucaacgacaagcacuccaacggcaccaucaaggaccgcucccccuaccgcacccucauguccugccccaucggcgagguccccucccccuacaacucccgcuucgaguccgucgccugguccgccuccgccugccacgacggcaucaacuggcucaccaucggcaucuccggccccgacaacggcgccgucgccguccucaaguacaacggcaucaucaccgacaccaucaaguccuggcgcaacaacauccuccgcacccaggaguccgagugcgccugcgucaacggcuccugcuucaccgucaugaccgacggccccuccgacggccaggccuccuacaagaucuuccgcaucgagaagggcaagaucgucaaguccgucgagaugaacgcccccaacuaccacuacgaggagugcuccugcuaccccgacuccuccgagaucaccugcgucugccgcgacaacuggcacggcuccaaccgccccugggucuccuucaaccagaaccucgaguaccagaucggcuacaucugcuccggcaucuucggcgacaacccccgccccaacgacaagaccggcuccugcggccccgucuccuccaacggcgccaacggcgucaagggcuucuccuucaaguacggcaacggcgucuggaucggccgcaccaaguccaucuccucccgcaacggcuucgagaugaucugggaccccaacggcuggaccggcaccgacaacaacuucuccaucaagcaggacaucgucggcaucaacgagugguccggcuacuccggcuccuucguccagcaccccgagcucaccggccucgacugcauccgccccugcuucugggucgagcucauccgcggccgccccaaggagaacaccgucuggaccuccggcuccuccaucuccuucugcggcgucaacuccgacaccgucggcugguccuggcccgacggcgccgagcuccccuucaccaucgacaaguga

SEQ ID NO: 119271 - RNA, 1410 nt, Artificial Sequence; identical to SEQ ID NO: 119270
  derived and/or modified CDS sequence (opt2) from neuraminidase__InfluenzaA__AFX96731

SEQ ID NO: 119272 - RNA, 1410 nt, Artificial Sequence; identical to SEQ ID NO: 112774
  derived and/or modified CDS sequence (opt2) from neuraminidase__InfluenzaA__AFX96741

SEQ ID NO: 119273 - RNA, 1410 nt, Artificial Sequence; identical to SEQ ID NO: 112774
  derived and/or modified CDS sequence (opt2) from neuraminidase__InfluenzaA__AFX96751

SEQ ID NO: 119274 - RNA, 1410 nt, Artificial Sequence; identical to SEQ ID NO: 113792
  derived and/or modified CDS sequence (opt2) from neuraminidase__InfluenzaA__AFX96761

SEQ ID NO: 119275 - RNA, 1410 nt, Artificial Sequence; identical to SEQ ID NO: 112774
  derived and/or modified CDS sequence (opt2) from neuraminidase__InfluenzaA__AFX96771

SEQ ID NO: 119276 - RNA, 1410 nt, Artificial Sequence
  derived and/or modified CDS sequence (opt2) from neuraminidase__InfluenzaA__AFX96791
augaaccccaaccagaagaucaucaccaucggcuccgucugcaugaccaucggcauggccaaccucauccuccaggucggcaacaucaucuccaucuggaucucccacuccauccagcucggcaaccagaaccagaucgagaccugcaaccaguccgucaucaccuacgagaacaacaccugggucaaccagaccuacgucaacaucuccaacaccaacuucgccgccggccaguccgucgucuccgucaagcucgccggcaacuccucccucugccccgucuccggcugggccaucuacuccaaggacaacuccauccgcaucggcuccaagggcgacgucuucgucauccgcgagcccuucaucuccugcuccccccucgagugccgcaccuucuuccucacccagggcgcccuccucaacgacaagcacuccaacggcaccaucaaggaccgcucccccuaccgcacccucauguccugccccaucggcgagguccccucccccuacaacucccgcuucgaguccgucgccugguccgccuccgccugccacgacggcaucaacuggcucaccaucggcaucuccggccccgacaacggcgccgucgccguccucaaguacaacggcaucaucaccgacaccaucaaguccuggcgcaacaacauccuccgcacccaggaguccgagugcgccugcaucaacggcuccugcuucaccgucaugaccgacggccccuccgacggccaggccuccuacaagaucuuccgcaucgagaagggcaagaucgucaaguccgucgagaugaacgcccccaacuaccacuacgaggagugcuccugcuaccccgacuccuccgagaucaccugcgucugccgcgacaacuggcacggcuccaaccgccccugggucuccuucaaccagaaccucgaguaccagaucggcuacaucugcuccggcaucuucggcgacaacccccgccccaacgacaagaccggcuccugcggccccgucuccuccaacggcgccaacggcgucaagggcuucuccuucaaguacggcaacggcgucuggaucggccgcaccaaguccaucuccucccgcaacggcuucgagaugaucugggaccccaacggcuggaccggcaccgacaacaacuucuccaucaagcaggacaucgucggcaucaacgagugguccggcuacuccggcuccuucguccagcaccccgagcucaccggccucgacugcauccgccccugcuucugggucgagcucauccgcggccgccccaaggagaacaccaucuggaccuccggcuccuccaucuccuucugcggcgucaacuccgacaccgucggcugguccuggcccgacggcgccgagcuccccuucaccaucgacaaguga

SEQ ID NO: 119277 - RNA, 1410 nt, Artificial Sequence; identical to SEQ ID NO: 119276
  derived and/or modified CDS sequence (opt2) from neuraminidase__InfluenzaA__AFX96801

SEQ ID NO: 119278 - RNA, 1410 nt, Artificial Sequence
  derived and/or modified CDS sequence (opt2) from neuraminidase__InfluenzaA__AFX96811
augaaccccaaccagaagaucaucaccaucggcuccgucugcaugaccaucggcauggccaaccucauccuccagaucggcaacaucaucuccaucuggaucucccacuccauccagcucggcaaccagaaccagaucgagaccugcaaccaguccgucaucaccuacgagaacaacaccugggucaaccagaccuacgucaacaucuccaacaccaacuucgccgccggccaguccgucgucuccguccgccucgccggcaacuccucccucugccccgucuccggcugggccaucuacuccaaggacaacuccauccgcaucggcuccaagggcgacgucuucgucauccgcgagcccuucaucuccugcuccccccucgagugccgcaccuucuuccucacccagggcgcccuccucaacgacaagcacuccaacggcaccaucaaggaccgcucccccuaccgcacccucauguccugccccaucggcgagguccccucccccuacaacucccgcuucgaguccgucgccugguccgccuccgccugccacgacggcaucaacuggcucaccaucggcaucuccggccccgacaacggcgccgucgccguccucaaguacaacggcaucaucaccgacaccaucaaguccuggcgcaacaacauccuccgcacccaggaguccgagugcgccugcgucaacggcuccugcuucaccgucaugaccgacggccccuccgacggccaggccuccuacaagaucuuccgcaucgagaagggcaagaucgucaaguccgucgagaugaacgcccccaacuaccacuacgaggagugcuccugcuaccccgacuccuccgagaucaccugcgucugccgcgacaacuggcacggcuccaaccgccccugggucuccuucaaccagaaccucgaguaccagaucggcuacaucugcuccggcaucuucggcgacaacccccgccccaacgacaagaccggcuccugcggccccgucuccuccaacggcgccaacggcgucaagggcuucuccuucaaguacggcaacggcgucuggaucggccgcaccaaguccaucuccucccgcaacggcuucgagaugaucugggaccccaacggcuggaccggcaccgacaacaacuucuccaucaagcaggacaucgucggcaucaacgagugguccggcuacuccggcuccuucguccagcaccccgagcucaccggccucgacugcauccgccccugcuucugggucgagcucauccgcggccgccccaaggagaacaccaucuggaccuccggcuccuccaucuccuucugcggcgucaacuccgacaccgucggcugguccuggcccgacggcgccgagcuccccuucaccaucgacaaguga

SEQ ID NO: 119279 - RNA, 1410 nt, Artificial Sequence; identical to SEQ ID NO: 112774
  derived and/or modified CDS sequence (opt2) from neuraminidase__InfluenzaA__AFX96821

SEQ ID NO: 119280 - RNA, 1410 nt, Artificial Sequence; identical to SEQ ID NO: 119276
  derived and/or modified CDS sequence (opt2) from neuraminidase__InfluenzaA__AFX96831

SEQ ID NO: 119281 - RNA, 1410 nt, Artificial Sequence
  derived and/or modified CDS sequence (opt2) from neuraminidase__InfluenzaA__AFX96841
augaaccccaaccagaagaucaucaccaucggcuccgucugcaugaccaucggcauggccaaccucauccuccagaucggcaacaucaucuccaucuggaucucccacuccauccagcucggcaaccagaaccagaucgagaccugcaaccaguccgucaucaccuacgagaacaacaccugggucaaccagaccuacgucaacaucuccaacaccaacuucgccgccggccaguccgucgucuccguccgccucgccggcaacuccucccucugccccgucuccggcugggccaucuacuccaaggacaacuccauccgcaucggcuccaagggcgacgucuucgucauccgcgagcccuucaucuccugcuccccccucgagugccgcaccuucuuccucacccagggcgcccuccucaacgacaagcacuccaacggcaccaucaaggaccgcucccccuaccgcacccucauguccugccccaucggcgagguccccucccccuacaacucccgcuucgaguccgucgccugguccgccuccgccugccacgacggcaucaacuggcucaccaucggcaucuccggccccgacaacggcgccgucgccguccucaaguacaacggcaucaucaccgacaccaucaaguccuggcgcaacaacauccuccgcacccaggaguccgagugcgccugcgucaacggcuccugcuucaccgucaugaccgacggccccuccgacggccaggccuccuacaagaucuuccgcaucgagaagggcaagaucgucaaguccgucgagaugaacgcccccaacuacuacuacgaggagugcuccugcuaccccgacuccuccgagaucaccugcgucugccgcgacaacuggcacggcuccaaccgccccugggucuccuucaaccagaaccucgaguaccagaucggcuacaucugcuccggcaucuucggcgacaacccccgccccaacgacaagaccggcuccugcggccccgucuccuccaacggcgccaacggcgucaagggcuucuccuucaaguacggcaacggcgucuggaucggccgcaccaaguccaucuccucccgcaacggcuucgagaugaucugggaccccaacggcuggaccggcaccgacaacaacuucuccaucaagcaggacaucgucggcaucaacgagugguccggcuacuccggcuccuucguccagcaccccgagcucaccggccucgacugcauccgccccugcuucugggucgagcucauccgcggccgccccaaggagaacaccaucuggaccuccggcuccuccaucuccuucugcggcgucaacuccgacaccgucggcugguccuggcccgacggcgccgagcuccccuucaccaucgacaaguga

SEQ ID NO: 119282 - RNA, 1410 nt, Artificial Sequence; identical to SEQ ID NO: 112774
  derived and/or modified CDS sequence (opt2) from neuraminidase__InfluenzaA__AFX96859

SEQ ID NO: 119283 - RNA, 1410 nt, Artificial Sequence; identical to SEQ ID NO: 112774
  derived and/or modified CDS sequence (opt2) from neuraminidase__InfluenzaA__AFX96907

SEQ ID NO: 119284 - RNA, 1410 nt, Artificial Sequence; identical to SEQ ID NO: 112774
  derived and/or modified CDS sequence (opt2) from neuraminidase__InfluenzaA__AFX96917

SEQ ID NO: 119285 - RNA, 1410 nt, Artificial Sequence; identical to SEQ ID NO: 112774
  derived and/or modified CDS sequence (opt2) from neuraminidase__InfluenzaA__AFX96927

SEQ ID NO: 119286 - RNA, 1410 nt, Artificial Sequence
  derived and/or modified CDS sequence (opt2) from neuraminidase__InfluenzaA__AFX96937
augaaccccaaccagaagaucaucaccaucggcuccgucugcaugaccaucggcauggccaaccucauccuccagaucggcaacaucaucuccaucuggaucucccacuccauccagcucggcaaccagaaccagaucgagaccugcaaccaguccgucaucaccuacgagaacaacaccugggucaaccagaccuacgucaacaucuccuccaccaacuucgccgccggccaguccgucgucuccgucaagcucgccggcaacuccucccucugccccgucuccggcugggccaucuacuccaaggacaacuccauccgcaucggcuccaagggcgacgucuucgucauccgcgagcccuucaucuccugcuccccccucgagugccgcaccuucuuccucacccagggcgcccuccucaacgacaagcacuccaacggcaccaucaaggaccgcucccccuaccgcacccucauguccugccccaucggcgagguccccucccccuacaacucccgcuucgaguccgucgccugguccgccuccgccugccacgacggcaucaacuggcucaccaucggcaucuccggccccgacaacggcgccgucgccguccucaaguacaacggcaucaucaccgacaccaucaaguccuggcgcaacaacauccuccgcacccaggaguccgagugcgccugcgucaacggcuccugcuucaccgucaugaccgacggccccuccgacggccaggccuccuacaagaucuuccgcaucgagaagggcaagaucgucaaguccgucgagaugaacgcccccaacuaccacuacgaggagugcuccugcuaccccgacuccuccgagaucaccugcgucugccgcgacaacuggcacggcuccaaccgccccugggucuccuucaaccagaaccucgaguaccagaucggcuacaucugcuccggcaucuucggcgacaacccccgccccaacgacaagaccggcuccugcggccccgucuccuccaacggcgccaacggcgucaagggcuucuccuucaaguacggcaacggcgucuggaucggccgcaccaaguccaucuccucccgcaacggcuucgagaugaucugggaccccaacggcuggaccggcaccgacaacaacuucuccaucaagcaggacaucgucggcaucaacgagugguccggcuacuccggcuccuucguccagcaccccgagcucaccggccucgacugcauccgccccugcuucugggucgagcucauccgcggccgccccaaggagaacaccaucuggaccuccggcuccuccaucuccuucugcggcgucaacuccgacaccgucggcugguccuggcccgacggcgccgagcuccccuucaccaucgacaaguga

SEQ ID NO: 119287 - RNA, 1410 nt, Artificial Sequence; identical to SEQ ID NO: 112764
  derived and/or modified CDS sequence (opt2) from neuraminidase__InfluenzaA__AFY23991

SEQ ID NO: 119288 - RNA, 1410 nt, Artificial Sequence; identical to SEQ ID NO: 112774
  derived and/or modified CDS sequence (opt2) from neuraminidase__InfluenzaA__AFY24001

SEQ ID NO: 119289 - RNA, 1410 nt, Artificial Sequence; identical to SEQ ID NO: 112774
  derived and/or modified CDS sequence (opt2) from neuraminidase__InfluenzaA__AFY24022

SEQ ID NO: 119290 - RNA, 1410 nt, Artificial Sequence; identical to SEQ ID NO: 112774
  derived and/or modified CDS sequence (opt2) from neuraminidase__InfluenzaA__AFY24043

SEQ ID NO: 119291 - RNA, 1410 nt, Artificial Sequence
  derived and/or modified CDS sequence (opt2) from neuraminidase__InfluenzaA__AFY24153
augaaccccaaccagaagaucaucaccaucggcuccgucucccucaccaucuccaccaucugcuucuucaugcagaucgccauccucaucaccaccgucacccuccacuucaagcaguacgaguucaacuccccccccaacaaccaggucaugcucugcgagcccaccaucaucgagcgcaacaucaccgagaucgucuaccucaccaacaccaccaucgagaaggagaucugccccaagcucgccgaguaccgcaacugguccaagccccagugcaacaucaccggcuucgcccccuucuccaaggacaacuccauccgccucuccgccggcggcgacaucugggucacccgcgagcccuacgucuccugcgaccccgacaagugcuaccaguucgcccucggccagggcaccacccucaacaacguccacuccaacgacaccguccacgaccgcacccccuaccgcacccuccucaugaacgagcucggcguccccuuccaccucggcaccaagcaggucugcaucgccugguccuccuccuccugccacgacggcaaggccuggcuccacgucugcgucaccggcgacgacaagaacgccaccgccuccuucaucuacaacggccgccucgucgacuccaucgucuccugguccaaggagauccuccgcacccaggaguccgagugcgucugcaucaacggcaccugcaccgucgucaugaccgacggcuccgccuccggcaaggccgacaccaagauccucuucaucgaggagggcaagaucguccacaccuccacccucuccggcuccgcccagcacgucgaggagugcuccugcuacccccgcuaccccggcguccgcugcgucugccgcgacaacuggaagggcuccaaccgccccaucgucgacaucaacaucaccgacuacuccaucgucuccuccuacgucugcuccggccucgucggcgacaccccccgcaagaacgacuccuccuccuccucccacugccucgaccccaacaacgaggagggcggccacggcgucaagggcugggccuucgacgacggcaacgacgucuggaugggccgcaccaucuccgagaagcuccgcuccggcuacgagaccuucaaggucaucgagggcugguccaaccccaacuccaagcuccagaucaaccgccaggucaucgucgaccgcggcaaccgcuccggcuacuccggcaucuucuccgucgagggcaaguccugcaucaaccgcugcuucuacgucgagcucauccgcggccgcaaggaggagaccgagguccucuggaccuccaacuccaucgucgucuucugcggcaccuccggcaccuacggcaccggcuccuggcccgacggcgccgacaucaaccucaugcccaucuga

SEQ ID NO: 119292 - RNA, 1410 nt, Artificial Sequence
  derived and/or modified CDS sequence (opt2) from neuraminidase__InfluenzaA__AFY24208
augaaccccaaccagaagaucaucaccaucggcuccgucucccucaccaucuccaccaucugcuucuucaugcagaucgccauccucaucaccaccgucacccuccacuucaagcaguacgaguucaacuccccccccaacaaccaggucaugcucugcgagcccaccaucaucgagcgcaacaucaccgagaucgucuaccucaccaacaccaccaucgagaaggagaucugccccaagcucgccgaguaccgcaacugguccaagccccagugcaacaucaccggcuucgcccccuucuccaaggacaacuccauccgccucuccgccggcggcgacaucugggucacccgcgagcccuacgucuccugcgaccccgacaagugcuaccaguucgcccucggccagggcaccacccucaacaacguccacuccaacgacaccguccacaaccgcacccccuaccgcacccuccucaugaacgagcucggcguccccuuccaccucggcaccaagcaggucugcaucgccugguccuccuccuccugccacgacggcaaggccuggcuccacgucugcgucaccggcgacgacgagaacgccaccgccuccuucaucuacaacggccgccucgucgacuccaucgucuccugguccaagaagauccuccgcacccaggaguccgagugcgucugcaucaacggcaccugcaccgucgucaugaccgacggcuccgccuccggcaaggccgacaccaagauccucuucaucgaggagggcaagaucguccacaccuccacccucuccggcuccgcccagcacgucgaggagugcuccugcuacccccgcuaccccggcguccgcugcgucugccgcgacaacuggaagggcuccaaccgccccaucgucgacaucaacaucaaggacuacuccaucgucuccuccuacgucugcuccggccucgucggcgacaccccccgcaagaacgacuccuccuccuccucccacugccucgaccccaacaacgaggagggcggccacggcgucaagggcugggccuucgacgacggcaacgacgucuggaugggccgcaccaucuccgagcgccuccgcuccggcuacgagaccuucaaggucaucgagggcugguccaaccccaacuccaagcuccagaucaaccgccaggucaucgucgaccgcggcaaccgcuccggcuacuccggcaucuucuccgucgagggcaaguccugcaucaaccgcugcuucuacgucgagcucauccgcggccgcaagcaggagaccgagguccucuggaccuccaacuccaucgucgucuucugcggcaccuccggcaccuacggcaccggcuccuggcccgacggcgccgacaucaaccucaugcccaucuga

SEQ ID NO: 119293 - RNA, 1410 nt, Artificial Sequence; identical to SEQ ID NO: 111965
  derived and/or modified CDS sequence (opt2) from neuraminidase__InfluenzaA__AFY24219

SEQ ID NO: 119294 - RNA, 1410 nt, Artificial Sequence
  derived and/or modified CDS sequence (opt2) from neuraminidase__InfluenzaA__AGB12978
augaaccccaaccagcgcaucaucaccaucggcuccgucugcaugaccaucggcauggccaaccucauccuccagaucggcaacaucaucuccaucuggaucucccacuccauccagcucggcaaccagaaccagaucgagaccugcaaccaguccgucaucaccuacgagaacaacaccugggucaaccagaccuacgucaacaucuccaacaccaacuucgccgcccgccaguccgucgucuccgucaagcucgccggcaacuccucccucugccccgucuccggcugggccaucuacuccaaggacaacuccauccgcaucggcuccaagggcgacgucuucgucauccgcgagcccuucaucuccugcuccccccucgagugccgcaccuucuuccucacccagggcgcccuccucaacgacaagcacuccaacggcaccaucaaggaccgcucccccuaccgcacccucauguccugccccaucggcgagguccccucccccuacaacucccgcuucgaguccgucgccugguccgccuccgccugccacgacggcaucaacuggcucaccaucggcaucuccggccccgacaacggcgccgucgccguccucaaguacaacggcaucaucaccgacaccaucaaguccuggcgcaacaacauccuccgcacccaggaguccgagugcgccugcgucaacggcuccugcuucaccaucaugaccgacggccccuccgacggccaggccuccuacaagaucuuccgcaucgagaagggcaagaucgucaaguccgucgagaugaacgcccccaacuaccacuacgaggagugcuccugcuaccccgacuccuccgagaucaccugcgucugccgcgacaacuggcacggcuccaaccgccccugggucuccuucaaccagaaccucgaguaccagaucggcuacaucugcuccggcaucuucggcgacaacccccgccccaacgacaagaccggcuccugcggccccgucuccuccaacggcgccaacggcgucaagggcuucuccuucaaguacggcaacggcgucuggaucggccgcaccaaguccaucuccucccgcaagggcuucgagaugaucugggaccccaacggcuggaccggcaccgacaacaacuucuccaucaagcaggacaucgucggcaucaacgagugguccggcuacuccggcuccuucguccagcaccccgagcucaccggccucgacugcauccgccccugcuucugggucgagcucauccgcggccgccccaaggagaacaccaucuggaccuccggcuccuccaucuccuucugcggcgucaacuccgacaccgucggcugguccuggcccgacggcgccgagcuccccuucaccaucgacaaguga

SEQ ID NO: 119295 - RNA, 1410 nt, Artificial Sequence; identical to SEQ ID NO: 116293
  derived and/or modified CDS sequence (opt2) from neuraminidase__InfluenzaA__AGB12989

SEQ ID NO: 119296 - RNA, 1410 nt, Artificial Sequence; identical to SEQ ID NO: 116745
  derived and/or modified CDS sequence (opt2) from neuraminidase__InfluenzaA__AGB13009

SEQ ID NO: 119297 - RNA, 1410 nt, Artificial Sequence; identical to SEQ ID NO: 116745
  derived and/or modified CDS sequence (opt2) from neuraminidase__InfluenzaA__AGB13019

SEQ ID NO: 119298 - RNA, 1410 nt, Artificial Sequence; identical to SEQ ID NO: 116745
  derived and/or modified CDS sequence (opt2) from neuraminidase__InfluenzaA__AGB13029

SEQ ID NO: 119299 - RNA, 1410 nt, Artificial Sequence; identical to SEQ ID NO: 116994
  derived and/or modified CDS sequence (opt2) from neuraminidase__InfluenzaA__AGB13039

SEQ ID NO: 119300 - RNA, 1410 nt, Artificial Sequence; identical to SEQ ID NO: 116745
  derived and/or modified CDS sequence (opt2) from neuraminidase__InfluenzaA__AGB13051

SEQ ID NO: 119301 - RNA, 1410 nt, Artificial Sequence
  derived and/or modified CDS sequence (opt2) from neuraminidase__InfluenzaA__AGB13069
augaaccccaaccagaagaucaucaccaucggcuccaucugcaugaccaucggcauggccaaccucauccuccagaucggcaacaucaucuccaucuggaucucccacuccauccagcucggcaaccagaaccagaucgagaccugcaaccaguccgucaucaccuacgagaacaacaccugggucaaccagaccuacgucaacaucuccaacaccaacuucgccgccggccaguccgucgucuccgucaagcucgccggcaacuccucccucugccccgucuccggcugggccaucuacuccaaggacaacuccauccgcaucggcuccaagggcgacgucuucgucauccgcgagcccuucaucuccugcuccccccucgagugccgcaccuucuuccucacccagggcgcccuccucaacgacaagcacuccaacggcaccaucaaggaccgcucccccuaccgcacccucauguccugccccaucggcgagguccccucccccuacaacucccgcuucgaguccgucgccugguccgccuccgccugccacgacggcaucaacuggcucaccaucggcaucuccggccccgacaacggcgccgucgccguccucaaguacaacggcaucaucaccgacaccaucaaguccuggcgcaacaacauccuccgcacccaggaguccgagugcgccugcgucaacggcuccugcuucaccgucaugaccgacggccccuccgacggccaggccuccuacaagaucuuccgcaucgagaagggcaagaucgucaaguccgucgagaugaacgcccccaacuaccacuacgaggagugcuccugcuaccccgacuccuccgagaucaccugcgucugccgcgacaacuggcacggcuccaaccgccccuggaucuccuucaaccagaaccucgaguaccagaucggcuacaucugcuccggcaucuucggcgacaacccccgccccaacgacaagaccggcuccugcggccccgucuccuccaacggcgccaacggcgucaagggcuucuccuucaaguacggcaacggcgucuggaucggccgcaccaaguccaucuccucccgcaacggcuucgagaugaucugggaccccaacggcuggaccggcaccgacaacaacuucuccaucaagcaggacaucgucggcaucaacgagugguccggcuacuccggcuccuucguccagcaccccgagcucaccggccucgacugcauccgccccugcuucugggucgagcucauccgcggccgccccaaggagaacaccaucuggaccuccggcuccuccaucuccuucugcggcgucaacuccgacaccgucggcugguccuggcccgacggcgccgagcuccccuucaccaucgacaaguga

SEQ ID NO: 119302 - RNA, 1410 nt, Artificial Sequence
  derived and/or modified CDS sequence (opt2) from neuraminidase__InfluenzaA__AGB13074
augaaccccaaccagaagaucaucaccaucggcuccgucugcaugaccaucggcauggccaaccucauccuccagaucggcaacaucaucuccaucuggaucucccacuccauccagcucggcaaccagaaccagaucgagaccugcaaccaguccgucaucaccuacgagaacaacaccugggucaaccagaccuacgucaacaucuccaacaccaacuucgccgccggccaguccgucgccuccgucaagcucgccggcaacuccucccucugccccgucuccggcugggccaucuacuccaaggacaacuccguccgcaucggcuccaagggcgacgucuucgucauccgcgagcccuucaucuccugcuccccccucgagugccgcaccuucuuccucacccagggcgcccuccucaacgacaagcacuccaacggcaccaucaaggaccgcucccccuaccgcacccucauguccugccccaucggcgagguccccucccccuacaacucccgcuucgaguccgucgccugguccgccuccgccugccacgacggcaucaacuggcucaccaucggcaucuccggccccgacaacggcgccgucgccguccucaaguacaacggcaucaucaccgacaccaucaaguccuggcgcaacaacauccuccgcacccaggaguccgagugcgccugcgucaacggcuccugcuucaccgucaugaccgacggccccuccgacggccaggccuccuacaagaucuuccgcaucgagaagggcaagaucgucaaguccgucgagaugaacgcccccaacuaccacuacgaggagugcuccugcuaccccgacuccuccgagaucaccugcgucugccgcgacaacuggcacggcuccaaccgccccugggucuccuucaaccagaaccucgaguaccagaucggcuacaucugcuccggcaucuucggcgacaacccccgccccaacgacaagaccggcuccugcggccccgucuccuccaacggcgccaacggcgucaagggcuucuccuucaaguacggcaacggcgucuggaucggccgcaccaaguccaucuccucccgcaacggcuucgagaugaucugggaccccaacggcuggaccggcaccgacaacaacuucuccaucaagcaggacaucgucggcaucaacgagugguccggcuacuccggcuccuucguccagcaccccgagcucaccggccucgacugcauccgccccugcuucugggucgagcucauccgcggccgccccaaggagaacaccaucuggaccuccggcuccuccaucuccuucugcggcgucaacuccgacaccgucggcugguccuggcccgacggcgccgagcuccccuucaccaucgacaaguga

SEQ ID NO: 119303 - RNA, 1410 nt, Artificial Sequence
  derived and/or modified CDS sequence (opt2) from neuraminidase__InfluenzaA__AGB13115
augaaccccaaccagaagaucaucaccaucggcuccgucugcaugaccaucggcauggccaaccucauccuccagaucggcaacaucaucuccaucuggaucucccacuccauccagcucggcaaccagaaccagaucgagaccugcaaccaguccgucaucaccuacgagaacaacaccugggucaaccagaccuacgucaacaucuccaacaccaacuucgccgccggccaguccgucgucuccgucaagcucgccggcaacuccucccucugccccgucuccggcugggccaucuacuccaaggacaacuccauccgcaucggcuccaagggcgacgucuucguccuccgcgagcccuucaucuccugcuccccccucgagugccgcaccuucuuccucacccagggcgcccuccucaacgacaagcacuccaacggcaccaucaaggaccgcucccccuaccgcacccucauguccugccccaucggcgagguccccucccccuacaacucccgcuucgaguccgucgccugguccgccuccgccugccacgacggcaucaacuggcucaccaucggcaucuccggccccgacaacggcgccgucgccguccucaaguacaacggcaucaucaccgacaccaucaaguccuggcgcaacaacauccuccgcacccaggaguccgagugcgccugcgucaacggcuccugcuucaccaucaugaccgacggccccuccgacggccaggccuccuacaagaucuuccgcaucgagaagggcaagaucgucaaguccgucgagaugaacgcccccaacuaccacuacgaggagugcuccugcuaccccgacuccuccgagaucaccugcgucugccgcgacaacuggcgcggcuccaaccgccccugggucuccuucaaccagaaccucgaguaccagaucggcuacaucugcuccggcaucuucggcgacaacccccgccccaacgacaagaccggcuccugcggccccgucuccuccaacggcgccaacggcgucaagggcuucuccuucaaguacggcaacggcgucuggaucggccgcaccaaguccaucuccucccgcaagggcuucgagaugaucugggaccccaacggcuggaccggcaccgacaacaacuucuccaucaagcaggacaucgucggcaucaacgagugguccggcuacuccggcuccuucguccagcaccccgagcucaccggccucgacugcauccgccccugcuucugggucgagcucauccgcggccgccccaaggagaacaccaucuggaccuccggcuccuccaucuccuucugcggcgucaacuccgacaccgucggcugguccuggcccgacggcgccgagcuccccuucaccaucgacaaguga

SEQ ID NO: 119304 - RNA, 1410 nt, Artificial Sequence; identical to SEQ ID NO: 116745
  derived and/or modified CDS sequence (opt2) from neuraminidase__InfluenzaA__AGB13133

SEQ ID NO: 119305 - RNA, 1410 nt, Artificial Sequence; identical to SEQ ID NO: 116293
  derived and/or modified CDS sequence (opt2) from neuraminidase__InfluenzaA__AGB13152

SEQ ID NO: 119306 - RNA, 1410 nt, Artificial Sequence; identical to SEQ ID NO: 116293
  derived and/or modified CDS sequence (opt2) from neuraminidase__InfluenzaA__AGB13162

SEQ ID NO: 119307 - RNA, 1410 nt, Artificial Sequence; identical to SEQ ID NO: 117116
  derived and/or modified CDS sequence (opt2) from neuraminidase__InfluenzaA__AGB13173

SEQ ID NO: 119308 - RNA, 1410 nt, Artificial Sequence
  derived and/or modified CDS sequence (opt2) from neuraminidase__InfluenzaA__AGB13183
augaaccccaaccagaagaucaucaccaucggcuccgucugcaugaccaucggcauggccaaccucauccuccagaucggcaacaucaucuccaucuggaucucccacuccauccagcucggcaaccagaaccagaucgagaccugcaaccaguccgucaucaccuacgagaacaacaccugggucaaccagaccuacgucaacaucuccaacaccaacuucgccgccggccaguccgucgucuccgucaagcucgccggcaacuccucccucugccccgucuccggcugggccaucuacuccaaggacaacuccauccgcaucggcuccaagggcgacgucuucgucauccgcgagcccuucaucuccugcuccccccucgagugccgcaccuucuuccucacccagggcgcccuccucaacgacaagcacuccaacggcaccaucaaggaccgcucccccuaccgcacccucauguccugccccaucggcgagguccccucccccuacaacucccgcuucgaguccgucgccugguccgccuccgccugccacgacggcaucaacuggcucaccaucggcaucuccggccaggacaacggcgccgucgccguccucaaguacaacggcaucaucaccgacaccaucaaguccuggcgcaacaacauccuccgcacccaggaguccgagugcgccugcgucaacggcuccugcuucaccaucaugaccgacggccccuccgacggccaggccuccuacaagaucuuccgcaucgagaagggcaagaucgucaaguccgucgagaugaacgcccccaacuaccacuacgaggagugcuccugcuaccccgacuccuccgagaucaccugcgucugccgcgacaacuggcacggcuccaaccgccccugggucuccuucaaccagaaccucgaguaccagaucggcuacaucugcuccggcaucuucggcgacaacccccgccccaacgacaagaccggcuccugcggccccgucuccuccaacggcgccaacggcgucaagggcuucuccuucaaguacggcaacggcgucuggaucggccgcaccaaguccaucuccucccgcaagggcuucgagaugaucugggaccccaacggcuggaccggcaccgacaacaacuucuccaucaagcaggacaucgucggcaucaacgagugguccggcuacuccggcuccuucguccagcaccccgagcucaccggccucgacugcauccgccccugcuucugggucgagcucauccgcggccgccccaaggagaacaccaucuggaccuccggcuccuccaucuccuucugcggcgucaacuccgacaccgucggcugguccuggcccgacggcgccgagcuccccuucaccaucgacaaguga

SEQ ID NO: 119309 - RNA, 1410 nt, Artificial Sequence; identical to SEQ ID NO: 116745
  derived and/or modified CDS sequence (opt2) from neuraminidase__InfluenzaA__AGB13193

SEQ ID NO: 119310 - RNA, 1410 nt, Artificial Sequence; identical to SEQ ID NO: 116812
  derived and/or modified CDS sequence (opt2) from neuraminidase__InfluenzaA__AGB13203

SEQ ID NO: 119311 - RNA, 1410 nt, Artificial Sequence; identical to SEQ ID NO: 116745
  derived and/or modified CDS sequence (opt2) from neuraminidase__InfluenzaA__AGB13213

SEQ ID NO: 119312 - RNA, 1410 nt, Artificial Sequence; identical to SEQ ID NO: 116745
  derived and/or modified CDS sequence (opt2) from neuraminidase__InfluenzaA__AGB13223

SEQ ID NO: 119313 - RNA, 1410 nt, Artificial Sequence; identical to SEQ ID NO: 116745
  derived and/or modified CDS sequence (opt2) from neuraminidase__InfluenzaA__AGB13233

SEQ ID NO: 119314 - RNA, 1410 nt, Artificial Sequence
  derived and/or modified CDS sequence (opt2) from neuraminidase__InfluenzaA__AGB13243
augaaccccaaccagaagaucaucaccaucggcuccgucugcaugaccaucggcauggccaaccucauccuccagaucggcaacaucaucuccaucuggaucucccacuccauccagcucggcaaccagaaccagaucgagaccugcaaccaguccgucaucaccuacgagaacaacaccugggucaaccagaccuacgucaacaucuccaacaccaacuucgccgccggccaguccgucgucuccgucaagcucgccggcaacuccucccucugccccgucuccggcugggccaucuacuccaaggacaacuccauccgcaucggcuccaagggcgacgucuucgucauccgcgagcccuucaucuccugcuccccccucgagugccgcaccuucuuccucacccagggcgcccuccucaacgacaagcacuccaacggcaccaucaaggaccgcucccccuaccgcacccucauguccugccccaucggcgagguccccucccccuacaacucccgcuucgaguccgucgccugguccgccuccgccugccacgacggcaucaacuggcucaccaucggcaucuccggccccgacaacggcgccgucgccguccucaaguacaacggcaucaucaccgacaccaucaaguccuggcgcaacaacauccuccgcacccaggaguccgagugcgccugcgucaacggcuccugcuucaccaucaugaccgacggccccuccgacggccaggccuccuacaagaucuuccgcaucgagcgcggcaagaucgucaaguccgucgagaugaacgcccccaacuacuacuacgaggagugcuccugcuaccccgacuccuccgagaucaccugcgucugccgcgacaacuggcacggcuccaaccgccccugggucuccuucaaccagaaccucgaguaccagaucggcuacaucugcuccggcgucuucggcgacaacccccgccccaacgacaagaccggcuccugcggccccgucuccuccaacggcgccaacggcgucaagggcuucuccuucaaguacggcaacggcgucuggaucggccgcaccaaguccaucuccucccgcaagggcuucgagaugaucugggaccccaacggcuggaccggcaccgacaacaacuucuccaucaagcaggacaucgucggcaucaacgagugguccggcuacuccggcuccuucguccagcaccccgagcucaccggccucgacugcauccgccccugcuucugggucgagcucauccgcggccgccccaaggagaacaccaucuggaccuccggcuccuccaucuccuucugcggcgucaacuccgacaccgucggcugguccuggcccgacggcgccgagcuccccuucaccaucgacaaguga

SEQ ID NO: 119315 - RNA, 1410 nt, Artificial Sequence; identical to SEQ ID NO: 116812
  derived and/or modified CDS sequence (opt2) from neuraminidase__InfluenzaA__AGB13253

SEQ ID NO: 119316 - RNA, 1410 nt, Artificial Sequence
  derived and/or modified CDS sequence (opt2) from neuraminidase__InfluenzaA__AGB13263
augaaccccaaccagaagaucaucaccaucggcuccgucugcaugaccaucggcauggccaaccucauccuccagaucggcaacaucaucuccaucuggaucucccacuccauccagcucggcaaccagaaccagaccgagaccugcaaccaguccgucaucaccuacgagaacaacaccugggucaaccagaccuacgucaacaucuccaacaccaacuucgccgccggccaguccgucgucuccgucaagcucgccggcaacuccucccucugccccgucuccggcugggccaucuacuccaaggacaacuccauccgcaucggcuccaagggcgacgucuucgucauccgcgagcccuucaucuccugcuccccccucgagugccgcaccuucuuccucacccagggcgcccuccucaacgacaagcacuccaacggcaccaucaaggaccgcucccccuaccgcacccucauguccugccccaucggcgagguccccucccccuacaacucccgcuucgaguccgucgccugguccgccuccgccugccacgacggcaucaacuggcucaccaucggcaucuccggccccgacaacggcgccgucgccguccucaaguacaacggcaucaucaccgacaccaucaaguccuggcgcaacaacauccuccgcacccaggaguccgagugcgccugcgucaacggcuccugcuucaccgucaugaccgacggccccuccgacggccaggccuccuacaagaucuuccgcaucgagaagggcaagaucgucaaguccgucgagaugaaggcccccaacuaccacuacgaggagugcuccugcuaccccgacuccuccgagaucaccugcgucugccgcgacaacuggcacggcuccaaccgccccugggucuccuucaaccagaaccucgaguaccgcaucggcuacaucugcuccggcaucuucggcgacaacccccgccccaacgacaagaccggcuccugcggccccgucuccuccaacggcgccaacggcgucaagggcuucuccuucaaguacggcaacggcgucuggaucggccgcaccaaguccaucuccucccgcaacggcuucgagaugaucugggaccccaacggcuggaccggcaccgacaacaacuucuccaucaagcaggacaucaucggcaucaacgagugguccggcuacuccggcuccuucguccagcaccccgagcucaccggccucgacugcauccgccccugcuucugggucgagcucauccgcggccgccccaaggagaacaccaucuggaccuccggcuccuccaucuccuucugcggcgucaacuccgacaccgucggcugguccuggcccgacggcgccgagcuccccuucaccgucgacaaguga

SEQ ID NO: 119317 - RNA, 1410 nt, Artificial Sequence; identical to SEQ ID NO: 116745
  derived and/or modified CDS sequence (opt2) from neuraminidase__InfluenzaA__AGB13273

SEQ ID NO: 119318 - RNA, 1410 nt, Artificial Sequence
  derived and/or modified CDS sequence (opt2) from neuraminidase__InfluenzaA__AGB13283
augaaccccaaccagaagaucaucaccaucggcuccgucugcaugaccaucggcauggccaaccucauccuccagaucggcaacaucaucuccaucuggaucucccacuccauccagcucggcaaccagaaccagaucgagaccugcaaccaguccgucaucaccuacgagaacaacaccugggucaaccagaccuacgucaacaucuccaacaccaacuucgccgccggccaguccgucgucuccgucaagcucgccggcaacuccucccucugccccgucuccggcugggccaucuacuccaaggacaacuccauccgcaucggcuccaagggcgacgucuucgucauccgcgagcccuucaucuccugcuccccccucgagugccgcaccuucuuccucacccagggcgcccuccucaacgacaagcacuccaacggcaccaucaaggaccgcucccccuaccgcacccucauguccugccccaucggcgagguccccucccccuacaacucccgcuucgaguccgucgccugguccgccuccgccugccacgacggcaucaacuggcucaccaucggcaucuccggccccgacaacggcgccgucgccguccucaaguacaacggcaucaucaccgacaccaucaaguccuggcgcaacaacauccuccgcacccaggaguccgagugcgccugcgucaacggcuccugcuucaccaucaugaccgacggccccuccgacggccaggccuccuacaagaucuuccgcaucgagaagggcaagaucgucaaguccgucgagaugaacgcccccaacuaccacuacgaggagugcuccugcuaccccgacuccuccgagaucaccugcgucugccgcgacaacuggcacggcuccaaccgccccugggucuccuucaaccagaaccucgaguaccagaucggcuacaucugcuccggcaucuucggcgacaacccccgccccaacgacaagaccggcuccugcggccccgucuccuccaacggcgccaacggcgucaagggcuucuccuucaaguacggcaacggcgucuggaucggccgcaccaaguccaucuccucccgccgcggcuucgagaugaucugggaccccaacggcuggaccggcaccgacaacaacuucuccaucaagcaggacaucgucggcaucaacgagugguccggcuacuccggcuccuucguccagcaccccgagcucaccggccucgacugcauccgccccugcuucugggucgagcucauccgcggccgccccaaggagaacaccaucuggaccuccggcuccuccaucuccuucugcggcgucaacuccgacaccgucggcugguccuggcccgacggcgccgagcuccccuucaccaucgacaaguga

SEQ ID NO: 119319 - RNA, 1410 nt, Artificial Sequence; identical to SEQ ID NO: 116745
  derived and/or modified CDS sequence (opt2) from neuraminidase__InfluenzaA__AGB13293

SEQ ID NO: 119320 - RNA, 1410 nt, Artificial Sequence; identical to SEQ ID NO: 116745
  derived and/or modified CDS sequence (opt2) from neuraminidase__InfluenzaA__AGB13303

SEQ ID NO: 119321 - RNA, 1410 nt, Artificial Sequence
  derived and/or modified CDS sequence (opt2) from neuraminidase__InfluenzaA__AGB13313
augaaccccaaccagaagaucaucaccaucggcuccgucugcaugaccaucggcauggccaaccucauccuccagaucggcaacaucaucuccaucuggaucucccacuccauccagcucggcaaccagaaccagaucgagaccugcaaccaguccgucaucaccuacgagaacaacaccugggucaaccagaccuacgucaacaucuccaacaccaacuucgccgccggccaguccgucgucuccgccaagcucgccggcaacuccucccucugccccgucuccggcugggccaucuacuccaaggacaacuccauccgcaucggcuccaagggcgacgucuucgucauccgcgagcccuucaucuccugcuccccccucgagugccgcaccuucuuccucacccagggcgcccuccucaacgacaagcacuccaacggcaccaucaaggaccgcucccccuaccgcacccucauguccugccccaucggcgagguccccucccccuacaacucccgcuucgaguccgucgccugguccgccuccgccugccacgacggcaucaacuggcucaccaucggcaucuccggccccgacaacggcgccgucgccguccucaaguacaacggcaucaucaccgacaccaucaaguccuggcgcaacaacauccuccgcacccaggaguccgagugcgccugcgucaacggcuccugcuucaccgucaugaccgacggccccuccgacggccaggccuccuacaagaucuuccgcaucgagaagggcaagaucgucaaguccgucgagaugaacgcccccaacuaccacuacgaggagugcuccugcuaccccgacuccuccgagaucaccugcgucugccgcgacaacuggcacggcuccaaccgccccugggucuccuucaaccagaaccucgaguaccagaucggcuacaucugcuccggcaucuucggcgacaacccccgccccaacgacaagaagggcuccugcggccccgucuccuccaacggcgccaacggcgucaagggcuucuccuucaaguacggcaacggcgucuggaucggccgcaccaaguccaucuccucccgcaacggcuucgagaugaucugggaccccaacggcuggaccggcaccgacaacaacuucuccaucaagcaggacaucgucggcaucaacgagugguccggcuacuccggcuccuucguccagcaccccgagcucaccggccucgacugcauccgccccugcuucugggucgagcucauccgcggccgccccaaggagaacaccaucuggaccuccggcuccuccaucuccuucugcggcgucaacuccgacaccgucggcugguccuggcccgacggcgccgagcuccccuucaccaucgacaaguga

SEQ ID NO: 119322 - RNA, 1410 nt, Artificial Sequence; identical to SEQ ID NO: 116745
  derived and/or modified CDS sequence (opt2) from neuraminidase__InfluenzaA__AGB13323

SEQ ID NO: 119323 - RNA, 1410 nt, Artificial Sequence
  derived and/or modified CDS sequence (opt2) from neuraminidase__InfluenzaA__AGB13333
augaaccccaaccagaagaucaucaccaucggcuccgucugcaugaccaucggcauggccaaccucauccuccagaucggcaacaucaucuccaucuggaucucccacuccauccagcucggcaaccagucccagaucgagaccugcaaccaguccgucaucaccuacgagaacaacaccugggucaaccagaccuacgucaacaucuccaacaccaacuucgccgccggccaguccgccgucuccgucaagcucgccggcaacuccucccucugccccgucuccggcugggccaucuacuccaaggacaacuccauccgcaucggcuccaagggcgacgucuucgucauccgcgagcccuucaucuccugcuccccccucgagugccgcaccuucuuccucacccagggcgcccuccucaacgacaagcacuccaacggcaccaucaaggaccgcucccccuaccgcacccucauguccugccccaucggcgagguccccucccccuacaacucccgcuucgaguccgucgccugguccgccuccgccugccacgacggcaucaacuggcucaccaucggcaucuccggccccgacaacggcgccgucgccguccucaaguacaacggcaucaucaccgacaccaucaaguccuggcgcaacaacauccuccgcacccaggaguccgagugcgccugcgucaacggcuccugcuucaccaucaugaccgacggccccuccgacggccaggccuccuacaagaucuuccgcaucgagaagggcaagaucgucaaguccgucgagaugaacgcccccaacuaccacuacgaggagugcuccugcuaccccgacuccuccgagaucaccugcgucugccgcgacaacuggcacggcuccaaccgccccugggucuccuucaaccagaaccucgaguaccagaucggcuacaucugcuccggcaucuucggcgacaacccccgccccaacgacaagaccggcuccugcggccccgucuccuccaacggcgccaacggcgucaagggcuucuccuucaaguacggcaacggcgucuggaucggccgcaccaaguccaucuccucccgcaagggcuucgagaugaucugggaccccaacggcuggaccggcaccgacaacaacuucuccaucaagcaggacaucgucggcaucaacgagugguccggcuacuccggcuccuucguccagcaccccgagcucaccggccucgacugcauccgccccugcuucugggucgagcucauccgcggccgccccaaggagaacaccaucuggaccuccggcuccuccaucuccuucugcggcgucaacuccgacaccgucggcugguccuggcccgacggcgccgagcuccccuucaccaucgacaaguga

SEQ ID NO: 119324 - RNA, 1410 nt, Artificial Sequence; identical to SEQ ID NO: 116745
  derived and/or modified CDS sequence (opt2) from neuraminidase__InfluenzaA__AGB13343

SEQ ID NO: 119325 - RNA, 1410 nt, Artificial Sequence; identical to SEQ ID NO: 116994
  derived and/or modified CDS sequence (opt2) from neuraminidase__InfluenzaA__AGB13353

SEQ ID NO: 119326 - RNA, 1410 nt, Artificial Sequence
  derived and/or modified CDS sequence (opt2) from neuraminidase__InfluenzaA__AGB13363
augaaccccaaccagaagaucaucaccaucggcuccgucugcaugaccaucggcauggccaaccucauccuccagaucggcaacaucaucuccaucuggaucucccacuccauccagcucggcaaccagaaccagaucgagaccugcaaccaguccgucaucaccuacgagaacaacaccugggucaaccagaccuacgucaacaucuccaacaccaacuucgccgccggccaguccgucgccuccgucaagcucgccggcaacuccucccucugcuccgucuccggcugggccaucuacuccaaggacaacuccauccgcaucggcuccaagggcgacgucuucgucauccgcgagcccuucaucuccugcuccccccucgagugccgcaccuucuuccucacccagggcgcccuccucaacgacaagcacuccaacggcaccaucaaggaccgcucccccuaccgcacccucauguccugccccaucggcgagguccccucccccuacaacucccgcuucgaguccgucgccugguccgccuccgccugccacgacggcaucaacuggcucaccaucggcaucuccggccccgacaacggcgccgucgccguccucaaguacaacggcaucaucaccgacaccaucaaguccuggcgcaacaacauccuccgcacccaggaguccgagugcgccugcgucaacggcuccugcuucaccaucaugaccgacggccccuccgacggccaggccuccuacaagaucuuccgcaucgagaagggcaagaucgucaaguccgucgagaugaacgcccccaacuaccacuacgaggagugcuccugcuaccccgacuccuccgagaucaccugcgucugccgcgacaacuggcacggcuccaaccgccccugggucuccuucaaccagaaccucgaguaccagaucggcuacaucugcuccggcaucuucggcgacaacccccgccccaacgacaagaccggcuccugcggccccgucuccuccaacggcgccaacggcgucaagggcuucuccuucaaguacggcaacggcgucuggaucggccgcaccaaguccaucuccucccgcaagggcuucgagaugaucugggaccccaacggcuggaccggcaccgacaacaacuucuccaucaagcaggacaucgucggcaucaacgagugguccggcuacuccggcuccuucguccagcaccccgagcucaccggccucgacugcauccgccccugcuucugggucgagcucauccgcggccgccccaaggagaacaccaucuggaccuccggcuccuccaucuccuucugcggcgucaacuccgacaccgucggcugguccuggcccgacggcgccgagcuccccuucaccaucgacaaguga

SEQ ID NO: 119327 - RNA, 1410 nt, Artificial Sequence
  derived and/or modified CDS sequence (opt2) from neuraminidase__InfluenzaA__AGB13383
augaaccccaaccagaagaucaucaccaucggcuccgucugcaugaccaucggcauggccaaccucauccuccagaucggcaacaucaucuccaucuggaucucccacuccauccagcucggcaaccagaaccagaucgagaccugcaaccaguccgucaucaccuacgagaacaacaccugggucaaccagaccuacgucaacaucuccaacaccaacuucgccgccggccaguccgucgucuccgucaagcucgccggcaacuccucccucugccccgucuccggcugggccaucuacuccaaggacaacuccauccgcaucggcuccaagggcgacgucuucgucauccgcgagcccuucaucuccugcuccccccucgagugccgcaccuucuuccucacccagggcgcccuccucaacgacaagcacuccaacggcaccaucaaggaccgcucccccuaccgcacccucauguccugccccaucggcgagguccccucccccuacaacucccgcuucgaguccgucgccugguccgccuccgccugccacgacggcaucaacuggcucaccaucggcaucuccggccccgacaacggcgccgucgccguccucaaguacaacggcaucaucaccgacaccaucaaguccuggcgcaacaacauccuccgcacccaggaguccgagugcgccugcgucaacggcuccugcuucaccaucaugaccgacggccccuccgacggccaggccuccuacaagaucuuccgcaucgagaagggcaagaucgucaaguccgucgagaugaacgcccccaacuaccacuacgaggagugcuccugcuaccccgacuccuccgagaucaccugcgucugccgcgacaacuggcacggcuccaaccgccccugggucuccuucaaccagaaccucgaguaccagaucggcuacaucugcuccggcaucuucggcgacaacccccgccccaacgacaagaccggcuccugcggccccgucuccuccaacggcgccaacggcgucaagggcuucuccuucaaguacggcuccggcgucuggaucggccgcaccaaguccaucuccucccgcaagggcuucgagaugaucugggaccccaacggcuggaccggcaccgacaacaacuucuccaucaagcaggacaucgucggcaucaacgagugguccggcuacuccggcuccuucguccagcaccccgagcucaccggccucgacugcauccgccccugcuucugggucgagcucauccgcggccgccccaaggagaacaccaucuggaccuccggcuccuccaucuccuucugcggcgucaacuccgacaccgucggcugguccuggcccgacggcgccgagcuccccuucaccaucgacaaguga

SEQ ID NO: 119328 - RNA, 1410 nt, Artificial Sequence; identical to SEQ ID NO: 116293
  derived and/or modified CDS sequence (opt2) from neuraminidase__InfluenzaA__AGB13393

SEQ ID NO: 119329 - RNA, 1410 nt, Artificial Sequence; identical to SEQ ID NO: 116993
  derived and/or modified CDS sequence (opt2) from neuraminidase__InfluenzaA__AGB13403

SEQ ID NO: 119330 - RNA, 1410 nt, Artificial Sequence; identical to SEQ ID NO: 116293
  derived and/or modified CDS sequence (opt2) from neuraminidase__InfluenzaA__AGB13413

SEQ ID NO: 119331 - RNA, 1410 nt, Artificial Sequence; identical to SEQ ID NO: 116293
  derived and/or modified CDS sequence (opt2) from neuraminidase__InfluenzaA__AGB13423

SEQ ID NO: 119332 - RNA, 1410 nt, Artificial Sequence; identical to SEQ ID NO: 116993
  derived and/or modified CDS sequence (opt2) from neuraminidase__InfluenzaA__AGB13433

SEQ ID NO: 119333 - RNA, 1410 nt, Artificial Sequence; identical to SEQ ID NO: 116993
  derived and/or modified CDS sequence (opt2) from neuraminidase__InfluenzaA__AGB13443

SEQ ID NO: 119334 - RNA, 1410 nt, Artificial Sequence
  derived and/or modified CDS sequence (opt2) from neuraminidase__InfluenzaA__AGB13453
augaaccccaaccagaagaucaucaccaucggcuccgucugcaugaccaucggcauggccaaccucauccuccagaucggcaacaucaucuccaucuggaucucccacuccauccagcucggcaaccagucccagaucgagaccugcaaccaguccgucaucaccuacgagaacaacaccugggucaaccagaccuacgucaacaucuccaacaccaacuucgccgccggccaguccgucgucuccgucaagcucgccggcaacuccucccucugccccgucuccggcugggccaucuacuccaaggacaacuccauccgcaucggcuccaagggcgacgucuucgucauccgcgagcccuucaucuccugcuccccccucgagugccgcaccuucuuccucacccagggcgcccuccucaacgacaagcacuccaacggcaccaucaaggaccgcucccccuaccgcacccucauguccugccccaucggcgagguccccucccccuacaacucccgcuucgaguccgucgccugguccgccuccgccugccacgacggcaucaacuggcucaccaucggcaucuccggccccgacaacggcgccgucgccguccucaaguacaacggcaucaucaccgacaccaucaaguccuggcgcaacaacauccuccgcacccaggaguccgagugcgccugcgucaacggcuccugcuucaccaucaugaccgacggccccuccgacggccaggccuccuacaagaucuuccgcaucgagaagggcaagaucgucaaguccgucgagaugaacgcccccaacuaccacuacgaggagugcuccugcuaccccgacuccuccgagaucaccugcgucugccgcgacaacuggcacggcuccaaccgccccugggucuccuucaaccagaaccucgaguaccagaucggcuacaucugcuccggcaucuucggcgacaacccccgccccaacgacaagaccggcuccugcggccccgucuccuccaacggcgccaacggcgucaagggcuucuccuucaaguacggcaacggcgucuggaucggccgcaccaaguccuucuccucccgcaagggcuucgagaugaucugggaccccaacggcuggaccggcaccgacaacaacuucuccaucaagcaggacaucgucggcaucaacgagugguccggcuacuccggcuccuucguccagcaccccgagcucaccggccucgacugcauccgccccugcuucugggucgagcucauccgcggccgccccaaggagaacaccaucuggaccuccggcuccuccaucuccuucugcggcgucaacuccgacaccgucggcugguccuggcccgacggcgccgagcuccccuucaccaucgacaaguga

SEQ ID NO: 119335 - RNA, 1410 nt, Artificial Sequence; identical to SEQ ID NO: 116293
  derived and/or modified CDS sequence (opt2) from neuraminidase__InfluenzaA__AGB13463

SEQ ID NO: 119336 - RNA, 1410 nt, Artificial Sequence; identical to SEQ ID NO: 116745
  derived and/or modified CDS sequence (opt2) from neuraminidase__InfluenzaA__AGB13473

SEQ ID NO: 119337 - RNA, 1410 nt, Artificial Sequence
  derived and/or modified CDS sequence (opt2) from neuraminidase__InfluenzaA__AGB13483
augaaccccaaccagaagaucaucaccaucggcuccgucugcaugaccaucggcauggccaaccucauccuccagaucggcaacaucaucuccaucuggaucucccacuccauccagcucggcaaccagucccagaucgagaccugcaaccaguccgucaucaccuacgagaacaacaccugggucaaccagaccuacgucaacaucuccaacaccaacuucgccgccggccaguccgucgucuccgucaagcucgccggcaacuccucccucugccccgucuccggcugggccaucuacuccaaggacaacuccauccgcaucggcuccaagggcgacgucuucgucauccgcgagcccuucaucuccugcuccccccucgagugccgcaccuucuuccucacccagggcgcccuccucaacgacaagcacuccaacggcaccaucaaggaccgcucccccuaccgcacccucauguccugccccaucggcgagguccccucccccuacaacucccgcuucgaguccgucgccugguccgccuccgccugccacgacggcaucaacuggcucaccaucggcaucuccggccccgacaacggcgccgucgccguccucaaguacaacggcaucaucaccgacaccaucaaguccuggcgcaacaacauccuccgcacccaggaguccgagugcgccugcgucaacggcuccugcuucaccaucaugaccgacggccccuccgacggccaggccuccuacaagaucuuccgcaucgagaagggcaagaucgucaaguccgucgagaugaacgcccccaacuaccacuacgaggagugcuccugcuaccccgacuccuccgagaucaccugcgucugccgcgacaacuggcacggcuccaaccgccccugggucuccuucaaccagaaccucgaguaccagaucggcuacaucugcuccggcaucuucggcgacaacccccgccccaacgacaagaccggcuccugcggccccgucuccuccaacggcgccaacggcgucaagggcuucuccuucaaguacggcaacggcgucuggaucggccgcaccaaguccaucuccucccgcaagggcuucgagaugaucugggaccccaacggcuggaccggcaccgacaacaacuucuccaucaagcaggacaucgucggcaucaacgagugguccggcuacuccggcuccuucguccagcaccccgagcucaccggccucgacugcauccgccccugcuucugggucgagcucauccgcggccagcccaaggagaacaccaucuggaccuccggcuccuccaucuccuucugcggcgucaacuccgacaccgucggcugguccuggcccgacggcgccgagcuccccuucaccaucgacaaguga

SEQ ID NO: 119338 - RNA, 1410 nt, Artificial Sequence; identical to SEQ ID NO: 117030
  derived and/or modified CDS sequence (opt2) from neuraminidase__InfluenzaA__AGB13493

SEQ ID NO: 119339 - RNA, 1410 nt, Artificial Sequence; identical to SEQ ID NO: 116822
  derived and/or modified CDS sequence (opt2) from neuraminidase__InfluenzaA__AGB13503

SEQ ID NO: 119340 - RNA, 1410 nt, Artificial Sequence; identical to SEQ ID NO: 114236
  derived and/or modified CDS sequence (opt2) from neuraminidase__InfluenzaA__AGB13513

SEQ ID NO: 119341 - RNA, 1410 nt, Artificial Sequence; identical to SEQ ID NO: 117028
  derived and/or modified CDS sequence (opt2) from neuraminidase__InfluenzaA__AGB13523

SEQ ID NO: 119342 - RNA, 1410 nt, Artificial Sequence; identical to SEQ ID NO: 117028
  derived and/or modified CDS sequence (opt2) from neuraminidase__InfluenzaA__AGB13533

SEQ ID NO: 119343 - RNA, 1410 nt, Artificial Sequence; identical to SEQ ID NO: 116745
  derived and/or modified CDS sequence (opt2) from neuraminidase__InfluenzaA__AGB13543

SEQ ID NO: 119344 - RNA, 1410 nt, Artificial Sequence; identical to SEQ ID NO: 116745
  derived and/or modified CDS sequence (opt2) from neuraminidase__InfluenzaA__AGB13553

SEQ ID NO: 119345 - RNA, 1410 nt, Artificial Sequence
  derived and/or modified CDS sequence (opt2) from neuraminidase__InfluenzaA__AGB13563
augaaccccaaccagaagaucaucaccaucggcuccgucugcaugaccaucggcgucgccaaccucauccuccagaucggcaacaucaucuccaucuggaucucccacuccauccagcucggcaaccagaaccagaucgagaccugcaaccaguccgucaucaccuacgagaacaacaccugggucaaccagaccuacgucaacaucuccaacaccaacuucgccgccggccaguccgucgucuccgucaaccucgccggcaacuccucccucugccccgucuccggcugggccaucuacuccaaggacaacuccauccgcaucggcuccaagggcgacgucuucgucauccgcgagcccuucaucuccugcuccccccucgagugccgcaccuucuuccucacccagggcgcccuccucaacgacaagcacuccaacggcaccaucaaggaccgcucccccuaccgcacccucauguccugccccaucggcgagguccccucccccuacaacucccgcuucgaguccgucgccugguccgccuccgccugccacgacggcaucaacuggcucaccaucggcaucuccggccccgacaacggcgccgucgccguccucaaguacaacggcaucaucaccgacaccaucaaguccuggcgcaacaacauccuccgcacccaggaguccgagugcgccugcgucaacggcuccugcuucaccaucaugaccgacggccccuccgacggccaggccuccuacaagaucuuccgcaucgagaagggcaagaucgucaaguccgucgagaugaacgcccccaacuaccacuacgaggagugcuccugcuaccccgacuccuccgagaucaccugcgucugccgcgacaacuggcacggcuccaaccgccccugggucuccuucaaccagaaccucgaguaccagaucggcuacaucugcuccggcaucuucggcgacaacccccgccccaacgacaagaccggcuccugcggccccgucuccuccaacggcgccaacggcgucaagggcuucuccuucaaguacggcaacggcgucuggaucggccgcaccaagaacaucuccucccgcaagggcuucgagaugaucugggaccccaacggcuggaccggcaccgacaacaacuucuccaucaagcaggacaucgucggcaucaacgagugguccggcuacuccggcuccuucguccagcaccccgagcucaccggccucgacugcauccgccccugcuucugggucgagcucauccgcggccgccccaaggagaacaccaucuggaccuccggcuccuccaucuccuucugcggcgucaacuccgacaccgucggcugguccuggcccgacggcgccgagcuccccuucaccaucgacaaguga

SEQ ID NO: 119346 - RNA, 1410 nt, Artificial Sequence; identical to SEQ ID NO: 116745
  derived and/or modified CDS sequence (opt2) from neuraminidase__InfluenzaA__AGB13573

SEQ ID NO: 119347 - RNA, 1410 nt, Artificial Sequence
  derived and/or modified CDS sequence (opt2) from neuraminidase__InfluenzaA__AGB13583
augaaccccaaccagaagaucaucaccaucggcuccgucugcaugaccaucggcauggccaaccucauccuccagaucggcaacaucaucuccaucuggaucucccacuccauccagcucggcaaccagaaccagaucgagaccugcaaccaguccgucaucaccuacgagaacaacaccugggucaaccagaccuacgucaacaucuccaacaccaacuucgccgccggccaguccgucggcuccgucaagcucgccggcaacuccucccucugccccgucuccggcugggccaucuacuccaaggacaacuccauccgcaucggcuccaagggcgacgucuucgucauccgcgagcccuucaucuccugcuccccccucgagugccgcaccuucuuccucacccagggcgcccuccucaacgacaagcacuccaacggcaccaucaaggaccgcucccccuaccgcacccucauguccugccccaucggcgagguccccucccccuacaacucccgcuucgaguccgucgccugguccgccuccgccugccacgacggcaucaacuggcucaccaucggcaucuccggccccgacaacggcgccgucgccguccucaaguacaacggcaucaucaccgacaccaucaaguccuggcgcaacaacauccuccgcacccaggaguccgagugcgccugcgucaacggcuccugcuucaccaucaugaccgacggccccuccgacggccaggccuccuacaagaucuuccgcaucgagaagggcaagaucgucaaguccgucgagaugaacgcccccaacuaccacuacgaggagugcuccugcuaccccgacuccuccgagaucaccugcgucugccgcgacaacuggcacggcuccaaccgccccugggucuccuucaaccagaaccucgaguaccagaucggcuacaucugcuccggcaucuucggcgacaacccccgccccaacgacaagaccggcuccugcggccccgucuccuccaacggcgccaacggcgucaagggcuucuccuucaaguacggcaacggcgucuggaucggccgcaccaaguccaucuccucccgcaagggcuucgagaugaucugggaccccaacggcuggaccggcaccgacaacaacuucuccaucaagcaggacaucgucggcaucaacgagugguccggcuacuccggcuccuucguccagcaccccgagcucaccggccucgacugcauccgccccugcuucugggucgagcucauccgcggccgccccaaggagaacaccaucuggaccuccggcuccuccaucuccuucugcggcgucaacuccgacaccgucggcugguccuggcccgacggcgccgagcuccccuucaccaucgacaaguga

SEQ ID NO: 119348 - RNA, 1410 nt, Artificial Sequence; identical to SEQ ID NO: 116745
  derived and/or modified CDS sequence (opt2) from neuraminidase__InfluenzaA__AGB13593

SEQ ID NO: 119349 - RNA, 1410 nt, Artificial Sequence; identical to SEQ ID NO: 116745
  derived and/or modified CDS sequence (opt2) from neuraminidase__InfluenzaA__AGB13603

SEQ ID NO: 119350 - RNA, 1410 nt, Artificial Sequence; identical to SEQ ID NO: 116745
  derived and/or modified CDS sequence (opt2) from neuraminidase__InfluenzaA__AGB13613

SEQ ID NO: 119351 - RNA, 1410 nt, Artificial Sequence; identical to SEQ ID NO: 116745
  derived and/or modified CDS sequence (opt2) from neuraminidase__InfluenzaA__AGB13623

SEQ ID NO: 119352 - RNA, 1410 nt, Artificial Sequence
  derived and/or modified CDS sequence (opt2) from neuraminidase__InfluenzaA__AGB13633
augaaccccaaccagaagaucaucaccaucggcuccgucugcaugaccaucggcauggccaaccucauccuccagaucggcaacaucaucuccaucuggaucucccacuccauccagcucggcaaccagucccagaucgagaccugcaaccaguccgucaucaccuacgagaacaacaccugggucaaccagaccuacgucaacaucuccaacaccaacuucgccgccggccaguccgucgucuccgucaagcucgccggcaacuccucccucugccccgucuccggcugggccaucuacuccaaggacaacuccauccgcaucggcuccaagggcgacgucuucgucauccgcgagcccuucaucuccugcuccccccucgagugccgcaccuucuuccucacccagggcgcccuccucaacgacaagcacuccaacggcaccaucaaggaccgcucccccuaccgcacccucauguccugccccaucggcgagguccccucccccuacaacucccgcuucgaguccgucgccugguccgccuccgccugccacgacggcaucaacuggcucaccaucggcaucuccggccccgacaacggcgccgucgccguccucaaguacaacggcaucaucaccgacaccaucaaguccuggcgcaacaacauccuccgcacccaggaguccgagugcgccugcgucaacggcuccugcuucaccaucaugaccgacggccccuccgacggccaggccuccuacaagaucuuccgcaucgagaagggcaagaucgucaaguccgucgagaugaacgcccccaacuaccacuacgaggagugcuccugcuaccccgacuccuccgagaucaccugcgucugccgcgacaacuggcacggcuccaaccgccccugggucuccuucaaccagaaccucgaguaccagaucggcuacaucugcuccggcaucuucggcgacaacccccgccccaacgacaagaccggcuccugcggccccgucuccuccaacggcgccaacggcgucaagggcuucuccuucaaguacggcaacggcgucuggaucggccgcaccaaguccaucuccucccgcaagggcuucgagaugaucugggaccccaacggcuggaccggcaccgacaacaacuucuccaucaagcaggacaucgucggcaucaacgagugguccggcuacuccggcuccuucguccagcaccccgagcucaccggccucgacugcauccgccccugcuucugggucgagcucauccgcggccgccccaaggagaacaccaucuggaccuccggcuccaucaucuccuucugcggcgucaacuccgacaccgucggcugguccuggcccgacggcgccgagcuccccuucaccaucgacaaguga

SEQ ID NO: 119353 - RNA, 1410 nt, Artificial Sequence
  derived and/or modified CDS sequence (opt2) from neuraminidase__InfluenzaA__AGB13643
augaaccccaaccagaagaucaucaccaucggcuccgucugcaugaccaucggcauggccaaccucauccuccagaucggcaacaucaucuccaucuggaucucccacuccauccagcucggcaaccagaaccagaucgagaccugcaaccaguccgucaucaccuacgagaacaacaccugggucaaccagaccuacgucaacaucuccaacaccaacuucgccgccggccaguccgucgucuccgucaagcucgccggcaacuccucccucugccccgucuccggcugggccaucuacuccaaggacaacggcauccgcaucggcuccaagggcgacgucuucgucauccgcgagcccuucaucuccugcuccccccucgagugccgcaccuucuuccucacccagggcgcccuccucaacgacaagcacuccaacggcaccaucaaggaccgcucccccuaccgcacccucauguccugccccaucggcgagguccccucccccuacaacucccgcuucgaguccgucgccugguccgccuccgccugccacgacggcaucaacuggcucaccaucggcaucuccggccccgacaacggcgccgucgccguccucaaguacaacggcaucaucaccgacaccaucaaguccuggcgcaacaacauccuccgcacccaggaguccgagugcgucugcgucaacggcuccugcuucaccgucaugaccgacggccccuccgacggccaggccuccuacaagaucuuccgcaucgagaagggcaagaucgucaaguccgucgagaugaacgcccccaacuaccacuacgaggagugcuccugcuaccccgacuccuccgagaucaccugcgucugccgcgacaacuggcacggcuccaaccgccccugggucuccuucaaccagaaccucgaguaccagaucggcuacaucugcuccggcaucuucggcgacaacccccgccccaacgacaagaccggcuccugcggccccgucuccuccaacggcgccaacggcgucaagggcuucuccuucaaguacggcaacggcgucuggaucggccgcaccaaguccaucuccucccgcaacggcuucgagaugaucugggaccccaacggcuggaccggcaccgacaacaacuucuccgucaagcaggacaucaucggcaucaacgagugguccggcuacuccggcuccuucguccagcaccccgagcucaccggccucgacugcauccgccccugcuucugggucgagcucauccgcggccgccccaaggagaacaccaucuggaccuccggcuccuccaucuccuucugcggcgucaacuccgacaccgucggcugguccuggcccgacggcgccgagcuccccuucaccaucgacaaguga

SEQ ID NO: 119354 - RNA, 1410 nt, Artificial Sequence
  derived and/or modified CDS sequence (opt2) from neuraminidase__InfluenzaA__AGB13653
augaaccccaaccagaagaucaucaccaucggcuccgucugcaugaccaucggcauggccaaccucauccuccagaucggcaacaucaucuccaucuggaucucccacuccauccagcucggcaaccagaaccagaucgagaccugcaaccaguccgucaucaccuacgagaacaacaccugggucaaccagaccuacgucaacaucuccaacaccaacuucgccgccggccaguccgucgucuccgucaagcucgccggcaacuccucccucugccccgucuccggcugggccaucuacuccaaggacaacuccauccgcaucggcuccaagggcgacgucuucgucauccgcgagcccuucaucuccugcuccccccucgagugccgcaccuucuuccucacccagggcgcccuccucaacgacaagcacuccaacggcaccaucaaggaccgcucccccuaccgcacccucauguccugccccaucggcgagguccccucccccuacaacucccgcuucgaguccgucgccugguccgccuccgccugccacgacggcaucaacuggcucaccaucggcaucuccggccccgacaacggcgccgucgccguccucaaguacaacggcaucaucaccgacaccaucaaguccuggcgcaacaacauccuccgcacccaggaguccgagugcgucugcgucaacggcuccugcuucaccgucaugaccgacggccccuccgacggccaggccuccuacaagaucuuccgcaucgagaagggcaagaucgucaaguccgucgagaugaacgcccccaacuaccacuacgaggagugcuccugcuaccccgacuccuccgagaucaccugcgucugccgcgacaacuggcacggcuccaaccgccccugggucuccuucaaccagaaccucgaguaccagaucggcuacaucugcuccggcaucuucggcgacaacccccgccccaacgacaagaccggcuccugcggccccgucuccuccaacggcgccaacggcgucaagggcuucuccuucaaguacggcaacggcgucuggaucggccgcaccaaguccaucuccucccgcaacggcuucgagaugaucugggaccccaacggcuggaccggcaccgacaacaacuucuccgucaagcaggacaucaucggcaucaacgagugguccggcuacuccggcuccuucguccagcaccccgagcucaccggccucgacugcauccgccccugcuucugggucgagcucauccgcggccgccccaaggagaacaccaucuggaccuccggcuccuccaucuccuucugcggcgucaacuccgacaccgucggcugguccuggcccgacggcgccgagcuccccuucaccaucgacaaguga

SEQ ID NO: 119355 - RNA, 1410 nt, Artificial Sequence; identical to SEQ ID NO: 116293
  derived and/or modified CDS sequence (opt2) from neuraminidase__InfluenzaA__AGB13663

SEQ ID NO: 119356 - RNA, 1410 nt, Artificial Sequence; identical to SEQ ID NO: 116293
  derived and/or modified CDS sequence (opt2) from neuraminidase__InfluenzaA__AGB13724

SEQ ID NO: 119357 - RNA, 1410 nt, Artificial Sequence; identical to SEQ ID NO: 116745
  derived and/or modified CDS sequence (opt2) from neuraminidase__InfluenzaA__AGB13734

SEQ ID NO: 119358 - RNA, 1410 nt, Artificial Sequence; identical to SEQ ID NO: 113250
  derived and/or modified CDS sequence (opt2) from neuraminidase__InfluenzaA__AGB51359

SEQ ID NO: 119359 - RNA, 1410 nt, Artificial Sequence
  derived and/or modified CDS sequence (opt2) from neuraminidase__InfluenzaA__AGB97270
augaaccccaaccagaagaucaucaccaucggcuccgucugcaugaccaucggcauggccaaccucauccuccagaucggcaacaucaucuccaucuggaucucccacuccauccagcuccgcaaccagaaccagaucgagaccugcaaccaguccgucaucaccuacgagaacaacaccugggucaaccagaccuacgucaacaucuccaacaccaacuucgccgccggccaguccgucgucuccgucaagcucgccggcaacuccucccucugccccgucuccggcugggccaucuacuccaaggacaacuccauccgcaucggcuccaagggcgacgucuucgucauccgcgagcccuucaucuccugcuccccccucgagugccgcaccuucuuccucacccagggcgcccuccucaacgacaagcacuccaacggcaccaucaaggaccgcucccccuaccgcacccucauguccugccccaucggcgagguccccucccccuacaacucccgcuucgaguccgucgccugguccgccuccgccugccacgacggcaucaacuggcucaccaucggcaucuccggccccgacaacggcgccauggccguccucaaguacaacggcaucaucaccgacaccaucaaguccuggcgcaacaacauccuccgcacccaggaguccgagugcgccugcgucaacggcuccugcuucaccaucaugaccgacggccccuccgacggccaggccuccuacaagaucuuccgcaucgagaagggcaagaucgucaaguccgucgagaugaacgcccccaacuaccacuacgaggagugcuccugcuaccccgacuccuccgagaucaccugcgucugccgcgacaacuggcacggcuccaaccgccccugggucuccuucaaccagaaccucgaguaccagaucggcuacaucugcuccggcaucuucggcgacaacccccgccccaacgacaagaccggcuccugcggccccgucuccuccaacggcgccaacggcgucaagggcuucuccuucaaguacggcaacggcgucuggaucggccgcaccaaguccaucuccucccgcaagggcuucgagaugaucugggaccccaacggcuggaccggcaccgacaacaacuucuccaucaagcaggacaucgucggcaucaacgagugguccggcuacuccggcuccuucguccagcaccccgagcucaccggccucgacugcauccgccccugcuucugggucgagcucauccgcggccgccccaaggagaacaccaucuggaccuccggcuccuccaucuccuucugcggcgucaacuccgacaccgucggcugguccuggcccgacggcgccgagcuccccuucaccaucgacaaguga

SEQ ID NO: 119360 - RNA, 1410 nt, Artificial Sequence
  derived and/or modified CDS sequence (opt2) from neuraminidase__InfluenzaA__AGB97274
augaaccccaaccagaagaucaucaccaucggcuccgucugcaugaccaucggcauggccaaccucauccuccagaucggcaacaucaucuccaucuggaucucccacuccauccagcuccgcaaccagaaccagaucgagaccugcaaccaguccgucaucaccuacgagaacaacaccugggucaaccagaccuacgucaacaucuccaacaccaacuucgccgccggccaguccgucgucuccgucaagcucgccggcaacuccucccucugccccgucuccggcugggccaucuacuccaaggacaacuccauccgcaucggcuccaagggcgacgucuucgucauccgcgagcccuucaucuccugcuccccccucgagugccgcaccuucuuccucacccagggcgcccuccucaacgacaagcacuccaacggcaccaucaaggaccgcucccccuaccgcacccucauguccugccccaucggcgagguccccucccccuacaacucccgcuucgaguccgucgccugguccgccuccgccugccacgacggcaucaacuggcucaccaucggcaucuccggccccgacaacggcgccgucgccguccucaaguacaacggcaucaucaccgacaccaucaaguccuggcgcaacaacauccuccgcacccaggaguccgagugcgccugcgucaacggcuccugcuucaccaucaugaccgacggccccuccgacggccaggccuccuacaagaucuuccgcaucgagaagggcaagaucgucaaguccgucgagaugaacgcccccaacuaccacuacgaggagugcuccugcuaccccgacuccuccgagaucaccugcgucugccgcgacaacuggcacggcuccaaccgccccugggucuccuucaaccagaaccucgaguaccagaucggcuacaucugcuccggcaucuucggcgacaacccccgccccaacgacaagaccggcuccugcggccccgucuccuccaacggcgccaacggcgucaagggcuucuccuucaaguacggcaacggcgucuggaucggccgcaccaaguccaucuccucccgcaagggcuucgagaugaucugggaccccaacggcuggaccggcaccgacaacaacuucuccaucaagcaggacaucgucggcaucaacgagugguccggcuacuccggcuccuucguccagcaccccgagcucaccggccucgacugcauccgccccugcuucugggucgagcucauccgcggccgccccaaggagaacaccaucuggaccuccggcuccuccaucuccuucugcggcgucaacuccgacaccgucggcugguccuggcccgacggcgccgagcuccccuucaccaucgacaaguga

SEQ ID NO: 119361 - RNA, 1410 nt, Artificial Sequence; identical to SEQ ID NO: 118182
  derived and/or modified CDS sequence (opt2) from neuraminidase__InfluenzaA__AGB97289

SEQ ID NO: 119362 - RNA, 1410 nt, Artificial Sequence
  derived and/or modified CDS sequence (opt2) from neuraminidase__InfluenzaA__AGE15475
augaaccccaaccagaagaucaucaccaucggcuccgucugcaugaccaucggcauggccaaccucauccuccagaucggcaacaucaucuccaucuggaucucccacuccauccagcucggcaaccagucccagaucgagaccugcaaccaguccgucaucaccuacgagaacaacaccugggucaaccagaccuacgucaacaucuccaacaccaacuucgccgccggccaguccgucgucuccgucaagcucgccggcaacuccucccucugccccgucuccggcugggccaucuacuccaaggacaacuccauccgcaucggcuccaagggcgacgucuucgucauccgcgagcccuucaucuccugcuccccccucgagugccgcaccuucuuccucacccagggcucccuccucaacgacaagcacuccaacggcaccaucaaggaccgcucccccuaccgcacccucauguccugccccaucggcgagguccccucccccuacaacucccgcuucgaguccgucgccugguccgccuccgccugccacgacggcaucaacuggcucaccaucggcaucuccggccccgacaacggcgccgucgccguccucaaguacaacggcaucaucaccgacaccaucaaguccuggcgcaacaacauccuccgcacccaggaguccgagugcgccugcgucaacggcuccugcuucaccaucaugaccgacggccccuccgacggccaggccuccuacaagaucuuccgcaucgagaagggcaagaucgucaaguccgucgagaugaacgcccccaacuaccacuacgaggagugcuccugcuaccccgacuccuccgagaucaccugcgucugccgcgacaacuggcacggcuccaaccgccccugggucuccuucaaccagaaccucgaguaccagaucggcuacaucugcuccggcaucuucggcgacaacccccgccccaacgacaagaccggcuccugcggccccgucuccuccaacggcgccaacggcgucaagggcuucuccuucaaguacggcaacggcgucuggaucggccgcaccaaguccaucuccucccgcaagggcuucgagaugaucugggaccccaacggcuggaccggcaccgacaacuacuucuccaucaagcaggacaucgucggcaucaacgagugguccggcuacuccggcuccuucguccagcaccccgagcucaccggccucgacugcauccgccccugcuucugggucgagcucauccgcggccgccccaaggagaacaccaucuggaccuccggcuccuccaucuccuucugcggcgucaacuccgacaccgucggcugguccuggcccgacggcgccgagcuccccuucuccaucgacaaguga

SEQ ID NO: 119363 - RNA, 1410 nt, Artificial Sequence
  derived and/or modified CDS sequence (opt2) from neuraminidase__InfluenzaA__AGE15476
augaaccccaaccagaagaucaucaccaucggcuccgucugcaugaccaucggcauggccaaccucauccuccagaucggcaacaucaucuccaucuggaucucccacuccauccagcucggcaaccagucccagaucgagaccugcaaccaguccgucaucaccuacgagaacaacaccugggucaaccagaccuacgucaacaucuccaacaccaacuucgccgccggccaguccgucgucuccgucaagcucgccggcaacuccucccucugccccgucuccggcugggccaucuacuccaaggacaacuccauccgcaucggcuccaagggcgacgucuucgucauccgcgagcccuucaucuccugcuccccccucgagugccgcaccuucuuccucacccagggcucccuccucaacgacaagcacuccaacggcaccaucaaggaccgcucccccuaccgcacccucauguccugccccaucggcgagguccccucccccuacaacucccgcuucgaguccgucgccugguccgccuccgccugccacgacggcaucaacuggcucaccaucggcaucuccggccccgacaacggcgccgucgccguccucaaguacaacggcaucaucaccgacaccaucaaguccuggcgcaacaacauccuccgcacccaggaguccgagugcgccugcgucaacggcuccugcuucaccaucaugaccgacggccccuccgacggccaggccuccuacaagaucuuccgcaucgagaagggcaagaucgucaaguccgucgagaugaacgcccccaacuaccacuacgaggagugcuccugcuaccccgacuccuccgagaucaccugcgucugccgcgacaacuggcacggcuccaaccgccccugggucuccuucaaccagaaccucgaguaccagaucggcuacaucugcuccggcaucuucggcgacaacccccgccccaacgacaagaccggcuccugcggccccgucuccuccaacggcgccaacggcgucaagggcuucuccuucaaguacggcaacggcgucuggaucggccgcaccaaguccaucuccucccgcaagggcuucgagaugaucugggaccccaacggcuggaccggcaccgacaacuacuucuccaucaagcaggacaucgucggcaucaacgagugguccggcuacuccggcuccuucguccagcaccccgagcucaccggccucgacugcauccgccccugcuucugggucgagcucauccgcggccgccccaaggagaacaccaucuggaccuccggcuccuccaucuccuucugcggcgucaacuccgacaccgucggcugguccuggcccgacggcgccgagcuccccuucaccaucgacaaguga

SEQ ID NO: 119364 - RNA, 1410 nt, Artificial Sequence; identical to SEQ ID NO: 119194
  derived and/or modified CDS sequence (opt2) from neuraminidase__InfluenzaA__AGE15477

SEQ ID NO: 119365 - RNA, 1410 nt, Artificial Sequence
  derived and/or modified CDS sequence (opt2) from neuraminidase__InfluenzaA__AGE15478
augaaccccaaccagaagaucaucaccaucggcuccgucugcaugaccaucggcauggccaaccucauccuccagaucggcaacaucaucuccaucuggaucucccacuccauccagcucggcaaccagucccagaucgagaccugcaaccaguccgucaucaccuacgagaacaacaccugggucaaccagaccuacgucaacaucuccaacaccaacuucgccgccggccaguccgucgucuccgucaagcucgccggcaacuccucccucugccccgucuccggcugggccaucuacuccaaggacaacuccauccgcaucggcuccaagggcgacgucuucgucauccgcgagcccuucaucuccugcuccccccucgagugccgcaccuucuuccucacccagggcucccuccucaacgacaagcacuccaacggcaccaucaaggaccgcucccccuaccgcacccucauguccugccccaucggcgagguccccucccccuacaacucccgcuucgaguccgucgccugguccgccuccgccugccacgacggcaucaacuggcucaccaucggcaucuccggccccgacaacggcgccgucgccguccucaaguacaacggcaucaucaccgacaccaucaaguccuggcgcaacaacauccuccgcacccaggaguccgagugcgccugcgucaacggcuccugcuucaccaucaugaccgacggccccuccgacggccaggccuccuacaagaucuuccgcaucgagaagggcaagaucgucaaguccgucgagaugaacgcccccaacuaccacuacgaggagugcuccugcuaccccgacuccuccgagaucaccugcgucugccgcgacaacuggcacggcuccaaccgccccugggucuccuucaaccagaaccucgaguaccagaucggcuacaucugcuccggcaucuucggcgacaacccccgccccaacgacaagaccggcuccugcggccccgucuccuccaacggcgccaacggcgucaagggcuucuccuucaaguacggcaacggcgucuggaucggccgcaccaaguccaucuccucccgcaagggcuucgagaugaucugggaccccaacggcuggaccggcaccgacaacuacuucuccaucaagcaggacaucgucggcaucaacgagugguccggcuacuccggcuccuucguccagcaccccgagcucaccggccucgacugcauccgccccugcuucugggucgagcucauccgcggccgccccaaggagaacaccaucuggaccuccggcuccuccaucuccuucugcggcgucaaguccgacaccgucggcugguccuggcccgacggcgccgagcuccccuucaccaucgacaaguga

SEQ ID NO: 119366 - RNA, 1410 nt, Artificial Sequence
  derived and/or modified CDS sequence (opt2) from neuraminidase__InfluenzaA__AGE15479
augaaccccaaccagaagaucaucaccaucggcuccgucugcaugaccaucggcauggccaaccucauccuccagaucggcaacaucaucuccaucuggaucucccacuccauccagcucggcaaccagucccagaucgagaccugcaaccaguccgucaucaccuacgagaacaacaccugggucaaccagaccuacgucaacaucuccaacaccaacuucgccgccggccaguccgucgucuccgucaagcucgccggcaacuccucccucugccccgucuccggcugggccaucuacuccaaggacaacuccauccgcaucggcuccaagggcgacgucuucgucauccgcgagcccuucaucuccugcuccccccucgagugccgcaccuucuuccucacccagggcucccuccucaacgacaagcacuccaacggcaccaucaaggaccgcucccccuaccgcacccucauguccugccccaucggcgagguccccucccccuacaacucccgcuucgaguccgucgccugguccgccuccgccugccacgacggcaucaacuggcucaccaucggcaucuccggccccgacaacggcgccgucgccguccucaaguacaacggcaucaucaccgacaccaucaaguccuggcgcaacaacauccuccgcacccaggaguccgagugcgccugcgucaacggcuccugcuucaccaucaugaccgacggccccaucgacggccaggccuccuacaagaucuuccgcaucgagaagggcaagaucgucaaguccgucgagaugaacgcccccaacuaccacuacgaggagugcuccugcuaccccgacuccuccgagaucaccugcgucugccgcgacaacuggcacggcuccaaccgccccugggucuccuucaaccagaaccucgaguaccagaucggcuacaucugcuccggcaucuucggcgacaacccccgccccaacgacaagaccggcuccugcggccccgucuccuccaacggcgccaacggcgucaagggcuucuccuucaaguacggcaacggcgucuggaucggccgcaccaaguccaucuccucccgcaagggcuucgagaugaucugggaccccaacggcuggaccggcaccgacaacuacuucuccaucaagcaggacaucgucggcaucaacgagugguccggcuacuccggcuccuucguccagcaccccgagcucaccggccucgacugcauccgccccugcuucugggucgagcucauccgcggccgccccaaggagaacaccaucuggaccuccggcuccuccaucuccuucugcggcgucaacuccgacaccgucggcugguccuggcccgacggcgccgagcuccccuucaccaucgacaaguga

SEQ ID NO: 119367 - RNA, 1410 nt, Artificial Sequence; identical to SEQ ID NO: 119194
  derived and/or modified CDS sequence (opt2) from neuraminidase__InfluenzaA__AGE15480

SEQ ID NO: 119368 - RNA, 1410 nt, Artificial Sequence; identical to SEQ ID NO: 114236
  derived and/or modified CDS sequence (opt2) from neuraminidase__InfluenzaA__AGE89270

SEQ ID NO: 119369 - RNA, 1410 nt, Artificial Sequence; identical to SEQ ID NO: 114236
  derived and/or modified CDS sequence (opt2) from neuraminidase__InfluenzaA__AGE89280

SEQ ID NO: 119370 - RNA, 1410 nt, Artificial Sequence
  derived and/or modified CDS sequence (opt2) from neuraminidase__InfluenzaA__AGE89290
augaaccccaaccagaagaucaucaccaucggcuccgucucccucaccaucuccaccaucugcuucuucaugcagaucgccauccucaucaccaccgucacccuccacuucaagcaguacgaguucaacuccccccccaacaaccaggucaugcucugcgagcccaccaucaucgagcgcaacaucaccgagaucgucuaccucaccaacaccaccaucgagaaggagaucugccccaagcucgccgaguaccgcaacugguccaagccccagugcgacaucaccggcuucgcccccuucuccaaggacaacuccauccgccucuccgccggcggcgacaucugggucacccgcgagcccuacgucuccugcgaccccgacaagugcuaccaguucgcccucggccagggcaccacccucaacaacguccacuccaacaacaccguccgcgaccgcacccccuaccgcacccuccucaugaacgagcucggcguccccuuccaccucggcaccaagcaggucugcaucgccugguccuccuccuccugccacgacggcaaggccuggcuccacgucugcaucaccggcgacgacaagaacgccaccgccuccuucaucuacaacggcaagcucgucgacuccgucgucuccugguccaaggagauccuccgcacccaggaguccgagugcgucugcaucaacggcaccugcaucgucgucaugaccgacggcuccgccuccggcaaggccgacaccaagauccucuucgucgaggagggcaagaucguccacaccuccacccucuccggcuccgcccagcacgucgaggagugcuccugcuacccccgcuaccccggcguccgcugcgucugccgcgacaacuggaagggcuccaaccgccccaucgucgacaucaacaucaaggaccacuccaucaucuccuccuacgucugcuccggccucgucggcgacaccccccgcaagaacgacuccuccuccuccucccacugccucgaccccaacaacgaggagggcggccacggcgucaagggcugggccuucgacgacggcaacgacgucuggaugggccgcaccaucaacgagaccucccgccucggcuacgagaccuucaaggucaucgagggcugguccaaccccaaguccaagcuccagaucaaccgccaggucaucgucgaccgcggcaaccgcuccggcuacuccggcaucuucuccgucgagggcaaguccugcaucaaccgcugcuucuacgucgagcucauccgcggccgcaaggaggagaccgagguccucuggaccuccaacuccaucgucgucuucugcggcaccuccggcaccuacggcaccggcuccuggcccgacggcgccgaccucaaccucaugcccaucuga

SEQ ID NO: 119371 - RNA, 1410 nt, Artificial Sequence; identical to SEQ ID NO: 116293
  derived and/or modified CDS sequence (opt2) from neuraminidase__InfluenzaA__AGE89301

SEQ ID NO: 119372 - RNA, 1410 nt, Artificial Sequence
  derived and/or modified CDS sequence (opt2) from neuraminidase__InfluenzaA__AGE89311
augaaccccaaccagaagaucaucaccaucggcuccgucugcaugaccaucggcauggccaaccucauccuccagaucggcaacaucaucuccaucuggaucucccacuccauccagcucggcaaccagaaccagaucgagaccugcaaccaguccgucaucaccuacgagaacaacaccugggucaaccagaccuacgucaacaucuccaacaccaacuucgccgccggccaguccgucgucuccgucaagcucgccggcaacuccucccucugccccgucuccggcugggccaucuacuccaaggacaacuccauccgcaucggcuccaagggcgacgucuucgucauccgcgagcccuucaucuccugcuccccccucgagugccgcaccuucuuccucacccagggcgcccuccucaacgacaagcacuccaacggcaccaucaaggaccgcucccccuaccgcacccucauguccugccccaucggcgagguccccucccccuacaacucccgcuucgaguccgucgccugguccgccuccgccugccacgacggcaucaacuggcucaccaucggcaucuccggccccgacaacggcgccgucgccguccucaaguacaacggcaucaucaccgacaccaucaaguccuggaagaacaacauccuccgcacccaggaguccgagugcgccugcgucaacggcuccugcuucaccgucaugaccgacggccccuccgacggccaggccuccuacaagaucuuccgcaucgagaagggcaagaucgucaaguccgucgagaugaacgcccccaacuaccacuacgaggagugcuccugcuaccccgacuccuccgagaucaccugcgucugccgcgacaacuggcacggcuccaaccgccccugggucuccuucaaccagaaccucgaguaccgcaucggcuacaucugcuccggcaucuucggcgacaacccccgccccaacgacaagaccggcuccugcggccccgucuccuccaacggcgccaacggcgucaagggcuucuccuucaaguacggcaacggcgucuggaucggccgcaccaaguccaucuccucccgcaacggcuucgagaugaucugggaccccaacggcuggaccggcaccgacaacaacuucuccaagaagcaggacaucaucggcaucaacgagugguccggcuacuccggcuccuucguccagcaccccgagcucaccggccucgacugcauccgccccugcuucugggucgagcucauccgcggccgccccaaggagaacaccaucuggaccuccggcuccuccauguccuucugcggcgucaacuccgacaccgucggcugguccuggcccgacggcgccgagcuccccuucaccaucgacaaguga

SEQ ID NO: 119373 - RNA, 1410 nt, Artificial Sequence; identical to SEQ ID NO: 117823
  derived and/or modified CDS sequence (opt2) from neuraminidase__InfluenzaA__AGE89321

SEQ ID NO: 119374 - RNA, 1410 nt, Artificial Sequence; identical to SEQ ID NO: 117179
  derived and/or modified CDS sequence (opt2) from neuraminidase__InfluenzaA__AGE89332

SEQ ID NO: 119375 - RNA, 1410 nt, Artificial Sequence; identical to SEQ ID NO: 116293
  derived and/or modified CDS sequence (opt2) from neuraminidase__InfluenzaA__AGE89343

SEQ ID NO: 119376 - RNA, 1410 nt, Artificial Sequence
  derived and/or modified CDS sequence (opt2) from neuraminidase__InfluenzaA__AGE89353
augaaccccaaccagaagaucaucaccaucggcuccgucucccucaccaucuccaccaucugcuucuucaugcagaucgccauccucaucaccaccgucacccuccacuucaagcaguacgaguucaacuccccccccaacaaccaggucaugcucugcgagcccaccaucaucgagcgcaacaucaccgagaucgucuaccucaccaacaucaccaucgagaaggagaucugccccaagcucgccgaguaccgcaacugguccaagccccagugcgacaucaccggcuucgcccccuucuccaaggacaacuccauccgccucuccgccggcggcgacaucugggucacccgcgagcccuacgucuccugcgaccccgacaagugcuaccaguucgcccucggccagggcaccacccucaacaacguccacuccaacaacaccguccgcgaccgcacccccuaccgcacccuccucaugaacgagcucggcguccccuuccaccucggcaccaagcaggucugcaucgccugguccuccuccuccugccacgacggcaaggccuggcuccacgucugcaucaccggcgacgacaagaacgccaccgccuccuucaucuacaacggccgccucgucgacuccgucgucuccugguccaaggagauccuccgcacccaggaguccgagugcgucugcaucaacggcaccugcaccgucgucaugaccgacggcuccgccuccggcaaggccgacaccaagauccucuucaucgaggagggcaagaucguccacaccuccacccucuccggcuccgcccagcacgucgaggagugcuccugcuacccccgcuaccccggcguccgcugcgucugccgcgacaacuggaagggcuccaaccgccccaucgucgacaucaacaucaaggaccacuccaucgucuccuccuacgucugcuccggccucgucggcgacaccccccgcaagaacgacuccuccuccuccucccacugccucgaccccaacaacgaggagggcggccacggcgucaagggcugggccuucgacgacggcaacgacgucuggaugggccgcaccaucaacgagaccucccgccucggcuacgagaccuucaaggucaucgagggcugguccaaccccaaguccaagcuccagaucaaccgccaggucaucgucgacaagggcaaccgcuccggcuacuccggcaucuucuccgucgagggcaaguccugcaucaaccgcugcuucuacgucgagcucauccgcggccgcaaggaggagaccgagguccucuggaccuccaacuccaucgucgucuucugcggcaccuccggcaccuacggcaccggcuccuggcccgacggcgccgaccucaaccucaugcccaucuga

SEQ ID NO: 119377 - RNA, 1410 nt, Artificial Sequence; identical to SEQ ID NO: 117030
  derived and/or modified CDS sequence (opt2) from neuraminidase__InfluenzaA__AGE89364

SEQ ID NO: 119378 - RNA, 1410 nt, Artificial Sequence; identical to SEQ ID NO: 117823
  derived and/or modified CDS sequence (opt2) from neuraminidase__InfluenzaA__AGE89374

SEQ ID NO: 119379 - RNA, 1410 nt, Artificial Sequence
  derived and/or modified CDS sequence (opt2) from neuraminidase__InfluenzaA__AGE89385
augaaccccaaccagaagaucaucaccaucggcuccgucugcaugaccaucggcauggccaaccucauccuccagaucggcaacaucaucuccaucuggaucucccacuccauccagcucggcaaccagaaccagaucgagaccugcaaccaguccgucaucaccuacgagaacaacaccugggucaaccagaccuacgucaacaucuccaacaccaacuucgccgccggccaguccgucgccuccgucaagcucgccggcaacuccucccucugccccgucuccggcugggccaucuacuccaaggacaacuccauccgcaucggcuccaagggcgacgucuucgucauccgcgagcccuucaucuccugcuccccccucgagugccgcaccuucuuccucacccagggcgcccuccucaacgacaagcacuccaacggcaccaucaaggaccgcucccccuaccgcacccucauguccugccccaucggcgagguccccucccccuacaacucccgcuucgaguccgucgccugguccgccuccgccugccacgacggcaucaacuggcucaccaucggcaucuccggccccgacaacggcgccgucgccguccucaaguacaacggcaucaucaccgacaccaucaaguccuggcgcaacaacauccuccgcacccaggaguccgagugcgccugcgucaacggcuccugcuucaccaucaugaccgacggccccuccgacggccaggccuccuacaagaucuuccgcaucgagaagggcaagaucgucaaguccgucgagaugaacgcccccaacuaccacuacgaggagugcuccugcuaccccgacuccuccgagaucaccugcgucugccgcgacaacuggcacggcuccaaccgccccugggucuccuucaaccagaaccucgaguaccagaucggcuacaucugcuccggcaucuucggcgacaacccccgccccaacgacaagaccggcuccugcggccccgucuccuccaacggcgccaacggcgucaagggcuucuccuucaaguacggcaacggcgucuggaucggccgcaccaaguccaucuccucccgcaagggcuucgagaugaucugggaccccaacggcuggaccggcaccgacaacaacuucuccaucaagcaggacaucgucggcaucaacgagugguccggcuacuccggcuccuucguccagcaccccgagcucaccggccucgacugcauccgccccugcuucugggucgagcucauccgcggccgccccaaggagaacaccaucuggaccuccggcuccuccaucuccuucugcggcgucaacuccgacaccgucggcugguccuggcccgacggcgccgagcuccccuucaccaucgacaaguga

SEQ ID NO: 119380 - RNA, 1410 nt, Artificial Sequence
  derived and/or modified CDS sequence (opt2) from neuraminidase__InfluenzaA__AGE89395
augaaccccaaccagaagaucaucaccaucggcuccgucucccucaccaucuccaccaucugcuucuucaugcagaucgccauccucaucaccaccgucacccuccacuucaagcaguacgaguucaacuccccccccaacaaccaggucaugcucugcgagcccaccaucaucgagcgcaacaucaccgagaucgucuaccucaccaacaccaccaucgagaaggagaucugccccaagcccgccgaguaccgcaacugguccaagccccagugcgacaucaccggcuucgcccccuucuccaaggacaacuccauccgccucuccgccggcggcgacaucugggucacccgcgagcccuacgucuccugcgaccccgacaagugcuaccaguucgcccucggccagggcaccacccucaacaacguccacuccaacaacaccguccgcgaccgcacccccuaccgcacccuccucaugaacgagcucggcguccccuuccaccucggcaccaagcaggucugcaucgccugguccuccuccuccugccacgacggcaaggccuggcuccacgucugcaucaccggcgacgacaagaacgccaccgccuccuucaucuacaacggccgccucgucgacuccgucgucuccugguccaaggagauccuccgcacccaggaguccgagugcgucugcaucaacggcaccugcaccgucgucaugaccgacggcuccgccuccggcaaggccgacaccaagauccucuucaucgaggagggcaagaucguccacaccuccacccucuccggcuccgcccagcacgucgaggagugcuccugcuacccccgcuaccccggcguccgcugcgucugccgcgacaacuggaagggcuccaaccgccccaucgucgacaucaacaucaaggaccacuccaucgucuccuccuacgucugcuccggccucgucggcgacaccccccgcaagaacgacuccuccuccuccucccacugccucgaccccaacaacgaggagggcggccacggcgucaagggcugggccuucgacgacggcaacgacgucuggaugggccgcaccaucaacgagaccucccgccucggcuacgagaccuucaaggucaucgagggcugguccaaccccaaguccaagcuccagaucaaccgccaggucaucgucgaccgcggcaaccgcuccggcuacuccggcaucuucuccgucgagggcaaguccugcaucaaccgcugcuucuacgucgagcucauccgcggccgcaaggaggagaccgagguccucuggaccuccaacuccaucgucgucuucugcggcaccuccggcaccuacggcaccggcuccuggcccgacggcgccgaccucaaccucaugcccaucuga

SEQ ID NO: 119381 - RNA, 1410 nt, Artificial Sequence; identical to SEQ ID NO: 114236
  derived and/or modified CDS sequence (opt2) from neuraminidase__InfluenzaA__AGE89425

SEQ ID NO: 119382 - RNA, 1410 nt, Artificial Sequence; identical to SEQ ID NO: 115554
  derived and/or modified CDS sequence (opt2) from neuraminidase__InfluenzaA__AGE89722

SEQ ID NO: 119383 - RNA, 1410 nt, Artificial Sequence
  derived and/or modified CDS sequence (opt2) from neuraminidase__InfluenzaA__AGE89733
augaaccccaaccagaagaucaucaccaucggcuccgucugcaugaccaucggcauggccaaccucauccuccagaucggcaacaucaucuccaucuggaucucccacuccauccagcucggcaaccagaaccagaucgagaccugcaaccaguccgucaucaccuacgagaacaacaccugggucaaccagaccuacgucaacaucuccaacaccaacuucgccgccggccaguccgucgucuccgucaagcucgccggcaacuccucccucugccccgucuccggcugggccaucuacuccaaggacaacuccauccgcaucggcuccaagggcgacgucuucgucauccgcgagcccuucaucuccugcuccccccucgagugccgcaccuucuuccucacccagggcgcccuccucaacgacaagcacuccaacggcaccaucaaggaccgcucccccuaccgcacccucauguccugccccaucggcgagguccccucccccuacaacucccgcuucgaguccgucgccugguccgccuccgccugccacgacggcaucaacuggcucaccaucggcaucuccggccccgacaacggcgccgucgccguccucaaguacaacggcaucaucaccgacaccaucaaguccuggcgcaacaacauccuccgcacccaggaguccgagugcgccugcgucaacggcuccugcuucaccaucaugaccgacggccccaacgacggccaggccuccuacaagaucuuccgcaucgagaagggcaagaucgucaaguccgucgagaugaacgcccccaacuaccacuacgaggagugcuccugcuaccccgacuccuccgagaucaccugcgucugccgcgacaacuggcacggcuccaaccgccccugggucuccuucaaccagaaccucgaguaccagaucggcuacaucugcuccggcaucuucggcgacaacccccgccccaacgacaagaccggcuccugcggccccgucuccuccaacggcgccaacggcgucaagggcuucuccuucaaguacggcaacggcgucuggaucggccgcaccaaguccaucuccucccgcaagggcuucgagaugaucugggaccccaacggcuggaccggcaccgacaacaacuucuccaucaagcaggacaucgucggcaucaacgagugguccggcuacuccggcuccuucguccagcaccccgagcucaccggccucgacugcauccgccccugcuucugggucgagcucauccgcggccgccccaaggagaacaccaucuggaccuccggcuccuccaucuccuucugcggcgucaacuccgacaccgucggcugguccuggcccgacggcgccgagcuccccuucaccaucgacaaguga

SEQ ID NO: 119384 - RNA, 1410 nt, Artificial Sequence
  derived and/or modified CDS sequence (opt2) from neuraminidase__InfluenzaA__AGE89743
augaaccccaaccagaagaucaucaccaucggcuccgucucccucaccaucuccaccaucugcuucuucaugcagaucgccauccucaucaccaccgucacccuccacuucaagcaguacgaguucaacuccccccccaacaaccaggucaugcucugcgagcccaccaucaucgagcgcaacaucaccgagaucgucuaccucaccaacaccaccaucgagaaggagaucugccccaagcucgccgaguaccgcaacugguccaagccccagugcgacaucaccggcuucgcccccuucuccaaggacaacuccauccgccucuccgccggcggcgacaucugggucacccgcgagcccuacgucuccugcgaccccgacaagugcuaccaguucgcccucggccagggcaccacccucaacaacguccacuccaacaacaccguccgcgaccgcacccccuaccgcacccuccucaugaacgagcucggcguccccuuccaccucggcaccaagcaggucugcaucgccugguccuccuccuccugccacgacggcaaggccuggcuccacgucugcaucaccggcgacgacaagaacgccaccgccuccuucaucuacaacggccgccucgucgacuccgucgucuccugguccaaggagauccuccgcacccaggaguccgagugcgucugcaucaacggcaccugcaccgucgucaugaccgacggcuccgccuccggcaaggccgacaccaagauccucuucaucgaggagggcaagaucguccacaccuccacccucuccggcuccgcccagcacgucgaggagugcuccugcuacccccgcuaccccggcguccgcugcgucugccgcgacaacuggaagggcuccaaccgccccaucgucgacaucaacaucaaggaccacuccaucgucuccuccuacgucugcuccggccucgucggcgacaccccccgcaagaacgacuccuccuccuccucccacugccucgaccccaacaacgaggagggcggccacggcgucaagggcugggccuucgacgacggcaacgacgucuggaugggccgcaccaucaacgagaccucccgccucggcuacgagaccuucaaggucaucgagggcugguccaaccccaaguccaagcuccagaucaaccgccaggucaucgucgacaaggacaaccgcuccggcuacuccggcaucuucuccgucgagggcaaguccugcaucaaccgcugcuucuacgucgagcucauccgcggccgcaaggaggagaccgagguccucuggaccuccaacuccaucgucgucuucugcggcaccuccggcaccuacggcaccggcuccuggcccgacggcgccgaccucaaccucaugcccaucuga

SEQ ID NO: 119385 - RNA, 1410 nt, Artificial Sequence; identical to SEQ ID NO: 117823
  derived and/or modified CDS sequence (opt2) from neuraminidase__InfluenzaA__AGE89754

SEQ ID NO: 119386 - RNA, 1410 nt, Artificial Sequence; identical to SEQ ID NO: 117823
  derived and/or modified CDS sequence (opt2) from neuraminidase__InfluenzaA__AGE89765

SEQ ID NO: 119387 - RNA, 1410 nt, Artificial Sequence
  derived and/or modified CDS sequence (opt2) from neuraminidase__InfluenzaA__AGG13414
augaaccccaaccagaagaucaucaccaucggcuccgucucccucaccaucuccaccaucugcuucuucaugcagaucgccauccucaucaccaccgucacccuccacuucaagcaguacgaguucaacuccccccccaacaaccaggucaugcucugcgagcccaccaucaucgagcgcaacaucaccgagaucgucuaccucaccaacaccaccaucgagaaggagaucugccccaagcccgccgaguaccgcaacugguccaagccccagugcgacaucaccggcuucgcccccuucuccaaggacaacuccauccgccucuccgccggcggcgacaucugggucacccgcgagcccuacgucuccugcgaccccgacaagugcuaccaguucgcccucggccagggcaccacccucaacuccguccacuccaacaacaccguccgcgaccgcacccccuaccgcacccuccucaugaacgagcucggcguccccuuccaccucggcaccaagcaggucugcaucgccugguccuccuccuccugccacgacggcaaggccuggcuccacgucugcaucaccggcgacgacaagaacgccaccgccuccuucaucuacaacggccgccucgucgacuccgucgucuccugguccaaggagauccuccgcacccaggaguccgagugcgucugcaucaacggcaccugcaccgucgucaugaccgacggcuccgccuccggcaaggccgacaccaagauccucuucaucgaggagggcaagaucguccacaccuccacccucuccggcuccgcccagcacgucgaggagugcuccugcuacccccgcuaccccggcguccgcugcgucugccgcgacaacuggaagggcuccaaccgccccaucgucgacaucaacaucaaggaccacuccaucgucucccgcuacgucugcuccggccucgucggcgacaccccccgcaagaacgacuccuccuccuccucccacugccucgaccccaacaacgaggagggcggccacggcgucaagggcugggccuucgacgacggcaacgacgucuggaugggccgcaccaucaacgagaccucccgccucggcuacgagaccuucaaggucaucgagggcugguccaaccccaaguccaagcuccagaucaacaagcaggucaucgucgaccgcggcgaccgcuccggcuacuccggcaucuucuccgucgagggcaaguccugcaucaaccgcugcuucuacgucgagcucauccgcggccgcaaggaggagaccgagguccucuggaccuccaacuccaucgucgucuucugcggcaccuccggcaccuacggcaccggcuccuggcccgacggcgccgaccucaaccucaugcccaucuga

SEQ ID NO: 119388 - RNA, 1410 nt, Artificial Sequence; identical to SEQ ID NO: 118182
  derived and/or modified CDS sequence (opt2) from neuraminidase__InfluenzaA__AGG13426

SEQ ID NO: 119389 - RNA, 1410 nt, Artificial Sequence; identical to SEQ ID NO: 118182
  derived and/or modified CDS sequence (opt2) from neuraminidase__InfluenzaA__AGG13438

SEQ ID NO: 119390 - RNA, 1410 nt, Artificial Sequence
  derived and/or modified CDS sequence (opt2) from neuraminidase__InfluenzaA__AGG13498
augaaccccaaccagaagaucaucaccaucggcuccgucucccucaccaucuccaccaucugcuucuucaugcagaucgccauccucaucaccaccgucacccuccacuucaagcaguacgaguucaacuccccccccaacaaccaggucaugcucugcgagcccaccaucaucgagcgcaacaucaccgagaucgucuaccucaccaacaccaccaucgagaaggagaucugccccaagcucgccgaguaccgcaacugguccaagccccagugcgacaucaccggcuucgcccccuucuccaaggacaacuccauccgccucuccgccggcggcgacaucugggucacccgcgagcccuacgucuccugcgaccccgacaagugcuaccaguucgcccucggccagggcaccacccucaacaacguccacuccaacaacaccguccgcgaccgcacccccuaccgcacccuccucaugaacgagcucggcguccccuuccaccucggcaccaagcaggucugcaucgccugguccuccuccuccugccacgacggcaaggccuggcuccacgucugcaucaccggcgacgacaagaacgccaccgccuccuucaucuacaacggccgccucgucgacuccgucgucuccugguccaaggacauccuccgcacccaggaguccgagugcgucugcaucaacggcaccugcgccgucgucaugaccgacggcuccgccuccggcaaggccgacaccaagauccucuucaucgaggagggcaagaucguccacaccuccacccucuccggcuccgcccagcacgucgaggagugcuccugcuacccccgcuaccccggcguccgcugcgucugccgcgacaacuggaagggcuccaaccgccccaucgucgacaucaacaucaaggaccacuccaucgucuccuccuacgucugcuccggccucgucggcgacaccccccgcaagaacgacuccuccuccuccggccacugccucgaccccaacaacgaggagggcggccacggcgucaagggcugggccuucgacgacggcaacgacgucuggaugggccgcaccaucaacgagaccucccgccucggcuacgagaccuucaaggucaucgagggcugguccaaccccaaguccaagcuccagaucaaccgccaggucaucgucgaccgcggcaaccgcuccggcuacuccggcaucuucuccgucgagggcaagaacugcaucaaccgcugcuucuacgucgagcucauccgcggccgcaaggaggagaccgagguccucuggaccuccaacuccaucgucgucuucugcggcaccuccggcaccuacggcaccggcuccuggcccgacggcgccgaccucaaccucaugcccaucuga

SEQ ID NO: 119391 - RNA, 1410 nt, Artificial Sequence; identical to SEQ ID NO: 118182
  derived and/or modified CDS sequence (opt2) from neuraminidase__InfluenzaA__AGG13510

SEQ ID NO: 119392 - RNA, 1410 nt, Artificial Sequence; identical to SEQ ID NO: 119390
  derived and/or modified CDS sequence (opt2) from neuraminidase__InfluenzaA__AGG13522

SEQ ID NO: 119393 - RNA, 1410 nt, Artificial Sequence
  derived and/or modified CDS sequence (opt2) from neuraminidase__InfluenzaA__AGG13534
augaaccccaaccagaagaucaucaccaucggcuccgucucccucaccaucuccaccgucugcuucuucaugcagaucgccauccucaucaccaccgucacccuccacuucaagcaguacgaguucaacuccccccccaacaaccaggucaugcucugcgagcccaccaucaucgagcgcaacaucaccgagaucgucuaccucaccaacaccaccaucgagaaggagaucugccccaagcccgccgaguaccgcaacugguccaagccccagugcggcaucaccggcuucgcccccuucuccaaggacaacuccauccgccucuccgccggcggcgacaucugggucacccgcgagcccuacgucuccugcgaccccgacaagugcuaccaguucgcccucggccagggcaccacccucaacaacguccacuccaacaacaccguccgcgaccgcacccccuaccgcacccuccucaugaacgagcucggcguccccuuccaccucggcaccaagcaggucugcaucgccugguccuccuccuccugccacgacggcaaggccuggcuccacgucugcaucaccggcgacgacaagaacgccaccgccuccuucaucuacaacggccgccucgucgacuccgucgucuccugguccaaggagauccuccgcacccaggaguccgagugcgucugcaucaacggcaccugcaccgucgucaugaccgacggcuccgccuccggcaaggccgacaccaagauccucuucaucgaggagggcaagaucguccacaccuccacccucuccggcuccgcccagcacgucgaggagugcuccugcuacccccgcuaccccggcguccgcugcgucugccgcgacaacuggaagggcuccaaccgccccaucgucgacaucaacaucaaggaccacuccaucgucuccuccuacgucugcuccggccucgucggcgacaccccccgcaagaacgacuccuccuccuccucccacugccucgaccccaacaacgaggagggcggccacggcgucaagggcugggccuucgacgacggcaacgacgucuggaugggccgcaccaucaacgagaccucccgccucggcuacgagaccuucaaggucaucgagggcugguccaaccccaaguccaagcuccagaucaaccgccaggucaucgucgaccgcggcgaccgcuccggcuacuccggcaucuucuccgucgagggcaaguccugcaucaaccgcugcuucuacgucgagcucauccgcggccgcaaggaggagaccgagguccucuggaccuccaacuccaucgucgucuucugcggcaccuccggcaccuacggcaccggcuccuggcccgacggcgccgaccucaaccucaugcccaucuga

SEQ ID NO: 119394 - RNA, 1410 nt, Artificial Sequence
  derived and/or modified CDS sequence (opt2) from neuraminidase__InfluenzaA__AGG13546
augaaccccaaccagaagaucaucaccaucggcuccgucucccucaccaucuccaccaucugcuucuucaugcagaucgccauccucaucaccaccgucacccuccacuucaagcaguacgaguucaacuccccccccaacaaccaggucaugcucugcgagcccaccaucaucgagcgcaacaucaccgagaucgucuaccucaccaacaccaccaucgagaaggagaucugccccaagcccgccgaguaccgcaacugguccaagccccagugcggcaucaccggcuucgcccccuucuccaaggacaacuccauccgccucuccgccggcggcgacaucugggucacccgcgagcccuacgucuccugcgaccccgacaagugcuaccaguucgcccucggccagggcaccacccucaacaacguccacuccaacaacaccguccgcgaccgcacccccuaccgcacccuccucaugaacgagcucggcguccccuuccaccucggcaccaagcaggucugcaucgccugguccuccuccuccugccacgacggcaaggccuggcuccacgucugcaucaccggcgacgacaagaacgccaccgccuccuucaucuacaacggccgccucgucgacuccgucgucuccugguccaaggagauccuccgcacccaggaguccgagugcgucugcaucaacggcaccugcaccgucgucaugaccgacggcuccgccuccggcaaggccgacaccaagauccucuucaucgaggagggcaagaucguccacaccuccacccucuccggcuccgcccagcacgucgaggagugcuccugcuacccccgcuaccccggcguccgcugcgucugccgcgacaacuggcgcggcuccaaccgccccaucgucgacaucaacaucaaggaccacuccaucgucuccuccuacgucugcuccggccucgucggcgacaccccccgcaagaacgacuccuccuccuccucccacugccucgaccccaacaacgaggagggcggccacggcgucaagggcugggccuucgacgacggcaacgacgucuggaugggccgcaccaucaacgagaccucccgccucggcuacgagaccuucaaggucaucgagggcugguccaaccccaaguccaagcuccagaucaaccgccaggucaucgucgaccgcuccgaccgcuccggcuacuccggcaucuucuccgucgagggcaaguccugcaucaaccgcugcuucuacgucgagcucauccgcggccgcaaggaggagaccgagguccucuggaccuccaacuccaucgucgucuucugcggcaccuccggcaccuacggcaccggcuccuggcccgacggcgccgaccucaaccucaugcccaucuga

SEQ ID NO: 119395 - RNA, 1410 nt, Artificial Sequence; identical to SEQ ID NO: 118182
  derived and/or modified CDS sequence (opt2) from neuraminidase__InfluenzaA__AGG13558

SEQ ID NO: 119396 - RNA, 1410 nt, Artificial Sequence; identical to SEQ ID NO: 118182
  derived and/or modified CDS sequence (opt2) from neuraminidase__InfluenzaA__AGG13570

SEQ ID NO: 119397 - RNA, 1410 nt, Artificial Sequence
  derived and/or modified CDS sequence (opt2) from neuraminidase__InfluenzaA__AGG13582
augaaccccaaccagaagaucaucaccaucggcuccgucucccucaccaucuccaccaucugcuucuucaugcagaucgccauccucaucaccaccgucacccuccacuucaagcaguacgaguucaacuccccccccaacaaccaggucaugcucugcgagcccaccaucaucgagcgcaacaucaccgagaucgucuaccucaccaacaccaccaucgagaaggagaucugccccaagcccgccgaguaccgcaacugguccaagccccagugcggcaucaccggcuucgcccccuucuccaaggacaacuccauccgccucuccgccggcggcgacaucugggucacccgcgagcccuacgucuccugcgaccccgacaagugcuaccaguucgcccucggccagggcaccacccucaacaacguccacuccaacaacaccguccgcgaccgcacccccuaccgcacccuccucaugaacgagcucggcguccccuuccaccucggcaccaagcaggucugcaucgccugguccuccuccuccugccacgacggcaaggccuggcuccacgucugcaucaccggcgaggacaagaacgccaccgccuccuucaucuacaacggccgccucgucgacuccgucgucuccugguccaaggagacccuccgcacccaggaguccgagugcgucugcaucaacggcaccugcaccgucgucaugaccgacggcuccgccuccggcaaggccgacaccaagauccucuucaucgaggagggcaagaucguccacaccuccacccucuccggcuccgcccagcacgucgaggagugcuccugcuacccccgcuaccccggcguccgcugcgucugccgcgacaacuggaagggcuccaaccgccccaucgucgacaucaacaucaaggaccacuccaucgucuccuccuacgucugcuccggccucgucggcgacaccccccgcaagaacgacuccuccuccuccucccacugccucgaccccaacaacgaggagggcggccacggcgucaagggcugggccuucgacgacggcaacgacgucuggaugggccgcaccaucaacgagaccucccgccucggcuacgagaccuucaaggucaucgagggcugguccaaccccaaguccaagcuccagaucaaccgccaggucaucgucgaccgcggcgaccgcuccggcuacuccggcaucuucuccgucgagggcaaguccugcaucaaccgcugcuucuacgucgagcucauccgcggccgcaaggaggagaccgagguccucuggaccuccaacuccaucgucgucuucugcggcaccuccggcaccuacggcaccggcuccuggcccgacggcgccgaccucaaccucaugcccaucuga

SEQ ID NO: 119398 - RNA, 1410 nt, Artificial Sequence; identical to SEQ ID NO: 118182
  derived and/or modified CDS sequence (opt2) from neuraminidase__InfluenzaA__AGG13606

SEQ ID NO: 119399 - RNA, 1410 nt, Artificial Sequence
  derived and/or modified CDS sequence (opt2) from neuraminidase__InfluenzaA__AGG13618
augaaccccaaccagaagaucaucaccaucggcuccgucucccucaccaucuccaccaucugcuucuucaugcagaucgccauccucaucaccaccgucacccuccacuucaagcaguacgaguucaacuccccccccaacaaccaggucaugcucugcgagcccaccaucaucgagcgcaacaucaccgagaucgucuaccucaccaacaccaccaucgagaaggagaucugccccaagcccgccgaguaccgcaacugguccaagccccagugcggcaucaccggcuucgcccccuucuccaaggacaacuccauccgccucuccgccggcggcgacaucugggucacccgcgagcccuacgucuccugcgaccccgacaagugcuaccaguucgcccucggccagggcaccacccucaacaacguccacuccaacaacaccguccgcgaccgcacccccuaccgcacccuccucaugaacgagcucggcguccccuuccaccucggcaccaagcaggucugcaucgccugguccuccuccuccugccacgacggcaaggccuggcuccacgucugcaucaccggcgacgacaagaacgccaccgccuccuucaucuacaacggccgccucgucgacuccgucgucuccugguccaaggagauccuccgcacccaggaguccgagugcgucugcaucaacggcaccugcaccgucgucaugaccgacggcuccgccuccggcaaggccgacaccaagauccucuucaucgaggagggcaagaucguccacaccuccacccucuccggcuccgcccagcacgucgaggagugcuccugcuacccccgcuaccccggcguccgcugcgucugccgcgacaacuggaagggcuccaaccgccccaucgucgacaucaacaucaaggaccacuccaucgucuccuccuaccucugcuccggccucgucggcgacaccccccgcaagaacgacggcuccuccuccucccacugccucgaccccaacaacgaggagggcggccacggcgucaagggcugggccuucgacgacggcaacgacgucuggaugggccgcaccaucaacgagaccucccgccucggcuacgagaccuucaaggucaucgagggcugguccaaccccaaguccaagcuccagaucaaccgccagaucaucgucgaccgcggcgaccgcuccggcuacuccggcaucuucuccgucgagggcaaguccugcaucaaccgcugcuucuacgucgagcucauccgcggccgcaaggaggagaccgagguccucuggaccuccaacuccaucgucgucuucugcggcaccuccggcaccuacggcaccggcuccuggcccgacggcgccgaccucaaccucaugcccaucuga

SEQ ID NO: 119400 - RNA, 1410 nt, Artificial Sequence
  derived and/or modified CDS sequence (opt2) from neuraminidase__InfluenzaA__AGG13630
augaaccccaaccagaagaucaucaccaucggcuccgucucccucaccaucuccaccaucugcuucuucaugcagaucgccauccucaucaccaccgucacccuccacuucaagcaguacgaguucaacuccccccccaacaaccaggucaugcucugcgagcccaccaucaucgagcgcaacaucaccgagaucgucuaccucaccaacaccaccaucgagaaggagaucugccccaagcccgccgaguaccgcaacugguccaagccccagugcggcaucaccggcuucgcccccuucuccaaggacaacuccauccgccucuccgccggcggcgacaucugggucacccgcgagcccuacgucuccugcgaccccgacaagugcuaccaguucgcccucggccagggcaccacccucaacaacguccacuccaacaacaccguccgcgaccgcacccccuaccgcacccuccucaugaacgagcucggcguccccuuccaccucggcaccaagcaggucugcaucgccugguccuccuccuccugccacgacggcaaggccuggcuccacgucugcaucaccggcgaggacaagaacgccaccgccuccuucaucuacaacggccgccucgucgacuccgucgucuccugguccaaggagauccuccgcacccaggaguccgagugcgucugcaucaacggcaccugcaccgucgucaugaccgacggcuccgccuccggcaaggccgacaccaagauccucuucaucgaggagggcaagaucguccacaccuccacccucuccggcuccgcccagcacgucgaggagugcuccugcuacccccgcuaccccggcguccgcugcgucugccgcgacaacuggaagggcuccaaccgccccaucgucgacaucaacaucaaggaccacuccaucgucuccuccuacgucugcuccggccucgucggcgacaccccccgcaagaacgacuccuccuccuccucccacugccucgaccccaacaacgaggagggcggccacggcgucaagggcugggccuucgacgacggcaacgacgucuggaugggccgcaccaucaacgagaccucccgccucggcuacgagaccuucaaggucaucgagggcugguccaaccccaaguccaagcuccagaucaaccgccaggucaucgucgaccgcggcgaccgcuccggcuacuccggcaucuucuccgucgagggcaaguccugcaucaaccgcugcuucuacgucgagcucauccgcggccgcaaggaggagaccgagguccucuggaccuccaacuccaucgucgucuucugcggcaccuccggcaccuacggcaccggcuccuggcccgacggcgccgaccucaaccucaugcccaucuga

SEQ ID NO: 119401 - RNA, 1410 nt, Artificial Sequence; identical to SEQ ID NO: 118182
  derived and/or modified CDS sequence (opt2) from neuraminidase__InfluenzaA__AGG13642

SEQ ID NO: 119402 - RNA, 1410 nt, Artificial Sequence
  derived and/or modified CDS sequence (opt2) from neuraminidase__InfluenzaA__AGG13654
augaaccccaaccagaagaucaucaccaucggcuccgucucccucaccaucuccaccaucugcuucuucaugcagaucgccauccucaucaccaccgucacccuccacuucaagcaguacgaguucaacuccccccccaacaaccaggucaugcucugcgagcccaccaucaucgagcgcaacaucaccgagaucgucuaccucaccaacaccaccaucgagaaggagaucugccccaagcucgccgaguaccgcaacugguccaagccccagugcgacaucaccggcuucgcccccuucuccaaggacaacuccauccgccucuccgccggcggcgacaucugggucacccgcgagcccuacgucuccugcgaccccgacaagugcuaccaguucgcccucggccagggcaccacccucaacaacguccacuccaacaacaccguccgcgaccgcacccccuaccgcacccuccucaugaacgagcucggcguccccuuccaccucggcaccaagcaggucugcaucgccugguccuccuccuccugccacgacggcaaggccuggcuccacgucugcaucaccggcgacgacaagaacgccaccgccuccuucaucuacaacggccgccucgucgacuccgucgucuccugguccaaggacauccuccgcacccaggaguccgagugcgucugcaucaacggcaccugcgccgucgucaugaccgacggcuccgccuccggcaaggccgacaccaagauccucuucaucgaggagggcaagaucguccagaccuccacccucuccggcuccgcccagcacgucgaggagugcuccugcuacccccgcuaccccggcguccgcugcgucugccgcgacaacuggaagggcuccaaccgccccaucgucgacaucaacaucaaggaccacuccaucgucuccuccuacgucugcuccggccucgucggcgacaccccccgcaagaacgacuccuccuccuccggccacugccucgaccccaacaacgaggagggcggccacggcgucaagggcugggccuucgacgacggcaacgacgucuggaugggccgcaccaucaacgagaccucccgccucggcuacgagaccuucaaggucaucgagggcugguccaaccccaaguccaagcuccagaucaaccgccaggucaucgucgaccgcggcaaccgcuccggcuacuccggcaucuucuccgucgagggcaagaacugcaucaaccgcugcuucuacgucgagcucauccgcggccgcaaggaggagaucgagguccucuggaccuccaacuccaucgucgucuucugcggcaccuccggcaccuacggcaccggcuccuggcccgacggcgccgaccucaaccucaugcccaucuga

SEQ ID NO: 119403 - RNA, 1410 nt, Artificial Sequence; identical to SEQ ID NO: 119393
  derived and/or modified CDS sequence (opt2) from neuraminidase__InfluenzaA__AGG13666

SEQ ID NO: 119404 - RNA, 1410 nt, Artificial Sequence
  derived and/or modified CDS sequence (opt2) from neuraminidase__InfluenzaA__AGG13678
augaaccccaaccagaagaucaucaccaucggcuccgucucccucaccaucuccaccaucugcuucuucaugcagaucgccauccucaucaccaccgucacccuccacuucaagcaguacgaguucaacuccccccccaacaaccaggucaugcucugcgagcccaccaucaucgagcgcaacaucaccgagaucgucuaccucaccaacaccaccaucgagaaggagaucugccccaagcccgccgaguaccgcaacugguccaagccccagugcggcaucaccggcuucgccccccucuccaaggacaacuccauccgccucuccgccggcggcgacaucugggucacccgcgagcccuacgucuccugcgaccccgacaagugcuaccaguucgcccucggccagggcaccacccucaacaacguccacuccaacaacaccguccgcgaccgcacccccuaccgcacccuccucaugaacgagcucggcguccccuuccaccucggcaccaagcaggucugcaucgccugguccuccuccuccugccacgacggcaaggccuggcuccacgucugcaucaccggcgacgacaagaacgccaccgccuccuucaucuacaacggccgccucgucgacuccgucgucuccugguccaaggagauccuccgcacccaggaguccgagugcgucugcaucaacggcaccugcaccgucgucaugaccgacggcuccgccuccggcaaggccgacaccaagauccucuucaucgaggagggcaagaucguccacaccuccacccucuccggcuccgcccagcacgucgaggagugcuccugcuacccccgcuaccccggcguccgcugcgucugccgcgacaacuggaagggcuccaaccgccccaucgucgacaucaacaucaaggaccacuccaucgucuccuccuacgucugcuccggccucgucggcgacaccccccgcaagaacgacuccuccuccuccucccacugccucggccccaacaacgaggagggcggccacggcgucaagggcugggccuucgacgacggcaacgacgucuggaugggccgcaccaucaacgagaccucccgccucggcuacgagaccuucaaggucaucgagggcugguccaaccccaaguccaagcuccagaucaaccgccaggucaucgucgaccgcggcgaccgcuccggcuacuccggcaucuucuccgucgagggcaaguccugcaucaaccgcugcuucuacgucgagcucauccgcggccgcaaggaggagaccgagguccucuggaccuccaacuccaucgucgucuucugcggcaccgccggcaccuacggcaccggcuccuggcccgacggcgccgaccucaaccucaugcccaucuga

SEQ ID NO: 119405 - RNA, 1410 nt, Artificial Sequence; identical to SEQ ID NO: 118182
  derived and/or modified CDS sequence (opt2) from neuraminidase__InfluenzaA__AGG13690
